United States Patent Application Publication US 2021/0199660 A1 - sequence listing, part 60

SEQ ID NO: 863174 - DNA, 120 bp, Artificial Sequence
  ENSG00000267610_6 (sequence is synthesized)
ggaggcccacaatgccgcgaccgccggcccctgacatgctcagctcagctccaggacaaaaggcagagacatgggaaatctggacccaggctcagaggcacaggagccaggcctgcggcc

SEQ ID NO: 863175 - DNA, 120 bp, Artificial Sequence
  ENSG00000267610_7 (sequence is synthesized)
ggggcagctgcagccagggccccactgatctgctcaagtggtgttctccttctccccgctggccagcacagtgaaaggagcagggaaggctgaagccaggggcaggggacaccgcagctc

SEQ ID NO: 863176 - DNA, 120 bp, Artificial Sequence
  ENSG00000267610_8 (sequence is synthesized)
tactcaaaggtggctaaagtcctcacaggccatctctagccagggccttaactagctcagcaagagtagacccctgccccgatagggccgcaggcacctcgggacaccagggatgtgacg

SEQ ID NO: 863177 - DNA, 120 bp, Artificial Sequence
  ENSG00000267610_9 (sequence is synthesized)
ggggaaggtctctgagcaccctgtcagctcggggatgtgccttggatagatagaggaaggaggctggcaggaaccagccagtggctgcagggcccagagaggccactaggtccatggtga

SEQ ID NO: 863178 - DNA, 120 bp, Artificial Sequence
  ENSG00000267610_10 (sequence is synthesized)
aagggctcctggggaggcagctcctggggaggcaaggagacgtcctgcccaccagaggcacaacgtgggccagctttcttacctggcaggctctttggggagccttgccttgaggtctac

SEQ ID NO: 863179 - DNA, 120 bp, Artificial Sequence
  ENSG00000267610_11 (sequence is synthesized)
acctgctctggacaggtgacaggagctgcagagcatctccatgtcgtgactgccttccctgtctgggcttccccgggggaggggataaccctgggatttgggacagaaaggaggaaggcc

SEQ ID NO: 863180 - DNA, 120 bp, Artificial Sequence
  ENSG00000267610_12 (sequence is synthesized)
cctttaggatgcccctccccaggccctgcctcgtggctgctctgcttttatctggcagaatggggcttatcagagccaccagctgaacaaatacacaaatccacggttagtgagaaaaaa

SEQ ID NO: 863181 - DNA, 120 bp, Artificial Sequence
  ENSG00000267617_0 (sequence is synthesized)
cctctatcaggggagccctgaggacccacgcttttgtctaaggggaaccccaaagactcgacctcttctgtgaagaaaggatccaccattttcagtgaggggaaccctggagaccagccc

SEQ ID NO: 863182 - DNA, 120 bp, Artificial Sequence
  ENSG00000267617_1 (sequence is synthesized)
tggagaaaacctctcaaactcactggagcaaacagcacctgtagactcagcgcgggagcgcctcttccctctacagctccacagacatcactgcactcccagcagcacaggcaggagcct

SEQ ID NO: 863183 - DNA, 120 bp, Artificial Sequence
  ENSG00000267617_2 (sequence is synthesized)
gcaccaggaaaagctcagggatgtgctggcccactcctctcctctgacccttgaggacccaggtctaggggggattaagaaatatgccataggaaaaataaatgcaagagctgaatggaa

SEQ ID NO: 863184 - DNA, 120 bp, Artificial Sequence
  ENSG00000267617_3 (sequence is synthesized)
accctgaggacccacctgcctctgtcaggggagccctggggacctgctctacgttaaatgaatagctgcaaacagagctcaagttgtcatccctgtgggagtgggattatgtctcctgga

SEQ ID NO: 863185 - DNA, 120 bp, Artificial Sequence
  ENSG00000267617_4 (sequence is synthesized)
caaggcgcctggagcaatcagcccttcagatacccctggagatggtgattacttcatggcacatcttgtaacccaagccggtcccatgagaatgtccccaggatgagcacaggtgctact

SEQ ID NO: 863186 - DNA, 120 bp, Artificial Sequence
  ENSG00000267617_5 (sequence is synthesized)
gagagcaatgactttttcccagtggactggatgctggggggatggggagatggtgcctttttaaatcctttatccaaaagctgaagcccgagacctaggctgggaagccgggtcaagaga

SEQ ID NO: 863187 - DNA, 120 bp, Artificial Sequence
  ENSG00000267617_6 (sequence is synthesized)
tagacatgaagctccagtgacttttttttctgagtccctggatcaaaccacacctgaaagtcacatatgtgtttggttttctagttttatgaagcagtaaatctgctttgttcttgacca

SEQ ID NO: 863188 - DNA, 120 bp, Artificial Sequence
  ENSG00000267617_7 (sequence is synthesized)
gctctttactgtgaggggaaccactgggacctgcccttctctgtgaaggcagtctcagagacccaaacttttctgtgatgggagccctagggacctgacctcctccgtgaaggaagccct

SEQ ID NO: 863189 - DNA, 120 bp, Artificial Sequence
  ENSG00000267617_8 (sequence is synthesized)
aaggacacgccctttactgtgaggggaaccctggggacctgcccttctctgtgaggggagcccccagatcggccttctttagtaagggaagccctagggatccaccatcctctgtgaggg

SEQ ID NO: 863190 - DNA, 120 bp, Artificial Sequence
  ENSG00000267614_0 (sequence is synthesized)
atgatgatgtgttgtgtgtgcatgaaaagcacaaaaagtcaacggtacaaaactgagtttcccagatgttccaagaagactcagttctatgaccctggagaaaaacttcactgtaccctc

SEQ ID NO: 863191 - DNA, 120 bp, Artificial Sequence
  ENSG00000267614_1 (sequence is synthesized)
gggccctagtttccccatatgggataaaagggagcttagactggaatctctgtttaaacagaagagtaattttgagtaggctctttctcaaagtcgattttacaagttttagcacacttt

SEQ ID NO: 863192 - DNA, 85 bp, Artificial Sequence
  ENSG00000267615_0 (sequence is synthesized)
cactctgggccagatgcttactgggtcaaagggggctctgcaggtcgatgatctcctcaaacctgcaaagacatcccatctatgc

SEQ ID NO: 863193 - DNA, 120 bp, Artificial Sequence
  ENSG00000248529_0 (sequence is synthesized)
aagtataaatcagctctctgtgtatgtccttgtgtggtggtataactgacaacaggtagggttcctgatgggattgggttccaccaatcagagccacttgcatgagacctcaactgagag

SEQ ID NO: 863194 - DNA, 120 bp, Artificial Sequence
  ENSG00000248529_1 (sequence is synthesized)
ccaggatgtcatctccaccagaacaaggactacgttttgtatgttgctgttccgttagtgccagaacatgcccacccctgctcagtaaataagcgttaagtgaatgaattaataagtgaa

SEQ ID NO: 863195 - DNA, 120 bp, Artificial Sequence
  ENSG00000248529_2 (sequence is synthesized)
aggctgtgtttgaagaggaggggctcactctaaatcttgaagatgttcagcctcgaaaaagtagaagtcattgtgaccaaagatgatgccaccatgcctttgaaaaagaaaggtgatgag

SEQ ID NO: 863196 - DNA, 120 bp, Artificial Sequence
  ENSG00000248529_3 (sequence is synthesized)
cctcaaatggaaaaatacattcaagaaaggtcaatgctaccaccattcccctctgcccctccactcctgaggccatcatgatgaagccagtgggaactccagtggaaggacccagacagg

SEQ ID NO: 863197 - DNA, 120 bp, Artificial Sequence
  ENSG00000248529_4 (sequence is synthesized)
aataagatcacctgggccttcaccttccttcaccgaccgagagctcttctcttcctgcgcttttattttaatctaggacatcccctcacttggctcctagaggccctgtttcatttaatt

SEQ ID NO: 863198 - DNA, 120 bp, Artificial Sequence
  ENSG00000248529_5 (sequence is synthesized)
tggcctccttgcccaagcagaatcctgggcaagcctgggaacctaataccctgaattcaaatgaagttgcctggaggaaactgaatgaatcaggtagctaagatttggcctaacgttgat

SEQ ID NO: 863199 - DNA, 120 bp, Artificial Sequence
  ENSG00000248529_6 (sequence is synthesized)
ctatttttggccaaagccaacctccactaataggtctctactaatagacttgcaaagatggagctctgaatcaatgctaaacaagagttataaatcatgaagacgtttgctgtcttttta

SEQ ID NO: 863200 - DNA, 120 bp, Artificial Sequence
  ENSG00000248529_7 (sequence is synthesized)
cctcccagggatgggagtgaatgggagaggactctgaccatgaagcgctctaatctaaactcggagaaaattctcccagccattcttctgctcacagaatttccgcggcaccagtctccc

SEQ ID NO: 863201 - DNA, 120 bp, Artificial Sequence
  ENSG00000248529_8 (sequence is synthesized)
aatcaaggataaaaagaaaaggtgagcgggagaaggagggtgtgagagagaagaactgggggtgaggtgcggaaaagcagaaaggacttcagataccgaaagaaaaggagccaggtgctc

SEQ ID NO: 863202 - DNA, 120 bp, Artificial Sequence
  ENSG00000248529_9 (sequence is synthesized)
ttcccggcaaggaagtcaccagccggccggtttgtggattgaaatcagcacgtgacccctcagcaaccatagtaacagtccctccctctggtctcacagggctctggaggggtgaagaca

SEQ ID NO: 863203 - DNA, 120 bp, Artificial Sequence
  ENSG00000248529_10 (sequence is synthesized)
gcacgatacatgccaaggtgccttgtcagtggtgaagtgttgtctacacagggtggcagctccctgtttgaccagggagctactgcgcctttcccacaaccccacccaaagactcaggac

SEQ ID NO: 863204 - DNA, 120 bp, Artificial Sequence
  ENSG00000248529_11 (sequence is synthesized)
ggcccaggccagaaggaaatttagacagtagaccctccgtcagcagatacctttccctgctcttcctaccgggtcacctagacccttaacaagggtgctattttagcaagaaactgaaaa

SEQ ID NO: 863205 - DNA, 120 bp, Artificial Sequence
  ENSG00000248529_12 (sequence is synthesized)
taaaaagagaatctgccctccgaacatgctgaacacttattttagcacacagccccatggagggtcagcgctccacgcatgttttaaagcgtttgtgcctatttattttgagaccggcag

SEQ ID NO: 863206 - DNA, 120 bp, Artificial Sequence
  ENSG00000248529_13 (sequence is synthesized)
ggcctgagtgagccacagcttcctggattctgctttgtcagcaaggaagatttgctgccatagatatgctgagctccctctggggccccccttctcctggaatctgactgagatgagaag

SEQ ID NO: 863207 - DNA, 120 bp, Artificial Sequence
  ENSG00000248529_14 (sequence is synthesized)
tttatcccagcacttaaatgaagagacttcctccagctcccacttctgcctcacccctccgcctaccactgacaaacaggcctggctgcaaggtgtgcgtgtcaccaggacctggccacc

SEQ ID NO: 863208 - DNA, 120 bp, Artificial Sequence
  ENSG00000248529_15 (sequence is synthesized)
agagggcgacagagagcaatgagggtcgaacagtttcccagaaggagccaaatcccctgacacatctgctccctcctccagcccaaaaactgccagacttgctagcatttgccagtccac

SEQ ID NO: 863209 - DNA, 120 bp, Artificial Sequence
  ENSG00000248529_16 (sequence is synthesized)
cgaaacaaacatctcaccttcatcgtacagttccttggtaaactcttattttcttctttatcaagtttggatggaaaacaaaacaattaattttaagagcagcacacaagaacctaaaca

SEQ ID NO: 863210 - DNA, 120 bp, Artificial Sequence
  ENSG00000248529_17 (sequence is synthesized)
aaaaatacattcaagaaaggtcaatgctagtgagtatgaatgaacacatagcaaaaatttcaggtagaacagccatgccaagggctggtgggacaggtgaggccgagtgaataaaaagaa

SEQ ID NO: 863211 - DNA, 120 bp, Artificial Sequence
  ENSG00000248529_18 (sequence is synthesized)
gtagccccagagacactcaaggtggttccagctgcttttgaaggaggtttctttctaagaggtggctgggcttggtttcagcgtattccaatttgggactcatgaactgcaactaataaa

SEQ ID NO: 863212 - DNA, 120 bp, Artificial Sequence
  ENSG00000248529_19 (sequence is synthesized)
gatcaaaaaactgatacagaaattgttttataaaacattcaattcaaaatgcctgcagtgaccttgacaagagcagacgttaggaagatccctgacagctgagaacattgtgtgaagccc

SEQ ID NO: 863213 - DNA, 120 bp, Artificial Sequence
  ENSG00000248529_20 (sequence is synthesized)
agtgtgtctagaggggtgcacagggagtggcacggcaaagggaattgcccctcaggagcagagggttatgtcagaggggaggcgcgaaccaggtcgcatagcacattctaggatgtaatg

SEQ ID NO: 863214 - DNA, 120 bp, Artificial Sequence
  ENSG00000248529_21 (sequence is synthesized)
agtgtggattctatgttgccatgggaagccagcatccttgcacgaggtggttaagtgctgagagaagataaatcagattaaggggctagagagagactggaagcctggggaagctatttg

SEQ ID NO: 863215 - DNA, 120 bp, Artificial Sequence
  ENSG00000248529_22 (sequence is synthesized)
aaacaaacgggcagaggagctctctctgaggaagtgactttagggctgagtcttgaaatatctgaagtagcgaccatgcagatttctgggataagccagttccaggcagaaaaaatagca

SEQ ID NO: 863216 - DNA, 120 bp, Artificial Sequence
  ENSG00000248529_23 (sequence is synthesized)
ctgaagtgggaataagcatcacatatcctggaaagagcaagaaggtcagcgtggccagggcacaataccagaggaagcagggggaggaggccagccctgtggaggccgtgggacggtact

SEQ ID NO: 863217 - DNA, 120 bp, Artificial Sequence
  ENSG00000248529_24 (sequence is synthesized)
tggcttttattctaaatacactgggaagattttcgaggactcttgcttgtttttcgagggaactggctgaaaacccagtagattttggtggctgttcttgactaagaagagtgtggaaca

SEQ ID NO: 863218 - DNA, 120 bp, Artificial Sequence
  ENSG00000248529_25 (sequence is synthesized)
aagtcacagagccacggccccagacaagacctggatgaagcgctacagcctggtagtgccaagactgggagggaaacagaagagcactatgagacagaatccagaagcaaggagaggaag

SEQ ID NO: 863219 - DNA, 120 bp, Artificial Sequence
  ENSG00000248529_26 (sequence is synthesized)
ccattacaaagtggccttcaaacatcatgtctgtattggaactgaatgattgatcagacatttaaatacggaaactgggaattcagctgaccagaatttcaccagggtgacatgacagtt

SEQ ID NO: 863220 - DNA, 120 bp, Artificial Sequence
  ENSG00000248528_0 (sequence is synthesized)
aaccatccacccactggcagtcagggaagaggaagagaagagagggaagtctctggattgcttttgaccagagaagtgaggtcgtattgaaaagagtttacaaaaacaaattccttataa

SEQ ID NO: 863221 - DNA, 120 bp, Artificial Sequence
  ENSG00000248528_1 (sequence is synthesized)
gcattttccatttatgtctcagaatccactcttcaccattctgcatcctgctctctgctctggagactccctgggaactgtatccatggtctcctgccttccagactggggttggatttg

SEQ ID NO: 863222 - DNA, 87 bp, Artificial Sequence
  ENSG00000248528_2 (sequence is synthesized)
ttgtccaaggtaaggaggtctggactgtggagaagatggagtttggaaggatatgcagcttataaatgcagttagacacagaggatt

SEQ ID NO: 863223 - DNA, 120 bp, Artificial Sequence
  ENSG00000248528_3 (sequence is synthesized)
aggatatgcagcttataaatgcagttagacacagaggatttccattgcatctccagtttgttggtggctggttcctcctttgctggtctcttttattccatctggaagattctgttcatg

SEQ ID NO: 863224 - DNA, 120 bp, Artificial Sequence
  ENSG00000248528_4 (sequence is synthesized)
tacacctctgaactctaaactagttgttcctgactttgtctctgcaacattttttcaggcctgttgtattcctgaccttgcttcctctgtgcaatatatttactccaggtcatctctacc

SEQ ID NO: 863225 - DNA, 120 bp, Artificial Sequence
  ENSG00000248525_0 (sequence is synthesized)
tggagtccaggaaacagctttgagaaatctttcagtcacaggttttggaggacagctaattctagaaaaaggaaacagcacatgtaaaagtacctggcaaagaaaggaaacagaaacccc

SEQ ID NO: 863226 - DNA, 120 bp, Artificial Sequence
  ENSG00000248525_1 (sequence is synthesized)
ccctgcaaatcgcagccgcttggtcagcttttgcacccagatccactggaatgtgcggagcagagcttgtcagttataggcctgagcctcactgcttctaaagaattcccagagggatcc

SEQ ID NO: 863227 - DNA, 120 bp, Artificial Sequence
  ENSG00000248525_2 (sequence is synthesized)
caaggatgaatggctatctccctgcttttataggaatagaatggacttcttgtgaaatgactctccaacgtgtttggagagtcatttcttgtgaaatgaatagatggacttcttgtgaaa

SEQ ID NO: 863228 - DNA, 120 bp, Artificial Sequence
  ENSG00000242522_0 (sequence is synthesized)
ttttggtgatgccgtgggggaacgcaacatgattcaaccccaatgaaagagaagttgcaataaccgctaagactgcagatgcatttgactcagcaaacccccttcaagaaatgcatatga

SEQ ID NO: 863229 - DNA, 120 bp, Artificial Sequence
  ENSG00000242522_1 (sequence is synthesized)
aaaaaactcatgtttcaggttattcattacaacattgtttgtaatagcaaaatgtggattagaaatagtccagatgtctgtccgtaggggactgtttaataaactattgtcagtccctta

SEQ ID NO: 863230 - DNA, 120 bp, Artificial Sequence
  ENSG00000249685_0 (sequence is synthesized)
atttacagaaaacatttccaacctgtgcatgggggatcattcttccgtcacctagaatatgaggcctccgagaggatgagaatgagggaaaaaactacaaagaaaatggtagcaaatact

SEQ ID NO: 863231 - DNA, 120 bp, Artificial Sequence
  ENSG00000249685_1 (sequence is synthesized)
tctttgtcctggagatttctcgctgcaaacacaaccctgagaaatggcccagctaatcagtagtgggcggggacgctcagaacccgcagcagagtgcctctccccttccttctgcaatgt

SEQ ID NO: 863232 - DNA, 120 bp, Artificial Sequence
  ENSG00000249685_2 (sequence is synthesized)
ctccagcaccctctaccgacaaaattagcactgtgcagactggcgaaggagaaaaaggctcatgtccacgttgactgagcaggtaatgaagactggatttgtagatgagaagcactaatt

SEQ ID NO: 863233 - DNA, 120 bp, Artificial Sequence
  ENSG00000268777_0 (sequence is synthesized)
gagggtctttaaatagttaatttatttaaattaggtcatggggaggccctaatccaatatgactagtgtctttataagaagagaagattaggacacaaacacactcagaggaaagaccat

SEQ ID NO: 863234 - DNA, 120 bp, Artificial Sequence
  ENSG00000268777_1 (sequence is synthesized)
aacaccttgttctcagacctctaacatctgaaactatacgaaaataaagttctgtgtttatgtcactcggtttgtggtacattgctgtggcagccctagtaaccaatacactgagaggtt

SEQ ID NO: 863235 - DNA, 120 bp, Artificial Sequence
  ENSG00000268777_2 (sequence is synthesized)
gcaccttgtggaagtgtaggacagcgtagtggagctcctgctcatcttctgagatggggccagcctcagcagggtggtctgaaactatgcctgtctggaactggtgctgatgacccttaa

SEQ ID NO: 863236 - DNA, 120 bp, Artificial Sequence
  ENSG00000221990_0 (sequence is synthesized)
acttccgcttccggcaacggcgccggaagcacgggtccgggccctcccgcggggcgggtactcgtctcccggccgagcgacttcagctcggggacctgccccatggccgctccccagcag

SEQ ID NO: 863237 - DNA, 120 bp, Artificial Sequence
  ENSG00000221990_1 (sequence is synthesized)
gacagggaaaccgccgaggtggggggcttcttgtccgtcccagcccccccaactcaggccctctcgctgcccctggcgaccaccgcgtgcgcccttccccagggcgggcgcagtcctgga

SEQ ID NO: 863238 - DNA, 120 bp, Artificial Sequence
  ENSG00000221990_2 (sequence is synthesized)
cgcctccgccgagcgtgactgcgtgcattttctctcctttcccttcccaacctgcggagagaagacagccccagagccgctgtctccatcctctgctgatgcctgctgtctttatgttgg

SEQ ID NO: 863239 - DNA, 120 bp, Artificial Sequence
  ENSG00000221990_3 (sequence is synthesized)
cctcgtcgtccgcactgcagtgtggcaggggcgtccctcgtttcccgcggactgaggtgggcgccgggcattcagtaaacgaagaaaccaaagcggagaaggttgggaatcaaacgtctg

SEQ ID NO: 863240 - DNA, 120 bp, Artificial Sequence
  ENSG00000221990_4 (sequence is synthesized)
tcatacctgccaccagcagacaagcggctttgggtacctcctggacccaaagacgaactcagcccctccaggagcgcagtcattggcaccctcgtgggaacaatgccagtgggatgggtg

SEQ ID NO: 863241 - DNA, 120 bp, Artificial Sequence
  ENSG00000221990_5 (sequence is synthesized)
gccaccggatgtttccggggcccctcagaggcccagcagcgcaggtcttggagaatgaatgtgggtcactgggccgcgctgcagagggccggtcctgagtcgcttcctggaggagaggcc

SEQ ID NO: 863242 - DNA, 120 bp, Artificial Sequence
  ENSG00000221990_6 (sequence is synthesized)
tgacaaagtctttcataggttggagctgctaggttgtgcccctgcccctcctgaaaattagccacacgaaaggaagggtctggaaggtggcagggaagccagcagagaccagggaagtgg

SEQ ID NO: 863243 - DNA, 120 bp, Artificial Sequence
  ENSG00000221990_7 (sequence is synthesized)
cagcagcatggggcaggggcacacaggaaggagatggagcttgcgggagcccccactgccactccgacagggagccctgccccgtgccctgctgatgttgacactgaccccggctctatt

SEQ ID NO: 863244 - DNA, 120 bp, Artificial Sequence
  ENSG00000221990_8 (sequence is synthesized)
atttcagtttttccttgtaatttctgaaaatctagcaacaagttgagcaatgaaaaaaagtaaaaaagttaaaattgtgttagaaattatgactgtaaagaaattttgaaactaatgaag

SEQ ID NO: 863245 - DNA, 120 bp, Artificial Sequence
  ENSG00000221990_9 (sequence is synthesized)
aaaaaattgccaaaattgccaaagcttttaggactcttaaaaatatagtaacattgagtattatgaactaaagactcatactattatatcagtgtctggtagtgaatttggatggaggac

SEQ ID NO: 863246 - DNA, 88 bp, Artificial Sequence
  ENSG00000221990_10 (sequence is synthesized)
ctattatatcagtgtctggtagtgaatttggatggaggactgtctagtaacttcttaacaaaacattgattagaagtctttcttggcg

SEQ ID NO: 863247 - DNA, 120 bp, Artificial Sequence
  ENSG00000249688_0 (sequence is synthesized)
ctcgcgccctcttcaggaggggacagctgagggacctgtgcacccccaccccatcctgatatggaaccacagggatgagagatcagatgcccccctgtagccatgggccgtcggaggaga

SEQ ID NO: 863248 - DNA, 120 bp, Artificial Sequence
  ENSG00000249688_1 (sequence is synthesized)
ttcctctccttcacctttgggtctccccacggctcattagggattctattggaagagacgcaaggaactcaaattccacaatttggtttctgtggagaaggtttaattaggagggtgtat

SEQ ID NO: 863249 - DNA, 120 bp, Artificial Sequence
  ENSG00000249688_2 (sequence is synthesized)
taacttaattggctatcatcaggcttccagcttctttgtgtattttaagtaattttctctccttttttcttacagccagtagagcatgcctttaaaagattaagtcttttctttggtctc

SEQ ID NO: 863250 - DNA, 120 bp, Artificial Sequence
  ENSG00000265927_0 (sequence is synthesized)
caaatcttccagggctccgggtcctgatttgaggtgagcccgggagccaagatgtgaatctcaaagcccgtccccagccctcactcttagacaccgccctgtgctgcgaagggcagggcc

SEQ ID NO: 863251 - DNA, 120 bp, Artificial Sequence
  ENSG00000265927_1 (sequence is synthesized)
ggaaacggcggctgtgtccatctcacaagtagctggtattgtgtcagaatctttacctacgctcttgtttaagcctgaagacgtgagttaggtataatgactcccatttgacagatgaga

SEQ ID NO: 863252 - DNA, 120 bp, Artificial Sequence
  ENSG00000265927_2 (sequence is synthesized)
aaactgaggccacaccgtaatcgaagattcgagtcagtttatggaaggaccaacctcctgacactcatccccatattctgttcagggcttcacttagcaagccagcaaggcagggagagt

SEQ ID NO: 863253 - DNA, 120 bp, Artificial Sequence
  ENSG00000265927_3 (sequence is synthesized)
aatgtctcctagattgccttctctcaaatccacttgcacgcaaatcttccagggctccgggtcctgatttgagcgctggaagggaaatgcgccactccaattctccggctgcctcctcac

SEQ ID NO: 863254 - DNA, 120 bp, Artificial Sequence
  ENSG00000265927_4 (sequence is synthesized)
tgctgttgagcttcagagcacagtatttaaatcctgttaaataacctgttttcatgggcaatcacagccaggtgtcttaaaaccgaagagcatcacagaatgccagacaccagacactca

SEQ ID NO: 863255 - DNA, 120 bp, Artificial Sequence
  ENSG00000265927_5 (sequence is synthesized)
acagattcctcaccacatccagccaaattgccttcatctcagcagaggctgtagaaggcagacggccaggagagtggggccgtcaatgcactgggtacagcagtgatcctccaggatttt

SEQ ID NO: 863256 - DNA, 120 bp, Artificial Sequence
  ENSG00000265927_6 (sequence is synthesized)
caacacctcaggtcctagtggcctgggatgatctgaccccagacaccctccccagatgcaagtccatccccaatgcacaggaaggaatacatctctggattgactaaaacatcatactgg

SEQ ID NO: 863257 - DNA, 120 bp, Artificial Sequence
  ENSG00000260340_0 (sequence is synthesized)
acccttccagctacagctccctccggtgccccagaaccgcccggcactccggggctcccaggttcatctgggcatgactccgccctcccgacagagccctctgcacaccccctccccacc

SEQ ID NO: 863258 - DNA, 120 bp, Artificial Sequence
  ENSG00000260340_1 (sequence is synthesized)
ctggcccatcgcagctcttcacgaagacgcttcatggaatgggtgattttcctaagcacttttctttccatgatctcatttggtcctcacagcacctggaggagggcagacaggctgttg

SEQ ID NO: 863259 - DNA, 70 bp, Artificial Sequence
  ENSG00000260340_2 (sequence is synthesized)
cagaagggccacccggctcacggttctctttattcaggcaaagccatcaagaccccgggtcttcctctgt

SEQ ID NO: 863260 - DNA, 120 bp, Artificial Sequence
  ENSG00000260343_0 (sequence is synthesized)
cagacaggtcaatatgaaccattctttcaggatgcagccaagtaagcatggaccatttcttgagaatggagcctggaaagcatggaccgttccttcagattgcagccaggtaaacaagaa

SEQ ID NO: 863261 - DNA, 120 bp, Artificial Sequence
  ENSG00000260343_1 (sequence is synthesized)
ctattccttcacgatgaatccaggtaagcatggaccattccttcatgatggaaccacgtaaggatggaccatttcttcagaatgcagccaggtaagcctgaaccatttcttcaccatgga

SEQ ID NO: 863262 - DNA, 120 bp, Artificial Sequence
  ENSG00000260343_2 (sequence is synthesized)
gagtcaggtaagcatgaaccattctttcagggtaaatgcaggtaagtatggatctgtctttcatcatgtggcctcgtaagcatggaccattccttcaggatggaaccaggtaagcatgag

SEQ ID NO: 863263 - DNA, 120 bp, Artificial Sequence
  ENSG00000260343_3 (sequence is synthesized)
catgtggcctcgtaagcatggaccattccttcaggatggaaccaggtaagcatgagccattgcttttggatgcagccaggtaagtacaaaacattccttcaggatgcagccaggtaagca

SEQ ID NO: 863264 - DNA, 120 bp, Artificial Sequence
  ENSG00000260343_4 (sequence is synthesized)
caggaacgcatggaccattttttaaggatggactcaggtaaacatggaccattccttccaaatggagcgtggtaagcatggatcattcattcaggatgcagccaggtcaacacgaaacat

SEQ ID NO: 863265 - DNA, 80 bp, Artificial Sequence
  ENSG00000260343_5 (sequence is synthesized)
catggaccattccgtcagtatgtagccacataagcatggaccactccttcaagatggagccaggtaagacatttttttca

SEQ ID NO: 863266 - DNA, 80 bp, Artificial Sequence
  ENSG00000260343_6 (sequence is synthesized)
taagacatttttttcaggatgcaggcaggaaagtatgaaccattcctttaggatgcagccaggtaagtgtgcacaattcc

SEQ ID NO: 863267 - DNA, 89 bp, Artificial Sequence
  ENSG00000260343_7 (sequence is synthesized)
catggaccattatttcaggatgcagccaggtaagtatgaaccatgtttttcagactctagccagataagtatggaccattctgctttca

SEQ ID NO: 863268 - DNA, 70 bp, Artificial Sequence
  ENSG00000260343_8 (sequence is synthesized)
ggaccattcttaagcatgtaacattcctttagaatgcagccaggtaagtgcggactattccctcaggatg

SEQ ID NO: 863269 - DNA, 83 bp, Artificial Sequence
  ENSG00000260343_9 (sequence is synthesized)
caggtaagcctggaccattctgtcaggatgtagcctggtaagcatgaatcatttcttaaggatggagtcagacaagcacaccc

SEQ ID NO: 863270 - DNA, 82 bp, Artificial Sequence
  ENSG00000260343_10 (sequence is synthesized)
cttcagaatgcagccaggtatgcagagaccatttttttcaggatgcaggcaagaaagtatgaaccattccttcaggatgcag

SEQ ID NO: 863271 - DNA, 120 bp, Artificial Sequence
  ENSG00000260343_11 (sequence is synthesized)
ccaggttagcatgaaccatatttttcaaatgtggccaggtaagcatgaacatttctttcaggatgcagccaagtaagtatgaaccatttcttcagtatggagccaggtaagcatagacta

SEQ ID NO: 863272 - DNA, 120 bp, Artificial Sequence
  ENSG00000260343_12 (sequence is synthesized)
cagtatggagccaggtaagcatagactattctttcaggatgcagccaggaaagcaatgaccagtttttaaagatacagccaggtaattatgatacataccttcaggatgcagccaggtaa

SEQ ID NO: 863273 - DNA, 120 bp, Artificial Sequence
  ENSG00000260343_13 (sequence is synthesized)
gcatgaaccattttttcaggatgtatccaggtgtgcatagaccactccttcaggatgtggccaggtaggcgtggaccattttttcaggaccaagccaggtaagcaggaatcattctttaa

SEQ ID NO: 863274 - DNA, 120 bp, Artificial Sequence
  ENSG00000260343_14 (sequence is synthesized)
ggatgcagcaaggtaagtatggaccattccttcagaatgcagacaggtaggagtagatcatttattgaggatgcagccaggtaatcaggaaccatttcttcaggatccaaccaggtaagc

SEQ ID NO: 863275 - DNA, 120 bp, Artificial Sequence
  ENSG00000260343_15 (sequence is synthesized)
gtaatcaggaaccatttcttcaggatccaaccaggtaagcatgacccattccttcaagatggagccaggtaactgtcaacaatcccttcaggttgcaactgggtaagcatggaccattcc

SEQ ID NO: 863276 - DNA, 79 bp, Artificial Sequence
  ENSG00000260343_16 (sequence is synthesized)
ttcaggatgcagccaggtaagcatcagccattccttcataatgcagccaggtaagcatcagccattccttcataatgcc

SEQ ID NO: 863277 - DNA, 90 bp, Artificial Sequence
  ENSG00000260343_17 (sequence is synthesized)
cgccaggtaagcctgaaccattccttcagaatgcatccaggtaagcatggaccagtttttaagtatacagtcagttaagtatgacacata

SEQ ID NO: 863278 - DNA, 120 bp, Artificial Sequence
  ENSG00000260343_18 (sequence is synthesized)
accagtttttaagtatacagtcagttaagtatgacacataccctcaggatacagccaggtaagcatgaaccattccttcaggatgccaccaggtaagcatgaaccattccatcaggatgg

SEQ ID NO: 863279 - DNA, 120 bp, Artificial Sequence
  ENSG00000260343_19 (sequence is synthesized)
agccagataagtatgaaccattccatcaggatgcagcaaggtaaacatggactaatctgtcaggatgcagtcgggtaagcatgaaccatttcttaatagtggagtcaggtaagcacatac

SEQ ID NO: 863280 - DNA, 90 bp, Artificial Sequence
  ENSG00000260343_20 (sequence is synthesized)
atgaaccatttcttaatagtggagtcaggtaagcacataccattcctttagaatgcagccagttaagcatggatcattcctttaggatgt

SEQ ID NO: 863281 - DNA, 120 bp, Artificial Sequence
  ENSG00000260343_21 (sequence is synthesized)
taagcatggaccattccttcaggatgaagctaggtaataatggaccattcattcaggatgcatcctggtaagtatgaattattccttcaggatgcaaccaggtaagtatggccattcctt

SEQ ID NO: 863282 - DNA, 120 bp, Artificial Sequence
  ENSG00000260343_22 (sequence is synthesized)
ccttcaggaaggagccaggtaagcaggaacaattctttcaggatggaacaaggtaagcatgcactattccttcagaaagcagtgaggttagcatggatcattccttcaggatgcaaacag

SEQ ID NO: 863283 - DNA, 120 bp, Artificial Sequence
  ENSG00000260343_23 (sequence is synthesized)
gtacgtgtgggcattccttcaggatgtagccaggtaagcagggaccatttttttcaggatgcaggcaggaaagtatgaacctttcctcgggatgcagccaggtaagtctggacacttcct

SEQ ID NO: 863284 - DNA, 120 bp, Artificial Sequence
  ENSG00000260343_24 (sequence is synthesized)
caggtaagcatgaaccattttttcagaatgtggccaggtaagcatgaacttttcctttagggtggagcctggtaagcatggaccactccctcaggattcatccaggtaagcctggaccat

SEQ ID NO: 863285 - DNA, 120 bp, Artificial Sequence
  ENSG00000260343_25 (sequence is synthesized)
agcctggaccattccttcaggatggtgtgaggtaagcatggacagttccttcaggatgcaggcaggtaagcgtggaccattcctcctggatacagctaggcaaatatgaaccattccttc

SEQ ID NO: 863286 - DNA, 120 bp, Artificial Sequence
  ENSG00000260343_26 (sequence is synthesized)
catttcttcaggatggtgccaggtaaccagggaccattctttcaggatacagccaggaaaggatggaccattttttaaggatacagccacataaatacgatacatactttcaggataaag

SEQ ID NO: 863287 - DNA, 120 bp, Artificial Sequence
  ENSG00000260343_27 (sequence is synthesized)
agccacataaatacgatacatactttcaggataaagccaggtaagcatgaaccattccttcagaatgcagccatgtaggcagagaccaacccttcaggttggagccaggtaagcatgaac

SEQ ID NO: 863288 - DNA, 120 bp, Artificial Sequence
  ENSG00000260343_28 (sequence is synthesized)
cattcctccatgatgaagccagttaagcataggcaattcctttaggatggagccaggtaagcatgggccattctttcagaatgcagtcaggtaagcatgaaccattccttcaggatcctg

SEQ ID NO: 863289 - DNA, 120 bp, Artificial Sequence
  ENSG00000260343_29 (sequence is synthesized)
ccaggtaagcgtggaccattatttcaggatgcagtcaggtaagcatgaaccattccttcaggatcctgccatgtaagcgtggaccattatttcaggatgcagtcaggtaagcatgaacca

SEQ ID NO: 863290 - DNA, 120 bp, Artificial Sequence
  ENSG00000260343_30 (sequence is synthesized)
ttacttcagaatggagccaggtaggcatggaccattccttcatgatgcagccaggtaagcatgaaccattacttcaccgtggagtgaggtaaacatgaaccaatccttcaggatgaatcc

SEQ ID NO: 863291 - DNA, 120 bp, Artificial Sequence
  ENSG00000260343_31 (sequence is synthesized)
tgataagtatggacctttcttttagggtgtagcctcataagagtggaccactccttcaggatggacccaggtaagtgtcaaccattccttcctaatgcagcatggtaagcatggatcact

SEQ ID NO: 863292 - DNA, 86 bp, Artificial Sequence
  ENSG00000260343_32 (sequence is synthesized)
accattccttcctaatgcagcatggtaagcatggatcactcattcaggatgcagccaggtaagtacaaaacattccttctggatgg

SEQ ID NO: 863293 - DNA, 120 bp, Artificial Sequence
  ENSG00000260343_33 (sequence is synthesized)
aaaagcatgtaccattttttcagaatgcagccaggtaactgtggacgattccctcaggatggagccaagtaagcatggaccattctctcagcatggagccaggtaagcatggaccattcc

SEQ ID NO: 863294 - DNA, 120 bp, Artificial Sequence
  ENSG00000260343_34 (sequence is synthesized)
ttccttaagaatggagccaggtaagcatgaaccatttcatcaggatgcagccaggtaagcatgaaccattctgtcaggatacagccaggtaagggtggaccattctgtcaggatacagcc

SEQ ID NO: 863295 - DNA, 120 bp, Artificial Sequence
  ENSG00000260343_35 (sequence is synthesized)
atggaccattctttcagatggtgtcaggtaagcatgaaccattctgtcaggatgcagccaggtaaacatgggccgttccatcaggatgcagccctgtaagtgtgaaccatttcttaagaa

SEQ ID NO: 863296 - DNA, 84 bp, Artificial Sequence
  ENSG00000260343_36 (sequence is synthesized)
tccatcaggatgcagccctgtaagtgtgaaccatttcttaagaatggagccaggtaagcagggaccattttttcaggatgcagt

SEQ ID NO: 863297 - DNA, 84 bp, Artificial Sequence
  ENSG00000260343_37 (sequence is synthesized)
gcacatagaccattccttcaggatagtgccaggtaggtgtggatcttccttcaggacggagccaggtaagcatggaccattcct

SEQ ID NO: 863298 - DNA, 74 bp, Artificial Sequence
  ENSG00000260343_38 (sequence is synthesized)
ggaccattccttcaggatagtgccaggtaggtgtggatcttccttcaggacacatagaccattccttcaggata

SEQ ID NO: 863299 - DNA, 85 bp, Artificial Sequence
  ENSG00000260343_39 (sequence is synthesized)
gaccattccttcaggatgcagccaggtaaacatagaccattccttcaggatagtgccaggtaggtgtggatctttccttcaggac

SEQ ID NO: 863300 - DNA, 120 bp, Artificial Sequence
  ENSG00000260343_40 (sequence is synthesized)
aagtgcggaccattccatcaggatgcaacttggtaagcatgagccatttcttaaggatggagtcagataagcatgtagcattccttctgaatgcagccagctaagtgtgggccattcctt

SEQ ID NO: 863301 - DNA, 63 bp, Artificial Sequence
  ENSG00000260343_41 (sequence is synthesized)
ctaagtgtggggtacgtatgcacctttttttcaggatggagtccggtaagcatggaccattcc

SEQ ID NO: 863302 - DNA, 120 bp, Artificial Sequence
  ENSG00000260343_42 (sequence is synthesized)
ggactacttcctcaggatggagtcggataagcatggccctctcctggatgcagccaggtaagggtggaccgttccttcaagatggagccatcaaacatgcagatcaccccacagcaccct

SEQ ID NO: 863303 - DNA, 120 bp, Artificial Sequence
  ENSG00000260343_43 (sequence is synthesized)
atgcagatcaccccacagcacccttgctccagttgactgggtttggtaacatggtggcaaaatcaaaaacttgtaaactagtagaaaaacgttttttagctcatgagtcctcttcaggcc

SEQ ID NO: 863304 - DNA, 120 bp, Artificial Sequence
  ENSG00000260343_44 (sequence is synthesized)
aagctcagaagctggtgccattggtcagcctcccttcgtggttggagttcttctcccacatcagcttctgccagggcgtgtgcctgtgcagcccgagtccagtgttcctgtgagctgaac

SEQ ID NO: 863305 - DNA, 120 bp, Artificial Sequence
  ENSG00000260343_45 (sequence is synthesized)
ttggcagggaaggctgctctgaggcggacaccacagcaacatcggtgcctggggaacttcagatccaagggcacctgaagacctagtatccacacggctcccttctcctgtaacccacca

SEQ ID NO: 863306 - DNA, 120 bp, Artificial Sequence
  ENSG00000260343_46 (sequence is synthesized)
cgatgtgggcggcctcgaagaaggcccacgagcaacataccgagtgctccagggaagcgagagcacacaccgggcaggattcacaatcaagacaaggtgatgatggacaggcatgcacac

SEQ ID NO: 863307 - DNA, 120 bp, Artificial Sequence
  ENSG00000260343_47 (sequence is synthesized)
atgagcacgtggagcacacagtgtgtttggctgcaggagaagaatccagttttcagcaggtgaatgcagagaagccctgctgctcaggacaaagaatgtttccagaatgaaccatgtttg

SEQ ID NO: 863308 - DNA, 120 bp, Artificial Sequence
  ENSG00000260343_48 (sequence is synthesized)
cagctctccattgcccaggatgagcggcgtccccaggtgcctggcccttttatcacccaggctgatggtacatccagaggcagccatggctcagcccccaagcaaggccagcaatggccg

SEQ ID NO: 863309 - DNA, 120 bp, Artificial Sequence
  ENSG00000260343_49 (sequence is synthesized)
ggaagaagcttattcaatgggattctctgcagagttgttctgactttcagcttgcagggatgtgggcatagaaaacaagaggctgacttctcaatcaatcgtcacttaaggatgcagagc

SEQ ID NO: 863310 - DNA, 120 bp, Artificial Sequence
  ENSG00000260343_50 (sequence is synthesized)
cagtggaagccctttctttcatgacttttagcattttttcttcattttcagaaaatccacaccatctccatatatgcatgcacgcatgagtgtccgtccgccccctaactgtggggttaa

SEQ ID NO: 863311 - DNA, 120 bp, Artificial Sequence
  ENSG00000260343_51 (sequence is synthesized)
gaatcatgtgactgctcatgctggaaaaacaagacaatcaccatcataaaagcccacatcatttacagatcttggaacttgaactttctttaaaagataaatatagtagtttacattttg

SEQ ID NO: 863312 - DNA, 120 bp, Artificial Sequence
  ENSG00000260349_0 (sequence is synthesized)
ttcatctgagataaatgcctgtgggacaatttggagatgtacaccggaggacagtgggacatgccatctggcagtcaggagagaaggtctaaacgagaggtccagatttggaagtgaaga

SEQ ID NO: 863313 - DNA, 120 bp, Artificial Sequence
  ENSG00000260349_1 (sequence is synthesized)
catgggaaacgtaatctagggcagtgacagggcctgaggacaggtcaggcaggccaatgtggcagaagagaagccaaggtaaggagaagctctagaaaagggatgaacagaggaccaatg

SEQ ID NO: 863314 - DNA, 120 bp, Artificial Sequence
  ENSG00000260349_2 (sequence is synthesized)
agaatggcaggcagagatccacaaagtgatccagaagatttctggtctcaagtatgctgtttacataaaaacgagttaccagttgttggtattaattcaactcttgggaaatttataata

SEQ ID NO: 863315 - DNA, 120 bp, Artificial Sequence
  ENSG00000260349_3 (sequence is synthesized)
taacattattataggataacaaagcaagacagaaatcaatttagcacatgcatgtttatctctttaattcctctgtgaatctaacatacagatgactaggtcccataggacacaggaaaa

SEQ ID NO: 863316 - DNA, 120 bp, Artificial Sequence
  ENSG00000260349_4 (sequence is synthesized)
aaagcaacatgttgcgaacaagtgtcaaaataaagcactgaattagtctttaagccttgctaaccactaattgaagtagctttgataaaaactatttgaggccagcacagtggctcacac

SEQ ID NO: 863317 - DNA, 120 bp, Artificial Sequence
  ENSG00000260349_5 (sequence is synthesized)
ctgcaatcccaccacttaggggcaagcagtgaggctaaggcagatcacttgagggaaaactgtcctctcttaaatacataggacatgaagaggaactgagtttgctttcattataaactc

SEQ ID NO: 863318 - DNA, 120 bp, Artificial Sequence
  ENSG00000236364_0 (sequence is synthesized)
gtcacgtagtcctcctaactgccctcagcctgggccttcagcccccttccttctgtagatctggtggcttcagctgttttgtcactggagagaggaaactggtcgtgcagaaagtaggag

SEQ ID NO: 863319 - DNA, 120 bp, Artificial Sequence
  ENSG00000236364_1 (sequence is synthesized)
gaggaggtaaatcacagtgaagctgctctgtagcccaaaagctgcttcttgttctacctctatgggctctggggggaaaactgccctggacctgaatcctaaccccaataactcctacct

SEQ ID NO: 863320 - DNA, 120 bp, Artificial Sequence
  ENSG00000236364_2 (sequence is synthesized)
accttcctcatacagttactattcaggaatacagagatgtgcataaaactcttcagcaccatagctggcaccttagcacatgttcaataagcatgtgttctatgatgattacgaccacaa

SEQ ID NO: 863321 - DNA, 120 bp, Artificial Sequence
  ENSG00000236364_3 (sequence is synthesized)
cagaacctgaggacgcgttgggagggcagtgcctccctgacagagcagctcaacaccgtgggagcgcgggaacctcgaattcagagccctcggaccaccaccaaagagccaagggtgatc

SEQ ID NO: 863322 - DNA, 120 bp, Artificial Sequence
  ENSG00000236364_4 (sequence is synthesized)
acggccgggacaaaggtctcctttgaccacttctgagctttcaccatgaaacagaaatacacggcagacatccttctccttggaattaaaaaaacctgctgttgaatgaagaataaaggc

SEQ ID NO: 863323 - DNA, 120 bp, Artificial Sequence
  ENSG00000236364_5 (sequence is synthesized)
acagccagcgcggcctccaattcttcacacgtctccagataaagcccaaagaaaaaaggaaaccagatcaaaagggtatcagagctagggaaaaaacaaacacacccgtgcttgggcagc

SEQ ID NO: 863324 - DNA, 120 bp, Artificial Sequence
  ENSG00000236364_6 (sequence is synthesized)
ttttacttaaagccctgcaaacgcctgatgctggattgttttgcaacacatgcttttcatacaattgctgaaggctttagcactggaggaagctttgtccttctcccagcacacacacac

SEQ ID NO: 863325 - DNA, 120 bp, Artificial Sequence
  ENSG00000236364_7 (sequence is synthesized)
gcccatagaaggaagtgtttcagaagattctggtgaggcatggaggaacagcagcactggaatgtggatcagaatgcacatgcagtccctcaagctgaaatcactatcccatccttcaga

SEQ ID NO: 863326 - DNA, 120 bp, Artificial Sequence
  ENSG00000236364_8 (sequence is synthesized)
gttaaggaatcgtgacaacaggactgttccagggagcgctcagatgaactccccaacctctacaatcccacagcacacactgctgccaccacccactccactgaccagctggaatggcat

SEQ ID NO: 863327 - DNA, 120 bp, Artificial Sequence
  ENSG00000236364_9 (sequence is synthesized)
taggcaggggtaggacagaggtctgaagtgcgagaggtaaggaaggaggtctcagtgcagaccagggatgctctgcggagcagtgggtgccatccctggcccagaacagctcacttaccg

SEQ ID NO: 863328 - DNA, 120 bp, Artificial Sequence
  ENSG00000236364_10 (sequence is synthesized)
ggaatgggagacaaagtcatacacggggatctggactgttttcccttcagtgatttctttgagtgttttgagaatgagttcattgtcaaaggcatctgaaaaataccaaattgttaaaat

SEQ ID NO: 863329 - DNA, 120 bp, Artificial Sequence
  ENSG00000236364_11 (sequence is synthesized)
acacaaggcatcctcataaacatgtatatgggcacatcacactttaaaggtaatcatactgctccctaaaaagctggatttttacccaaagcagaatggatgctccctgtatctcaaaat

SEQ ID NO: 863330 - DNA, 120 bp, Artificial Sequence
  ENSG00000236364_12 (sequence is synthesized)
agggtgtataaatgagttctgacaaatagatttcttttttctctcctttgacattccatccctgacttcagtcagttctttcccctctccaagtttagctgttatcatcctaggattggc

SEQ ID NO: 863331 - DNA, 120 bp, Artificial Sequence
  ENSG00000236364_13 (sequence is synthesized)
acatgctaaactgacctggaaagcaaacccatgactgggggagtacacacaataggcaccatgcccaggtttgcttctaacaattataagaaacccaagccagctaaaggagcagtgtgc

SEQ ID NO: 863332 - DNA, 120 bp, Artificial Sequence
  ENSG00000236364_14 (sequence is synthesized)
tgatctagggctgtagggcaaaaaccactctggcagccaccctgcccctccatctccctctctgccagacagtgggttgaacacacatgtacacctgaggaggagggtctgacgagggct

SEQ ID NO: 863333 - DNA, 120 bp, Artificial Sequence
  ENSG00000236364_15 (sequence is synthesized)
gcctcagatcagaggcagcaggactagctctgtatgttcgacctcatgtctggcccatcttgagtcccaggctcatacaaaatcacctttgttcagatacagattcaatcagtatttaat

SEQ ID NO: 863334 - DNA, 120 bp, Artificial Sequence
  ENSG00000236364_16 (sequence is synthesized)
gagccaagcactacttgaagcatttgaaaattccttctttcacataagccccacaataacactgcaaggtagttatcaagtccctacgttctagatagaaacaagattccgagaggttaa

SEQ ID NO: 863335 - DNA, 120 bp, Artificial Sequence
  ENSG00000236364_17 (sequence is synthesized)
gcaacttcctcatgagcaaaataaaactattccccccaacacaccaatacagatacatacccccttcaatgcccgactcacccgggtggtcaaagttgaactggcccttcagggctttgg

SEQ ID NO: 863336 - DNA, 120 bp, Artificial Sequence
  ENSG00000236364_18 (sequence is synthesized)
ccttctgctccgaggtaaggacacggtagaagctatcctggctcaggatgaccacctgcttctggcgatagtccacctcattctgccccaggagctgcacgatcttagcacacacggaag

SEQ ID NO: 863337 - DNA, 120 bp, Artificial Sequence
  ENSG00000236364_19 (sequence is synthesized)
actgtgaggagagaagagagcacccaggaataagagaaagggcacgtgtggtacagaggaagtcccgagagtaaccaagctgatgcacaccttccaagaaggggctctggaaggaagaat

SEQ ID NO: 863338 - DNA, 120 bp, Artificial Sequence
  ENSG00000236364_20 (sequence is synthesized)
ccaaaggcagctatcgtgcatgatgagttaaagggctaagggatgcagccataaaaagaataagatcacgtctcatgtgggaacatggatggagctagaggacactatccttagcaaact

SEQ ID NO: 863339 - DNA, 81 bp, Artificial Sequence
  ENSG00000236364_21 (sequence is synthesized)
gtaagtgggagctaaatgatgagaatgctggaggtggcgggtgggaggaagcagaggataaggaaaaataactaatgggta

SEQ ID NO: 863340 - DNA, 120 bp, Artificial Sequence
  ENSG00000236366_0 (sequence is synthesized)
gggcatgggcggaagatggcgcctgatcccaatatcatcaccagatgagaatatgtatggattcatgaacaagaaaattgcttaaccatttgatcaagagagattggaaaatcaagatga

SEQ ID NO: 863341 - DNA, 120 bp, Artificial Sequence
  ENSG00000236366_1 (sequence is synthesized)
agcaggtctgggtgaaagagctgtgaatggattaatggaacagaaaggaggtgtggagatccttctattacatgttaatgatcaccagggaacatccactacaatagaacatcccactaa

SEQ ID NO: 863342 - DNA, 120 bp, Artificial Sequence
  ENSG00000236366_2 (sequence is synthesized)
atcaccagtagacacaagagaatatgtggccagttgactttggccagcctctgtcattagatgtcaatgttcaaacaacggtacatgaatggcatagccctggtagcaggagtgggggct

SEQ ID NO: 863343 - DNA, 120 bp, Artificial Sequence
  ENSG00000236366_3 (sequence is synthesized)
atgcatggatccagcaatacacactcccactccacaacattgacccagccaccaaggctgacaaaatattcaaccttccagcaacagaaaccaaggatgacccttatccctgcccaggta

SEQ ID NO: 863344 - DNA, 120 bp, Artificial Sequence
  ENSG00000236366_4 (sequence is synthesized)
tggtattagcccttgagactaaccagccatgtggtgggaagttgaatatcttctaccctggaaaggtcattgattcattttagtatgaattaattcatgtttctgggttggatttgctgt

SEQ ID NO: 863345 - DNA, 120 bp, Artificial Sequence
  ENSG00000236366_5 (sequence is synthesized)
tcttgcctgcagggcctcagctggcaccagcatctaaaggcttagagagttagtgatccaccaacatggcatctcacataacatcccatcaaaccaagtgacccactttactagaaatga

SEQ ID NO: 863346 - DNA, 120 bp, Artificial Sequence
  ENSG00000236366_6 (sequence is synthesized)
ggtgcacgagtggacaagctccagcttgacccaagtggaacaagctctactagtcccatcagatcatgcaccatccagaagctgccacactaacagagtgatggaaaggcctgttgaagg

SEQ ID NO: 863347 - DNA, 120 bp, Artificial Sequence
  ENSG00000236366_7 (sequence is synthesized)
catagtggatgagccacaccattgcaaggtaatgtcatcggaggtttatttagcatgtgtattacacccagaagaatggtgtcccatccttgcaaggtaatgtcatcatcagattctcct

SEQ ID NO: 863348 - DNA, 120 bp, Artificial Sequence
  ENSG00000236366_8 (sequence is synthesized)
tatatgatgctgtgtccccaagaggtaaaatatgtgggagctaaggagtggaagcagcaatagcctcacttaccatcaatacaattgactccttagggaacttgtgcctaggctctgtgg

SEQ ID NO: 863349 - DNA, 120 bp, Artificial Sequence
  ENSG00000236366_9 (sequence is synthesized)
gtttagaggtcctggtgcccaaaggagatgtgcttccatcagggaatacaacaagcattcaattgaacatgaggttaaggctgccacttgggagcatcaggctcctcatgccaagagatc

SEQ ID NO: 863350 - DNA, 120 bp, Artificial Sequence
  ENSG00000236366_10 (sequence is synthesized)
accaagcaaaaagaggaatcaccgtaccatgagcattaatcaatcccattcttcagaaggagatgggactgctgacacaaggccacagagaggcccccagataacttgcctgggtgtccc

SEQ ID NO: 863351 - DNA, 120 bp, Artificial Sequence
  ENSG00000236366_11 (sequence is synthesized)
ttagaattcccttgcccattttttaataatagatggataaatgcaacagtctccacctaacaaaggcataatgatgggacttctcaagagtgagaagctaggtcattccaccagccaagt

SEQ ID NO: 863352 - DNA, 120 bp, Artificial Sequence
  ENSG00000236366_12 (sequence is synthesized)
agaccagcagaggtaccaaaaagagacaggaaatctagactgtaaagtaaaacaggaagattccccaggaacagaagccaactgtgatcctagaggagcttctccttaacatgcagaaag

SEQ ID NO: 863353 - DNA, 120 bp, Artificial Sequence
  ENSG00000236366_13 (sequence is synthesized)
aagtggatccatgaagcacaagagctgagctgtcatggaaactgcacatctcaaatttcccatcaggactgaaggacctagtcccccacaggctgaagacagtcaccttacccaacttca

SEQ ID NO: 863354 - DNA, 120 bp, Artificial Sequence
  ENSG00000236366_14 (sequence is synthesized)
tgctctcttccaggggcagcctgcatccaacaacttgtcagcacaggactataaaggccttaccctttgcctctgtgaagcatcccacagagaggtgcatccacctctgaaggtacatcc

SEQ ID NO: 863355 - DNA, 120 bp, Artificial Sequence
  ENSG00000236366_15 (sequence is synthesized)
cagcttcaggctcccagtcactttgggcttacccagcctcttcgtctgccctgcttttctccctccccttccttcctgcaggtttggatcctgagagcactccctaataaacctcatgcc

SEQ ID NO: 863356 - DNA, 120 bp, Artificial Sequence
  ENSG00000236366_16 (sequence is synthesized)
tacatgatgtaagtgctgctgaagccctgctgagtcagagtccacaaatcaaacagcccctagaaacctgcccttctctggcagggttagggctgagactgggccctcagaccatttgga

SEQ ID NO: 863357 - DNA, 120 bp, Artificial Sequence
  ENSG00000236366_17 (sequence is synthesized)
atgaccagtgatttcagctctcactcccttctcatcagcacgtgtctacagttgcaagttctcactctgtagcccagtctggagtgcagtggtacaataatggctcacttcagctttgac

SEQ ID NO: 863358 - DNA, 120 bp, Artificial Sequence
  ENSG00000236366_18 (sequence is synthesized)
gtggtacaataatggctcacttcagctttgaccttccaggctcaagcggtccttctacctcagcctctggagcaactggaaccacgggtgcaccccaccacgcccagctaacttttgtat

SEQ ID NO: 863359 - DNA, 120 bp, Artificial Sequence
  ENSG00000236366_19 (sequence is synthesized)
tttggaatgaccagtgatttcagctctcactcccttctcatcagcacgtgtctacagttgcaaaaaattatgcagaagagcagatcagattgacgcagtttgataaggattcagcccacc

SEQ ID NO: 863360 - DNA, 120 bp, Artificial Sequence
  ENSG00000236366_20 (sequence is synthesized)
attgctgactttgaagatgaaggagagggaccatgagccacagaaaaccagcagcctctaggaactggaaaaagcaaggaaatggattttcccctagagcttcatcctccctcccagcac

SEQ ID NO: 863361 - DNA, 120 bp, Artificial Sequence
  ENSG00000259624_0 (sequence is synthesized)
tgctctcatacagagattacatttcttaaggaagtcaggcctttggaatgcagtagacaaatggccatgagagaaaaaacatataagtatcgaaactaatggcacactcgatatgtcata

SEQ ID NO: 863362 - DNA, 120 bp, Artificial Sequence
  ENSG00000259624_1 (sequence is synthesized)
aagattgctatagctaaacgcataacaatcctcaacaggggagatgaaagaagtggtttctgtaagaaggaattgataccacttgaaattttagtgctgagtaactaagaaaacttacat

SEQ ID NO: 863363 - DNA, 120 bp, Artificial Sequence
  ENSG00000259624_2 (sequence is synthesized)
gagggtctatggttatgcggagcagacaccatcttctttccctttttcttcttctcattctagttttctaagatgcagcctttggtgagcttactaaaaatacagattcttttaaagtta

SEQ ID NO: 863364 - DNA, 120 bp, Artificial Sequence
  ENSG00000253281_0 (sequence is synthesized)
atgtgacttctgcacctcatctctgggatggtttcagtgggtcctagattgctttctgtgctccctgggacagttggtggcactctgtgagactactctgagaccagtcctttccatcat

SEQ ID NO: 863365 - DNA, 120 bp, Artificial Sequence
  ENSG00000253281_1 (sequence is synthesized)
gggctcctgtggaaaatgaccccagctcagctcagtagttgatgggacatctgattcaggacaacatatatcaagcaggggccattgctccagcctgactccaggaatcagcagacagcg

SEQ ID NO: 863366 - DNA, 120 bp, Artificial Sequence
  ENSG00000253281_2 (sequence is synthesized)
cagcctcattctccacctgctccctgcagtacagcctcagaaccacacagttgcagccaaccagctcctgacatggaacttgagcaacaaatgccctttgtttttgcaagtccctgagat

SEQ ID NO: 863367 - DNA, 120 bp, Artificial Sequence
  ENSG00000253281_3 (sequence is synthesized)
tttttatatgccatgaatttctgaagatagaactactgttattccccatgcagcagctgaggaaactgagtcttagaatgtataaacaactttcccaaggctactgaaagtgatgggaat

SEQ ID NO: 863368 - DNA, 120 bp, Artificial Sequence
  ENSG00000253281_4 (sequence is synthesized)
caaatatatctttgcctaactccagatcccatgcttttgaagatatttatactgcctaaagctgtaacagacttttctaatagtcatacatggcatatttagttgctctccatggggaaa

SEQ ID NO: 863369 - DNA, 120 bp, Artificial Sequence
  ENSG00000253281_5 (sequence is synthesized)
taatgacctgacatggaaaatattggtgtactttattatgagattctaataagcaaccattatacatgtatataatatatacatgcaacctcttaagcttatgccattctgtatggatgt

SEQ ID NO: 863370 - DNA, 120 bp, Artificial Sequence
  ENSG00000253281_6 (sequence is synthesized)
tactagcttgaagaaattctaaagagtagggatattaaaaatactgagccaataaagtaggataatttttttattgtagtcaattttcatttataatattaaattcttgcactccctttc

SEQ ID NO: 863371 - DNA, 120 bp, Artificial Sequence
  ENSG00000253281_7 (sequence is synthesized)
gaggatgtgattccatccctggcagttcttagattccctcatgactataggacagagaggagactgagaaacacaagaagcaccagagtggttgaaaggagctgaaggttcagacagcaa

SEQ ID NO: 863372 - DNA, 120 bp, Artificial Sequence
  ENSG00000253281_8 (sequence is synthesized)
acaatattcttctccaggaattttgtaaccagcactggtaaagggagggaagtgctccccagtggggagagctgcagaatgtgagacttggaaaccaaaggccgccatgttttctgtctc

SEQ ID NO: 863373 - DNA, 120 bp, Artificial Sequence
  ENSG00000253281_9 (sequence is synthesized)
atgtgacttctgcacctcatctctgggatggtttcagtgggtcctagattgctttctgtgctccctgggacagttggtggcactctgtgagactactctgagcaagtgaaaaagatagca

SEQ ID NO: 863374 - DNA, 120 bp, Artificial Sequence
  ENSG00000253281_10 (sequence is synthesized)
cttttaaaaaacttcctttcttctgttgtagttggattacagaagtgatttttaaagacactattaatagaggtattttatcttggtacaaaattatttaaaaaatagacttaaacagag

SEQ ID NO: 863375 - DNA, 120 bp, Artificial Sequence
  ENSG00000253281_11 (sequence is synthesized)
aagagaagatgacaggatctaatgggggagtccatgcttgcttgaaggaggagagatatggatctggacaaaccagtcctttccatcatgggctcctgtggaaaatgaccccagctcagc

SEQ ID NO: 863376 - DNA, 120 bp, Artificial Sequence
  ENSG00000253281_12 (sequence is synthesized)
gggcattctgttattgggattgtcatgggtgaagggctaaatgcactattcaggacgaccaacctaaaataagagaagagataggactgtatataccagtcctttccatcatgggctcct

SEQ ID NO: 863377 - DNA, 120 bp, Artificial Sequence
  ENSG00000253281_13 (sequence is synthesized)
gagactactctgagcatgactataggacagagaggagactgagaaacacaagaagcaccagagtggttgaaaggagctgaaggttcagacagcaacctggacactaagggtccaaagcca

SEQ ID NO: 863378 - DNA, 120 bp, Artificial Sequence
  ENSG00000253281_14 (sequence is synthesized)
cctgattttctgcagaagcaagtccctgtttagccttctactgcctccttttagaatgaagccagaccagtcctttccatcatgggctcctgtggaaaatgaccccagctcagctcagta

SEQ ID NO: 863379 - DNA, 120 bp, Artificial Sequence
  ENSG00000253281_15 (sequence is synthesized)
gatggaatccaatcttctttggcggggaaaataaatgaagccaacaccagtaggtataagagagatacagagttgtagctgtgtcaaaactctgtttccccttgttcttgaagtccatat

SEQ ID NO: 863380 - DNA, 120 bp, Artificial Sequence
  ENSG00000253281_16 (sequence is synthesized)
atgtgtttgccctgtctatgattcagtttgattgtatgccctgcccttttctttgatcatatgggatgccccaatgtggtctttttagcaaattcccctcttttattgccaactacatag

SEQ ID NO: 863381 - DNA, 120 bp, Artificial Sequence
  ENSG00000253281_17 (sequence is synthesized)
agctgttttagttccttggtgtatgtattcaattgtattattgtcactatttttcactccttcctttgaacaaaatatttatttatacacttcaccatatgacttgccttctttctgata

SEQ ID NO: 863382 - DNA, 120 bp, Artificial Sequence
  ENSG00000253281_18 (sequence is synthesized)
catgtcagaaatgatggggtggcagtttgagcagaatcttcaagaagcagtatgcatttctaccactattcttgcatttctcccctccctcataaggacaacatatatcaagcaggggcc

SEQ ID NO: 863383 - DNA, 120 bp, Artificial Sequence
  ENSG00000253281_19 (sequence is synthesized)
ctcagccagaagtgactgacatggtcactgagaggctgacccaaggacaaaagttttttttttcttttttcaaaaaaaacatgatcgcacaaaattttcagttcgaacaacaaaatcagt

SEQ ID NO: 863384 - DNA, 120 bp, Artificial Sequence
  ENSG00000253281_20 (sequence is synthesized)
ggttgtaatttaccattttcaaggtcacctatagaaggctgcaatatctaaagcctctcaggaaaacatgagaaccagctggaaaggcattttcccatgttcccactattttgctatgat

SEQ ID NO: 863385 - DNA, 120 bp, Artificial Sequence
  ENSG00000253281_21 (sequence is synthesized)
aaatactgtatttgattaccttctgttgaagtttataaaaagagatcattctttaatgctgaggccatttgcggagagtgatccagttggaaccagtgatttcgagaattccagacgtga

SEQ ID NO: 863386 - DNA, 120 bp, Artificial Sequence
  ENSG00000253281_22 (sequence is synthesized)
gagactggaaagcaaatcagaaaaaagacaagtgacgaagttttacagtcaggaaacaaaattctgatcttttgttcttgtttactttctatggcaatgaagcagaatgcaaaaatcgga

SEQ ID NO: 863387 - DNA, 120 bp, Artificial Sequence
  ENSG00000253281_23 (sequence is synthesized)
agggaagtgctccccaaatgtgagacttggaaaccaaaggccgccatgttttctgtctcatgatggaatccaatcttctttggcggggaaaataaatgaagccaacaccagtaggtataa

SEQ ID NO: 863388 - DNA, 79 bp, Artificial Sequence
  ENSG00000239480_0 (sequence is synthesized)
gtggaatgagccagagggtctgggcagcatgactgggcgtccagccacaggagaatggaagaaattggagagatggggt

SEQ ID NO: 863389 - DNA, 120 bp, Artificial Sequence
  ENSG00000239480_1 (sequence is synthesized)
gctgatctgcctgcctaaacccagaggatgtttcagctgtcagccctgtcatcggggacccctccttctaccaggaaaccctgttccttggctccatgatgccctgaagaaagaatctct

SEQ ID NO: 863390 - DNA, 120 bp, Artificial Sequence
  ENSG00000239480_2 (sequence is synthesized)
ctaaatatcatctcctgcaccccgtgggggtgaagcccaccgcaacctggcatcctgctgtgtcgccatgtgcccacccacccaacacacacctgtggcgactgtctctcttggcccagt

SEQ ID NO: 863391 - DNA, 120 bp, Artificial Sequence
  ENSG00000239480_3 (sequence is synthesized)
gagctggcagaggcaggaagggacttgctgacagtcccctggcttaccagaggcaggggcaggattcaaagccaggtcatcaggctccaagccccagcaccctccccagcactgaggcgg

SEQ ID NO: 863392 - DNA, 120 bp, Artificial Sequence
  ENSG00000239482_0 (sequence is synthesized)
atttctggtgagtcagccaggaggccgtggagaggacaggttggctgtctcctttgcctgtaggtggtctggggccccagcagtgggagacctgtaacttcaggcaccactggaagaact

SEQ ID NO: 863393 - DNA, 120 bp, Artificial Sequence
  ENSG00000239482_1 (sequence is synthesized)
taagcccagagaaggaaacggctcttccactccccagcgcccctccccagatggtgcatcagaacctggagggttgcaggacaatctcaagagcagcaggcagacatctgaaccgtggta

SEQ ID NO: 863394 - DNA, 120 bp, Artificial Sequence
  ENSG00000239482_2 (sequence is synthesized)
catctagttcttctatttgtctacctataggtgcactcataacattttaatttatttcatgtgttgtcatcgttatcctctgtattactctgagaaagaagatgttacctgtttgtgaaa

SEQ ID NO: 863395 - DNA, 120 bp, Artificial Sequence
  ENSG00000239482_3 (sequence is synthesized)
aagagggtcacagagtatgtgtgaaccaatacttcatttgagacagcctcacatggagaatgcaatgagccattctcttctcacatacagttgaatatgacatttactgcagtttgatca

SEQ ID NO: 863396 - DNA, 120 bp, Artificial Sequence
  ENSG00000239482_4 (sequence is synthesized)
gaactctggaacaagaagaagaagacgaaggaggaggaggagggggagggggaggaggagaaggagaaggaggagaaggagaaggagaaggagacggagaaggaggaagaggaggaggag

SEQ ID NO: 863397 - DNA, 120 bp, Artificial Sequence
  ENSG00000239482_5 (sequence is synthesized)
cactgcactccagcctggaccacagagcgagactccgtctcaagaagaagaagaaggagaagaaggagaaggagaagggaaaaaagaatcctcatcattaatgcaagtggaaggaaactc

SEQ ID NO: 863398 - DNA, 120 bp, Artificial Sequence
  ENSG00000239482_6 (sequence is synthesized)
ttcaccaaagaattgatcacatcatgaaaggtgaaatcattacggaattgcttaaatatataatttgaatctggatttaaaaataataaatgtaagttttttctttaaaaaaaaaaaaaa

SEQ ID NO: 863399 - DNA, 120 bp, Artificial Sequence
  ENSG00000239482_7 (sequence is synthesized)
gaagttgaatatgacatttactgcagtttgatcactaagcataagacctttctttaaaaaaaattatgtaagcaaatttcttctttttcaaagggtttttaatacaatgtttatgcttca

SEQ ID NO: 863400 - DNA, 120 bp, Artificial Sequence
  ENSG00000278200_0 (sequence is synthesized)
gcggccgctatcgcctccgctctctgattggctgtgcggcggccaatcgggtgagggggccgccagcccgtgcggccccacgtggggcggcgcgaggggctgttagaggaccgcagcggg

SEQ ID NO: 863401 - DNA, 120 bp, Artificial Sequence
  ENSG00000278200_1 (sequence is synthesized)
cgaggggctgttagaggaccgcagcgggcggggcgcgtggttcgatcgcgcgctacgcgcctcggggacgcggtccgcgccacccccagccgtccctgccgtcccgaggcccccagcgag

SEQ ID NO: 863402 - DNA, 120 bp, Artificial Sequence
  ENSG00000278200_2 (sequence is synthesized)
ggccatcgccgggtgctgtgcggttcccggctcggaggcgctgggccggcgtcgcggctgccccctgcccacgcgggagggaagcgagcggcgctcagggaccaggagcgaaggccttgc

SEQ ID NO: 863403 - DNA, 120 bp, Artificial Sequence
  ENSG00000278200_3 (sequence is synthesized)
ttgccacctggcgaggcggggaggccaaggtgggctgtggaaggaagaggcgggcctgccgctggtggtggtgggatcaattcattcattcattgagtccgtcattgacacctcctactc

SEQ ID NO: 863404 - DNA, 120 bp, Artificial Sequence
  ENSG00000278200_4 (sequence is synthesized)
tacttcaagtggaacgtacaagcatgttttttgatatgggcaattgacacagtcttacatttttatggcaccctcagacagggtatttgaggagaattgaataaatggaaaatacgtgaa

SEQ ID NO: 863405 - DNA, 120 bp, Artificial Sequence
  ENSG00000278200_5 (sequence is synthesized)
ttaaaggagagctgtgcagtacccagggccagcaacaaaggggagctgttaccccctgagacctggagggcagctggagccacaggagaggccgtctccaggagccctgaccttggagag

SEQ ID NO: 863406 - DNA, 120 bp, Artificial Sequence
  ENSG00000278200_6 (sequence is synthesized)
ggacacagcgacccggcagggaggagctgctgctgtacactgacctcacccctcctgaccgcttggcttgtctaccggctacgcattggctgaactaggtggaggccagggagcaacgag

SEQ ID NO: 863407 - DNA, 120 bp, Artificial Sequence
  ENSG00000278200_7 (sequence is synthesized)
gccccatggatcctgtacctacagtcagcttcccggggcacagagcaggggctggcatggggcaatgggaagatgtccagcacctgttttgaagtgtgaataaaagcatcgtagaaaatg

SEQ ID NO: 863408 - DNA, 120 bp, Artificial Sequence
  ENSG00000283897_0 (sequence is synthesized)
gcagagacgccatgccggctgatacacacgcccggaggaggtgcggccggcgggggacagggaaagagatcacagcgaagacccagaagaaacaaaaggactttattttactgaaaaaaa

SEQ ID NO: 863409 - DNA, 120 bp, Artificial Sequence
  ENSG00000283897_1 (sequence is synthesized)
aaaaacttgaatgaagagagccaaagtacatggtgatgtgagtgtgagtcatggaacttgttcttttttctgaataattatttcacttaagaagacatccagatacatccagataatttg

SEQ ID NO: 863410 - DNA, 120 bp, Artificial Sequence
  ENSG00000283897_2 (sequence is synthesized)
ttatgcattggatccttgaagacttaacgcttcaggatggcatgctgggcacacaagttcacttcccccttgcaaagccacatgacatttacggtaaagaaataaggcagaaataaagcc

SEQ ID NO: 863411 - DNA, 120 bp, Artificial Sequence
  ENSG00000283897_3 (sequence is synthesized)
atgacactactgtgaccagaaggaaggccatccgagagaaatatacttttgtgaagttcttggcaagaagaaagaggagaggaccaggccgggcgcggtagctcacgcctgtagtcccag

SEQ ID NO: 863412 - DNA, 120 bp, Artificial Sequence
  ENSG00000283897_4 (sequence is synthesized)
ggcggcccagggcatggggcagagacgccatgccggctgatacacacgcccggaggaggtgcggccggcgggggacagggaaagagatcacagcgaagacccagaagaaacaaaaggcaa

SEQ ID NO: 863413 - DNA, 120 bp, Artificial Sequence
  ENSG00000283897_5 (sequence is synthesized)
gcgaatgtaagagcttcaccaccttcccactccaggacggtggacaacaagaggtttgaaagctgtgatgtcctcactgtcttccgtccctctcacggaatgaaaagtcgtttttgccag

SEQ ID NO: 863414 - DNA, 120 bp, Artificial Sequence
  ENSG00000283897_6 (sequence is synthesized)
aatattatacctgcaagatctcacggggaggagactgcagcccacccgctggagatttttgcctacagaaagcttccctttttttccaacccaaagacagacttttatagcctctccaac

SEQ ID NO: 863415 - DNA, 120 bp, Artificial Sequence
  ENSG00000283897_7 (sequence is synthesized)
tccccttgaatttttaagagagagaaagaaaagccccaaagtgaaagatagtggtcatttatgccttggaaagataaatgggtgttttagttttgtttttaaatgaattttccttttcta

SEQ ID NO: 863416 - DNA, 120 bp, Artificial Sequence
  ENSG00000283897_8 (sequence is synthesized)
aagaatttctttcaaaaaattagtgggagttgaggtgaggcatgtgttttatatttttatatccactttagtaggttttaatataacgtcttgagtcccttttgaatttctttatgaccc

SEQ ID NO: 863417 - DNA, 120 bp, Artificial Sequence
  ENSG00000283897_9 (sequence is synthesized)
ttaaattgtagcttccatccatgtcacaaatatgtaagctggggaggtaacctactatcaggccatatttacagaatggctaaaaaactaagctaaacttctcgaagatgtcaataccta

SEQ ID NO: 863418 - DNA, 120 bp, Artificial Sequence
  ENSG00000283897_10 (sequence is synthesized)
gttctttcactcctcggcgcgtgagctcctggcagcctcacccttttgcacatgacgcgcctccccgggtctcccgcaggcaggcctcgctcctccctccgccaggcctgcccgggaggc

SEQ ID NO: 863419 - DNA, 120 bp, Artificial Sequence
  ENSG00000283897_11 (sequence is synthesized)
ctcgacccggcgaggtgacccgccccagggtcgccggcgcgaggacgaggctggcggtgcgctgcttcctcagagccgcttcctcagagccggctgcggcgggcccgggcgggaaccacg

SEQ ID NO: 863420 - DNA, 120 bp, Artificial Sequence
  ENSG00000283897_12 (sequence is synthesized)
gagcccagtgcaccagcctcctcggtgctaccgcgggacacagaggaaacaggaacagctggtttctgtgggcaggccccgggctggaactagagccagggtgcggccggcgggggacag

SEQ ID NO: 863421 - DNA, 72 bp, Artificial Sequence
  ENSG00000283897_13 (sequence is synthesized)
ttgataatttgactatttgccgacctcttggatgtaccatagattcttatgcattggatccttgaagactta

SEQ ID NO: 863422 - DNA, 120 bp, Artificial Sequence
  ENSG00000283897_14 (sequence is synthesized)
tgtaccatagattcttatgcattggatccttgaagacttacacttcaggatggcatgccaggcacacaagttcacttcccccttgcgaagccacatgacatttatggtaaagaaataagg

SEQ ID NO: 863423 - DNA, 120 bp, Artificial Sequence
  ENSG00000283897_15 (sequence is synthesized)
cagaaataaagtcatgacactactgtgaccagtgcagtggcatgaccataactcactgcagcctcaaattcctgggttcaagggatcctcctacctcagcctactatggagtagctgaga

SEQ ID NO: 863424 - DNA, 87 bp, Artificial Sequence
  ENSG00000283897_16 (sequence is synthesized)
tcctacctcagcctactatggttgtctaatttttttttttaagtactggtagagatgggtaccttgctttgttgcccaggctggagt

SEQ ID NO: 863425 - DNA, 120 bp, Artificial Sequence
  ENSG00000283897_17 (sequence is synthesized)
cccctcgctccacctcccgcgtagcctgcgggcccctggcggcccagggcatggggcagagacgccatgccggctgatacacacgcccggaggaggtgagggaggaagccacttgaaaat

SEQ ID NO: 863426 - DNA, 120 bp, Artificial Sequence
  ENSG00000224209_0 (sequence is synthesized)
gagtagctgggagtacagatgcacaccaccacacccagcctagaatgaagaaacctgcagttgggaagcatgaatttaccacctattaagaattgtggcttgcattgtaagaggagcctg

SEQ ID NO: 863427 - DNA, 120 bp, Artificial Sequence
  ENSG00000224209_1 (sequence is synthesized)
tgaattcagaggcaagtctgctgaggaccgaatgttcctgtccataaaaacagaagtctggcctgggctcctctcttgggtgaatttgcaatgccagatcctctctatcagtttggtttt

SEQ ID NO: 863428 - DNA, 120 bp, Artificial Sequence
  ENSG00000224209_2 (sequence is synthesized)
gtttcttgtatctctgggaaggcaggcagacagcacggtcacctgtgaatgcagctacaattggcttagctgcctcactgataaatgtgcccccagtaagctacaaagggattaccagcg

SEQ ID NO: 863429 - DNA, 120 bp, Artificial Sequence
  ENSG00000224209_3 (sequence is synthesized)
ttctcagcagctaaagaaaaggtccagacgcctgagcctggaaagaagcctggcccacgttctatccatttaccctgtggccttacagagacagaacctttgcagagcctgcactgtgct

SEQ ID NO: 863430 - DNA, 120 bp, Artificial Sequence
  ENSG00000224209_4 (sequence is synthesized)
tttactgttccctttcgtggttggctgaatattggccttccaaagatgtctacatcttaatccccagaacctagggaacctgtgaatacatcacctaacataggaaaaggaactttgagg

SEQ ID NO: 863431 - DNA, 120 bp, Artificial Sequence
  ENSG00000224209_5 (sequence is synthesized)
ttcttactttgagtagccaacttgcagaatacaatagaattttgggaggagcccctcgatgcctggctttactgttggagagacagtacagtatacaccagatgacttatttgtgaacca

SEQ ID NO: 863432 - DNA, 120 bp, Artificial Sequence
  ENSG00000224209_6 (sequence is synthesized)
tggaaacgtttggaaaagcctacttcatgctttgaacagaagagttttatcagttttaaatgtttcttcatttctataccttcttttatctgaggagcttaagccattttgtagaggcat

SEQ ID NO: 863433 - DNA, 120 bp, Artificial Sequence
  ENSG00000224209_7 (sequence is synthesized)
taagtattgcctcagtcttaatatgtgagacaaggtgtgaggaatatagagattcataaaataatccccatcttcaaggaactcacagtcaggaagaacagagcctgcaacacaaataat

SEQ ID NO: 863434 - DNA, 120 bp, Artificial Sequence
  ENSG00000224209_8 (sequence is synthesized)
tgcaatatagtagaagtgccaataggagctctatgaagggcgtgaaacaggaaaggctacatagaggagatggcagacactctgtggattgtgacctgttggtgggccatgaaatcaatt

SEQ ID NO: 863435 - DNA, 120 bp, Artificial Sequence
  ENSG00000224209_9 (sequence is synthesized)
tgggggtttgagagcatcattcttttaataaaacagaagagaatcatctgcaataaggaacccatggatgaataccatctggtcctggtgatttactgcacagagtccctcaagttgctc

SEQ ID NO: 863436 - DNA, 120 bp, Artificial Sequence
  ENSG00000224209_10 (sequence is synthesized)
catacctttctcctgagagactgaagaatctctgtcaaggccgttctctgctttgccataaaatgtgtccttggaacaagaatttccccattgtcttcttcaataaatactgattcaaag

SEQ ID NO: 863437 - DNA, 120 bp, Artificial Sequence
  ENSG00000224209_11 (sequence is synthesized)
atagatgaagactggggagattgcaaaagacccatccagcagtggttctcagacctcagtgtgcatcagaatcacctggaaggcttgtgaaaacacgtattgctgggccacacccccaga

SEQ ID NO: 863438 - DNA, 82 bp, Artificial Sequence
  ENSG00000224209_12 (sequence is synthesized)
tcccgagtagctggtactacaggcacacatttgtagagatggtgtttccccatgtcatccaggctggtctggaactcctggg

SEQ ID NO: 863439 - DNA, 120 bp, Artificial Sequence
  ENSG00000224209_13 (sequence is synthesized)
aaagattatctccagatgctggaatgaccagtaatttattttcttcctttttttttgtctgcactttctaccataatcatatgttagcttcttactaagaagaaaagtcaatgttatttc

SEQ ID NO: 863440 - DNA, 120 bp, Artificial Sequence
  ENSG00000224209_14 (sequence is synthesized)
cctgaaaaagtaatgttgtttggttattaaacaaatttaattttctaaacaagagtacgacaggtaaactgcctaccttaaaagcaaacgaacacaaataaataaactaaccatcttcca

SEQ ID NO: 863441 - DNA, 120 bp, Artificial Sequence
  ENSG00000224209_15 (sequence is synthesized)
gggaaggaagggagcggaaaggccgagcgccacccgccccgggagtctccagagcagcgcgcggggcagacctcctcgggtcctccggcgcttcggtctccggagacgcccggcctcctg

SEQ ID NO: 863442 - DNA, 120 bp, Artificial Sequence
  ENSG00000224209_16 (sequence is synthesized)
aagggttcggcttgtcctcctctggcgctcagctccctctggcggccgggctggcaggacctcagcgcccagcccttccgtcttgttacgtccagggtctcactctgtgtctcaggctgg

SEQ ID NO: 863443 - DNA, 120 bp, Artificial Sequence
  ENSG00000224209_17 (sequence is synthesized)
cacctcgaaatgatccaaggcaatttaaaaaaagttgtctgattacctttactaatgcattgagatttaaataccagggctttcatttagctttccgttcctctgtgtcgaagaggatgt

SEQ ID NO: 863444 - DNA, 120 bp, Artificial Sequence
  ENSG00000224209_18 (sequence is synthesized)
tgctcacagaagatggtgccgtgcatgtgcagaacttcccaggccaagatccaccacattggacccactgagtgagcccccttgtcattgcatgagatggtgatgatcacatagcgtaga

SEQ ID NO: 863445 - DNA, 120 bp, Artificial Sequence
  ENSG00000224209_19 (sequence is synthesized)
ggagagtatgtgtgacacagagcaatggtagtcagtttaacatacgatagccctgtgaaaggtgtgtggtcagccctgggatcagtaaccatcagaagacatggctcccagaaggctacc

SEQ ID NO: 863446 - DNA, 120 bp, Artificial Sequence
  ENSG00000224209_20 (sequence is synthesized)
gctccagtggcagcagcaaacttcagcatagcctgctggctgacattcctggaggatgtgacactgacagcagctgagtttccaaatggcaacaatggcacaagctgccagccaaagctt

SEQ ID NO: 863447 - DNA, 120 bp, Artificial Sequence
  ENSG00000224209_21 (sequence is synthesized)
aatggcaacaatggcacaagctgccagccaaagcttcttgcaggtcctcttcagatttatcatgtagatgccatcacttttccttttgtagtgtatcatttggaagtcaaggtgggtgcc

SEQ ID NO: 863448 - DNA, 120 bp, Artificial Sequence
  ENSG00000224209_22 (sequence is synthesized)
acctaagtggattcctgctggaaggaatgtgaggacattctcctccttcatcttcagggcataaagggctccaaacattgtgaaagtttctctttaaattacgacatgctgtatggatct

SEQ ID NO: 863449 - DNA, 120 bp, Artificial Sequence
  ENSG00000224209_23 (sequence is synthesized)
gtttgattgctagtatagctcactcttctgtggctagaagtcctgaagaataaaacgttaagcaagttattatgctgactacaacacccaggcttaggaactagtgagcataagacctca

SEQ ID NO: 863450 - DNA, 120 bp, Artificial Sequence
  ENSG00000224209_24 (sequence is synthesized)
aatttctttctggctctcattatgaaagtcatgattgtttcccttgcatcatcctctgcatgtggcttttcatcttacattctggctttgctccaggagacacactgccttatgccaggg

SEQ ID NO: 863451 - DNA, 120 bp, Artificial Sequence
  ENSG00000224209_25 (sequence is synthesized)
acctggtggaaaggtcacccccagaatggacaggctgggaagagctcacttaacagtgcactggtttactgagacaattcaaaacacacattcattttgtgtgcttatgaaatatatccc

SEQ ID NO: 863452 - DNA, 120 bp, Artificial Sequence
  ENSG00000224209_26 (sequence is synthesized)
aagaaaatggaaacaactctgtccttgaccttcaaaaagaaattgacttacctagcttaactattcaaacaaacaactgtgtactctcttcaattccgatgatgattttgatttactgta

SEQ ID NO: 863453 - DNA, 120 bp, Artificial Sequence
  ENSG00000224209_27 (sequence is synthesized)
aatgactgaatttaatgaactaaattatgctatttaaatgcattttgtgaatggtattgtagtttgttacaaagcattatgtccatgctaaattgtgctgtaaatgatatggtatggaac

SEQ ID NO: 863454 - DNA, 120 bp, Artificial Sequence
  ENSG00000224209_28 (sequence is synthesized)
atatgtgctgtattcataatttaactgttgctgtggattgccttcttggataggacacattgaaaaaaggagcctttatttacctggtgaaatgaaggtgatatctcagcaaatcactag

SEQ ID NO: 863455 - DNA, 120 bp, Artificial Sequence
  ENSG00000224209_29 (sequence is synthesized)
gtcttactgaccttggcagaattacagtgctaatattttcacatggatgaactgttcttaaacaatttctctaatgtatatggcagaaatcggctttccattaaaactaggtatatatgg

SEQ ID NO: 863456 - DNA, 120 bp, Artificial Sequence
  ENSG00000224209_30 (sequence is synthesized)
atacggaagttggaggttctcgtagcaatgcagatgtcagcttctctcagctctgatggagtagcacttaatgtaaatttaatttgaagtgatgtatggaaggcttgaggtggtactccg

SEQ ID NO: 863457 - DNA, 120 bp, Artificial Sequence
  ENSG00000224209_31 (sequence is synthesized)
tgattccctaactgcctggagagcctctgtgggtagcatctggatttggcggctccacatgcccggcagcatctactaactaggattaatgaggtagcctgttcaccagtgatccaaagg

SEQ ID NO: 863458 - DNA, 120 bp, Artificial Sequence
  ENSG00000224209_32 (sequence is synthesized)
caagggggaaattttttctccctggctacatgatccaggactgtttctgccatgcgtgttactcattgccatggtgcttatgacagtgaaggaaagagtctcactttgtcgcccaggctg

SEQ ID NO: 863459 - DNA, 120 bp, Artificial Sequence
  ENSG00000224209_33 (sequence is synthesized)
actggggagattgcaaaagacccatccaggtactgatgcggtcttctgggaccaggaaccctactcatgcctcaagctacctgtgatgaaaagtccattgtctgccacctgtctggtaga

SEQ ID NO: 863460 - DNA, 120 bp, Artificial Sequence
  ENSG00000224209_34 (sequence is synthesized)
tctgtcctgaggattaatgagataatgtctggagagccatgtgaagcctttggaaggagattacagataaaagtctagttccagtgaattaggctactgataagagtactgaataacaaa

SEQ ID NO: 863461 - DNA, 120 bp, Artificial Sequence
  ENSG00000224209_35 (sequence is synthesized)
gctgtgatcaggcttttaaaacgttattttgttgatatttggttacagctacttttagacactgaactagccagtggaacaagttctttctgaggtccctgaactttaaacagtcactct

SEQ ID NO: 863462 - DNA, 120 bp, Artificial Sequence
  ENSG00000224209_36 (sequence is synthesized)
agaacagtctttctcaaagtctcaacccgaggagaattgtctatatcaccagtgtgtttgttaaaaatataatttcctggccttcaacttcagaactacaaatttgcaaaacttcaggaa

SEQ ID NO: 863463 - DNA, 120 bp, Artificial Sequence
  ENSG00000224209_37 (sequence is synthesized)
gagtagctgggagtacagatgcacaccaccacacccagcctagaatgaagaaacctgcagttgggaagcatgaatttaccacctattaagactaaggtacagagaggtcaagtaacttgc

SEQ ID NO: 863464 - DNA, 120 bp, Artificial Sequence
  ENSG00000224209_38 (sequence is synthesized)
gagtagctgggagtacagatgcacaccaccacacccagcctagaatgaagaaacctgcagttgggaagcatgaatttaccacctattaaggaatgcaagaaattacattatagaaagcaa

SEQ ID NO: 863465 - DNA, 120 bp, Artificial Sequence
  ENSG00000224209_39 (sequence is synthesized)
attcttctcagaaatctttttaaaaaatcagtatattcagagatctgatagagactttattttagttctagtttttttggggaaaagtttgccatggttttggaggctccttaaagtatt

SEQ ID NO: 863466 - DNA, 120 bp, Artificial Sequence
  ENSG00000224209_40 (sequence is synthesized)
aaatcttgagctcttcttatcaaagtcaagggaacctactgagtaaaactatttttaaaagggagaaatttttatgctttccttttaagaggttaatcaataaacccaagtgaacaagaa

SEQ ID NO: 863467 - DNA, 120 bp, Artificial Sequence
  ENSG00000224209_41 (sequence is synthesized)
ccagggacctggtggaaaggtcacccccagaatggacaggctgggaagagctcacttaacagtgaatgcaagaaattacattatagaaagcaagctgtacttcagaaaaacacacatcaa

SEQ ID NO: 863468 - DNA, 120 bp, Artificial Sequence
  ENSG00000224209_42 (sequence is synthesized)
attaagacagcagaagaggtgatttactgtatgcttgttacacttggccacaagtgaacacagaaatgagcccagaatgttacaggtccagggtaaatgaccaacagggactgttttggt

SEQ ID NO: 863469 - DNA, 120 bp, Artificial Sequence
  ENSG00000224209_43 (sequence is synthesized)
acatggctgctttcagaaatgaagacccaaagaaactgggaaaactgtatttttatggacagccatgcagtatgattggaggacaaagactatgatataattgtaataaactgggggaac

SEQ ID NO: 863470 - DNA, 120 bp, Artificial Sequence
  ENSG00000224209_44 (sequence is synthesized)
gtcacccccagaatggacaggctgggaagagctcacttaacagtgtaagtccttaactgcatttcttcaagcgccatcttaatggcatataagcaaaagtgaaaaattccaaaggggact

SEQ ID NO: 863471 - DNA, 120 bp, Artificial Sequence
  ENSG00000224209_45 (sequence is synthesized)
aaaatttagattttggcctgatagtataactagaaggtttttttgctttgaattaccataagtaggagtgagtgagtttctgtcattcccctaccgaataaaatattgaatttatgatga

SEQ ID NO: 863472 - DNA, 120 bp, Artificial Sequence
  ENSG00000224209_46 (sequence is synthesized)
atagttgttaaatagagtgatctggacttattctttccagcctagtgagacccatcccaaccttttacagacagtttctttaaatatagcatgagaaacctcagtgtcctctggagggtt

SEQ ID NO: 863473 - DNA, 120 bp, Artificial Sequence
  ENSG00000224209_47 (sequence is synthesized)
ttgtaaatggatgccagcccagtctttattaaactgggcttgtatgtcatataattgcctgtcttgacatacctcttccaggctttgctggaagggtttgttaaggattcttttctgctg

SEQ ID NO: 863474 - DNA, 120 bp, Artificial Sequence
  ENSG00000224209_48 (sequence is synthesized)
tttgagacggagttttgctcttcttgccaaaaatgtaggtttaaaacagtatattggaagtcctagaagatgagggaaggagggcaaggaacaaacattgattgaaaacctcttagctcc

SEQ ID NO: 863475 - DNA, 120 bp, Artificial Sequence
  ENSG00000224209_49 (sequence is synthesized)
attgaaaacctcttagctcctacgtagagtgctagaaactttatgtatgattgcttatttattgttcacaacaacccctgtaaggtattgcttatcagccctattttgtggatagaatgt

SEQ ID NO: 863476 - DNA, 120 bp, Artificial Sequence
  ENSG00000224209_50 (sequence is synthesized)
ccaaggctaagagaattcagacagcttctttgttaggaagggatggagcccagaattctctgatgtctatagtgctgttgcctccctctcagacccaggaaccatgtctttagaatattg

SEQ ID NO: 863477 - DNA, 120 bp, Artificial Sequence
  ENSG00000224209_51 (sequence is synthesized)
atcgcaggaagtttccagcttgggaattccaacaagaaagagatgatgctaaaggatttactaatgccgaattttactggcaaaaaattactcttttattacaaacaaattcctgaacaa

SEQ ID NO: 863478 - DNA, 120 bp, Artificial Sequence
  ENSG00000224209_52 (sequence is synthesized)
cacagctgtttccgcttttgaatccttgttggctatgttaagcagcatttggctgaatgctaatccttagattaagcatctcttaatcaatttgtccatcattactttgagcttacaaac

SEQ ID NO: 863479 - DNA, 120 bp, Artificial Sequence
  ENSG00000224209_53 (sequence is synthesized)
tgttgttccatgaatagtggttgtctttaagaggcagtaagaaaagtatcagcgtcattatttgctgtttcatacccctgtgacagtactcacagtctgtgatgggtgacagaggaagcg

SEQ ID NO: 863480 - DNA, 120 bp, Artificial Sequence
  ENSG00000224209_54 (sequence is synthesized)
gcttctccgacttgactccctgtttgaggcgaaggaaaaacattcatgtcatctgcatcatctgcatcctgttggcataacattgtgcattgaaggattaatcaacataacagttttttt

SEQ ID NO: 863481 - DNA, 120 bp, Artificial Sequence
  ENSG00000224209_55 (sequence is synthesized)
aaacaggaaaggctacatagaggagatggcagcctctctttatcccagactcctcccctgcaatctccctcttagagaccgcctctctgccctctcaacccagagctaggcatgtgacta

SEQ ID NO: 863482 - DNA, 120 bp, Artificial Sequence
  ENSG00000224209_56 (sequence is synthesized)
aagcttggctaatcaaagcatccagtgcctttgaccacagtaagagctggaagactgagcacatggcctcttcagagccacagagatggaagagaattttttgctgaaacttctgggaaa

SEQ ID NO: 863483 - DNA, 120 bp, Artificial Sequence
  ENSG00000224209_57 (sequence is synthesized)
gaaattaactttcctgctggactttattcatgggaatatgcttcagccatattccaagggagatcaggacaaacatgacactctgtggattgtgacctgttggtgggccatgaaatcaat

SEQ ID NO: 863484 - DNA, 120 bp, Artificial Sequence
  ENSG00000224209_58 (sequence is synthesized)
atgtggttaaggatcctgagatggaactggtgaagatttccccagcaaaaagtagaagctcagtgtttcatagatgaagactggggagattgcaaaagacccatccagcagtggttctca

SEQ ID NO: 863485 - DNA, 120 bp, Artificial Sequence
  ENSG00000272727_0 (sequence is synthesized)
agaatgttctggacatatttaaaaatggctactttctccctccctgtgtcagaagcatgaagagattttcttcctacactcacgatgagaacctggtggagctcctaaagattggctctc

SEQ ID NO: 863486 - DNA, 120 bp, Artificial Sequence
  ENSG00000272727_1 (sequence is synthesized)
ctgatggttgcacgatggctgcagcagttccagatgtcccatcgagacacaaaaagatcccagatggaagatgccatctcctcctatgtgcctctttttaagagttacacaggagtgagg

SEQ ID NO: 863487 - DNA, 120 bp, Artificial Sequence
  ENSG00000272727_2 (sequence is synthesized)
aggaccaccaaaccaaactaagactcggaggaaaaaaaaaaaagaaaaagaagaaaatgtctgctaggtgccatgccactcaaacagccaatggaaaggcccacgtggcgagagctaagg

SEQ ID NO: 863488 - DNA, 120 bp, Artificial Sequence
  ENSG00000272727_3 (sequence is synthesized)
cttcctgccaacaggcaagtgaggaagcccagtcagctgcctgcagtcctgacccatgaagagcctgactgaaagtgaatgagcaaccctgagctaggacaacccagcaaggcccatcct

SEQ ID NO: 863489 - DNA, 120 bp, Artificial Sequence
  ENSG00000272727_4 (sequence is synthesized)
accaattgggactgcagtattccttcagggaacttgaatagtcattctgtatatggaaattgtacacatcttaaaattgctggactaaagtgagaagagactgtcttgagtcaactggat

SEQ ID NO: 863490 - DNA, 120 bp, Artificial Sequence
  ENSG00000272727_5 (sequence is synthesized)
aaagtggaaaaaaaattaatttggaaatcaatagaattctggccttggctttgtcactaagaaacacttataagtaatttcacttctcttgaaattatgatcattatctataacataaag

SEQ ID NO: 863491 - DNA, 120 bp, Artificial Sequence
  ENSG00000272727_6 (sequence is synthesized)
gaactgagctaaatgttatctgatgcctctttaggctctcaaactccatagatttatgacatgcttgaaattcactttgtttcaccctaattcagagctttgtttcactagctctagaat

SEQ ID NO: 863492 - DNA, 120 bp, Artificial Sequence
  ENSG00000272727_7 (sequence is synthesized)
tagatgccttgggtttaaattgcaattcagtcacttatttaaataattgtacttggatgagtgatgttgccattttaagcctcagtttccccatagattcattgagaagatcaaataaga

SEQ ID NO: 863493 - DNA, 120 bp, Artificial Sequence
  ENSG00000272727_8 (sequence is synthesized)
tgatgcagataaagctcttagtttgtggggacacttagtaagtgcttaataaatacaggcagttgtgttatctatgttgtagcagcacattttgtaaaataaaacaaagttgaaatcaca

SEQ ID NO: 863494 - DNA, 120 bp, Artificial Sequence
  ENSG00000272727_9 (sequence is synthesized)
agtgcgcatgcttgtcggagattctcaggcgaccttccctcttatcttcctcttgcatttatcagaagtgctgaacccttgacgtgccttatcttatttgctcctcacaacaaatcttat

SEQ ID NO: 863495 - DNA, 120 bp, Artificial Sequence
  ENSG00000272727_10 (sequence is synthesized)
gatgcatcactaccagaagttgtccagaaagaactgtgaccgtatgttttaattaaataatttttcatccagtttttttctttgcatataaagaaacagaatcctgacatctgattgaat

SEQ ID NO: 863496 - DNA, 120 bp, Artificial Sequence
  ENSG00000272727_11 (sequence is synthesized)
tgcatcctgtatatctgagataaaacttcaaagaatcaacttaaggtcacaaaggattacaaagaaaaaattttagaaaggggtccctagatgcactgaacgtatttctattgagacatt

SEQ ID NO: 863497 - DNA, 120 bp, Artificial Sequence
  ENSG00000272727_12 (sequence is synthesized)
agaatgttctggacatatttaaaaatggctactttctccctccctgtgtcagaagcatgaagagattttcttcctacactcacgatgagaacctggtggagctcctaaaggtaaaactta

SEQ ID NO: 863498 - DNA, 120 bp, Artificial Sequence
  ENSG00000260838_0 (sequence is synthesized)
ggtgtgagccaccacacccagcccttaaaattattaagacttcacatatactatctatttgaggagtcttttacagcctccttgttaccacacatttgagtatgcttagtcattatgtga

SEQ ID NO: 863499 - DNA, 120 bp, Artificial Sequence
  ENSG00000260838_1 (sequence is synthesized)
catttgagtatgcttagtcattatgtgaatattcaacaaactggtccatctttctgatttaaatatttgtacacctaaggatgtatttcataaagtaattcataaccagtttggttctag

SEQ ID NO: 863500 - DNA, 120 bp, Artificial Sequence
  ENSG00000260838_2 (sequence is synthesized)
atttactgtaattggctatctgccagaataaactataaaatgagaataaaagcttttggtgtcaaaattttttttcattaaattttgttttgattatccagtctaaattgtcatctgtat

SEQ ID NO: 863501 - DNA, 120 bp, Artificial Sequence
  ENSG00000260838_3 (sequence is synthesized)
agatttcatcagatacttttttttactttttaaatgtcaatcttattgatcaagaaaggtaaaaaagagggaggctcattttctattctgatttgtttaaaatgccagatcacataaatt

SEQ ID NO: 863502 - DNA, 120 bp, Artificial Sequence
  ENSG00000260838_4 (sequence is synthesized)
tagatagggcccttattttctacgagagcagtggagctgggtgatgaccaaggactacatataatgcagcaagcacgctgtacagtccttacactatctaaatgcacctactcaaccaaa

SEQ ID NO: 863503 - DNA, 120 bp, Artificial Sequence
  ENSG00000260838_5 (sequence is synthesized)
gcagataggcactgtggaacgagaagggtgcagccaacactaatgctaaagacaggctaacttggaaattcttgcattgaaactgcaaaggaatttccaaatacactaaaaattctcttt

SEQ ID NO: 863504 - DNA, 120 bp, Artificial Sequence
  ENSG00000260838_6 (sequence is synthesized)
tagagtatctgctagccatcatcagtaaaaggaaaataataccttgattttaatgaggttttattgtttggttggttttcgggtggttatttggggtattttatttgtttggttggtttg

SEQ ID NO: 863505 - DNA, 120 bp, Artificial Sequence
  ENSG00000260838_7 (sequence is synthesized)
ttgaggggtttttttgcttatttattttatgaaaactttagtataacacactacttagtttggacttgaaatcaacttattatgatgcttaaaaaaatccatgttctaaatcataattgc

SEQ ID NO: 863506 - DNA, 120 bp, Artificial Sequence
  ENSG00000260838_8 (sequence is synthesized)
atgacagtttagatcttattactatttagttgtagcctaacaaatactgtattcctctgttttctcaaaaaaaaaagttcctagtttatgaaatagtattcagataaagccttatgctgc

SEQ ID NO: 863507 - DNA, 120 bp, Artificial Sequence
  ENSG00000260838_9 (sequence is synthesized)
ccaccagcccactaaatgtattaaatacctgtctctatgtagcttatgtaaaaactcaatgttgactgtcccatgtctgctgcatttaaaagctcattgtgattctatcatcttgctatg

SEQ ID NO: 863508 - DNA, 120 bp, Artificial Sequence
  ENSG00000260838_10 (sequence is synthesized)
ccaatgccttatgttatggtgtcgtgtatataggccatggtacaaaagtgactgtcaactgcttactcaacatctagtcagaaaaggtctgaggcagtgcaataacgcttttagtcaaac

SEQ ID NO: 863509 - DNA, 120 bp, Artificial Sequence
  ENSG00000260838_11 (sequence is synthesized)
tggctcactgttggaatcatttacatctgtgtattctttaccgtaaatactgaaatagtattttttaactgttttttcaggcttgtaataaatatctgtgtcatatctacatagtcaaaa

SEQ ID NO: 863510 - DNA, 120 bp, Artificial Sequence
  ENSG00000260838_12 (sequence is synthesized)
ctactgattttcccatataattgcttattttccattgccaatgtagacctgcctggaatggtgtctttcaccactatcatgtgtaaaataaagggaggctattgtggtgaattttcacct

SEQ ID NO: 863511 - DNA, 120 bp, Artificial Sequence
  ENSG00000260838_13 (sequence is synthesized)
gtctgacattagctctttcactagtcaaagattgtacatacctcagaggtgacctgactaccgaggtccagttttcaaaagtgcatcttattttaatttttgtctccaaaaattaaaatt

SEQ ID NO: 863512 - DNA, 120 bp, Artificial Sequence
  ENSG00000260838_14 (sequence is synthesized)
ggatgtctacaaaactaacatatgtagactttcaaaggccagcattggtggggaagggaaaagaaaggatggaaggatggaaggaacgaagggtgatgaggagatgaagggagagggagg

SEQ ID NO: 863513 - DNA, 120 bp, Artificial Sequence
  ENSG00000260838_15 (sequence is synthesized)
ggaaagaaaagaacagaaaaaagctaatagaggaaggtaaatctctaaatgagttaaataaggcttaaataaagtttgcatggtatattctctaaaagttgattggcgtggaggaggctg

SEQ ID NO: 863514 - DNA, 120 bp, Artificial Sequence
  ENSG00000260838_16 (sequence is synthesized)
tatgtgtttgtgtgtgtatgcacatgggcatgtctatgtgtaaggtcagaagggggagcctgaattatctactgcttttttggttaactagtcctatttttaaaactttgtctaactccc

SEQ ID NO: 863515 - DNA, 120 bp, Artificial Sequence
  ENSG00000260838_17 (sequence is synthesized)
aaaacttattaatgcgacatgtagtactgaaattagaagattattgttaaactcaggacagctctgtggagattcacaaagtaatttcatgaaaacttatgaggaagttgttcagtactg

SEQ ID NO: 863516 - DNA, 120 bp, Artificial Sequence
  ENSG00000260838_18 (sequence is synthesized)
tcactaattaacgcgcacaaaaaaaaaacttgttgtgagtaattatgggtgatttcgctgcaaaacaaattagtatacgaattattattttttctcaaattgtagaggttttgtttctat

SEQ ID NO: 863517 - DNA, 120 bp, Artificial Sequence
  ENSG00000260838_19 (sequence is synthesized)
taagtctctaacatttcccagattaaaaataccaaaactattttttaaacttaaggaatagagtatcagaaattaaccattaaattaatagttcttaaagttgctatgtatatggtaagt

SEQ ID NO: 863518 - DNA, 120 bp, Artificial Sequence
  ENSG00000260838_20 (sequence is synthesized)
aaaacaatttcctatttctaagttatacatggtattagatttctaggtacagtcgcatgaagcattattgacttttattaacttcagtgttttagagggttttcatactagtctatgaat

SEQ ID NO: 863519 - DNA, 120 bp, Artificial Sequence
  ENSG00000260838_21 (sequence is synthesized)
gctctgaatgctgcagggaaaaagaagcacaatcagtatttcattatttatgaattctcaattgaattatcctatcctgtccacacacataatagcattagcatttcttcttataccatg

SEQ ID NO: 863520 - DNA, 120 bp, Artificial Sequence
  ENSG00000260838_22 (sequence is synthesized)
ttgaaatacttttaatacaaactctcaatagaagcttaaacataagtggttaagtcttgttgtctagtctcattcacctgcctcaacatgctttctttcattctatttgcatacaaaatg

SEQ ID NO: 863521 - DNA, 120 bp, Artificial Sequence
  ENSG00000260838_23 (sequence is synthesized)
ttcttatttcagttttgtagacaggatatgagttagcatactcgtgtttgttcagctgtccatcctgcatcgttactacaatgcctttttctgccatttaatggtgtttgtatcaatgtt

SEQ ID NO: 863522 - DNA, 120 bp, Artificial Sequence
  ENSG00000260838_24 (sequence is synthesized)
cccatatctgctgcattttaactccataaaaaggaaatgtgatttcgtattaatagttttgttgatcaactcaatatttctgcaccaatcagcatacctatatgcatgtagtagtctgta

SEQ ID NO: 863523 - DNA, 120 bp, Artificial Sequence
  ENSG00000260838_25 (sequence is synthesized)
caattgttcaacatcaaaatacttgtttactttatgtcaaaatgtctataaaattgctggcattgttctccatttcagtctggtagaataagcgagatagaaaataaatgtgtaaatgaa

SEQ ID NO: 863524 - DNA, 120 bp, Artificial Sequence
  ENSG00000272720_0 (sequence is synthesized)
caggcgtgagccaccgagcctggcctaaaacttctttcaatggcactgacctttctgtgttgtcactcagtcataataaaatcccaggtacaatcagaatgctgcattctccagccataa

SEQ ID NO: 863525 - DNA, 120 bp, Artificial Sequence
  ENSG00000272720_1 (sequence is synthesized)
gctgcattctccagccataaagatcgctccctcttttcaaacatccctgtccctcaaggcctagctcaagacggtcaccttaagaaaagctccctttgtcgagcagtgactccataccag

SEQ ID NO: 863526 - DNA, 120 bp, Artificial Sequence
  ENSG00000272720_2 (sequence is synthesized)
gccctgctttaaacgctttatctgcattatcttacttgattctcgcaatagccctgggtggtaggtgcaattattatctccagtttataaaagaagatactgagggtcagagaagttaag

SEQ ID NO: 863527 - DNA, 120 bp, Artificial Sequence
  ENSG00000272720_3 (sequence is synthesized)
catgactaaaaacctcacgtcaaactcaggcagcaataacgggaaggcttggtgcctcccatcactggagcaactagtctagctggtcactaagtggacagcccctctgtttccctgcag

SEQ ID NO: 863528 - DNA, 120 bp, Artificial Sequence
  ENSG00000272720_4 (sequence is synthesized)
taactaattagcagaatagcacaaagataaaacccgaaggcctttgtgcagaagtttcagagacataagcaaagtgagagcattaggttctgcatatctttcttgttgttgttgttgaga

SEQ ID NO: 863529 - DNA, 74 bp, Artificial Sequence
  ENSG00000272720_5 (sequence is synthesized)
aggccaggctggtctcaaagtcctcaactcgtgatccacccgccttagcctcacaaagtgctgggattacaggt

SEQ ID NO: 863530 - DNA, 120 bp, Artificial Sequence
  ENSG00000272720_6 (sequence is synthesized)
ttacaggtgtgagccactgcacccagtcacatgtcgtattttaaaagggatttaaaagtatcattggattgtttgtaacacgaaggataaatgcttgaggggatggatacccattctcca

SEQ ID NO: 863531 - DNA, 120 bp, Artificial Sequence
  ENSG00000272720_7 (sequence is synthesized)
attctccagcatgtcatgattacacattgcatgcctgtatcaaaacacctcatgtaccccataaatatatacacctactatgtaccacaaaaattaaaataaatggtgggtgagaagaaa

SEQ ID NO: 863532 - DNA, 120 bp, Artificial Sequence
  ENSG00000260835_0 (sequence is synthesized)
cctgaatgtcgctggctgccgttcacagcaggctctctctgagcaccgtggggaggcagtgacacccgctggcctcgcagcgacactccggcagctgtcctgttttccagcctggacgtg

SEQ ID NO: 863533 - DNA, 120 bp, Artificial Sequence
  ENSG00000260835_1 (sequence is synthesized)
atagcaaagataaagaacctgtaaagaaccacccatctagggatacatttccagccccccttttatcaaagcggtgacatgtgaccgaattctgcccagtgacatgtgggaagaagtggc

SEQ ID NO: 863534 - DNA, 120 bp, Artificial Sequence
  ENSG00000260835_2 (sequence is synthesized)
tgctacatgttaaaaacggagttgtcatcttctacctgggtcgctgaatgactgtgtggatcaggaagctccccactcttccctgccatgactgaactagccactgtcatctggagggtg

SEQ ID NO: 863535 - DNA, 120 bp, Artificial Sequence
  ENSG00000260835_3 (sequence is synthesized)
tctgtaatagcatctagcattgcctaacatcatactaatggaacactacatattttcatctgaagtgatatcagtggaatttccactgaaagcaaaggtttagattttggagcaataatg

SEQ ID NO: 863536 - DNA, 73 bp, Artificial Sequence
  ENSG00000260834_0 (sequence is synthesized)
ccaggccgagctgtatcacctcccctcacacctggtccggcttacagtttcggcccgtgactagccctccccc

SEQ ID NO: 863537 - DNA, 120 bp, Artificial Sequence
  ENSG00000260834_1 (sequence is synthesized)
acctcccctcacacctggtccggcttacagtttcggcccgtgactagccctcccccacctgcccagcaatttacttttaaaacggtggctggcgccaaaggcatagtcaaggttaatgct

SEQ ID NO: 863538 - DNA, 87 bp, Artificial Sequence
  ENSG00000260834_2 (sequence is synthesized)
aaaaatccagcccagttcataacttgtttggtagcaacgtcaaaaggccgtcttattcttaaaatacattttattacccaatctgct

SEQ ID NO: 863539 - DNA, 83 bp, Artificial Sequence
  ENSG00000260834_3 (sequence is synthesized)
gatttaattaacctcgccttcaaggtgtagaataatagaaaaaagttgcaattccttaccttgagaacttccaaacgcctgaa

SEQ ID NO: 863540 - DNA, 120 bp, Artificial Sequence
  ENSG00000260834_4 (sequence is synthesized)
accatcacgaacgccgagctttgggtaactctcacagtgaaaggcccatccatctggcagagaaagggatgctcaggacacagaacaaccatgttaccttaacaagacttccgtgagcac

SEQ ID NO: 863541 - DNA, 120 bp, Artificial Sequence
  ENSG00000260834_5 (sequence is synthesized)
caactttggatgcggtctactctctacagaggtctctggcaacctcacaacctgcagttccttgccctcatgcagcacttcctgagaggcagagacgtggactaggagaaacctgagaga

SEQ ID NO: 863542 - DNA, 120 bp, Artificial Sequence
  ENSG00000260834_6 (sequence is synthesized)
ctggagtgcagtggcacaaacacagctcagtgtaatcttgaactcctgggctcaagagatcttcctgccttagcctccggagtagccaggactacaggtatgcaccaccacatccagctg

SEQ ID NO: 863543 - DNA, 120 bp, Artificial Sequence
  ENSG00000260834_7 (sequence is synthesized)
ggtatgcaccaccacatccagctgagaatatgcagtcctgctaggatgtaatgaaaatggtactttatcttggtggtattcctccaaaaaacatacaactccaggttaaccatgagaaaa

SEQ ID NO: 863544 - DNA, 120 bp, Artificial Sequence
  ENSG00000260834_8 (sequence is synthesized)
tcaacattagaagctctaatgggttctgccctggtgatggcccttccccagtctggacaacacacttcaagagtaaaactttgctgtaaataaatgaatcaacaaacaaatgaataacaa

SEQ ID NO: 863545 - DNA, 120 bp, Artificial Sequence
  ENSG00000260832_0 (sequence is synthesized)
gccatcctccttgaaatgcagtttgcatgttttttctaggatccttgcttttctgcagaacaagaggctatccatttcaaagatgaactttgaaaatgctgaattctagaatgattggca

SEQ ID NO: 863546 - DNA, 120 bp, Artificial Sequence
  ENSG00000260832_1 (sequence is synthesized)
gttggctctctgacttctagacgcaacagattggggttggaacacagataaaggagatttaaaaaatattctaaagttcattgtggcgacggttgcacaattctgtgaatagactgaaaa

SEQ ID NO: 863547 - DNA, 120 bp, Artificial Sequence
  ENSG00000260832_2 (sequence is synthesized)
ccatggagtgctacactttaaaagagtgaatagtatggacggaagtgcagcaggtactgttcttgtgtgctcacatccttgtgcgtcaccagaggctttctggaaacccctgtatctctg

SEQ ID NO: 863548 - DNA, 120 bp, Artificial Sequence
  ENSG00000260832_3 (sequence is synthesized)
tacctgagggctttctctagccaccagaacatgctcagccccttcccttccacagggtgaactggaagttccgggaagtcgacttccctgaaagcagctctgaactaattacaaacagga

SEQ ID NO: 863549 - DNA, 120 bp, Artificial Sequence
  ENSG00000260832_4 (sequence is synthesized)
gtcggaagagcaatacccagcttcctcactgattgtgtggtacaactcaaaggtgtgttctacactgtccccagacgtgccaaggggggtggcatcccaggtgcccacagagacaatcta

SEQ ID NO: 863550 - DNA, 120 bp, Artificial Sequence
  ENSG00000260832_5 (sequence is synthesized)
ccattcagtgcatcctggtgttgccttccttgccttccccagctgactttcttcattccctacagtgcttcttggcattacctcccaaataaactatctgagcccataaatgtctgagtc

SEQ ID NO: 863551 - DNA, 120 bp, Artificial Sequence
  ENSG00000260832_6 (sequence is synthesized)
taggtctattggaaggaagaaataaaatattacatgcagagcatttcagcactatgtctggccacttaataattgttacctactatcatcattattattgtcgttgttattactaaaaac

SEQ ID NO: 863552 - DNA, 120 bp, Artificial Sequence
  ENSG00000260832_7 (sequence is synthesized)
aaataattgactggaattgtttatcagatctcggcccatctggaagcctgtcttggctttcctacatatgtgagacatgccaagctggtattgtgcttattatttcaccactgagcaccc

SEQ ID NO: 863553 - DNA, 120 bp, Artificial Sequence
  ENSG00000260832_8 (sequence is synthesized)
agttcattattttccatccaattgactccaggttttcaaagactttatctagcaaactgcacagattaagtaataatttattttctcacccatgttttattaatcaaaggcacatataac

SEQ ID NO: 863554 - DNA, 120 bp, Artificial Sequence
  ENSG00000260832_9 (sequence is synthesized)
tgccaaccagagctgctgatcagaattaaattactaagttcaccatgcagagctaatatcatttcagtcaaaagcaaaacatcttgatgtttttgtttgtgaagctttatcatttgtaaa

SEQ ID NO: 863555 - DNA, 120 bp, Artificial Sequence
  ENSG00000260832_10 (sequence is synthesized)
agtaagattatattagattttctgaaatatttaaaatagcttgcagaccttcattgccaccatcagggtctcctaagagctagaaaccccatgttggtcactggtgatctaataaaccaa

SEQ ID NO: 863556 - DNA, 120 bp, Artificial Sequence
  ENSG00000260832_11 (sequence is synthesized)
aattcattaagaagtgtatctgtttttgctataaaaattggagcaataaaacctttatggccatatttggcaataacctttctgtatatgatgagaaaataaaggataaatggatattta

SEQ ID NO: 863557 - DNA, 120 bp, Artificial Sequence
  ENSG00000260830_0 (sequence is synthesized)
gcggcggtttccaggacctcagactttttgccgaggcggcagtccctagacgaagcgaaggaggcggcgcctgccccgcccacaagagctgccgcgcgcgggtgttatagctccacccca

SEQ ID NO: 863558 - DNA, 120 bp, Artificial Sequence
  ENSG00000260830_1 (sequence is synthesized)
tctgcaaaggaagggggagcggaaagagcgggatctagcgtgggataaaagtgggactactacagtgtaactgggcatgcgcccctcctagaaatgatgggaatgcaaaagcccttgact

SEQ ID NO: 863559 - DNA, 120 bp, Artificial Sequence
  ENSG00000260830_2 (sequence is synthesized)
aggatgctgggtcaagcgctccgccgggacagaggactcataccagggaaatggagcccagcctcgtgataaactacgacccaagctgggggaggaacctagttttcgaaaggaaaataa

SEQ ID NO: 863560 - DNA, 120 bp, Artificial Sequence
  ENSG00000260830_3 (sequence is synthesized)
tatgcgcaagctttaactgagcagtgggatggtgtaagtcagaggaaacagatgacttgaggggctctacaaacttttagttccttcccacaaccccaccccctgagcccaagtcgcggc

SEQ ID NO: 863561 - DNA, 120 bp, Artificial Sequence
  ENSG00000260830_4 (sequence is synthesized)
agcatccttccagtcggccagtccccttgctgcagttcatgaaaactggcactattctatggcttcccccaaataaccgttacttcagttaattagaaacaaaacataaatggttcctga

SEQ ID NO: 863562 - DNA, 120 bp, Artificial Sequence
  ENSG00000229502_0 (sequence is synthesized)
ccagccacatccagaaggaggaagtgagacgtacctggtgattgttgctggcagccgacgaactggcctgagctgtgctggctgagagagaatcaaggaaggcttggtcagccactgaat

SEQ ID NO: 863563 - DNA, 120 bp, Artificial Sequence
  ENSG00000229502_1 (sequence is synthesized)
ttccacaagaaaattgatcttttccatcactgggtaaaatctgaataggagaaagagccgcaattattttcatagattacggtcacttcagggagtcttcgagggcaagcaagaattgtc

SEQ ID NO: 863564 - DNA, 120 bp, Artificial Sequence
  ENSG00000229502_2 (sequence is synthesized)
tattcttcaatgctacaaatttctcttgtgattccattgtggtctcagggcagacactgtatgatttctttcaaacatgttgagatttttctcaatcttgtcaatttgtgggctcctgga

SEQ ID NO: 863565 - DNA, 120 bp, Artificial Sequence
  ENSG00000229502_3 (sequence is synthesized)
tgcaaagtgcatacaagtaaaacaagacttcaacataagacctacggagtgaggccaggggcctgtgaatagggggttgcagttgtatggaaaaggctgtggtgtgtgcatgggcacacg

SEQ ID NO: 863566 - DNA, 120 bp, Artificial Sequence
  ENSG00000229502_4 (sequence is synthesized)
tttctgagggaaagcctagagattgcatcggattctctgaggggtcatgactccccaccctcactgtctatcaacaacagaaggacggccttagatctcactctgcagacaggtcccagg

SEQ ID NO: 863567 - DNA, 120 bp, Artificial Sequence
  ENSG00000229502_5 (sequence is synthesized)
gaaaatgatgtaacctaaaaacaagaaaaatcaaacttcaataataagtgatcaaagattgaaaacagctgatgattagatgaccctcatcttgtctgtgtactggtctgcggcagataa

SEQ ID NO: 863568 - DNA, 120 bp, Artificial Sequence
  ENSG00000229502_6 (sequence is synthesized)
taaaagtggcttgcagctctgaatgtgaagcggtgggatgcgcatcccaggcctggaatctgccctctgccacctcgctggtcaacagaatcaagtggaaatcctccagggaatccagaa

SEQ ID NO: 863569 - DNA, 120 bp, Artificial Sequence
  ENSG00000229502_7 (sequence is synthesized)
ccttgcctcaagggcttctgcacacttcagctgactcttctggcacccaagtcgctatacgaattaatgtgggttgctagatgatgacagagacccagtctccctgttgccccattcaaa

SEQ ID NO: 863570 - DNA, 120 bp, Artificial Sequence
  ENSG00000261129_0 (sequence is synthesized)
ggagaggatatctggggaaggcctctttgaggaggtgagttgtgaagggacaagaaagagacagccatatggacactggagttaagactatcagtcacagtagcgactctggttttctca

SEQ ID NO: 863571 - DNA, 120 bp, Artificial Sequence
  ENSG00000261129_1 (sequence is synthesized)
agttcatattgttgtactgtaagagcagaggcattctaactttccagcagcttccaagtggaagagtttttattgccttggtggctttccttaacaattgaacagaaccacaagggagaa

SEQ ID NO: 863572 - DNA, 120 bp, Artificial Sequence
  ENSG00000261129_2 (sequence is synthesized)
agacctttttttcagggaagctggggtaggtagagttggcctctgacctaagattttgtccagtgacttttctgttggaacggaatgtctaagaaaacccaaggaagaagtgaagtctct

SEQ ID NO: 863573 - DNA, 120 bp, Artificial Sequence
  ENSG00000261129_3 (sequence is synthesized)
aagaaatgtcaggcagaaatcacccgggggcaaaatccacctgaaaatgttgattagcctctccctttccctctttcatccacatccttatctctatatactcacatggtagaaggtcag

SEQ ID NO: 863574 - DNA, 120 bp, Artificial Sequence
  ENSG00000261129_4 (sequence is synthesized)
attgttttccttaagaagaattttctcatgtaaaatattaatgcaatctgaattgcataattttaccatattctattatctgaaattagttataataattcaatgctttcaccccatacc

SEQ ID NO: 863575 - DNA, 120 bp, Artificial Sequence
  ENSG00000261129_5 (sequence is synthesized)
acataaatacaaagcattttttcttagtgggtggaatggtgaaccccaaaatgatatgttcatgtcctcacccacaaaaactgtaaatgtgatgttatttggaaagggagtctttgcaga

SEQ ID NO: 863576 - DNA, 120 bp, Artificial Sequence
  ENSG00000261129_6 (sequence is synthesized)
tgttactaagttaaggatcacaagagcatactgatttagggtgggccctaaatccaatgacaagtccttctaagagaagagcaggggaaacaggcacagctatagtcacagaggggagaa

SEQ ID NO: 863577 - DNA, 120 bp, Artificial Sequence
  ENSG00000261129_7 (sequence is synthesized)
aggcatgtgacgatgcaggcagagattaaataaggctgccacaagccaaggaactccaggagcctccagaagttagaagaagcaagaaaagattctcctctagagcctttcaagggagca

SEQ ID NO: 863578 - DNA, 120 bp, Artificial Sequence
  ENSG00000261129_8 (sequence is synthesized)
ccatgttaataacaccttgattcagatttctagccttgagatttgtgggagaaaatatttccatgtttgaaaccatcaaatttgtggtaatttgttgtagcaactgaaggaaacaaatac

SEQ ID NO: 863579 - DNA, 120 bp, Artificial Sequence
  ENSG00000261129_9 (sequence is synthesized)
accatctgaagctgagcttttgaaggttggaaaattatacttgcctttatttcagtttatttttcttcagtgaaaaaagcaatcaacaggaatgaaatggcttaacaagagcacattgca

SEQ ID NO: 863580 - DNA, 120 bp, Artificial Sequence
  ENSG00000261129_10 (sequence is synthesized)
ggttgcacaaaggcatcactggcagttctaccactgctccatcaaagactgtgttcccagaccctgcaatttcccatcctgtgaaccacagcacagggtaatggaagaaaagctggacta

SEQ ID NO: 863581 - DNA, 120 bp, Artificial Sequence
  ENSG00000261129_11 (sequence is synthesized)
cgaatcataagctgaggtactgttgttcctgtttatagactctcagtcttgatttttctatcttgcctttgtgtacttcacagtggagggatcttaatatgatcaaaatagaataataaa

SEQ ID NO: 863582 - DNA, 120 bp, Artificial Sequence
  ENSG00000261129_12 (sequence is synthesized)
tcccatatagacatcactaaacctgaataatgaacaggaattccttactcctgatgtcactgggtgacgtccacatagcccacaacgttcaaggctctgatgagctcactctgatgagct

SEQ ID NO: 863583 - DNA, 120 bp, Artificial Sequence
  ENSG00000261129_13 (sequence is synthesized)
tccaagagtccaagtcctccactgttctttcttcctcacagaaaattgacatgaaaagtacaggtcaggcttggctaccttctgagggatcaaatatgcacagaagtgatagcctcatca

SEQ ID NO: 863584 - DNA, 120 bp, Artificial Sequence
  ENSG00000261129_14 (sequence is synthesized)
tagtgccaaactcagaattaaacaccattcttggccattaggtccatacactagtgtttttctgggattctctggaagacaccagaatatcctggtaccattcagtcctaccttatgggc

SEQ ID NO: 863585 - DNA, 120 bp, Artificial Sequence
  ENSG00000261129_15 (sequence is synthesized)
caagcctgaggatgtttcaaaagaaacccagagcagccaaggtggtggttttgtggaaggtcttagaagcctcactgccaaagcgaaaccagctgagtaaacttcacaagcagacccaca

SEQ ID NO: 863586 - DNA, 120 bp, Artificial Sequence
  ENSG00000261129_16 (sequence is synthesized)
ccactcagtaaggtgtcccactaagatattagccttgacaagagagccctggtgccatggaaacagggtaaacacagagtttgtcttccaggctttgtggaagatgctacaatcctcatc

SEQ ID NO: 863587 - DNA, 120 bp, Artificial Sequence
  ENSG00000261129_17 (sequence is synthesized)
ctgcctccagacccagaatgtacagaaaagtagactgaggaagaaaacataaaagaaaagagaacataggctaagactgacctaagtttagaaataaatgctttaacattgacctgaaaa

SEQ ID NO: 863588 - DNA, 120 bp, Artificial Sequence
  ENSG00000261129_18 (sequence is synthesized)
tttgttagggaagagttgatttcccttctccttgctgcctatcaaaattaaattaaaaataaaaaaagttttcccttcttctccttgctgcctatcaaaattaaatgaaaaaaaagtttt

SEQ ID NO: 863589 - DNA, 120 bp, Artificial Sequence
  ENSG00000261129_19 (sequence is synthesized)
gcattcatgatttatgtgagctatcatgctagctacatggcttaattatggccaagtatagtcaagtggacagaacacggaacttacacaggtctggattcaagcagccaacatggtcac

SEQ ID NO: 863590 - DNA, 120 bp, Artificial Sequence
  ENSG00000261129_20 (sequence is synthesized)
ttgaatggaccagttaagaagcctatgtgtctacctaagtctgttttctcacttgtaaaatataggtgcctagttagagaggataaggaaaccattcttaaaaccatatttagaggaatc

SEQ ID NO: 863591 - DNA, 120 bp, Artificial Sequence
  ENSG00000261129_21 (sequence is synthesized)
tcaaaatatcaaaagaacaataatttaatatactgaaatatattaataagttaccaggttttaacaactttgaagtccatctcaacccagcaatgcaaacccctgtattggaagcacatt

SEQ ID NO: 863592 - DNA, 120 bp, Artificial Sequence
  ENSG00000261129_22 (sequence is synthesized)
cctatggaagcttgtacatactacatattactgtgctctcatacacactagaaatgtgtccattattatggaaaagttttgcatggtaatagcttaaagtaggactttcttaattttaaa

SEQ ID NO: 863593 - DNA, 120 bp, Artificial Sequence
  ENSG00000261129_23 (sequence is synthesized)
gtataaagatacagtggaaatcggtaacattgactcagcaaaacaagccaacgaaaaaatacaaaacacagagaatgagaatctgaaagactctaacaacaataattcttcttaggccaa

SEQ ID NO: 863594 - DNA, 120 bp, Artificial Sequence
  ENSG00000261129_24 (sequence is synthesized)
tatgaaaatattaggttgtaaaagaaataggaaagaataaaatcaaaataacattaaatatggacaattccaagtgaagaataaagtatataaaaatcaaggaataaatccatgtataca

SEQ ID NO: 863595 - DNA, 90 bp, Artificial Sequence
  ENSG00000261122_0 (sequence is synthesized)
tccagtgggtccctgcacagatgggacacagctgagggatcgcaggctgtgggcattccttggcccagtggctgattgaaggccatctgg

SEQ ID NO: 863596 - DNA, 120 bp, Artificial Sequence
  ENSG00000261122_1 (sequence is synthesized)
atcctgagattgaaggccatctggacatttatgtgtaggtcacaggggttacaatggctgagctttggctcagagacctgacaaagcccagaagctaaacagggtttggcctgcctgggg

SEQ ID NO: 863597 - DNA, 120 bp, Artificial Sequence
  ENSG00000261122_2 (sequence is synthesized)
cacccctgctgtggaagaaaacctacctataggggtactccctggcagcccatgaagccatagtagcctgaaagtgctcaagcccagaaaacaatagttacttctgtgagatgaatggaa

SEQ ID NO: 863598 - DNA, 120 bp, Artificial Sequence
  ENSG00000261122_3 (sequence is synthesized)
actatgttccaatgggatccaaaatgtcccttcaaaaattctacaaaaagactgcttccaatctgcttaatcagaacaaaggtttaactccatgagatgcatccaaacattgcaaagcat

SEQ ID NO: 863599 - DNA, 120 bp, Artificial Sequence
  ENSG00000261122_4 (sequence is synthesized)
agatgggggaccgcctggagagactgggctggaggcttttggattgcctctccattcccactttcccctactagtcacaatgcttcccaactgcctcttgactctctagtaccctgtttc

SEQ ID NO: 863600 - DNA, 120 bp, Artificial Sequence
  ENSG00000261122_5 (sequence is synthesized)
ccacccacctgtgcccccccccccggtggcccgctacacccctccccccgtggaagtcagtctcggcattcccgggcatcatagcaacatgagggtgccccagcccggaagggcccagga

SEQ ID NO: 863601 - DNA, 120 bp, Artificial Sequence
  ENSG00000261122_6 (sequence is synthesized)
actatagccccaattagctccaaaatgtccattcatagattttacaaaaacagtgtttctaacatgctgaatgaaaacaaaggtttaactctgtgatatgaatccacacattggaaagtg

SEQ ID NO: 863602 - DNA, 120 bp, Artificial Sequence
  ENSG00000261122_7 (sequence is synthesized)
agcctgagggtgctccagcccggaagctaagcagggttgatcctggctgggacttggatgagggaccacttggggagatcggggctggaggcttttggcttcccgctcccttcccacttt

SEQ ID NO: 863603 - DNA, 120 bp, Artificial Sequence
  ENSG00000261122_8 (sequence is synthesized)
tccctgcttgttacaacatttcccgattctgtgacccccccgccacccgcttcccacatgactgcattcttgctccagcccaggacctccttttggggctccatttggccagcccctggg

SEQ ID NO: 863604 - DNA, 120 bp, Artificial Sequence
  ENSG00000261122_9 (sequence is synthesized)
caccatagcaaactcagggtgccccagccgggaagggcccaggacctcccagtgggtttccgtcccagcagcccgggcgccacagcagtctgacagcgccccatcccagaagctcacctg

SEQ ID NO: 863605 - DNA, 120 bp, Artificial Sequence
  ENSG00000261122_10 (sequence is synthesized)
tgaatcaaaacaaaggtttaattctgagataaatccacacatcacaaagcggtttcacagataccttgtttctagtttctatcgtggaatgtttggttttcttactatgggcctcaatgg

SEQ ID NO: 863606 - DNA, 120 bp, Artificial Sequence
  ENSG00000261122_11 (sequence is synthesized)
gctctgaaagttcccttagatattacaaaaagattgtttacaacctgctgaatcaaagcaatgttttaactctgtgagagaaatccaaatgtcacaaaacattgttagaggtagcttgct

SEQ ID NO: 863607 - DNA, 120 bp, Artificial Sequence
  ENSG00000261122_12 (sequence is synthesized)
tctagttttcatcactagataatcagtttcttaatataggcctcaatgagctcagaaatgtccctttgtagattctacaagaagacagtttccaacctgcttaatcagaacaaaggttta

SEQ ID NO: 863608 - DNA, 120 bp, Artificial Sequence
  ENSG00000261122_13 (sequence is synthesized)
cctctatgagatgaatccacacattgcagagaattttaacagatagcttgtttctggagtttactgcagaatatttggttttccactataggcttcaatgagctcaaaaatcgcccttcg

SEQ ID NO: 863609 - DNA, 80 bp, Artificial Sequence
  ENSG00000261122_14 (sequence is synthesized)
tagattttttaactctgcgagatgaatcaacatatcacaaagtattttcaaggatatcttctttctaggtttcattatga

SEQ ID NO: 863610 - DNA, 120 bp, Artificial Sequence
  ENSG00000261120_0 (sequence is synthesized)
gaaaaagaggggatcaaagactcccggtgatgtacgcccgaaggccaccaggtgacggattctgaccttatcacagagagagggtggattccggggcaatccgattcaagtccgagtcca

SEQ ID NO: 863611 - DNA, 120 bp, Artificial Sequence
  ENSG00000261120_1 (sequence is synthesized)
ctccgatttcccaatccctgtcttgcagcagaagctctcgggtcctggaagcgcggagcctctctggccttgagccccgagggcatggccctgtgatgtcacaaggtggcgtgacagccg

SEQ ID NO: 863612 - DNA, 120 bp, Artificial Sequence
  ENSG00000261120_2 (sequence is synthesized)
tccttcccgcggccagcgaccaccgcctcccgggaaggtggctgaccacagccgcaagccgctgcgcgcccggcaagccgaatggaaggacggcgcgggcaaacgaacgcccagtgaggt

SEQ ID NO: 863613 - DNA, 120 bp, Artificial Sequence
  ENSG00000261120_3 (sequence is synthesized)
ccagagaagagagggaccttccgagggtcttctagtcgatctcggacaggcttttgagtgccttttaagcattccaaaattttcaggagacaacagtaatttacaaaatagagtagaatt

SEQ ID NO: 863614 - DNA, 120 bp, Artificial Sequence
  ENSG00000261126_0 (sequence is synthesized)
ttctaatgtcacaacttccaaagctgtcggaaacctgcatttaagtgcacctgtcaaagtcctatggttgattataaaaccaccttttaaagaggaccaaaacaagacaattgtctgtgg

SEQ ID NO: 863615 - DNA, 120 bp, Artificial Sequence
  ENSG00000261126_1 (sequence is synthesized)
atgacaaaagtcttaggccagccactattaaagtcaaaattgataatgaaatttggttatttctgtggcatataacaatgttatgtaacaattttcactattaataacatacactaagtc

SEQ ID NO: 863616 - DNA, 120 bp, Artificial Sequence
  ENSG00000261126_2 (sequence is synthesized)
atatcagaattatagaactttcttataattttggaacacataccaataacatatttattcaaatacagcccaaagttagccaaacattatttcatatttgacaatgcttcctgtatgatt

SEQ ID NO: 863617 - DNA, 120 bp, Artificial Sequence
  ENSG00000261126_3 (sequence is synthesized)
tttataccaaataagccaaatctcacctttacattagtgtactattaatgctaaaccctaatcttaataaaaccttatagacaaatgtatttaatcttaatcagtttgaccataaggtaa

SEQ ID NO: 863618 - DNA, 120 bp, Artificial Sequence
  ENSG00000261126_4 (sequence is synthesized)
ggcttacaggcatgagccaccatgcccggcccctaaggtaagattcttataccttttataaccctttacaatttttttttgttaaagagtggattataagcaggattttgctttaagaaa

SEQ ID NO: 863619 - DNA, 120 bp, Artificial Sequence
  ENSG00000261126_5 (sequence is synthesized)
taagcaggattttgctttaagaaaaacctgttatgtttttattcctatgtttaatttacaggaaaactgaataatacccctttaactttagccaatgtccatacacagaatttcttttac

SEQ ID NO: 863620 - DNA, 120 bp, Artificial Sequence
  ENSG00000261126_6 (sequence is synthesized)
aattaattttttacaaaccttccacaacttgttcaaacctttagcttgatcctaacttaaaacaatactttaaccctttaatctaggcagaaacatccacattcccatgacttcttataa

SEQ ID NO: 863621 - DNA, 120 bp, Artificial Sequence
  ENSG00000261126_7 (sequence is synthesized)
tctttaccaaaagtatattctactttccttttcgccttgggtgtggaactatttcttgcgtagtctcaaatacagtgttagcttttagcaccttttgcttttggtgaaaatcttggtaag

SEQ ID NO: 863622 - DNA, 120 bp, Artificial Sequence
  ENSG00000261126_8 (sequence is synthesized)
tcagggatttttcattatgtgccaggtgtggggcctagcctgggacccaccagacagaagtgcagatgagggcagaccctcccgcatggctagggtgtggctctccacatgtccccaggc

SEQ ID NO: 863623 - DNA, 120 bp, Artificial Sequence
  ENSG00000261126_9 (sequence is synthesized)
cttagctagaatctaatgtccccaagctaggtaaattggacaattttcaaaagtcaaataagcagtttatgaccttaaagcattgagtaaacttcatatcctacctgcataatttagacc

SEQ ID NO: 863624 - DNA, 120 bp, Artificial Sequence
  ENSG00000261126_10 (sequence is synthesized)
aaatgtctttattttaccaataatctttaaaactttttatttcccaaagattacttcagtcacatgagctaaataaaagttattacactatttacttttctgacaaaatatttgatttaa

SEQ ID NO: 863625 - DNA, 120 bp, Artificial Sequence
  ENSG00000261126_11 (sequence is synthesized)
gctgttattgtaattaaaccaattaatcaaaactcttttatattacacacacaacacatataaatagaagacgaaggactcatcccctaagacaggaattgggccctaaacacgggccgc

SEQ ID NO: 863626 - DNA, 120 bp, Artificial Sequence
  ENSG00000261126_12 (sequence is synthesized)
cattgtgaaaaaagaaagcacaaccacatggttacaagttcaagctcccagggacctacaagacaagagggaaacctcatccagtttcgtttttttttcagggacctgtagcaacgttta

SEQ ID NO: 863627 - DNA, 120 bp, Artificial Sequence
  ENSG00000261126_13 (sequence is synthesized)
taactgaccagtttgctggggcatcttgaacagtgggcttataggagtcccgctctccgtggtggttcccacatccactcaggggtgtctgggttctcagggacacctgcttcttgctgg

SEQ ID NO: 863628 - DNA, 120 bp, Artificial Sequence
  ENSG00000261126_14 (sequence is synthesized)
gcaccgtggcctggacttaccacctggcctccagggttcaggccgtggacatctgccctgaagtagcctgtggggactgtcacgccacagttaatgtcctgggtccttggcatcaagtct

SEQ ID NO: 863629 - DNA, 120 bp, Artificial Sequence
  ENSG00000261126_15 (sequence is synthesized)
gtaaagctgtctttgctttctcaacagcactgtgtgggagttggctgggcctcggcgactgttgcctgtctctgtcgtcactaggatgttagcgggaaatggtggcgttctctccacgca

SEQ ID NO: 863630 - DNA, 120 bp, Artificial Sequence
  ENSG00000261126_16 (sequence is synthesized)
cgggaaatggtggcgttctctccacgcagttgctgctttgcctgtggatcatgtttttcttctccctattgatcagcacacatcacagatttgatttgagacggagtcttgctctgtcac

SEQ ID NO: 863631 - DNA, 81 bp, Artificial Sequence
  ENSG00000261126_17 (sequence is synthesized)
cctgcctcacccggctaacttttgtattttcactagagacagagtttcaccatcttggcccggctggtctcgaacccctga

SEQ ID NO: 863632 - DNA, 60 bp, Artificial Sequence
  ENSG00000261126_18 (sequence is synthesized)
ccaccgcacccggctaacttttgtattttcactagagacagagtttcaccatcttggccc

SEQ ID NO: 863633 - DNA, 120 bp, Artificial Sequence
  ENSG00000261126_19 (sequence is synthesized)
taaataatataaattacaaataatacattaataaattaataatacaatttttttaattttaatttttaacatgttaggcattgaggtaagtacagtggataaacacccatcacgcacaga

SEQ ID NO: 863634 - DNA, 120 bp, Artificial Sequence
  ENSG00000261126_20 (sequence is synthesized)
cagaaaaaaggaatgaggaaggcacgtttgccacacatctgctccctgctctgggagccctccctgttccttgtggtttaatcttctagaactctgatggcggcattactgtgagttttg

SEQ ID NO: 863635 - DNA, 120 bp, Artificial Sequence
  ENSG00000261126_21 (sequence is synthesized)
cttctccagaaggcttcttcttaaagctttctgagcactggtactcacaaaactctcccctggtgaaatgaaaacacacacaggcgggaagtgagccagttctcaacttgagtggcttct

SEQ ID NO: 863636 - DNA, 120 bp, Artificial Sequence
  ENSG00000261126_22 (sequence is synthesized)
ccccaatgcatgctttttaaaacttccagcgttttctaatcagatctgggcaatattgtggcatcacctcctgcatccgcctttaccctcctcatcctgttctttgtcctaaaaaaggct

SEQ ID NO: 863637 - DNA, 120 bp, Artificial Sequence
  ENSG00000261126_23 (sequence is synthesized)
gtgggaccagccggtctcagagcccaggtggagcctcagctcccctgcgacctgtgcttttccgagggtgccgcctggcagggcctgcgtcagggtcaccctggcaggaccagaggtcaa

SEQ ID NO: 863638 - DNA, 120 bp, Artificial Sequence
  ENSG00000261126_24 (sequence is synthesized)
aggtcaccctggccagaccagagcctcggaggtccctgggctgcagtgagggagatcagaggtcgtgggctggggccagccaagaagagttgggggcagcagggagcacagtctggccct

SEQ ID NO: 863639 - DNA, 120 bp, Artificial Sequence
  ENSG00000261126_25 (sequence is synthesized)
tgacattcccacctgcttgtctgctccacaggacagtggtcaggagggcccgggagtgagtgtgcagggtcctgggtgggctccacatgcatctcatggggcagcaggaccccgatgagg

SEQ ID NO: 863640 - DNA, 120 bp, Artificial Sequence
  ENSG00000261126_26 (sequence is synthesized)
gcacccacagggtgggagggtggagagctctgctaaccaagatggggaggcccgggtcagggccagctctgcctccgaggctatatccagcagccttcggccttgccatgtgagctcgtg

SEQ ID NO: 863641 - DNA, 120 bp, Artificial Sequence
  ENSG00000261126_27 (sequence is synthesized)
gaagcccatgcagtgtgtgcccctctggttgtatctggtgaggccttgtacagggatgagctcggacctgagtttcagtcagcagaaaaataagtttctggaggacttgattcttttcag

SEQ ID NO: 863642 - DNA, 120 bp, Artificial Sequence
  ENSG00000261126_28 (sequence is synthesized)
ggcattcagttctgtgtttcccctgtacccaagatgagatttctaatacagtgatgtgtttaaaattaaccatatctccagggcagcatccagctgtgagccttggtgaagaaggtcctg

SEQ ID NO: 863643 - DNA, 120 bp, Artificial Sequence
  ENSG00000261126_29 (sequence is synthesized)
gagacgggagtgaatggggtggggccatccttggacacacaggaggttcctgggccctggggatgtgtccgtgggtgctgaggagatgaggggtgcatgctgtctgggttcttttctctc

SEQ ID NO: 863644 - DNA, 120 bp, Artificial Sequence
  ENSG00000261126_30 (sequence is synthesized)
cgctccatctcttgcaaggtgaggaggggtctgctgttgattcctgtcctgcctgtggtgctgaagctcccctcaagctgggctttctcagcagggagagtttcttcattgcttgtagaa

SEQ ID NO: 863645 - DNA, 120 bp, Artificial Sequence
  ENSG00000261126_31 (sequence is synthesized)
gtttatgcttccctgctttagtctgggcaaattgctccccaaaggacatgagagctgaggctgtgtttttagagatagggagcagctacagggacttagcttcttaatgaattaattcac

SEQ ID NO: 863646 - DNA, 120 bp, Artificial Sequence
  ENSG00000261126_32 (sequence is synthesized)
aaatctcagcagctcctggcgataagatatgcagagctgatggcagggaggacacgaggtggctcaaagggaactaagctttgcgtgtgaatttagggtgaggctaagagccctccaggc

SEQ ID NO: 863647 - DNA, 120 bp, Artificial Sequence
  ENSG00000261126_33 (sequence is synthesized)
aggcagaggagggtgctggagggaggagaggccggtataggaccttcgccttgaagaaagcacccaggtaaggctgggcagtgttgggagagagctttagttgatctttttgtttttgga

SEQ ID NO: 863648 - DNA, 120 bp, Artificial Sequence
  ENSG00000261126_34 (sequence is synthesized)
tgttttctgatggtcctctatggctttggaaaatggagagaagacagagaggcgtaggcactgaaggctgcagctgtgattgaggatcacgacgcctgttggggctgctcacctgcctag

SEQ ID NO: 863649 - DNA, 120 bp, Artificial Sequence
  ENSG00000261126_35 (sequence is synthesized)
gcctgggtgaggaggtgctggggcctggctgcacacacgttcctgccccagaactcagttgggggctcggagcaggagaagctgcacacggtggatgaagacctgatcattgaagttcac

SEQ ID NO: 863650 - DNA, 120 bp, Artificial Sequence
  ENSG00000261126_36 (sequence is synthesized)
cagttatttttctcaagaatgtgaataacaatgggatttgcactcattatatttttagaatggcttcgcataattttcagttgggcgtggtggctcacgtctgaaatcccagcactgtgg

SEQ ID NO: 863651 - DNA, 120 bp, Artificial Sequence
  ENSG00000261126_37 (sequence is synthesized)
aaaaataaaaataaataaaaataaacaaattaattaattttaaaaaagaaatgacctatttggaaaccaaattttctttttggaaggcccccattttgtgttcagtgaaaaattagttgg

SEQ ID NO: 863652 - DNA, 120 bp, Artificial Sequence
  ENSG00000261126_38 (sequence is synthesized)
caagacatggacttctaatcaagttatttttgtagttgtgctcagaatatctgtggaatattagctgacgcagagtagatttttcacgttagatattggaataaagagagttgctcctta

SEQ ID NO: 863653 - DNA, 120 bp, Artificial Sequence
  ENSG00000261126_39 (sequence is synthesized)
tgcgactctgagtcatactgaattctttgtgtcacctccgacgcaaagattcgttttgctgtttatcagaagagaaaacacagattccataccttgtcagctcctatttagttcggcttc

SEQ ID NO: 863654 - DNA, 120 bp, Artificial Sequence
  ENSG00000261126_40 (sequence is synthesized)
cctcttaatgtcccagcccctgtgagctgtcaggttctaaattcagaattctctcaattctgtcaggttctgcactacgagtcagtgtcatccctccaagccctggctctctgccagtgc

SEQ ID NO: 863655 - DNA, 120 bp, Artificial Sequence
  ENSG00000261126_41 (sequence is synthesized)
agcagggctgtgagaatcaagacggcacagggaaggcatctgtcccagcatttgcacatgacaggtgcccacggtgcaggagtagaatctgtggaagcagcagtggctttagttgctgtg

SEQ ID NO: 863656 - DNA, 120 bp, Artificial Sequence
  ENSG00000261126_42 (sequence is synthesized)
ccctgccacctcctccccaaaaaggagaagtgtccaagggatagcagacccgtagcactgagcggcctgccgtgctgaccactggatccaggccacgtgctgcagacagcggctgtgggc

SEQ ID NO: 863657 - DNA, 120 bp, Artificial Sequence
  ENSG00000261126_43 (sequence is synthesized)
gagtgatgaggccactacccagaaagctgcatgtgcactgtgtgggcaagataacttcaggttacaaggctctggtacttgaccatgatgactccatgagaaaacagcagaacgccagct

SEQ ID NO: 863658 - DNA, 120 bp, Artificial Sequence
  ENSG00000261126_44 (sequence is synthesized)
ggccgtgcctggcctgtgtgtgttgaacgcgttcctgccgtgcgggagccacctacccagcggagcctcagagtctgagttctcaatgagtcaacattttgggtgtgtatgccaagaggt

SEQ ID NO: 863659 - DNA, 120 bp, Artificial Sequence
  ENSG00000261126_45 (sequence is synthesized)
gacacgaaacagaagttgggatcactgtggttaacctgagcatgttggagaccaaggagaggctgatgttaatgttggatttttgtgaaaatgattcctttcaaagaaagacctgtgaca

SEQ ID NO: 863660 - DNA, 120 bp, Artificial Sequence
  ENSG00000261126_46 (sequence is synthesized)
gttggtaattgcagctaatgtgtttccacaaacagccattttgtgttggcaatcacaccgtccaccatcagggttgctgacaggagcagtgttcaggagtctcagacagtggattgtgct

SEQ ID NO: 863661 - DNA, 120 bp, Artificial Sequence
  ENSG00000261126_47 (sequence is synthesized)
gcttcaggcgcctggtggctggagggtttgcaggctgccaggggcctcagctgaagacctggacccacaggacccacagaggcaaattgttcagttgactgtacagtgtgagaatgaaac

SEQ ID NO: 863662 - DNA, 120 bp, Artificial Sequence
  ENSG00000261126_48 (sequence is synthesized)
attaattccccttctctacctcatatgagaaatgtgaattgtcttttttaaatttgggaatctgggttatagtatgtgtgagtcaattttttcaacaatgactttttttttggctcaaaa

SEQ ID NO: 863663 - DNA, 120 bp, Artificial Sequence
  ENSG00000261126_49 (sequence is synthesized)
tggccgagtcccaccactttgctcagctatgaacacctgacatctcgtttcattttcatgcaaaatctggagataattattatccacaattctaaggccttaggcccctccgcatgagcc

SEQ ID NO: 863664 - DNA, 90 bp, Artificial Sequence
  ENSG00000238284_0 (sequence is synthesized)
taaatttcagaagtttgatcttaacagatgaggagactgaagcccacagagatctgatagaaaacagctggatgtgctaacagagcatca

SEQ ID NO: 863665 - DNA, 120 bp, Artificial Sequence
  ENSG00000238284_1 (sequence is synthesized)
gatctgatagaaaacagctggatgtgctaacagagcatcagacttggaatcaggtggatcctagattggctacttcctaacctcagaaaagtgacataatgtctatggtgaagtcatcca

SEQ ID NO: 863666 - DNA, 120 bp, Artificial Sequence
  ENSG00000238284_2 (sequence is synthesized)
tctgaaacacaatgcagtgaaatccactttaaattttgattgtgaaagctttactgaggtttatttgatacacaatgatcgtatcattatggctacaagaaaagtaatcaacaaagtata

SEQ ID NO: 863667 - DNA, 120 bp, Artificial Sequence
  ENSG00000238284_3 (sequence is synthesized)
cccatccttccttgttcttggaactgctaatcaactataggttagtttgcattttctggaattttatattaatagaatcatatagtgtggactctctttggagtttagtttccttcactt

SEQ ID NO: 863668 - DNA, 120 bp, Artificial Sequence
  ENSG00000238284_4 (sequence is synthesized)
ggcataattattttgagattcacccttgttgtggcatgtatcaatagtttattcttatttattgctgactagtatttcattgtatgggcataccacagtatgtttattccttcagctcgt

SEQ ID NO: 863669 - DNA, 120 bp, Artificial Sequence
  ENSG00000238284_5 (sequence is synthesized)
ggtggatatttatattgtttccagctttttgcctattgtttttaaaagctgctataaaaattgtattcatgtctttgcatgaacatatgcttttatttatcttgagtaaatgcctaggag

SEQ ID NO: 863670 - DNA, 120 bp, Artificial Sequence
  ENSG00000238284_6 (sequence is synthesized)
tagagtggctgtatcataaggtagatgtatatttaactgtttacgaaacttgctgaccattttccaatgtggttgtatactttacattcccaccagcaatgtatgggagtctattcctcc

SEQ ID NO: 863671 - DNA, 120 bp, Artificial Sequence
  ENSG00000238284_7 (sequence is synthesized)
acattcacaccaatgctcgatatggtcagtctttaattttagccattctaaaatgtttgtagagtatctcattgtgtttttaattttaattaaatttctgaaataacaaattatattgag

SEQ ID NO: 863672 - DNA, 89 bp, Artificial Sequence
  ENSG00000261124_0 (sequence is synthesized)
tacgttctacttgcagccctgtggattactatgagacctcagtgaaatgagtgttgtttataagactatttccgcccggctgggcggca

SEQ ID NO: 863673 - DNA, 120 bp, Artificial Sequence
  ENSG00000261124_1 (sequence is synthesized)
tacaggcgtgagccaccgtgcctgcccaaccaatacttaagaaccaaacacacatccttaggtctccacgagctctcaggagaggagcattttaagtgttcactacacctctttttcaga

SEQ ID NO: 863674 - DNA, 120 bp, Artificial Sequence
  ENSG00000261124_2 (sequence is synthesized)
gagattaaggtccccacaaaggaaaaactgtacacaaggacacacagctggtcaaggagccagactcgaacccaagtctccattctctcccccaggttgaatcatgagacttcccactgc

SEQ ID NO: 863675 - DNA, 120 bp, Artificial Sequence
  ENSG00000261124_3 (sequence is synthesized)
ttgaatcatgagacttcccactgctcccaggaaaaagaccaatatcttttccatggccagcatagccccaaaccatctaaatcctgcctacctgggcagatcacttgaggccaggagttt

SEQ ID NO: 863676 - DNA, 120 bp, Artificial Sequence
  ENSG00000280273_0 (sequence is synthesized)
cttgtcgatggcgtcgatgtttgaatggaggagccacagctcctccgtattgtcctgccgggaggacaggatcaagtggtggcccgtcaggcacagggtgccctcgacagccgggtagaa

SEQ ID NO: 863677 - DNA, 120 bp, Artificial Sequence
  ENSG00000280273_1 (sequence is synthesized)
aggccggtgcagcaccacattgtccacccgcggggtcttaatcagctccgcaaactccatgctcccccgcggccggagccagggaaccgagcccggtaggtgcgaggcggttaccccgcc

SEQ ID NO: 863678 - DNA, 80 bp, Artificial Sequence
  ENSG00000280273_2 (sequence is synthesized)
ggttaccccgccgcagggaagtagcggaaacacccggcgcggggctggcccgtggggcggggcgggccgggcggtgaggc

SEQ ID NO: 863679 - DNA, 120 bp, Artificial Sequence
  ENSG00000280273_3 (sequence is synthesized)
ggccgcggggagacaggggctggggctggacgaggcccaagcgcctctcccgcaccgcgcggttcaccaggcctaggactcggccacagagaacccctctccacaggcccaaggaccgcc

SEQ ID NO: 863680 - DNA, 120 bp, Artificial Sequence
  ENSG00000280273_4 (sequence is synthesized)
gctgccgttgggctccgggtcccgcgttggcaagcggagggcagtaggagaaagccgcctcagaatccgcttccacgccctggccgctagggactcctagcggaagtggctactcgctgc

SEQ ID NO: 863681 - DNA, 120 bp, Artificial Sequence
  ENSG00000280273_5 (sequence is synthesized)
tggagcccacaacaactccgggcggaagcagcaggtctcgaaactcggaagacgcggaagtcgcagccggaagttggtcctcgctaggtcctctggaaatgcctccggaaacacagccag

SEQ ID NO: 863682 - DNA, 120 bp, Artificial Sequence
  ENSG00000280273_6 (sequence is synthesized)
aaaagcttgtctttgccttcacgccctcccgctgcctttcttaaccacctacaaatattccttatcagaagaggtccgggaagagggaggaggtccctgtcttgccttcctccgcttgag

SEQ ID NO: 863683 - DNA, 120 bp, Artificial Sequence
  ENSG00000280273_7 (sequence is synthesized)
tagtatcccctccagaagctcttcagagcgtggggctgctgtaaattgtgataattgttatgcattagccctgaagacatggcaagtaggggatggaggcggtgactgtgaccttacgga

SEQ ID NO: 863684 - DNA, 120 bp, Artificial Sequence
  ENSG00000280273_8 (sequence is synthesized)
atcctccaggggtcagggagggacacagggccactccacaggctctccgagagcgccgcgccacgaggtgtaacctggagcaagaaagaggaaaaacaggaatacctgtgagaggaaccc

SEQ ID NO: 863685 - DNA, 120 bp, Artificial Sequence
  ENSG00000280273_9 (sequence is synthesized)
aagtacatgcagtgcacagaagagcaagtcacttgacttgctggcggccaccccgttaatctgcagcagagcctggacttcagtctgcatctgtgaaacccagcgcatgggtgcgttggt

SEQ ID NO: 863686 - DNA, 120 bp, Artificial Sequence
  ENSG00000280273_10 (sequence is synthesized)
caccaccgcacagcctccccgtcagacacccacgtttcgccaaaaatttattcaaataattactcctttgcttgttcctttcccaccgcccacttctgacatttttattcaaaagtagga

SEQ ID NO: 863687 - DNA, 120 bp, Artificial Sequence
  ENSG00000280273_11 (sequence is synthesized)
aatagaagagaaatatgtttgagtgctggtctgctgtgacttcattgaccttttaaatcctcaccatctagtacctaagcacagcgagttggacaaactctcacagtattcacaaagtaa

SEQ ID NO: 863688 - DNA, 120 bp, Artificial Sequence
  ENSG00000280273_12 (sequence is synthesized)
attgccacaacctcatcagctcatccaacacttgtccatgcttttgattttgtccttcttaaaatgtacccttcttaaaataaaccactttatagacttgttttaagtgagatacgtaaa

SEQ ID NO: 863689 - DNA, 88 bp, Artificial Sequence
  ENSG00000280279_0 (sequence is synthesized)
gcctctacagtccgaacgtctgcctcacagcagattctttacgcccagcatctacctcactgtggatcccccaagccaagctcccaac

SEQ ID NO: 863690 - DNA, 78 bp, Artificial Sequence
  ENSG00000280279_1 (sequence is synthesized)
cagcagcctagacaggcccaggtcttgtctcacactggcctctctacatccagcttatgcctcacggtggcctctcca

SEQ ID NO: 863691 - DNA, 120 bp, Artificial Sequence
  ENSG00000238755_0 (sequence is synthesized)
aacttgccccaggttacccacctcccagctgcaaaagaaaagggcttagttcttctcctgcctgtggagtctgcacactggatttgtgccctcctctgagttctggccaggaggcttctc

SEQ ID NO: 863692 - DNA, 120 bp, Artificial Sequence
  ENSG00000238755_1 (sequence is synthesized)
acccagttcaaattgttaccaagttatctggagatttccttctccctgtggtgttcacccctgccctctgattcctctgtccaccctctcgatggatcactgtgatgccatgcagaaatg

SEQ ID NO: 863693 - DNA, 120 bp, Artificial Sequence
  ENSG00000238755_2 (sequence is synthesized)
caaaagctagattcctgctgtgacttctcaaaaactgcttctcaaaatactcatgcaacagctgacacataaaaaatgtacatgaatgtctggatggcttcccagacctgtctggaagta

SEQ ID NO: 863694 - DNA, 120 bp, Artificial Sequence
  ENSG00000238755_3 (sequence is synthesized)
cacacccagttttcaggtgatggagatgtcttcaaaatgttggacttctagcaagagttctctgcctaaaactgtatgtgagattctgaaagaggtatattaaagtctcagcatgaaagc

SEQ ID NO: 863695 - DNA, 120 bp, Artificial Sequence
  ENSG00000238755_4 (sequence is synthesized)
ttgttgaataaaaaatattacatggatatcccagaattttctgtccatttactggtgataaaaattggagttgtttccaaataaagttgatatgaatatgtacgtacaagtgtttgaata

SEQ ID NO: 863696 - DNA, 120 bp, Artificial Sequence
  ENSG00000238755_5 (sequence is synthesized)
gacatatattttcatttatcttaggtaaatgtataggagtggagtggctagaacatataatagctacatgtttaactttttaagataccaacaaaccgttgctgaaagtggttctaccat

SEQ ID NO: 863697 - DNA, 120 bp, Artificial Sequence
  ENSG00000238755_6 (sequence is synthesized)
tttacattacctgtcagaattgtaaaagtttcagtctctccacatccttgttaacacttattatgataagcctttttcactttaagcactactgtgatgtccagtggtatatcattgtgg

SEQ ID NO: 863698 - DNA, 120 bp, Artificial Sequence
  ENSG00000238755_7 (sequence is synthesized)
tttcaattttacatttctttgatgaaaacaatttgaacacatttttatgttttaatatattatgcatatcttttatttttggaaatatatgttcaaattgtttgcccaaattgttatggg

SEQ ID NO: 863699 - DNA, 120 bp, Artificial Sequence
  ENSG00000238755_8 (sequence is synthesized)
gttgcctcgtttcttagcagtgaattttgacagtgttttaagtattctgaacatgaatcttttatcaaatatataatttgcaattattttctcttaatccgtagattttttttcatttcc

SEQ ID NO: 863700 - DNA, 64 bp, Artificial Sequence
  ENSG00000238755_9 (sequence is synthesized)
caattattttctcttaatccgtagattttttttcatttccatcagtgtctttcaaaaagcaaaa

SEQ ID NO: 863701 - DNA, 120 bp, Artificial Sequence
  ENSG00000238755_10 (sequence is synthesized)
gcctggtgacagagtgagactctgtctcccatgtgcatgagaagctgttatgtaatatccgtaactggtttgaaaatcacttgcccattcaattcagtttgtctttacaagcagttgctc

SEQ ID NO: 863702 - DNA, 120 bp, Artificial Sequence
  ENSG00000238755_11 (sequence is synthesized)
tcggagaggtagatcagtagccctttctcaaggaagggcctgtgctatgatttcagtgagctctgtctgaacatgatgtgatccagtggctacaggtttgaacaacagagtcttccccta

SEQ ID NO: 863703 - DNA, 120 bp, Artificial Sequence
  ENSG00000238755_12 (sequence is synthesized)
tctcctgcaataaagtacataacaaagagaagctgagttaaaattgttggggtttagcatatatgacaaaaaaaaaaaaagaaatcaatagaaatctattcataaggtaaagtttggggt

SEQ ID NO: 863704 - DNA, 120 bp, Artificial Sequence
  ENSG00000238755_13 (sequence is synthesized)
gaagacaggtggttggtgaatatatagaacagcaactactttgggcggtcttgatgccaggtcaatgccaaagtctacctattggtctgaataaatatttgcccatactcacaggcttgg

SEQ ID NO: 863705 - DNA, 120 bp, Artificial Sequence
  ENSG00000238755_14 (sequence is synthesized)
tcaggatttgtgtagaaagtgcacagcagaactgagcctatgcattcaaagtcctgagtacccctacaaaggaagaggacacaaatgaaaaatattccctcataccaaggattgtcctga

SEQ ID NO: 863706 - DNA, 120 bp, Artificial Sequence
  ENSG00000238755_15 (sequence is synthesized)
aatccaagaccatattttatgagaagacatacatcagagagagagagattacagtatgcaatctctcagctgccaacagaacacagatgggcttgggaacagagaatgatccagatctgc

SEQ ID NO: 863707 - DNA, 120 bp, Artificial Sequence
  ENSG00000238755_16 (sequence is synthesized)
aggactggagcaatccgtgggaagtttggacagaagatctgatgcataagacagtaaaggactattgaatgttccatgatagatatgcttgttcttttgcctgcatgcccttgaataaag

SEQ ID NO: 863708 - DNA, 120 bp, Artificial Sequence
  ENSG00000238755_17 (sequence is synthesized)
acattttgatctccaggaccaacctgagaaacatataatttaatctagttttgaaagaagagccctgctacacaaatactggctcacaatgttaagagatatcaactgaaatatcaaagg

SEQ ID NO: 863709 - DNA, 120 bp, Artificial Sequence
  ENSG00000238755_18 (sequence is synthesized)
gctttcatatttcattaaattgactatcctatgtgtttgatatttccatttaattgaatatttcttaactcaatgaaaaatgtatgagcctgctgtgataaattcggtgtcgcatatggg

SEQ ID NO: 863710 - DNA, 120 bp, Artificial Sequence
  ENSG00000238755_19 (sequence is synthesized)
aaaagcagagttgcatagatcaaggtatgtgagattctgaaagaggtatattaaagtctcagcatgaaagcataaaggccataatgaatgcatttcaagaatgtgatctctttcagcatg

SEQ ID NO: 863711 - DNA, 120 bp, Artificial Sequence
  ENSG00000238755_20 (sequence is synthesized)
tccacaccctgccttccacatgtcactacaggagaggaggatgaggaaactgaggcatggagcagtccacgtgaatgagtctcgtagtaagtgatggaactaggatgcaactctctggtg

SEQ ID NO: 863712 - DNA, 120 bp, Artificial Sequence
  ENSG00000286949_0 (sequence is synthesized)
ggcagtctgttgggctttccttccagtttgtggaagtttgttgttttgctgtttgcgataaatcctgctgatgctctttctgtgggtctatactacctttatgagctgttatactaactg

SEQ ID NO: 863713 - DNA, 120 bp, Artificial Sequence
  ENSG00000286949_1 (sequence is synthesized)
cgaaggtctgtggcttcacttctgaagccagcaagaccacgaatccaacgggaggaatgaacaactccagataagaactgtagtaacactcgccgtgagggtccgcagcttcattgttga

SEQ ID NO: 863714 - DNA, 120 bp, Artificial Sequence
  ENSG00000286949_2 (sequence is synthesized)
cactggaaggaaccaattctggacacagggggacttcgtgcacgcagcactccatgagaccatgagctttctcaccgggcaggaggagcccatccccagctacacgtctgggcccagcgc

SEQ ID NO: 863715 - DNA, 120 bp, Artificial Sequence
  ENSG00000286949_3 (sequence is synthesized)
tacacgtctgggcccagcgctctcggagctgctttggagaaacatgcttggcgttgtctatgccaatggccaggctcctgggactctacaggtttctccagctgcttcgtcctctcaaga

SEQ ID NO: 863716 - DNA, 120 bp, Artificial Sequence
  ENSG00000286949_4 (sequence is synthesized)
ttgatgccaacggagatttaattacagaatttgatgttgtctatggacagaagaccactgagggctgattccactttgtccacataggcatagtcaacccgtgagcccctctgggagaca

SEQ ID NO: 863717 - DNA, 120 bp, Artificial Sequence
  ENSG00000286949_5 (sequence is synthesized)
gaatgacagtgcatgtgacaaaggaggacctctaggtcagtttccagggtgcagaaatgatcccagttctggtgtattcgagtcagagggaagcacagaggccagcggtgtccctatttg

SEQ ID NO: 863718 - DNA, 120 bp, Artificial Sequence
  ENSG00000286949_6 (sequence is synthesized)
gtacatgaagttggtgcagctctaaattaggccagtcataactcagctatgctgtttagggatactgagcccttctctgagtgaggaaagacatttgctcaccacccaaaatgaaaatat

SEQ ID NO: 863719 - DNA, 120 bp, Artificial Sequence
  ENSG00000286949_7 (sequence is synthesized)
tagtgtcacacaagctgaatcagagtctccatcaggagttttttctgtagtatttttcagtgtgtcagtattccaggatctgcccagtgaatacactttgccaaacacatagttaatcta

SEQ ID NO: 863720 - DNA, 86 bp, Artificial Sequence
  ENSG00000286949_8 (sequence is synthesized)
tgcccagtgaatacactttgccaaacacatagttaatctataatctgtagaaacaatgcttatcactggtggaggctctcagctct

SEQ ID NO: 863721 - DNA, 120 bp, Artificial Sequence
  ENSG00000286948_0 (sequence is synthesized)
ggagcagccacagcagcccatgattctggtagattgagggtggatcaggtagaggagcaggcgtgactgcagagggagctgaaccgacatttctgaaagaagacgtacaaatgaccaaca

SEQ ID NO: 863722 - DNA, 120 bp, Artificial Sequence
  ENSG00000286948_1 (sequence is synthesized)
tgcagaggaagtgaagaaagggaactcgtatgctgttagtgggaagttgtacaaccactaaggaaaactgtatggagattcctcaaaaagctaaaaatagagctaacccagcaatcccac

SEQ ID NO: 863723 - DNA, 120 bp, Artificial Sequence
  ENSG00000286943_0 (sequence is synthesized)
caattatgtaattaatattcttatacacacctcctattcataagagtttctttaatgatatgctcctatcaagctgtggggaatacacagctttatgagatggtagcacattgttctcca

SEQ ID NO: 863724 - DNA, 120 bp, Artificial Sequence
  ENSG00000286943_1 (sequence is synthesized)
aagtagttaaaacaatttacagtcctacctgcagtgtatgagaagtcctatttctttaaatccttgcaattggcattataaaactaatttttgccagtctgattattgtaaaatggcact

SEQ ID NO: 863725 - DNA, 120 bp, Artificial Sequence
  ENSG00000286943_2 (sequence is synthesized)
gcattttcctgattatttatgaggctgaatatctttttctatatttattggcctttcaagttcctcttctgtatactaacatatttatctgttgtctatttttctactgggtttctcttt

SEQ ID NO: 863726 - DNA, 120 bp, Artificial Sequence
  ENSG00000286943_3 (sequence is synthesized)
cttcctattgttttgtaggagctcttgacacattctggatcccaatactttttggttatattacttgctaatatcttctcccagtctcagcttatcttttacctttgtttgtggtaactt

SEQ ID NO: 863727 - DNA, 120 bp, Artificial Sequence
  ENSG00000286943_4 (sequence is synthesized)
ttgttagatagatatttttaattaaatttcatagatattttcctttatggtttaaccacaaagctagcaagcatccactcatcccgtgggtctcagctaagctaccaccctctccagggt

SEQ ID NO: 863728 - DNA, 120 bp, Artificial Sequence
  ENSG00000286943_5 (sequence is synthesized)
gtgtttcctgtgtaaggctgagtcaggggcctgtcctctgaggtcatatttcgcaccctcgtgtttccctcattgactgcattagctagtcctgtctaactccatatccatctaagccca

SEQ ID NO: 863729 - DNA, 120 bp, Artificial Sequence
  ENSG00000286943_6 (sequence is synthesized)
gcctcctccctctctactggactatatgctccagagggcaggcagtgtctgagccacctctgtaccctccagcaaatagcacagagacacaccaggcctcggtaatgtttggtgagcacg

SEQ ID NO: 863730 - DNA, 120 bp, Artificial Sequence
  ENSG00000286943_7 (sequence is synthesized)
tgagtgaataagtaaaagaagaacatacggtatccaatgaggggactgagctttgaccagccatgttgtagccctcaaaaggtgaattgataaagagacctctgaaatcttctatgactt

SEQ ID NO: 863731 - DNA, 120 bp, Artificial Sequence
  ENSG00000286943_8 (sequence is synthesized)
tgtctcaccgttatatgtgaactatatattataatctctgggaccatgtgctggcctagaatggagggcctctcagccacaagatgaatatatttctaaggttaacctgtccctaagtaa

SEQ ID NO: 863732 - DNA, 120 bp, Artificial Sequence
  ENSG00000286943_9 (sequence is synthesized)
ctcaattctgaaaacatgagtgctaaatgaagtgaagcagaaccctgttaaaggagcagtctgctttaccacaaacttggccatcctgtgggttagagcctctactctatggtttataca

SEQ ID NO: 863733 - DNA, 120 bp, Artificial Sequence
  ENSG00000286943_10 (sequence is synthesized)
agtaatctctcttggtatgccacgaaagccaacataccaaagatgtatgttataatatcctgtatatacactggctaatggtgggtcacaaatatggctccaagctgcctataagccaat

SEQ ID NO: 863734 - DNA, 120 bp, Artificial Sequence
  ENSG00000286943_11 (sequence is synthesized)
acaaagaaagaaacatgattcattgcatgagtcacagcacctgtaagttaggaacgaaccagcttcttgggaaaaccattacaattgctggcattgaaacttaagaaatatctcttgtag

SEQ ID NO: 863735 - DNA, 120 bp, Artificial Sequence
  ENSG00000286943_12 (sequence is synthesized)
ggtcttgtgatgggaactcagtgtcacacaatgaattatgtacccacaaaattacatggcaaattcaaaaccagtttcataaggcaattttcttttcttttctttttttttttggtgaca

SEQ ID NO: 863736 - DNA, 120 bp, Artificial Sequence
  ENSG00000286943_13 (sequence is synthesized)
gggattacagccctgagccaccacgcctggcccataaggcaattttctttaattcatatcaaataggacaagggcaatataaaatttgtagcaaaagtttgtgtctgaatattgtttcaa

SEQ ID NO: 863737 - DNA, 120 bp, Artificial Sequence
  ENSG00000286943_14 (sequence is synthesized)
cccaataaatccttgtctgactctcctctccctccttcttcgtgaccagatttccagtccctagggactctggaggtgcaagagacaaaccacaacagccaggtgcgccacctcaagtct

SEQ ID NO: 863738 - DNA, 120 bp, Artificial Sequence
  ENSG00000286943_15 (sequence is synthesized)
ggctcaccccaatcacatctttgctggctgacctcaccttggagaacttcaggccactcacattaatggtgcacagatctgatggcttcctcacacagtggtgcttcagctggaacataa

SEQ ID NO: 863739 - DNA, 120 bp, Artificial Sequence
  ENSG00000286943_16 (sequence is synthesized)
ctcttaaggcccctacaaagtttaattaatctattaccactcagccttctcttgttgggcaatcatatacttgtcataatttgtttgcttgttcattcattcattcattcattcattcat

SEQ ID NO: 863740 - DNA, 120 bp, Artificial Sequence
  ENSG00000286943_17 (sequence is synthesized)
atttaccaaacactaaattgggccatacgctttgctgaatacattaacaaactttcttctaatcctaattaagccctttgattataaagtaagattatctcctctttttaatgagaaaaa

SEQ ID NO: 863741 - DNA, 120 bp, Artificial Sequence
  ENSG00000286943_18 (sequence is synthesized)
caaggttaagagaagttatgtgccttgccaaaggtcccacagttagtaagtgacagatcttactaatccaaatctgtaatcactagactctatgcacttttgactgccatatgtcacccg

SEQ ID NO: 863742 - DNA, 120 bp, Artificial Sequence
  ENSG00000286943_19 (sequence is synthesized)
acataatttaaaagttagaggtaaattttagctttggagcttccatttatgtttaatcaaacctcattctttttttgttaatcatttatttatggtacccaccatgtttaggcactgaaa

SEQ ID NO: 863743 - DNA, 120 bp, Artificial Sequence
  ENSG00000286943_20 (sequence is synthesized)
ggcattgggaagacaatgaagaaaaagcagagacattccataacctcatagagcttacagtgtcatgggaagccaagtagcaagatgttatattctgtatgtgatgaccacaattgctgc

SEQ ID NO: 863744 - DNA, 120 bp, Artificial Sequence
  ENSG00000286943_21 (sequence is synthesized)
agccatctcaggatcatgaaggcaatcagcccaagaggacaagataacatgtaaagtggcacagcacaaagacagaaggaacacaggccttgcaagacgtcattaagcctgtaaattaat

SEQ ID NO: 863745 - DNA, 120 bp, Artificial Sequence
  ENSG00000286943_22 (sequence is synthesized)
ctaccctaaacaatgcctctggcttatttttatgtgaaataaaagcatcctaattagtttacaacatatagaaagtttctgaattagtccaataagagatgatggtggcccagataaggg

SEQ ID NO: 863746 - DNA, 120 bp, Artificial Sequence
  ENSG00000286943_23 (sequence is synthesized)
tcatggcagtcgagatgagaagacagatttgacaactatcttgtaaaagtgccaggacttggtaaaagttggggtggggacagtgtgggagaggcaaatgtcaaggataacctcaggtac

SEQ ID NO: 863747 - DNA, 120 bp, Artificial Sequence
  ENSG00000286943_24 (sequence is synthesized)
tggcttggcaactgggtagatggtagtgccaacagagagagtaaagtagatactggaaaaagaggtctgttttgggatttggagtaggagcattggtgctgtaattcaactgtcaatgaa

SEQ ID NO: 863748 - DNA, 120 bp, Artificial Sequence
  ENSG00000286943_25 (sequence is synthesized)
acattcaagtggaactatccaataggcagagtggataccccatgattctgaaaaacatccttgttgctcctgtctcccacggtggcaagacgggtaacaagctgtatttattgaatatgg

SEQ ID NO: 863749 - DNA, 120 bp, Artificial Sequence
  ENSG00000286943_26 (sequence is synthesized)
gaatgtataagtatttggaaacaagggaagaaaaaaaggccactatgggaagtgtttctgcccctcctcagtataattatttcagtcctcctcattcccaatgagaagtggacctaataa

SEQ ID NO: 863750 - DNA, 120 bp, Artificial Sequence
  ENSG00000286943_27 (sequence is synthesized)
tgaaactgattccacaggactgcaaaaagcttatactacccacttgaggtgagatgaaaccaacaaagttctctttcaacatctgatttatgcaggcacccatctcttgggaaccatagc

SEQ ID NO: 863751 - DNA, 120 bp, Artificial Sequence
  ENSG00000286943_28 (sequence is synthesized)
agaatctggaaacaaagtaggcagccagggagttcttagggagctatgagaactcgactgcacattaatattgatttacaaaatgcatccttcttagcaaagccactgaggcattgcaca

SEQ ID NO: 863752 - DNA, 120 bp, Artificial Sequence
  ENSG00000286943_29 (sequence is synthesized)
gagcagatgtgaaactacctggctggtctccaacacagccaccccagtcctctttgtaaagcctgcccccggcactaagtaatatctggtcagctcccttggctttcagccagacactaa

SEQ ID NO: 863753 - DNA, 120 bp, Artificial Sequence
  ENSG00000286943_30 (sequence is synthesized)
agtcaaaggacaaaggctgtgggagagcaggacccagtcccactcaatcctgtagagatcaccccaaagagcacagcaggaatctctcaaccctactaggtgctggaatgcaattttcaa

SEQ ID NO: 863754 - DNA, 120 bp, Artificial Sequence
  ENSG00000286943_31 (sequence is synthesized)
ttgactgtttcccctgacctgctcctttgtctctccaactcagtaagagtttttacctcatataatgtaaaagtacaggctttggagtcagtagaccagagttctaatcctggatcagcc

SEQ ID NO: 863755 - DNA, 120 bp, Artificial Sequence
  ENSG00000286943_32 (sequence is synthesized)
atttactagctgtggaacctcagccaaggcaaactacttcttggagcctcagttttcccatctgcccaatggcaacaacacaaaagggacgacaatacctatctcactaggtagatgtca

SEQ ID NO: 863756 - DNA, 120 bp, Artificial Sequence
  ENSG00000286943_33 (sequence is synthesized)
agaaagctttacatgtcaagaaacttttgggtcccttcattatcctggctgtactcaatttgccaatatcactctaacagtttggagtagattgggggtagttgtgccagagcagggcaa

SEQ ID NO: 863757 - DNA, 120 bp, Artificial Sequence
  ENSG00000286943_34 (sequence is synthesized)
atccttccccacttcctccccaccctagctgatgtgctggccactccaggatgcatttactctcaccagaaaagcctggtccaggatatgtccaggaaggtccacctgattttcccgccg

SEQ ID NO: 863758 - DNA, 120 bp, Artificial Sequence
  ENSG00000286942_0 (sequence is synthesized)
acttccaggttctagacggctttctcccaatccatcagcctcctctgagcttcacttcttttctgatcccaccatcagttcatctaccctactctgccagcgttcctgagggggtgaaag

SEQ ID NO: 863759 - DNA, 120 bp, Artificial Sequence
  ENSG00000286942_1 (sequence is synthesized)
agttctggacactctccactgctgacatctattggtacatgatggaccaagccagctgggtgacccaacgtgggacctgtatctggagcaagtgacactaagacgcacaacaacaggggc

SEQ ID NO: 863760 - DNA, 120 bp, Artificial Sequence
  ENSG00000286942_2 (sequence is synthesized)
aggcgtgtccaggggcagcagcactgacagcagtatcctgcccagtctgtcttgggttccgccctttttctcagccagtttttcctgccttcctgttgatatttgagctactgagagcat

SEQ ID NO: 863761 - DNA, 120 bp, Artificial Sequence
  ENSG00000286942_3 (sequence is synthesized)
ttcaataagttctttttctgctgaagttggctggagtcatttgcaaccaagaaccttaactgatctatccactggcttgaaggttacacattctgtttgttctactagcagttatcttta

SEQ ID NO: 863762 - DNA, 120 bp, Artificial Sequence
  ENSG00000286942_4 (sequence is synthesized)
cagtttctaagattagcaaatattattgatttcttttaaactgcaaactatagtctgtaatattctgtaattattctaatccccctcctcctcctggcaggaaaaatgaggacagatttc

SEQ ID NO: 863763 - DNA, 120 bp, Artificial Sequence
  ENSG00000286942_5 (sequence is synthesized)
cctggcaggaaaaatgaggacagatttcagaatttgatcctagaaacatacgtacactattttattttattttatcttatcttcttatcttattttatagagacagggtctcactatgtt

SEQ ID NO: 863764 - DNA, 120 bp, Artificial Sequence
  ENSG00000286942_6 (sequence is synthesized)
ggattacaggcaagagccactgcgcctgactcatacttacatttttctaacagtctaaacctcttcagcacaagaaaagaaccccagtgtgcttctaacacactgtgagttagtagagtg

SEQ ID NO: 863765 - DNA, 120 bp, Artificial Sequence
  ENSG00000286942_7 (sequence is synthesized)
cagtgtgcttctaacacactgtgagttagtagagtggagtgtggaggtggtgagcaaggactctctggttgggctgcccagctgtgactcctggttctgctgctaattatccttacatgt

SEQ ID NO: 863766 - DNA, 120 bp, Artificial Sequence
  ENSG00000286942_8 (sequence is synthesized)
aggcaaacactgacagtctgcaacatcgttccaaatggtgtccaggtttctaaatctacaaggtgtagtctgaggatggtggtgactctctaaagtaaatgttctttctgtggccccttc

SEQ ID NO: 863767 - DNA, 120 bp, Artificial Sequence
  ENSG00000286942_9 (sequence is synthesized)
aaggcaataccccaacctaacattcaagtttctgcacaaggcagggcaggaaaactggggactgggcaggatcaaaggcctgacgcataggtgcgggacagtggggactcagggaaggcg

SEQ ID NO: 863768 - DNA, 120 bp, Artificial Sequence
  ENSG00000286942_10 (sequence is synthesized)
aacttgggtaagtgcgccctggtcaataagaagaggccatgggctggaattagactggagagcctggaagctgcagccacatcctatggaacatccacaagagtttctggaatcttttaa

SEQ ID NO: 863769 - DNA, 120 bp, Artificial Sequence
  ENSG00000286942_11 (sequence is synthesized)
tctaacattcaagccccttcttcagctctaagcaacacaggcatcattcatccaacatttattgagcaccaaccatgtgccaggcacttttcaaggctgaggcggggtgaaggagagggc

SEQ ID NO: 863770 - DNA, 120 bp, Artificial Sequence
  ENSG00000286942_12 (sequence is synthesized)
agataaacatactggcatataagtgctttgacagctggaactcaggcatcgaagagaggcacctgccccagccgagggaaggcttccaggaggaggtgatgcgcccaagtcctggggaga

SEQ ID NO: 863771 - DNA, 120 bp, Artificial Sequence
  ENSG00000286942_13 (sequence is synthesized)
agggtctgactggcccctgagctttggccagggaagcagttccaccaaaactgaatcaggggaggaggtggagagcctaaagggaatgagggatgtcaggaggcagaatgaacactggac

SEQ ID NO: 863772 - DNA, 120 bp, Artificial Sequence
  ENSG00000286942_14 (sequence is synthesized)
aggcacacacaaaagcaaagcaactgaggtccactatcatcactgctggcgcgtggacttccctggccacccttcctggaacttggacttggaaccttccctccagtctttctccctgtt

SEQ ID NO: 863773 - DNA, 120 bp, Artificial Sequence
  ENSG00000286942_15 (sequence is synthesized)
cgtctcacctcctttagatgtgttcaggcaggatttcttttatttgcatttcaggaaatttgaaaaaagtacaaaaaaccaccaaaaaaaattacttccattcccaacacccaaattaac

SEQ ID NO: 863774 - DNA, 120 bp, Artificial Sequence
  ENSG00000286941_0 (sequence is synthesized)
gggagccctctggggatgggcaaggccttccaggacaggctcggttctggtcccctgctttttgaggttgggttaaaatgccgaccatggcagaggggttacaactcaggttcccacacc

SEQ ID NO: 863775 - DNA, 120 bp, Artificial Sequence
  ENSG00000286941_1 (sequence is synthesized)
tcgcttttcacagcctccgagggcagcagtgcacatgggggagacatctcccacgaggccaaggcctccagtgctcaccgatgccctctgtgaagttggggtagaactcgtcagtgaaaa

SEQ ID NO: 863776 - DNA, 120 bp, Artificial Sequence
  ENSG00000286941_2 (sequence is synthesized)
ggggctcgggcagctcacggaagtacagcttcagcatgcctgcgatggcgttcacgtccatctcgctcatcatcaccgacacgtccttgttatctggaaagagcatggaaatgcagcggc

SEQ ID NO: 863777 - DNA, 120 bp, Artificial Sequence
  ENSG00000286941_3 (sequence is synthesized)
ctccttgaagatcctgataaatgaagaaaagacacagagaaggatgtgacatgcctgggccatggagcactctgagatctcatcgcggacaccactgcccacacctccatcccgtcctgc

SEQ ID NO: 863778 - DNA, 120 bp, Artificial Sequence
  ENSG00000286941_4 (sequence is synthesized)
gcaggccgacactcactgacgttgaagcctgccttcagtgcctggatgtccgtggccaccccagacatgcggtagatgcccacctcctccatgcctcggcgctcgatctcctccacacac

SEQ ID NO: 863779 - DNA, 120 bp, Artificial Sequence
  ENSG00000286941_5 (sequence is synthesized)
tggcgcacgatgtagggcaccttggacctctctctcctgcgggaggagggaatgttctcagtgtcctaacagccctgcttgggccataacacaggagacctgctccctatgtgcacaccc

SEQ ID NO: 863780 - DNA, 120 bp, Artificial Sequence
  ENSG00000286941_6 (sequence is synthesized)
ggaggtggggtgaggacggtgacgaaggtacccaggtctggggctgcacacagagccttctgcatgcctgtcctccctctgcaagctctgtcctcatggcatgtactttctcaggaacct

SEQ ID NO: 863781 - DNA, 120 bp, Artificial Sequence
  ENSG00000286941_7 (sequence is synthesized)
ttcaagcggccagaacccctgcgaatcacacatgacctttgcgggaaggtcaggaggcctgtctaagtcaagtcagcacgggaagggcatctgacagattccaggcctggggttagcagc

SEQ ID NO: 863782 - DNA, 120 bp, Artificial Sequence
  ENSG00000286941_8 (sequence is synthesized)
ctgtgcccccgtctgggaggtcagacccggtgttggtcctgccacccacgtgctgtgtgagaggagaatccctgacccctgccctgggcctgggccttaacacacatccgacgaatgaat

SEQ ID NO: 863783 - DNA, 120 bp, Artificial Sequence
  ENSG00000286941_9 (sequence is synthesized)
gaagggttgcctcagcaccggtgctccaagtcctgcgatgctaagtgcttttctcctctgagtcttagcaatggacaattccaatacctccacacaggacactagagtaagaatccttca

SEQ ID NO: 863784 - DNA, 120 bp, Artificial Sequence
  ENSG00000286941_10 (sequence is synthesized)
agtgctgtgcggaggccttaacttgagttctgttttgcacctggatttaccagcacatcaaagctgcttcgcaagccccctcattagcagggcttatctgggggagctgctgatggagtc

SEQ ID NO: 863785 - DNA, 120 bp, Artificial Sequence
  ENSG00000286941_11 (sequence is synthesized)
ctcgctgctcatgcccacagccctcccagagtgctatgcgagtgggggtggggcgtggtgtttagacacagataggagtccagggtatgactgatggaggccccggcccacgtgaccagc

SEQ ID NO: 863786 - DNA, 120 bp, Artificial Sequence
  ENSG00000286941_12 (sequence is synthesized)
aaggtcagaggcccagccagattccatcctagggaggcaaatgaattctcagaggaagtggtctatgtctgcatgaactgctctcaaaccaacaaacaggcttctcttggcaactgactc

SEQ ID NO: 863787 - DNA, 120 bp, Artificial Sequence
  ENSG00000286941_13 (sequence is synthesized)
gtgacaaaggggcaggggttacaaccattcaacaggaatctgggaccgtgactaattccaagcaagggcagaaaaccctgcacttgggcagttcctggagccagcctactgcttccaagc

SEQ ID NO: 863788 - DNA, 120 bp, Artificial Sequence
  ENSG00000286941_14 (sequence is synthesized)
aaggtggcaaggacattcctgagctggtttgcaggaaacacaggaggtagctgaagacgccgtgttccctggggcctgacctcaccgtgcagtggccacgcacagagaggagagacccac

SEQ ID NO: 863789 - DNA, 120 bp, Artificial Sequence
  ENSG00000286941_15 (sequence is synthesized)
acatgctcttttctgcagaaacagctgaagggacaggcaccctcagtgcgtgagcccaagcccctccccactcacttggtgaccacagcaatcttgactccgaagacccctgtctgtttt

SEQ ID NO: 863790 - DNA, 120 bp, Artificial Sequence
  ENSG00000286941_16 (sequence is synthesized)
cgggacggcatcctcttcaagctgaacttcctgctgttgaacttgaccgagagctttacttcgatctacagtggggagaaggggcacagtcctctaatccttctggtcctcatagcccaa

SEQ ID NO: 863791 - DNA, 120 bp, Artificial Sequence
  ENSG00000286941_17 (sequence is synthesized)
ggtcccaaggacccctgggagtctcatcaaatatttccacccccaaggcatgcagaggtctcagcatgaggtggagccgcccctcggggaagcccctagtctacttcagcaagagccagg

SEQ ID NO: 863792 - DNA, 120 bp, Artificial Sequence
  ENSG00000286941_18 (sequence is synthesized)
attgttgaagatgatgtaaacgactggtttctgcagaagcacctcctaaaatccccgctgcttctcttgcttgcttacttttttttaagatatgggatcttgcaatgttgcccaggctgt

SEQ ID NO: 863793 - DNA, 120 bp, Artificial Sequence
  ENSG00000286941_19 (sequence is synthesized)
aatcaaactcttgggctccagtgattctcctggttcagcctccagagtagctgagattatagtgtactgtgaccagctttctcttagtaacaattaaaaattaagtaggaaagacagaat

SEQ ID NO: 863794 - DNA, 120 bp, Artificial Sequence
  ENSG00000286940_0 (sequence is synthesized)
gtccaggctggagcgcgatctggaatctgactcgctggaaacagcaccgcggtggattcggacctggcttcccttgtcagtcacgcagctgaaagcaggaagaagctttctcttctgcac

SEQ ID NO: 863795 - DNA, 120 bp, Artificial Sequence
  ENSG00000286940_1 (sequence is synthesized)
ttggaacaacaaggtgaagatgacagagagtcccacatctaccatggaaaaggcaatggtccctaaatcatgccaagttttctaatgacatgtgttttcccgcaacatgtaactatatgt

SEQ ID NO: 863796 - DNA, 120 bp, Artificial Sequence
  ENSG00000286940_2 (sequence is synthesized)
cctcccttcaagcaccagttatcacagtacaaacacagcaacagcataaaggaatgactactgagcctgaagctctgatggatgctctgagttgagactttgttttatacttaggtacct

SEQ ID NO: 863797 - DNA, 120 bp, Artificial Sequence
  ENSG00000286940_3 (sequence is synthesized)
gtgagtcattgcagagttttgcctgactccaccatgacccaatttgatcaaggtctatatgctatgagacctctctagttcctcatcagaaattataatgaataccatgtccagctcctg

SEQ ID NO: 863798 - DNA, 120 bp, Artificial Sequence
  ENSG00000286940_4 (sequence is synthesized)
aggtgcctgatggcaacgagcggcagctcctcttggggcaacactttgggggtgaccaaggcctcacagacctcactactgctgggctacatggcccaaggctcctgggcgcaatggatc

SEQ ID NO: 863799 - DNA, 120 bp, Artificial Sequence
  ENSG00000286940_5 (sequence is synthesized)
actgcccagggaccccctcaccgtcctcacttccactcaagacgacatggccgttccactaaattcccgaggacatggccaacatgagtaacaacacagggaagtgccttacacagagtt

SEQ ID NO: 863800 - DNA, 120 bp, Artificial Sequence
  ENSG00000286940_6 (sequence is synthesized)
ccatggaagcctggctagtaccctctagaccatttacctacacctgttgggatctctctagcatgaaatgctccagaggcagtcatgccataagcttggatcctccagccattgagtgtg

SEQ ID NO: 863801 - DNA, 120 bp, Artificial Sequence
  ENSG00000286940_7 (sequence is synthesized)
agggtcttagcccggtctaaatgagcactgaattctagagagaccaagggactgtctaagttctgaattctgagtcctgaatcctggaagttggcttctggccagggagcaggtgttact

SEQ ID NO: 863802 - DNA, 120 bp, Artificial Sequence
  ENSG00000286940_8 (sequence is synthesized)
gcctctgatccacaaaagcagccccacagctcaagttgctcttctggatttctcccctctcctggttcctggccaggcaaatcttcactgctttgttagcccatccatttgctcaaccag

SEQ ID NO: 863803 - DNA, 120 bp, Artificial Sequence
  ENSG00000286940_9 (sequence is synthesized)
atttttcaaatatgtatgttttcctccttttcccattgtactcagtggaaggaatggtctaaattacctaatcagcaattcctggaaaccaagccaccatgtacatacaatcttatacgt

SEQ ID NO: 863804 - DNA, 120 bp, Artificial Sequence
  ENSG00000286940_10 (sequence is synthesized)
ctgcagggtccggaaaagaaagagaaacggcccagcgcggtcgctcacaaaattcagggcggggctgccctcggcgcccgaaagctttttgttttttgtttttttttgaaacggagtttc

SEQ ID NO: 863805 - DNA, 120 bp, Artificial Sequence
  ENSG00000286940_11 (sequence is synthesized)
acaggcttgagccaccgcgcacggctttgcccgcaagcgttttgaattttgtggcccggaattcactgcgaggactgggatcacccatcacccttccctggtctacggaaaatgaaacgt

SEQ ID NO: 863806 - DNA, 120 bp, Artificial Sequence
  ENSG00000286940_12 (sequence is synthesized)
gtttactgatacagaaacggaataacggcactttgggctggggagggccgagctgcctcaggcttctggtctccagctgcgcggcactcacacctgccgctgtgaaaatgcagacccgcg

SEQ ID NO: 863807 - DNA, 120 bp, Artificial Sequence
  ENSG00000286940_13 (sequence is synthesized)
gggcaggaattccgagtccaggctggagcgcgatctggaatctgactcgctggaaacagcaccgcggtggattcggacctggggttggggcctggagagacagaggctgccactgattct

SEQ ID NO: 863808 - DNA, 70 bp, Artificial Sequence
  ENSG00000286947_0 (sequence is synthesized)
agaagaaatgtgcacggaagatactgcataccactatctacataggaggttttctattgatgaagtctcg

SEQ ID NO: 863809 - DNA, 62 bp, Artificial Sequence
  ENSG00000286947_1 (sequence is synthesized)
ggcgtgatctcagctcactggaacctccacgtcctggcgacgcctggcaaatttttgtattt

SEQ ID NO: 863810 - DNA, 75 bp, Artificial Sequence
  ENSG00000286947_2 (sequence is synthesized)
aaatactgcgcccagccaaatctattttttaaacaatagaacccctgatttaattgatacctgacatggaagtct

SEQ ID NO: 863811 - DNA, 120 bp, Artificial Sequence
  ENSG00000286947_3 (sequence is synthesized)
atagaacccctgatttaattgatacctgacatggaagtctaacactcacagcagataaagtgaaattgctatgcctagaatgtgtgtgggagtgtggggggacaagagccctttccactc

SEQ ID NO: 863812 - DNA, 120 bp, Artificial Sequence
  ENSG00000286947_4 (sequence is synthesized)
ctggagggctttgaaacacttgaaggatccactggacacagactgaaaaccactaatttctaagtcctaatggaaaactaccgagggtttgagcaagagtgttatttaatcgaagcacta

SEQ ID NO: 863813 - DNA, 120 bp, Artificial Sequence
  ENSG00000286947_5 (sequence is synthesized)
ttttaggaagataaatctgacaagatggattgtagagaagccaagaagcagggagaccaattaagagattattgaaaaaattcaggccaaattaacataggttctggggaatgactgaag

SEQ ID NO: 863814 - DNA, 120 bp, Artificial Sequence
  ENSG00000286947_6 (sequence is synthesized)
gtgggggtaaaaagagagagacacctgggatggcttcaaggtttaatgctgcacgactgcaacattaattaatagactgaagatacctgtaaggtctcctggatcatccctcttttatgg

SEQ ID NO: 863815 - DNA, 120 bp, Artificial Sequence
  ENSG00000286947_7 (sequence is synthesized)
gaggcaaaacgtctccaaaatgaccacaaggtgcctctgttctttaagagggcagtcaactgtttaacatttttccaaaaatgtacattttacctcagttgataaattatatgtgctcct

SEQ ID NO: 863816 - DNA, 120 bp, Artificial Sequence
  ENSG00000286946_0 (sequence is synthesized)
atggcatgaaggcttcagaatgaaataggtttgctgatttttgtagtttttaggtttttcattatttttgtacacttttggtcttttcaatatgttcatatagcacaagtttataattgc

SEQ ID NO: 863817 - DNA, 120 bp, Artificial Sequence
  ENSG00000286946_1 (sequence is synthesized)
atatattaaatttgcataaaatgacttcaatatagtttgctttcagggtttactggaggctttttgctttcgaaaaccagattatgaaaatcatgttttctctgtggagactgggcaatg

SEQ ID NO: 863818 - DNA, 120 bp, Artificial Sequence
  ENSG00000286946_2 (sequence is synthesized)
ggccgggtttcagttttgatagcctcctgttacaggtctccttgacattcccttgggctagttcttatcatttggctgctacttcttccatcataattatcttctaagggtggttggaga

SEQ ID NO: 863819 - DNA, 120 bp, Artificial Sequence
  ENSG00000286946_3 (sequence is synthesized)
atcggaaaacgcagagctgaggtgtgaccttggtgagtttatccagaaccttggactttgcatccttcttcggataggattctaattctagtgcccctacctcattttagaagtaacaga

SEQ ID NO: 863820 - DNA, 120 bp, Artificial Sequence
  ENSG00000286946_4 (sequence is synthesized)
agagaagacacagtcaaattcaagcttcaaaggggaggtgtgggcattaatattgaaaataattggacacatgcttggctagtcagatggagtttttcctctgccctatttattttgtac

SEQ ID NO: 863821 - DNA, 120 bp, Artificial Sequence
  ENSG00000286946_5 (sequence is synthesized)
caccaacaccctagatagaagtttccctgcatggggaatggagtgaagagaattcacaggcgagtgagagaactggattgttcagaaatagtaagcctgtacaattttatcaagaattta

SEQ ID NO: 863822 - DNA, 120 bp, Artificial Sequence
  ENSG00000286946_6 (sequence is synthesized)
cagtctaaactgaattcttaaaaggtataatgctactagaatcctacagcatgctctgtgacccatatttcctgcagaatgatatttcagttaattctacggagaaatgtcttttaaagc

SEQ ID NO: 863823 - DNA, 120 bp, Artificial Sequence
  ENSG00000286946_7 (sequence is synthesized)
ttatatgaaatgatacagttctcatatcacaaatttaaatgttcaagaaatgtaatttctcatcttatccagagttttatctaaatgtctaaaatgtagagaatgccaggccagagtaaa

SEQ ID NO: 863824 - DNA, 120 bp, Artificial Sequence
  ENSG00000286946_8 (sequence is synthesized)
gttgaggaatttaggagcagggaataggtgaagaggaactgggaagaggctaaaatgaagcatttaggcctcctcattcctttctaatctcaaagtgtcagtccagagtttgtggctcca

SEQ ID NO: 863825 - DNA, 120 bp, Artificial Sequence
  ENSG00000286946_9 (sequence is synthesized)
tactccttatcttggctgtaagataactcctggactagcttctcccagctgcatatgaatgtctaaatgcttaggactgtgtcaagattgatgcttacccacattttttccaagaatgga

SEQ ID NO: 863826 - DNA, 120 bp, Artificial Sequence
  ENSG00000286946_10 (sequence is synthesized)
ggagtgatcaactaagcaaacatttggttaatgattaagctaataccttggtaaataaatatggtaaataagtatctggaagaaacatagaaaatgtcctcctcacccaggataaaggat

SEQ ID NO: 863827 - DNA, 120 bp, Artificial Sequence
  ENSG00000286944_0 (sequence is synthesized)
gtgagccactgcacccggccaggccgattttctaaatagtgtgttgggtaagaccgaaggcatggggctgggtgataaacataattttaagtgatggcatcatttgccttcagttggctt

SEQ ID NO: 863828 - DNA, 120 bp, Artificial Sequence
  ENSG00000286944_1 (sequence is synthesized)
ttgggatcaaatgataagattctttggaaaatagcaatttggggcatccaatgcctagcaagtgaccaaaacagtaactatcttttctcattctaccactcccaagttttatttttccta

SEQ ID NO: 863829 - DNA, 120 bp, Artificial Sequence
  ENSG00000286944_2 (sequence is synthesized)
tctcttctggcaatattctcagcagtctgaggaaaaagaaggaagaagtgctgcaagtagtcacagggtaatatcaaggtgctttcatttcagtgtgttgtttcttaagatatttaacct

SEQ ID NO: 863830 - DNA, 120 bp, Artificial Sequence
  ENSG00000286944_3 (sequence is synthesized)
cctgaactgttgtgaatattgacatttctcctcacaggttgtcaactgcctttttaggatgtgaacatcctgagtcacaggcctaccttgtttgaattatcaagcattgttcagctcatg

SEQ ID NO: 863831 - DNA, 120 bp, Artificial Sequence
  ENSG00000286944_4 (sequence is synthesized)
ttaatagtgggggctaccacaaacttggaggctcctccctgagtttctgtttgctgttcttttgtgacggtattcccaccacctcttggtgttaggagctcagagaatggagaaagaagg

SEQ ID NO: 863832 - DNA, 120 bp, Artificial Sequence
  ENSG00000286944_5 (sequence is synthesized)
aaatggagtttagaaaaaggctcagttcctggattcaatcatgagggttgatgctcttctgagaatatctaaatggtgaagtgcttaagaactctctagcacaaagggaacacagaagag

SEQ ID NO: 863833 - DNA, 120 bp, Artificial Sequence
  ENSG00000286944_6 (sequence is synthesized)
attcccacagtctgaaagagctgccattcaccctcctcctccaatattcttccaaaattcattttcttttcccattgggtacagagctaccatatttatctgagcataggctgatcagaa

SEQ ID NO: 863834 - DNA, 120 bp, Artificial Sequence
  ENSG00000286944_7 (sequence is synthesized)
tggagaccgtaattcctaagccccctcactggcaggtatgtgcaggtgattaagttctgattaaggggaagtaaatgcaagtgtcgcattcacttgggggtattggggcatgttttcctc

SEQ ID NO: 863835 - DNA, 120 bp, Artificial Sequence
  ENSG00000286944_8 (sequence is synthesized)
cttcttgcctgctggattgtggatgtgagggctgggtttgaagaagccaaactctttctgtatcttcttaatccttcttaaaaacctacattctagggctgggtgcggtggcttgcacct

SEQ ID NO: 863836 - DNA, 84 bp, Artificial Sequence
  ENSG00000286944_9 (sequence is synthesized)
aaatacacacacacacacacacacacacagaattagccgagtatggtggtatgtgcttgtgggcgtggtggtgtgtgctttgtc

SEQ ID NO: 863837 - DNA, 82 bp, Artificial Sequence
  ENSG00000286944_10 (sequence is synthesized)
caacaaaccaaccaagcaaccaacccctacattctggctttctgatactgcctaagtaggaaaacaaagtgataattatcta

SEQ ID NO: 863838 - DNA, 120 bp, Artificial Sequence
  ENSG00000286944_11 (sequence is synthesized)
tgatactgcctaagtaggaaaacaaagtgataattatctagtaatttttactgtgtgaagacaaacaatctgactcattcagactaaactcccctttccatcttagtggttggttttaca

SEQ ID NO: 863839 - DNA, 120 bp, Artificial Sequence
  ENSG00000286944_12 (sequence is synthesized)
agtgacatttccagtttgtctatgtaccgaattctacagtaacttgtagggcaagcttcctctgtatctttatattacatctttctaaccaatttattacaaattattctctaggggaaa

SEQ ID NO: 863840 - DNA, 120 bp, Artificial Sequence
  ENSG00000286944_13 (sequence is synthesized)
aacaccttttgtatagggaaaaaataaacaactataaatattgattcagaaagaacttccccttctcccccaggaaagtagagctctttatttgctgcccttctgccctttgcatttggg

SEQ ID NO: 863841 - DNA, 120 bp, Artificial Sequence
  ENSG00000286944_14 (sequence is synthesized)
taggttcagaatagctctttgttgtagagttatggaagtgaatacaaggtttgtatccattgctatagatcaagatttttgttttagctagggtagatctactttccgacttattttagt

SEQ ID NO: 863842 - DNA, 120 bp, Artificial Sequence
  ENSG00000286944_15 (sequence is synthesized)
agaatagttttgcattttattggttcaaaatttataggaattaaagattgagaataagaaactcttccaacacaaaaacataaatttgtgttttttttttttaaaacccttttccattta

SEQ ID NO: 863843 - DNA, 120 bp, Artificial Sequence
  ENSG00000286944_16 (sequence is synthesized)
atccttgctttagatttctgtatactctgtatttaggtgaaatatactttgtagatgactgattgcattaatgaccctgattcctcttgtctatttctttccatgcccttccccatgtca

SEQ ID NO: 863844 - DNA, 120 bp, Artificial Sequence
  ENSG00000286944_17 (sequence is synthesized)
gtttgcagtgctctttcattctttgcaggcatcctgcccagggtcatgtgacttactgtggaccaatggaatattgacaaatgtgacacagcagagacttgaaaaaggctcgtgtgattg

SEQ ID NO: 863845 - DNA, 120 bp, Artificial Sequence
  ENSG00000286944_18 (sequence is synthesized)
tgcacctcaccatgacaaggacatgcctgagctatcttgctagaggataagcttgctgggggatatgtgaagcagagccagacctccttggtcatcccaggcaaggccatctacaatcag

SEQ ID NO: 863846 - DNA, 120 bp, Artificial Sequence
  ENSG00000286944_19 (sequence is synthesized)
cagagctatagaactgacctgcagctgatggacacagaaatctgctgttaaccacagacatcataatcacaagctaacaatgtcaaaagagtatgctgccaagacctctgccatgggtaa

SEQ ID NO: 863847 - DNA, 120 bp, Artificial Sequence
  ENSG00000286944_20 (sequence is synthesized)
catctaaaaactcaacaaagaaaagctctgcattttttacaaaattgacttatcaggtcactgagcaactgaaatatttccaaagaaacaacttaaaactactacattttagagttattt

SEQ ID NO: 863848 - DNA, 120 bp, Artificial Sequence
  ENSG00000286944_21 (sequence is synthesized)
cagctccaatatggctcagcgtggcactggtgaagagagcttgatcaacctgtgaggaaactcagacacggaggtgtggccgagcatctcctcagagagagagagagtcccaactggctt

SEQ ID NO: 863849 - DNA, 120 bp, Artificial Sequence
  ENSG00000286944_22 (sequence is synthesized)
agccattcaacagggactagtttcatccctatagatccaagtgcattccttatttaataaaccagtgattgcagaatgagacttctgactgtccagtttgactgaattcatggagcatct

SEQ ID NO: 863850 - DNA, 120 bp, Artificial Sequence
  ENSG00000286944_23 (sequence is synthesized)
tagaatggagatcaaacatctgcagaggaacagaatgtgaagaacatctcacgatattcacaaatagattatcactaatcatctttaaagtagagcagtgtgttgacagattaagtctac

SEQ ID NO: 863851 - DNA, 120 bp, Artificial Sequence
  ENSG00000286944_24 (sequence is synthesized)
gtttactgctattcctccagctctttatttaagaaagcagcttgctcacagtaattagtttgccacgggaaggatgagtggaatctgtctggaagtggaacactggattgagactgaaaa

SEQ ID NO: 863852 - DNA, 120 bp, Artificial Sequence
  ENSG00000286944_25 (sequence is synthesized)
accccatgtttttggccatgctctgttctttactgtctgaatcaatgatgttgatcagatgacataatcttgtttatacctcaggacctcatcggaaaatgaagaggtgggtgggggcag

SEQ ID NO: 863853 - DNA, 120 bp, Artificial Sequence
  ENSG00000286944_26 (sequence is synthesized)
gacctcatcggaaaatgaagaggtgggtgggggcaggtgaattttagtcgatttagagttaatcttttcggcttctaacataccatgcttccagttttcttttcttttcttttctttttt

SEQ ID NO: 863854 - DNA, 120 bp, Artificial Sequence
  ENSG00000266369_0 (sequence is synthesized)
ggcagggtctcattctgtcacccagactgggatgtggtggtgttatcgtagcttactgtaaccttcaactactgggctcaagcaatcctccaggctcagcctctgagtagctaagattaa

SEQ ID NO: 863855 - DNA, 120 bp, Artificial Sequence
  ENSG00000266369_1 (sequence is synthesized)
ctctgagtagctaagattaaaggcatgtgacaccatgcccagcttattttattttatttttttcagagacaaaatcttgcattaaagcccaatctggtctcaaactcctgtcctcaagtg

SEQ ID NO: 863856 - DNA, 120 bp, Artificial Sequence
  ENSG00000266369_2 (sequence is synthesized)
taatcccaaagggctgggattccaaacatcagcagctgtgctcaaccttgaggttctggctgtaatctggctgttatttatcgaaacaacagaagttcttggtattaacagtcattcttc

SEQ ID NO: 863857 - DNA, 120 bp, Artificial Sequence
  ENSG00000266369_3 (sequence is synthesized)
ttcagagagtcaccccacaagactcagatgaatatagttaagaagccaaaatgaggtcattatggcagaacagaattgatagtgcacattaaaagacattacacactttgggtgattcaa

SEQ ID NO: 863858 - DNA, 120 bp, Artificial Sequence
  ENSG00000266369_4 (sequence is synthesized)
ctaaatcatagtctgaaatgcagttacaaagtggtaatgttcaaacgatcatctattagtcaaagttacaagaaaagtcctggttatgttggtaaaaattgtatctgtgattatccatct

SEQ ID NO: 863859 - DNA, 120 bp, Artificial Sequence
  ENSG00000266369_5 (sequence is synthesized)
aagtatttatattatttgtcaattcctccataacaaattatcccaaaataaagtataataatgaaattttaaaaaaagatgagaaacatattcttcaccacaaaaaaaaaaaaaaccttt

SEQ ID NO: 863860 - DNA, 120 bp, Artificial Sequence
  ENSG00000266369_6 (sequence is synthesized)
tctcgaagtttctgtggtgcaggaatctgggcatggcttaactgggtcttctattcagagactctcacaagttataatcaatctcactcacatgcttgatggtatattcagtactttgac

SEQ ID NO: 863861 - DNA, 120 bp, Artificial Sequence
  ENSG00000266369_7 (sequence is synthesized)
agctgttgtccagaattccatataatgtgagcctcttcagtatgggaaggtttcttcatcaaaatgtgcgaagccaaaaaaaaaagccattgaaaagagtccaagacagaagtcacatct

SEQ ID NO: 863862 - DNA, 120 bp, Artificial Sequence
  ENSG00000266369_8 (sequence is synthesized)
tttgtcaactaatcacagaatcaacctctcatcatgtttgctgtattctgtgcaacagcagcaagcctatggatccagctgacacccatggggagggtattagacaagggttggaatccc

SEQ ID NO: 863863 - DNA, 120 bp, Artificial Sequence
  ENSG00000266369_9 (sequence is synthesized)
aggagatggagaccattagaaactacattaatctgctgattacagtagtttgccaaagaatcctgagataataattctgggctcaaagttcttatgaggcactgaggcaggacaataaag

SEQ ID NO: 863864 - DNA, 120 bp, Artificial Sequence
  ENSG00000266369_10 (sequence is synthesized)
aggcaggacaataaagtaacagaaaataatactatattaattttaatgatttactaatactaatatactggtataatgtactaaaatagtatactacatttttggtaatttgtccaggag

SEQ ID NO: 863865 - DNA, 120 bp, Artificial Sequence
  ENSG00000266368_0 (sequence is synthesized)
ccccttaaaatgagttctagagcaggtcttctgttccagaaggggagaagcatagagggcctgtgagctcacgtgtgttctttgtcataggggtgaaaaactaacttcaagtgtcccttg

SEQ ID NO: 863866 - DNA, 120 bp, Artificial Sequence
  ENSG00000266368_1 (sequence is synthesized)
tgaactccaaagtcagcccctataaacctcaagttcataatgtagcagaacagtaataggaaagtcctaggctaatgttcagacgatcggagcttggccagtgctggcaacacctttatc

SEQ ID NO: 863867 - DNA, 120 bp, Artificial Sequence
  ENSG00000266368_2 (sequence is synthesized)
tcagtgcctactcagctgtgaatcctctgaagttcattttttcatatcaatattgtatttttcatctctataaattccatttgcgtcttttaataaatatcttacatgttctacattata

SEQ ID NO: 863868 - DNA, 120 bp, Artificial Sequence
  ENSG00000228750_0 (sequence is synthesized)
attctgaacatgtcaccggggactttggaatgtgtatccataactccctgattttcaaccacattccagcctgcctgactcatgaagcgtggagcgacccaggaacatcccagctcctca

SEQ ID NO: 863869 - DNA, 120 bp, Artificial Sequence
  ENSG00000228750_1 (sequence is synthesized)
tgtcccacattcttcaggctttctcttagttttggcatgtgcatgtaaatgtcaacaggtgagtgcccagatcagcgcctgatatatacttggcacacaataaccactcttgaaattcat

SEQ ID NO: 863870 - DNA, 120 bp, Artificial Sequence
  ENSG00000228750_2 (sequence is synthesized)
ccgcttttagggaagattctctgcctgatgtgtgagcgctctaacctcttcatctgtgttcagtccccttgcaatgcttctctaagatcaataaaggcaaaaaccaggagatcccataaa

SEQ ID NO: 863871 - DNA, 120 bp, Artificial Sequence
  ENSG00000228750_3 (sequence is synthesized)
tcccgctgagcctgtcatagctatcaaattatacccagataaagcttctggtggctaatgacatggccatcacccagcgtggacgtgggcaggaggggctctccgggagcatctggtctg

SEQ ID NO: 863872 - DNA, 120 bp, Artificial Sequence
  ENSG00000228750_4 (sequence is synthesized)
ctgtggagacacttgtcatctggaggctctgtggctctaatggagggtgatgctttgaacgcgactatctcccccataaaaaaataaataaataataagtataatttaaaaataaacaaa

SEQ ID NO: 863873 - DNA, 120 bp, Artificial Sequence
  ENSG00000228750_5 (sequence is synthesized)
ttaatcgcggctctgtcttccgtttgctgaagccgaagacctccccgctctctcagagcccatgtctggcacatcagcgaatctcgttggcactgccgtcaaacacatccatctaggatc

SEQ ID NO: 863874 - DNA, 120 bp, Artificial Sequence
  ENSG00000228750_6 (sequence is synthesized)
tccccgcacttcacgccacccaccgcgctagtctgtggatccctgtttctctcttggatgtagtaatagtcacatagctggacttctgccctggcacttcttcagccccttgttagagga

SEQ ID NO: 863875 - DNA, 120 bp, Artificial Sequence
  ENSG00000228750_7 (sequence is synthesized)
atcctgctaaatgttggatgatttaccccccacctcccgcaccccccgccacacacacataggagctccactggctcctcataactctcagggtgccagcctgtctctgccatgacccga

SEQ ID NO: 863876 - DNA, 120 bp, Artificial Sequence
  ENSG00000228750_8 (sequence is synthesized)
aagctctccgtcatctgtctcccgcccctccctcactgactctatctgccaccctctccctgttgtccacgctgccccagccccacaggcctcctcctgttcctcagactccccagggat

SEQ ID NO: 863877 - DNA, 120 bp, Artificial Sequence
  ENSG00000228750_9 (sequence is synthesized)
actcctgcctcagggcctttgccctggctattccctccagctacaatgctcttcctgaatctgcatgattcgatgcccactcccccattctcagcctgtccccacatctcagtgagccct

SEQ ID NO: 863878 - DNA, 80 bp, Artificial Sequence
  ENSG00000228750_10 (sequence is synthesized)
attctcagcctgtccccacatctcagtgagccctgcccgggccaccctggaaaatctcagcatccttgggaggccaaggc

SEQ ID NO: 863879 - DNA, 90 bp, Artificial Sequence
  ENSG00000228750_11 (sequence is synthesized)
cacacacaaaaaaagcacttttttttcatcctcccagcacttcttgtcctccttgcttcccttgttttttttttttttcacattcacaca

SEQ ID NO: 863880 - DNA, 120 bp, Artificial Sequence
  ENSG00000228750_12 (sequence is synthesized)
ccttgcttcccttgttttttttttttttcacattcacacatatgatgatccagcattctacatattttatttatcttatttattttcagtcttctccactcaaatgtatgatatttaagg

SEQ ID NO: 863881 - DNA, 89 bp, Artificial Sequence
  ENSG00000228750_13 (sequence is synthesized)
tattttcagtcttctccactcaaatgtatgatatttaaggcaggggttttaaaatgtcttgttcttggccaggcatggtggctcacacg

SEQ ID NO: 863882 - DNA, 74 bp, Artificial Sequence
  ENSG00000228750_14 (sequence is synthesized)
gccactcaacaaaataaataaataaataaaaataaaatgtcttgttctcttttttcctccagtgcccagatcag

SEQ ID NO: 863883 - DNA, 120 bp, Artificial Sequence
  ENSG00000279243_0 (sequence is synthesized)
gcacatgacttaggcagcatccgcccacacagtcagcccatgcagccttgggctggtgctaggggctctgagaggctcaccccagtcccagctggtggtctctgtggattccccagccag

SEQ ID NO: 863884 - DNA, 120 bp, Artificial Sequence
  ENSG00000279243_1 (sequence is synthesized)
atcaggcagaagtgtttgtggtttgccctccctgtctgcccccagccagaattccaacctggccagttctaaaagctgaaccgtgaagactcagccctgcctggagcagccttccctgga

SEQ ID NO: 863885 - DNA, 120 bp, Artificial Sequence
  ENSG00000279243_2 (sequence is synthesized)
gcctggctgactgcacccaccagccgtcagctctggcctagaaacttaggggtcctggagacagcaggtcctgctacctccctgtcctccattcagcctaaatgtccacctcctcagggg

SEQ ID NO: 863886 - DNA, 120 bp, Artificial Sequence
  ENSG00000279243_3 (sequence is synthesized)
cctgccttcagctcacctgcagaccatagaagtctccctgctgtgcactcatcccctgcgctttggcactccctactccgccccaggtgttctgcaacatcggtagcatgacagagggct

SEQ ID NO: 863887 - DNA, 120 bp, Artificial Sequence
  ENSG00000279243_4 (sequence is synthesized)
acaggctcagtctcagcctggttcctgtttgtggtgcccctttctcaggcctgtggggatgtcaggagcttaggacagcgccgggctcaagagatgtggctaccttccctcctgctttcg

SEQ ID NO: 863888 - DNA, 120 bp, Artificial Sequence
  ENSG00000279243_5 (sequence is synthesized)
gtactcagcgcaggcagggttcagtgcagcaagtaacagctgtggcttactggattgtctgcaaccattggcgactgagagatccctgcagccctcccagaccctcgatctgactggagc

SEQ ID NO: 863889 - DNA, 120 bp, Artificial Sequence
  ENSG00000279243_6 (sequence is synthesized)
caggcccacgtggggaaagggttaaacgttggcagtgacttcacccctgcattggagcaggcggaggcagagaacctgctggaagctgttctgaaccagagaaggatgaaaatagctgcc

SEQ ID NO: 863890 - DNA, 120 bp, Artificial Sequence
  ENSG00000279243_7 (sequence is synthesized)
aaagatgttgccatagcaactgctttccttcctgacctccttggaagtgaactccctcattttccagagtagtcaaggaatttctgtgcctctacccatggctttggttaccaactcatc

SEQ ID NO: 863891 - DNA, 120 bp, Artificial Sequence
  ENSG00000279243_8 (sequence is synthesized)
cctgggggccttggtttctttctgtgaaatggaatattcattccagcactcaccaccttctaggctggagtaaggctccaactttgcaaatgctgttagtaaactgtagagctccgtgca

SEQ ID NO: 863892 - DNA, 120 bp, Artificial Sequence
  ENSG00000279243_9 (sequence is synthesized)
accatggaaacggtcacgtgcgcctgcctcctggttattccaccctggtcaggaggatgatgcaagctccgagcctcttcattggctgccaccttcctcttgccaccgaaatctggtggg

SEQ ID NO: 863893 - DNA, 120 bp, Artificial Sequence
  ENSG00000279240_0 (sequence is synthesized)
caagcaggtgttacagatctcctcctcctagggagcttgcagtattttacccagtttgtggagttccatttgaggattgctgggggttgtggaccatccagagatctttccatggtaaag

SEQ ID NO: 863894 - DNA, 120 bp, Artificial Sequence
  ENSG00000279240_1 (sequence is synthesized)
cgtgatcttggctcactgcaacctccagggttcaagggaacctgtaaaggaaaccagtagcttatctgtaccagtggcatatctgtataatctcttagaaaatcaagggttcaaaatcaa

SEQ ID NO: 863895 - DNA, 120 bp, Artificial Sequence
  ENSG00000279240_2 (sequence is synthesized)
aatcaagggttcaaaatcaaacaccttgctagtttgcgattcagtgattcaagaatgaattctgcagttggaggactctctaggcccttcagtgttccacttactttttctgctcttatt

SEQ ID NO: 863896 - DNA, 120 bp, Artificial Sequence
  ENSG00000286369_0 (sequence is synthesized)
gctctcaggccccgcctccccggggccggctcgggccacttcttgcgcgctgccagaaggagctattttgagcagtccttctgaccctcgtggcttctcctgctccaaggccaagctcgg

SEQ ID NO: 863897 - DNA, 120 bp, Artificial Sequence
  ENSG00000286369_1 (sequence is synthesized)
gaccctgtcatcatccccggggacaggccccatcttagagaggatccacccagctccccgctcctgagccatcttccagctatcccgcctcgagactcccaccgcacctgctcctgggct

SEQ ID NO: 863898 - DNA, 88 bp, Artificial Sequence
  ENSG00000286369_2 (sequence is synthesized)
gggctgcagctgcacccaacaagtcaacatgtggattgcttctagaatttggatattatgaacactgctgtgctgaacattcttgtac

SEQ ID NO: 863899 - DNA, 86 bp, Artificial Sequence
  ENSG00000286369_3 (sequence is synthesized)
cgtgggagggacccaatgggaggtaattgaatcataggggcaggtctttcccctgctgtccttatgatagtgaataagtctcatga

SEQ ID NO: 863900 - DNA, 120 bp, Artificial Sequence
  ENSG00000286369_4 (sequence is synthesized)
ttatacatgggagttcccctgcacaagccctcttgtctgccgccatgtaagatgtgcctttgcttctcctctgccttccaccatgattgtgaggactccccaaccatgtggaactgtgag

SEQ ID NO: 863901 - DNA, 120 bp, Artificial Sequence
  ENSG00000279245_0 (sequence is synthesized)
gcctccccgcagcatggggggacttcttataagcatttttatttatttatttggaattcggatggatagatcatgttggcctgataatgtatgtgcaagagcacagactctggggtctca

SEQ ID NO: 863902 - DNA, 120 bp, Artificial Sequence
  ENSG00000279245_1 (sequence is synthesized)
tggatgcaatgctcttacggcagtgccccacccaaggcacaaggaaaaaccacgaaagcaattccagtttacaccacgtcccaaactggattttccattcgactataattcctcccaata

SEQ ID NO: 863903 - DNA, 120 bp, Artificial Sequence
  ENSG00000279245_2 (sequence is synthesized)
agggctcaaaacgttgtctaaggaaagtcgattggttgttgcccagggctggaggagttgggggaaaacggggagtgactgctgatggagacagagtttccttttgagatgatgagaatg

SEQ ID NO: 863904 - DNA, 120 bp, Artificial Sequence
  ENSG00000279245_3 (sequence is synthesized)
tcctgaagctggtcatgctgatggttgcacgtatctatgaatatactaaaaaccatcgaattgtacactttagacatgtgaattgtgtagcatgtgaattaaacctcaagtcgttatttt

SEQ ID NO: 863905 - DNA, 120 bp, Artificial Sequence
  ENSG00000286366_0 (sequence is synthesized)
gggcgccggggactcggaacgccgggtcggagctcggcaggcggagactgtgttagtctgttttcacagtggtagaaagaaatacccgagactgggtagtatataaagagaagagattta

SEQ ID NO: 863906 - DNA, 120 bp, Artificial Sequence
  ENSG00000286366_1 (sequence is synthesized)
attgactcacagtttcgaatggctcgggaggcctcaggaaatttaaaattatggcagaaggtgaagcaggcatgccttacatgacagcaggcgagaggtgaattgcgagtataggaaaaa

SEQ ID NO: 863907 - DNA, 120 bp, Artificial Sequence
  ENSG00000286366_2 (sequence is synthesized)
ctgccacttttaagaccatcagatctggtgtgactcactcattatcaggagaacagcatgagggaaaccagcctcctaatccaatcacctcccaccaacttcctcccttgacacataagg

SEQ ID NO: 863908 - DNA, 120 bp, Artificial Sequence
  ENSG00000286366_3 (sequence is synthesized)
gataagatttgggtggggacacagagcccaaccatatcaacagccatatgagaagtcttcaaaaagtccatggaaaatgtgtattatcaagaaactgtgcatggattgcaaaatcttttt

SEQ ID NO: 863909 - DNA, 82 bp, Artificial Sequence
  ENSG00000286366_4 (sequence is synthesized)
catggaaaatgtgtattatcaagaaactgtgcatggattgcaaaatctttttgagggctgggcatggtgatggtggatcact

SEQ ID NO: 863910 - DNA, 87 bp, Artificial Sequence
  ENSG00000286366_5 (sequence is synthesized)
tggtggttcacacttgtatagcttgaactggggaggtgaggttgcaatgagctgagatcgcgccacagcactgcagcctgggcgaca

SEQ ID NO: 863911 - DNA, 120 bp, Artificial Sequence
  ENSG00000286366_6 (sequence is synthesized)
gagtgagactccatctcaaaaacaaaatctttttgcaccaaaacaaactggtactaacgcattataaaatgtctcaacaggatctagtttgagtcattaaaaaggagaagtcatcagttt

SEQ ID NO: 863912 - DNA, 120 bp, Artificial Sequence
  ENSG00000286366_7 (sequence is synthesized)
gatctagtttgagtcattaaaaaggagaagtcatcagtttgaaaagagctacaatcagagcaaaatgaattctgctaaaattgaaggaacaacaaacgtcaaatttagggtgaggttagg

SEQ ID NO: 863913 - DNA, 120 bp, Artificial Sequence
  ENSG00000286366_8 (sequence is synthesized)
taatttgtaagaaaggacaagacgatgctgaagatgaagcctgcagcagcaggtcatccacatcaatttgtgagaaaaaaaatttatcttctttgtgccctaatttggaaggaccaacga

SEQ ID NO: 863914 - DNA, 120 bp, Artificial Sequence
  ENSG00000286366_9 (sequence is synthesized)
ttaacagcagaaacaacagtcaacaccatagacatcacaattggttcagcttacagaattctgactgaaaaatcaaaagttgagcaaactttccacttgatgggtgccaaaaccagatca

SEQ ID NO: 863915 - DNA, 120 bp, Artificial Sequence
  ENSG00000286366_10 (sequence is synthesized)
gctgcaaagaacagagctttcaatggaaattttaaacaagtaggctctattggttgctacaaaattaattgcagtttttgccattgaaagacatgtcaaaaaccgcaattacttttgccc

SEQ ID NO: 863916 - DNA, 120 bp, Artificial Sequence
  ENSG00000286366_11 (sequence is synthesized)
caaccaatagatcatgaagcatctattgggaaagtgtaacaggaggtgaaatgtggctttccaactatggagacaaagtacaatcgaagtaatggctccgaagatgtggaagtggtccag

SEQ ID NO: 863917 - DNA, 120 bp, Artificial Sequence
  ENSG00000286366_12 (sequence is synthesized)
tcaaagcaaaagtggtctggtcaagagcaaaggtcatggaaatagttttttgagctgcttgagaaattttgcttgttgactttctggagggccaaagaaaaataacatctgcttattatg

SEQ ID NO: 863918 - DNA, 120 bp, Artificial Sequence
  ENSG00000286366_13 (sequence is synthesized)
agagtgttttgagaaagccaaagctttagcagaaaaatgcccaggaaaacttcaccagagagtccttttctatcacagcaaaggttctgctcacgcctctcatcaaacgggaaattttga

SEQ ID NO: 863919 - DNA, 120 bp, Artificial Sequence
  ENSG00000286366_14 (sequence is synthesized)
gagagtttcaatgggaaaccagtaggcattcaccctacagttggtatttagctccttccaacttcttttggtttcctaatgataaaaaatctgtaaagggtaccattttttttccagtta

SEQ ID NO: 863920 - DNA, 120 bp, Artificial Sequence
  ENSG00000286366_15 (sequence is synthesized)
ataatgtaaaaaagattgcattgatgtaaattcccaggaactccaattctttggggatggataaaatggctagtatctaagtgctgtgagcaagagacaaaaataaataaataaatggct

SEQ ID NO: 863921 - DNA, 120 bp, Artificial Sequence
  ENSG00000286365_0 (sequence is synthesized)
gttgttagaatatgttaaaaaaaactcagcaaaaagaaacacaatctgattaaaaaatggacaaaggacctatatatctatattctatatagttattagaatatatttaagaaactccta

SEQ ID NO: 863922 - DNA, 120 bp, Artificial Sequence
  ENSG00000286365_1 (sequence is synthesized)
ttattagaatatatttaagaaactcctacaactcaacaaaacaaccccaatctgattaaaaatggacaaaggacttatataaacatttctccgaagaagatatacagatggcccacaagc

SEQ ID NO: 863923 - DNA, 120 bp, Artificial Sequence
  ENSG00000286365_2 (sequence is synthesized)
acgtgaaaaggtgctccatgtcactgatcctgagggaggcagacaaggaccacgttgagacaccaccacacaccctctaggacggctactatcaacgcgcacacacggaaaataagcgtt

SEQ ID NO: 863924 - DNA, 120 bp, Artificial Sequence
  ENSG00000286365_3 (sequence is synthesized)
ggtgaggatgtggaggaattggagccttgtgcattgagggtaaaaatgtaaaatgctggaggcactatgggaaacagtatggtaattcctcaaaaaacgaaatatagaattaccatgggc

SEQ ID NO: 863925 - DNA, 120 bp, Artificial Sequence
  ENSG00000286365_4 (sequence is synthesized)
ttccactgctgggtataaatccacgagaactgaaaacagggtctcaaagccatgtctgcacacccatgctcacagcgacattatccacaacagccacgagggggaagcaacagtgtgtcc

SEQ ID NO: 863926 - DNA, 120 bp, Artificial Sequence
  ENSG00000286365_5 (sequence is synthesized)
ctccacaaacgggcattctcatgatcaaaatgtggcgtctgcatacagtggaatgttatccagcctttaacaggagggggctcctgtcacagctacagcatggaggaaccctgaggacac

SEQ ID NO: 863927 - DNA, 120 bp, Artificial Sequence
  ENSG00000286365_6 (sequence is synthesized)
tatgctcagtgaagtctcattaacaaaagaaggttaagtccatgactgatgctgccatcatcagcaacaggacgtgcgccaagttttcctggtggcaccaccccagcctggcctgtgaca

SEQ ID NO: 863928 - DNA, 120 bp, Artificial Sequence
  ENSG00000286365_7 (sequence is synthesized)
aggggcctgcagagagtcaggcacaccggattttctttcaggccaaacagaagagcaagggtttccccaaattcgagagcacggggctgggaagaagagccaagcgccagcagtgtcctc

SEQ ID NO: 863929 - DNA, 120 bp, Artificial Sequence
  ENSG00000279249_0 (sequence is synthesized)
aggcgcggcgaggcgggtggcgcgcggcagcagggttgggctctcgccgtgagtcgacgaagggagcgcgggcgcgcgcccgcgtccgcgcactgagagtcgcctcggccgctcgctttc

SEQ ID NO: 863930 - DNA, 120 bp, Artificial Sequence
  ENSG00000279249_1 (sequence is synthesized)
tcgactcccgcctcgcgcctcgatcctgttccgcctccctcggccctcctgcccgcccccactcgtcggccctcagctcagagacctaataggatggggtcttagagaaacatcttttga

SEQ ID NO: 863931 - DNA, 120 bp, Artificial Sequence
  ENSG00000279249_2 (sequence is synthesized)
gccacagacttctttgttaccagaaggaaaatgaaagaagaaatttaaataccacttgaagagagagagtgtgaagaaatgaccctgaaaagcctctggcagaggattcttctttcagga

SEQ ID NO: 863932 - DNA, 120 bp, Artificial Sequence
  ENSG00000279249_3 (sequence is synthesized)
tggtgtcgcctcctcagcagcccatcctcctcccctggactcaagctctcattccagtaacactccttcctccttctccatcttcagggggaggtttgccagtcggtgggttctaagcat

SEQ ID NO: 863933 - DNA, 120 bp, Artificial Sequence
  ENSG00000279249_4 (sequence is synthesized)
atctcgctgattccccccaaccctgccgacacctctgtaggtcgtcccttcattaaaatctctccatttgaactatctgagtttaattccatttcctcctggtatctcagtgatacacgg

SEQ ID NO: 863934 - DNA, 120 bp, Artificial Sequence
  ENSG00000279249_5 (sequence is synthesized)
tatcagtacaaaaatctcgcttcaccttcagaaccaacagatttgagacattttatcctctgtggaaccattagttattttgtcattggttgtatcagaaaaaaaaatcaggaatgcaaa

SEQ ID NO: 863935 - DNA, 120 bp, Artificial Sequence
  ENSG00000279249_6 (sequence is synthesized)
tccttctttattacagattcagatttgcatattaccaatgttatatattttaaacaaaactattcatcataagttttaaaaattaactactggagtagttaatgaatctgaatgtaatta

SEQ ID NO: 863936 - DNA, 120 bp, Artificial Sequence
  ENSG00000279249_7 (sequence is synthesized)
tgtagctttcataatattaaagtaaaaatactaaaagaagtatttcttaaagaagcaaatgctcaatctccaagtaaattttattctatgctcttccggtataagaatatgttaatatct

SEQ ID NO: 863937 - DNA, 120 bp, Artificial Sequence
  ENSG00000279249_8 (sequence is synthesized)
tgaaaaatatcatattattttgtgaactcataaagctattttgagtttttgtaaaatgaaaaccttaccaaaatgtattttattgttggaaagcttgaccgttactgctgtttaattttt

SEQ ID NO: 863938 - DNA, 120 bp, Artificial Sequence
  ENSG00000279249_9 (sequence is synthesized)
tgagcttgtaaactttatttgtgcatgttttcaacaaagaaggattttattgttattacataaaacaggtgatttctagattttaaaatcacaaattgaaagcaaggcacaataatatat

SEQ ID NO: 863939 - DNA, 120 bp, Artificial Sequence
  ENSG00000279249_10 (sequence is synthesized)
atttcaagatataggtacttaggaggcatccttttagtcatctgttcaatgtagccatctattttacacctactgtctactattgtttgaggtccttgccaaagtattgcaggctagtta

SEQ ID NO: 863940 - DNA, 120 bp, Artificial Sequence
  ENSG00000279249_11 (sequence is synthesized)
gtctagaagaataggctgagtaaattagtatttctctggctgttgtggtaacacattgcatgctataacagttttaagtaattacaggtgcattgaaatttatctatggctttgtcatca

SEQ ID NO: 863941 - DNA, 120 bp, Artificial Sequence
  ENSG00000279249_12 (sequence is synthesized)
tattctaaaatgtcatgagtacttttttctgacctcaattactatgaaattggtttccaatatttaattaaccaagaatatcaagtctatagggtattattaaggtgagacttctgtagc

SEQ ID NO: 863942 - DNA, 120 bp, Artificial Sequence
  ENSG00000279249_13 (sequence is synthesized)
cttttcaataaagaccagaattttggagtgccttgaaccttaatcattgatctttaattcttattaagtcaactgcccaccttttaaagactgaggcccaggaagagtaagtttctctga

SEQ ID NO: 863943 - DNA, 120 bp, Artificial Sequence
  ENSG00000279249_14 (sequence is synthesized)
gacaatgcatacagtacagtgcttcttgggtattggctctaagaccagatgcaaagaaaggctaaaatcccatttcattgttcattaggtgagaaccctttgttaagctgtgtaacctct

SEQ ID NO: 863944 - DNA, 120 bp, Artificial Sequence
  ENSG00000279249_15 (sequence is synthesized)
gtgcatagtttcctcatcagcaaagtcagaaaaagtatgtacctgaaggactgattgtaaggctgggatgagagaatccatgtgatcagccctcaccaacaggtgctgcccagttcatga

SEQ ID NO: 863945 - DNA, 120 bp, Artificial Sequence
  ENSG00000279249_16 (sequence is synthesized)
gtgctgctgctgtcctgcccaagtacccagcttgcagagtgccagagttagagtcccaggggtgttctccacagctgcatgcttgatccaggcctatcagatatattccattgaaagtcc

SEQ ID NO: 863946 - DNA, 120 bp, Artificial Sequence
  ENSG00000279249_17 (sequence is synthesized)
tcattctcaaatttaaaacaaagactttttgtgtacctcaatagcaatgcacacacagttggcttcacaaacatattgtacatttctttttttcatatttattcaacaaatgtatattga

SEQ ID NO: 863947 - DNA, 120 bp, Artificial Sequence
  ENSG00000279249_18 (sequence is synthesized)
ctacccaccgtgtgacaggtgttatttgttgacggaaccaggcatcatcagcaaacaaaactgacaaagcttcctgccctctgtggaaggcatctgaggaagagactggattttgtagca

SEQ ID NO: 863948 - DNA, 120 bp, Artificial Sequence
  ENSG00000279249_19 (sequence is synthesized)
acatgttattctcattataaactttatcattggaatactaaagccaaatcatcccccatctccttgatcaggatacccacttaatctaggcagctacacaattgtgagagcctttgtttt

SEQ ID NO: 863949 - DNA, 120 bp, Artificial Sequence
  ENSG00000279249_20 (sequence is synthesized)
tttctgctgaaacatccttaaaaagatacctcacaacccaagatttggcttttcttaaatacgatttttaatttttttcatttctatctagagatttaattggaaatggaaaatcatcaa

SEQ ID NO: 863950 - DNA, 120 bp, Artificial Sequence
  ENSG00000279249_21 (sequence is synthesized)
ttttccaattaaatgtctgttccaatcaacattataccttttaggttgtcattgtcatttttaagtttaagcaactttaaggattttgaatctggctgcctgtaaattaaaggtgaaagt

SEQ ID NO: 863951 - DNA, 120 bp, Artificial Sequence
  ENSG00000279249_22 (sequence is synthesized)
aatcattgtgttggattggaacattttgtcaattgagagtggtttccttgttcttagtgtatgaaaagtttatttttctaatgtagattaataaaggagataaagaaaaacaaaatgagt

SEQ ID NO: 863952 - DNA, 120 bp, Artificial Sequence
  ENSG00000279249_23 (sequence is synthesized)
agttcattccagatcattgggtagagactagaaatgtaccgagcagtgcgcaaagaagatgaggagggttctacagtttctccagatacataccatgacaatttgtttttttaaaaaaga

SEQ ID NO: 863953 - DNA, 120 bp, Artificial Sequence
  ENSG00000279249_24 (sequence is synthesized)
agaaagcctgcaggaaaaaatctacaactttcatcaaattactcagggagactttattctaaagagactgaaaacgaccaacatcaattttgactcctatgggcatctgtaaatagcttc

SEQ ID NO: 863954 - DNA, 120 bp, Artificial Sequence
  ENSG00000279249_25 (sequence is synthesized)
aaggttttaaggtgaaatgtcatgtaccaaaatacacattctggagaagcaggaagctacagaccaacttgagatgaaagtctcatatcaatgttttcccaagtgtgctccttggaatac

SEQ ID NO: 863955 - DNA, 120 bp, Artificial Sequence
  ENSG00000279249_26 (sequence is synthesized)
aggttgacatgatatgatgcccagcaagggaaacaaaacatattcatgttcaaattagttggggaaatgctggactaaataaggtttgatgggattcttttttctgcaggacttctcaga

SEQ ID NO: 863956 - DNA, 120 bp, Artificial Sequence
  ENSG00000279249_27 (sequence is synthesized)
ttcccagatttacctaataaaagcattgtttctgtgggagtttcatttgttattacatgtttcctgaatgcagattcatagactatcctttggggaaccctcgtcctcacgggatgtatg

SEQ ID NO: 863957 - DNA, 120 bp, Artificial Sequence
  ENSG00000279249_28 (sequence is synthesized)
ttcatggtggtgtcttcgagtttgtgcccttgtgaagcattctggcagcaagcatctgaacacttccaaaagggggcgatatttaggagaaatcgctcagcctgagttagaacaaatgca

SEQ ID NO: 863958 - DNA, 120 bp, Artificial Sequence
  ENSG00000279249_29 (sequence is synthesized)
gctgctggtgtctcttggtgcctgggagccctagagtgtcagagggaggagcgtgcacactggaaccagcagcctggtgctgcgtctcagctctgtcgctaactggctatgcacctctgg

SEQ ID NO: 863959 - DNA, 120 bp, Artificial Sequence
  ENSG00000279249_30 (sequence is synthesized)
gcatggcacttaacccttctgagccccagcccgccatctgtaaaaagggcttgatgtgaggattgaatgagatcatgcagggaacacaatgtctggcacttggaagcgtccaccataaag

SEQ ID NO: 863960 - DNA, 120 bp, Artificial Sequence
  ENSG00000279249_31 (sequence is synthesized)
agccaaggcagtagatggcccagctgggtttggtccaggcagagtttaccctctgccctggaggctccaggaaatgctgccacgtggctcctattgccttaaccacatccgacctgttcc

SEQ ID NO: 863961 - DNA, 120 bp, Artificial Sequence
  ENSG00000279249_32 (sequence is synthesized)
tgacagctccccacatctccagctcctttgctggtgctccaggcacctccaaacgtggcgagcccctctcccctgccctcttgtggcagctgacctggcaggagtgggaccaagacatcc

SEQ ID NO: 863962 - DNA, 120 bp, Artificial Sequence
  ENSG00000279249_33 (sequence is synthesized)
aaggcagctcctttccacctgcatgggcactttcctcaggacatccttgcccctggcaccaccttgggccagcaagccacatggaaatggatgcagaggcaccactgtttgctgacaatt

SEQ ID NO: 863963 - DNA, 120 bp, Artificial Sequence
  ENSG00000279249_34 (sequence is synthesized)
atacactgtccttaaggtcacccttggcgatctgtcaccaggagcagacaaacccacacctcaaccatcccatcagagcttgtttctatctgcatctgtcatcgctgatcgcatttgaat

SEQ ID NO: 863964 - DNA, 120 bp, Artificial Sequence
  ENSG00000279249_35 (sequence is synthesized)
atgaaaaacaaatgaaaatttgagagagatattctgaagaataaaaggatcaagttgggtcatttctaaaatctcagagacctaataggatggggtcttagagaaacatcttttgagcca

SEQ ID NO: 863965 - DNA, 120 bp, Artificial Sequence
  ENSG00000279249_36 (sequence is synthesized)
cccacgaggtgaaaattcccaagaaccccatgtctaacctaactccctctctatgtcctgttgcttgagccattctcattaggctgcctgttcggagttcattatctcctaatttttcat

SEQ ID NO: 863966 - DNA, 120 bp, Artificial Sequence
  ENSG00000279249_37 (sequence is synthesized)
ccaggaattgatgaagaatcacctactgcctctcccacacactgtttattctttcatttgatgatatctgttaagtgccctgagatatgtaacctccacttccctcccatataagtgaga

SEQ ID NO: 863967 - DNA, 120 bp, Artificial Sequence
  ENSG00000279249_38 (sequence is synthesized)
tttcacgttgattacttccttggctttcctcatcccttatccacatagcatgtgttcaaaataatgaatattaatttaatgttaatagatatgtgctttcctgaattgtgaggattaaat

SEQ ID NO: 863968 - DNA, 120 bp, Artificial Sequence
  ENSG00000279249_39 (sequence is synthesized)
gaaatcatgtatatagggaggaaaatccattagaaacctcaaaagcagttatgtttatttttgctattgtcacattgttagagtcagaattcttttagctgcaagtgacaaaaccaactc

SEQ ID NO: 863969 - DNA, 120 bp, Artificial Sequence
  ENSG00000279249_40 (sequence is synthesized)
aaactggcttaaggactttattggttgatgcaaaaagcctcgggttaggtcttgccatttaaggtagggctggatccatcaatccgggttaccaggatctgttttctagttgtggcttca

SEQ ID NO: 863970 - DNA, 120 bp, Artificial Sequence
  ENSG00000279249_41 (sequence is synthesized)
ttttcagacaagttgtttccatatgatagcctcatagaaggtactaccagcttagtcctagcaagaaaaaagagtacttactcttcaatatttgcagcagaagtcccaggtctgttctta

SEQ ID NO: 863971 - DNA, 120 bp, Artificial Sequence
  ENSG00000279249_42 (sequence is synthesized)
tgagggcagtttgagtcacttgctcttctctgaacgtggagaaggcactgtttagatgatggaggttggattcaggtgcatcccctggaatggggtttggcattagcttcacgtggtcta

SEQ ID NO: 863972 - DNA, 120 bp, Artificial Sequence
  ENSG00000279249_43 (sequence is synthesized)
gaataaaggggttctccaaaggaaaattagggtaggaatgctgagtaagcagaacaaacagatgtctactttagtccttcccaaagggtgagctgcaatacattgcagactatcagaatg

SEQ ID NO: 863973 - DNA, 120 bp, Artificial Sequence
  ENSG00000279249_44 (sequence is synthesized)
gtgatgaacacggatgcagtagccaagaaaatagatgtgtgtttgtcgtggtctttttcagtcttcaagatctcagttaaacatgaagtcaaccactcactatgatgttatttgaggttt

SEQ ID NO: 863974 - DNA, 120 bp, Artificial Sequence
  ENSG00000279249_45 (sequence is synthesized)
agctttgaagtggaaatgtaccacaaatagtagagccagataaatacaaataaataattttaacagtccattctaaaagatttctttggtaatattctgttggaattgatttctatcttt

SEQ ID NO: 863975 - DNA, 120 bp, Artificial Sequence
  ENSG00000279249_46 (sequence is synthesized)
ttaaataccacttgaagagagctgatcgccaccaactggcctctgggtggatttggccaatggaagcacctgtagagggaagagagtgaggttaggatatttcttcctgctgtctccgtg

SEQ ID NO: 863976 - DNA, 120 bp, Artificial Sequence
  ENSG00000279249_47 (sequence is synthesized)
gtgctaatcgtaatcatcatattcaccactgctgagcagaacagtcagggtgctgccctcagggagttaccatgtagtaaaggagacagatggaatcacacagaggaatgcacgtctgat

SEQ ID NO: 863977 - DNA, 120 bp, Artificial Sequence
  ENSG00000279249_48 (sequence is synthesized)
tgtagcctgactggagtgccatgaaggagaccaagagggcagggtgatggagaaagcacaggatgaagttctcgtcttccttccaacagaatctcagttgcactcagttgttgcccccct

SEQ ID NO: 863978 - DNA, 120 bp, Artificial Sequence
  ENSG00000279249_49 (sequence is synthesized)
cgaacctcccttgagcctcaggagaaaccaccctgattcagaggtccagagaagacctgactagcccaagggtgtcaccgtgtctggatgcgatgcctggaagtgctacagccactcgcg

SEQ ID NO: 863979 - DNA, 120 bp, Artificial Sequence
  ENSG00000279249_50 (sequence is synthesized)
cccagcctgaagatgaaaccaaccccaaacacagccaagcagagagatggaaagaactaggaccctaattacaccactgagcagctatagcaaccagttccagagccctctgacttcccg

SEQ ID NO: 863980 - DNA, 120 bp, Artificial Sequence
  ENSG00000279249_51 (sequence is synthesized)
agccaaacacaccaaaattgacacagagatgtgagccatacctactactgttactgctccatccctagctccaaccacagtgcatggtacatggtagagagccaacaaacacttgaagaa

SEQ ID NO: 863981 - DNA, 120 bp, Artificial Sequence
  ENSG00000279249_52 (sequence is synthesized)
tgaatggtgcatattgagtgggattttccagaggcagacctggagacaaggcttcaagtgcgtgtgttgtattaaggaaatgctcccaggggacaatagcagagtggcagaaatgggaca

SEQ ID NO: 863982 - DNA, 120 bp, Artificial Sequence
  ENSG00000279249_53 (sequence is synthesized)
agggggccagggagccaagaacagagaatcaatcgtctaaacagagccccctgttttttgtttcacctgggagtagcttctacctgatccccaggggaactctgggatgtcagtgacggc

SEQ ID NO: 863983 - DNA, 120 bp, Artificial Sequence
  ENSG00000279249_54 (sequence is synthesized)
tcagcattgcccctgaggcaagggagctgggctttcctaatcccccactcctcagtctctggctaagcgctgtccccaggggacttaatcacccaaacacttccccaagagtggcatctg

SEQ ID NO: 863984 - DNA, 120 bp, Artificial Sequence
  ENSG00000279249_55 (sequence is synthesized)
ctgaccactggaggcactggtacagtgaagcgacagaagggatcagagagggtccaggtggagcacagcaatgtggctgaataataactatattaattcatatagttaattctcaagcaa

SEQ ID NO: 863985 - DNA, 120 bp, Artificial Sequence
  ENSG00000279249_56 (sequence is synthesized)
agcctgcaggagattgtggggacagcagaatgtgacttccaaggctaggtcctgaaagatgctgtgactttcgcctgagtctcttggatcactcgctctgggggaggactgctgtcatgt

SEQ ID NO: 863986 - DNA, 120 bp, Artificial Sequence
  ENSG00000279249_57 (sequence is synthesized)
catgaggacactcaggcatccccatggaaaagtctgcatggcggcatgaagcaagtccttgctgaaggtccagggcatggcaagagaacctgagtttaagaagcagacatcacctgctgg

SEQ ID NO: 863987 - DNA, 120 bp, Artificial Sequence
  ENSG00000279249_58 (sequence is synthesized)
cagcaggcagtatcctctcagtcagccttgatgtccccttccctggatcctcacttctcatggcaatctccccgtctcctcaggtggggatgggatgaacagattcatagactatccttt

SEQ ID NO: 863988 - DNA, 120 bp, Artificial Sequence
  ENSG00000279249_59 (sequence is synthesized)
tatttgaaaatttaatcttgtttctaggagtctagattaacttattagatttaggcgtccctcgtgggtctctgagagaggaggagtagattctcctccctgcattcggccctgcacacc

SEQ ID NO: 863989 - DNA, 120 bp, Artificial Sequence
  ENSG00000279249_60 (sequence is synthesized)
cgacagtgagagccaagagctggatgggcttctccatccagcacgcccaggctggacagaggcccccaactcaggcaactttgtcgggtaaccgtgtgtccagggagtgctttcttgcac

SEQ ID NO: 863990 - DNA, 120 bp, Artificial Sequence
  ENSG00000279249_61 (sequence is synthesized)
gctccgtctccgggccagcttccaggacctgtgctcactgcaagggacacccatcaagccggccctttctcagaggttttggggaggcttcaggaaggacccccagtgggggcccagctt

SEQ ID NO: 863991 - DNA, 120 bp, Artificial Sequence
  ENSG00000279249_62 (sequence is synthesized)
gtcaacatgggctgtgccaaggagttctgagtttccttcaggtctgtattgtatcttccaccccctcagagctccctccctactgcttagaccacacgaagctgtggggctgtgggcagc

SEQ ID NO: 863992 - DNA, 120 bp, Artificial Sequence
  ENSG00000279249_63 (sequence is synthesized)
cagttcacttccctgaccttgtctgcaggtggagacagtggcagtgcccctcccgggctgctgcgtcactcagtgtaaaagcagggaggcactggagagctgctgtctgcaagtttgttg

SEQ ID NO: 863993 - DNA, 120 bp, Artificial Sequence
  ENSG00000279249_64 (sequence is synthesized)
ctacttcaaaaggtgcaggtgggccctcacctcctttagaggtgaggatgagctacccaaagtgaaaaggagcttctcagcgtcgcaatggagtcacggccaggctgcccacaccagccg

SEQ ID NO: 863994 - DNA, 120 bp, Artificial Sequence
  ENSG00000279249_65 (sequence is synthesized)
tccggacctgcaccagtgccacggggtctgccccatcttctcttccctctccttcccctctccctctctctccctgtctctttctcctctctccatgctattgactgaatgtttgaattc

SEQ ID NO: 863995 - DNA, 120 bp, Artificial Sequence
  ENSG00000279249_66 (sequence is synthesized)
cctgcaaatgcattcctaacccccaatgtgactgtgtttggagacagggtctttaggaggtaactgaggttaaatgaggttgtaaagatggggccctgaaccgatgggactggggtcctt

SEQ ID NO: 863996 - DNA, 120 bp, Artificial Sequence
  ENSG00000279249_67 (sequence is synthesized)
atgagaagaggaaaaggggtccctccccatggagggacgaccacagcgaggcagcagccgcccacacgccagagaaggggactcagacggaagccttgcttcaccggcaccttgatcttg

SEQ ID NO: 863997 - DNA, 120 bp, Artificial Sequence
  ENSG00000279249_68 (sequence is synthesized)
gcccgcccccactcgtcggccctcaggttcctggaaagtgaaaatttcatttctttgtggacagctcagagacctaataggatggggtcttagagaaacatcttttgagccacagacttc

SEQ ID NO: 863998 - DNA, 120 bp, Artificial Sequence
  ENSG00000279249_69 (sequence is synthesized)
cctcggccctcctgcccgcccccactcgtcggccctcagccctgcttctttagaattgacagtctggcttcgtggttaattcacagcatctgaggaatacatccaaagagggtgatactg

SEQ ID NO: 863999 - DNA, 120 bp, Artificial Sequence
  ENSG00000279249_70 (sequence is synthesized)
gccatgtcctcgctctcatgaccacatgaattcttctgtatgtcttttctcacagctgagtactctcttcctgacccccttgtggaatggggaaaggaggctgtgacattgtgcttgtgc

SEQ ID NO: 864000 - DNA, 120 bp, Artificial Sequence
  ENSG00000279249_71 (sequence is synthesized)
aaacaataattgagagctttccgagtctcctgcatcttcataaatgattttttgttttatgctgggacagtagttctttaaatagaatattctcccatggaaatcgcccacaatgctgag

SEQ ID NO: 864001 - DNA, 120 bp, Artificial Sequence
  ENSG00000279249_72 (sequence is synthesized)
agtacaccttgcaaaaggtaagtctagaatatagggtgcctcctcagcattgcccagaagctgaagttaggactctctagaataccaaaaacaaatttatagcagttcattaatgtaagg

SEQ ID NO: 864002 - DNA, 120 bp, Artificial Sequence
  ENSG00000279249_73 (sequence is synthesized)
aattatgaaaactgtgtgccaccattatccatagatgaaacaagagccaccacgcaagcacagacacaaagccctgaagatgaagccattgacagggctctcatttattctgtagaaacc

SEQ ID NO: 864003 - DNA, 120 bp, Artificial Sequence
  ENSG00000279249_74 (sequence is synthesized)
cacttgcctgtttttgaaccagttttctttggagcatatgtctcactgtgcaaccaaagtggtgtttatatcctagtcacttggcaaaaattctgtcattgcttcagggagatccatttt

SEQ ID NO: 864004 - DNA, 120 bp, Artificial Sequence
  ENSG00000279249_75 (sequence is synthesized)
aggcctgaagcatggagctggtaatagatgggatttggtacttctgaagaaaagaccctactgcaaatttagagagttaattttttcttttgttccccataatattgttgctagatagaa

SEQ ID NO: 864005 - DNA, 120 bp, Artificial Sequence
  ENSG00000279249_76 (sequence is synthesized)
ctaccttttttgactagaagttaaatatagaggcctaaatcaattaggtaactcccactcattctaaatgagaacatgtttgtttttctccaacgagatgagaaatatttgaggcgcttc

SEQ ID NO: 864006 - DNA, 120 bp, Artificial Sequence
  ENSG00000279249_77 (sequence is synthesized)
ctgatatctctatcacccactgcattttttcacttgatgtatatttccccatgtatttgggataattttcaaataattgccctttagaaatctacttgatattaaatgtaaaaaaaaagc

SEQ ID NO: 864007 - DNA, 120 bp, Artificial Sequence
  ENSG00000279249_78 (sequence is synthesized)
aagatgcaaaattattataggatgcatttacagaaattacaaaatttctataaactatttatggaggaagacttatagagtatatgtcaacacattgctttattattgtccttggttatg

SEQ ID NO: 864008 - DNA, 120 bp, Artificial Sequence
  ENSG00000279249_79 (sequence is synthesized)
agtatggtttttttgaaacctgctttgtactttgggtgttttctcaccattggtacaattgaggcatttttccctcttcttcaaccttgcaaatcacacgtgaggatgctcatagaagtg

SEQ ID NO: 864009 - DNA, 120 bp, Artificial Sequence
  ENSG00000279249_80 (sequence is synthesized)
tcagacaggctgttgttttgctttcaccaataaatcatttataattagaagtagaaaactattctttccagtgcaaatacatccctttcaaaagcagttctctttttgtgaatgatgtct

SEQ ID NO: 864010 - DNA, 120 bp, Artificial Sequence
  ENSG00000279249_81 (sequence is synthesized)
agtgtctaagaaacgagggtaacctttattatatgcattgctctaatcgaagcattgttttttgcggtgaactcaaggttacatgtttaagaaaagcatcgggttaattccattaggaaa

SEQ ID NO: 864011 - DNA, 120 bp, Artificial Sequence
  ENSG00000279249_82 (sequence is synthesized)
agtgtcttattcataaacctttagccactggaaaaacaccattaggaggccacacaagtgtgtatagctggatagaatttgacaactggcaaaacaaaacaatagcctacaattgcagag

SEQ ID NO: 864012 - DNA, 120 bp, Artificial Sequence
  ENSG00000279249_83 (sequence is synthesized)
tgctgtctgtttaaaaaccaacatatctttcaccaacaaatacatattcacctcaacacgagactttcatgtggttattaatatcaaatttttgaatgtccaaattttggagtgtagtct

SEQ ID NO: 864013 - DNA, 120 bp, Artificial Sequence
  ENSG00000279249_84 (sequence is synthesized)
agcagaggtaaactgatttgcctaaggtccttcaactgtcagaggtagaattattttctctctcctggctctaaaacctgtccagattctcctgcaacactgtccttcaaaaacacactt

SEQ ID NO: 864014 - DNA, 120 bp, Artificial Sequence
  ENSG00000279249_85 (sequence is synthesized)
ccgctgactccagtgctggtgatgtcatgctttagctagtagttagaggtgacttaactttaaatatggaatctttttttcctattaagcaatgaggtttagtttgaaaattcttagaga

SEQ ID NO: 864015 - DNA, 120 bp, Artificial Sequence
  ENSG00000279249_86 (sequence is synthesized)
tgataaacccctctcctttttttcttccttctcctcttttgtcctgaacaatgttccatatatattactgccagaaacagattcttgacattcctgttatgcttttccacatcttgtaat

SEQ ID NO: 864016 - DNA, 120 bp, Artificial Sequence
  ENSG00000279249_87 (sequence is synthesized)
catttctacagctgttagcattgccaacaattatatttccacttttaaaaaattgttacaaagatgcagagagaaaagaggaaagccaaggaataaactacaggcaattatgggatattt

SEQ ID NO: 864017 - DNA, 120 bp, Artificial Sequence
  ENSG00000279249_88 (sequence is synthesized)
ttgtgatgtgacattttgggaactgaggcagcatcactgatactgcactactttttaatatctagattttaatcttttgtatgaagataaaattcacatgccttaaacctgaccacaaca

SEQ ID NO: 864018 - DNA, 120 bp, Artificial Sequence
  ENSG00000279249_89 (sequence is synthesized)
taatagggcatttatttttctaattttgataccatccacatttcttaactataagaagaatgcttatgttgtaccaggttatatgatgttgccaagaagtagatgtgtaccatttactaa

SEQ ID NO: 864019 - DNA, 120 bp, Artificial Sequence
  ENSG00000279249_90 (sequence is synthesized)
tacatccttttggaaaatgcgtattaataacatattaaggagtaaattgacgttgtgcaaagtgagcctgtgagtttaaatgtatggattgtacaccttgctcttcctaattgcagattt

SEQ ID NO: 864020 - DNA, 120 bp, Artificial Sequence
  ENSG00000279249_91 (sequence is synthesized)
aacaggatttgatgacctaatgagtttatttctgaatgatttatatttctttgtcagttcaatgatttagtattttaaatttttttaaatcacattttattgagataatgctattagtgt

SEQ ID NO: 864021 - DNA, 120 bp, Artificial Sequence
  ENSG00000279249_92 (sequence is synthesized)
ttctttcccatcacttaacaaagttaagtcactcctctcccaccccacttttgtacctaccaatgtttttttcacagttacaggctgattggcttgacgtgtcttaggataccacccaaa

SEQ ID NO: 864022 - DNA, 120 bp, Artificial Sequence
  ENSG00000279249_93 (sequence is synthesized)
gagagcttcattttataaataccaagctcattttcctaaatattttcaaaaagatagatttatcctcatatagtaaattcagattaataattttggaaagggtcatgtgaccatggtatt

SEQ ID NO: 864023 - DNA, 120 bp, Artificial Sequence
  ENSG00000279249_94 (sequence is synthesized)
acatggctgtggaagaccctccaagatcttgttttgggatagaaggactcagacatccaaacttttaaattaatgaacttattaaattctaaaactttgtaacagtgttaatttgagaag

SEQ ID NO: 864024 - DNA, 120 bp, Artificial Sequence
  ENSG00000279249_95 (sequence is synthesized)
ttgatccaggcctatcagcattgtctttgaatattagcaaataatggaacatgggccaagggtgaaccatgacgaatttgtgttccagcagccctgcttctttagaattgacagtctggc

SEQ ID NO: 864025 - DNA, 120 bp, Artificial Sequence
  ENSG00000279249_96 (sequence is synthesized)
ccaagttcattccaggtacagtcgatgcatcattcacagcagactcgtgagtgtccatcctgtgccagactccatcgcaggtgctggggataccaggcagaggatgcagtgttgccagct

SEQ ID NO: 864026 - DNA, 120 bp, Artificial Sequence
  ENSG00000279249_97 (sequence is synthesized)
atcaggaagacctgacggtcaacaatcgtgcttccaaagccacctgcatattatactcccttgggggtcagctgtaatatacctgtgcctaggccccatcctaggccaatggaatcagaa

SEQ ID NO: 864027 - DNA, 120 bp, Artificial Sequence
  ENSG00000279249_98 (sequence is synthesized)
tctctgggcctagggctggcacacccatcttttttaagcctcaagtgctgttcatgggcagtcagggctgagaccccctgctggagtagaaggatggtgcataggtagcaaaaccacaaa

SEQ ID NO: 864028 - DNA, 120 bp, Artificial Sequence
  ENSG00000279249_99 (sequence is synthesized)
gcaatgggcaaaggccaagtcgcagatggcagttgcgtaagctggaagtggtgacatttctcttcagtgcataaccacagctcagaatgaatatttgtatggatcaggaggccaagtgac

SEQ ID NO: 864029 - DNA, 120 bp, Artificial Sequence
  ENSG00000279249_100 (sequence is synthesized)
ctggtattgagcagtagataaacgttgcatctatttatcaccacccccaaaaaacctttttaaaatggcaaataccattcattaaatgtttatttttcctgcatgaggtcaaacaaataa

SEQ ID NO: 864030 - DNA, 120 bp, Artificial Sequence
  ENSG00000279249_101 (sequence is synthesized)
ctgaagccacacagctgacatcagagccaaagcatgagcctcagtctctctgacccagagctaccacccttgctgccttgggaagaaggaagccccctcctattctatccttgagctgcc

SEQ ID NO: 864031 - DNA, 120 bp, Artificial Sequence
  ENSG00000279249_102 (sequence is synthesized)
ttggcaaggaggggccccttgctgccgccatcctcacaggacaccatccacatgaggggatgaatctcagttgcactcagttgttgcccccctcgaacctcccttgagcctcaggagaaa

SEQ ID NO: 864032 - DNA, 120 bp, Artificial Sequence
  ENSG00000279249_103 (sequence is synthesized)
ccaccctgattcagaggtccagagaagacctgactagcccaaggtaattccgtccccttgccagagtggcttgggcagggacacgggacctatttcaatgaggccaatgagacaaaggta

SEQ ID NO: 864033 - DNA, 120 bp, Artificial Sequence
  ENSG00000279249_104 (sequence is synthesized)
tttctgctggggaggcaggggcttcaagcaaagggtcttgcttgaaagagccaccggaagagggctctctccttccttagggtgtcaccgtgtctggatgcgatgcctggaagtgctaca

SEQ ID NO: 864034 - DNA, 120 bp, Artificial Sequence
  ENSG00000279249_105 (sequence is synthesized)
gcttcttgtctgcaaacgtttccatgatatctctcctgcagccagacgggtcttttcctgccgcctacacagaatggccatggagcatccccaactcttattaaaatggaaaaaaaaaaa

SEQ ID NO: 864035 - DNA, 120 bp, Artificial Sequence
  ENSG00000279249_106 (sequence is synthesized)
ctccacttccaccttttctacatgtctgctctttaaactgcacacgttgattcattcattcattcattcattcattcccttgatattaccattcatttattcatcaagtatttattgagc

SEQ ID NO: 864036 - DNA, 120 bp, Artificial Sequence
  ENSG00000279249_107 (sequence is synthesized)
gttctctctgcaaaacattgaaagccagatcataatttgatgatgaaatattgattatgcatttgtatgcagaggtctatactatatagatagaattcccaccctgtagtatcttctatt

SEQ ID NO: 864037 - DNA, 120 bp, Artificial Sequence
  ENSG00000279249_108 (sequence is synthesized)
ttaagtcagtatgaagatggatgttccccccaggcaaattttgataagatacttgtgtcaatacaaaaagagattaatgccaatgtgaatcaatacccgcttattggtttgggttgcttc

SEQ ID NO: 864038 - DNA, 120 bp, Artificial Sequence
  ENSG00000279249_109 (sequence is synthesized)
ttctccacgcagcagctggcaccaagaggggtttccaaacaccagcggctcccagccaatctgcatatttctttatttaaatcatgagagtgggaagtggcaagggaatggtgggttggc

SEQ ID NO: 864039 - DNA, 120 bp, Artificial Sequence
  ENSG00000279249_110 (sequence is synthesized)
agggggctgcccacgcccactcccaaattgagaagggaatgaaaataaaacaaacgcaacttgtcaacaaatctgggagaagctttattaccatcattagcagtgtgcttgtcctctgct

SEQ ID NO: 864040 - DNA, 120 bp, Artificial Sequence
  ENSG00000279249_111 (sequence is synthesized)
tgcagctggatcccataagtatttccacaacaccctgtacttttcctacatgcaccccagcatcttcatacaataggtgcttaataaattgtccaatgactgaatcctcacaatatctct

SEQ ID NO: 864041 - DNA, 120 bp, Artificial Sequence
  ENSG00000279249_112 (sequence is synthesized)
aaggaaaatgaaagaagaaatttaaataccacttgaagagaggtaaataaatgagaaatggggctgagagggcgggtatttttttaaaaattcattaaatggaaaaatccacaaatgtta

SEQ ID NO: 864042 - DNA, 120 bp, Artificial Sequence
  ENSG00000279249_113 (sequence is synthesized)
attctggtagatttcttagaaattacatcagaggagcatgcttggtcttcccaccctcattaggcctcagtgacaggtacttgaacaactgagcccctaatgtgcatgctcccccacccc

SEQ ID NO: 864043 - DNA, 120 bp, Artificial Sequence
  ENSG00000279249_114 (sequence is synthesized)
attcagcctgagccatctttacatgtggataatcttggatttcccaactgggcttcttgcacactccatggtagaacgtcagaggaaatttttttcaagcaagagctgttagatcatgag

SEQ ID NO: 864044 - DNA, 120 bp, Artificial Sequence
  ENSG00000279249_115 (sequence is synthesized)
cggtctccatccttgctgggttctcagcgtacagcagggactgggcttatcttgactgtgcatctgctgtgtttcctgcccagcccccactgccacctgcaatgccctatatttagtgct

SEQ ID NO: 864045 - DNA, 120 bp, Artificial Sequence
  ENSG00000279249_116 (sequence is synthesized)
tctttaaaatctcatttatcatctcccatccccaccaaaaagtaaggtccaaaaccacggaggattttttttttttgcgggggcgggggtggtattttttgttcactgctgaatttccaa

SEQ ID NO: 864046 - DNA, 120 bp, Artificial Sequence
  ENSG00000279249_117 (sequence is synthesized)
aaattattatagaaccacttatctgaggcttttaaaagtgatgtgttacagagatttagggaactgcaagattgcagataaagaatttatactgtcaactgttctatactttaccttctg

SEQ ID NO: 864047 - DNA, 120 bp, Artificial Sequence
  ENSG00000279249_118 (sequence is synthesized)
ctttaaatgcggccttatattttgaagtcaaacatttattttctctcactgcgttctgaatttcctaccacagtgcattttgagaaatgaatataacagcagtcttcatagatgccatat

SEQ ID NO: 864048 - DNA, 120 bp, Artificial Sequence
  ENSG00000279249_119 (sequence is synthesized)
tcatggcaactctgtcccccgccaacaccacaccctggaaaaaaaccaactttctattgttggaatgaggtaacattttcaggaaaagggaaccattttctcacaggatatagaacaaat

SEQ ID NO: 864049 - DNA, 120 bp, Artificial Sequence
  ENSG00000279249_120 (sequence is synthesized)
tcaaccttttattaaatcaaaatggattctctaatgtttatacatatcatataggatttcatctctttcaatcttggttcaaaggcccagacagtaccattccctagtatttagtccatt

SEQ ID NO: 864050 - DNA, 120 bp, Artificial Sequence
  ENSG00000279249_121 (sequence is synthesized)
tgctcataaagcagaagagaaaagctactttgttccgaagggtgttagatttaggattccaaggttatttcaaattaatgcctggaactagactataaaatgcaggaaagattctaagtt

SEQ ID NO: 864051 - DNA, 120 bp, Artificial Sequence
  ENSG00000279249_122 (sequence is synthesized)
gttcaaagatgaaatatcttaactttcaccaaaaactctgtcttctgggtattttttgtttttctgcctttccagatttattttaaatacaacatttttgctgtttacatttttaaaagt

SEQ ID NO: 864052 - DNA, 120 bp, Artificial Sequence
  ENSG00000279249_123 (sequence is synthesized)
tacatttcaaaattgttcataattggacactttcataaaatgtaggcaaatgcagttttactttttaatgaaggacaagtctgttgataacattttgattcttaaaattttttttatctt

SEQ ID NO: 864053 - DNA, 120 bp, Artificial Sequence
  ENSG00000279249_124 (sequence is synthesized)
ataaaaatgaaacaatgcatttaaagtgtcttcagctcttatgttaataccaaattatacattttcttagcccatgttcaggagagacaatatatcttccaaattaagagaagctggcac

SEQ ID NO: 864054 - DNA, 120 bp, Artificial Sequence
  ENSG00000279249_125 (sequence is synthesized)
catttttaaaacaaggccttgaatctgctgtggtatgtgctggtaggaattttgtatgaagctgttattgaagtagatgacattaaggtcaaaggaaaaaaaaaacagaaaataatgtaa

SEQ ID NO: 864055 - DNA, 120 bp, Artificial Sequence
  ENSG00000279249_126 (sequence is synthesized)
tcctacagagctgctcttaagatcttgagagaaaaaccacgtaggtaacatcaaacactagttggaatctttccaagaagtaattatctgtgtgctgtttgtggtggttgattatgggaa

SEQ ID NO: 864056 - DNA, 120 bp, Artificial Sequence
  ENSG00000279249_127 (sequence is synthesized)
caaaccaaggtttagccaattcagcaaacatttatggagtgcctgcaatgtgcatgtcactgttttaaggcctgtgcctactgtaaaggtgacccacacatgatgcctgccttgcaggac

SEQ ID NO: 864057 - DNA, 120 bp, Artificial Sequence
  ENSG00000279249_128 (sequence is synthesized)
ttggagttcagcgataataagagatgcatacctgaaaagcctatttaagactcttccggttctacaaagaaggcttcttgaaagtggtagctttgattactctttggatttatttacatt

SEQ ID NO: 864058 - DNA, 120 bp, Artificial Sequence
  ENSG00000279249_129 (sequence is synthesized)
tatcctataatcagaaggtatacaaaacagactcacacatatataaaattaatagattagatagcatttaaacaaatatttcaggtaggtacttcaaatgcatttgacatttatcaaaga

SEQ ID NO: 864059 - DNA, 120 bp, Artificial Sequence
  ENSG00000279249_130 (sequence is synthesized)
aatggtaagtgctgtcatccgtgggtggctggattaacatgtgggactacttatcaccaattttgttagggatcttagggaaattcctggatcttatattcacaagcaattgtataaata

SEQ ID NO: 864060 - DNA, 120 bp, Artificial Sequence
  ENSG00000279249_131 (sequence is synthesized)
ctccttcattttcatattatgttggaagcttagcatgaaagaacgtgcctcagaggaaaccataggtaagcatactttaacaaaagttagtgtcatcatgtttgtgtctttgcctgtggt

SEQ ID NO: 864061 - DNA, 120 bp, Artificial Sequence
  ENSG00000279249_132 (sequence is synthesized)
tttttaaatgtataatgtttaacgttgatttggctatcaaattacattttcttttgttaaaaaattctgtaaattagaaatgtactgaatcatttatttagcagactgaaggtgggtaat

SEQ ID NO: 864062 - DNA, 120 bp, Artificial Sequence
  ENSG00000279249_133 (sequence is synthesized)
gttggctgaacaggtttaagccacagtaatttgaaaatgtaaatacataaaataatgtcatttctcttccactcaatgtttcttcaccaaataaagtccagcctgctctgaatttgttgc

SEQ ID NO: 864063 - DNA, 120 bp, Artificial Sequence
  ENSG00000279249_134 (sequence is synthesized)
cagtaggaacaatgttacagtgaatcatggtttaatataccttgaaaatggcacatctgttctgtgatagcttaccaattttagcctctttataaaatacgaagagtttgtcaaccagaa

SEQ ID NO: 864064 - DNA, 120 bp, Artificial Sequence
  ENSG00000279249_135 (sequence is synthesized)
taatctagaacctggcaattcaaataccattcaaagcaaatgttttatctaataactggaactaaatgttaggcctcatgacagttcaatatttactaaataagtttaataacagggtaa

SEQ ID NO: 864065 - DNA, 120 bp, Artificial Sequence
  ENSG00000279249_136 (sequence is synthesized)
gccctcagtatccagagcagagacaagcacaccatatttacacatacaaattctgcctttagccatctgaaagggccccgaactattgcagcaagcaaagagtctttgcattgtcctaaa

SEQ ID NO: 864066 - DNA, 120 bp, Artificial Sequence
  ENSG00000279249_137 (sequence is synthesized)
atccatacaatactttatattttacacattttaatagctagtttaacaaataacaagtaccatgcttaattctctgcatgcattatttcaactaattattggaataatcttataaagtgg

SEQ ID NO: 864067 - DNA, 120 bp, Artificial Sequence
  ENSG00000279249_138 (sequence is synthesized)
gtactttcgtctcagcttacaggtgagaaaacaaaagttaaatagatcgcccagggctctgctggaacgtgttaagcagggatttcagcctgtccagtcagaccccagaagttgtgttct

SEQ ID NO: 864068 - DNA, 120 bp, Artificial Sequence
  ENSG00000279249_139 (sequence is synthesized)
taaccattagcaacacatcatcccaggcaggccctacatgagcctcataaccaattttatgctggatagtattatccctatttcacagatggcaaaactgaggtccagagactttaagtg

SEQ ID NO: 864069 - DNA, 120 bp, Artificial Sequence
  ENSG00000279249_140 (sequence is synthesized)
acctacccaaaattacagtcatgagcagaggcactggaatgtagggccttgacactctacctcacgtggtcctctttcctgttttgggtagttctccactaccactactcatttctgatg

SEQ ID NO: 864070 - DNA, 120 bp, Artificial Sequence
  ENSG00000279249_141 (sequence is synthesized)
ctggaaaggctgtgttttatacatttctgtttctggcttggaacgaaacactctgggtctctgcttgatcagtgtcccctctaaactgcacctcactacagtagggatggcataagatac

SEQ ID NO: 864071 - DNA, 120 bp, Artificial Sequence
  ENSG00000279249_142 (sequence is synthesized)
ttctttacacagcatctttttgttcccacctcacccccagagctgtaataggtagagccagccaaatgtcaaagggatgatttgtcttgtcaccactagtttcccttttctctgccttgt

SEQ ID NO: 864072 - DNA, 120 bp, Artificial Sequence
  ENSG00000279249_143 (sequence is synthesized)
atgtaacaggaatattctttagttcctccttatgttctaaagcacctccccaacctaaaaatagaagaggagttgtgggtcatttacactttagtgtgaatttgcccttgtgactttgcc

SEQ ID NO: 864073 - DNA, 120 bp, Artificial Sequence
  ENSG00000279249_144 (sequence is synthesized)
aaggctgttgtgcctaaccctttcaatctaacagcagaatgagagtctctggactatcctggctccttccctgagaagaatgaactgggaattgttggtctagacatcaagactaccaga

SEQ ID NO: 864074 - DNA, 120 bp, Artificial Sequence
  ENSG00000279249_145 (sequence is synthesized)
gacctattgctcagagatgtttgggctgtacaatttctgtagatatggcatctggagcagccttttctaagcaatggcattatcattccaggctctctcgctctttccatctctccacca

SEQ ID NO: 864075 - DNA, 120 bp, Artificial Sequence
  ENSG00000279249_146 (sequence is synthesized)
ggtggactcttgccctccaccccttccaatttgtcagtgattcagagaacattctccatccttccaatgattacattccttcatcttgctggggcgccaattcagtgatggagcggctct

SEQ ID NO: 864076 - DNA, 120 bp, Artificial Sequence
  ENSG00000279249_147 (sequence is synthesized)
tgggagcagccttggcttatagtgcagctctctgctaccttcaacaggctggtattcggggtgcttagatgtgactggttgtacgcacgtgtgtgtatgtgcatgtgtgtacagcagtaa

SEQ ID NO: 864077 - DNA, 120 bp, Artificial Sequence
  ENSG00000279249_148 (sequence is synthesized)
gagctttcgaggtagatacttgaggaagcctcagacatctagccccattactggggcaatgtcttacttgggtttttccagaaacagacctggagaccaggattcaagtgccagtggtat

SEQ ID NO: 864078 - DNA, 120 bp, Artificial Sequence
  ENSG00000279249_149 (sequence is synthesized)
atttgggatgtgaaccctgcaatgctggtaggagagtggagaagtgaggcaaggaaaggaaggccgtcaaggggcgtgttaggaggtcattcaccaccgcaggtagcccgctggggacct

SEQ ID NO: 864079 - DNA, 120 bp, Artificial Sequence
  ENSG00000279249_150 (sequence is synthesized)
ctgggagcaagtgtggcgcacaagcctcagcattactgccctgtgccttgaggagtaagggataaggattttccccaccagttccctgtagtccttggtgagagcttctggggtggaggt

SEQ ID NO: 864080 - DNA, 120 bp, Artificial Sequence
  ENSG00000279249_151 (sequence is synthesized)
taaggtctttaggtcagagaaattttctttagtttcggaaaaatctttcaggccgaggtccagacactcactggaacacactgaagtggttaggtccaagggctgtaggcagagctccca

SEQ ID NO: 864081 - DNA, 120 bp, Artificial Sequence
  ENSG00000279249_152 (sequence is synthesized)
tatccatctgcagaggtgtttcaggtggaaggagtggagacagccttctctgctccacactgtcttcagcaagggtttctgtatctgtgcattgaggattaaattattcacatggtcaga

SEQ ID NO: 864082 - DNA, 120 bp, Artificial Sequence
  ENSG00000279249_153 (sequence is synthesized)
gaagcccatcaccactgatagttattgtaggtatggaaaactaacgactaagaagggagaaaaatataccaagcagttggcttggctgaacacaagtaaagactcttacagtcactggtg

SEQ ID NO: 864083 - DNA, 120 bp, Artificial Sequence
  ENSG00000279249_154 (sequence is synthesized)
tgaactgcttattatcaatgtctgattacagtgctgcatactaatgattatgcatgtcattaaatgtgtcagattaactttgttataaaatttatgacaacattaaattttattcacatg

SEQ ID NO: 864084 - DNA, 120 bp, Artificial Sequence
  ENSG00000279249_155 (sequence is synthesized)
ctctgttatgttgctattacccgggacactttaataccataaatatgttttctaaccttactgagttatttgctaatttaacatccttattttatttagtgttccaattatgagcatctg

SEQ ID NO: 864085 - DNA, 120 bp, Artificial Sequence
  ENSG00000279249_156 (sequence is synthesized)
tggcttgcagaattgtgtcaacttgctagagacagacttttgatttagcattcgtttccatttttatgcttatctgtcttttttatttgtgtttgcagaattttcaatttctcatcaatc

SEQ ID NO: 864086 - DNA, 120 bp, Artificial Sequence
  ENSG00000279249_157 (sequence is synthesized)
tctctgggtcattattattgtcttagcatctcattgtccagattttcaagaagttaagaaagcttagtcagatggttgactatattttgtaaatatatgactcagctaatggctctttga

SEQ ID NO: 864087 - DNA, 120 bp, Artificial Sequence
  ENSG00000279249_158 (sequence is synthesized)
aatttacatggactttttttacttagtagtcttagtctgtgtaatgccatctttgagggacttccatgcacaatctcatatcatctccgtatatttgtttctagctgggtatttgaggct

SEQ ID NO: 864088 - DNA, 120 bp, Artificial Sequence
  ENSG00000279249_159 (sequence is synthesized)
agatagactcacaagatgtttacagaaacaaagatgagtcaaaaatccaaatctcctaattagtgtaattttcaatatagcccagtcctgtccagcatcaggagacttgacagcccccaa

SEQ ID NO: 864089 - DNA, 120 bp, Artificial Sequence
  ENSG00000279249_160 (sequence is synthesized)
accaaaagggcatctgaaatacatattgctcatccctccgcctgcctcccccatgccgagacaggagctgtggtgagcgtgtggatggcacaggctctgcgggtgtctgactagagagcc

SEQ ID NO: 864090 - DNA, 120 bp, Artificial Sequence
  ENSG00000279249_161 (sequence is synthesized)
tcagttacgcgctctccacctcatcacacagcagccccgtgtaatagaaatcgcttattatgagggttggctaaataaaggcacattgtgaccagtcacaatttctaaatgaatcctcct

SEQ ID NO: 864091 - DNA, 120 bp, Artificial Sequence
  ENSG00000279249_162 (sequence is synthesized)
gactgatctggtcctgacactttcaaagctgccgttattactgaacctgaacatgtggaaaggacaagtcaagacagaatgataaaattcttgaatgcttttgcttaaaattattcattc

SEQ ID NO: 864092 - DNA, 120 bp, Artificial Sequence
  ENSG00000279249_163 (sequence is synthesized)
tcttgtgtgtgtgtaaatggggacacacacacacacatacacacactccatagacactctcgcatacttaaacggttccctaggtgcacttttatcattttatctcatctcactttggta

SEQ ID NO: 864093 - DNA, 120 bp, Artificial Sequence
  ENSG00000279249_164 (sequence is synthesized)
gtttccattgtagtccttctgtagactaattctctaaatatttagaaaaataagagggtcttttatctgtgtgtagtcgtggattttgctgcctcttaaagcattatcttttctaagtcc

SEQ ID NO: 864094 - DNA, 120 bp, Artificial Sequence
  ENSG00000279249_165 (sequence is synthesized)
ttaagtgttagaagtgggaaaaccatctttcttttaaatttagcaaatggcacttatgtgcatatgtactgatgccatatacacacttacactgtaatagaaacatcgtggaaaagcaaa

SEQ ID NO: 864095 - DNA, 120 bp, Artificial Sequence
  ENSG00000279249_166 (sequence is synthesized)
ccataggcttttatcataggcatgagctttttccctctcatctccgcctggaaagatggttaggagaatgagaggcctctctggatctgtatttataagccttactggaaaaaaaaagtc

SEQ ID NO: 864096 - DNA, 120 bp, Artificial Sequence
  ENSG00000279249_167 (sequence is synthesized)
aattattttttagactcagctcacaccataataaatgtgaatctaaacaatcgctcaagtgctttctaagcaatggttctatctatgatcactcagacttccttcttttatttagtaaaa

SEQ ID NO: 864097 - DNA, 120 bp, Artificial Sequence
  ENSG00000279249_168 (sequence is synthesized)
aggtaacaaataagaatggagtgccatttgcatgtttcttatttttactcaatatggagtccagtggttgagtaggctcatccagtagcaaagagaagcaaacaaaattgatttcctgta

SEQ ID NO: 864098 - DNA, 120 bp, Artificial Sequence
  ENSG00000279249_169 (sequence is synthesized)
gcccacagtgattttccctagatttagagagcatgtgattccaagatgggtgtggggtaaaactctcaaggctttcctggcgagagacccgggcatgctggtggagaaaccagacatcat

SEQ ID NO: 864099 - DNA, 120 bp, Artificial Sequence
  ENSG00000279249_170 (sequence is synthesized)
gcttgggaggttggggcctctctcctccttgaatgagctctgttttaggatgttgttcatgtgaaagtattgcacttacctcagcataaaatgtcaagccatcacatccttgggatagaa

SEQ ID NO: 864100 - DNA, 120 bp, Artificial Sequence
  ENSG00000279249_171 (sequence is synthesized)
acaattaaggaaggatttatgtttgtaaaaacatgtgcctattaaggtaagtaattagggcacatgaaagaaagataatatggagatgtaaaaattgggggttctgcagtcagaccccct

SEQ ID NO: 864101 - DNA, 120 bp, Artificial Sequence
  ENSG00000279249_172 (sequence is synthesized)
ggatttaaatcctagctccacttgctgagtgaccttgggctagtcattgaacctctctgagcctcagcttctttccctgtgaaatggggaaactaatgggtttattgtgagtattaaatg

SEQ ID NO: 864102 - DNA, 120 bp, Artificial Sequence
  ENSG00000279249_173 (sequence is synthesized)
agttaatacatgcaaaacaattcacacatagtaagcatgaaataaatactaattattatcattgttacgcactaagaaaggatttttgcaactaaagtgtcaaaagaaatggagatgcta

SEQ ID NO: 864103 - DNA, 120 bp, Artificial Sequence
  ENSG00000279249_174 (sequence is synthesized)
aagaattatttggctttaaaagatgaattccagtacaaaatgaggctgtttaacaaccagattccatattacaatcagaaagttccagcagagtacctcaggcttcatctggggaacatg

SEQ ID NO: 864104 - DNA, 120 bp, Artificial Sequence
  ENSG00000279249_175 (sequence is synthesized)
tttaaaggtaccaataatttttgggtttttttttccaattttaataaatgaaattctcattcctttctgtctgtctctctgttagcgctattgctttatcttactctgtagtctgtattt

SEQ ID NO: 864105 - DNA, 120 bp, Artificial Sequence
  ENSG00000279249_176 (sequence is synthesized)
ctcttcctagtttcttttttttttagaactagttgtgaattctttattctctcacatagacatatgacagtggggaaggagggcatgtgtgtttcctaaatgttagcaagaagtctgtct

SEQ ID NO: 864106 - DNA, 120 bp, Artificial Sequence
  ENSG00000279249_177 (sequence is synthesized)
tgccatctccatagagtggaaaattcagcaagtagagtctgttaatgtcattccccttcaaatcacattcaaaagtgtgcttaatgcactgtgtacattaatcagacattttgatcatga

SEQ ID NO: 864107 - DNA, 120 bp, Artificial Sequence
  ENSG00000279249_178 (sequence is synthesized)
gtaatggtgatgccttcagaagtttggggtgggggtgtgggttttgtatatcttggaaggaatcctaagtccttgggtgacttcgaagcagtctgtatgggcgctcctcccacatccatt

SEQ ID NO: 864108 - DNA, 120 bp, Artificial Sequence
  ENSG00000279249_179 (sequence is synthesized)
gcatctttgtcagacacatggcccctaggctccactttgtccataggcatggaaaggtgaaagtgcctgggaattaatatctctggggacactctgaagcaatgactgctggttatatgg

SEQ ID NO: 864109 - DNA, 120 bp, Artificial Sequence
  ENSG00000279249_180 (sequence is synthesized)
gtataaatactccagctccctcaccccttggctaaagtaattccaaggcacgtactttgcagttttccagagttaccctgtgagattcaactgccatcacccactgtggtagctgactta

SEQ ID NO: 864110 - DNA, 120 bp, Artificial Sequence
  ENSG00000279249_181 (sequence is synthesized)
ataatgcatcctatattgtgtggccgccttcccttccctgtctaacttctccctcactacccagactctctgtatctcccaatacaccactcacttgttcggggtcacttctggagtttc

SEQ ID NO: 864111 - DNA, 120 bp, Artificial Sequence
  ENSG00000279249_182 (sequence is synthesized)
tgaatctactaagcctagactaggtatcatcaaaaccactctgggctgcaaactggcagggtgcaggccgcaaatttggcagagctctgctttccctgggtttggaattccactgactca

SEQ ID NO: 864112 - DNA, 120 bp, Artificial Sequence
  ENSG00000279249_183 (sequence is synthesized)
gagcctgaataatcgtggaggcagacctgtcaaggtgttatctgaagagctgttggggaagtggaccaagaccacagctgcccattctctcaccccaccttctttctgcagagtggccca

SEQ ID NO: 864113 - DNA, 120 bp, Artificial Sequence
  ENSG00000279249_184 (sequence is synthesized)
tttgtgattcaggagaaagagtgcaggagcagtggtcagcatgctgtgatcgatgatttctgagcgtgggtgggccttgacaaatgctcctatccacttcattccctcttaatagaccca

SEQ ID NO: 864114 - DNA, 120 bp, Artificial Sequence
  ENSG00000279249_185 (sequence is synthesized)
tcagacaggtgcttgttgttttccagtgccaacctgggtaaaccagtcatcatgtgccccagtgtgtcaaagaaaatgcctgcttcccagaaggtttcccactaatggggaaaagaaggt

SEQ ID NO: 864115 - DNA, 120 bp, Artificial Sequence
  ENSG00000279249_186 (sequence is synthesized)
tgattcacacagccttttattgcaaaccaattcattctttggcaatctgaaaccaaaactgcacatttagccaggcaggtcttttaaaagcatgtcctttaccgtactgtccattgcaga

SEQ ID NO: 864116 - DNA, 120 bp, Artificial Sequence
  ENSG00000279249_187 (sequence is synthesized)
ctcccatccatatcttctttcttgttttgtgttatcatttttgtgatgctttaatactcaatacatgaactgaagctatgtggcttctgtatcgcagtgtattaggattccagaaagaca

SEQ ID NO: 864117 - DNA, 120 bp, Artificial Sequence
  ENSG00000279249_188 (sequence is synthesized)
tgcaatccctgagcagacaataaatttgattttgcacaagtggcatcctttatactttgctcataaggcgatctctcaagtgtatttttttttctgaaacacaacacaaatagtctgatg

SEQ ID NO: 864118 - DNA, 120 bp, Artificial Sequence
  ENSG00000279249_189 (sequence is synthesized)
aagtaaaaatgggttgcatgatgggttttgtgctcagcaaaaagaacttggacaaagcagccatgctgatgttcttatttacaaaggttgccgtctgggaaattaatctctgctgttgct

SEQ ID NO: 864119 - DNA, 120 bp, Artificial Sequence
  ENSG00000279249_190 (sequence is synthesized)
cagtaattaggaaaatttaggacccctagtgctccagcatcttgcattaaaggttgtatgtcattggtgttttcatgagagtttgctggatttctgtcattaataacaggcataagccca

SEQ ID NO: 864120 - DNA, 120 bp, Artificial Sequence
  ENSG00000279249_191 (sequence is synthesized)
gcaagcagtagaatatgcattgcatttaatcaatttgctatttgtattcattatgcatgtcatccgttttgagtcatgaaaaattgaaaggccattacgaatagaaagagcatcatggat

SEQ ID NO: 864121 - DNA, 120 bp, Artificial Sequence
  ENSG00000279249_192 (sequence is synthesized)
tacaaatgatgtaacaagagcataagcgctattaattggtcaattgtgcttgtcggtacatttaaagtgattaaggcagaaagattagaaaggacacgaatgtgcttgggaaacagaagc

SEQ ID NO: 864122 - DNA, 120 bp, Artificial Sequence
  ENSG00000279249_193 (sequence is synthesized)
atagcaacacaagggctctcccaagtcctttgtgcccaaataaatgcagcaaaatccaatggcatttattccaactaattcattaaacagatattagttgagcacttaccatgtgctgag

SEQ ID NO: 864123 - DNA, 120 bp, Artificial Sequence
  ENSG00000279249_194 (sequence is synthesized)
tacaaggattgtactgagtacagcagaaaacaaaataagtgaagcccttgacctcagggatttaccttccagaggggagggggaagtatgaaatgaacaaatagatatacaatataatat

SEQ ID NO: 864124 - DNA, 120 bp, Artificial Sequence
  ENSG00000279249_195 (sequence is synthesized)
attgtagtagcagagaccatgaagaccaccagaagcagagaggaagccctctttggggaaatgacatttgaacagaggtttaaatgaagaaaataaaaagacagggggtccgagcacagt

SEQ ID NO: 864125 - DNA, 85 bp, Artificial Sequence
  ENSG00000279249_196 (sequence is synthesized)
ggaggctgaggtgggaaaatcacttgagcccaggagtttgagacctgggcaacatggtgaaactcagtgcacacctgtagtccca

SEQ ID NO: 864126 - DNA, 120 bp, Artificial Sequence
  ENSG00000279249_197 (sequence is synthesized)
tgatagagcgaaaccctgtctaataaaagaaaaataaaattaaaaggctacatggatatctgggggaagaatagactcaatatcccccactcccattccaacactcaagaagaaaagaaa

SEQ ID NO: 864127 - DNA, 120 bp, Artificial Sequence
  ENSG00000279249_198 (sequence is synthesized)
attcttgcaattatttttttactcaagtgattttgtgaggcttgacccaataatggaatggctttgccaaggctagagaactcactcagccggttttcccattacagacctcttgggtga

SEQ ID NO: 864128 - DNA, 120 bp, Artificial Sequence
  ENSG00000279249_199 (sequence is synthesized)
tagcaattctgttaaagtggaaactgatggcatcatttgccatttttactgtccccatacatagtccttaccatggcatgcagacccctacgctatccagctcctgcctcccatttcata

SEQ ID NO: 864129 - DNA, 120 bp, Artificial Sequence
  ENSG00000279249_200 (sequence is synthesized)
ccactcctccttctcctgccaagttctagcccctggactttctgttgctcacatttccagttcgttcctgcctctgcacccatgcatttgctgtctcctgccctcagaaatccagacctg

SEQ ID NO: 864130 - DNA, 120 bp, Artificial Sequence
  ENSG00000279249_201 (sequence is synthesized)
agctcccaggccacatcctcagagacaccctccatgaccaccagggttgcacctgctccctggcccctgtgatttgatcccactacactcattactgcctgagttctgtgctatctgctt

SEQ ID NO: 864131 - DNA, 120 bp, Artificial Sequence
  ENSG00000279249_202 (sequence is synthesized)
actcgtttcttacctacctcccatgtttgatataagttccatgagactaggcccaggtcacttgagttcactgcggtatcccatcacctggaacagtgcccggtacaaagaggctcagta

SEQ ID NO: 864132 - DNA, 120 bp, Artificial Sequence
  ENSG00000279249_203 (sequence is synthesized)
cgcccaaatcaaatgaatgaatgagtggatcaatcaatcagccaaccagccaaaaataaaatgaaaaattgacagttgggtttctgcttttgtattcggtaactattttaaaattttgta

SEQ ID NO: 864133 - DNA, 120 bp, Artificial Sequence
  ENSG00000279249_204 (sequence is synthesized)
tttaggtagctatttttttaaaccacatgaaagaaagggatgtttgttctgcacagcattctctggagtgattaggtagcattggtatttgtgcttcatgtgtctacaatctattgccat

SEQ ID NO: 864134 - DNA, 71 bp, Artificial Sequence
  ENSG00000279249_205 (sequence is synthesized)
atcagggggaatgaattaacatgttctctaagactatgttagaaggtcagagcccagcacagtggtacatg

SEQ ID NO: 864135 - DNA, 120 bp, Artificial Sequence
  ENSG00000279249_206 (sequence is synthesized)
aggattccaagttcattccaggtgaaaataacaggaaaatgataataactttataagggccaaattaccactcacagtggtacttctgagtgtgtgttggaaaattacatcttttgtcaa

SEQ ID NO: 864136 - DNA, 120 bp, Artificial Sequence
  ENSG00000279249_207 (sequence is synthesized)
gtgataaactctgattttttttaaaaaaaaagcaatgttcgtgatctagtaagcactttacaaaagctaacatgctttatgaaggtgtgtacacagactgcctaacctcacactgcagcc

SEQ ID NO: 864137 - DNA, 120 bp, Artificial Sequence
  ENSG00000279249_208 (sequence is synthesized)
tcacttactctaacacactctatggccctccatggaggagcagaagcttccacccacgggatgacttcagatgaacgcttttgatgctgggagcagcagccacccatgtctccagatacc

SEQ ID NO: 864138 - DNA, 120 bp, Artificial Sequence
  ENSG00000279249_209 (sequence is synthesized)
tgttcctctgactctgcctccttggattttacagttaccaacagttcatgatgatcttcagaaatgttcacagtttcagaggagccacatatttgaatgtttaaagaaagcaatattttg

SEQ ID NO: 864139 - DNA, 120 bp, Artificial Sequence
  ENSG00000279249_210 (sequence is synthesized)
caaaacgcaaggatgatccaagagagccacaggaggatctagcagccctttgtcgggaaatgaaagtaaccaacaagatcaggcctggaaagaccttcctggatcccccaggacatgctc

SEQ ID NO: 864140 - DNA, 120 bp, Artificial Sequence
  ENSG00000279249_211 (sequence is synthesized)
ccttctgtgaagcagcggttctcagcccttgctgctcattgaagtcaactggggtgctagaataatactgatgcctgatgtgcccaggctggagtacagtggtgtggtcatggctcactg

SEQ ID NO: 864141 - DNA, 120 bp, Artificial Sequence
  ENSG00000279249_212 (sequence is synthesized)
aagcatgcaccactgtggtgggctctgaccttttaacatagttttagataatatgttaattccttgcctctgatggttaccaggcagattctcttattttcctttctctcatacctgcca

SEQ ID NO: 864142 - DNA, 120 bp, Artificial Sequence
  ENSG00000279249_213 (sequence is synthesized)
ggatctcatacctgtgccagagattcctgaggaaggaggggcagtgtattttggaaaagctcccaggtgaatctgaagtgcagcctgggttgggaaccactgatgtagtcccagattagt

SEQ ID NO: 864143 - DNA, 120 bp, Artificial Sequence
  ENSG00000279249_214 (sequence is synthesized)
gactgaaatgggtaataagggaagcagtgttggcagcacattctaccaagctcaaagtcttgacatgtcctggagccagcagagggcaaagacttcattgctaagagagaagctttagtg

SEQ ID NO: 864144 - DNA, 120 bp, Artificial Sequence
  ENSG00000279249_215 (sequence is synthesized)
ggagaagataaataagtctgtttccaggcaaatgtcccctttctgctgtcagcttcctggctatttctgccctgcctgagcctgaggatttagacatcactttcacgtaaatgccataaa

SEQ ID NO: 864145 - DNA, 120 bp, Artificial Sequence
  ENSG00000279249_216 (sequence is synthesized)
tgccagcttccaggtctctccacacattaatgacattgtggtgagaaaagccacttgcaaatgaagtaaatccttgaaagagtcagacaatagtgggctttgtaagctctgccttacagg

SEQ ID NO: 864146 - DNA, 120 bp, Artificial Sequence
  ENSG00000279249_217 (sequence is synthesized)
agagcctgcagggggattttcggtgatctatgcagggatcaagctgccatggccaaggctctcaggacaaaggcctcatggagtcttttgtttgccaccgcatgtgactttactcctgca

SEQ ID NO: 864147 - DNA, 120 bp, Artificial Sequence
  ENSG00000279249_218 (sequence is synthesized)
tctcctgcagagctctcccaggacagttgagtaagagtggagaagcaattggggtgaaccccaagactcagcctgatccgttgaggggctttgcagcataaattacacctcagagcctgg

SEQ ID NO: 864148 - DNA, 120 bp, Artificial Sequence
  ENSG00000279249_219 (sequence is synthesized)
ggcaaaggagctgtgaggcatttttctctacatgggttagtcattggctacctgggctctcggtaagagtgatgtggctccagagcccaagaaaagcggcccctgcggtcctggggtggg

SEQ ID NO: 864149 - DNA, 120 bp, Artificial Sequence
  ENSG00000279249_220 (sequence is synthesized)
gagctcttagcagcacagcactcagaagctgcgagatgggtgcgcagagctgtgctagggatcctggagtctgggcaaacagcactgcatgtgctccacaggtgaagccttgcctcctcc

SEQ ID NO: 864150 - DNA, 120 bp, Artificial Sequence
  ENSG00000279249_221 (sequence is synthesized)
atccgtcagctcagcaccctgtatggaaatgcaaactgtgacgtgtgcttctgcgtttcccacctctgatatgatagatggcaccgcaatgcttttctcttcctcagggcccatttccag

SEQ ID NO: 864151 - DNA, 120 bp, Artificial Sequence
  ENSG00000279249_222 (sequence is synthesized)
gcccatttccaggctggactgcagtggtgtgatctcccctcactgcagcctccacctaaagtaatcctcccaggctaaagcgatcctcccacttcccacctcagcctcccaagtagctag

SEQ ID NO: 864152 - DNA, 120 bp, Artificial Sequence
  ENSG00000286363_0 (sequence is synthesized)
atgtgcagatttgttgttcagaacaaatggggttaccataagtatggaaaatggttcctggtctacagcgaattggagagactagagaggcaagccagtgctcttaaatagcagtgaccc

SEQ ID NO: 864153 - DNA, 120 bp, Artificial Sequence
  ENSG00000286363_1 (sequence is synthesized)
atctaagttcatttttcatcacccttctgggtattgtgataggcagaatgctggccctgccccaaagatgccagtgtcctaatctctagaacctctgaatatgctacctcacatggcaaa

SEQ ID NO: 864154 - DNA, 120 bp, Artificial Sequence
  ENSG00000286363_2 (sequence is synthesized)
agggactctgccaatatgatgaaggtaaggatcttaaaatgaggaaaaaattctggattatcctagtggacctaatattttataagtgtacttgtaaatgaaagagaggggcaggagttg

SEQ ID NO: 864155 - DNA, 120 bp, Artificial Sequence
  ENSG00000286363_3 (sequence is synthesized)
tgattatgtgattgctggctttgaagatgaaagaggaccataagccaaggatcaaggtcagtccctagaaactggaaaagccaagaaaacagactctctgatagaccctccaaaaggaac

SEQ ID NO: 864156 - DNA, 120 bp, Artificial Sequence
  ENSG00000286363_4 (sequence is synthesized)
acccattttagacttctgatttccagaactgtaagatagtaaatgtatattgctttaaattactacatttgtggcaatttgtcacatcagtagtaggaaatgaatacagctataaagtgg

SEQ ID NO: 864157 - DNA, 120 bp, Artificial Sequence
  ENSG00000286363_5 (sequence is synthesized)
aagaaaccatagaaagttcactgagccttttgagattaatctttaactcatattctaaaatcatatagctccctgagtgtcaaactgataactacataatcacactttcactgttctcag

SEQ ID NO: 864158 - DNA, 120 bp, Artificial Sequence
  ENSG00000286363_6 (sequence is synthesized)
gtttactacaagcagaattaccccatactggtgttcaggcagatgaattctcactatgaaatactttttaattggcgttcttatgattgcctccaaaatgtttaaaccttttgacagttg

SEQ ID NO: 864159 - DNA, 120 bp, Artificial Sequence
  ENSG00000286363_7 (sequence is synthesized)
catccattttatgaatccatcttcagtaataaagattgaaatgctctaaaccaccaaaaattagtggcttaatcagaaactgagggtggttctataaatccaaagctgctggtcattaga

SEQ ID NO: 864160 - DNA, 120 bp, Artificial Sequence
  ENSG00000286362_0 (sequence is synthesized)
gggggtagaaccaggaagtcttgtcaatgggcagggcttgcgatcttcgcatgtgtcttatcgtaaagaattgttaaaatttaggatagggaaaaaactatttaatggatgaagcgagaa

SEQ ID NO: 864161 - DNA, 120 bp, Artificial Sequence
  ENSG00000286362_1 (sequence is synthesized)
cagcaggaagaaaaggagggaaggtagttttctagtacaagcatattgagaagaatggaggacaaagtttgcgaagagccagctagattaactagaactggaccgagagaaagtcctcac

SEQ ID NO: 864162 - DNA, 120 bp, Artificial Sequence
  ENSG00000286362_2 (sequence is synthesized)
acctgagttcctttctcaactctccaccaactgaaccgggatggaaacagactagtgaagttctttcagttcccttaaaggtactttgaggtatatagcaggtatctgaagaatggccag

SEQ ID NO: 864163 - DNA, 120 bp, Artificial Sequence
  ENSG00000286362_3 (sequence is synthesized)
tttactctaacactctttggtgggcaaagtacgaaaactgaaagacagcctaaaggattccattaagaaaaaagagaaaaaatagcctaataaaatataggtgtcggaggaccaattgtg

SEQ ID NO: 864164 - DNA, 120 bp, Artificial Sequence
  ENSG00000286362_4 (sequence is synthesized)
agacttctcaagactgcctttaaaaaactacctcaacttcgacttctaatcaatgatcttgcagcaagtttgtatctgacctggaattagaaacagcttcagatccctactaagcaagtt

SEQ ID NO: 864165 - DNA, 120 bp, Artificial Sequence
  ENSG00000286362_5 (sequence is synthesized)
tgcttcggggtgggtaggggtctcacccaattaccaagtctgtaagctgattcccagcacttcctatctatcatctgagtaaaataaatataagtggaaggcaagagttctataaacatt

SEQ ID NO: 864166 - DNA, 120 bp, Artificial Sequence
  ENSG00000286362_6 (sequence is synthesized)
gggtatcaccactgtattttaaggtagagtgacaggtgtcctgtagagtccctgtaatcaccggtaactcttcaaaaacttcacggaggttgtattagtatttcctgacttgctcccgct

SEQ ID NO: 864167 - DNA, 120 bp, Artificial Sequence
  ENSG00000286362_7 (sequence is synthesized)
gacacatgcctccaaggtcagctggaccagtgctactcatcaccgcagtgcagctaactggacggcccaccggaggcgtggactcctcgggaacaggcagcttgctatgagcccccggcc

SEQ ID NO: 864168 - DNA, 120 bp, Artificial Sequence
  ENSG00000286360_0 (sequence is synthesized)
tgtcagtcaagatttcaatgcccttttccagggccttctggaatgactcagaaatgatggttggatgaatccctgtaatttgtgaaagtctagttatttaattgtaacagtaataaagta

SEQ ID NO: 864169 - DNA, 120 bp, Artificial Sequence
  ENSG00000286360_1 (sequence is synthesized)
catcctacccacctttctgaagaagcttggtacaagaatctaagagggagccagcaatgatgactactgatgtggtgccatctcctgcttctatatcttgagccttagacagctccacca

SEQ ID NO: 864170 - DNA, 120 bp, Artificial Sequence
  ENSG00000286360_2 (sequence is synthesized)
gctaagtgaacagaaaatgccaagttgctcaatgagaaatgacagaacccagtaacacctaattcaaataatcgcaccagtgtcacaaacagaatttgaagatgcaacatgattcctgat

SEQ ID NO: 864171 - DNA, 120 bp, Artificial Sequence
  ENSG00000286360_3 (sequence is synthesized)
ttcttctgatttgttgtctaccttgggtttcatttaaaattaaagactagtagatgatctccagttcagattgtgggttgtcatctccccctgccctgctactcaaaagttctaattaga

SEQ ID NO: 864172 - DNA, 120 bp, Artificial Sequence
  ENSG00000286360_4 (sequence is synthesized)
gttctaattagaaagcaaaaatatatcgtaagtactctatagaattggaagctaagaaaaggggcattccagatgagactagagtatcaaacttttttttttgagacagggtcttactct

SEQ ID NO: 864173 - DNA, 120 bp, Artificial Sequence
  ENSG00000286360_5 (sequence is synthesized)
tgcagcctccacctcctgggctcaagagatcctcctgtctcagtctcccgagtagctggggctataggtgcacactaacacatctggctactttttttaaaaagtcttttttgttcgttt

SEQ ID NO: 864174 - DNA, 120 bp, Artificial Sequence
  ENSG00000286360_6 (sequence is synthesized)
ttttttaaaaagtcttttttgttcgtttgtttttagagacggggccccattatgttccctagaatggtcttgaactcctgggctcaaaggatcctcctgcttcagcctcccacagtgctg

SEQ ID NO: 864175 - DNA, 120 bp, Artificial Sequence
  ENSG00000286360_7 (sequence is synthesized)
agattacaggcatgaaccaccattcccagcctcagagtatcaacttaagagtcttttgccaagtttatttgagtagaccccttgtaagtataacctgattcattaaaaagccatcttttc

SEQ ID NO: 864176 - DNA, 120 bp, Artificial Sequence
  ENSG00000286360_8 (sequence is synthesized)
ataactggtggatggcacaacatatgaagcctcaggactatccaagaaaacagcaaaacttcacgtagcagtgaagttttgttttatttagcaatgctttcttattttatgttccaaata

SEQ ID NO: 864177 - DNA, 120 bp, Artificial Sequence
  ENSG00000286360_9 (sequence is synthesized)
agatgcttattttcctataataatcatttttttcaacattttaatagcaatattatatatagagacttttgtcacttctggataacaaaatttttttgttatcctgtcgaactcctgacc

SEQ ID NO: 864178 - DNA, 120 bp, Artificial Sequence
  ENSG00000226620_0 (sequence is synthesized)
agatcaagaggagaggctctccagatttgctgacctagaaggataagtctgaaagtaggagggtggggagagccagatgaacaagggaggtgaaaacgtgatctagggaggcatccgagt

SEQ ID NO: 864179 - DNA, 120 bp, Artificial Sequence
  ENSG00000226620_1 (sequence is synthesized)
gagcaaaggcacgagtgagcctggtacacttctgggcaggcagaaggaaggcagttaggctgttaggaaggcagttaggctgcagtgaattctacaaagaggctatgggaaagaaacctg

SEQ ID NO: 864180 - DNA, 120 bp, Artificial Sequence
  ENSG00000226620_2 (sequence is synthesized)
gaaagtacccttggctgtgtacatttgagtaaagagagcactataaaatcaaaaaccaatgaaatggtttccagaacacagaactattaagcttaagaaaaggacagaaggaactgaaga

SEQ ID NO: 864181 - DNA, 120 bp, Artificial Sequence
  ENSG00000226620_3 (sequence is synthesized)
gagaggaactgttttggagcatcacacttccacctcagaagaaataaggaaggaaggaggagggtgttcccacggctcttcaaccaggccggctcttcagcctacatccccatctcatca

SEQ ID NO: 864182 - DNA, 120 bp, Artificial Sequence
  ENSG00000226620_4 (sequence is synthesized)
agtaaaagggatttttcaactggaccaaccagatggtttaacagtgcactcccacaccattcaactacgcaagggagatacacttaacatatgcagtcgtataacacctactaacatttt

SEQ ID NO: 864183 - DNA, 120 bp, Artificial Sequence
  ENSG00000226620_5 (sequence is synthesized)
caaacattaaacctttaaaaaagagttctaaagaaatagaagcttgaagtatcatctctcaagtatatagacactacttcatggtgtggtaatatatgcatatagaagctagtaaacacc

SEQ ID NO: 864184 - DNA, 120 bp, Artificial Sequence
  ENSG00000226620_6 (sequence is synthesized)
tccaggagatgcaaaaggaattagaactgccacaaggtgcaagcaaaaccttgagcttctttaaaatatgaagacttcgaagttatttatccaaaccaacctgatcatttcttaagagtg

SEQ ID NO: 864185 - DNA, 120 bp, Artificial Sequence
  ENSG00000226620_7 (sequence is synthesized)
aatataccttggaagacgtgtcctgcctttagtagcgtcacaatggattacatcctctataaagcagtctggggtgagaaaatcgaatttggacaccgttgaggagactattgcagtcat

SEQ ID NO: 864186 - DNA, 120 bp, Artificial Sequence
  ENSG00000226620_8 (sequence is synthesized)
ccaagctcaagatggtggagcttcatccttgagaataaccaatggggatagatttaagagacacttagagtctgcagccaacagggctgaatgagcattctgtttttcctcttctaatcc

SEQ ID NO: 864187 - DNA, 120 bp, Artificial Sequence
  ENSG00000226620_9 (sequence is synthesized)
ttcacccatctgagctaaagtctagacctaaggaggctactaattcagggatcgagtaatctgccaagcaagagtttattcaagcacagtttgaaataaaggtttcaaatgcatagcctg

SEQ ID NO: 864188 - DNA, 120 bp, Artificial Sequence
  ENSG00000226620_10 (sequence is synthesized)
ctcctaaaattcatatgttgaaggcctaactctcaatgtgatgattatgtggagatggtgcctttgggaggatatgggaggacacctgagacggcaggccagaagtcactcagtaggaga

SEQ ID NO: 864189 - DNA, 120 bp, Artificial Sequence
  ENSG00000226620_11 (sequence is synthesized)
aacatccgttagaagtaataatgtgggattgctgaagtaaagactataggaagaaaaaagtgtctgtgtgtaggaaacggaaagggagagaaaaatacactgagatggtaaagtaaggaa

SEQ ID NO: 864190 - DNA, 120 bp, Artificial Sequence
  ENSG00000226620_12 (sequence is synthesized)
gtggaagatcagcagaatgtgcagatgccaagccatccaagaaaatcatctcttgtgattgttgcgaagtcaactagctaatgtgactcactgctaggctgttggatctgagacttatgt

SEQ ID NO: 864191 - DNA, 120 bp, Artificial Sequence
  ENSG00000226620_13 (sequence is synthesized)
gggataatttagaaacttgctagtgtcttaagatcaattactcaccaatgagagtggcattgaactgtgaatgttcctcctagattttccatgaagactaatggttttgtcttgtcttga

SEQ ID NO: 864192 - DNA, 120 bp, Artificial Sequence
  ENSG00000226620_14 (sequence is synthesized)
atttgttttaattacaatttgtatacatcctgttccaccctgaaatttttattttccaaatggtttttcatttaaagagactaaataaaggttctgactgagttgtacttgtgggaactc

SEQ ID NO: 864193 - DNA, 120 bp, Artificial Sequence
  ENSG00000226620_15 (sequence is synthesized)
caaaatctttttataggaagctattttcatcaaatagtgttgagaatcaagtttccagttggagaaaataacagagacatgcaaattcaggatgtagctgtacagcaatgttagtgaaga

SEQ ID NO: 864194 - DNA, 120 bp, Artificial Sequence
  ENSG00000226620_16 (sequence is synthesized)
gagaaaattttgagtcatttagacattaaccattaagcatctggatttttttaaatgttaagacagaaaaaaatacctgtatgtcaaccaaaattttatttaatttagtgaactgtgata

SEQ ID NO: 864195 - DNA, 120 bp, Artificial Sequence
  ENSG00000226620_17 (sequence is synthesized)
gggactcctctctgctcatccaaatccaggttttcttctgctcctggacacataagcagggtatgtgttgcagttagctgtggccaggacattggacttgtggtcaatggaatatgcaca

SEQ ID NO: 864196 - DNA, 120 bp, Artificial Sequence
  ENSG00000226620_18 (sequence is synthesized)
agaagagatgtgcgatatttccaagcctgactccctaaacagtaaatactttcgagtcataattttccacattctgtcctattagctgtgtcaatggaatgactattggcatcttagaag

SEQ ID NO: 864197 - DNA, 120 bp, Artificial Sequence
  ENSG00000226620_19 (sequence is synthesized)
ttagagatgaaagatctcctatcagcctgattcttcagagacttacttggaacagaacctctgctgtggatcttaaaccactcactctggggaatggtgaggattaaattcctattttgt

SEQ ID NO: 864198 - DNA, 120 bp, Artificial Sequence
  ENSG00000226620_20 (sequence is synthesized)
aattgaacagctgccactactggcaataagtctactgccatttggtagataaccttcttatcacacagaaaaatatcagtacagacaaatagaccgcaaagaaaatgagaccatcagcaa

SEQ ID NO: 864199 - DNA, 120 bp, Artificial Sequence
  ENSG00000226620_21 (sequence is synthesized)
agaagataaagaagtttgtacaaagcaactttttataaatggatggctgtcaggcaaaaataaatttcctgtggacaagaccaagagcaaggcaagaggaaaataaacatgtttaaacta

SEQ ID NO: 864200 - DNA, 120 bp, Artificial Sequence
  ENSG00000226620_22 (sequence is synthesized)
atgggaaagaaacctggaaaggtagggaggtatggatatggacaagctatgccaaggagcagggctttgtcatggagagtgactaggtgcttttacataggaaagtcacctgataatatt

SEQ ID NO: 864201 - DNA, 120 bp, Artificial Sequence
  ENSG00000226620_23 (sequence is synthesized)
ggaggtaactgggcttagatgtgggcgtgagggtggggcctcatggtgaaatttgtgcccttgtaagaaaaacacaccacaggttttcattcttcctctgccacatgaggccacagtaag

SEQ ID NO: 864202 - DNA, 120 bp, Artificial Sequence
  ENSG00000226620_24 (sequence is synthesized)
aatgtgaccatctgctagccaggaggaaagtcctcactggaacccgcccataataacactccagtctggggcttttcagcctccagaaccatgagaaataaatttctagtgtttaagtca

SEQ ID NO: 864203 - DNA, 120 bp, Artificial Sequence
  ENSG00000226620_25 (sequence is synthesized)
ccaagagcaagatatacccggcttttaaaattgaaaaccatagcctagaattctgattgaatatgcataacaagatgggagcataagaagaaaatttttattgatctttaaaatataaac

SEQ ID NO: 864204 - DNA, 120 bp, Artificial Sequence
  ENSG00000226620_26 (sequence is synthesized)
caaatgactctcactactgattttagacttgtgaattaaaacaggggtccatgaactatgcgtagagggtcaaatctggcccactgcctggttatataaataaagtgttgttgaaacaca

SEQ ID NO: 864205 - DNA, 120 bp, Artificial Sequence
  ENSG00000226620_27 (sequence is synthesized)
attttaaggacagcagcagaagaattatggcaggtatctgaaattcatttctgtgctttgccgaggacccatgggatgccatttgcagatgagaaaactaaagaatagctttatcttcca

SEQ ID NO: 864206 - DNA, 120 bp, Artificial Sequence
  ENSG00000226620_28 (sequence is synthesized)
gctcttcacggaaaaaaaaatggcaacaataaaatcagcaactcctgccaaataaatgggcataaaaaagaaatcatagactgctggcaatggtggggaaaaagttataaaaattgtctc

SEQ ID NO: 864207 - DNA, 120 bp, Artificial Sequence
  ENSG00000226620_29 (sequence is synthesized)
tgcaccatcttccttttgtcctctaaaatattcacattagcaaaagtatataacagctgatgaagaaatactgataatttgtctttgggactagcttcagtattttggcttctttttgct

SEQ ID NO: 864208 - DNA, 120 bp, Artificial Sequence
  ENSG00000226620_30 (sequence is synthesized)
tctttgcaacaaattgggagacaaaggtgggaaagtttttttcaataagttaataattttttaaaggtcaaaattttgttctttgcttatattagaattaaacactgtgagattctctct

SEQ ID NO: 864209 - DNA, 120 bp, Artificial Sequence
  ENSG00000226620_31 (sequence is synthesized)
atatcgaaaacatttcaagatctagaaatttgaaattgttgacaagtatttatctgtttattcacaaatttgaaatcaacctcaggaatgctcattctgattgatatacttaggtcataa

SEQ ID NO: 864210 - DNA, 120 bp, Artificial Sequence
  ENSG00000226620_32 (sequence is synthesized)
tcttttaaagataatttcactgcatgtaatttttcggggaatgactctcagagttgttgtctgaaagtaccttgatgtttggatattggtttgtttggatgaacaacaaaaggaatcagt

SEQ ID NO: 864211 - DNA, 120 bp, Artificial Sequence
  ENSG00000226620_33 (sequence is synthesized)
aagagaagttattataagaaatataaagctattattaacatttcaatgaaaccaagtagtctgaaaattttcacagatgactgtaatagttagtgggatgacctcactgttttgcattag

SEQ ID NO: 864212 - DNA, 120 bp, Artificial Sequence
  ENSG00000226620_34 (sequence is synthesized)
tgttatgtagcctttaatttattgaatataactattgccttaattttaatgaacaattataaatacgtgaatgaaaaaggaacaattctatatataacaattctagttattattgctcca

SEQ ID NO: 864213 - DNA, 120 bp, Artificial Sequence
  ENSG00000226620_35 (sequence is synthesized)
tccatataacaattctagttattattgcttattctatataacaattctagttattatttcatatggtctaacatgaaagtcaacagcatagacacaagacagaaagcccatgtttacaaa

SEQ ID NO: 864214 - DNA, 120 bp, Artificial Sequence
  ENSG00000226620_36 (sequence is synthesized)
ccaaatacattaaaaagattgtcgttacatatcagcagaagaaaaatgcccaatggcagatgaagagaaatgctaatgagattccatgagctaaaaccaccatgacaaatgtaaatgaat

SEQ ID NO: 864215 - DNA, 120 bp, Artificial Sequence
  ENSG00000226620_37 (sequence is synthesized)
agtactaagtgatccacatgtttatttcaccaattctatttgcgagagaataagtagaaaagtaacatccaattgctgtcttccacaagaataaagaggcttgacgcttattcccaacct

SEQ ID NO: 864216 - DNA, 120 bp, Artificial Sequence
  ENSG00000226620_38 (sequence is synthesized)
atatgacagctgaggaaatggaggaactagaggtcagtaattagcccagggacacatctcagttgcacaggcagtatttgaacacagcattccagccatggtgatgatgtttttaacagc

SEQ ID NO: 864217 - DNA, 120 bp, Artificial Sequence
  ENSG00000226620_39 (sequence is synthesized)
tgcattatatttccatttcatggtcaaataccttcattgaataatttaaaatttcatttaattaagtaggtctggcattattcagatccaaatttaaaccagttcagcaagccatctcaa

SEQ ID NO: 864218 - DNA, 120 bp, Artificial Sequence
  ENSG00000226620_40 (sequence is synthesized)
aatacagtaattgggtattaagaaattatctaggcattctctaaatttatttacatattcaacgagcattgaaaattatgtatcagatattctgcccaatcagaggctaacatctgccac

SEQ ID NO: 864219 - DNA, 120 bp, Artificial Sequence
  ENSG00000226620_41 (sequence is synthesized)
atggagctcatattcgaatggagaaaatgtcaacaagtatcccacggagtgaacacttcaaaaggagaagcacaggtgagaaaatcgaatttggacaccgttgaggagactattgcagtc

SEQ ID NO: 864220 - DNA, 120 bp, Artificial Sequence
  ENSG00000226620_42 (sequence is synthesized)
atttggcatgtcttctctagtacctagagcagtgcgttgcatgcagtagcaggtttataaacatttgcgagtaaaacatccaacctgatactcaaggtaatcaatctgcatcccattttg

SEQ ID NO: 864221 - DNA, 120 bp, Artificial Sequence
  ENSG00000226620_43 (sequence is synthesized)
cttccccttctgccatgattgtaagttccctgaggcctccccagtcctgcaaaacttaggtgtattggaaaagttttggagatttgcaataatttgaaaaaacctcacagatgaactgcc

SEQ ID NO: 864222 - DNA, 120 bp, Artificial Sequence
  ENSG00000226620_44 (sequence is synthesized)
gaactgccacccctgagataacaaaaccaaccccttctcttcttcctcctcttcagcctacccaacatgaagaccacaaggatgaatacctttatgatgatctacttccatgtaataaat

SEQ ID NO: 864223 - DNA, 120 bp, Artificial Sequence
  ENSG00000226620_45 (sequence is synthesized)
attaaatatattttctcttcctcatgattttcttaatgcaattttcttttctccattgtaagagtgcagtatttaatacatgcaatataaaaaatatgtgttaattggctgtttacatta

SEQ ID NO: 864224 - DNA, 120 bp, Artificial Sequence
  ENSG00000226620_46 (sequence is synthesized)
tcattaaggtttccagtaaacagtagactagtagataagttttggtggagtcaaaatctatattcagatttccaatcatgcataagtgagcactcctagcccctgcactgttcaagggtc

SEQ ID NO: 864225 - DNA, 120 bp, Artificial Sequence
  ENSG00000226620_47 (sequence is synthesized)
aactgtgtatatgtcagtttaaaggtgaaccttatccttacacctcccccttacttacttctgtatccctaaatacacttgcaaagtcatgaaatatctgaataatgccactgtgatttt

SEQ ID NO: 864226 - DNA, 120 bp, Artificial Sequence
  ENSG00000226620_48 (sequence is synthesized)
aatggttttgcatagcagactgtttatgtgtttaacatggtgtttgaaatagcactgataccgcctggtgcagaagattcagagaataaaaccaaaatttactaagatttttctttttta

SEQ ID NO: 864227 - DNA, 120 bp, Artificial Sequence
  ENSG00000226620_49 (sequence is synthesized)
ccaccctgcttgaaggaagtagtttttaatcaaaaaataattattttaatttgttagcatttatttgtagcctgcacatctatagctaaagctgagcaattggtcagaaaatcactttat

SEQ ID NO: 864228 - DNA, 120 bp, Artificial Sequence
  ENSG00000226620_50 (sequence is synthesized)
gttgtgttatgatttttattataaactcctactcatcattctttcctttccagaaaaatctgttgaactttgagaaaatttgtcctctaagtgagaacattatgtctgctaaatggagat

SEQ ID NO: 864229 - DNA, 69 bp, Artificial Sequence
  ENSG00000226620_51 (sequence is synthesized)
tgtcctctaagtgagaacattatgtctgctaaatggagatagtcagtatttgaattaaaaagtaccagt

SEQ ID NO: 864230 - DNA, 120 bp, Artificial Sequence
  ENSG00000226620_52 (sequence is synthesized)
gagctttacaaaggctagataactcatctgaaggcaatgcttagcactgcttagcagcccaatagtggtaccagctcagcaccatggttttatttatactttgtctctgtagaccttgct

SEQ ID NO: 864231 - DNA, 120 bp, Artificial Sequence
  ENSG00000226620_53 (sequence is synthesized)
aggaagtatgggagaggaagctggggcaagaggaactaatgcatgattaatgctagatatttggaattgcctagagcaaaggaggttgggggctgcagaaaactagatctttgaagattt

SEQ ID NO: 864232 - DNA, 120 bp, Artificial Sequence
  ENSG00000226620_54 (sequence is synthesized)
aatagattcctcattctatgtcagtcagcccacttagatttgtcacgtgttagctctgtttttctttacatttagtatttttagtaatggcttttacatttttaaaaatcaggttgaatt

SEQ ID NO: 864233 - DNA, 120 bp, Artificial Sequence
  ENSG00000226620_55 (sequence is synthesized)
taagctaatggacaataaaacttcagggttagagatactgtttttattcagcaactagatgaggaactgcaatgaatgagaatttggaaattgatgtttttatagtgacacaagctgcat

SEQ ID NO: 864234 - DNA, 120 bp, Artificial Sequence
  ENSG00000226620_56 (sequence is synthesized)
atcccgtgcttttgaggaaacctagcgtgctatgtcacatcttgccagccaagctacagaatcacttcattaatatctaaagaccaaaacaccaaaagctaatatgaactaggtgcaaaa

SEQ ID NO: 864235 - DNA, 120 bp, Artificial Sequence
  ENSG00000226620_57 (sequence is synthesized)
agcgtagccagtctcaaacctccacttctctgtctgttacataggcttccatgtatccttctgatagtgaatggaaaaaatattggaagcacctatcagtggggtgagaccctcaccctg

SEQ ID NO: 864236 - DNA, 120 bp, Artificial Sequence
  ENSG00000226620_58 (sequence is synthesized)
tcaccttaccatacatagggactttcaagggagaaaaggaaggaccaagaggataagaaaagacccaccaaggataccaaagagttggcctagtatgcaaatacagagttttgatttctc

SEQ ID NO: 864237 - DNA, 120 bp, Artificial Sequence
  ENSG00000226620_59 (sequence is synthesized)
tccattcatagttttcaatccttatttattgaatttaaagacactcgggttttgagtcttgactcattaaaatgtttctcgtggaagattgggctgagcccttgttttttctagaggttg

SEQ ID NO: 864238 - DNA, 120 bp, Artificial Sequence
  ENSG00000226620_60 (sequence is synthesized)
gattatgaccactgtcattccttacattttgactgtttttctgttaacatagggagcactacaattatgaaatatattcttttctgctatgggaaaatcaacacaatttggaagcagtcc

SEQ ID NO: 864239 - DNA, 120 bp, Artificial Sequence
  ENSG00000226620_61 (sequence is synthesized)
tgcctggaattttgggaaattgattcttcctccttgccacttttccatcaatcaacctgcagtcaatggataactccactctactatgtcttctatctcctttgtggtacatctgaaagt

SEQ ID NO: 864240 - DNA, 120 bp, Artificial Sequence
  ENSG00000226620_62 (sequence is synthesized)
tgctgaattggatcaggtcattgctttgacaatgtttgtcacaaggatctgttgtaaactctcccaagaaatcttcctctgtgtatttgtcttctcaagtcattatgttgtaccaccaag

SEQ ID NO: 864241 - DNA, 120 bp, Artificial Sequence
  ENSG00000226620_63 (sequence is synthesized)
acaggatgtttgcacactaagtaactatgtttactgtcatttaaagatcgacaaattcaaaagttcattaaattgcccaggggcatccaactaggaaatggaagagccaggatccaagcc

SEQ ID NO: 864242 - DNA, 120 bp, Artificial Sequence
  ENSG00000226620_64 (sequence is synthesized)
caggtctaactgagggagaaagggatgtttccattgatgtttactgtcctgtgcccttcagtcccctttctgcccatctcagagaatttcaatcttggaattccctctccagtgtatcca

SEQ ID NO: 864243 - DNA, 120 bp, Artificial Sequence
  ENSG00000226620_65 (sequence is synthesized)
gcattctctcaatcaccctttcccagacaatgtgtctaactaacaaacaaacgaaccaataaagaaaaagaaatggtctgttaagtaagaagcaaatcaaaaaaagtaaacctccatact

SEQ ID NO: 864244 - DNA, 120 bp, Artificial Sequence
  ENSG00000226620_66 (sequence is synthesized)
atttgaatatttcccattttaaatttattttctagaagctctttggtaagaaataaaaagcactaaaaatttcgagctttgggcaataatgcttaaatcaatttcttttcatgttcaccg

SEQ ID NO: 864245 - DNA, 120 bp, Artificial Sequence
  ENSG00000226620_67 (sequence is synthesized)
taaaaagatattgcactgatgcttaagtctattcctgtcttagtattacagtattagtgttttctgaaacgtaaagttcagaacttcaagattatttttaattttagttttaaagttaca

SEQ ID NO: 864246 - DNA, 120 bp, Artificial Sequence
  ENSG00000226620_68 (sequence is synthesized)
aaaattttagagacagtttgggggaaatcaatgaatatttttggcaaaagtaaaagcaataataaatacaaggaccaggatacaggcaggcgtatatggttagaaagagtttcactgagc

SEQ ID NO: 864247 - DNA, 120 bp, Artificial Sequence
  ENSG00000226620_69 (sequence is synthesized)
caaaaagctctggaaaggagtaagggcaccaacttgcctttaaataatgctgatccaaaatttctgctgtaattagtcagacttgtggatgataggctaatactttgaaaaacatagaat

SEQ ID NO: 864248 - DNA, 120 bp, Artificial Sequence
  ENSG00000226620_70 (sequence is synthesized)
ttctgtcaggccaaagttgaagcatgctatatggatttagaaaaaatgctgtttttatttttttaaactttctggataatagctttctttagggtaacatagtaatttctttaagcacaa

SEQ ID NO: 864249 - DNA, 120 bp, Artificial Sequence
  ENSG00000226620_71 (sequence is synthesized)
agttgttttatgacaatatcttgttattgttgatgttggttttattaccaccactgctgccattgttatcattatgtttgccatcctgtactatttatttcagttagtcttttattgagt

SEQ ID NO: 864250 - DNA, 120 bp, Artificial Sequence
  ENSG00000226620_72 (sequence is synthesized)
tcacatggaacttgttcagagtaatgcattatggttaagtaactctatgtatgttacagtttgggttgttgcaataatcgtatttatattctcaatgattatcagatttatacagtacac

SEQ ID NO: 864251 - DNA, 120 bp, Artificial Sequence
  ENSG00000226620_73 (sequence is synthesized)
agtttgaagattcccttaagaccgaaacaaacaagtaaacacctctgactatgtttggtcgtttagtctatggtggatctgtagatccattttttttaaactgaagtttggatgttttat

SEQ ID NO: 864252 - DNA, 120 bp, Artificial Sequence
  ENSG00000226620_74 (sequence is synthesized)
aatcaagttcattataggaaaaagaaagctgaactgaaaagctgagtgttcccaggacattgctagtgcagcaccaataatctatatttggaagaactctggaaagtgaagaatgaattg

SEQ ID NO: 864253 - DNA, 120 bp, Artificial Sequence
  ENSG00000226620_75 (sequence is synthesized)
ctcagtaatctgggaggacattagccattttccatgagtcatgactcaaggttgtcttctatgccctgcactggagaagcagtggagtcaggagagacccagagactggtgtttaaagat

SEQ ID NO: 864254 - DNA, 120 bp, Artificial Sequence
  ENSG00000226620_76 (sequence is synthesized)
gggtttgtcttccaccatgggaattctagcaagccatcatttcagacactgtttctgtaaaatgggatggtagatcgtgtggtgaatagaagccagggggccctcatgctcctaaccttc

SEQ ID NO: 864255 - DNA, 120 bp, Artificial Sequence
  ENSG00000226620_77 (sequence is synthesized)
acatcctttcctcttgaatgcaagcgagaccgccgacttccttccttcttcacggatgttgctccagttattaggctttgcgttgtactgtgtacagctccatcttggtagaaggaagag

SEQ ID NO: 864256 - DNA, 120 bp, Artificial Sequence
  ENSG00000226620_78 (sequence is synthesized)
aggctcttcttgctggcctgatgacgtgagcagccatgctgggaacatccccacgccaaggccagtatctcatcaacaaacagcatcagctgaggctctgaatcatgcagctgcaagctg

SEQ ID NO: 864257 - DNA, 120 bp, Artificial Sequence
  ENSG00000226620_79 (sequence is synthesized)
attctgccccaaacctgaatgagattaaaagtggattcttgcatagctgagaacacagcccagctgacacctgattagcccccataaggaatccgtggactcctggctcacagaaaccat

SEQ ID NO: 864258 - DNA, 120 bp, Artificial Sequence
  ENSG00000226620_80 (sequence is synthesized)
atcaagatgtggaaagaaataataacaagaccatgttccatttcttgttaagatttgatagttgcgtttcactacattaagaaaggttaataaacaaaaagtattttttcttccctgact

SEQ ID NO: 864259 - DNA, 120 bp, Artificial Sequence
  ENSG00000226620_81 (sequence is synthesized)
cccaacagtcatagtatcctttggtcctacagaagactttgttttaaacacttcttatattgaaaatgaactattttcttatacataaatggcatgaccatctttcctgctatataggga

SEQ ID NO: 864260 - DNA, 120 bp, Artificial Sequence
  ENSG00000226620_82 (sequence is synthesized)
acatggggtgaactcaatctcatttctaattctcttcccaatcctctataaatcctacggaggaattttgttaatcatcagttctaattttggtctatgaaagtgtgctcagcacatgta

SEQ ID NO: 864261 - DNA, 120 bp, Artificial Sequence
  ENSG00000226620_83 (sequence is synthesized)
ctggtgtacaggatggaaatgattcacttggaataaagaccaccctgtagataacacacataggaaggactggaagctatggctgtgctcatgtcccagagtctctcagtctgtggttgt

SEQ ID NO: 864262 - DNA, 120 bp, Artificial Sequence
  ENSG00000226620_84 (sequence is synthesized)
tcctcgggaagctctaaacacacagttacagaattatgcaaagcctcttacttgataagatcttctggaaatactacatggtcaagagcagtctacacacagctttaagcttaaagtctg

SEQ ID NO: 864263 - DNA, 120 bp, Artificial Sequence
  ENSG00000226620_85 (sequence is synthesized)
aaacattcttttaactcttccgtgatattttctgaagctctgaaagaatttccccttttaaagaattgacgtataaaatatatgcactctcccactagagatacgagctactttagtccc

SEQ ID NO: 864264 - DNA, 120 bp, Artificial Sequence
  ENSG00000226620_86 (sequence is synthesized)
gtattttattattgcagggatagataagtggacagatgctgtcaagcattcaaataatcgacctataaagggctagacatagaaagacataatttccctgacctctccaacacgcagtct

SEQ ID NO: 864265 - DNA, 120 bp, Artificial Sequence
  ENSG00000226620_87 (sequence is synthesized)
ctgggctgaggagagctggaaaagggaacagcatggtcccgtgagagagatctttctgtctttgactccagttctcttcctgctccccatctcctttttccatcaccagaaatcacatca

SEQ ID NO: 864266 - DNA, 120 bp, Artificial Sequence
  ENSG00000226620_88 (sequence is synthesized)
tgcaaaacctaaataactttatgaatgtgaaagtagaaaatagccatgtcctacttcccatttggaaatggaaaaatggaaggaaaaaataaaaacagcagcttgcagcactctctgaaa

SEQ ID NO: 864267 - DNA, 120 bp, Artificial Sequence
  ENSG00000226620_89 (sequence is synthesized)
ctttagtagcgtcacaatggattacatcctctataaagcagtctggggtgagtgaaagaggggggcggaaattagtgatttcatttgatttaattgttgaatcatacttaagaacttaat

SEQ ID NO: 864268 - DNA, 120 bp, Artificial Sequence
  ENSG00000226620_90 (sequence is synthesized)
aaggctttgttctttagaaaaaccagaaactgtaactcaatgtgatttttgttaagctcttgatgcttttccatgaaagattattttgaattcttaaggtggtagaataggaaattatca

SEQ ID NO: 864269 - DNA, 120 bp, Artificial Sequence
  ENSG00000226620_91 (sequence is synthesized)
cataaaaatacatgaaaatagacgtgtacagacatttttgtcaggacaaaaggaaaaccctctgctcagataatggcagtttatcaagaatcctgacgaaatgcttggtttctcccttca

SEQ ID NO: 864270 - DNA, 120 bp, Artificial Sequence
  ENSG00000226620_92 (sequence is synthesized)
atgggccacccactgctgtccaggtaggaaatttcctgccatggacaatctggaagtgtctgagagactgtctatactcagctcagtgagtgaaaagagaaaacctgtgatgggcaaata

SEQ ID NO: 864271 - DNA, 120 bp, Artificial Sequence
  ENSG00000226620_93 (sequence is synthesized)
gtctggatgatgataccaagattaatttgttccgtccatctgactgggtggagtgcatatgtgctatgttgttgtagactccaaacatctaaattgttcagaccagaccaatctggatat

SEQ ID NO: 864272 - DNA, 120 bp, Artificial Sequence
  ENSG00000226620_94 (sequence is synthesized)
ttggtgaaaggaaagctcatagaaaaatttttcagagtttttactttgtgcaattttataattttatattatctaaagttttagcttgaaaatatgaaagacaagcatccaattgatgga

SEQ ID NO: 864273 - DNA, 120 bp, Artificial Sequence
  ENSG00000226620_95 (sequence is synthesized)
tgcagggagaaaaggcctgtatcgaaggacactgttgatgctgagatttgaagggtgggcagcaattaaacagttgatggtgtggagagtgagccacactccaggataggaagaccaacg

SEQ ID NO: 864274 - DNA, 120 bp, Artificial Sequence
  ENSG00000226620_96 (sequence is synthesized)
tgataagtgagcagagcaaagagggaccctggctgtccaggaggcagggctcagttactcacggccccaccgtcaagctgaagattggagacttcatttggtaggcaataggaagccact

SEQ ID NO: 864275 - DNA, 120 bp, Artificial Sequence
  ENSG00000226620_97 (sequence is synthesized)
ctcccctgtttctggccttaacatgtaactaggtacctgtctggacttctgtgtctcaaaatatgaagcagcccatactactacttcctttgtttctgcatctgatggaataatagaaac

SEQ ID NO: 864276 - DNA, 120 bp, Artificial Sequence
  ENSG00000226620_98 (sequence is synthesized)
gttttcaatttttgtcagaataccttcataacacacacatacaattaaaatagcctttacattttttacattcctatatttatatttacacttaacattattgagaaaagcccacacttg

SEQ ID NO: 864277 - DNA, 120 bp, Artificial Sequence
  ENSG00000226620_99 (sequence is synthesized)
atgtacattgtaccaattgtactgttctgcttgccccatcaggaaagcaactctggaaaaagtgtggttgtttgcagtttcctggttatttaaattgactgtaaaaggtgatatggttct

SEQ ID NO: 864278 - DNA, 120 bp, Artificial Sequence
  ENSG00000226620_100 (sequence is synthesized)
tcaatattattgaatagtgttgctgagactttcttgaatgttactgaacttctgtaataacatcactcaacaactgagattatcctatcctaaataatggttgatgtgatgtaaatgcca

SEQ ID NO: 864279 - DNA, 120 bp, Artificial Sequence
  ENSG00000226620_101 (sequence is synthesized)
gtccatcagtcatacagacaaaacccaagatgatgttttgattgtcattgagacaaagttattcttgcaataataagaatggccaacgctcatggagtgccttctaccttccaggcacca

SEQ ID NO: 864280 - DNA, 120 bp, Artificial Sequence
  ENSG00000226620_102 (sequence is synthesized)
actgagagcttcacacatattaactcactcaatcctgctagcaatactcccaaagatggtaatatttttgtcttcactttggggatgagcaaagtgaagacatagaaatttagtatcctg

SEQ ID NO: 864281 - DNA, 120 bp, Artificial Sequence
  ENSG00000226620_103 (sequence is synthesized)
accaaagtcaaatgctggataagtggtggagacagaattgaaagctgttaggctgcctggagtgaacgtcatcagaaaaatgcaagacctctttttacggagagttattcttctgcccca

SEQ ID NO: 864282 - DNA, 120 bp, Artificial Sequence
  ENSG00000226620_104 (sequence is synthesized)
aagatggaaagctaaatttctgattgtgtatgtgaataagcaaattttaaaataatcacatttaatgcacatacactgtgtcttttccctaggagagttatgattcagaagatcatctaa

SEQ ID NO: 864283 - DNA, 120 bp, Artificial Sequence
  ENSG00000226620_105 (sequence is synthesized)
ttggtcattctgacaccagatattgtatgcaaagctgactgtgttttctctggtgacaccagacactgtatgcaaagctggctgtgttttctccggtgaattgggaagagggactacact

SEQ ID NO: 864284 - DNA, 120 bp, Artificial Sequence
  ENSG00000226620_106 (sequence is synthesized)
actatgagatgttcttagagaggaaatatttgaaatttttaatatttgcattttaaattggaattgagaaatgggcaaatgaagacatagctcaatggtcaaattaaacattacttgtta

SEQ ID NO: 864285 - DNA, 120 bp, Artificial Sequence
  ENSG00000226620_107 (sequence is synthesized)
ttctaaatgcaagattctagttaaattagaagggtggaaaagtgttgttaattattttttcttcataggaatgtaaaatcaactataaaaaattaatgcatgagacccagggattagcat

SEQ ID NO: 864286 - DNA, 120 bp, Artificial Sequence
  ENSG00000226620_108 (sequence is synthesized)
tacagcaaattcagtgatttttgcaatccatgcctttacaaagaatgtgtgattactttgtctagactttgtagcacactataataaatagagactgacaatatcaatatatttcataaa

SEQ ID NO: 864287 - DNA, 120 bp, Artificial Sequence
  ENSG00000226622_0 (sequence is synthesized)
agaagcactctagctacagattagaatgatgacaagagtaataccttcctagtgaagatgacttttatttcaggactatattaagtttcccaacttctgtcatgatatagtccaaagaga

SEQ ID NO: 864288 - DNA, 120 bp, Artificial Sequence
  ENSG00000226622_1 (sequence is synthesized)
acctggaccacgcagacatcaaacagaacatgacactgacccattctatcagtgacgttgtgctgattgcacaggacagatgagaggctcgtatactagaagtcttgataacttgttttc

SEQ ID NO: 864289 - DNA, 120 bp, Artificial Sequence
  ENSG00000226622_2 (sequence is synthesized)
tagtttcacatgtccacagatgaagaaaaattgtgccccagcaaggattatacccagagcctcatccattcatacctgatttagatacttagatgatgagtaatagaaaagcatcatctt

SEQ ID NO: 864290 - DNA, 120 bp, Artificial Sequence
  ENSG00000226622_3 (sequence is synthesized)
aaaatgaattgcttcaatccctggactcaaggatcctgtgttaccaagtcatatgatacttcaaaatctgtgattccatgaagccaagagtagctcttcaacaggaaatgaatgagtgct

SEQ ID NO: 864291 - DNA, 120 bp, Artificial Sequence
  ENSG00000226622_4 (sequence is synthesized)
tcagcttctgatcccattagtaagaaaatacagtcttatgagcaatgatggagctgcatctcttaggggcatttgattcccaagagaccaaagagcaaagagaatgtcaatttaaaaaaa

SEQ ID NO: 864292 - DNA, 120 bp, Artificial Sequence
  ENSG00000226622_5 (sequence is synthesized)
tcaaatgtttccatgacttagctatttaactgctttaaaatgaatgaatgctgcttcaagttctttcaaataccccacatcttggcaacaacgaaaggaattaacatgaagaaaatttac

SEQ ID NO: 864293 - DNA, 120 bp, Artificial Sequence
  ENSG00000226622_6 (sequence is synthesized)
aatctttcatcacatcgaacaatgtcccacatttgaaaagttcacagcacagatttctggttactgaaagaaaggaaagaccttctttggatttgaataaacagatggactttcttctcc

SEQ ID NO: 864294 - DNA, 120 bp, Artificial Sequence
  ENSG00000226622_7 (sequence is synthesized)
agaagtcttgttatccacagaaggaatgatctgcaatgtacacacgccaggacagaaattctacagttgctgataaaatgtaaacctgtaagtactgaataagaattatgcccaataaaa

SEQ ID NO: 864295 - DNA, 120 bp, Artificial Sequence
  ENSG00000226622_8 (sequence is synthesized)
agtcatggctagggagtaaaagatggagtgttgacagggaagtagaacaataaatggggtaatcaggaaaggctgattacctttcctgatggggaagggtgagacccctaatctagtcca

SEQ ID NO: 864296 - DNA, 120 bp, Artificial Sequence
  ENSG00000226622_9 (sequence is synthesized)
gtctcccattttacaaataaagagactgagctccacaaggttaagctactggtccagaatcccatagctcacaagtgatgagctgcctccttcacccctcagctccctctgtgttccact

SEQ ID NO: 864297 - DNA, 120 bp, Artificial Sequence
  ENSG00000226622_10 (sequence is synthesized)
caaatagcacattctcctaagcactctccacactgcacaatatcagctgtcctaagaagattttgaatatgggttgaaaatattgtttgttttgttttaaatcttggaaaaaattctagt

SEQ ID NO: 864298 - DNA, 120 bp, Artificial Sequence
  ENSG00000226622_11 (sequence is synthesized)
tgcatgaaatttttttctccagaattaatcatgagtagcatattcttcagccttgttaattggcaaagcagaaaacaaaatagccactgaagggctcctttgtttggacttggagaccag

SEQ ID NO: 864299 - DNA, 120 bp, Artificial Sequence
  ENSG00000226622_12 (sequence is synthesized)
tgacattgctcacccttcccactgagcagcctgcagatattggtctctctggagagcactgaggacccggggtggcaggactcgctgagtaagcccttccccatactaaacttggtttca

SEQ ID NO: 864300 - DNA, 120 bp, Artificial Sequence
  ENSG00000226622_13 (sequence is synthesized)
aggagacaattcctctaactgttcttgagctttctcgtctcatataatctcaacaagttcttccaatttctgtttttaaaccaaaaagaaaaagaacagcacattccttttatgtttgtg

SEQ ID NO: 864301 - DNA, 120 bp, Artificial Sequence
  ENSG00000226622_14 (sequence is synthesized)
caaatgaaggggaggcaagttgctggggaaaatctagcaaatgtcttttgatatgtaatttgaatgatttcctactgaagtcctgaaatatgaattaaaatcatgtattcacttttgtct

SEQ ID NO: 864302 - DNA, 120 bp, Artificial Sequence
  ENSG00000226622_15 (sequence is synthesized)
cttggcttcgtgagaaatataaaaatgaattgcttcaatccctggactcaaggatcctgtgttaccaaggtggttatcaaacctgggtcaaagttgaatcacctgaggatcttttagaac

SEQ ID NO: 864303 - DNA, 120 bp, Artificial Sequence
  ENSG00000226622_16 (sequence is synthesized)
aatattcaggtcaggtcaaagcctagagaaaaatgcgcattcagaagtgggctgccatcctgctttttctgaagtgaacagctgctgggtattgaaaccagccctcacggttgggtccct

SEQ ID NO: 864304 - DNA, 120 bp, Artificial Sequence
  ENSG00000226622_17 (sequence is synthesized)
gccaccatggcaacactctggtttctgagctggagtggccaaggcacaatggggtggttccatggcccagaagcactctagctacagattagtttatttcaggactatattaagtttccc

SEQ ID NO: 864305 - DNA, 120 bp, Artificial Sequence
  ENSG00000226622_18 (sequence is synthesized)
tacttttttacaatcagataaatccaaatgttagccagaattggtcccatagccataaaatttagtataatactcggattcatatgcttgcctctaaaatttcagagatttggtattgct

SEQ ID NO: 864306 - DNA, 120 bp, Artificial Sequence
  ENSG00000226622_19 (sequence is synthesized)
gttagtttaatgagtttctcttaaaattgagcaacttggctagagaaaacttattaatttagagtttataatataagcgcaattgaagaaactcatagtatgaatcatgtcatcaaaatt

SEQ ID NO: 864307 - DNA, 120 bp, Artificial Sequence
  ENSG00000226622_20 (sequence is synthesized)
attaagaggcttgagaaaatcagaagttcataaaggaagaaaggaaagaaattataggaagcaggaagagctctggggagctgttttcgggagcaaatatccagaatgaacaccttgact

SEQ ID NO: 864308 - DNA, 120 bp, Artificial Sequence
  ENSG00000226622_21 (sequence is synthesized)
ttgtccggagccctgagctgaagacaggcctgctgctgatcccagagacagatggccagagttaggaacagcatgcacaaagaagatcctaagccttcctggagaagtgccaatatcatc

SEQ ID NO: 864309 - DNA, 120 bp, Artificial Sequence
  ENSG00000226622_22 (sequence is synthesized)
atttgggggtcttaaagccaagctggggaataagcgttatggggaatgctgagaaggagatgtttaatcaagtgtgtaggtttaggacttcagtcaaagggctgcttttttgctgctctc

SEQ ID NO: 864310 - DNA, 120 bp, Artificial Sequence
  ENSG00000226622_23 (sequence is synthesized)
aggcagttttcactgcatgccttcacctctggtatcttcaaagcactccttggcttgtgccattaatactttacctaagatttttagaaattctgtctggtcatatgctacatcctactt

SEQ ID NO: 864311 - DNA, 120 bp, Artificial Sequence
  ENSG00000226622_24 (sequence is synthesized)
gtattgaaagaacccttaggatttcccctttattgctatacatctctttaagtctcttatctttagagactaaagtaaaatttggtcctttaataatcataataaacaggtaatcatact

SEQ ID NO: 864312 - DNA, 120 bp, Artificial Sequence
  ENSG00000226622_25 (sequence is synthesized)
ccctgaagacacaattccagaattacaaattttgtctatttacccaaaatgtaaggtggataatcttttcagtttattggttacaaatgaccagctgacaagttactcagcttctgcaat

SEQ ID NO: 864313 - DNA, 120 bp, Artificial Sequence
  ENSG00000226622_26 (sequence is synthesized)
tgtggtgaaattctagagctaccaagaaagggtcacttgttcaagaagaacaagctaaggaattgattggctcttcagaacttgtgccaacttcctttctgcaggcgggctaaatattgg

SEQ ID NO: 864314 - DNA, 120 bp, Artificial Sequence
  ENSG00000226622_27 (sequence is synthesized)
aagctgaatgcaatcacagaaactgcagacaaaagagcttttgatgacagatattgctgatgcctggtgccttcaaaggcattccaggaaaggtgaaggaataattatgattaacaataa

SEQ ID NO: 864315 - DNA, 120 bp, Artificial Sequence
  ENSG00000226622_28 (sequence is synthesized)
ctcatgtttcttccaggatgttactcattgaaccaatgggtcacttgagaaatatgtcagtgagtcagctcacatccaatttggcaaaaagatcctgggctcccaaactctttgcattga

SEQ ID NO: 864316 - DNA, 120 bp, Artificial Sequence
  ENSG00000226622_29 (sequence is synthesized)
actgagtaaacccaaatgaatacattctgggggagaagtaaaggaaggagaactgtggtggtaaaagacagagttggctccttcagtctccacctccacagtcccacccccatatttaag

SEQ ID NO: 864317 - DNA, 120 bp, Artificial Sequence
  ENSG00000226622_30 (sequence is synthesized)
tggaatgaaattatcaaggccaatgaagaaagtcttgagcatacctttagaaaagttaaaggactcagatgaaggaaaaatacagaaacaccaccaggaaacaaggagagtctaataact

SEQ ID NO: 864318 - DNA, 120 bp, Artificial Sequence
  ENSG00000226622_31 (sequence is synthesized)
caccacacatctaaaacaacatgaacttataaatttatattgcaacttatacagtaagagcatataccaaaagccagttaaaataataatggttacaaataaaaaggagtttggactggc

SEQ ID NO: 864319 - DNA, 120 bp, Artificial Sequence
  ENSG00000226622_32 (sequence is synthesized)
ggtggcagtcctcaaccaatgggtgccgggaattggtgaacaacgccccagccccccagcctccagagaaacaattctaagtgacatggatgatgataaccagtctatgcccacagtgat

SEQ ID NO: 864320 - DNA, 120 bp, Artificial Sequence
  ENSG00000226622_33 (sequence is synthesized)
tatcagctcagcaatgtaccctttactggcttttctccttccatatgtcactattcctgctccctcactcctgcttcctggaattaccttcccagaaaaacttcattcaggtaagccata

SEQ ID NO: 864321 - DNA, 120 bp, Artificial Sequence
  ENSG00000226622_34 (sequence is synthesized)
gtcctaggctctacttgagggtaggggaatccaaactaaagtaagtgtctgtaggacttcaaagtaaagatccaagttagactttcaggagaagagatttggggtagaactataaactta

SEQ ID NO: 864322 - DNA, 120 bp, Artificial Sequence
  ENSG00000226622_35 (sequence is synthesized)
cgttttcttcctaatgggagctgacaacacagaagtagatgaaattttccagtaatagaagaaaggggtctatgaggaaccatgaggaacaacaacatttctggcacaggcagaagaaga

SEQ ID NO: 864323 - DNA, 120 bp, Artificial Sequence
  ENSG00000226622_36 (sequence is synthesized)
gtcaaggagacagaaacgacaagagaggtagaagaacaaagaaagtttgcaacatggaaagccagggaggaggaagtttcaagaaagagtaggtgaatctatcccagcagcagccagggt

SEQ ID NO: 864324 - DNA, 120 bp, Artificial Sequence
  ENSG00000226622_37 (sequence is synthesized)
gggcctctgtcctcgagcagcactggagccagactcagttcccggatcttgcagccgaggagcctctcaagcatccacagcccccaccagtgtggggacggtggatcctgtggtggacat

SEQ ID NO: 864325 - DNA, 120 bp, Artificial Sequence
  ENSG00000226622_38 (sequence is synthesized)
ccccggggatgtgactgcctgatggtggcagcaacagcagcaacatctgagaccacggagtgggggtctttggcagagaccccagggcagctgaggcagctgggcttcctcccagctcca

SEQ ID NO: 864326 - DNA, 120 bp, Artificial Sequence
  ENSG00000226622_39 (sequence is synthesized)
cagctccatcagcctttgggtccatgagaatcccttatcctttacagccctgccctggctctgggaaactggggatggcctctgtgacccccctttgagaggtgaagccagctggacttc

SEQ ID NO: 864327 - DNA, 70 bp, Artificial Sequence
  ENSG00000226622_40 (sequence is synthesized)
actctgtaaaatggaccaatcaagaataaaacctggccaccccagccagcagcagcaacccacttgggtt

SEQ ID NO: 864328 - DNA, 120 bp, Artificial Sequence
  ENSG00000226622_41 (sequence is synthesized)
acctggccaccccagccagcagcagcaacccacttgggttcccttccatggtgtggaagctttgttctttagctcttcacaataaatcttgctggtgctaactctctgggtccgtgacat

SEQ ID NO: 864329 - DNA, 120 bp, Artificial Sequence
  ENSG00000226622_42 (sequence is synthesized)
ccaccagaaggaaccaactccagacacaccctgacgtgggataccccatttcctgaggcatggagaggcatcaccccagtaagttgcccatgccctgtgctggcagcctcccttttaccc

SEQ ID NO: 864330 - DNA, 120 bp, Artificial Sequence
  ENSG00000226622_43 (sequence is synthesized)
ccaaccatcctttgctctagcttctggccccaaatttgtccaaggagccccccattcaaatcctttccctgctgccacgtggccttccctgtcccacagcttgctctgcaagcctccaat

SEQ ID NO: 864331 - DNA, 120 bp, Artificial Sequence
  ENSG00000226622_44 (sequence is synthesized)
gtctgaagatcttccagtgtcactcatggcccctttagtctcagcccagccataaacttcaatgcaaaggataagtctagattgatttcacagttcttttaacaagtggacttaaaagct

SEQ ID NO: 864332 - DNA, 120 bp, Artificial Sequence
  ENSG00000226622_45 (sequence is synthesized)
agtggcaatacattccttctcctcagagttgaaggcaagttctccctgaagcctgggtgacacatgtccttttcctaagactggggaagagaattgggagtggcagccagttcggcagga

SEQ ID NO: 864333 - DNA, 120 bp, Artificial Sequence
  ENSG00000226622_46 (sequence is synthesized)
aatttgttagcaggggaagaaactcagatgggagtgaggaacttcacaggaaaagtctggaggagcatccaaggatgatcaacatttattttatgtgtgggaagcaatgcgactttactg

SEQ ID NO: 864334 - DNA, 120 bp, Artificial Sequence
  ENSG00000226622_47 (sequence is synthesized)
ttattgaccctttacaatatcccctgtaaatgtatgtttagggttttcttctgaaaaagaaagaaattgttactcagccagtaaatgatacttaaagagagaaagagggggaaaaaagga

SEQ ID NO: 864335 - DNA, 120 bp, Artificial Sequence
  ENSG00000226622_48 (sequence is synthesized)
aggaagggagagagaaagtgggagtagatgaaagtgagggcgagagaaagaaaaagaaaggaattgttattcagccagtaaaagatacttaaaaagagagaaagaaggggggaaaagagg

SEQ ID NO: 864336 - DNA, 120 bp, Artificial Sequence
  ENSG00000226622_49 (sequence is synthesized)
aaagatacttaaaaagagagaaagaaggggggaaaagagggagggtgggtgagtgttgcgggaagacagggaccccaaatggagggaccagttgaagccatggcagaagaacgtagattg

SEQ ID NO: 864337 - DNA, 66 bp, Artificial Sequence
  ENSG00000226622_50 (sequence is synthesized)
tttactgcaatctctaaacataaattgtacagatttcatggacacttatgctaatcctgtcagctg

SEQ ID NO: 864338 - DNA, 83 bp, Artificial Sequence
  ENSG00000226622_51 (sequence is synthesized)
cctcaggaccctgtaataattgcattaatgcacaaattgtacagcatgtatgtttgagcagtagcaattgttcagggaataag

SEQ ID NO: 864339 - DNA, 120 bp, Artificial Sequence
  ENSG00000226622_52 (sequence is synthesized)
attctttttctcagcatggaacatccctgggaaagagaatacacgcctgggggtgggtctctaaactggctcccttgggcgtggccgtcttttatggtggaggttgtaggggtgaaatag

SEQ ID NO: 864340 - DNA, 61 bp, Artificial Sequence
  ENSG00000226622_53 (sequence is synthesized)
ttttggtcagactggttgctctcaaaatcctgtttcctgataagatgttatcaatgacaat

SEQ ID NO: 864341 - DNA, 120 bp, Artificial Sequence
  ENSG00000254394_0 (sequence is synthesized)
aaagcattgatctgcacagagctgctctcacactgcaactgcatccagtttgcttctaggattttcttctaccttgaaaaactgcacatagtgaagagtttctttgccttattcctgcag

SEQ ID NO: 864342 - DNA, 120 bp, Artificial Sequence
  ENSG00000254394_1 (sequence is synthesized)
tcttaacatgtcctactgagtaaagcatctggaaacataaggagcttatgaagtccttgcagcagagttgaaggagcctcagatgtgattggaggtcattgggaaacactgtgggtcttc

SEQ ID NO: 864343 - DNA, 120 bp, Artificial Sequence
  ENSG00000254394_2 (sequence is synthesized)
tctgtctggccttgaaggaacaagctctgaagtcttgatccaaaacagacaaggctttaatatgaaagcatttttctttgaagaagttcaccctgaagccttggcccaatgatctcagaa

SEQ ID NO: 864344 - DNA, 120 bp, Artificial Sequence
  ENSG00000254394_3 (sequence is synthesized)
ctgaagccttggcccaatgatctcagaagatgagagagaatggcaaaccaaaaagttcacccaaaacatctcacttttcaactggattttgtgaattttttttttttttttttgagatgg

SEQ ID NO: 864345 - DNA, 120 bp, Artificial Sequence
  ENSG00000254394_4 (sequence is synthesized)
gaattacagctgtgagccaccatgccgagcccattttgtgaattttcattacaaaattttttcacattatactcctctgtcctcagaatctgtgaacactcctcaccacctgtctgtcca

SEQ ID NO: 864346 - DNA, 120 bp, Artificial Sequence
  ENSG00000254394_5 (sequence is synthesized)
ccacacccacaaactgtttggttctattatgacttgcttactcattttcattctctaaacttcaaaatttcaaaccatcatttactttcaggggtcgaaggaattgtctaaactccttct

SEQ ID NO: 864347 - DNA, 120 bp, Artificial Sequence
  ENSG00000254394_6 (sequence is synthesized)
gctctccatgataaaataaataacctattatttttttcttcctctctgaatttttttcagcactcttattttaaaatcaaatatatagcataattatttgattaacatacatccctctca

SEQ ID NO: 864348 - DNA, 120 bp, Artificial Sequence
  ENSG00000254394_7 (sequence is synthesized)
ttatagtggaagctccatagggccaagaactatgattgttttgattgatctctttatagaatgtatggcaagtaataagtgctaatattagttggataaataagtgaaagtattatacta

SEQ ID NO: 864349 - DNA, 120 bp, Artificial Sequence
  ENSG00000254394_8 (sequence is synthesized)
attcatgagccacagattggcagtgacataaaagggaatgttttttggctagctatatcatcagtagagtaaacacaaatattttcatctgaccgtaaggcaaccgatatcacacatatg

SEQ ID NO: 864350 - DNA, 120 bp, Artificial Sequence
  ENSG00000254394_9 (sequence is synthesized)
accttttgaattgaagaggcaagaaaactacatactacatttctgatacccttttttgcagaaaggatacttgatacttcatttaaagctgagagttgtgtctgtatcttcaagacttag

SEQ ID NO: 864351 - DNA, 120 bp, Artificial Sequence
  ENSG00000254394_10 (sequence is synthesized)
attcagagctgagttacttggctatatgaggaagcctctttgctgatacagatcatgtagtgatggtgtgcgaagtcctagacagcagcaatttgattcaacaacattctgacagtggtg

SEQ ID NO: 864352 - DNA, 120 bp, Artificial Sequence
  ENSG00000254394_11 (sequence is synthesized)
ttctctacacaactctatgggcttacatatctgaaattcagttgaattcagacaaaattcaagtgatatagtgaaacggagtttgtgatgtcaacttgcctaagcaagcacacaagataa

SEQ ID NO: 864353 - DNA, 120 bp, Artificial Sequence
  ENSG00000254394_12 (sequence is synthesized)
gctgacaagaggagcaagctaaagttcaagggcctgtgtgaaagagagatgcctgactaatgttttgtcaagataaagcagagggttggtgacagacaatagaggccaggacacttaagt

SEQ ID NO: 864354 - DNA, 120 bp, Artificial Sequence
  ENSG00000254394_13 (sequence is synthesized)
aagaaggtctacctttcctgttttaaagtcatggttgcatctactttcataagaacttattgtgtaatgtttctgtcagtaacctgggaataaagagtggagtttctcctgcactacaga

SEQ ID NO: 864355 - DNA, 120 bp, Artificial Sequence
  ENSG00000254394_14 (sequence is synthesized)
gaaaactgaacatgcatctataaaatgcattgaacatcaagcttaatttgcttttctgactaatctacataaataaagtttctctctgatagttgctgcagctagtaaaaatgactgtat

SEQ ID NO: 864356 - DNA, 120 bp, Artificial Sequence
  ENSG00000254394_15 (sequence is synthesized)
agatgttcttaaatttaggaagcctccttaggataatttgatttaaaatctaggctatttctcaagtacgaaattcacttagagaagacccagtaaacctcttaaagagatgtcttcagt

SEQ ID NO: 864357 - DNA, 120 bp, Artificial Sequence
  ENSG00000254394_16 (sequence is synthesized)
cctccaaatgtcatattgaaatgtgacctccaattttggaggtggacctagtgggaggcgtttgggtcatgcgttggatccttcatgaatggcttggtgtcctccctatggaacaagctc

SEQ ID NO: 864358 - DNA, 120 bp, Artificial Sequence
  ENSG00000254394_17 (sequence is synthesized)
tctgagtgagctgggcttacatatctgaaattcagttgaattcagacaaaattcaagtgatatagtgaaacggagtttgtgatgtcaacttgcctaaggacaatttcctaaattgaacac

SEQ ID NO: 864359 - DNA, 120 bp, Artificial Sequence
  ENSG00000254394_18 (sequence is synthesized)
tctttcatggaaaaaagtaaattggaacctgcacttgtgaggcttggaaactaccacctaagatgtttaaaaggaaaactgtcgtttgcctcaaaatgtttatccttgggaaggaatcaa

SEQ ID NO: 864360 - DNA, 120 bp, Artificial Sequence
  ENSG00000254394_19 (sequence is synthesized)
tattgtgctgactttctccccatacctaagttggctttgctccaatagtattatttccctctttacaaagtaaaagtccaaacaaaaaaactgttacttaaataagttcctctctaattt

SEQ ID NO: 864361 - DNA, 120 bp, Artificial Sequence
  ENSG00000254394_20 (sequence is synthesized)
atttgttccccaatgtcaccagctcaaagacatttacaataaactccatattggaaattgcaaatctttccacattgctagcactcatggtcactttataaattatgtatttcttctttc

SEQ ID NO: 864362 - DNA, 120 bp, Artificial Sequence
  ENSG00000254394_21 (sequence is synthesized)
attgtttcatgtgcttatatatatgtgcatgtgtatatatatacatatacacacacacacaacatacctgttcaaacatttattgtttactattaatattgtttggctctatgtccccac

SEQ ID NO: 864363 - DNA, 120 bp, Artificial Sequence
  ENSG00000254394_22 (sequence is synthesized)
tcatatctcatctcgaattgtaatccccacacatcaagggagggacctggtgggaggtgactgtatcatggggggtggattcccccatgctgttcttatgatggtgagatagttctcaca

SEQ ID NO: 864364 - DNA, 120 bp, Artificial Sequence
  ENSG00000254394_23 (sequence is synthesized)
atagttctcacaagatccggtggtttaaaagtgtttggcagttccctcctcactctccctctcttgtcgccttatgaagaaggtccttgcctcccctttaccttccaccatgattgtaag

SEQ ID NO: 864365 - DNA, 120 bp, Artificial Sequence
  ENSG00000254394_24 (sequence is synthesized)
tctgagtgagctgttctgtttctctgaagaagcctaatacgtcttataagaagtgaaaatttggacacacaaagaagcaccaggattgcatacttacagagtaaagaccatgtgaggaca

SEQ ID NO: 864366 - DNA, 120 bp, Artificial Sequence
  ENSG00000254394_25 (sequence is synthesized)
cagagaggtggtggctgtctgcaagcagaggagagaggcttcagaggaaatcaaccctgctggcaccttgaccttggatttctagcattcaggactatgagaaatgaatttctgtttttt

SEQ ID NO: 864367 - DNA, 120 bp, Artificial Sequence
  ENSG00000254394_26 (sequence is synthesized)
taagccacctagtctgtggtactttttgatacagttctagcaaactcatacaagttttgcttattaataaattatatactcagaagaataactacaaagaatacaaaaacctgaagaagg

SEQ ID NO: 864368 - DNA, 120 bp, Artificial Sequence
  ENSG00000254394_27 (sequence is synthesized)
ccaatggcacggtactccaaaagcaaaagctaaagttccatgttctccgattcagggatatataggaggaccagcagctggtatccaggaagctgtctgatgacacagaggacttttcta

SEQ ID NO: 864369 - DNA, 120 bp, Artificial Sequence
  ENSG00000254394_28 (sequence is synthesized)
atctgctgttgatttcctcctttagtggtggcaaacagagaaagagggggcaacatttttatgttaaaattctaacccacaatgtgatggtattaggagataaggcctttgggagacaaa

SEQ ID NO: 864370 - DNA, 120 bp, Artificial Sequence
  ENSG00000254394_29 (sequence is synthesized)
cgggtgaagaggatgaagcccttattaataagattagtgcctttatgataaggggccccagagagagcttgcttcccctctctgctcttaccactatgtgcaaatataataagaagacag

SEQ ID NO: 864371 - DNA, 120 bp, Artificial Sequence
  ENSG00000254394_30 (sequence is synthesized)
tcattggacaccaaatcttccagcacctcgatcctggacttctcagactctagaataaagtgtgaaataaatgtttgttgtttgacccaatctattgtatatttcttagagcagcccaag

SEQ ID NO: 864372 - DNA, 120 bp, Artificial Sequence
  ENSG00000254394_31 (sequence is synthesized)
ctgactaagacaacaactgcattagtctgctagggctgtcgtatataataccatggactctgtggtttaaacaacagaaatataacttcttacagctctggaggataggaaatccaagat

SEQ ID NO: 864373 - DNA, 120 bp, Artificial Sequence
  ENSG00000254394_32 (sequence is synthesized)
caaggtgccagcatggtaggttttattctgaagcctcttctttggcttgtaggtcactgccatttcttcatgtgctcccatggcttttttgtatgtatgtgtatacttctctctctgatt

SEQ ID NO: 864374 - DNA, 120 bp, Artificial Sequence
  ENSG00000254394_33 (sequence is synthesized)
cttcttattaggccaccaattctattggattagggtcccatgtttatgacctcatttaaccttaattaccttcttagaagtgctatattcaaacaagttgcattgggtttaaggcttcag

SEQ ID NO: 864375 - DNA, 120 bp, Artificial Sequence
  ENSG00000254394_34 (sequence is synthesized)
catctgaattttggagaaaaaaaagtcagtgcatagcaccaactgaaaaacatctgagacatttgtcagttaatgcctgcccaccatttatcaattgttattggaagatgggcatttact

SEQ ID NO: 864376 - DNA, 120 bp, Artificial Sequence
  ENSG00000254394_35 (sequence is synthesized)
ccccacacttccaagtttagtttccctgtgagcaagttcccgcagctaaagagaaggcaccgagaaaaaaaatggtaccccttatcaagataatatggggcacaatatcagagtaggttt

SEQ ID NO: 864377 - DNA, 120 bp, Artificial Sequence
  ENSG00000254394_36 (sequence is synthesized)
gagctttcaggaggctgtaaaccacatcacaattgaaatcagagatgagctgatggggtatgccaggtggcacaaaaaatattatgatcattatattatggacctcatatgtttggaaag

SEQ ID NO: 864378 - DNA, 120 bp, Artificial Sequence
  ENSG00000254394_37 (sequence is synthesized)
gtggcagctgtttttcagttcatgtgggcccaatagaagtaggcttttcataaacggaacatggatttatctggaatctttgagcgcaggccatgatagatttgttggagacttcaaaac

SEQ ID NO: 864379 - DNA, 120 bp, Artificial Sequence
  ENSG00000229943_0 (sequence is synthesized)
gctgagactcggctacttgttacaagagcacttccaatctctgtacacatccagactgtgtctgcttttacgtcgatgtagaagataaaggaagctgacttcaagacaactgcccttcct

SEQ ID NO: 864380 - DNA, 120 bp, Artificial Sequence
  ENSG00000229943_1 (sequence is synthesized)
gttcatagtgtaattttgtcatttctacactttgtgtccgttcctgttctatatcttaataatttctggaagacactctctactttcttattaaaagtaaatatatttggcccaaaaaaa

SEQ ID NO: 864381 - DNA, 120 bp, Artificial Sequence
  ENSG00000245330_0 (sequence is synthesized)
acagatgtaaaacaccgaggctcaggggagtgaaggaagacttgtcagcaaaaaggaaaacctagtgaagactatcgttggtcttgctccttttatcaaggagtagaggggctggggtcg

SEQ ID NO: 864382 - DNA, 120 bp, Artificial Sequence
  ENSG00000245330_1 (sequence is synthesized)
cctcgggaccccacagcgacccctcttgctctcttcgcggatgaggcgcaggctgtcagccgggaggcctggcggcgtccaggtacacgggaagacggacagcgcggtgggtggcaggga

SEQ ID NO: 864383 - DNA, 120 bp, Artificial Sequence
  ENSG00000245330_2 (sequence is synthesized)
ctttgcccggcacaggactgcagcagccaggctagggcgcagcgcgcaccacccgctcgtcggcttctgccaggcagccccgcttggcgagcgagtcctcagggaccgaggctgcagcag

SEQ ID NO: 864384 - DNA, 120 bp, Artificial Sequence
  ENSG00000245330_3 (sequence is synthesized)
ctaagcgcgggcgcaccgaggaccatccacgcgcccgcagccgttccggcgccccacgcgagtcgcaagccacgagccagggagcgcgtgcgcgcaggactgcagcgggcacgcgttggc

SEQ ID NO: 864385 - DNA, 120 bp, Artificial Sequence
  ENSG00000245330_4 (sequence is synthesized)
agtgccatcgtgagctcacccgctgtgtctcttgccttaccgtagctgttccccggtgaccaagacctcagccatgcgctccagctccctttgctgcgccccgccactcccgctggtgct

SEQ ID NO: 864386 - DNA, 120 bp, Artificial Sequence
  ENSG00000245330_5 (sequence is synthesized)
gctgtcactgccagcactgccagtgctgccgccctcctccatggttttagggccgtgcggctaccactggctccgctgtccgccgagggtttgggtgctcggatcagtctgccctcacag

SEQ ID NO: 864387 - DNA, 120 bp, Artificial Sequence
  ENSG00000245330_6 (sequence is synthesized)
acgcttcccgcgccatctttgttcggggcagctccgctgctctgactggattggctggagagggaatccctatgggtaggcagacgcgctgggctagtccggccccagaaacttgagctt

SEQ ID NO: 864388 - DNA, 120 bp, Artificial Sequence
  ENSG00000245330_7 (sequence is synthesized)
ggaggctgaatttggtgagctctctttacccacaaagctcatgctgtagaatcctggggacaggcctggaggttattagtgtgaaggcgtttttattgtacgttccacaccccaagttgc

SEQ ID NO: 864389 - DNA, 120 bp, Artificial Sequence
  ENSG00000245330_8 (sequence is synthesized)
cagagagcaaaacataattcaacaatctggccaaatggtcaacagtgaaggttatacatgtcattgaagggcatggagaaattaaacattcttctctccccaacctctctctccaaagac

SEQ ID NO: 864390 - DNA, 120 bp, Artificial Sequence
  ENSG00000245330_9 (sequence is synthesized)
gacttgtttgccttatgttgtaatcaataaggaacgccggcctaggaatcaggctgacctgggatccagctccgctcctgtgatgtcctatttaaatgtgtttaatcctcccttacaaaa

SEQ ID NO: 864391 - DNA, 120 bp, Artificial Sequence
  ENSG00000245330_10 (sequence is synthesized)
taaaaataattgcggctaccacttttgacatctgctgcattaaagatacttcaggtatggtattacctcgtttaattattacaataattcataaaataggtattggtgttcgttttgcat

SEQ ID NO: 864392 - DNA, 120 bp, Artificial Sequence
  ENSG00000245330_11 (sequence is synthesized)
aaaataggtattggtgttcgttttgcattagaatgcaggcttggagaggtgaagttacttgtctaaggcaagcaaataataagtataagaagagccgggcaccgtggctcatgcctgtaa

SEQ ID NO: 864393 - DNA, 86 bp, Artificial Sequence
  ENSG00000245330_12 (sequence is synthesized)
ctgagcgacagagggagactctgtttctaaataaataaataaataaataaatgtaaaaacagagaaaagtacaatttccatggctt

SEQ ID NO: 864394 - DNA, 120 bp, Artificial Sequence
  ENSG00000245330_13 (sequence is synthesized)
ataaatgtaaaaacagagaaaagtacaatttccatggcttttgtcattcacacccatttttaatatttttgtcatatttgagtcatctttttgtagtgatagaaataaaacattacaaat

SEQ ID NO: 864395 - DNA, 120 bp, Artificial Sequence
  ENSG00000205452_0 (sequence is synthesized)
agtcgccgctccagcgggaggcaggatggttgctacctggggcggccgccagctcctcccgcagtgctccgggccgcccctcaccccagggtcgcccgctcctagtgtggcccaggcttc

SEQ ID NO: 864396 - DNA, 120 bp, Artificial Sequence
  ENSG00000205452_1 (sequence is synthesized)
ccggcctgcccctcccagccctaggaagacgtcccccgggccccctcagccctccgcctccccttctctccctttctccccgctcctggcaggctgcagccgtctcctcccggtgctcgc

SEQ ID NO: 864397 - DNA, 120 bp, Artificial Sequence
  ENSG00000205452_2 (sequence is synthesized)
tccttccttgagctctgtccaccgctgcccactgggggctagagcttcccggctaccctggaagctggaggctgggaccagctcttcaggtgacaggcctctgtgtctccacagtggcca

SEQ ID NO: 864398 - DNA, 120 bp, Artificial Sequence
  ENSG00000205452_3 (sequence is synthesized)
gaggggagcctgcctgactgatgagcaaggctccactttgtcaccaaggcagagaaggggcccgggtaaatgaccccggtggcccccacccctgcctggcatgagagtgggtaggggctt

SEQ ID NO: 864399 - DNA, 120 bp, Artificial Sequence
  ENSG00000205452_4 (sequence is synthesized)
cggacttgaggggactggagcgggaataagggtcttctctggcccagcctttgactgaagctggtctggagacaggggcgttagagaagtgactcatagatggcctaaataagcggggcc

SEQ ID NO: 864400 - DNA, 120 bp, Artificial Sequence
  ENSG00000205452_5 (sequence is synthesized)
actcaaggacccaggacagggggaagagggccaacccatctggaccgcaggcaaaccccatggcctttgagagaagagagaagaggacccggtgaagtaggctccgagggcctcagccca

SEQ ID NO: 864401 - DNA, 120 bp, Artificial Sequence
  ENSG00000205452_6 (sequence is synthesized)
gcaggagcgcagggtgggcgcgtgatgtcatcgaagggaagacagtgacctgggggagggccgctttgagggagagtgcaggccaccgccagagagctctgggagccgagggcagggaag

SEQ ID NO: 864402 - DNA, 120 bp, Artificial Sequence; identical to SEQ ID NO: 814567
  ENSG00000205452_7 (sequence is synthesized)

SEQ ID NO: 864403 - DNA, 120 bp, Artificial Sequence
  ENSG00000205452_8 (sequence is synthesized)
tctctccctcatgcaggcttttcctccaggagctgcaccaggaactcacagaggatcagggagaattctgagaacatgctactgtggtgctgcctagagaggaaggataaatgatgacaa

SEQ ID NO: 864404 - DNA, 120 bp, Artificial Sequence
  ENSG00000205452_9 (sequence is synthesized)
gtacatctctgagtaacgtatgggcacttgttcatgaaaactgtttttctgaaagcttgtgaaggtcttgaaatactcgctatcagttgaggacaaacatttacaccctccttccacagg

SEQ ID NO: 864405 - DNA, 120 bp, Artificial Sequence
  ENSG00000205452_10 (sequence is synthesized)
gagttcaagcaggctggatgggtccatctatggatgatcttccccagccccttcctcttcccagctcatccctggctctctgtgtgaacaggtctcatcagtggaatgtggttgatgaag

SEQ ID NO: 864406 - DNA, 120 bp, Artificial Sequence
  ENSG00000205452_11 (sequence is synthesized)
tgaggtcttcaattttctcatctactgtgtggtcatgttattttcctcatctgaggcttaaaaactcacctgcatgcagcacatgacagcttaaaatctcttgtgaacaaaacagtaaca

SEQ ID NO: 864407 - DNA, 120 bp, Artificial Sequence
  ENSG00000205452_12 (sequence is synthesized)
aagacacccaccagcgttgagcatcccgtgttgatgacagcgaccaccaggggtcaacgtcctcttcacaatcctgtgtcagagcatcacttgactgatttcattagcaacttcccagga

SEQ ID NO: 864408 - DNA, 120 bp, Artificial Sequence
  ENSG00000205452_13 (sequence is synthesized)
gaatcagcttacaaaatacttgtcccattttccatgcagatgtaacccatctattttactgaagaaatgggaagagctgaatgctgaatacactgaatgtctgcaggttgtgcaagtttg

SEQ ID NO: 864409 - DNA, 120 bp, Artificial Sequence
  ENSG00000205452_14 (sequence is synthesized)
tgactttatcactttctaatttctgatctgtgtggaccactctacagatttttctcactggtgtgatcagccttctggatgtcaaatataatagactttcaataatataaaagtcaacac

SEQ ID NO: 864410 - DNA, 120 bp, Artificial Sequence
  ENSG00000205452_15 (sequence is synthesized)
cccattttatgtttcttatacaggctttcttctatgaaatgctatgtcatgaatatgcaaataacctgagatccactgaggtaaatttggatgtctgtgccctgagagcatcacccaaca

SEQ ID NO: 864411 - DNA, 120 bp, Artificial Sequence
  ENSG00000205452_16 (sequence is synthesized)
ctctatagaagcccctgagaacacagctcctcaccatggactgtacctgggggatccacttcttggtggcagctgccacaggtgtccattcccaggttcagctgttgcagcctggggctg

SEQ ID NO: 864412 - DNA, 120 bp, Artificial Sequence
  ENSG00000205452_17 (sequence is synthesized)
aggtgaagaagcctgggtcctcagtgaaggtctcctgccaggcttccagatacaccttcaccaaatactttacacggccacaatcaacttatgagtgtttaaacttcacctacttgattg

SEQ ID NO: 864413 - DNA, 120 bp, Artificial Sequence
  ENSG00000205452_18 (sequence is synthesized)
gaggactattcacctcagatatttggaatacttctgtaaggagatgtgttcgtcttcccaatatttattttcataatcatctattaatatgtgtattggtttatgaatatatatttcata

SEQ ID NO: 864414 - DNA, 120 bp, Artificial Sequence
  ENSG00000205452_19 (sequence is synthesized)
ggctccactttgtcaccaaggcagagaaggggcccggctccctgatctgatcgtggacactgcagtccccagatggcttatcccgttaagctaagccctcggccatccctccagctttag

SEQ ID NO: 864415 - DNA, 120 bp, Artificial Sequence
  ENSG00000254777_0 (sequence is synthesized)
caggcgggcacatcccgcaccctctccgcccgcccgcccccggcgcccttcgcattcccttcttcggccctggcccctcggaccggagcgcccaggccagctcagggtgttcccgtgggg

SEQ ID NO: 864416 - DNA, 120 bp, Artificial Sequence
  ENSG00000254777_1 (sequence is synthesized)
cggcgcccttcgcattcccttcttcggccctggcccctcggaccggagcgcccaggccagctcagggtgttcccgtgggggtctccggaaacaatgtagagacggggtttcaccgtgtta

SEQ ID NO: 864417 - DNA, 120 bp, Artificial Sequence
  ENSG00000254777_2 (sequence is synthesized)
ggtaccctaactagcgcggctgtgagtctgaagcttgaaatggggaagttggtcagcatgggtgagctatgcagcccaggtgaagggatcctcaagcagcagcctctgcctttttgtctt

SEQ ID NO: 864418 - DNA, 120 bp, Artificial Sequence
  ENSG00000254777_3 (sequence is synthesized)
ctccttttcacggagatgacaagaatcaccccaggacttatcttctgaggtgctcagctgtggtcccagtgctgctttggtcactgctatggcgggtggaagcaggatgggtgaagtcat

SEQ ID NO: 864419 - DNA, 120 bp, Artificial Sequence
  ENSG00000254777_4 (sequence is synthesized)
agcagttgccctactgagttaatgtgataaggagaaaaaaaaaagggattgatggttaagagaatggttgaacacagcacatctcaggatggggcaatatttggtgagaaccatattgga

SEQ ID NO: 864420 - DNA, 120 bp, Artificial Sequence
  ENSG00000254777_5 (sequence is synthesized)
ttctaccaaattacaaatatattccaggttggcctgatcactcactcaccactccctgcaactccatggagaagatataagctgtcaaaaatgtatttgtgagtctgatgagctctttca

SEQ ID NO: 864421 - DNA, 120 bp, Artificial Sequence
  ENSG00000254777_6 (sequence is synthesized)
acggtggctgttcatcagcactcacacatccaccacaccggtttagtcgcacgctggaaggttttgcttggaatctgccatcagcaatgccgaggcctggccttggtggaaatggaggtg

SEQ ID NO: 864422 - DNA, 120 bp, Artificial Sequence
  ENSG00000254777_7 (sequence is synthesized)
ctgcttaacttttcttccaaaacatagtacaaccctagtcatcctgtcatgcacctgagacattcttattagcaagcttggagcagcagtggagtgttgaaaaaatttctctcaaacctg

SEQ ID NO: 864423 - DNA, 120 bp, Artificial Sequence
  ENSG00000254777_8 (sequence is synthesized)
gaggtagaccccagatggtgggaatcaaaggagggaagtgaggggcacacgggcctctgggggctgaggcaggagacagctctctgcctttctcagaggacctttggagatgtgaatgaa

SEQ ID NO: 864424 - DNA, 120 bp, Artificial Sequence
  ENSG00000254775_0 (sequence is synthesized)
tttcttagctggatgggtgaagtgttccctcagttcacatagaccaggcttcctctttagaggcataagctgtaaaacaggagagtctgttttaagaggatctgtttgaagtttaatgta

SEQ ID NO: 864425 - DNA, 120 bp, Artificial Sequence
  ENSG00000254775_1 (sequence is synthesized)
actgaagtccatgcacctgaagccattaattgatataagtgaagtaagtctttgggtttccggtagctctgactcagattctgcttgcctcttctccatgagattaccaaggcatcaggg

SEQ ID NO: 864426 - DNA, 120 bp, Artificial Sequence
  ENSG00000254775_2 (sequence is synthesized)
cagagactccctgaggctatgctagaagggtaccatttgaaaaggaagtgtatgacccaccgtgaaatggaactggtagctggtcacccaggtgctcttccttgttaactgatgagagcg

SEQ ID NO: 864427 - DNA, 120 bp, Artificial Sequence
  ENSG00000254775_3 (sequence is synthesized)
attattatgtgagaactttaacaacctgccaaaggatcccggggcaagaatgagagctgaaccattgaaaagctgagcatcgaagtgcctgggaagcccaaaactcagcacattcatgct

SEQ ID NO: 864428 - DNA, 120 bp, Artificial Sequence
  ENSG00000254775_4 (sequence is synthesized)
tttgctggtttttgaccattgagaagaaaaaagagtcagcaaccagggagcaggatgagtggatctggttcagaacatctgtgaacacagagggagtggaaacttcactttcaacatcat

SEQ ID NO: 864429 - DNA, 120 bp, Artificial Sequence
  ENSG00000254775_5 (sequence is synthesized)
cagccaacttccctcccattacaattctatctcaagatcaaggtcatgcaacaaaaccagcaggtgtgattctttctctccgatcaactcactttgttttttctatttttatgctctctt

SEQ ID NO: 864430 - DNA, 120 bp, Artificial Sequence
  ENSG00000254775_6 (sequence is synthesized)
gagcactgtataattaacttccataatggctctaaaactactaggtaaacatatttaacaagcttctatccatattgatagagaggaaatatgttaactatcagatgtcagagaggaaat

SEQ ID NO: 864431 - DNA, 120 bp, Artificial Sequence
  ENSG00000254775_7 (sequence is synthesized)
caatactaatggattattggtagaaatatcaattgactgccctgcagattctaagccaactttggccacttcttctttgaaggaaatgatgacagtgataaaaaaaaaaaaaaaaaaaaa

SEQ ID NO: 864432 - DNA, 120 bp, Artificial Sequence
  ENSG00000254775_8 (sequence is synthesized)
cctgagaaattcagagggatttcctgtactctgcaaagaccatgacacaatgtggccataatcctaactctcatgctgctgctgaaagtggaagcagaaggatacaaacaaaccaaaccc

SEQ ID NO: 864433 - DNA, 120 bp, Artificial Sequence
  ENSG00000254775_9 (sequence is synthesized)
ttggttcaagcaacaagcatttattgaatacctgctgtgtgccagaactagtctaggcacgttgaaggcaattgatgcaggacttccaatagcttcccatctcactcaaagtaaaggcca

SEQ ID NO: 864434 - DNA, 120 bp, Artificial Sequence
  ENSG00000254775_10 (sequence is synthesized)
aagacattacagggacctagaaagatctttcctccacttcactccactctagccacaatgatgtccattctgttcttccaatacactgtgcatagtatctcctgaaaaccttatctcaca

SEQ ID NO: 864435 - DNA, 120 bp, Artificial Sequence
  ENSG00000254775_11 (sequence is synthesized)
tggttctctccacctaggaagctccaatcccagatacctgcatggcttgacctctctttccaaccaatctttacccaaatacagcctcctcagagaggtcttcctgagccacatttgcaa

SEQ ID NO: 864436 - DNA, 120 bp, Artificial Sequence
  ENSG00000254775_12 (sequence is synthesized)
agttaaatcacccctatgcagttcctaatctatttctttgctttacttccttccttaacacttgtcattctctcacatagtatatatctcacccattataatctgtctctataattagac

SEQ ID NO: 864437 - DNA, 120 bp, Artificial Sequence
  ENSG00000254775_13 (sequence is synthesized)
tataaaatttaggtaagtggggctttggggttttgttttgttcactgctaaatcccaaaaaaagagccttgcacataatagccatttaataaatatttttgcattaattgactaataaaa

SEQ ID NO: 864438 - DNA, 120 bp, Artificial Sequence
  ENSG00000254775_14 (sequence is synthesized)
ctcaagatcaaggtcatgcaacaaaaccagcaggtgtcaagacattttaagatgttgtcaatttgccaaggaaatgaaagattgttgtgaatatggcaagatgtgaaaacaatggaggac

SEQ ID NO: 864439 - DNA, 120 bp, Artificial Sequence
  ENSG00000254775_15 (sequence is synthesized)
taggtttggtattagtgaggcagatatttgtcattggaggaaatactacaattccatattttctttgagagcaactacaaaattcattttgcaacataagaaaggaaggtgctcacaagt

SEQ ID NO: 864440 - DNA, 120 bp, Artificial Sequence
  ENSG00000254775_16 (sequence is synthesized)
gtttttgaccattgagaagaaaaaagagtcagcaaccagggagcagcctcttctaaaatggtgtgtttattatgaagtgttcttggaagttttcttatgtcatctgaatcaatataatat

SEQ ID NO: 864441 - DNA, 120 bp, Artificial Sequence
  ENSG00000254775_17 (sequence is synthesized)
cagacctatcaagatctatttttaaaggatactctgggaaaagcttcatgctttcaaaacactgaatttcagggaggtcctcggcaaaatcatgaaacgaatttgaatcttacccttcgt

SEQ ID NO: 864442 - DNA, 120 bp, Artificial Sequence
  ENSG00000254775_18 (sequence is synthesized)
tcaggtttcagtctgtgaccttggacccagattccatgaatagaacattgtcctcgcagggcagaggctcaataactggacattttctgggtccctgaatttgtacaatgagatatcaac

SEQ ID NO: 864443 - DNA, 120 bp, Artificial Sequence
  ENSG00000254775_19 (sequence is synthesized)
tccaatctgtgagcacaatgctccagtgactgccaggaatggctgcaatattgatgcctttcaatgtagatcacatcattcaccgagcagagctcaataaaatgatactgtagttaacaa

SEQ ID NO: 864444 - DNA, 120 bp, Artificial Sequence
  ENSG00000254775_20 (sequence is synthesized)
ggtgatacttcaaactttctgaagatcagagtttccactaccctgccccacaaaggcaatggagtgtggccttttcacagtataactatggctgacaacaaataaaaaataatgaaataa

SEQ ID NO: 864445 - DNA, 120 bp, Artificial Sequence
  ENSG00000254775_21 (sequence is synthesized)
ctgttggaaggattggctattttagtcaacgtgagctgcgctgacaaaaacgtgcctagaacatcctctggtggcgacagtgggaatcatcagtttttgacataactgaaggttccttgt

SEQ ID NO: 864446 - DNA, 120 bp, Artificial Sequence
  ENSG00000254775_22 (sequence is synthesized)
tcagccccattccgcaggaatgacacttaccaaggaaacagtcccatgactgaacacacgcagcgactgagaaacagcctgctttgaagactttaccgcaaccctgccacatattttggg

SEQ ID NO: 864447 - DNA, 120 bp, Artificial Sequence
  ENSG00000254775_23 (sequence is synthesized)
cattctgctgcgaaagttcttaatacgggatggcaccatctcgccacaagacttgcttcccactcttttctaccactggtgtaaatctggaagtgaaaagtaaagagaacttacaaatca

SEQ ID NO: 864448 - DNA, 120 bp, Artificial Sequence
  ENSG00000254775_24 (sequence is synthesized)
tacaattctatctcaagatcaaggtcatgcaacaaaaccagcagagatgctaaagaacaatgaacaattacatgttcaaaaagcaagcagaaaacgaagaatgaggaataaaagacctgt

SEQ ID NO: 864449 - DNA, 120 bp, Artificial Sequence
  ENSG00000254775_25 (sequence is synthesized)
ttaatcttaaaattagataagtaatatttgaataattgtgctttgactagaataatagcatagcttctgcccatgacggacccttgataaatgtttgcttgagtgaataaaagaactgac

SEQ ID NO: 864450 - DNA, 120 bp, Artificial Sequence
  ENSG00000254775_26 (sequence is synthesized)
ctacagcatggcagctgggttcctgaagaacaaaagcagaactttccaaacgcttaaagggctaggtctggagctgcacagcttcacatctgccacgtggtattggccaaagcaagtgac

SEQ ID NO: 864451 - DNA, 120 bp, Artificial Sequence
  ENSG00000254775_27 (sequence is synthesized)
aagggcactccaaattcaagggaaggggaaaacagattccacctttgattggaggaatagcaggagagcatagtgagggaagaagttgatggtcctccttgaaaactacctaacacattg

SEQ ID NO: 864452 - DNA, 120 bp, Artificial Sequence
  ENSG00000254775_28 (sequence is synthesized)
ggtaatatttagcagtgtctcattttcccattggcaggaatcgctcactatttcatgacatacggtcacaaataaaaagtactgccaatagctttgttctcgccaaagaatggagtggct

SEQ ID NO: 864453 - DNA, 120 bp, Artificial Sequence
  ENSG00000254775_29 (sequence is synthesized)
gagcacatgaaaaatagcatatcacctaaatgtatacaaatcaatgcccatagtgcctttaccactgtattattactatggtctttggataaacaaaaatacatgtttttaaatgcacaa

SEQ ID NO: 864454 - DNA, 120 bp, Artificial Sequence
  ENSG00000240868_0 (sequence is synthesized)
ctttggtgtgcagtatttttactccatttttgaccaaagacacctgaacatttctggagaaaacagtgatgtggcagaccattgtgaccggggttcccagggattccagggtgcccttgc

SEQ ID NO: 864455 - DNA, 120 bp, Artificial Sequence
  ENSG00000240868_1 (sequence is synthesized)
aaacccaaaggagaaatctttgttgctggggccctggacacagcctctgttccgtgcagtgggaaatggatgagctgtcccctgccccagacccacacctgcacaaacttggacagaagg

SEQ ID NO: 864456 - DNA, 120 bp, Artificial Sequence
  ENSG00000240868_2 (sequence is synthesized)
ctcagggcaggggagcaagctgattataaccagaatgacactgtccttggaaggtaacacttgtgattggaaccactcttcaaggtgaacgggcaatttaaaaagccaagtttaaggtca

SEQ ID NO: 864457 - DNA, 120 bp, Artificial Sequence
  ENSG00000227574_0 (sequence is synthesized)
aggtgatgtctgcaggcagccatgaatcatgctgaaaacagtatcgttcaaaactttgccaggaagtctctggcagaagtgtgttagcgagtcttagcaaacacagctgcttcctttctg

SEQ ID NO: 864458 - DNA, 120 bp, Artificial Sequence
  ENSG00000227574_1 (sequence is synthesized)
gaggtataaaatgctccaggggcaaggttctgagaagatgccctgccactgtatgaggccacaacctgctgtgtataacctcatctaagcacagagaagcaccagactgagcgtgggaaa

SEQ ID NO: 864459 - DNA, 120 bp, Artificial Sequence
  ENSG00000227574_2 (sequence is synthesized)
tgataaagcaaactgtggacttgaatgaaagacatacaggtattctttgtatttttatagttagcttctgagtctgaaattatttcccaaataaaaagttaaaaacaaatctctactgaa

SEQ ID NO: 864460 - DNA, 120 bp, Artificial Sequence
  ENSG00000205181_0 (sequence is synthesized)
agtctctggctttacctcctggtatgttggtgtcacaaagggatcttcatgacttcactgcccttccctcagcaatcagccatgactgcctttgcactgtccatgctctcagcccaccac

SEQ ID NO: 864461 - DNA, 120 bp, Artificial Sequence
  ENSG00000205181_1 (sequence is synthesized)
ctcctccccctgccattgcagtggctaacactggagacgaagaccaagacaccacagcctttctccagtacctctcaaatcagcacagacaaggacaaaggcctcaatccacaactgctg

SEQ ID NO: 864462 - DNA, 120 bp, Artificial Sequence
  ENSG00000205181_2 (sequence is synthesized)
aagatggaccctggccacatgggatggtcagacacgcctgcccagctatctgcaggcgaagaggctcagaagaggtttaggggcctgaaggacatcttgcttccatgtccatatgagcag

SEQ ID NO: 864463 - DNA, 120 bp, Artificial Sequence
  ENSG00000205181_3 (sequence is synthesized)
gctatttctgctccatgagtcaattttgccatataaaatacttaatttcagccattccagggtgctataggatgcacagcttcccatcagcccacctgaactccagccatgccattttaa

SEQ ID NO: 864464 - DNA, 120 bp, Artificial Sequence
  ENSG00000205181_4 (sequence is synthesized)
taccaggaataaggtcacctgctttcctgccccttaggaggccggagccgtggaagcaaaatggcacttctgtttacctgttatattatttttttgtcatccttatatgtttgaaaaatg

SEQ ID NO: 864465 - DNA, 120 bp, Artificial Sequence
  ENSG00000205181_5 (sequence is synthesized)
caattatatgaaaaaagtttagtaattacagacataacagcagaaagtcctcggaaccaagcttattctcatggccgattctgctccacctgggactctgctgtgctgcgggcatcctgt

SEQ ID NO: 864466 - DNA, 120 bp, Artificial Sequence
  ENSG00000205181_6 (sequence is synthesized)
gacctcacgtgactgctgcgtgggcaagtggcactggccactctgcctggagagaggagtaaatgcagggctggccaggcgacctgcacactctgctaccggccttgtccatctttagcc

SEQ ID NO: 864467 - DNA, 120 bp, Artificial Sequence
  ENSG00000205181_7 (sequence is synthesized)
tctaatttgaaaatgaggatcacacagaccaagagtatctttgagggttagtacagaccacagaaatgccctgggcctttcactctctccttttgcaaattcccatgtgtggaaatgccg

SEQ ID NO: 864468 - DNA, 120 bp, Artificial Sequence
  ENSG00000205181_8 (sequence is synthesized)
tttggataatgagggagcctgaaggaggtggacacatgagcagccccgacaggcctggctccatcctctgaaaatggggccccgtgcccggcgtgtggccttactggttcagtcttcttt

SEQ ID NO: 864469 - DNA, 120 bp, Artificial Sequence
  ENSG00000205181_9 (sequence is synthesized)
acagtggtaggttttgagtgcccagatgcccagtgcctcctacccggaacaggacaggaccaggctgtcccctggaagaatcccatgcacacttggctattcagggagtttccacccagc

SEQ ID NO: 864470 - DNA, 120 bp, Artificial Sequence
  ENSG00000205181_10 (sequence is synthesized)
cgagctcgcctctgtggctaccctggtcttgctgctcatatctgccaggaaaggcctggacttggagagaaacctgggatttggattcagtccttgccagcctggctggttcatatcctt

SEQ ID NO: 864471 - DNA, 120 bp, Artificial Sequence
  ENSG00000205181_11 (sequence is synthesized)
acctctgtctgtggaagcctatgttcctgagcagcgagtcagagggggcatctgaacgcagagcagggagcttcagatgggaagaagtcagaggaaccagaatgtatcagacgatgtgga

SEQ ID NO: 864472 - DNA, 120 bp, Artificial Sequence
  ENSG00000205181_12 (sequence is synthesized)
gttgggtgcctgagctcaaagcaagctgggccttgggctggctgtgtgatcttgggcaagttcgaccagcttctttgtgcctcttttctctccttaataagataaatgtcttcactagta

SEQ ID NO: 864473 - DNA, 67 bp, Artificial Sequence
  ENSG00000205181_13 (sequence is synthesized)
ggactaccaatcttgatggcaacattagactgggggccactgtagtcataacagtggtggaccaggc

SEQ ID NO: 864474 - DNA, 120 bp, Artificial Sequence
  ENSG00000205181_14 (sequence is synthesized)
gactgggggccactgtagtcataacagtggtggaccaggcagcagagtcttgtcttcagtaccatggacaccgcagcatccagtgctagcagcaatcagccatgactgcctttgcactgt

SEQ ID NO: 864475 - DNA, 120 bp, Artificial Sequence
  ENSG00000205181_15 (sequence is synthesized)
gggtccctgtctcggggagtcgggactattgggtcaccccgggtagtcgagactctagactgagctgtctcggtcactcaggaggcagttggcagagtattcgtggtcagggaggtgacc

SEQ ID NO: 864476 - DNA, 120 bp, Artificial Sequence
  ENSG00000205181_16 (sequence is synthesized)
cgtggtcagcagggtcaggccacccagggacaaagggtgctcctgcaccgggccttggagaaggacagagcggtggggacttggggtcagcgggggagcctccgcggatggggagtcacc

SEQ ID NO: 864477 - DNA, 120 bp, Artificial Sequence
  ENSG00000205181_17 (sequence is synthesized)
acctgccgggtaagaggggactcatcacaggggccggagcaagacaagccctccctcccggctcaggccgggtcccaggctggacccctccctgtctcacagggccggcctccttcggag

SEQ ID NO: 864478 - DNA, 120 bp, Artificial Sequence
  ENSG00000205181_18 (sequence is synthesized)
ctggctgggatggaaaggggaagtaggaggagctcaggacacagggattggggccgatcctggggtctgagctgtggggtgaggaggggatcgcctgtcccctggggagtgacgatgtca

SEQ ID NO: 864479 - DNA, 120 bp, Artificial Sequence
  ENSG00000205181_19 (sequence is synthesized)
actcctccttacaatttgctgcccggagcaacattgggtgacagaacttcttagcaccttggcagtccttgtcctcctggaccctctgttttgagggtggaatgaggtgaagggcaagtg

SEQ ID NO: 864480 - DNA, 120 bp, Artificial Sequence
  ENSG00000205181_20 (sequence is synthesized)
ctttcccagctggtcaggtgctctaccaactgggcatattctaatccccccagagtatacagatcagagtttgatgtggccaatgggtccaatgcccaagtgagaatctcttgatgaagt

SEQ ID NO: 864481 - DNA, 120 bp, Artificial Sequence
  ENSG00000205181_21 (sequence is synthesized)
tattggtgtggggttttgctttggtttttaattatagagagcaaaagtattgaaagtattacatttaccctaaaggtgtaagcaagttatggtcaagtgaagatgaagtaccatcctcaa

SEQ ID NO: 864482 - DNA, 120 bp, Artificial Sequence
  ENSG00000205181_22 (sequence is synthesized)
acacgggttccattcttagctcatctcatttaaaggagagaaaagccttgcaggtgaaacatggtgggggtagacaggggttcagccaatttcagtgtttggccccaagaagtgaatttg

SEQ ID NO: 864483 - DNA, 120 bp, Artificial Sequence
  ENSG00000205181_23 (sequence is synthesized)
ggtttgaggacctctctctggaaggattttatgaccagatcttcctggagatgatattagaagcttttctcaccaaatatttatttgcctggggtgcaacttctgcttcattctctcttt

SEQ ID NO: 864484 - DNA, 120 bp, Artificial Sequence
  ENSG00000205181_24 (sequence is synthesized)
gactccagctgtctttttggactgaagtgcaggttgctcacagcatcctacaaagtaactgtcttcccaaatctcacttacctctgagtttctgctgtattcctgtctttctctctctct

SEQ ID NO: 864485 - DNA, 120 bp, Artificial Sequence
  ENSG00000205181_25 (sequence is synthesized)
ttttgaactggaatctattactttggatgatgcatgctggcgttttctaaagttttctgattgattgtgtctttaaaaaataatctgatagtattttagcttcttgaattttgtggcata

SEQ ID NO: 864486 - DNA, 120 bp, Artificial Sequence
  ENSG00000205181_26 (sequence is synthesized)
tttttaggcctctcctaaacccatttttgagtgctatgacattgttcatgtatgaagttatgccagtagaaacaaaatgctgtcatataggctcccctaaaacttcaaatctggtccaga

SEQ ID NO: 864487 - DNA, 120 bp, Artificial Sequence
  ENSG00000205181_27 (sequence is synthesized)
tcttagactggcagcttctgctgtcattggatctcagtgagacctttgcacccatttcctccctttgtgattcatccacggacatccccatctccttgagaacaatctcaggaatattcc

SEQ ID NO: 864488 - DNA, 120 bp, Artificial Sequence
  ENSG00000205181_28 (sequence is synthesized)
ttgtcaatatcacacagagctgggagtgtggtaagcccttgaaatggggctcaatgacaccgctacctcccagggattcctaatgtctgagggttccagtgagctgagatgaacccaggg

SEQ ID NO: 864489 - DNA, 120 bp, Artificial Sequence
  ENSG00000205181_29 (sequence is synthesized)
cctaagaagaactctctgacctcctcacctccaaagccccacccagtgcacatggcctgaggcgtccatggtgatggtaaagaaacctcacctgccatctctcccattactgccatgtcc

SEQ ID NO: 864490 - DNA, 120 bp, Artificial Sequence
  ENSG00000205181_30 (sequence is synthesized)
cctctcatcctattctgtgccaaatgtccagatgtgatcaatagaatcaggagaaaattgaggcctgaggggagggggccagactctgggagtggagagtggattgaagtcagactaggg

SEQ ID NO: 864491 - DNA, 120 bp, Artificial Sequence
  ENSG00000205181_31 (sequence is synthesized)
ctgttcagcaaggagttcagggccttcaagtgttgggagcttggcagcaatgccaaggggaatgggggtggatttgggtccaagtttatgttcgaagaatataagcatgatttggagact

SEQ ID NO: 864492 - DNA, 120 bp, Artificial Sequence
  ENSG00000205181_32 (sequence is synthesized)
cctgatgttcatatgcccccatcaagcagagctaggggtcgccagaggagagaatggtgctagaagttcaggtgagaacagggcagacccctgcataaatgtgggatctctctgtttgaa

SEQ ID NO: 864493 - DNA, 120 bp, Artificial Sequence
  ENSG00000205181_33 (sequence is synthesized)
tcacggcccaaacaccgtggcagggacactcccaaggaactcaaacatgtattttatcagggctttaacataaggaatattgattcttaagaaaattggaaacatatgagaatctaattt

SEQ ID NO: 864494 - DNA, 120 bp, Artificial Sequence
  ENSG00000205181_34 (sequence is synthesized)
actctgttatgagatgccatacacctggaagaacaggttaactgtcaaattactaccaaattgttgcaaaaaattgccaatgaagcaatcatacaaagctcaggtaacagagtgggtggc

SEQ ID NO: 864495 - DNA, 120 bp, Artificial Sequence
  ENSG00000205181_35 (sequence is synthesized)
catcactctgggagagggagatagcactggagaaggtccttgtgactcagatcaaagagagcaaatggcaaagaagggggacagttgctgttttctgaagtaaagcctcttaggtgttat

SEQ ID NO: 864496 - DNA, 120 bp, Artificial Sequence
  ENSG00000205181_36 (sequence is synthesized)
ttgaccatttgttacctgtgaatgtataattttgatttttaaaataagtagaaaggagcctctttcttaaaaccaaccaatctctgagccccacagatggtattctggtttcttgcagga

SEQ ID NO: 864497 - DNA, 120 bp, Artificial Sequence
  ENSG00000205181_37 (sequence is synthesized)
ggttctgggtcccacccgcctgcccccttctaggacaaccccaccagcaaggaggtcttttagttccttctgtgtgtgttcacctgctcgtcctggcttgggccccagggagcccaggaa

SEQ ID NO: 864498 - DNA, 120 bp, Artificial Sequence
  ENSG00000205181_38 (sequence is synthesized)
cctcagggttctctcagctgcacttccatccgtggtgcccaacctcagtgcctaggactctgtgtgcctgacctcctccaggcggggctgctccctccaggtgtccacctggtatgggca

SEQ ID NO: 864499 - DNA, 120 bp, Artificial Sequence
  ENSG00000205181_39 (sequence is synthesized)
tcccgtggcagctctcctctgatgaccgagtgtggtgggggtgctaaggccaacttgctgctggcacgcccagaacttatttgctggctgtttcaaagactccctaaaggcaccatggat

SEQ ID NO: 864500 - DNA, 120 bp, Artificial Sequence
  ENSG00000205181_40 (sequence is synthesized)
tttccttagaatacagttctgtgcagtcccgcccatcctcttcccctctgtttcccactagggctgatacttgctttaaggtctgatggctcacccagtccttcataattttcacaatgt

SEQ ID NO: 864501 - DNA, 120 bp, Artificial Sequence
  ENSG00000205181_41 (sequence is synthesized)
tatgttccttcctaaaacccttgcagtttaatctgctcttggcgtctgcttctcagaggagctgaggaacagagacttcaacccttcttctctcagttcctgctgcccctgtagtgaggc

SEQ ID NO: 864502 - DNA, 120 bp, Artificial Sequence
  ENSG00000205181_42 (sequence is synthesized)
tgacagttgcagaccatagagccagcctggccttgcccagagcatacatgacctcttagtaaggctgggccctgctaagggctatgttttgcacacgttcctgctagtcacatccagcac

SEQ ID NO: 864503 - DNA, 120 bp, Artificial Sequence
  ENSG00000205181_43 (sequence is synthesized)
atctgggctaccacttggatggcaacattacattgaagaccactgtggccatggcaggagtagacaaggtggcagtcttgtcttcagtcgtcatggaaatcccagctatgcagcactagc

SEQ ID NO: 864504 - DNA, 120 bp, Artificial Sequence
  ENSG00000205181_44 (sequence is synthesized)
aggtgttttgtaatggaggatcagatgcttgagcttctgagcaggccccctccctctactgccttctgtcagggtcttggcagcagccggctctggaaggcatcccggctctgggttcaa

SEQ ID NO: 864505 - DNA, 120 bp, Artificial Sequence
  ENSG00000205181_45 (sequence is synthesized)
gagcttgctgggcttctacatgaaggtgtgaagtgtgaatgttaccttttctgatttacacttctgttttctgctacaaacttgggatgttttctgagggatgctgaatagatgggggtg

SEQ ID NO: 864506 - DNA, 120 bp, Artificial Sequence
  ENSG00000205181_46 (sequence is synthesized)
gatggggggagggaggcaggggctagaaagtgttcttctggggccaccctccagcctggggcatctgatggatgaggaggggagaatctttgagatcctgtttatgagggcactgcaaat

SEQ ID NO: 864507 - DNA, 120 bp, Artificial Sequence
  ENSG00000205181_47 (sequence is synthesized)
accacatttttttcttgtttgcaaattctagtggagaagttttaccaggttgggagagaggcctcagaattaagtccctgtctcctgccacagtttacaccggtgaagcttcctggccga

SEQ ID NO: 864508 - DNA, 120 bp, Artificial Sequence
  ENSG00000205181_48 (sequence is synthesized)
gcataaactcccaggtggagtacaaacagccttcaacaatggcaccatcattggtaccaatggcattgagaggaggtggcactgacaccctaagtgggtggcactgacacctaagactta

SEQ ID NO: 864509 - DNA, 120 bp, Artificial Sequence
  ENSG00000205181_49 (sequence is synthesized)
tggtcttctgctgcctggagagctttgcctccatcactggtgcccaccttgggaattcccaggaattactcttcaaaggtacactcggacgcccactctgcaaggccattttgttccctt

SEQ ID NO: 864510 - DNA, 120 bp, Artificial Sequence
  ENSG00000205181_50 (sequence is synthesized)
acagtgcctctgaaatcattttgagagaggagaatagggaattagggtaaacaacggttaaggcataagcaaaagaacagcaggtgcagccagctctagacagcatataggccacatcct

SEQ ID NO: 864511 - DNA, 120 bp, Artificial Sequence
  ENSG00000205181_51 (sequence is synthesized)
cactcctgttataacaaaacagaagtttccacttcagccttttgtttcatcctgggtaagtccttcatagggtgtaaccaattggaggcctctaaagggcacctaggggtgttgctaaat

SEQ ID NO: 864512 - DNA, 120 bp, Artificial Sequence
  ENSG00000205181_52 (sequence is synthesized)
tattaatagcttaaaaccctaaagaacattgtaatcagcgctcttgagccctttacataagttggcttccactctgtggagtgtactttgcttcaataaatctgtgctttcattgcttca

SEQ ID NO: 864513 - DNA, 120 bp, Artificial Sequence
  ENSG00000205181_53 (sequence is synthesized)
gcctttgcctacctctcagtctcagaggaaccccttcgttgagttttttcctccttttggctcttgcgtttctctcaccccatctcacctccgcctgtccatcatgagcctattctattc

SEQ ID NO: 864514 - DNA, 120 bp, Artificial Sequence
  ENSG00000205181_54 (sequence is synthesized)
cctgtcctaagtttgcacaagagacaaacctgaggctcagattgggtaacacggccacaggttgacagcccagatgtgatgagcaggaacagagagagcagagtccccaggtgaatggtc

SEQ ID NO: 864515 - DNA, 120 bp, Artificial Sequence
  ENSG00000205181_55 (sequence is synthesized)
aggccttggggacttcaacaaagaaagctcggcacagtcacagcaactctccaaatcatgacgctcaaaatgccacatctaaaaagaacatccggcaatcagccatgactgcctttgcac

SEQ ID NO: 864516 - DNA, 120 bp, Artificial Sequence
  ENSG00000205181_56 (sequence is synthesized)
ttcctgacttcgaagcagtctggtgaccccaggcaggaactgactagcatgagagtcttgatgcaggagaatttttgaagaaattcagaagcagaaccgaaaggaggagagaagccacct

SEQ ID NO: 864517 - DNA, 120 bp, Artificial Sequence
  ENSG00000205181_57 (sequence is synthesized)
ccaccctgtccactaaccttcagtgggaacagcagatgcaactggcggggctgaaggaaacagcaggcagtgagatggagtgagaactggaataaggcaaggaatattgctgagatggtt

SEQ ID NO: 864518 - DNA, 120 bp, Artificial Sequence
  ENSG00000205181_58 (sequence is synthesized)
ctcaaatcaatggagagagatgtccgtggatgaatcacaaagggagggaatgggtgcaaaggcctcactgagatccaatgacagcagaagctgccaggatctgacgtaaaccagtttggt

SEQ ID NO: 864519 - DNA, 120 bp, Artificial Sequence
  ENSG00000205181_59 (sequence is synthesized)
tgaagtgttgggggaggctatatgaccacattttgtttctattggcacaattccatacatggaaaatgtcatgagactcaaaaatgggttcagcagaagctcaaaaatatgctacaaaat

SEQ ID NO: 864520 - DNA, 120 bp, Artificial Sequence
  ENSG00000205181_60 (sequence is synthesized)
tcaggaagaagctaaaatattatcagattattttataaaggacacaactagtcaggaaccttttgaaaacaccagcatgcatcatccaaagaagtagaatccaattaaaaaaaaaaaaaa

SEQ ID NO: 864521 - DNA, 120 bp, Artificial Sequence
  ENSG00000205181_61 (sequence is synthesized)
cccaccaccacgcctggctacttctttgtattttagtagaaacagggttttaccgtgttggtcaagatggtctcgatctcctgacctcgtaacctgcccgccttggcctcccgaagtgct

SEQ ID NO: 864522 - DNA, 120 bp, Artificial Sequence
  ENSG00000205181_62 (sequence is synthesized)
agtttactgaggaaaacacttagacctggttacagctgaacctatgcagaatccagccatcatctgaggaagcagttcatgtcgcagcaaaggaagttctgttctcaccacagcccctat

SEQ ID NO: 864523 - DNA, 120 bp, Artificial Sequence
  ENSG00000248858_0 (sequence is synthesized)
agaaatcataaagggaatactgttggattataacacattaaattaaaatctaacatgcagcctggtactcagtgttaattaaggatgtgaagaaacaatctctttcattcactgcttgag

SEQ ID NO: 864524 - DNA, 120 bp, Artificial Sequence
  ENSG00000248858_1 (sequence is synthesized)
ggaatgataatctcacacactttctggaacgcacttatgtttcaaaagctttacatttcatatatactttagaaattcgtctatatgtgacaatgacagtagtatgcaaaaatgtattaa

SEQ ID NO: 864525 - DNA, 120 bp, Artificial Sequence
  ENSG00000248858_2 (sequence is synthesized)
ccgcatcactgtttatgaccaaaaaagtgaaagtgatgtaaatatccaatttaggagtaggtgaaaaagcagttataaaatattaatgtgatgcaattctattttgtttaaagatactgg

SEQ ID NO: 864526 - DNA, 120 bp, Artificial Sequence
  ENSG00000248858_3 (sequence is synthesized)
tctctgtgtgtttaacttatgggaggactagaaggaaaatgttttgttgaactacaacttgagtccatatacctagtagatctgtctgctagtttccgttacattctatattcgtttatt

SEQ ID NO: 864527 - DNA, 120 bp, Artificial Sequence
  ENSG00000248858_4 (sequence is synthesized)
cagtattcactcattcattctatatttatttgtccgataactcttgcccttctagatgctaatatgtcatctgtcacaattccacagcaaaagtactatggaaaaagatgggtctgcttt

SEQ ID NO: 864528 - DNA, 120 bp, Artificial Sequence
  ENSG00000248858_5 (sequence is synthesized)
attcactgaaaaattaaagaacacttcaaaaaggaactgatacttgagtttattcattgttcattcaagaaatatacttattgagcacttgcgacatgctagtcactgtcctttgtgctt

SEQ ID NO: 864529 - DNA, 120 bp, Artificial Sequence
  ENSG00000248858_6 (sequence is synthesized)
gcaacaaatcagtgaaccttaaaaacaaaaacacaacatactcctgttcttatgatgtaatcttgagagatggtgattgtttcatcaaacagaaaaaaaaaaaaaaaggatgagacggta

SEQ ID NO: 864530 - DNA, 120 bp, Artificial Sequence
  ENSG00000248858_7 (sequence is synthesized)
ttccaagtagagaaagccacacttgactttatttatttcacaatagttatcaatttatttgtgtgattctcccactggactctaagttccttaagaaaggaactctggcttgtactgctg

SEQ ID NO: 864531 - DNA, 120 bp, Artificial Sequence
  ENSG00000248858_8 (sequence is synthesized)
tatctctgatgccaaacattgttccagacccataataggcacacagtaaatatttttgaataactaatactatacttcattccctagaacagagtttcttgatgttggcattattggcat

SEQ ID NO: 864532 - DNA, 120 bp, Artificial Sequence
  ENSG00000248858_9 (sequence is synthesized)
ttgaggccagataattatttgttgtgggtgtctaccctgtgcattgtagaatgtttagctgcatcactggatgctagcatgcagctagatgccagcagtacctctcctgcctgttatcaa

SEQ ID NO: 864533 - DNA, 120 bp, Artificial Sequence
  ENSG00000248858_10 (sequence is synthesized)
aaccaaagatgtttccaggcattttcaaatgtctgtggggtccagaatcacccctatctgtagagaatcactgtcctagcactgtgaaattaagtgaaaactatggaacaattccagtga

SEQ ID NO: 864534 - DNA, 120 bp, Artificial Sequence
  ENSG00000248858_11 (sequence is synthesized)
atataatgtggaaatcgggaagagtagaatgagactttcttttcagttactttgagtcttttattagaggcattgtattttattttttgtccaagcactcttaattctatactgtttgtt

SEQ ID NO: 864535 - DNA, 120 bp, Artificial Sequence
  ENSG00000248858_12 (sequence is synthesized)
gattcaattcctatactgactaccgtgcttgtgagagatggggacatcacatgtaaagatgagcgatgtctgcatttaacccaccttgctggtcacatccctagtggtactgcaactttg

SEQ ID NO: 864536 - DNA, 120 bp, Artificial Sequence
  ENSG00000248858_13 (sequence is synthesized)
ttttgttttcaaaagaaaggaggaaagactttaagatgttgcttttatcaaataaataagctagtgttttttcaagaaattttagacacactctaagacaaaactcctaatgcagttttt

SEQ ID NO: 864537 - DNA, 120 bp, Artificial Sequence
  ENSG00000248858_14 (sequence is synthesized)
taataccttttataatgtaggattttttaatacctaatatttcatcttgaattgcaatccccagatgttgagggagagacctggtgggaagtgactgcggttttccccctgctgctctcg

SEQ ID NO: 864538 - DNA, 120 bp, Artificial Sequence
  ENSG00000248858_15 (sequence is synthesized)
tgaaggtcagtgaattctcgcgagatctgatggttttataaatggaagtttttcctgccgctgacacatgcatttccctgctgctatgtgaaatgtgcgtcttctccttccgccatgatt

SEQ ID NO: 864539 - DNA, 89 bp, Artificial Sequence
  ENSG00000248858_16 (sequence is synthesized)
gtttcctgaggcctcctcagccatgcggaactgtgagtcagttaaacctcgtttctttataagttactcagtctcgagatgaatagcta

SEQ ID NO: 864540 - DNA, 120 bp, Artificial Sequence
  ENSG00000248858_17 (sequence is synthesized)
atgtctgatctccgttttctcttcattttgtaatctgaaatgattcacatataaaagatgcatatattgtatatatatctatatgtcagtgaaataataaaatgaatacccatgtatcca

SEQ ID NO: 864541 - DNA, 120 bp, Artificial Sequence
  ENSG00000248858_18 (sequence is synthesized)
gagcccagcttaccaacatttggtattgcttggctattttaatttttgccattttgaagtgtgtataaagatatttcatttaaaaatttttattttctttattactgttgaaattgaaca

SEQ ID NO: 864542 - DNA, 120 bp, Artificial Sequence
  ENSG00000248858_19 (sequence is synthesized)
tctttcagtatactttatctatttatattttctctctgaaagctctgttcacatttattgcacatttaaaaattttttgtgtcttaaaaatgagtaagaattacttatatctgtatattc

SEQ ID NO: 864543 - DNA, 120 bp, Artificial Sequence
  ENSG00000248858_20 (sequence is synthesized)
tagtactaatcttcagggtttcaagtgtgtatttgtgtgtcacaaatatactattagagattgtgtcttctattttcactttctttgtggtatctattaataaagttcctgattttaatg

SEQ ID NO: 864544 - DNA, 120 bp, Artificial Sequence
  ENSG00000248858_21 (sequence is synthesized)
taatcaaacacatcaatgtttgtcattttaaacaattattgagatttaaaggaaggcttcttgccccagggtcatgaaaatatgtttatattttttcttacagtgcttttgctcttacac

SEQ ID NO: 864545 - DNA, 120 bp, Artificial Sequence
  ENSG00000248858_22 (sequence is synthesized)
ttaagtctttaatctcatctggcattgattttgtacatggtgtgaggtttaacttttttccattggcctactactagctcagtgaggcctaccctaattacccagggtaaaatcataact

SEQ ID NO: 864546 - DNA, 120 bp, Artificial Sequence
  ENSG00000248858_23 (sequence is synthesized)
tcttcacccaccctgggacatccccctttaccctgctttaattgtctctcgagcacttcttgccacctgtcacattcatgttctatgtttcttgtcccagtaccatttatttgagttgcc

SEQ ID NO: 864547 - DNA, 120 bp, Artificial Sequence
  ENSG00000248858_24 (sequence is synthesized)
ccctcctttccatactgaccccctttcccacctcagtcaaacatcaagtatagatgctgttatctggactctgtattctggctcatgatccaaatatttcattgtttatctctgtgtaat

SEQ ID NO: 864548 - DNA, 120 bp, Artificial Sequence
  ENSG00000248858_25 (sequence is synthesized)
caccacattgtcttaataactgcactgctataatggtcttaatattatagggctagtccaccacctcattctgcagaagtgacttggttatttgtgattgtttaaacttctatcaaatat

SEQ ID NO: 864549 - DNA, 120 bp, Artificial Sequence
  ENSG00000248858_26 (sequence is synthesized)
tggaaatagtgtttctagttccctgacaaaccctgctaaaaaatttttactgaaactccattaaatcaacttggtgacaattgtcacatttaatatattcaacctccagcacagtgaaaa

SEQ ID NO: 864550 - DNA, 120 bp, Artificial Sequence
  ENSG00000248858_27 (sequence is synthesized)
tggtacctttccctaattaattaggtctttttaaaaaaattatttaagcaaagctttagaagtttcttcatgaaagtcttgtaactttttgttagagttattcatagattacttttaata

SEQ ID NO: 864551 - DNA, 120 bp, Artificial Sequence
  ENSG00000248858_28 (sequence is synthesized)
acctatttgttgctagtgtatggaaatacaaaggatttctaatgttataaaaatagtattattaactaagttattaattctaataattagccagaagattcttttgaattttgtatgagg

SEQ ID NO: 864552 - DNA, 120 bp, Artificial Sequence
  ENSG00000248858_29 (sequence is synthesized)
aattagccagaagattcttttgaattttgtatgaggacataacaatgcattcaagtaatgataattttgtttcttactttccatctctagtattgtttattttcttccatccttagagtt

SEQ ID NO: 864553 - DNA, 120 bp, Artificial Sequence
  ENSG00000248858_30 (sequence is synthesized)
tgatctaataagttcagtaccttattggacagaaatgttgatggtgagcatctcaatcttgttcatgccatatcctgcaagtcttcatgcaagtgtcgtcttcttagtgaggcctaacct

SEQ ID NO: 864554 - DNA, 120 bp, Artificial Sequence
  ENSG00000248858_31 (sequence is synthesized)
atcccccatttaaaattgcaaattcccaaacattctgggccttcctagtcctctttaactgttttatatttctctgtagcgatattaccatctgacatagtcatattttatgtgctggtt

SEQ ID NO: 864555 - DNA, 120 bp, Artificial Sequence
  ENSG00000248858_32 (sequence is synthesized)
tattatttatctaccaccatcatgaggcatggactgactttctacctaagttattttgagcaaataactgaatgaataatgtattttataccttatactgccaaattattgttacacata

SEQ ID NO: 864556 - DNA, 120 bp, Artificial Sequence
  ENSG00000248858_33 (sequence is synthesized)
gtttttccattgattctctatggatttccaaatgtgctatcctgtcatctgtaaataaataatgtaagttgttcctttccaatttttatgtcattaattgttaccgcttatctaagaaca

SEQ ID NO: 864557 - DNA, 120 bp, Artificial Sequence
  ENSG00000248858_34 (sequence is synthesized)
ttgagtaattagtgccatcaacataatgttaatgattatagagatagtggccatcattactcctgaccttactaagaattactgtgttttactactaaataaaaatctggctttacttta

SEQ ID NO: 864558 - DNA, 120 bp, Artificial Sequence
  ENSG00000248858_35 (sequence is synthesized)
agaggaattcagaattcagcgggggtacattctcagctgatggagatggtcaaggggttaccgccagtctgtttcttgcgctgataatttttctagacattaaatctcaccatttgttcc

SEQ ID NO: 864559 - DNA, 120 bp, Artificial Sequence
  ENSG00000248858_36 (sequence is synthesized)
acactaacaacttaacaaccattctactgagtcaacaaatttctcctctgtgtacagacttcaaccgaagaatctaatactactgtgaagtgctgctgggcaggacacacgttcaggaga

SEQ ID NO: 864560 - DNA, 120 bp, Artificial Sequence
  ENSG00000248858_37 (sequence is synthesized)
cacagtaggggaacagatgaggccagagtggcccacagccggggtgaagagcccccaattatttataaagtgtttgctgcctcatttatgaaaataaatagtgcaaagctgttacaagta

SEQ ID NO: 864561 - DNA, 120 bp, Artificial Sequence
  ENSG00000248858_38 (sequence is synthesized)
aagttaagattgccacctggaaactttgggctcctcttacctttaaggcaacaggctaagaaaggagttacagtgttatctggggtgattgaccaggactgtgaagatgaaatcagtcta

SEQ ID NO: 864562 - DNA, 120 bp, Artificial Sequence
  ENSG00000248858_39 (sequence is synthesized)
acatgcatttccctgctgctatgtgaaatgtgcgtcttctccttccgccatgattaagtaagcaaacattttcctctaattcagattctttaaacaaaagttgcaaatgaatgtagcctt

SEQ ID NO: 864563 - DNA, 120 bp, Artificial Sequence
  ENSG00000248858_40 (sequence is synthesized)
ggaccaccagactctacagggaagccaagaggaagaagggaaggagcccagaaatggagagaagctggactctagggatggatctggggatgctccacaaagtgcagctgtggagaatgc

SEQ ID NO: 864564 - DNA, 120 bp, Artificial Sequence
  ENSG00000248858_41 (sequence is synthesized)
agaagaagagttggctagtgggacattcccactgaggagcatggcagggggaatgtctaatattcactaagagaattcttgaaatgtaacatttagatgaaactcttcaagtttccttaa

SEQ ID NO: 864565 - DNA, 120 bp, Artificial Sequence
  ENSG00000248858_42 (sequence is synthesized)
aatacaaattcatgactctctttctttctctctctctctttctctctctctttggtatgttaaagtaatcaaggaaagggattttgttttataactgggttacacaggggagagaccaga

SEQ ID NO: 864566 - DNA, 120 bp, Artificial Sequence
  ENSG00000248858_43 (sequence is synthesized)
atagctgaaagctgtgagacatgaagaaaattcaagatttaggagacatgcagaacatcagtgtctaggcaaaatggcagactgaccaacccccacacactgaatccctagagatattag

SEQ ID NO: 864567 - DNA, 120 bp, Artificial Sequence
  ENSG00000248858_44 (sequence is synthesized)
gacagggatattgagaaaaatttacctttaagttgtaaaggacaaggcaactcaacatattgaatgccttgttgacaaccaggggctaatatttgggatgcatattgggcatagatgcac

SEQ ID NO: 864568 - DNA, 120 bp, Artificial Sequence
  ENSG00000248858_45 (sequence is synthesized)
agaaaataatttatcagtgacattaataatatgacatctctttgttgagaatttactgctgtcttaatatcacaactctaaggggtcaacatccagaataaacttcttatcttacatatt

SEQ ID NO: 864569 - DNA, 120 bp, Artificial Sequence
  ENSG00000248858_46 (sequence is synthesized)
taaaattatttgctaggctacatttttcttagaaaaatgcatatctgaaacagaatattgatttttttcctgggtcatacataaagaccatcagaaattaattattgaaaaaacactgct

SEQ ID NO: 864570 - DNA, 120 bp, Artificial Sequence
  ENSG00000248858_47 (sequence is synthesized)
atactcattagagatatattttaattagattaattttgcattaacagtccatgagaagttacaactaacttgcaacgagacattaacatgcatcatgtttgatataagtaaaaatggaaa

SEQ ID NO: 864571 - DNA, 120 bp, Artificial Sequence
  ENSG00000248858_48 (sequence is synthesized)
tgattagaagtatacaaatataaagtatgttgctagtatatgcaagcttaaaaaacttttacctgatagaattagcaagagcagctatgttgagcttctttcagttaaaagtcattttcg

SEQ ID NO: 864572 - DNA, 120 bp, Artificial Sequence
  ENSG00000248858_49 (sequence is synthesized)
gctatgtctccctaaggatagaaatatcactgcttttgatctcatttagaattctgctcacttttaggaaagtagggctgtttggaaatggtcagccatatccttactgaatttcctagg

SEQ ID NO: 864573 - DNA, 120 bp, Artificial Sequence
  ENSG00000248858_50 (sequence is synthesized)
gcttgactgcacctactctagttaacaagtaagatatagttatatattgtattataacttctcaaagcacttatattttgattttccttcttttatgttcattatcttcatttggactac

SEQ ID NO: 864574 - DNA, 120 bp, Artificial Sequence
  ENSG00000248858_51 (sequence is synthesized)
tccatgtgacaaaagcagttatttttcttctaccccctaaactggaccacatcgatgctcttaggtccaaatcatattctttaagaaacaagtgttcactgaatgatttactgcattata

SEQ ID NO: 864575 - DNA, 120 bp, Artificial Sequence
  ENSG00000248858_52 (sequence is synthesized)
ggagcttgcccaataggagagaaatttttaatttaccctttctcagtaaaccattatacaaaacagaagtgaaattatggacccagtgaactcaatctggctgacttgcaacccctatgt

SEQ ID NO: 864576 - DNA, 120 bp, Artificial Sequence
  ENSG00000248858_53 (sequence is synthesized)
gttcataaacccactgaaatatataatttgttgtttatattaaatatgcactgaagcatgattagataaacattgaaagtaaattttaattttaaccatcagtggaagtatatggggtga

SEQ ID NO: 864577 - DNA, 120 bp, Artificial Sequence
  ENSG00000248858_54 (sequence is synthesized)
tttaagtcattcatattagtttatttttatcaggtgttcctccttgtccatagtgaaatacaatacagagattatagcctgtggcttgacaggacatcttatagttggtaacaggactac

SEQ ID NO: 864578 - DNA, 120 bp, Artificial Sequence
  ENSG00000248858_55 (sequence is synthesized)
attaaaaggaaaaaacaataaataaggatgtctaattatacagataaagaaagcaagttcactcactcctccaggacagcaccagagacaacgttagaaccaagagtttcaaaacctcgc

SEQ ID NO: 864579 - DNA, 120 bp, Artificial Sequence
  ENSG00000248858_56 (sequence is synthesized)
cttgtatggtttgcctgatgccatgattaaagaaaagggggtggggaactaagagaggaagccaaagagaaagaattcagtaccaaacagcaatattcagatgttttattaaataatagg

SEQ ID NO: 864580 - DNA, 120 bp, Artificial Sequence
  ENSG00000248858_57 (sequence is synthesized)
aggtgttttgaccttgctggtgaacagaggtgatctcaaaacatttgacagatataattaaggccataaggcaataattgcaaaagtcaaggagcccttgccacctccaaagcatcacgt

SEQ ID NO: 864581 - DNA, 120 bp, Artificial Sequence
  ENSG00000248858_58 (sequence is synthesized)
gtggatgcaggaaccatattaacaacatgggtagtcaaggagaaagcagatagaataaagctgtacccagcaatataaagggacatgcaagtgtgtgttgtgcttaagagtaaacttagg

SEQ ID NO: 864582 - DNA, 120 bp, Artificial Sequence
  ENSG00000248858_59 (sequence is synthesized)
gaaaaaagctccccataacctcgagaaacgtttctggatctgagatatccattagcacatttagaaggtacctatttccattattgtgaaggagttgtaaatgaaataaacaactttaaa

SEQ ID NO: 864583 - DNA, 120 bp, Artificial Sequence
  ENSG00000248858_60 (sequence is synthesized)
taatacctcccttggtcaaactgcattaagtattccctgatggaattcattcatcatcattcaaacagaatggtttgcaactcaacctgcctagtgtggggtctggaattcccaccacag

SEQ ID NO: 864584 - DNA, 120 bp, Artificial Sequence
  ENSG00000248858_61 (sequence is synthesized)
tcactgtgccttaagcactgttgcagcagaaggacttgaagtaacacatgaatatataatgccaatttgcatgtcagcatggattgttgaaattgaagttagttaattgtcacattgtaa

SEQ ID NO: 864585 - DNA, 120 bp, Artificial Sequence
  ENSG00000248858_62 (sequence is synthesized)
caggaaaagaatccaagttttggagctggttggaactgagttttcatcttctttctctgctacttaactgtgttatcctgaacaagatactcaacctccatgagacacagtgaccatgtg

SEQ ID NO: 864586 - DNA, 120 bp, Artificial Sequence
  ENSG00000248858_63 (sequence is synthesized)
aaatatatatgtaaaatgtctggcaaacatctgattcatgtaggtacccaaaattagatcattttcattttcttttgcttccttggaagttcaaaacaaaattctgaggtaagtttcaat

SEQ ID NO: 864587 - DNA, 120 bp, Artificial Sequence
  ENSG00000248858_64 (sequence is synthesized)
taaaatgggtcaggcagacagattccagcaaggtcaaagcatccttttttctttaataaaatatctgaatatctgaacaagaaacaacttctgtttctcaaggttgaaatgatgaattat

SEQ ID NO: 864588 - DNA, 120 bp, Artificial Sequence
  ENSG00000248858_65 (sequence is synthesized)
tgaacttctgttgctgtttgttttctctcttatctccttactactacatataaatgagatatcttgctatcccactgatatctcaaattcagtatttcccaaataaaacgtaatcttttc

SEQ ID NO: 864589 - DNA, 120 bp, Artificial Sequence
  ENSG00000287708_0 (sequence is synthesized)
gacatcacagatagccatgggttgcttctggtgtcccatctgttcctgcaggccttgcctcagtgcggcataatagatcacagaatctttgggacaacgaacaggcacattggctaaatc

SEQ ID NO: 864590 - DNA, 120 bp, Artificial Sequence
  ENSG00000287708_1 (sequence is synthesized)
accttattacacttccatatagttgaaaagaggcttaatgttaaattatgagatcccagctattgtggaaaccaagaaagaataatgctccaaaataacgactgtggcgcctctgtgcca

SEQ ID NO: 864591 - DNA, 120 bp, Artificial Sequence
  ENSG00000287708_2 (sequence is synthesized)
ctcattgtcccaggaactgttggcacgcctcccatgggagctctccattgagtcagccgtcctctgaaatgaacagtggggcccaaattcagatagctgggccatggtgagccatgaatc

SEQ ID NO: 864592 - DNA, 120 bp, Artificial Sequence
  ENSG00000287708_3 (sequence is synthesized)
tggacctgatggggaagatggcatccctagagaatctggacatagagcctaactcacttctctcaggaaaagtctggaacacgagatgatattctccactcgaataagatgctggcagga

SEQ ID NO: 864593 - DNA, 120 bp, Artificial Sequence
  ENSG00000287708_4 (sequence is synthesized)
actggatagaaaactggtggagatacagtggatgtatatgaagaaggagctatctgtcacttgtgaggcattttgaatgctaggtgttctacatacatattttgttaaattccaaaacaa

SEQ ID NO: 864594 - DNA, 120 bp, Artificial Sequence
  ENSG00000287708_5 (sequence is synthesized)
tttcaagaggtagaaatgatcacactcactgataggtgagggaactaagactctcacaagtaaattgcccagatctcacaggtagaaaggtacagaagaccaccatttggaataaaaata

SEQ ID NO: 864595 - DNA, 120 bp, Artificial Sequence
  ENSG00000287708_6 (sequence is synthesized)
actccagaaatactggtggcttctcactctcatatcctctttcctccctcattctaatcctaaccgtgtgctccacactgacatatccaggtatcagaagtgtgtctgggacaggcaggc

SEQ ID NO: 864596 - DNA, 120 bp, Artificial Sequence
  ENSG00000287708_7 (sequence is synthesized)
aggcacaacaatgcccacttcgattccacacacttcaggtagaacaccagtggtcctgtgtctacgttcctttaactgcctttgtctcgatcaagactattttttgatgcccacttcttt

SEQ ID NO: 864597 - DNA, 120 bp, Artificial Sequence
  ENSG00000287708_8 (sequence is synthesized)
tccagagcagccaggtatgaacacattgggattgggggaccgaactgtgcaaactgaacctagtagggccccaaaaccctgtaagactcagttttatcatacggcaaaaagatataagcc

SEQ ID NO: 864598 - DNA, 120 bp, Artificial Sequence
  ENSG00000287708_9 (sequence is synthesized)
tgttatcaacttgaaaagttactgtgaagatgacatgggatactgatgatcattgtgggtttcacaaacttctctggtgatgagaagtgcccacacacttgttgatgtatagagctcttc

SEQ ID NO: 864599 - DNA, 120 bp, Artificial Sequence
  ENSG00000287708_10 (sequence is synthesized)
cctggaaatgtggattcggaacccatctctggattactgtattattctcactggtatgacttaggtatcaaatcagtgagtttgcctttgcccatcctctggttctaaaatcttctccct

SEQ ID NO: 864600 - DNA, 120 bp, Artificial Sequence
  ENSG00000287708_11 (sequence is synthesized)
tccaaatttggaaataacgtaatcttgtgtattttactggcttcttccctctgcatgcatgctcctaaatccttcagcaggtgcctgatacgaattggttggaagtggggcatgtgggct

SEQ ID NO: 864601 - DNA, 120 bp, Artificial Sequence
  ENSG00000287708_12 (sequence is synthesized)
ctcctgcatttaactagctaggtttccattttcctccctctttctaccactgtcttgtattccccctttcagacattaaatgacaagaacataatatccagcctgcattccttataaagt

SEQ ID NO: 864602 - DNA, 120 bp, Artificial Sequence
  ENSG00000287708_13 (sequence is synthesized)
cctctcctatatacttgttaatggctgtccatcatggttctgcctggggaggtctccaactcaaactaacccaaggaagggattgaggaagaacattagaaccaaatcatataaatgatt

SEQ ID NO: 864603 - DNA, 120 bp, Artificial Sequence
  ENSG00000287708_14 (sequence is synthesized)
acactgtgtctaggtgactttttaatcaaggcttgaaaatttcaagtccaattttccccaaatattctatttgtgttgtggttaaataattacattttccattgtgtgtgtgtgttttaa

SEQ ID NO: 864604 - DNA, 120 bp, Artificial Sequence
  ENSG00000287708_15 (sequence is synthesized)
agaactattgcagagattcacacggggatgcaaacagactggcaggtactaaagcagtgaagggaactgtatgaacttcagcaagctaattaacctctctgtgcctcagtttatttatct

SEQ ID NO: 864605 - DNA, 120 bp, Artificial Sequence
  ENSG00000287708_16 (sequence is synthesized)
gaaatgaaagatcacattgatattcaccctatgggttgtcatgaggactaaaatgagttcatgcaggtgaggagctgggagcaatgcctggcacaggttggaaacagctgttattgtcat

SEQ ID NO: 864606 - DNA, 120 bp, Artificial Sequence
  ENSG00000287708_17 (sequence is synthesized)
ctatgtgcaactctgtgtgtctgctccattttctcctctctttactcactggctttccctgcttgctcctggttcctgttcttatacaactctaaattgcatatggttttggtttgccat

SEQ ID NO: 864607 - DNA, 120 bp, Artificial Sequence
  ENSG00000287708_18 (sequence is synthesized)
atttgtgagctttcaacttactcctatttcagcttcatgatctcacttccaaatagcaaattccttctgttccttggtttgcccccctgaaaaagagaatttgaattgtcctatctacct

SEQ ID NO: 864608 - DNA, 120 bp, Artificial Sequence
  ENSG00000287708_19 (sequence is synthesized)
tttacccttctatggatgaactccataagggccagatggtcatctctggactaattaacaatggtgggagtagaggagtcacatagtacaaaacctggctgcttaggcagcaggggcttg

SEQ ID NO: 864609 - DNA, 120 bp, Artificial Sequence
  ENSG00000287708_20 (sequence is synthesized)
ggatagggggatttcctctagagagggcacgagcagacacgcaggcaggcaatgattagcatcttgtagtataaattcgagaccacatgtccacagcaattacattcagagtttctttca

SEQ ID NO: 864610 - DNA, 120 bp, Artificial Sequence
  ENSG00000287708_21 (sequence is synthesized)
tgaactctgatttctgccgaaactaggaggaaacacctaaaagaagactggacaaagagccaggggaacggaacccagactctaatcacaatttgttgtaagacctcagtgtaacccatt

SEQ ID NO: 864611 - DNA, 120 bp, Artificial Sequence
  ENSG00000287708_22 (sequence is synthesized)
tcaccctcataggcctcagtttcctcatctgtcaaggcaatgggatggagaagatgaactctaaattcctttccacttccaagataaaaaggaaacagaaatgatgaggcagggtgccta

SEQ ID NO: 864612 - DNA, 120 bp, Artificial Sequence
  ENSG00000287708_23 (sequence is synthesized)
aaagctgaccttggacctgaaatggttagataattgaacttgatgcatagtttaaagcattaatgatctgaaaaattccatatgtattgatattcttggagacaattatctctacagtaa

SEQ ID NO: 864613 - DNA, 120 bp, Artificial Sequence
  ENSG00000287708_24 (sequence is synthesized)
gcatatgttgaattagcataaggttactattaaaaaatactgtggaaatgaaatataaacttctataatcgtaggaagcaacaatctcaaaatcactgatccagtctttcacttaaacag

SEQ ID NO: 864614 - DNA, 120 bp, Artificial Sequence
  ENSG00000287708_25 (sequence is synthesized)
gattgatgactaaagctccaacttccttcctcacatcactgatgttacgcatgtaggacatgaagtctggatgaaaggtgaatggcttctaaatggatttgcctcccccctgaggtcagg

SEQ ID NO: 864615 - DNA, 120 bp, Artificial Sequence
  ENSG00000287708_26 (sequence is synthesized)
caccggctggtctttaatcactgttgtcctgtgcctgagcttatttataaataagctgcagagtcaaatgtgtaccacatgtggaatgccccccagaagcgttgccatcatatgggccaa

SEQ ID NO: 864616 - DNA, 120 bp, Artificial Sequence
  ENSG00000287708_27 (sequence is synthesized)
atattgattttataggaataagaatgtgcagtaagcaacacgtggaaaagaaagactacatttgtttcccaataaccaagttagtagaagactgcaaagcttctaaaatcatagccacta

SEQ ID NO: 864617 - DNA, 120 bp, Artificial Sequence
  ENSG00000287708_28 (sequence is synthesized)
tttaggaagaattgatctttggatggtggataccttagccagaccttatctacatagttccctttaccagtggggagtagaatttaaggtttttctggttccactttttgccacgtaagt

SEQ ID NO: 864618 - DNA, 120 bp, Artificial Sequence
  ENSG00000287708_29 (sequence is synthesized)
caccatctattctctgtttttccctgtcacagggccttggaactcatccgggaagtttagtccatcactttaccaagctaatttgcgacaatcagtcttagggtggccctacagaaacca

SEQ ID NO: 864619 - DNA, 120 bp, Artificial Sequence
  ENSG00000287708_30 (sequence is synthesized)
cagttatttccagtctgagctgtttcccagttgggacaaacaggaataattgcccctgaagaggcctctgaagtgattgatccacctgtgttaggcaggcatatagtccaggtcttactg

SEQ ID NO: 864620 - DNA, 120 bp, Artificial Sequence
  ENSG00000287708_31 (sequence is synthesized)
cttctagctacttggcacccctccattctctgcctccatctccgacctgcaggttatatttttccttcaatgagttcccttgctctttagactgcccttggcactcctgtaataggcatt

SEQ ID NO: 864621 - DNA, 120 bp, Artificial Sequence
  ENSG00000287708_32 (sequence is synthesized)
ttcacacatgtagaaataggaaagatgagagatcgcgcagaacaatttgtcttggtcaatggattacctgtagatcatcaggttgactgaaattttgaggtctatgttgtgtcccttgca

SEQ ID NO: 864622 - DNA, 120 bp, Artificial Sequence
  ENSG00000287708_33 (sequence is synthesized)
atataattttaacacagtatctttctgatgatatggtcatttaagtgagcactagcaatgcacatgttgctgtgtgtgctgaaatactcccagactaggtccaagttatggacgaaagtg

SEQ ID NO: 864623 - DNA, 120 bp, Artificial Sequence
  ENSG00000287708_34 (sequence is synthesized)
tattgttctcaacgacctctagcctggtgctactccaagtggtgatccatagaccagtgtccatctacaaaatttttattccagatccactttggaacaagaacagaaattaagagcaag

SEQ ID NO: 864624 - DNA, 120 bp, Artificial Sequence
  ENSG00000287709_0 (sequence is synthesized)
gactgggtggttgagggagctcctggtgaaatgtgctgaggcttctgctgaggtttctacctcagctccacggcctggccaggtaggaatgcaattcaccttcctgtcatgtttctgtcc

SEQ ID NO: 864625 - DNA, 120 bp, Artificial Sequence
  ENSG00000287709_1 (sequence is synthesized)
tggcactccagacattcgggtcagacagacctcactatctccaagctgcagtgaatctgagagccatgaaagttcaatggattgaagaaaatgttcacggaaggaagatgattaattgat

SEQ ID NO: 864626 - DNA, 120 bp, Artificial Sequence
  ENSG00000287709_2 (sequence is synthesized)
ccagagggcctgtagcaactctgtttaacatgctagatgagccagtcttattcagtgatgactaaggatctagagaaaactggtgtcaggttggtcttcttcttcccacctattttcagt

SEQ ID NO: 864627 - DNA, 120 bp, Artificial Sequence
  ENSG00000287709_3 (sequence is synthesized)
tggcctgcagttcctaggatgtgtatcctgtatgctggtcaccggaagataggcaaatttttgctttgttgctggttctgggacaacagccatgaatacaaaagattaaatggaaggctc

SEQ ID NO: 864628 - DNA, 120 bp, Artificial Sequence
  ENSG00000287709_4 (sequence is synthesized)
tggagccctgaggaatagcagttactagactgaaggaacctgagtttctagattgcgatgttgagcagagtccctgctaacccaggaaaactctgatgtgagaaagaagaaaacccggat

SEQ ID NO: 864629 - DNA, 120 bp, Artificial Sequence
  ENSG00000287709_5 (sequence is synthesized)
ggtaggcaggatttcaagatgtccttgtgatctctgcctccttgtgtttctcccatgactatgtcatgttccacagcaaaagggattttgcaatgtattaagggtactgaacggttgacc

SEQ ID NO: 864630 - DNA, 120 bp, Artificial Sequence
  ENSG00000287709_6 (sequence is synthesized)
ttaagatcgtgggattatctgggtgggcctaatttcatcacatgagtcctgtaaaagaagtgaattttctctatttggtagcagaagaggcagtcagagacatctgaagtgtgagaggga

SEQ ID NO: 864631 - DNA, 120 bp, Artificial Sequence
  ENSG00000287709_7 (sequence is synthesized)
ttcagtgctgaaatggagaaggtcacatggtaagaacctgagagtggcttctggtagctgagagtgatccttggcaagataatggaaccttagtcctagagcctcaaggaaattaattct

SEQ ID NO: 864632 - DNA, 120 bp, Artificial Sequence
  ENSG00000287709_8 (sequence is synthesized)
gctgacaatctgagggaactttgaagcagatcttttcctagttgagcctccaagtaaggatttagctagctagctggtactttaatttgagccttatgagtctctgagcagaggacccag

SEQ ID NO: 864633 - DNA, 120 bp, Artificial Sequence
  ENSG00000287709_9 (sequence is synthesized)
ggaaataaagtcaggctcctaatgcatggtgatgatgacgtgataagtgtgttttgttaagctactaagtttgtggtaatttttaatgtagcaataaaaaactaatgcagagagtgaaaa

SEQ ID NO: 864634 - DNA, 120 bp, Artificial Sequence
  ENSG00000287706_0 (sequence is synthesized)
gcttcccttcccagtgagaacccgatcaagctttatcatgcagcccagaagggtgggggaaagaaaaagaattaggagaaaatgttgtaaaagtaatgagataatatgagaatgtgcttt

SEQ ID NO: 864635 - DNA, 120 bp, Artificial Sequence
  ENSG00000287706_1 (sequence is synthesized)
gggaactgcgaatctggagtcactggtccatgaggaatctaggataagaagaaggaagctgtgaagaatggttggctaacagtgctggcaaggaattcagatcaacatacctctcaaaag

SEQ ID NO: 864636 - DNA, 120 bp, Artificial Sequence
  ENSG00000287706_2 (sequence is synthesized)
aatggaagtctcttaaactcagacagaataaaggaggcacagagaagttatacaaattgtcctggcacaaaaaactgataagacttaagcccaggagtactggcccaagaagatattaga

SEQ ID NO: 864637 - DNA, 120 bp, Artificial Sequence
  ENSG00000287706_3 (sequence is synthesized)
ctatggaaatgatgttggagaaaaagcaaatttgagcgattttcttatttgagttcaaaatgggtcttaaagcagtggggacaactggcaacataacaatgcatttggcctgggaactgc

SEQ ID NO: 864638 - DNA, 120 bp, Artificial Sequence
  ENSG00000287706_4 (sequence is synthesized)
taaccaactcttagttcaatggcggttcaagaagttttgcaaaggagacaatagccttgaagataaggagcatagtggccggccatcagaagttgacaacgaccaattgagagcaatatt

SEQ ID NO: 864639 - DNA, 120 bp, Artificial Sequence
  ENSG00000287706_5 (sequence is synthesized)
aagcaaattggaaaggtgagaaagctccatacatgggtgctgcatgagctgagtgagaagaaaaaaatcgtcattttgaagttttgtcttctcttgttcttcacaacggtgaactatctc

SEQ ID NO: 864640 - DNA, 120 bp, Artificial Sequence
  ENSG00000287706_6 (sequence is synthesized)
gttttgtcttctcttgttcttcacaacggtgaactatctcatgattggattgtgacgtacgatgaaaagtagattttatatgacaatgggcaatgaccagctcagtggttggactgagaa

SEQ ID NO: 864641 - DNA, 120 bp, Artificial Sequence
  ENSG00000287706_7 (sequence is synthesized)
aaagccaaatttgcaccacaaaaaaaggtcatgatcactgttgggtggtctgctgccactccgatccactacagctttctgaatcctggcaaaaccattacatctgagaagtatgctcag

SEQ ID NO: 864642 - DNA, 120 bp, Artificial Sequence
  ENSG00000287706_8 (sequence is synthesized)
aaaactgcaatgcctgcagctggcattggtcaacagaaagggtccaattcttctcccaaccgcgtgttgcaaaactaatgcttcaaaagttgaacgaagttttgcctcatctgccatatt

SEQ ID NO: 864643 - DNA, 89 bp, Artificial Sequence
  ENSG00000287706_9 (sequence is synthesized)
cttcaaaagttgaacgaagttttgcctcatctgccatatttgcctgatctctcaccaactgatcaccacttttttaagcatctcgacag

SEQ ID NO: 864644 - DNA, 120 bp, Artificial Sequence
  ENSG00000287706_10 (sequence is synthesized)
aaatgctttccaagggttcatttaatcctgaaccatagattgttagctacaggaataaacaaacttatttctcactggcaaaaatttgttgattataatggttcctattttgattaataa

SEQ ID NO: 864645 - DNA, 87 bp, Artificial Sequence
  ENSG00000287707_0 (sequence is synthesized)
tccagcccaactgggggtttcttctggtcccagctgagcttactcatgattttgcagtcagctgtgtgtttgaagctctgctgacct

SEQ ID NO: 864646 - DNA, 120 bp, Artificial Sequence
  ENSG00000287707_1 (sequence is synthesized)
gattttgcagtcagctgtgtgtttgaagctctgctgaccttgacttatctatgtttggaggttggctggcaatggacacactgggaaaactgcacttccatatgtggtttctcattctcc

SEQ ID NO: 864647 - DNA, 120 bp, Artificial Sequence
  ENSG00000287707_2 (sequence is synthesized)
agcaggctagcccacgccaggagagaagcatgcaagtcatctagaggtccgggcttgaatctggcacttctattgcattcagttggccaaagtgaatggcaggccatcctagattgatgg

SEQ ID NO: 864648 - DNA, 120 bp, Artificial Sequence
  ENSG00000287707_3 (sequence is synthesized)
gaaggaaacttcatctcttgatgggactgactgccatgtcatgttgtgaagggcagggaatccacatagtttactgtccagtccagaacatcactccacctttctcctgccagagctacg

SEQ ID NO: 864649 - DNA, 120 bp, Artificial Sequence
  ENSG00000287707_4 (sequence is synthesized)
ctcttcttactcctgagtcggcagaggatgtgctagagggcaacctcagactctgatggtgcagtaagagtcaaggatgaacgaccagaccctagctcactggccccccctttttttttt

SEQ ID NO: 864650 - DNA, 71 bp, Artificial Sequence
  ENSG00000287707_5 (sequence is synthesized)
gtctcatgcctcagccacccaagtagttgggtttatagtcatgagccagtacacctggctaatttttgtat

SEQ ID NO: 864651 - DNA, 87 bp, Artificial Sequence
  ENSG00000287707_6 (sequence is synthesized)
gtatttttagtagagaagaggtttcactatgttggtcaggttggtcttaaactcctggcctctgggattatgggcatgagccacagc

SEQ ID NO: 864652 - DNA, 120 bp, Artificial Sequence
  ENSG00000287707_7 (sequence is synthesized)
tcccaaatttctgggattatgggcatgagccacagcacctggccgccccctggccactattaggaggttggcatgacagatgagcagccaatatccactcttccctcctgcctgagaatg

SEQ ID NO: 864653 - DNA, 120 bp, Artificial Sequence
  ENSG00000287707_8 (sequence is synthesized)
ggcctaggagtacagtctgaacctctgagccacccaaatcactgccattctgggggaatctaccatcaatcctaacttcaaaagggaaactagaaatcagggaggtgaaggcaatagggc

SEQ ID NO: 864654 - DNA, 120 bp, Artificial Sequence
  ENSG00000287707_9 (sequence is synthesized)
tggcaactcaccttctttccacaaacaggaaggattgaggccactttatggagatggtgacagtaatatgtcttcgatacctgttgtgtggtctgccaggtactcattcccatttccttc

SEQ ID NO: 864655 - DNA, 120 bp, Artificial Sequence
  ENSG00000287707_10 (sequence is synthesized)
tgaaagtgtaactccaatttctcttggaaaactatcccttgtagcatatccatccttgtagcatatccatccatccatccattgtagcatatccatccttgtagcatatccatccatcca

SEQ ID NO: 864656 - DNA, 120 bp, Artificial Sequence
  ENSG00000287707_11 (sequence is synthesized)
ccatgcatctgtccgtccaacaaaacttggttgtgttccagtgatgccccagctcctggggatacagaaacgaacaagaaaaagttcctgcattcaagaagtctaccctctggaggtata

SEQ ID NO: 864657 - DNA, 120 bp, Artificial Sequence
  ENSG00000287707_12 (sequence is synthesized)
aagcatgtaaataatcagacacaatgcaaatccagatgattagtgttaatgaggaggtcaagcagagtgagaggacagagactgggtaaggtctctggagaagtgacatccagtgagacc

SEQ ID NO: 864658 - DNA, 120 bp, Artificial Sequence
  ENSG00000287707_13 (sequence is synthesized)
tgaatgatgggaagacctgggggaagagcaccccgagtctttaatcatctgtgcaaaggcctaagacaagagaatcttcctcaagaagccactttccggggcctcttgactagagaagtg

SEQ ID NO: 864659 - DNA, 120 bp, Artificial Sequence
  ENSG00000287707_14 (sequence is synthesized)
tgtggacagaaaccccaggcagaggtgagtaagacagaagggtagctggtgcaggacgggttggctgccagctaaatgccctgcctctctcaacccctcttactctaccacgtctctgtc

SEQ ID NO: 864660 - DNA, 120 bp, Artificial Sequence
  ENSG00000287707_15 (sequence is synthesized)
tcatttctcttccccacccctacctttccagtgctggctcttctggttgctgtccagttcccagtgctgaacaccaccttccccaatgtggagcttcctcattcccagcccagtcacttc

SEQ ID NO: 864661 - DNA, 120 bp, Artificial Sequence
  ENSG00000287707_16 (sequence is synthesized)
ctgctcacccccacctctttctggggacactgggtacagggaagcacagtgacaggacctctccctaggcatggagaaagggtctcgggactttagggccttgggtctccttagagaagc

SEQ ID NO: 864662 - DNA, 120 bp, Artificial Sequence
  ENSG00000287707_17 (sequence is synthesized)
atctggtcctcttttactttataatattcattcattcaatgagcatttatttagtacttgctctgtgctggcactttttagcatctggggacacaaatgaggaaatactcagattctgcc

SEQ ID NO: 864663 - DNA, 120 bp, Artificial Sequence
  ENSG00000287707_18 (sequence is synthesized)
agcaaggagccagaagaaggaagagaccggctagcaaaggtgactgcataagatcagccctccttcaaggggcctactgagaacctctggaggaaactctggtagaggaggtggagaatt

SEQ ID NO: 864664 - DNA, 120 bp, Artificial Sequence
  ENSG00000287707_19 (sequence is synthesized)
ggtgggggtgggatggaagaatggtaccctaggatgctggtacttctgtgctcagcgctcacccacagtggccctgaggggcctgtgtcttgctccctgtgctgcatcccttaccccagc

SEQ ID NO: 864665 - DNA, 120 bp, Artificial Sequence
  ENSG00000287707_20 (sequence is synthesized)
tccaggaggttcactccaccatgctcgccccagccccctcacccagcgcaccctccaacctcccattggatggcatcttcctctgctcctcagcccctggggtgcctcctccctgcccac

SEQ ID NO: 864666 - DNA, 120 bp, Artificial Sequence
  ENSG00000287707_21 (sequence is synthesized)
tggctagaggctgagctggtcttggtggtactcaaggccccagcgctcaccctgcctctagagtcacctcatccacgaacaccgcagcccctgggtctcccctgtctgggcctccctcca

SEQ ID NO: 864667 - DNA, 120 bp, Artificial Sequence
  ENSG00000287707_22 (sequence is synthesized)
ttctgggctccagctctgtagtcaccctcggctccaaatgtgggatcttttctgtgcccttggagtgcaaggaccttcatctctttgcttctcatatagacccaaataagaggatcatgc

SEQ ID NO: 864668 - DNA, 68 bp, Artificial Sequence
  ENSG00000287707_23 (sequence is synthesized)
tactgtgcccagcctgaaaaatcctattgcagatgagaagatgttggtagaattcactcactcctgtg

SEQ ID NO: 864669 - DNA, 120 bp, Artificial Sequence
  ENSG00000287707_24 (sequence is synthesized)
gcagatgagaagatgttggtagaattcactcactcctgtgtcccgtcccaaattgagctcagcagtgtcataaacacacctgaaaaacactgtaaacaacccagagaagcccctgaagga

SEQ ID NO: 864670 - DNA, 120 bp, Artificial Sequence
  ENSG00000287707_25 (sequence is synthesized)
gtgaaccctttcctaagtacattctcatcaaatgaaaacgaggactccggattcaaagtgaagataacttctcccatggtttctattctcagccttgctccgtcggggcttccttgcttt

SEQ ID NO: 864671 - DNA, 120 bp, Artificial Sequence
  ENSG00000287707_26 (sequence is synthesized)
tggattcttgagcaggggctgctatcagcaaacccggtgccttcagcctctcctaggacccttctcctcacctccactttggccaaaatctgcctgttccaggcaggttgcattccaccc

SEQ ID NO: 864672 - DNA, 120 bp, Artificial Sequence
  ENSG00000287707_27 (sequence is synthesized)
agctttcaggctgagattgagtaggtgttctccctggctcctgcatctgttagctattgctgggtgcaaaccatcctaaaactggcttagaaccactagtgtgcatgggtctgcaggcca

SEQ ID NO: 864673 - DNA, 74 bp, Artificial Sequence
  ENSG00000287707_28 (sequence is synthesized)
actggcttagaaccactagtgtgcatgggtctgcaggccaacgggggacccagtgttacccaggctgaagtgca

SEQ ID NO: 864674 - DNA, 120 bp, Artificial Sequence
  ENSG00000287707_29 (sequence is synthesized)
agaagaaggaagagaccggctagcaaaggtgactgcataagatcaggttaaataccaagaagccagattgctgggtcatatgttgaactttataagaagctgccaaactattttctggag

SEQ ID NO: 864675 - DNA, 120 bp, Artificial Sequence
  ENSG00000287707_30 (sequence is synthesized)
taactgtaccattttgcatccccaccagcaatttatgagacttctagtcactccacatcctttataacacttgttattatcagtatttaaaattttatccatttaaataaatgtgtagtg

SEQ ID NO: 864676 - DNA, 120 bp, Artificial Sequence
  ENSG00000287704_0 (sequence is synthesized)
agactccagtcagtctccctgcagcttcaagtggcatcaaagagggactacacatgctcagaagtgcagataactcatgcacaagtggaactgaaacagacaaacagactgctatagatt

SEQ ID NO: 864677 - DNA, 120 bp, Artificial Sequence
  ENSG00000287704_1 (sequence is synthesized)
gtgaaaaaaaccaacatagaaatggaggacctagaatagtctatagaaacatccccaccctgctcagtgcttcatggtacaataacagaaagactttaaagcagttagaagcagctaaga

SEQ ID NO: 864678 - DNA, 120 bp, Artificial Sequence
  ENSG00000287704_2 (sequence is synthesized)
gggtgtggaagaagtaaatttccttagttccagtatcaatttctggctgtctacaatctgatttaaaaacagaaaataaagactttacaaaattatagcaaaactgaagatagttttgaa

SEQ ID NO: 864679 - DNA, 120 bp, Artificial Sequence
  ENSG00000287704_3 (sequence is synthesized)
tataacaaagaaagagagagtcaaatcaaaaccagtgcttgctctgcagcacatatactaaagtggaaatgacacagagattagcatggccagtccacaaagataacatgcaaatttctg

SEQ ID NO: 864680 - DNA, 120 bp, Artificial Sequence
  ENSG00000287704_4 (sequence is synthesized)
aagtgttccatacttttctgccatcacaaaaaatatgaaattatagaactcattggtagagcagatacacaaatgagaaagagaaaggaatcaaatattatcacaacagaaacccaaaaa

SEQ ID NO: 864681 - DNA, 120 bp, Artificial Sequence
  ENSG00000287704_5 (sequence is synthesized)
cctacaaaagtaaacaataaaagaggaagaaagaaacaatggatataaaaaagaaccagaaaacaacaaaatgacaggagtgagtcctcacctatcaataaaaatcttgaatggaaatgg

SEQ ID NO: 864682 - DNA, 120 bp, Artificial Sequence
  ENSG00000287704_6 (sequence is synthesized)
cttaaattacctaattaaaagcatagactaggtgaatgaataaaaaataaacaagactcaacatttgctgcctacaagaaacctacttcacctgtaaagacacaatagaccaaaaggaaa

SEQ ID NO: 864683 - DNA, 120 bp, Artificial Sequence
  ENSG00000287705_0 (sequence is synthesized)
actcacctgactgggtgcctgaattggtaaagctttcctgaggctgcggtcattccagggccatcgggcatctggagaggaaaggaagtgaatccagttatcacccacctccttctagaa

SEQ ID NO: 864684 - DNA, 120 bp, Artificial Sequence
  ENSG00000287705_1 (sequence is synthesized)
agtggaaacgtgcacgacccagtgttcctcgtgcccgctgggaatgtaaccccagggctctcagcagcctcgctcccggctgggtgcctgtggcccatcgctccagaggacacatccgcc

SEQ ID NO: 864685 - DNA, 120 bp, Artificial Sequence
  ENSG00000287705_2 (sequence is synthesized)
gcgtcggcacctttatggccaccggcaggcgggatgttaagcgagaggcaggacccggtgtctcgcatgtctctctcaggccctgcgtcccgagagccctggtcgatcttctgcacccgt

SEQ ID NO: 864686 - DNA, 120 bp, Artificial Sequence
  ENSG00000287705_3 (sequence is synthesized)
gggaggcgcggcctgagacgcgtggctcactcaccgcctccgcggcgtggttcggcgtctcctcttctttcttgcctccggcgtccacccagggtctccagaagcctgcgtatctgcggg

SEQ ID NO: 864687 - DNA, 120 bp, Artificial Sequence
  ENSG00000287705_4 (sequence is synthesized)
ataggggagcacaaggcgcgcagaggagacgtgagcccagacccgggagaatccaccgaagccgagcgctggcaccgggcagtgggggatggagagttggaggggaggagctggggaggc

SEQ ID NO: 864688 - DNA, 120 bp, Artificial Sequence
  ENSG00000287705_5 (sequence is synthesized)
gcaggagggagagacgggggaagctgggaggcgcagagcagcgcggggaagcctacccggagtccgcgcccgcgcgccgcgtagggccgtcggtggccgcgcacgccgcagctccactct

SEQ ID NO: 864689 - DNA, 120 bp, Artificial Sequence
  ENSG00000287705_6 (sequence is synthesized)
ctgtaccctctgcgcctcccgcgttctccatgacgccgcagagctgggcggaaggccgctgccagctcgcgggcaatcttgaccagttccagtaggtccgagacccgagctttatatagc

SEQ ID NO: 864690 - DNA, 120 bp, Artificial Sequence
  ENSG00000287705_7 (sequence is synthesized)
agccgcataaacaaaaaggctgcgcgtgaaggcgcaccgggctgagccccgggtgtgaacgcgtgcaactcccaaatggcccgggacagggttttgtcgagcgaatgttaatcgcccttc

SEQ ID NO: 864691 - DNA, 120 bp, Artificial Sequence
  ENSG00000287705_8 (sequence is synthesized)
gacacatggctgcggagaaaaacaacattcgcccgagcagccaatttccgtgtgaagaggccaggaggagatggaattaagcgagtctacacgttttgtggatttctgcaaaaaggccaa

SEQ ID NO: 864692 - DNA, 120 bp, Artificial Sequence
  ENSG00000287705_9 (sequence is synthesized)
gtgactggttaattgcttgattcgctggagactcaggacttggcctgtggcaaatcaactggttctgcatcccgtgttctaaaagctgggatgcagactagaattcaaaggaataaactt

SEQ ID NO: 864693 - DNA, 120 bp, Artificial Sequence
  ENSG00000287705_10 (sequence is synthesized)
aattcctcttcatggaacaattttctaaaaaatggggagaatgcatggactccttaagagaggaatgtcggttttttaaaaaagtattgataaactaggttcatactccagcctattatt

SEQ ID NO: 864694 - DNA, 120 bp, Artificial Sequence
  ENSG00000287705_11 (sequence is synthesized)
atttgaagataatagaaaattattggcaacaagaggtaaattgtaaaagattcgctgttctggctaagagagccagagactggagtcatgtgatttgggcatagagctctaaattatctt

SEQ ID NO: 864695 - DNA, 120 bp, Artificial Sequence
  ENSG00000287705_12 (sequence is synthesized)
ctcgtgtcttttgtgattttccccaacattttatcagtgtcctcctacaataacttttgagttcgtctatacacctctgtcactacttggtattttgtcactcaatggtaattacaaaat

SEQ ID NO: 864696 - DNA, 120 bp, Artificial Sequence
  ENSG00000287705_13 (sequence is synthesized)
tcttttttgagggcagtgttgtggaatgataatgaaatcttgaaaagttatgatatgagacaagttaatcaaacgtctgcacccctgtttctctgatttgagttacccctcacttatcta

SEQ ID NO: 864697 - DNA, 120 bp, Artificial Sequence
  ENSG00000287705_14 (sequence is synthesized)
ccactaaactttgtaaaaagtgttatgcatcgaggaaaagatgatatataaatgttataatttttttcaaaatgttttaaataataaaactggactttctcttaaaagtttagacaaaaa

SEQ ID NO: 864698 - DNA, 120 bp, Artificial Sequence
  ENSG00000287702_0 (sequence is synthesized)
agaccagaaatacaagcaagaataagaaagacacaaatattttagaactaaatgagaggctgttttctgcattccttggctcatggccccttccatcttcaaagccagcaatgacaagtt

SEQ ID NO: 864699 - DNA, 120 bp, Artificial Sequence
  ENSG00000287702_1 (sequence is synthesized)
gagtctttctcaggtcgcactactgactcttctgcctccctcttccatatctgagacacaaccggataatttaggataacctccttattttaagagagacctgtgtggttcgatgcattc

SEQ ID NO: 864700 - DNA, 120 bp, Artificial Sequence
  ENSG00000287702_2 (sequence is synthesized)
tctgacgttattctgagaagaaacaattaaatgcatactggaagacattttgctcttctacatgttggaaattcggtgtcaccaatgcacagctgcagaatgcacagttctattgttttc

SEQ ID NO: 864701 - DNA, 120 bp, Artificial Sequence
  ENSG00000287702_3 (sequence is synthesized)
tttctcatcacagatctgacccctcaccatcttcccccgcccttgagcctgatccttttctgactttgagcctggcaccttgctggtgccggcaggcatcatgaaggcatgggctgggag

SEQ ID NO: 864702 - DNA, 120 bp, Artificial Sequence
  ENSG00000287702_4 (sequence is synthesized)
ccagactcagccttgcaaaggaggctcagggaagccgactgacatgggctcaataattagttcaatgccggacacaatgctcaataaggagctgctgggttaatggatgtgtgtgctagc

SEQ ID NO: 864703 - DNA, 120 bp, Artificial Sequence
  ENSG00000287702_5 (sequence is synthesized)
aattcaagttgataacatggggctgattgtctgaacagtacaaaagaaaatggaggactgaccagctctttggtcctccaaggtcaatacaacatttaaagccttcttatagagatatac

SEQ ID NO: 864704 - DNA, 120 bp, Artificial Sequence
  ENSG00000287702_6 (sequence is synthesized)
aagttttgttcatttttaatattcatgtcaataatttaagcaatgtgaaaacttaaacattctcaagcatttatttattttttttggtagagaccaggtctcactctgcttcccagcctg

SEQ ID NO: 864705 - DNA, 120 bp, Artificial Sequence
  ENSG00000287702_7 (sequence is synthesized)
tagggcagtggcatgatcctagctcactataaccttgaactcctgggctcaaacaatccctgctgtctcagcctcctgaacagcttggactataggtgcacgacaccatgcccggctaat

SEQ ID NO: 864706 - DNA, 120 bp, Artificial Sequence
  ENSG00000287702_8 (sequence is synthesized)
ttttttatttttattattgtagagatagggtcttgttatgtttcccaggcttgtcattttatgtattgtcttgaataataaaagaaacttggacagagaatagcaggtagcaaattttca

SEQ ID NO: 864707 - DNA, 120 bp, Artificial Sequence
  ENSG00000287702_9 (sequence is synthesized)
gatgtagatttaggataatacaaaattttataatgtgaagtacctcagtaccaaaatcttagctatttataatatgatagcccttgatgtagagctaacttaaattcaacatttccatga

SEQ ID NO: 864708 - DNA, 120 bp, Artificial Sequence
  ENSG00000287702_10 (sequence is synthesized)
ctaaataatttgtgggctctaaaatattctcaaaattcctagagttagcatttcttaattgatttctttagcctttttcacattcaactatattataaatacaaaatgaatccattaaca

SEQ ID NO: 864709 - DNA, 120 bp, Artificial Sequence
  ENSG00000287700_0 (sequence is synthesized)
gtgctgaaggaaaacgtcagagcgctagacaggaagacttgcatgcccgaggtacaactatacgagttgaaaatcagtaaagcagcagaagtgaggagtctaaggtttttgcagcgcttc

SEQ ID NO: 864710 - DNA, 120 bp, Artificial Sequence
  ENSG00000287700_1 (sequence is synthesized)
ccacccccatgcacgtgtaaatttcatttgtaataaatcttctggtgtttggtagtctggcctacatatgcaaactcttgtaaaccaggatacgtttttaaagctgtaaatggaagcagc

SEQ ID NO: 864711 - DNA, 120 bp, Artificial Sequence
  ENSG00000287700_2 (sequence is synthesized)
tgttaagctctctctaaggatgaagtttttcagctgcctgagcccgctcctttcgcctttggacacgcagcaaattgtggacgttaaaatcacaggaccattcaagatttctttatgtac

SEQ ID NO: 864712 - DNA, 120 bp, Artificial Sequence
  ENSG00000287700_3 (sequence is synthesized)
attgctggatgctgaagaggacagaggaacaatgcttttgactgattatggttgatgtacgtgacttcaacaatcataatctgacagccaccgttcagctactatttgaggcctgaagaa

SEQ ID NO: 864713 - DNA, 120 bp, Artificial Sequence
  ENSG00000287700_4 (sequence is synthesized)
aggagaagaaaccaccaattgtatctctttcagactcccttcagcagactgctgcctatgtctcatggcaagaactgctatgctatgtggccatccttagctgtaagagatgctgagatt

SEQ ID NO: 864714 - DNA, 120 bp, Artificial Sequence
  ENSG00000287700_5 (sequence is synthesized)
gtgaatatttacttcttacagtctctgtatgaatttctgtgaaggacaagataatttaggaaattgaaatggtgttagtatagccagtcatccaaatttgtttactttgttgcttcttaa

SEQ ID NO: 864715 - DNA, 120 bp, Artificial Sequence
  ENSG00000287700_6 (sequence is synthesized)
ctattgagccttgtgttatagtaaagaatatagtacctcttaaacacctaagttgttcctgattatacagtcataaattagattaagcttatatcatgaattcttctttttcctttaaca

SEQ ID NO: 864716 - DNA, 120 bp, Artificial Sequence
  ENSG00000287700_7 (sequence is synthesized)
gataaagcccatcacagcacatggatttaaagatttaatagttgtgaccttttgtccctagttaaggaacatgaaatcaccctttgatttctgtcatgctagtaaaagctgacctttata

SEQ ID NO: 864717 - DNA, 120 bp, Artificial Sequence
  ENSG00000287700_8 (sequence is synthesized)
atcccttggaactgatgtgctattttgagaatgggcataatttaactatgacaaatgaccacaactataggactacccaaagacaagtataggacgtgcatttctgtggaatatttaatg

SEQ ID NO: 864718 - DNA, 120 bp, Artificial Sequence
  ENSG00000287700_9 (sequence is synthesized)
gctatattttaatctaataaagttcattgggaggaacacttataaacacctttgggttatgtcctgtgactatagtaactgaaaactggtccacttgagtagcctattttaatgtaaaat

SEQ ID NO: 864719 - DNA, 120 bp, Artificial Sequence
  ENSG00000287700_10 (sequence is synthesized)
gccctcatctaccctgcccctccttcaaactgtcctgttcctactgtcccttcttgtaacatcgtttgaggtactgaagatgagctattcattccaaattttattatataaagtagaaaa

SEQ ID NO: 864720 - DNA, 120 bp, Artificial Sequence
  ENSG00000287700_11 (sequence is synthesized)
aaccatcacaaatgaatagaaaacagtaaaagaaaccacatattattttgtggattgaatatatttcaaatgtaataatttgacatgaatgtaattaaagaaattttgaatcaaagcaaa

SEQ ID NO: 864721 - DNA, 120 bp, Artificial Sequence
  ENSG00000287700_12 (sequence is synthesized)
tagtaacacagattaaatccatagtatgagtttgctgaagattaaagggggactgaattttaatccaagaacaaaatggcagatagtagatttggcctggtggggatgtcatgggatatc

SEQ ID NO: 864722 - DNA, 120 bp, Artificial Sequence
  ENSG00000287700_13 (sequence is synthesized)
taaggtgtcatattctaagttaaagaaatatttgccaaccccttcagaagaattacaaggaggaatttgcttttgtgcatgactggatttggaggctggagtaactctgatgctctggca

SEQ ID NO: 864723 - DNA, 120 bp, Artificial Sequence
  ENSG00000287700_14 (sequence is synthesized)
atagttttctatcctgagaattacagctacacagggaaatttttaagaatatatgaatacctgggcccctcctacagagcctctcatttattttgactggagggtggcacctggctacgg

SEQ ID NO: 864724 - DNA, 120 bp, Artificial Sequence
  ENSG00000287700_15 (sequence is synthesized)
agaatccaccaagaatcctaatgagcagccagttttgagaagctgtgaaatctggttttgaatcatcacaggaaccttccttggttgtttgctctgtggtgatgattgaagattcctgtc

SEQ ID NO: 864725 - DNA, 120 bp, Artificial Sequence
  ENSG00000287700_16 (sequence is synthesized)
ttttccatgattatattatgtgaagaatcattggcagttctcaaaacttacaaactttctattatttatacttacagagattgtttatgtccttcttctagactctgaaaataccaccca

SEQ ID NO: 864726 - DNA, 120 bp, Artificial Sequence
  ENSG00000287700_17 (sequence is synthesized)
atgtctactgtatctattgtgataaaattcagaggtaagaagacctgatggttagaagaagagcagggaataacctgaaaatcaggagtagctgcctaaacttgccagacagttagtagt

SEQ ID NO: 864727 - DNA, 120 bp, Artificial Sequence
  ENSG00000287700_18 (sequence is synthesized)
cttcttagtcattcatagttaaatgtgaagtaattaactttagttgcattttctctagaaatcatgtaagataacctgcatcacccaaattggaattttggttgggggcacgtggaagag

SEQ ID NO: 864728 - DNA, 120 bp, Artificial Sequence
  ENSG00000287700_19 (sequence is synthesized)
aagagcttttagatgttgcactcacaaactggcaaataacagggaaaattaattccagggatgtatgtgatttgtttagcatggagagtgtcaagaaaggattcattagagcatgcactt

SEQ ID NO: 864729 - DNA, 120 bp, Artificial Sequence
  ENSG00000287700_20 (sequence is synthesized)
ctaattctttagaaccccagtactctttagtagattggagcaatatataccactactccctgttatattgcttaactcatatttcctccttgaacccagaaggcatatttttttcaccag

SEQ ID NO: 864730 - DNA, 120 bp, Artificial Sequence
  ENSG00000287700_21 (sequence is synthesized)
tttcaaagcttagaagcagaatatacacactctaatattatgatgtaagaattatggagggagaacagctctactgaaaatgaggccagctaaaagttggaatattgatataggtaggta

SEQ ID NO: 864731 - DNA, 120 bp, Artificial Sequence
  ENSG00000287700_22 (sequence is synthesized)
gttacaatggagtcaaagaaaactgattttttttttgcattatacctgtagttatcactataccaaataagggggggtaaccatttctcctctctcctatttatttttttccttctttac

SEQ ID NO: 864732 - DNA, 120 bp, Artificial Sequence
  ENSG00000287701_0 (sequence is synthesized)
gttcccaggacaggagagtgtgtgctccaccatgccaggccacatgggggagcggcagggtcagtcgggacagcgggagcaagagcctttattctggtttccccaggaacaggtgaggcc

SEQ ID NO: 864733 - DNA, 120 bp, Artificial Sequence
  ENSG00000287701_1 (sequence is synthesized)
aggtcacaattcatattgatatttaaatggcatctggatgctgcatattgcatattagaaacaaaaaaaattggtaaaatcccaatacgaagagagagaacaaaacaagcagaaaaatta

SEQ ID NO: 864734 - DNA, 120 bp, Artificial Sequence
  ENSG00000287701_2 (sequence is synthesized)
ggaagcaaataagaacaaaagaaaacaaaacctataagcaaataataccatgggaaaataacagaagtttttgcatccataaaccaaggatatggtgcctcacgcctgtaatcccagcac

SEQ ID NO: 864735 - DNA, 120 bp, Artificial Sequence
  ENSG00000225561_0 (sequence is synthesized)
ggcttgaaaagtggagtacggcttctgcatttctatacaacattaagtttcaaaggacagatgaaagcagaagagccatagaagaaggctctaggtgctcagttactgctacatctttac

SEQ ID NO: 864736 - DNA, 120 bp, Artificial Sequence
  ENSG00000225561_1 (sequence is synthesized)
gattcccgctaacaaatgttggataagaaacactgtctgaatcacaagaacagagaggttaggagaaatagttttgctcactccttccatgtggtgaaacatctactaatgcaatactcc

SEQ ID NO: 864737 - DNA, 120 bp, Artificial Sequence
  ENSG00000225561_2 (sequence is synthesized)
agtcctctctctatccttactcacatgaaaatgcaatggttcgatttgtaaaggtaaataaacagatgtgttattttgcatgtatctacattatacttgatatttgaaatctgccgtcaa

SEQ ID NO: 864738 - DNA, 120 bp, Artificial Sequence
  ENSG00000225561_3 (sequence is synthesized)
ggtgtagagaatcctatcgaagatagggcacattagcatactgagtattttatgctgaaggaaattgagaaaactgcggaagcagaaagttgcctctgacctctcttaaagaccctcatg

SEQ ID NO: 864739 - DNA, 120 bp, Artificial Sequence
  ENSG00000225561_4 (sequence is synthesized)
tgacaagtgtcctgctctatacacagagggaaggaactacacaaacaggccaagaagaatctggagaaacagtcttttctaagccctccccagtttactgacactaggtcatacctcctt

SEQ ID NO: 864740 - DNA, 120 bp, Artificial Sequence
  ENSG00000225561_5 (sequence is synthesized)
tttgtttaattatacctttacaggactatctattcttcatcaaacctaagcataaaaatatacagttttccctgggtcttcatttctgaaagttgtcatgtcaaggaaaacttatattaa

SEQ ID NO: 864741 - DNA, 120 bp, Artificial Sequence
  ENSG00000287410_0 (sequence is synthesized)
agggccagcaggggccacatggtgaggctgagggagggctgggatgaagctgaggctgctgggtccaagttaggcaagcctgggcctagggagttagattcactccagactcagtgggat

SEQ ID NO: 864742 - DNA, 120 bp, Artificial Sequence
  ENSG00000287410_1 (sequence is synthesized)
atctcatggcgtttagcaactatctggtagccttctgcttccctggctgactcccgtgcaggggtgaaaggcccaaacaaatggtaaagtggagatttataactggaggctcccagacac

SEQ ID NO: 864743 - DNA, 120 bp, Artificial Sequence
  ENSG00000287410_2 (sequence is synthesized)
tccagatgtgctggatgcatgtgcacgtctgtgggacatggaagaagagagacagcgggtttctaggaagtctggaaactgcacactgcagccagatggtcccaacctgggggaccgtca

SEQ ID NO: 864744 - DNA, 120 bp, Artificial Sequence
  ENSG00000287410_3 (sequence is synthesized)
tggcacactggggcatgaaatcggattttggagggagacgaggatgtggtttggcagaggcccagagaggggattctgagccagaggtgtaggggacgagagatggcctaggtttgcaaa

SEQ ID NO: 864745 - DNA, 120 bp, Artificial Sequence
  ENSG00000287410_4 (sequence is synthesized)
caaccaaacagatgtgggagagggaagataagcactggagtgccttagagccagttcttcccactgctcaagttcaactcctgacacttggtgatgcctcctatatgatccaccatcaaa

SEQ ID NO: 864746 - DNA, 120 bp, Artificial Sequence
  ENSG00000287410_5 (sequence is synthesized)
taaagactgagagctcgagttgctgtgagctacccaatctctggacctgcagtaaagtgaacatcaagcagattgtcaagagaaggtcctacagtggaatgatgtttggagaagaaaact

SEQ ID NO: 864747 - DNA, 120 bp, Artificial Sequence
  ENSG00000287410_6 (sequence is synthesized)
tccaagatgccgtaattgactaatttacctcctgttcctctacaacttataggagaatcacaaccaggcacacatcaaggaaaggctgtgtgaggacacagggagaaagcatcatctaca

SEQ ID NO: 864748 - DNA, 120 bp, Artificial Sequence
  ENSG00000287410_7 (sequence is synthesized)
cacagggagaaagcatcatctacaaaccaggaagagagcccttactagaaacctaaccctaccagcaccttgaccttggacttctaccctacagaactgtgagaaataaatttctgttgt

SEQ ID NO: 864749 - DNA, 120 bp, Artificial Sequence
  ENSG00000287410_8 (sequence is synthesized)
ttatgatggcagcctgagaagactgataaaaagctaaaacacatttaaatgaaaaaaaaaatatttatttatataatgtaaatatcttccagcttgatagcctctgtgggtgactgcatt

SEQ ID NO: 864750 - DNA, 120 bp, Artificial Sequence
  ENSG00000287410_9 (sequence is synthesized)
ttggctgccacaatatctcccctcccacatgtacatctaccacgtgacattgagtatctcccatcccacacgtttatctaccacgtgacattgaattgtcaccaatcaagatgtacaatc

SEQ ID NO: 864751 - DNA, 120 bp, Artificial Sequence
  ENSG00000287410_10 (sequence is synthesized)
tgtgactttccctttggaattgcacaaacttatgtctcattagtaaccagtgtggtagaagtgatgctgtgtgccttctgaggctgggtcatgaagacaatgcagtttccaacttgagag

SEQ ID NO: 864752 - DNA, 120 bp, Artificial Sequence
  ENSG00000287410_11 (sequence is synthesized)
ttggagcacttgctttaggagtgctgtcaccaagaaggtttggataccctaaggctgccatgttgtgaggaagcccaggccagtggagaagccacttttggatgctcagcttactgtcaa

SEQ ID NO: 864753 - DNA, 120 bp, Artificial Sequence
  ENSG00000287410_12 (sequence is synthesized)
gcacacaggaagtatgaaagagaaggtcccagataaaagtcaacaccaatatcccaacatgtgaatgaagacacctcttgatgatttcaaagcccaacaatcatcaagtcacccctagga

SEQ ID NO: 864754 - DNA, 120 bp, Artificial Sequence
  ENSG00000287410_13 (sequence is synthesized)
ctctgctgcctggaggttctccatccctgcctttgcccttccctcacactctcatttcaaggtccctgtcaaagaggaatgatttaacagctttcaggatttggcaactccaatgccgct

SEQ ID NO: 864755 - DNA, 120 bp, Artificial Sequence
  ENSG00000287410_14 (sequence is synthesized)
gaagactgagtgtggaagaggccccattgccaattttcagccatactttgtcacttgggctccaaagcaacctagaaagtcacaaaagctactcctgggcaattttctgccaactctagt

SEQ ID NO: 864756 - DNA, 120 bp, Artificial Sequence
  ENSG00000287410_15 (sequence is synthesized)
agccgtgcttattcaataacaattatataatactcaatgtgagacagttactatttccatcacttaaaaagattaacctacctttacaataaccttatgagttttgttattattttgttt

SEQ ID NO: 864757 - DNA, 120 bp, Artificial Sequence
  ENSG00000287410_16 (sequence is synthesized)
tacagaagaggatactgagatttagcaaggctaaataaccagcttagggtcacccagctaggaagtagtagagctagtgtgtgtgcatacactggcacatgcatgctcatatgtgcatgt

SEQ ID NO: 864758 - DNA, 120 bp, Artificial Sequence
  ENSG00000287410_17 (sequence is synthesized)
gtacttgtatctttctctgctgtgtatacttggaagcaggttttggcttgcctgagtctatggatggaggtaagagcagccaatatttattgcaagagataaacaaaccctaacccagcc

SEQ ID NO: 864759 - DNA, 120 bp, Artificial Sequence
  ENSG00000287410_18 (sequence is synthesized)
aagctttaaagtgtctggggttttaagagctttccaggccctttgacgaaacccatcaggccagagtaatgatgctgcggtttgccattcattcttattgggtttaatgaagataaagga

SEQ ID NO: 864760 - DNA, 120 bp, Artificial Sequence
  ENSG00000287410_19 (sequence is synthesized)
gctctctttatgtgtccagttgggcttaacaaattaaccaggctgccggaggggtacatgtgaacagaatatttgtcctcataatgttcattaggagggagaaagttaactaaccttttg

SEQ ID NO: 864761 - DNA, 120 bp, Artificial Sequence
  ENSG00000287410_20 (sequence is synthesized)
ttctgtatttcttttcctaaagcccagtgaaaactgcagagctgaaacatcatcgctaatcttatttctgacgggcctttttctaacttctccttttatgatcatttcacagctgttata

SEQ ID NO: 864762 - DNA, 120 bp, Artificial Sequence
  ENSG00000287410_21 (sequence is synthesized)
ttgaatcagtatcattatgtgtttaaaaaaaaaattatgctctgtgtctcagagctaactgtccagaactaaacatcctggccccctttggacaatgacaggctgtcagagaactggaaa

SEQ ID NO: 864763 - DNA, 120 bp, Artificial Sequence
  ENSG00000287410_22 (sequence is synthesized)
ggggattgggttggtttgtttgcttcttgtgtcctcttgacagctcctggtgaatgaaggaaagctgcgatgatcagatttttgctatgggtttacaacatgactataagcaaatccctg

SEQ ID NO: 864764 - DNA, 120 bp, Artificial Sequence
  ENSG00000287410_23 (sequence is synthesized)
tagcaaattgcaaaaatggcccccaagtcctgaatgcacacccctttccagtgggattttgccacatctctcattaacaggtggagtccctatttcacactttgaatctggaattagtaa

SEQ ID NO: 864765 - DNA, 120 bp, Artificial Sequence
  ENSG00000287410_24 (sequence is synthesized)
tgggatttgctttgtccaatgggatgtcagctgaggcttgaaaggcacttgttggagtttgctttaccatgctgcatctataatcttgagaccctcacgttacccggcctgagctagcct

SEQ ID NO: 864766 - DNA, 120 bp, Artificial Sequence
  ENSG00000287410_25 (sequence is synthesized)
gcaagaaaatgagagaagataaggagaagaaacaaagtacaatggttgatggtcacccttgttaattcaactgatagacttccaactgctagacaagtgagggtggccaccctagatcac

SEQ ID NO: 864767 - DNA, 120 bp, Artificial Sequence
  ENSG00000287410_26 (sequence is synthesized)
tcagccatcagcccgcatgccaactgatcacagatgcatgagagcccagcagagataagccatgctaacccaggcagaagtatcacccaactgacacacagaatcatggactaaataaaa

SEQ ID NO: 864768 - DNA, 120 bp, Artificial Sequence
  ENSG00000287410_27 (sequence is synthesized)
ctacaagccaggaagagagccttcactagatactgaccatgctgacatcttgatcttggacttcccagactccagaactgcacacatcaaggaaaggctgtgtgaggacacagggagaaa

SEQ ID NO: 864769 - DNA, 120 bp, Artificial Sequence
  ENSG00000285700_0 (sequence is synthesized)
gcgcagagctgcacagggcagggctaggaggacatttccagggcaggctccctgccttgcctcttgcaggggaaatctaagatggtcaaaggaaaggaatccaacggttttgcccaggct

SEQ ID NO: 864770 - DNA, 120 bp, Artificial Sequence
  ENSG00000285700_1 (sequence is synthesized)
tgtttagcaaagctcttgcagctggagctgtttattattgcagctaggaagatgctcttccaaacacacttcccaagctgagagagctgaaataatctatcctatttcttcagagcctgc

SEQ ID NO: 864771 - DNA, 120 bp, Artificial Sequence
  ENSG00000285700_2 (sequence is synthesized)
agggtctgtgcctcagaaaggggtttctgttaaaagaggaacattcttgagcatggttattcttccccagctcctcaagaagaggcatcccccagatttagtttgcagatatctttccca

SEQ ID NO: 864772 - DNA, 120 bp, Artificial Sequence
  ENSG00000285700_3 (sequence is synthesized)
actcttacctcccatgcgcactttcgataaaacagcttggataccgcttcttggaatgatgatactgatgttgcatcttccttcaccagctttgagctttggagatcgcagcagaggtag

SEQ ID NO: 864773 - DNA, 120 bp, Artificial Sequence
  ENSG00000285700_4 (sequence is synthesized)
ttactggaagacaatctcaggcccacattgatcatggaagtctagcttttaaagataagtgagccaaccaagctgtaaggctaatcaccctgtgcaagtatgaatttatctaaagaggat

SEQ ID NO: 864774 - DNA, 120 bp, Artificial Sequence
  ENSG00000285700_5 (sequence is synthesized)
ttcatgtggaacccccggagccggccgccaaacggatgactgcacactttaagaaagttcgtgggacttctcccaatcaactgtcaggccacataaagggtctggaacgcgctgacttaa

SEQ ID NO: 864775 - DNA, 120 bp, Artificial Sequence
  ENSG00000285700_6 (sequence is synthesized)
aagcgatatgtgtctcctttcggcactatctctgtttaggaaacaccttgctttaaaagaaagcacaggtgggggcagggacaatgtcaaacccagcacttcactgggttttccagcttt

SEQ ID NO: 864776 - DNA, 120 bp, Artificial Sequence
  ENSG00000285700_7 (sequence is synthesized)
cctgggatcacaatttcatgaaaataggaactaagcaaaagtcgtctcctttttgaaaaaaaccaaatgtattggaatttgaatttgcaaactctcagaatgtctagctgacaagtgaac

SEQ ID NO: 864777 - DNA, 120 bp, Artificial Sequence
  ENSG00000285700_8 (sequence is synthesized)
cctgcccataaccccaaaactattccttaagtttattaacctaggaaacctgccactgattaggtttgggtgtgtttctcagcttttacaatagtctaaactatattacaactatgtggt

SEQ ID NO: 864778 - DNA, 120 bp, Artificial Sequence
  ENSG00000285700_9 (sequence is synthesized)
tacagggcctaaaaagtaaattgaaatatgtggctattaagtcgcaaatcccctcaataggacatgtgagtcaaaactcaattttttgtgagaagtaatgtctgtaatcctattgactca

SEQ ID NO: 864779 - DNA, 120 bp, Artificial Sequence
  ENSG00000285700_10 (sequence is synthesized)
tcatttttagacatttgtggctttaattacaggggaaaaactgtaatgtcctgtcttgggaaaatttgatagggaacatcgggctgttaccatagaataaaggttgcgttggaggattta

SEQ ID NO: 864780 - DNA, 120 bp, Artificial Sequence
  ENSG00000285700_11 (sequence is synthesized)
atttaaaaaggaaaaagaaagaaccctattttatcagaatactctaaacattctccatcagtaacgttgtgcctgaggtgatatccttgaagatgctggaggtggcggtgttaatgaaat

SEQ ID NO: 864781 - DNA, 120 bp, Artificial Sequence
  ENSG00000285701_0 (sequence is synthesized)
agcagcagacctcaggagggaggaaggagccaggtctctgcactgctccggctgcccgagctcccttacatcccaccacaaactctggaagactgctctgtgcaggaaagcagaactggg

SEQ ID NO: 864782 - DNA, 120 bp, Artificial Sequence
  ENSG00000285701_1 (sequence is synthesized)
ggccagcttgcttgcctgtaagccccaccatgtcttccaaaaaatcaccagcacctcatcttcctgcaactccagcgatcggccagaggaaggctatgtgcccctggaggctgtgggcag

SEQ ID NO: 864783 - DNA, 120 bp, Artificial Sequence
  ENSG00000285701_2 (sequence is synthesized)
tgccaacagtattaacacacacggagggagaaggaccttctgcctcagtccagaagccgagtgtgagcacacgctcaggaacaggctcatagggcctagccagagctgaccttggcaggt

SEQ ID NO: 864784 - DNA, 120 bp, Artificial Sequence
  ENSG00000285701_3 (sequence is synthesized)
gacaactgatgggaggaccaaaaagggatctgaaaagctggccaatggcacccagtctaaagagtcccactctggattcctgctctcccagagggaacagactgattccacctcttcgtt

SEQ ID NO: 864785 - DNA, 120 bp, Artificial Sequence
  ENSG00000285701_4 (sequence is synthesized)
tccactgccactgccccgatccctcaagccaccatcatctcttgccaggcagctgcaatagtctgtctcataactggtattcctgcctccacctttgctccttagaatccagtctctaca

SEQ ID NO: 864786 - DNA, 120 bp, Artificial Sequence
  ENSG00000285701_5 (sequence is synthesized)
cagtggccagaacaatcttttggaacaaatcagactttattctttctctgcttaaaaccctccaatggcctctaactgttcttggaataaaatccaaactctttattacgacctacaaaa

SEQ ID NO: 864787 - DNA, 120 bp, Artificial Sequence
  ENSG00000285703_0 (sequence is synthesized)
accctaatgttcgttatctgccgccatcacacaagttcccttttcgtttctcacagggctcttcgtgcaagatccaagagcaaatctgtttccaggggcagataaggcaaataagaagta

SEQ ID NO: 864788 - DNA, 120 bp, Artificial Sequence
  ENSG00000285703_1 (sequence is synthesized)
atgttgggatcactggcacgctgggaacccagtggcagtagaggtttgaatgagcgaggcatctggacaagtcaagtcaagaagtttgcacccttgtggaattgttcccaaaataacctc

SEQ ID NO: 864789 - DNA, 120 bp, Artificial Sequence
  ENSG00000285703_2 (sequence is synthesized)
gaaagtaggaactcaagatgctttcactagaattgttcatttcagggaataatttaaggaagacgtcagtgcccacattgtcttcctttgtatatcctgttgattcagcaccacctttgg

SEQ ID NO: 864790 - DNA, 120 bp, Artificial Sequence
  ENSG00000285703_3 (sequence is synthesized)
aaaaatctctctttccctgattgaattgcattgtatgtggttttacataggtagatccattttgtttcattggtctctatctttatgtcagtaacactctttcttaatcagtgtatcttc

SEQ ID NO: 864791 - DNA, 120 bp, Artificial Sequence
  ENSG00000285704_0 (sequence is synthesized)
tttcttttttcttttttttgagatggagtcttcctctttcgcccaggctggagtgcaattccatctccaaaacataaataaataagtaaataatagtaagaattcactatcacagcctcc

SEQ ID NO: 864792 - DNA, 120 bp, Artificial Sequence
  ENSG00000285704_1 (sequence is synthesized)
cccgctttttaaaagaattcagtttcattcttccatagggaagatccttatcgagctggcaaagtagatcaactgttcacaatagctaaataaggatttctattttcagtcagaatgctc

SEQ ID NO: 864793 - DNA, 120 bp, Artificial Sequence
  ENSG00000285704_2 (sequence is synthesized)
attttattgttatttactcatggtatgtctcaaagccataataacactgtatagttcttcattctcctaagtaaaaatctgaaaattctggggttgctagttcagaaagttaactatatt

SEQ ID NO: 864794 - DNA, 120 bp, Artificial Sequence
  ENSG00000285704_3 (sequence is synthesized)
ctttatttggaaaagcagcaaggacccacatgcttaaaataattttataagatagatcttttataaacattaatggagccaaagaaagtcatacatactatatatgcatctaatgcattc

SEQ ID NO: 864795 - DNA, 120 bp, Artificial Sequence
  ENSG00000285704_4 (sequence is synthesized)
gctgatacatcatcttacataaatgattaaattaaaataaatgttcactccaaggttattctttgctgactaaggttattaaaaaaaaaaaggactcatccagttttattagtgtctcct

SEQ ID NO: 864796 - DNA, 120 bp, Artificial Sequence
  ENSG00000285704_5 (sequence is synthesized)
tagaataaagtgaggagaaaaaatgtttgggtaatgtttgataaaatttgcttttgattaaggcaataactttaaaattaatccttttaaaactagaatatgaaaatgaaagaattttat

SEQ ID NO: 864797 - DNA, 120 bp, Artificial Sequence
  ENSG00000285704_6 (sequence is synthesized)
gtcgataggaaacaggaagatataatgaaaggtaaattttattggacacatgctggtatgtgccaaggacattataggtattctctctcattacctccttgctttttattcccccttaaa

SEQ ID NO: 864798 - DNA, 120 bp, Artificial Sequence
  ENSG00000285704_7 (sequence is synthesized)
gccttattacaaaaaagtttcctacaggaataactggtatcctagaagcataatataaccaagtttagtcctgttctttattcaattttaattaaaattcttgttgcctggatgtattca

SEQ ID NO: 864799 - DNA, 120 bp, Artificial Sequence
  ENSG00000285704_8 (sequence is synthesized)
ttggtaataattgttcatttgtcagaagtttacagttacatacagtactgacaaagagggaaggcaggctggagcgtcggtgcttgcgctgagaggcagagtgcataggcaggacactct

SEQ ID NO: 864800 - DNA, 120 bp, Artificial Sequence
  ENSG00000285705_0 (sequence is synthesized)
aaaagcctgccagaaggtaccacctttctcctttacccagatggtgcctacatttgttcctgtgatttgaggaggaagctaacctggggcttcggagcagaagctttttccctaggtcca

SEQ ID NO: 864801 - DNA, 120 bp, Artificial Sequence
  ENSG00000285705_1 (sequence is synthesized)
tctcctgcactgcagtctgatgagggctgctgaggggaagctggaacccaccattctgcacgctcatcgttttgagcaggagttagctgattctggagctggaaatgctcagctcgagag

SEQ ID NO: 864802 - DNA, 120 bp, Artificial Sequence
  ENSG00000285705_2 (sequence is synthesized)
atgctgataaagagaaccttcttgctcttctggctgttctagagccctgctcttgggatgatgggacccaagagcccagtggcatggctttctccagggtaccaaactatcaacaccatc

SEQ ID NO: 864803 - DNA, 120 bp, Artificial Sequence
  ENSG00000285705_3 (sequence is synthesized)
tctttgcagttcttctcttccaatacttgactgtttccccatactttgaatctgaattaacttgtgacttgctttggccatttgaacgcatcagaggtgacatggggccagttctaagct

SEQ ID NO: 864804 - DNA, 120 bp, Artificial Sequence
  ENSG00000285705_4 (sequence is synthesized)
taggcctcaagaggccacactctccattgggaccctgccaccaacatctggtggcagaagaggaattcagaaattagaagcatgagaaacattcaacaacagccagccaggaaacaagaa

SEQ ID NO: 864805 - DNA, 120 bp, Artificial Sequence
  ENSG00000285705_5 (sequence is synthesized)
tctgcaaaccacaagaagctgaattgggccagcaaccgggatgagcatgaaagccgattttctcccccagagcctccagataagagcccagtctggaaacaccttgattttggcctgtga

SEQ ID NO: 864806 - DNA, 120 bp, Artificial Sequence
  ENSG00000285705_6 (sequence is synthesized)
gaccctaaagagacatccaaatgctcctgcctggacttctgacttacagaactatgacataatacatgcgtgtcattttaagtttctaaatttctggcaatagaaaatgaatacacctga

SEQ ID NO: 864807 - DNA, 120 bp, Artificial Sequence
  ENSG00000285706_0 (sequence is synthesized)
cgcgccagcccaagcgcagcccccggggtggctcatttcggcagggtcttcaagtgggctggctgagacttgcatcttccttcttgggctatggtgcattattaaagagatagtggtggt

SEQ ID NO: 864808 - DNA, 120 bp, Artificial Sequence
  ENSG00000285706_1 (sequence is synthesized)
aaaacccttagcgcctggcatattgtaggcgctaagtgttggctgaatacaccctgcagggtgttatgaattctactgccattatctcatctgatctttacacagtccaataaaacaacc

SEQ ID NO: 864809 - DNA, 120 bp, Artificial Sequence
  ENSG00000285706_2 (sequence is synthesized)
atcaactaggattacgagctcccttttacagatgaggagatggaggtgcgatgagatcaacagacaccacgctgccccactgacttctgcaggcccagcctctgccatactctttggagt

SEQ ID NO: 864810 - DNA, 120 bp, Artificial Sequence
  ENSG00000285706_3 (sequence is synthesized)
ccttgaatagcaaaccctcgcctggctcgcctcgtgatagctctgtgacctctgaggctaggagcaaaaggccatgaaggctgtacatgatagttcacacctgtaatcccaggccgagat

SEQ ID NO: 864811 - DNA, 120 bp, Artificial Sequence
  ENSG00000285706_4 (sequence is synthesized)
aggaggatcacttgaagccaggagcttaaaacgagactggtcaacatagcaagactcccatctctacagaaaaatttcagaattagccatgcatggtggcacgtgcctatagtgccagct

SEQ ID NO: 864812 - DNA, 120 bp, Artificial Sequence
  ENSG00000285706_5 (sequence is synthesized)
actcaggatgctgaagcaggaggattgtgtgagcccaggaattggaggttaccgtgaactatgcgccactgcgctgcagcctggatgacaaagcgagatcctgtttctattaaacaacaa

SEQ ID NO: 864813 - DNA, 120 bp, Artificial Sequence
  ENSG00000285706_6 (sequence is synthesized)
ccaaaaaaggccatgaagctgccgccctgttcatgagatcactgctgtgggagccttgagctgccagggacgaaggtgcagctgcggcatgagatttgggtcattgttcctggctttggg

SEQ ID NO: 864814 - DNA, 120 bp, Artificial Sequence
  ENSG00000285706_7 (sequence is synthesized)
gcctccagaactggttctcaggctctcatggatctgtgagctacagaagaaccttgtactaaatcctgcagcttttccagcacctaaaacagtgtctggaaatggcaggcactcaataca

SEQ ID NO: 864815 - DNA, 120 bp, Artificial Sequence
  ENSG00000285706_8 (sequence is synthesized)
agagagttggactcgatgtcagaagacctgagtcctactcacagctctcctgcagaatagttgtggagtctttggcaagacacaacctctttgtgcctcggttgcctcctctgcaaccta

SEQ ID NO: 864816 - DNA, 120 bp, Artificial Sequence
  ENSG00000285706_9 (sequence is synthesized)
gggatgatcatctgggccctccccggtggatggcaggcgtgcaatgaagatcaaacgtgggtctccaactttagcatgcatcagaatcacccagagggcttgttaaaatataggttgctg

SEQ ID NO: 864817 - DNA, 120 bp, Artificial Sequence
  ENSG00000285706_10 (sequence is synthesized)
aacccacacccagaatttctgattcagtagatcttgggtagggccagaaaaatctgcgtttgtaacagtgttgcagctggtgatggtgctactgctgtgtgggacacacttcaaggaccg

SEQ ID NO: 864818 - DNA, 120 bp, Artificial Sequence
  ENSG00000285706_11 (sequence is synthesized)
ctgataaagagagagaaggtatttcattttctttgtgaccattgtaaatgaggttgtgttcttaattttgttctcagctagaatgttattggcatatcaaactgctattgctttttatac

SEQ ID NO: 864819 - DNA, 120 bp, Artificial Sequence
  ENSG00000285706_12 (sequence is synthesized)
attgattttctgtcctgaaactttactgaatttgtttatcatttccaggagccttttggcaaactctgtagggttttctatgtatagattcatactctccgcaaagacagagtgttcgac

SEQ ID NO: 864820 - DNA, 89 bp, Artificial Sequence
  ENSG00000285706_13 (sequence is synthesized)
tgtatagattcatactctccgcaaagacagagtgttcgactttttcttttcctatttgaatgccttttatttctttctcttacctggtt

SEQ ID NO: 864821 - DNA, 120 bp, Artificial Sequence
  ENSG00000285706_14 (sequence is synthesized)
atatgatgttggctatgggtttgtcatagatggctgttattattttgaggtatgttccttcaatgcctaatctgttttgaagatttttattataaagggatgttggattttattgaaggc

SEQ ID NO: 864822 - DNA, 120 bp, Artificial Sequence
  ENSG00000285706_15 (sequence is synthesized)
cttttctgcatctattgagatgattatatggtttttgtttttgattctgtttatatggtgaatcacatgtattgatttgcgcatgttgagccaaccttgcattccagaaataaagcctac

SEQ ID NO: 864823 - DNA, 120 bp, Artificial Sequence
  ENSG00000285707_0 (sequence is synthesized)
attttatgattttctgagtgctgtttggaccatcatgtcagtgacctaaacagcttcctgctacaaggaagactgagttcccaaaccggatctgtggctcatttccactcaacgttcaga

SEQ ID NO: 864824 - DNA, 120 bp, Artificial Sequence
  ENSG00000285707_1 (sequence is synthesized)
ccaaccaaagatctgggcagcagcttggagccccttgtaatttggccccaggacaacctggcttgcaggcaccatttgccaacttgtgtggctgagagagacgggagccagctggtacat

SEQ ID NO: 864825 - DNA, 120 bp, Artificial Sequence
  ENSG00000285707_2 (sequence is synthesized)
ggaagattgcaggatctgaaattcacggggttccacaaacagaaattatccctgtttctcaagaaatcatcaatgccctacattaaactgctaaggtcagttcgagagaaggaacaacag

SEQ ID NO: 864826 - DNA, 120 bp, Artificial Sequence
  ENSG00000285707_3 (sequence is synthesized)
gctctgaaggcagtaattgtacaagagtagtggctgtgccggggaggccaggagaaggtggaatgggcgagattctgcttccttgagaaacagcagaatcagagagaaatggggaatgga

SEQ ID NO: 864827 - DNA, 120 bp, Artificial Sequence
  ENSG00000285707_4 (sequence is synthesized)
tgcccagcaggaatgctggctgcccattttcctcagaatttacaacccctgtgccagacaggggcattcaacagcgcctgtcttgatggtcatgggccaaaacgacccctgttccaactg

SEQ ID NO: 864828 - DNA, 120 bp, Artificial Sequence
  ENSG00000285707_5 (sequence is synthesized)
ggaaacacaggccctgctgccgcctgtgaggggaactctggagtgtgagaagttcatgggtcagcgtcgggaatgtgctttcctctaccgatgctttgtcctgggtgcgtcttttggatt

SEQ ID NO: 864829 - DNA, 120 bp, Artificial Sequence
  ENSG00000285707_6 (sequence is synthesized)
ccaacagtgtctaagttattgagtccattcactcaagacattttcccctgctgttcccaactgtgctgatgagatcaggagagacagtgatggatgagacacagccccggccctcggctg

SEQ ID NO: 864830 - DNA, 120 bp, Artificial Sequence
  ENSG00000285707_7 (sequence is synthesized)
tcaggtcgtgttgccacctgtccagtttctaactgtgagcagggcttgtcctgctgccgcctcacaggaagactctggagtttggatgaaatctctgccctttctccctgcctggaattc

SEQ ID NO: 864831 - DNA, 120 bp, Artificial Sequence
  ENSG00000285707_8 (sequence is synthesized)
tgcagtgttctggcagcttcttggatccccagagagccaattccttgtccccctgtgggaagtccacctgggaaggccacagacacagcggagaaaggcgctgccccatcaaggtgaaga

SEQ ID NO: 864832 - DNA, 120 bp, Artificial Sequence
  ENSG00000285707_9 (sequence is synthesized)
gggggccggcagaggagctggctgagatgaacgacgtggtgacaaagcacagtgtcactcggagcccctgggaccgtttgtctctgggtttccccagtcagctgctgttggaaagcaaca

SEQ ID NO: 864833 - DNA, 120 bp, Artificial Sequence
  ENSG00000285707_10 (sequence is synthesized)
ccttttgcctggaaacatagtgaagttttgcagccccagagaaagtcagcaaatctgtgaagttagaaccacggcaatatttctttgcacatttgacttgtttgtttatttatttatttc

SEQ ID NO: 864834 - DNA, 78 bp, Artificial Sequence
  ENSG00000285707_11 (sequence is synthesized)
ttctttgcacatttgacttgtttgtttatttatttatttcgagacaaagtctcgctcttgtcgtccagtgtagagtgt

SEQ ID NO: 864835 - DNA, 120 bp, Artificial Sequence
  ENSG00000285707_12 (sequence is synthesized)
acagatgtgagccaccgtgcccggccttgacttgtttattttaagatgttttgccttcagcaaaatggctggtgtagcgccttgaggatgcggtcctgagtgtgcgctgtgtttcagagc

SEQ ID NO: 864836 - DNA, 120 bp, Artificial Sequence
  ENSG00000285707_13 (sequence is synthesized)
gtgtttcagagccgacaaaggcctgcgtgtctctagctcctgcttctggacaccatcactcaggacgtgtggcaaggggcagtaggtggtccccccaggaaggccacggatgccctgcca

SEQ ID NO: 864837 - DNA, 120 bp, Artificial Sequence
  ENSG00000285707_14 (sequence is synthesized)
tgatgggatcaaccacgcctctttcccttcagtctccatccgcacatctgggagtggacaaagtatctgcatggagagtttgactgtgtgaccttctctaaaacaggcaacagctcttcc

SEQ ID NO: 864838 - DNA, 120 bp, Artificial Sequence
  ENSG00000285707_15 (sequence is synthesized)
taaaacccagtcatcctgagagagcagcgccctgtgtgtccagaccaggcttctgtcgatgccggcagcagacgtctcactgcattagcagaactgcatccccccaacaaagccaggagg

SEQ ID NO: 864839 - DNA, 120 bp, Artificial Sequence
  ENSG00000285707_16 (sequence is synthesized)
caggaaatattttccagattattccaatgaagaaattgaggctccaaaaatgaaaatatttgctgatcacacagcttctgagaggcggggctgatgtttattagttttatttattatgtg

SEQ ID NO: 864840 - DNA, 120 bp, Artificial Sequence
  ENSG00000285707_17 (sequence is synthesized)
tattcttactgattttgttatgtgtgtgtttatttattgtctatttgttttcatgcagatgtatttgcaagtaggttttattttattctaaccaaagggaaaatggactcactggctgtt

SEQ ID NO: 864841 - DNA, 120 bp, Artificial Sequence
  ENSG00000285707_18 (sequence is synthesized)
catgaatgcacccaccccaccttgctcagagagtggctttcccaggtcttcgagatttgcagggggctaccctgcccctctggctgtgcaccagtgctttctgccagcctccaacccaaa

SEQ ID NO: 864842 - DNA, 120 bp, Artificial Sequence
  ENSG00000256739_0 (sequence is synthesized)
tcatttgtctcccctttctgcctgggagtaccagcaaagcagtcatgttttaaatgtggtctgtgtactggtgccagacggtgaactttgccaccagcttttgatgggataaatacaaac

SEQ ID NO: 864843 - DNA, 120 bp, Artificial Sequence
  ENSG00000256739_1 (sequence is synthesized)
aggcagggcttgtggcagcagagatgatcagtaagaatctggtaagtgaaagaatgctggagctggaaggggtccttgggatctgctatcctaacttctttattttactgaggaggagag

SEQ ID NO: 864844 - DNA, 120 bp, Artificial Sequence
  ENSG00000256739_2 (sequence is synthesized)
tctgtactgctggcgtgaatcagagtgtggagcttcaacagaggacagacagcctgaggcacagctgattctctccacatcaggcagtgccgccagatggacagacggtgaagtgtaaca

SEQ ID NO: 864845 - DNA, 120 bp, Artificial Sequence
  ENSG00000256739_3 (sequence is synthesized)
agaagcgaactcttaagttttgggtcctgacaacaagccaagaggctgttaaaggggatggcaccactggaaaggatctttgcctcaggcagggatggtggggaatttaaggactcattt

SEQ ID NO: 864846 - DNA, 120 bp, Artificial Sequence
  ENSG00000256733_0 (sequence is synthesized)
gcagcagtcaaacctggtctatttatgccgaagcccaagtgcaggtgctcagaggagctcaagggcagaagaattagtcagggcacagatcttccggatcgctactgtatggggaccata

SEQ ID NO: 864847 - DNA, 120 bp, Artificial Sequence
  ENSG00000256733_1 (sequence is synthesized)
atgctgtggtgcagccagacaagccccaccttgttgtgcctccagaagaagcacattcttggcctgggtggtaacaataacatctggatggaaatatcaagtggtatcaggcttccagac

SEQ ID NO: 864848 - DNA, 120 bp, Artificial Sequence
  ENSG00000256733_2 (sequence is synthesized)
caccattcatgaaagagctaaccttacatatgcttgatcaaatgacgaaaagcttcagccagaaacagttttgcctgggttctgaatcttccctgagctcttaaattctacccagtgagc

SEQ ID NO: 864849 - DNA, 120 bp, Artificial Sequence
  ENSG00000256733_3 (sequence is synthesized)
acggccccacaggcccagagctgggctctgcccatcatggggctgcttcctgttccccaaacactggccacaatgtgaggtcagcccaaaggcgtagagccaagaaaactcagcctccaa

SEQ ID NO: 864850 - DNA, 120 bp, Artificial Sequence
  ENSG00000256733_4 (sequence is synthesized)
tggtcatctgtcctgaacctcctcacggccccacaggcccagagctgggctctgcccatcatggggctgcttcctgttccccaaacactggccacaatgtgaggtcagcccaaaggcgta

SEQ ID NO: 864851 - DNA, 120 bp, Artificial Sequence
  ENSG00000256733_5 (sequence is synthesized)
ggtgaggaagagtggggtccctgggacaggaagacagggtgacaggagtgggccagctccaaggtcagagagaagccacaggctgagcatctcagagcccccagtgcctagtacaaagaa

SEQ ID NO: 864852 - DNA, 120 bp, Artificial Sequence
  ENSG00000256733_6 (sequence is synthesized)
gcataagaaggctggctcactctcattgagccctatatcgtcccctgcattagagccaagaaaactcagcctccaagacacggaacatattttcctgggtcagaagcagcagtcaaacct

SEQ ID NO: 864853 - DNA, 120 bp, Artificial Sequence
  ENSG00000256732_0 (sequence is synthesized)
gaagagaccaggtgggctctgagacagggagaccctttctacgtcggtgccttgacatgtgacttttttgtcacttcgtgctccaggatcacacctggatgaactatcactttcaaatga

SEQ ID NO: 864854 - DNA, 120 bp, Artificial Sequence
  ENSG00000256732_1 (sequence is synthesized)
gcgaccctggtctccatcactctctgctgcctggtaactggtattggacacctggacatctgcatccccgagccttgagaacccaacacgtgttctggaatgactggcagtagcacccca

SEQ ID NO: 864855 - DNA, 120 bp, Artificial Sequence
  ENSG00000256732_2 (sequence is synthesized)
ccactcaacccccatatgagaagaaaaaggcctcctgcctcctcttctttcaccagacactgtgggcccacaattcccatgtgcaccccaaagatccaagccactagctctctctccacc

SEQ ID NO: 864856 - DNA, 120 bp, Artificial Sequence
  ENSG00000256732_3 (sequence is synthesized)
gcatatttagaaaaatctcagcacatctctgggcaatgaaatcattcttttgggacctgacacatgaactgaagtgtaattggcattcttcgtggaaggggcatggatttaaattgtcat

SEQ ID NO: 864857 - DNA, 120 bp, Artificial Sequence
  ENSG00000256732_4 (sequence is synthesized)
aatattctactttgaagaacaccagtagaccgaagcaagatgactaatttttaatgccaaagtatgcaaaacctgccacttcactggcaagccatgaattattcataaatatagacttgg

SEQ ID NO: 864858 - DNA, 120 bp, Artificial Sequence
  ENSG00000256732_5 (sequence is synthesized)
aaaaggaaacatttctgacaatgttctgttatgaagaatccacctttcctagaagccccagcaaacctcccatcggactcataggtgcaaactggctgaaaggctcattccaagaccaag

SEQ ID NO: 864859 - DNA, 120 bp, Artificial Sequence
  ENSG00000256732_6 (sequence is synthesized)
cacaggtacaagggccaaaactggctagaacaggcatgactcaccttttcagcttctcagtcatctcctctcaagggcacaggtctgtttggttggtttgtgaataaaactgggggactg

SEQ ID NO: 864860 - DNA, 120 bp, Artificial Sequence
  ENSG00000256732_7 (sequence is synthesized)
ttattatggaagaagcagtgataagaccctttccataaagaggagagacgtgaactggcatatatcaccaggaccacctccaagtaattgactaataaataaaagctctattagtaagaa

SEQ ID NO: 864861 - DNA, 120 bp, Artificial Sequence
  ENSG00000203930_0 (sequence is synthesized)
tcttccagacaatccatgtcttccggacaatccatgtcttccaagaagctccaagtcttccagtaaatcaagtcttccagcaaatccagtcttccagcaattactggtcttccaccaaat

SEQ ID NO: 864862 - DNA, 120 bp, Artificial Sequence
  ENSG00000203930_1 (sequence is synthesized)
ccagatcttccaggaaaatccacgtcttccaggaaatccatgtcttccaataatttcaaggtcttccatcaaatacagatcttccagctaatccatgtcttccagaaaaatctgtgtctt

SEQ ID NO: 864863 - DNA, 120 bp, Artificial Sequence
  ENSG00000203930_2 (sequence is synthesized)
ccaccaaatccaagtcttccagtaaatctagttcttccagaaaaatctagatcttccagtcaatcagtgtcttccagaaagaaatccaggtcttccagtcaatcagtgtcttccagaaag

SEQ ID NO: 864864 - DNA, 120 bp, Artificial Sequence
  ENSG00000203930_3 (sequence is synthesized)
aaatccaggtcttccagtcagtcagtgtcttccagaaaaatctacgtcttccaccaaatccaggtcttccagtcaatccacatcttccggaaaaaatccaggtcttccagccaatatatg

SEQ ID NO: 864865 - DNA, 120 bp, Artificial Sequence
  ENSG00000203930_4 (sequence is synthesized)
ccaagtcttccggataatttgggtcttcctgaaaatctacgtcttccaaaaaagccatgtcttccagaaaatccacatcttccaatggcctccaggtcttccagactatccatgtcttcc

SEQ ID NO: 864866 - DNA, 120 bp, Artificial Sequence
  ENSG00000203930_5 (sequence is synthesized)
agaaaatccttgtcttcccttaaatctatagcttccaaaaaatccgggtcttccaggaaatccgtgtcttccagcaagtccacgtcttccaacaaagccatgtcttccagactatccatg

SEQ ID NO: 864867 - DNA, 120 bp, Artificial Sequence
  ENSG00000203930_6 (sequence is synthesized)
tcttccagaaaatccttgtcttccctcaaatccatagcttccgaaaaatccaggtcttccaggaaatccgtgtcttccagcaaatccacgtcttccaacaaagccatgtcttccatcaaa

SEQ ID NO: 864868 - DNA, 120 bp, Artificial Sequence
  ENSG00000203930_7 (sequence is synthesized)
ttaatgtcttccagcctacttgtgtcttccaacaaaggtcttccagcatctccagggcttccagcatctgctcgtcttccaacatctccacgtcttccagcatctctgtgtcttccagca

SEQ ID NO: 864869 - DNA, 120 bp, Artificial Sequence
  ENSG00000203930_8 (sequence is synthesized)
tcttcatgtcttccaacaactacccagtcttccatcaactggctcaatatccatgtcttccaacgtctccagtgtgctgatcttctgacattcaggtcttccagtgtctgcaatatccag

SEQ ID NO: 864870 - DNA, 120 bp, Artificial Sequence
  ENSG00000203930_9 (sequence is synthesized)
gctgctgtttgcccccactccttcagtgcgacagacagcctcagagctggtggggagacagcatgccactggaaaaattcgtagacatggaattcctggatcaaatggtatgaaacaatt

SEQ ID NO: 864871 - DNA, 120 bp, Artificial Sequence
  ENSG00000203930_10 (sequence is synthesized)
taaggtttcttccccccaacacctatcacctaatttatttattatatgtggtataaacattattttccagccattgttttcctattaatttttaccatttatggtggtgattttttgata

SEQ ID NO: 864872 - DNA, 120 bp, Artificial Sequence
  ENSG00000203930_11 (sequence is synthesized)
ttttacagttttacatgttagatttccatatctgaccattttaagtgttgtgatttttttctttcctttgattagtgtattcacctgtatttttttctagttatttaattgcttcatttt

SEQ ID NO: 864873 - DNA, 120 bp, Artificial Sequence
  ENSG00000203930_12 (sequence is synthesized)
ttacaattaactccttaatccacctagaattcattttgatatatggtatacagtaggatttaattttttttccccctaataggtcaccgattgtttcagcatcacttattgaataatcca

SEQ ID NO: 864874 - DNA, 120 bp, Artificial Sequence
  ENSG00000203930_13 (sequence is synthesized)
acgcaacaactgttcttccattagatagggtgtagctttccacaggtcggccattttctctttacccaagatggttacattttgcaatggtactcctaccttcctgcagcttctgacagc

SEQ ID NO: 864875 - DNA, 120 bp, Artificial Sequence
  ENSG00000203930_14 (sequence is synthesized)
atactagagcaccatgtttgtgcttgtgcgtttcaaaaatcctaggcacatgcagattagggcagtattttaaacaggattttttttttcattttaaatatgttaagtttgtcacattct

SEQ ID NO: 864876 - DNA, 120 bp, Artificial Sequence
  ENSG00000203930_15 (sequence is synthesized)
tgttgcaaattaaaattaaggaatccaaatatatgaaaccacggtttcaggtgtgctattcctcttaggcgcacctgatatcccaattgtgtgttaaaaaaaaaaatacccccggggtta

SEQ ID NO: 864877 - DNA, 120 bp, Artificial Sequence
  ENSG00000203930_16 (sequence is synthesized)
aagttcctccttcaacctcttttttttttttttttttactcttcagatactcaaagagttaaagttggctcgactcagttcttggaattttctagaatgatataagagggaaatacaaga

SEQ ID NO: 864878 - DNA, 120 bp, Artificial Sequence
  ENSG00000203930_17 (sequence is synthesized)
aatgtatgaggagtagaagtaaataatgtttgccagcctgttgctggccgtagtctcatgtagggatttaaaggagctagggtgagtcctaacccatgccaccactgccactacctcttc

SEQ ID NO: 864879 - DNA, 120 bp, Artificial Sequence
  ENSG00000203930_18 (sequence is synthesized)
tagatagggacacaccccagtgagccacctcttttcactgcaggtgtaaggctcaagacataaggcaaggagttttttagtaggagatgggttaaatattgcccagagaaatctgacaat

SEQ ID NO: 864880 - DNA, 120 bp, Artificial Sequence
  ENSG00000203930_19 (sequence is synthesized)
taaaatcacttgctacctattaccaaccctctcccgggcccccaacgaagctttctctctctattgacttctgcaccgggcctcttagctttactgattctgggggggaaaaaaaagggc

SEQ ID NO: 864881 - DNA, 120 bp, Artificial Sequence
  ENSG00000203930_20 (sequence is synthesized)
ggggggaggatggcgcgtgagtgggaggctgccttgcctgcggttattgcaaggggctcctttggctcacagcctcagtcccagtagtttcctgacttgccgcattagactgtgttttgt

SEQ ID NO: 864882 - DNA, 120 bp, Artificial Sequence
  ENSG00000203930_21 (sequence is synthesized)
ttatgaggaggctggtttccctggcaatggcagctcgccagtgcatgcgcatttgctccactgcagtagcagaatgcggctgtggggccaggggaggggtcctgagggccgcagtggctg

SEQ ID NO: 864883 - DNA, 120 bp, Artificial Sequence
  ENSG00000203930_22 (sequence is synthesized)
gagttatttggcagacatgacgtcagtttttctgagctaaactgccatcgttactgtatatggagcatttttttttttttaaataaagcttggaaggcttttagccactccttttctttc

SEQ ID NO: 864884 - DNA, 120 bp, Artificial Sequence
  ENSG00000203930_23 (sequence is synthesized)
ctcccaaattaactgctctctatatgctcaccagtgaccacgaaggctttctaaggtttgaggccaccgatgccctcagggccccgaggggaatcataatagtatgagaacaggaaacag

SEQ ID NO: 864885 - DNA, 120 bp, Artificial Sequence
  ENSG00000203930_24 (sequence is synthesized)
actgcctggtttcagacctcggctgcttgctagttgcatgactgtgggacgggttacttaaatctcttcgtttcctcagatgtaaaatggggatgctaacagcatgtttagaacagtgtc

SEQ ID NO: 864886 - DNA, 120 bp, Artificial Sequence
  ENSG00000203930_25 (sequence is synthesized)
tggcacatagtaaccattatgtaagtgttgtctattattatttgtagatactaagggggacttgcctggaagcagacttgtgtccgcagtatacaaactcaccctttaatgcacacactg

SEQ ID NO: 864887 - DNA, 120 bp, Artificial Sequence
  ENSG00000203930_26 (sequence is synthesized)
accagataacacaaacacatttacccccacagcacctagactcttctcacagtacacacacttgccttccagtacacagacatatccaaaggcacaccgacaagcaccacagcaaaaaga

SEQ ID NO: 864888 - DNA, 120 bp, Artificial Sequence
  ENSG00000203930_27 (sequence is synthesized)
tgttccccagaacacatggacaccccaatccccgtatcattagactctcccagaggcacgtatgtactgcttaatgcagagactcacctgaggcacactgatgcaccccgcatgacacag

SEQ ID NO: 864889 - DNA, 120 bp, Artificial Sequence
  ENSG00000203930_28 (sequence is synthesized)
acttgcccccccataaggactctactatgacacacagacaatcccaacatcacacactgttcccacatcacacgaacccattttaggaaacacacagcatacagacttaccccatagaac

SEQ ID NO: 864890 - DNA, 120 bp, Artificial Sequence
  ENSG00000203930_29 (sequence is synthesized)
acggcttccccgacaagcacacatactctcaaggccagtagactcaccccacagcacacagactttctctagagtgtacagcttcttcccacagcaaacagactctccccagggcacaca

SEQ ID NO: 864891 - DNA, 120 bp, Artificial Sequence
  ENSG00000203930_30 (sequence is synthesized)
gacacccctgacatcacatactctcaccacagaccatagactcgtcctagagcacagggactcttgccaatgaaacagactttcccgagaatagactcatgagacagcttgaagacccgc

SEQ ID NO: 864892 - DNA, 120 bp, Artificial Sequence
  ENSG00000203930_31 (sequence is synthesized)
atcatgacacaaagactctcccacaacagacagactcaccccattgtgtacagacaagcaccataggccacagaccatcacctcaggacacagacttgcccagcaccacacagacactct

SEQ ID NO: 864893 - DNA, 120 bp, Artificial Sequence
  ENSG00000203930_32 (sequence is synthesized)
gcagagcacgtagagtcaccccgcaaagcacagactaaacccatactacagagactctccctatagctttcagacaagtttaccccaccacagagacatgcaacggtacatcttacaaca

SEQ ID NO: 864894 - DNA, 120 bp, Artificial Sequence
  ENSG00000203930_33 (sequence is synthesized)
tatatcactccttgatgcacacaattgtgccacagcacacaaacttgtcctacagtgcacaaattcatgtcacaaaagacacactcaccacacaatacaaatacttgctccagccggacg

SEQ ID NO: 864895 - DNA, 120 bp, Artificial Sequence
  ENSG00000203930_34 (sequence is synthesized)
ataaaaaaataaaaaaaaaaacaacccagcaacaaaaacaaacaaaaaaaaacaattacttgctccagagttcactcatttgccctaaaatatctagaccttaccccagagttaccacac

SEQ ID NO: 864896 - DNA, 120 bp, Artificial Sequence
  ENSG00000203930_35 (sequence is synthesized)
tgccctaaaatatctagaccttaccccagagttaccacacaatgcatgctgtgtccctgcatcaccaaaatacaactcaaactcctcagacacactctgataaatagacatacctgacaa

SEQ ID NO: 864897 - DNA, 120 bp, Artificial Sequence
  ENSG00000203930_36 (sequence is synthesized)
tgtacagcttggcatcatagcaggaaaaactggctctacaacagatttattctacaacagacacactcaggctgtagagacacctaatctttctttaaggtattcagacccacccttttg

SEQ ID NO: 864898 - DNA, 120 bp, Artificial Sequence
  ENSG00000203930_37 (sequence is synthesized)
ggcacagtcacagatgtgatccaggataccctcacccatcccacaatactgatgcaacccacagcgtacaaacacatcccacagcataacactctaagcccacagtgctcagaaatgtca

SEQ ID NO: 864899 - DNA, 88 bp, Artificial Sequence
  ENSG00000203930_38 (sequence is synthesized)
acagcataacactctaagcccacagtgctcagaaatgtcaggcacacatttgccatacagatttacttcacacacaaaaaacacagcc

SEQ ID NO: 864900 - DNA, 90 bp, Artificial Sequence
  ENSG00000203930_39 (sequence is synthesized)
tgagccgagatcatgccattgcactccaccttgggcaacagagtgagacttcgtctcaagaaaacaacaacaaaaaacacttcttatagt

SEQ ID NO: 864901 - DNA, 120 bp, Artificial Sequence
  ENSG00000203930_40 (sequence is synthesized)
aacaacaacaaaaaacacttcttatagtgcctatacaatgcaaacatgtatcccaaaatatatgaaactatttgctatgtcactcttaggtttaccccaaagcacatagaccgttttcac

SEQ ID NO: 864902 - DNA, 120 bp, Artificial Sequence
  ENSG00000203930_41 (sequence is synthesized)
tgctcaagctgctgcctacaaaacaggagatgccaagccatgcacagaaattcaccaaaatgcacagattcacctatcaatatacatacttgcctcacaactcacacaaacaccaccgag

SEQ ID NO: 864903 - DNA, 120 bp, Artificial Sequence
  ENSG00000203930_42 (sequence is synthesized)
taaatgtacagacaagcccttcagggcacagacttactctgtaacatactaaatcacatcccccatacttagatgtgccttatgattcacagtgatgcgtgtaaacacatagattgcttc

SEQ ID NO: 864904 - DNA, 120 bp, Artificial Sequence
  ENSG00000203930_43 (sequence is synthesized)
cacaatgcacagaattgcatcataacacagacttactctacagtgcaaaactgacagtgcacataaacatttcccagtcggctagacacacaacacacatattactcctacaatgtaaag

SEQ ID NO: 864905 - DNA, 120 bp, Artificial Sequence
  ENSG00000203930_44 (sequence is synthesized)
atttccatcacggtggacagacgtgcttttccatgctgttgagctacaactctggcctacaacaacagaaatacagcttgtgtaatagttaccagcaaggcctctagacccatactaact

SEQ ID NO: 864906 - DNA, 120 bp, Artificial Sequence
  ENSG00000203930_45 (sequence is synthesized)
gggtttgaatcaaggtcccgtcccttgctgattgtatcaccttgggaggagatggaagattgagagcagagtgcaagaatgggaagagggcttcgtgccctgtgcacgtttgccacctag

SEQ ID NO: 864907 - DNA, 120 bp, Artificial Sequence
  ENSG00000203930_46 (sequence is synthesized)
tgaccaaactgaatggtgtgcttctcacctcagcgtgatagcctgaccttgactcctgagttccacgatcgcttcacaactgcaagtcaccatcatacaaaatttgagtttccctaagtc

SEQ ID NO: 864908 - DNA, 120 bp, Artificial Sequence
  ENSG00000203930_47 (sequence is synthesized)
cgcgcctttgagagctttggaacgatatgcaagttcaagtcaccatcctgtttcttgctacctcctgtgagaagaccaacatttgggttacacttgtttctactcttgttcttctgcttg

SEQ ID NO: 864909 - DNA, 120 bp, Artificial Sequence
  ENSG00000203930_48 (sequence is synthesized)
ttattgttgcctctgcagccattgatcacacacgtgttgtcatacaaaaactggttagcctttttatttgtcttgtgaattttatcatttggttcttaagtattacaaattaatattgtg

SEQ ID NO: 864910 - DNA, 120 bp, Artificial Sequence
  ENSG00000203930_49 (sequence is synthesized)
tactctcattgatatacaacttgcagtcattgtaaatatgcgtgagttaggggtgagaatggcatgcaagcaaaagaacaaggagagggatgatagagatgcaagaagagtaaagagggc

SEQ ID NO: 864911 - DNA, 120 bp, Artificial Sequence
  ENSG00000203930_50 (sequence is synthesized)
aagaaagtttatgttaatagcgaacacaatgaaagttctttaaatgcttgataatggtgaaagcaacacttcctagggcatatttttggtgttaatgaacctacacatcatacaataaag

SEQ ID NO: 864912 - DNA, 120 bp, Artificial Sequence
  ENSG00000203930_51 (sequence is synthesized)
aaaattgagaaagcagttggggccagtgaatcgggggcacacaagaatcactgagaaaatcatacacaactcaaaatgccacaatagggaaaatataaagagatttgcacttgtggcttc

SEQ ID NO: 864913 - DNA, 120 bp, Artificial Sequence
  ENSG00000203930_52 (sequence is synthesized)
taaaacagagaaggttgaataggtctctttctgtgtgtaaaatctgccagtgagcatcacaaaaatgcaaatttaaatttcaatctggatggaaagttataaaattcattgcaagtaatg

SEQ ID NO: 864914 - DNA, 88 bp, Artificial Sequence
  ENSG00000203930_53 (sequence is synthesized)
caatctggatggaaagttataaaattcattgcaagtaatgggtggttgggtaggtttaagaaatgcccaactagcctggccaacatgg

SEQ ID NO: 864915 - DNA, 120 bp, Artificial Sequence
  ENSG00000203930_54 (sequence is synthesized)
acgagagcaaagctctgtctcaaaaaaagaaaagaagagaagagaaaagagaagagaagaaagaagagaagagaagagaagagaagctgtggcctgtaatgaaaagaagtggagaagtga

SEQ ID NO: 864916 - DNA, 120 bp, Artificial Sequence
  ENSG00000203930_55 (sequence is synthesized)
ctgtcagaggaagcagattaaggagctgccggagagtatcctgaatacctgaagaagacgattgaggacaatggcaatttgcctgagcaggttgtcagtgctgctgaaactctggaagca

SEQ ID NO: 864917 - DNA, 120 bp, Artificial Sequence
  ENSG00000203930_56 (sequence is synthesized)
aatgcctacttgcacatctattgcaaagcatgagaaaaggaccagaggcttcaagcctggaaaagacaaactcaaagttctgctttgttccagtgtgttctgattaaacccatgttgctt

SEQ ID NO: 864918 - DNA, 120 bp, Artificial Sequence
  ENSG00000203930_57 (sequence is synthesized)
tacagattccaaaattgttaccttctttaaagagaaagccagaaacacttttctgtgtacatgaagggaaaccatgaaatatggatcactgagaaactctttttgaactggtctttgaag

SEQ ID NO: 864919 - DNA, 120 bp, Artificial Sequence
  ENSG00000203930_58 (sequence is synthesized)
tgttttgttctgaggttaaataacatttaaatgaaaaaaaaatcttgacttcacagtgttgtgattctggacactgctcctacagacaaaaatgcagtcataaatgctgctccttgtgtt

SEQ ID NO: 864920 - DNA, 120 bp, Artificial Sequence
  ENSG00000203930_59 (sequence is synthesized)
caagtcatctccattacccccagtacgactccactccttcaactcttgcatctgagagtgctagcgatgtactgtgctctgcatgtattttgactacctgaagatcttatcagagacacc

SEQ ID NO: 864921 - DNA, 120 bp, Artificial Sequence
  ENSG00000203930_60 (sequence is synthesized)
agaactttaccatgaaagtggcttggcaacatttctccgtttgtaatgctttaacaggtgtagaagaatcagtgagacaaataaaacaatcaatacttaatgaagtctggcagaaatttt

SEQ ID NO: 864922 - DNA, 120 bp, Artificial Sequence
  ENSG00000203930_61 (sequence is synthesized)
ggaatgaggttgtgactgatttggaaggtttccttccagtggtagaagaaattgaaaatattgtaacatctgcaaaccatttgaatagtgaaggccttgaagacattgagttaagtgaca

SEQ ID NO: 864923 - DNA, 120 bp, Artificial Sequence
  ENSG00000203930_62 (sequence is synthesized)
ttactgaattgttagactctcaccttcaaaagatagttgagaaatattttggagatgtgatcacatcaaaaggcaatagaagaagccagcataggttaacatccagaactctaagaatgt

SEQ ID NO: 864924 - DNA, 120 bp, Artificial Sequence
  ENSG00000203930_63 (sequence is synthesized)
tcaagtatctactccacaaatgaaattgtcacaatgattcaaaagaaagagatcctttggtgggctacatattgactttcaggtaaggcttagatgattacttacaatcctataaagcag

SEQ ID NO: 864925 - DNA, 120 bp, Artificial Sequence
  ENSG00000203930_64 (sequence is synthesized)
tagtaataaacttccaaacaaacaccgataagtattttctctctgcttacttgacaggggagaagaggttgacattaggccatgtcattcaaacccgttctgcaaacaggaaaacaggaa

SEQ ID NO: 864926 - DNA, 120 bp, Artificial Sequence
  ENSG00000203930_65 (sequence is synthesized)
gtagaaacgccgcacacagatagttaaaccttgggattcagactctgatggctctgatgatatggtgatttgtgtgctggggatgaaagaggagcagaagactgagcttacatctcttca

SEQ ID NO: 864927 - DNA, 120 bp, Artificial Sequence
  ENSG00000203930_66 (sequence is synthesized)
gacgaaatgcaattttctctattctttccctgttactattgttacgaccaagcattttcattgatccattatcatcttcatcttgagatcacaaaggaagttaattgcctgatatccact

SEQ ID NO: 864928 - DNA, 120 bp, Artificial Sequence
  ENSG00000203930_67 (sequence is synthesized)
cttgttaatataaaatatcaatgatatttattttattgttttagtttggtgaacaaactgattgtctaggctttcataatactcatgtccttgcctcattttttcctaaaaagtcttaaa

SEQ ID NO: 864929 - DNA, 120 bp, Artificial Sequence
  ENSG00000203930_68 (sequence is synthesized)
ttcctccaacatgggtactctgagagtttcgggaactcaactatagcatttaaggagtgggctgctactgtacttggctggataatttgattttgtactcctgaaatttgttttaattct

SEQ ID NO: 864930 - DNA, 120 bp, Artificial Sequence
  ENSG00000203930_69 (sequence is synthesized)
gattaagcctaacttgcgatctcaccagaaaggattagtttggtataagttaaattaatttcttttccagcaattgtatatgttagctattggctgatcctgaaaagcagtatatttatg

SEQ ID NO: 864931 - DNA, 120 bp, Artificial Sequence
  ENSG00000203930_70 (sequence is synthesized)
ttaaatttccagatttcctttggtagctaatcaaggaggaacagctgctagagttcattttcatagattctttctgttctcatatctggcctcctcagtgatttgaagaattgaatatcc

SEQ ID NO: 864932 - DNA, 120 bp, Artificial Sequence
  ENSG00000203930_71 (sequence is synthesized)
tccaaaaaatggatattattacctcctgttctctgatggtgatggagacttcattctcagattgtttttaaattcctttcataattccatatatttacttcatttgattcaattgtgtta

SEQ ID NO: 864933 - DNA, 120 bp, Artificial Sequence
  ENSG00000203930_72 (sequence is synthesized)
caaaagttattgtcatggttgttttaattttggatgtttggaattttccaggcagatttaacagaggaaaaaaaaccacaaagccagagatacgacgctgttatcttgttctaagaattt

SEQ ID NO: 864934 - DNA, 120 bp, Artificial Sequence
  ENSG00000203930_73 (sequence is synthesized)
tgggcaaaggcataggctgaacctgcctgttcttttggctgctttacacattcccaactgatgtccattttgaactcagttggacagttattctggggaatagagaggaagtccaaataa

SEQ ID NO: 864935 - DNA, 120 bp, Artificial Sequence
  ENSG00000203930_74 (sequence is synthesized)
catcgctgttgtttctgtcttaattgctgtttgtgccggattcacagcactggcctcatcattatatctgataatgatgcacagaaaacctgaatagagaaaagaagaaagataattcat

SEQ ID NO: 864936 - DNA, 120 bp, Artificial Sequence
  ENSG00000203930_75 (sequence is synthesized)
tggcatgtgcttgccaaaaagagactttatataacttgagaaagcataaagacaacctggaatgaggaaatgtatgtacagtaatgaaaaaaaaatgctttaaacagctgtgtcaaaaac

SEQ ID NO: 864937 - DNA, 120 bp, Artificial Sequence
  ENSG00000203930_76 (sequence is synthesized)
tgacatcagagagtaaattgaatttggttttgtaggaagcaggaagcaagcccactcaaacgttgaaatttggcatgagggagtccagtaactttctcctcaatctgtgaactatatgtg

SEQ ID NO: 864938 - DNA, 120 bp, Artificial Sequence
  ENSG00000203930_77 (sequence is synthesized)
agagggtggcgagtcaggagccgacgaatgctggagaggccatccgcaggggcgggtctctccagagagcagccgggtgacaacgtggcacagaacggcactgcatcggagtaggcacac

SEQ ID NO: 864939 - DNA, 120 bp, Artificial Sequence
  ENSG00000203930_78 (sequence is synthesized)
ggaggagatggaagattgagagcagagtgcaagaatgggaagagggcttcgtgccctgtgcacgtttgccacctagtgaccaaactgaggtttccgatggcacctgtgtcaaggtcttcc

SEQ ID NO: 864940 - DNA, 120 bp, Artificial Sequence
  ENSG00000203930_79 (sequence is synthesized)
ccagcctacttgtgtcttccaacaaaggtacgtcttccaacaaaggtacgtcttccaacaaaggtatgtcttccaacaaaggtacgtcttccagaaaatccacgtcttccaaccaagcca

SEQ ID NO: 864941 - DNA, 120 bp, Artificial Sequence
  ENSG00000203930_80 (sequence is synthesized)
tgtcttccagaaaatccacgtcttccagaaaatatatgtcttccaactaagctacgtcttccaacaaatccatgtcttcctatatctccaggtcttccagcatctccagggcttccagca

SEQ ID NO: 864942 - DNA, 120 bp, Artificial Sequence
  ENSG00000203930_81 (sequence is synthesized)
aggcttcccctgtctgagccttcccatgttaaaatcactctacagaaaaatcttccaactcaactatttctgcttctagttgaattagcttcaaaaacatttaatgggacattcctcctt

SEQ ID NO: 864943 - DNA, 120 bp, Artificial Sequence
  ENSG00000203930_82 (sequence is synthesized)
atagaccagatcttatgaaccaacagtactgcagtttgtgttttttactattaggaaatgtgtgtttaatccctacaacttttaaaagtaatgtccataataaaacttctgcagaataaa

SEQ ID NO: 864944 - DNA, 120 bp, Artificial Sequence
  ENSG00000203930_83 (sequence is synthesized)
agaaaaattcctgtttaagactggtattttaggtaaagttaacatgtagagtattatttgtccattttaaatgatattaatttttatcattggtcttacatgaccaaagaataataataa

SEQ ID NO: 864945 - DNA, 120 bp, Artificial Sequence
  ENSG00000203930_84 (sequence is synthesized)
tataataataataataataataataacaacaacaacacttaacatagcatttgctacatccaggcactgttctcagatccttacatgcattaactcatttaatctatttaatcttcacaa

SEQ ID NO: 864946 - DNA, 120 bp, Artificial Sequence
  ENSG00000203930_85 (sequence is synthesized)
caacccattgaagctaggtaccatcattatccctattttacagatgaggaaactggcacacagaggtgaagtaaattttgtccacaggacacaactactaaataatggagccagatttaa

SEQ ID NO: 864947 - DNA, 120 bp, Artificial Sequence
  ENSG00000203930_86 (sequence is synthesized)
acccggctagcctgttgtgagagtccatgattgtaaccactatgctataatatctgctgtttaaaatcatgatagaatgatgtgatccaaaggttgattgcttccacattttgtgtagaa

SEQ ID NO: 864948 - DNA, 120 bp, Artificial Sequence
  ENSG00000203930_87 (sequence is synthesized)
tattatacaatcccgtatacaaatggtctcgcttgatcctgtcactgccagagtctgtttgtatgcacagcttttattccccaaccagctactaccattcccttggacctgtatatggaa

SEQ ID NO: 864949 - DNA, 120 bp, Artificial Sequence
  ENSG00000203930_88 (sequence is synthesized)
gtaggtgcaaacactttctgataccattttcagttttggcaggaagaatataaggaagcactgagttcaattaccctttgcttcagaatcatattcatagctccatgcttcgagtactgg

SEQ ID NO: 864950 - DNA, 120 bp, Artificial Sequence
  ENSG00000203930_89 (sequence is synthesized)
tgcttggaatttaactcttctatctatttgaatccccttttactgacttttgtccagtttgcaccttactatgtggagcacttaccattagtttgtttctaacctccagcatctacctgc

SEQ ID NO: 864951 - DNA, 120 bp, Artificial Sequence
  ENSG00000203930_90 (sequence is synthesized)
ttcaaatatcgcaacctcctgggttcctggccactgccttgtatccgactaatggtagctgcaactccttaaatcccagcatgctgatctggagaaccaagtagttggttctctaagtct

SEQ ID NO: 864952 - DNA, 120 bp, Artificial Sequence
  ENSG00000203930_91 (sequence is synthesized)
cagctcccaccaggtgccttcagcaatgttgctacccatgcttctggctggcatgaaaagcatgaaaaccacataattaaatttttacagttaggcagggactctctaaagatttaaaat

SEQ ID NO: 864953 - DNA, 120 bp, Artificial Sequence
  ENSG00000203930_92 (sequence is synthesized)
cctctatgtgataacaaaaaggaacaatgataatgccaattaaaatagaaataccttctgaatgtctaatgatttatactttacaaagtgctgtcacctcattcattcaacaaatattta

SEQ ID NO: 864954 - DNA, 120 bp, Artificial Sequence
  ENSG00000203930_93 (sequence is synthesized)
ttgagcgctaactgtatgccaggcatgttttgataaagcttaaaatcgtctgtgggaaacaacatacagataattggaaaattatttatcaattgttaaggccatgaagaaaaagtaact

SEQ ID NO: 864955 - DNA, 120 bp, Artificial Sequence
  ENSG00000203930_94 (sequence is synthesized)
gagagtctggaaaatcaaggaaagcattcctaaagaagtaatatttattgtgactctgaagaatctatattgtcatttggttctcacaatatagccttgtgacttaaataaaacagattt

SEQ ID NO: 864956 - DNA, 120 bp, Artificial Sequence
  ENSG00000203930_95 (sequence is synthesized)
tttgtatatcagttttactaatctgagtgctaacaatagccatgggacccagctgttttgacctctttattttccctgctactcattttgccttaaaatatatatgaagtactatttgaa

SEQ ID NO: 864957 - DNA, 120 bp, Artificial Sequence
  ENSG00000203930_96 (sequence is synthesized)
aatttatatcaagggatataaaaatgtactttttggtttagtatattccacttcaaggaatctgtccaaggaaattatctaaaatgtggataattcacacacaaagatactcctcacata

SEQ ID NO: 864958 - DNA, 120 bp, Artificial Sequence
  ENSG00000203930_97 (sequence is synthesized)
gttatttggtatagtgaaaaacagaaaaaccttagtctaacattcagggaatgattaagtaaatgtgccatgtacctatgatggaatattcttccattaaaatgctatggcatattcatt

SEQ ID NO: 864959 - DNA, 120 bp, Artificial Sequence
  ENSG00000203930_98 (sequence is synthesized)
ttataagttaagtgaaaaatcatcagcatacaaggttacataaagtgtgatggcaactattttaaaatatataatcagtgacaaatgactagaagtaaatgtattggggactgtaaacta

SEQ ID NO: 864960 - DNA, 120 bp, Artificial Sequence
  ENSG00000203930_99 (sequence is synthesized)
attattactggatgggttgcattatgtatgattttattttcttctatatattcttttaagttcttacaatgtacaggtattttctattcaggaaaaatatttaaacaattgtgcacaaaa

SEQ ID NO: 864961 - DNA, 120 bp, Artificial Sequence
  ENSG00000203930_100 (sequence is synthesized)
ctattcatcttttttcttgtacatggaatcaagctttactgttggaaacacttcaaaatatatgttagcaaagtgaaaaaaaacaaattctcaaataatttcagtatctagagataatca

SEQ ID NO: 864962 - DNA, 120 bp, Artificial Sequence
  ENSG00000203930_101 (sequence is synthesized)
ctgtaaggattttcgtgtatgctcttgtaggcacttttactagcatattttcttgtacaaaatgtaatcatactgcaatttaacctatttctttcttacacttaataaattgtgaacaac

SEQ ID NO: 864963 - DNA, 120 bp, Artificial Sequence
  ENSG00000203930_102 (sequence is synthesized)
gctgtttgcccccactccttcagtgcgacagacagcctcagagctggtggggagacagcatgccactggaaaaattcgtagacatggaattcctggatcaaatggaggagatggaagatt

SEQ ID NO: 864964 - DNA, 120 bp, Artificial Sequence
  ENSG00000203930_103 (sequence is synthesized)
agtttgatattttgaaggaaaaggaaaaaaaaaagtttaaaagggcttctgcacagcaaatgaaactagcatcagaatgaacaggcaaccaaaagaatgggagaaaaattttgcaatcta

SEQ ID NO: 864965 - DNA, 120 bp, Artificial Sequence
  ENSG00000203930_104 (sequence is synthesized)
tcactgatcattagagaaatgccaatcaaaaccacaatgagagccagactgggatccggtgcggagagcccctcatcctggaaaattggcctcggccagaaaggcagccaccccctcgcc

SEQ ID NO: 864966 - DNA, 120 bp, Artificial Sequence
  ENSG00000203930_105 (sequence is synthesized)
catcatgcataacacgttcgtgaagaacctggcgctaaaccattcctaggcaacctgtttctgggtcagggtttcgtgagtagcagagcagattcctcgttgccatctattgaaagtgag

SEQ ID NO: 864967 - DNA, 120 bp, Artificial Sequence
  ENSG00000203930_106 (sequence is synthesized)
ccctccacacaagggtttgtctgcctgcgtgctcagggggccgttggacccgcgcgtccggcgctgtccctcttccttccttcctcccgccacccgccggggtcctcgttacccaagccc

SEQ ID NO: 864968 - DNA, 120 bp, Artificial Sequence
  ENSG00000203930_107 (sequence is synthesized)
gcgcgtgaccacccactccgggggtgtcgcgcgctggcctgtccgcatccgccgcgcgttaggccagtcaggatggcgattattaaaaagtcaggaaaggatagatgccggagaggatgt

SEQ ID NO: 864969 - DNA, 87 bp, Artificial Sequence
  ENSG00000203930_108 (sequence is synthesized)
tattaaaaagtcaggaaaggatagatgccggagaggatgtggagaataggaacgtttttacactgtcggtgggagtgtaaattagtt

SEQ ID NO: 864970 - DNA, 74 bp, Artificial Sequence
  ENSG00000203930_109 (sequence is synthesized)
agattatagattattctattataaagacatgcacacatatgtttgttgcagcactatttacaatagcaaagact

SEQ ID NO: 864971 - DNA, 73 bp, Artificial Sequence
  ENSG00000203930_110 (sequence is synthesized)
tactgcagccataaaaatgaattgagatcatgccctttgtgggtacatggatgaagctggaagccatcattct

SEQ ID NO: 864972 - DNA, 65 bp, Artificial Sequence
  ENSG00000203930_111 (sequence is synthesized)
ggggcttaaaacctagatgaagggttgatgggtgcagcgaaccaccatggcacatgtatacctat

SEQ ID NO: 864973 - DNA, 120 bp, Artificial Sequence
  ENSG00000203930_112 (sequence is synthesized)
caaacctgcacgttctgcacatgtatcttggaacttaataataattttaaaaagggcttgcttgcatggttatggttgagactacagatattcttcaacacgctcaaatgaggaagatga

SEQ ID NO: 864974 - DNA, 120 bp, Artificial Sequence
  ENSG00000203930_113 (sequence is synthesized)
gggttgaaaacccattgtaggatgctgtggatctaggattcgccacagttccaggagagcttacgctcttgatctaaaccacagttgttctcaacactgactgtgtatcagagtaatgat

SEQ ID NO: 864975 - DNA, 120 bp, Artificial Sequence
  ENSG00000203930_114 (sequence is synthesized)
agaaagcgttgaaaaatatagatttccaggaactgcacaaagacctgctgaatcagggatagggccagaatctgtatatttcaaaatttccttcagcgtttctttatatagccatggttt

SEQ ID NO: 864976 - DNA, 120 bp, Artificial Sequence
  ENSG00000203930_115 (sequence is synthesized)
tcaaactgccgctctaaagctagggaaaattatgatagaaaatataaatggtagtgggcccaggaactaggaaaccttgattcaaagtgtttgttctgccactagttcaatgaatggtct

SEQ ID NO: 864977 - DNA, 120 bp, Artificial Sequence
  ENSG00000203930_116 (sequence is synthesized)
tattcaagtcactcctgcctttgtctttcaaatgagagaataagaccacttggtgtctaaagtctttctatctctgacattaccttgagagaaaggtgcatcaaccacaatggttgattt

SEQ ID NO: 864978 - DNA, 120 bp, Artificial Sequence
  ENSG00000203930_117 (sequence is synthesized)
tgagaatatctaaactttttcatagagaccaaagtaaataggattattattgcattgtgtaattgtgctcatggttcaagttttaccatgttttagtccctcccagaaaaggaagtaggg

SEQ ID NO: 864979 - DNA, 120 bp, Artificial Sequence
  ENSG00000203930_118 (sequence is synthesized)
cataatgccatagaaacaaggcaaatataaacaccaactctctgaaaggaaagagaggcagtacctactgggagtttctttttctatgataattgtttttatttcccctctgggttatag

SEQ ID NO: 864980 - DNA, 120 bp, Artificial Sequence
  ENSG00000203930_119 (sequence is synthesized)
gttttgggaaaaataatgcacagatattgtgtgtaaaatgctaatattttgtatctattgtttccataaaccaaaacagagaaccctgtatggtgaatgctttaagttttcataggtcat

SEQ ID NO: 864981 - DNA, 120 bp, Artificial Sequence
  ENSG00000203930_120 (sequence is synthesized)
ttgcttcttcttagtcacatctacaggtaaatatttttaaatcaatgatcttttcctcagtataatcagtggttctatatgactttaaagaatgagctgttttggctgggcgtggtggct

SEQ ID NO: 864982 - DNA, 120 bp, Artificial Sequence
  ENSG00000203930_121 (sequence is synthesized)
caaagaaaaaaaaaaaaaaaaagaactgttttgataattttaccatttactgagattactaccttggccatttttttatttattttgaccagaattagagaaataaaaggttaaattgaa

SEQ ID NO: 864983 - DNA, 120 bp, Artificial Sequence
  ENSG00000203930_122 (sequence is synthesized)
ccagaattagagaaataaaaggttaaattgaattgcatcaactaggaactcttaatataaataataaaatgagaaattgactattatatgatcttagttgtcatagaaatactttgactt

SEQ ID NO: 864984 - DNA, 120 bp, Artificial Sequence
  ENSG00000203930_123 (sequence is synthesized)
tggcttgatgtatggaaacatttatctagggcccaggtcatttgaaataaaatattgagataaatctaattattgtttaagacaatatccagttaaaacaacctaagaagtatcactgat

SEQ ID NO: 864985 - DNA, 120 bp, Artificial Sequence
  ENSG00000203930_124 (sequence is synthesized)
gagagtcaaagaacattttactgtggttgagttgaacaggtcagcaaaacttgtaggaggatgagaaagtttgatatacgctaaaggtagaaatagaagttaatgacaacactgccatgt

SEQ ID NO: 864986 - DNA, 120 bp, Artificial Sequence
  ENSG00000203930_125 (sequence is synthesized)
aaatgggtgtttttttcttctttaagaaaagccccccaaatatcaaagctgaggtttcttttagtatgttttatgcacagtttgagtggagagaacctgttgtcaaatggcttgggtaaa

SEQ ID NO: 864987 - DNA, 120 bp, Artificial Sequence
  ENSG00000203930_126 (sequence is synthesized)
ttcttgagctcagtattacaaagtgcatggaaatttcgttctttatagacatgtttaaccactgtggcaaaaagaaaaaaaaggaggggtggggagaaagggcagcccaggctgatgaga

SEQ ID NO: 864988 - DNA, 120 bp, Artificial Sequence
  ENSG00000203930_127 (sequence is synthesized)
tgtgaagaatatgttaggaaacttgtattacatttaaaaagaactttttgtttaaaatcttttaagttcaaaatgcagagaaagctctttaaattacacatttggattacatagcttcta

SEQ ID NO: 864989 - DNA, 120 bp, Artificial Sequence
  ENSG00000203930_128 (sequence is synthesized)
ccacccgaatgctaataaagggttttgacagtatatatagtctaaaagcttgcgtgaacaaggtttatgatgtgaaatgcattgattactgaactttacatagtattattaccttttaat

SEQ ID NO: 864990 - DNA, 120 bp, Artificial Sequence
  ENSG00000203930_129 (sequence is synthesized)
ggcctttgatgtcagtgtgttatggttgcttaagaattcagaaatatgatgtactatgaacagagtgtatatattactgggaagtataaaatcaaatagaaaatagatgaaagaattagt

SEQ ID NO: 864991 - DNA, 120 bp, Artificial Sequence
  ENSG00000203930_130 (sequence is synthesized)
atcattagcataaataacaaatattgagaaattaagtatgaatctattgtgtttgagacactgcatttcatctttcttgcattgctacgtaaagccaaagatataattaactcatctttg

SEQ ID NO: 864992 - DNA, 120 bp, Artificial Sequence
  ENSG00000203930_131 (sequence is synthesized)
caaacacctagaattggttcttgactacttggcagtggtatggtgagtgtcacaatgataagaaaatgggacttaaagtgagatctttgccactgacttcttgtctgctctgggctgggg

SEQ ID NO: 864993 - DNA, 120 bp, Artificial Sequence
  ENSG00000203930_132 (sequence is synthesized)
gcaccctctttttgggtgagtggtgcttagtcctggcagtacaacccctgggttattgggttgtggagaatcagcacggaggcaaggttttgtaatcacacggatctgctttcaaatcct

SEQ ID NO: 864994 - DNA, 120 bp, Artificial Sequence
  ENSG00000203930_133 (sequence is synthesized)
gcctctaccaattaccagctgtgtgactgtgggcatatttcttaaccattccagacttcagtttctgatctgtaaaatgcagtcaaaatacctgcattataggattgctataagattata

SEQ ID NO: 864995 - DNA, 120 bp, Artificial Sequence
  ENSG00000203930_134 (sequence is synthesized)
tgaaatgcttagtacagtgcctggcacatagtaagcgctcaataaattgttgtgattattattattattataacatgaataagcattatgcaaccagaatatgagagtttgcgcctatct

SEQ ID NO: 864996 - DNA, 120 bp, Artificial Sequence
  ENSG00000203930_135 (sequence is synthesized)
ttgcaaaattttcacactttgatacttaatttccctcaaattaaggtatgcatgatggttttaagatgagagaaggaagtttaaaaatgagttttagtatttctttttgtttgctgatga

SEQ ID NO: 864997 - DNA, 120 bp, Artificial Sequence
  ENSG00000203930_136 (sequence is synthesized)
gggatacatgaaacaataatttccttgtctgtaagttactccctgatctgcagtgattctttatgctataatgtggttatcattactgacatttatttgtgtagtgactagaggtaatct

SEQ ID NO: 864998 - DNA, 120 bp, Artificial Sequence
  ENSG00000203930_137 (sequence is synthesized)
cagttttggacatggatgagttcttattctctagaaaataatccatccacttgtttccactttaaagaaaattaggtaactgtgatataggggtaaagataaagctaaatagggcctgct

SEQ ID NO: 864999 - DNA, 120 bp, Artificial Sequence
  ENSG00000203930_138 (sequence is synthesized)
ttgcttgaccaccaaaatattagctcagctgccttttgagagaatttgtgtaagtctacgtaatcttactaggcaaggaaaattcctcacagctggcttctgaacttctttgaatttcat

SEQ ID NO: 865000 - DNA, 120 bp, Artificial Sequence
  ENSG00000203930_139 (sequence is synthesized)
gtattctatgatggcattcaagaagtttaaaatagtgttattcagaatcctaagtattcatcataactgatgctgtgtctgctgagtgacagaaacgtcactgccttaattctagccccc

SEQ ID NO: 865001 - DNA, 120 bp, Artificial Sequence
  ENSG00000203930_140 (sequence is synthesized)
actaccacttacctgcataactgtattagcctcacatcccaaccctttaagtgttttagcttggggtattaggtgttctactgtacgtatctagtagtctttgctattcagcaccttgct

SEQ ID NO: 865002 - DNA, 120 bp, Artificial Sequence
  ENSG00000203930_141 (sequence is synthesized)
gctcaactggctttccttatgtacggttctgattccaatacctcctggttcatagacgtttaataaccacccattgtctatatattccactacttgatctttaaatcatgcatggcctag

SEQ ID NO: 865003 - DNA, 120 bp, Artificial Sequence
  ENSG00000203930_142 (sequence is synthesized)
ttccagtgtactttcccagttttgtatgccagtgttctctttcatgtaatacatgtgatagttcctgacttcctcagctttatctaagtactaagggccttcagcgcatagctcaagtct

SEQ ID NO: 865004 - DNA, 120 bp, Artificial Sequence
  ENSG00000203930_143 (sequence is synthesized)
aatccctgaagcttgtcacttaaggtctttgtcacttaagaaattacatgtattacctgaagccagggtgcctgagaagagcctaccaagctataatctttttcctgttcccctccatat

SEQ ID NO: 865005 - DNA, 120 bp, Artificial Sequence
  ENSG00000203930_144 (sequence is synthesized)
atgtccagtctgtaggggtgggtttcttctctaatttacttaagcttccagcctatttaattaaattaggacatcctcattgatcctcagccctgttggttgggcccctgaatgcaaccc

SEQ ID NO: 865006 - DNA, 120 bp, Artificial Sequence
  ENSG00000203930_145 (sequence is synthesized)
atttaattttggctctgaatacaaggctccctgtttgggcaattgtccaaacaattgcctagagatctaaattcttaggttcttgccagtttcatctcctatcattacagcacatgatat

SEQ ID NO: 865007 - DNA, 120 bp, Artificial Sequence
  ENSG00000203930_146 (sequence is synthesized)
tgttatttaccattcggcttcaattttctctgcttgttctctatgtgagaacaagttctcttgttctctgcttgttctcatatgtgaatgctagcctggaatgtacttaactttaccata

SEQ ID NO: 865008 - DNA, 120 bp, Artificial Sequence
  ENSG00000203930_147 (sequence is synthesized)
tccttgatttggcgttagagcagggcatagcaaactaaggcccttgggccaatgcagcccaaccattttttttaagtaaagttttaatgcagcacagccatccccattcatttacttact

SEQ ID NO: 865009 - DNA, 120 bp, Artificial Sequence
  ENSG00000203930_148 (sequence is synthesized)
gtctgtgactgcactacaatgggagagttgagtagttgcaacagagacaatgtaacctgtaaagccttaaatatttacttctgaacctttacagaaaatgtttgttgatccctgatctaa

SEQ ID NO: 865010 - DNA, 120 bp, Artificial Sequence
  ENSG00000203930_149 (sequence is synthesized)
agccaagcagttctctcgacctagatactgcttattctttgataatttcccattcccatcttgttaaccaataaggccagttcattgagactatgaagatagcttccaacccattcaaac

SEQ ID NO: 865011 - DNA, 120 bp, Artificial Sequence
  ENSG00000203930_150 (sequence is synthesized)
tatttgctttttcttgaatttccctgccttctctttctcaccttcctagaatgctatttccttgtgttttgctttttagcagaagagatgaaatagtattaaagactgtaagagtagtct

SEQ ID NO: 865012 - DNA, 120 bp, Artificial Sequence
  ENSG00000203930_151 (sequence is synthesized)
catgatgtcttttaatttaatatctaggccctaatacacaactctttgaatattgctactatctttcagcatgactttccaataccattaagattaagcctttctgttcttcagtttctc

SEQ ID NO: 865013 - DNA, 120 bp, Artificial Sequence
  ENSG00000203930_152 (sequence is synthesized)
taactcaagtcttctaagctccacagcttccaacatctttaattaccagatcttcccaatattataacatccgtgcattccagtccctgtcctgcagcatctccaatgcccttgttttct

SEQ ID NO: 865014 - DNA, 120 bp, Artificial Sequence
  ENSG00000203930_153 (sequence is synthesized)
aaacttcccagtattcaagtcattaaaaatttaggtcttctaatatctccaacaacccatcttcaaagtccaggtcttgtctttcagaatccagagttctaaattacaagtcttccatgg

SEQ ID NO: 865015 - DNA, 120 bp, Artificial Sequence
  ENSG00000203930_154 (sequence is synthesized)
ttttaaatgtctcctactttctagttttacagtgtatttttatcgccaattcctccaatgcccaagtctttaaatacctgcaagaactttcaggtacatcaatatcctcaatgtctgaat

SEQ ID NO: 865016 - DNA, 120 bp, Artificial Sequence
  ENSG00000203930_155 (sequence is synthesized)
gaatagacctcttaatatcctggtctcatattgtccaggctgccagtattcttgacatccagcatctttaaaatttaattcttccaaactgtctttttgacataaatatgtcaatatcca

SEQ ID NO: 865017 - DNA, 120 bp, Artificial Sequence
  ENSG00000203930_156 (sequence is synthesized)
tgcttaccaatgtctcccaatatccagggcttctcattttaggatttataaatgtctacatctgctgttgtttatatctgccagtatttaggagttccaaggtacaggacttacaatatc

SEQ ID NO: 865018 - DNA, 120 bp, Artificial Sequence
  ENSG00000203930_157 (sequence is synthesized)
tctaatttccagagatttcagtgtctatgacttccaatattcaatatcccaatgttcagggcctccagaaatatcaatgtccagagtaaccaatgtcttcaaaatccaaggcttgcaatg

SEQ ID NO: 865019 - DNA, 120 bp, Artificial Sequence
  ENSG00000203930_158 (sequence is synthesized)
tctccaatatcctgtgcttacaatgtttccaatgtccagggtttccgatggcacctgtgtcaaggtcttccaacaactccgggtcttccagcgacttcaagtcttccaataatctcaagg

SEQ ID NO: 865020 - DNA, 120 bp, Artificial Sequence
  ENSG00000203930_159 (sequence is synthesized)
ttctgtgatcagcacatactttatgtaaggtgtgaagaacacaaactgtgtcattctacgtggtgttcctgtacatatttgtgtgcagatgtgtttgggtattacttaggataaatttct

SEQ ID NO: 865021 - DNA, 120 bp, Artificial Sequence
  ENSG00000203930_160 (sequence is synthesized)
aaaaggagagttgctgagccaaacaagaccatgtgcatcataatgttcatcacagcaaaaaaattacaagcaatcatgtgtctaacagttggggtggttagaaaattatattgtaactat

SEQ ID NO: 865022 - DNA, 120 bp, Artificial Sequence
  ENSG00000203930_161 (sequence is synthesized)
ctaatggaatactgtgtggtcatttaaatttatatcatggaagaatatttaccaaaatgggaatatgttcataaggtatcatcagtgagagaaataggtcacaaaaaatacgtataatat

SEQ ID NO: 865023 - DNA, 120 bp, Artificial Sequence
  ENSG00000203930_162 (sequence is synthesized)
tcatgtttcatagaaggaaaactaaataccttcgggaaaataactagaagatacacactaaaatgttgttagtagtaaaagtcccaaaaagaaaatggataaatcatggtatatttcacg

SEQ ID NO: 865024 - DNA, 120 bp, Artificial Sequence
  ENSG00000203930_163 (sequence is synthesized)
taaaatattatatagtcattatatgaatgttctacagctacacataacaatatgggtagattttacttctagaatattaagatatcaagtctcaaaagactacatatagtaggatatcct

SEQ ID NO: 865025 - DNA, 120 bp, Artificial Sequence
  ENSG00000203930_164 (sequence is synthesized)
ttttatattattcaaaaacaggtaaaactaagcactatattatttagggctacatacacatagcatacaaataatttattaaaaagcaaaaaaaaaattgaagatgatggtcactggggt

SEQ ID NO: 865026 - DNA, 120 bp, Artificial Sequence
  ENSG00000203930_165 (sequence is synthesized)
tgaggaaatagggtcagaatatgggaggacaatgtacatgaattcatattatggttaacattctagtactcgtgtgttgggtagtggttggtgtcattatgtaattgaaatcccattatt

SEQ ID NO: 865027 - DNA, 120 bp, Artificial Sequence
  ENSG00000203930_166 (sequence is synthesized)
atttaataattttatgattattattaacattaaataaaaaggcaagttaatgagtaaaaataaaagagggccttgcatgaatcaatgagacactgtgcacaatctaaggattattaatcc

SEQ ID NO: 865028 - DNA, 120 bp, Artificial Sequence
  ENSG00000203930_167 (sequence is synthesized)
ctttctgtacatttgtctttcattattttttaaagtaatttatctgtgggtagtaagactacatgggatttttattctcttttggttctttgctctcgaaatgttctattttgaacatgt

SEQ ID NO: 865029 - DNA, 120 bp, Artificial Sequence
  ENSG00000203930_168 (sequence is synthesized)
ttaaactttatgttaatgtgtttttattgatataggaaaatacaatattatatttattgaaaaacaagctcaaaattacatagcgcatgatccaaaatatgttgaaaatacataacaggg

SEQ ID NO: 865030 - DNA, 120 bp, Artificial Sequence
  ENSG00000203930_169 (sequence is synthesized)
atatgttgaaaatacataacagggagtgaaaagaaaagtgttgatatgttaacaatagttgcttctgtgtagtcagatttcaaatcactttttttctgtttccatatatacacatatatg

SEQ ID NO: 865031 - DNA, 120 bp, Artificial Sequence
  ENSG00000203930_170 (sequence is synthesized)
tatatatgtgtgtgtgtgtgtgtgtgttttatagggtgggcttattttttgttataaaagtaatatatgtttatagtaaaaagtaaaaaaaagcagtagtgtataaagtaaaaagtgaaa

SEQ ID NO: 865032 - DNA, 120 bp, Artificial Sequence
  ENSG00000203930_171 (sequence is synthesized)
taaaaagtgaaaatatccttctcctaatcctatctatctcccagagatagccatgactctttgttttgttaccttcctcatactttttttatttacttgaatgtattctcatgtgtttta

SEQ ID NO: 865033 - DNA, 80 bp, Artificial Sequence
  ENSG00000203930_172 (sequence is synthesized)
tcatgtgttttagaaaatgaaaatacgtaacggagtgagaagaaaagtgttgatatgttattattaacattaaatgttat

SEQ ID NO: 865034 - DNA, 120 bp, Artificial Sequence
  ENSG00000203930_173 (sequence is synthesized)
tctacaacttgcttttttcctgctctgtagaaagtcattttataaaacagctacaggaaatttcagagtagggtgtactgtattatttattcaattctttccacattagatctttaggtt

SEQ ID NO: 865035 - DNA, 120 bp, Artificial Sequence
  ENSG00000203930_174 (sequence is synthesized)
gttaacagtttgtagctattatagataatgctatataaagcatctttacaatctattatttatttaattctttccacatgatcttttggttgttaacagtttgttgctaatatagataat

SEQ ID NO: 865036 - DNA, 120 bp, Artificial Sequence
  ENSG00000203930_175 (sequence is synthesized)
gatatataaagcatctttacaatttttttgcacttttacaaggattttaaagagctagtacctgagaaataaaatttctggatcaacatgtttgagctaaattgccctcctggcatgctg

SEQ ID NO: 865037 - DNA, 120 bp, Artificial Sequence
  ENSG00000203930_176 (sequence is synthesized)
aatgctattatttttgacttttgtcagtattttggatggaaaatctaatctcattcctttaaattatttttctctaataatttgtaaagttaagcaacttttcatacatttactagctat

SEQ ID NO: 865038 - DNA, 120 bp, Artificial Sequence
  ENSG00000203930_177 (sequence is synthesized)
ttttatttcttctttaagaaattgcttgtttgtatcctttacctattcttttgttgtgtcatttgtctttttttattattaatttgtagatctctggatattggagctgatatccttttg

SEQ ID NO: 865039 - DNA, 120 bp, Artificial Sequence
  ENSG00000203930_178 (sequence is synthesized)
tctggtgtatattgcaaatgtttatcatttgtcttttaaatttattcatggtgctatttactataaagaagatttaattatgtaaatagacaaacattttaatcttttatagtttcttgt

SEQ ID NO: 865040 - DNA, 120 bp, Artificial Sequence
  ENSG00000203930_179 (sequence is synthesized)
ttttgtttcatatttagataggcttctgcactcccaagattaaaaaagtattctcctatatattcttctaatcaaaaaatatattttttgagatatcgtctttctgtgttgtccacactg

SEQ ID NO: 865041 - DNA, 120 bp, Artificial Sequence
  ENSG00000203930_180 (sequence is synthesized)
ctcccgagtagctgggactacaggtgtgggccagtgtgcctggttcttccaatattttgtacgttcttattgcttagtactctatgtagaattggcttttcttttataagtgtttctatg

SEQ ID NO: 865042 - DNA, 120 bp, Artificial Sequence
  ENSG00000203930_181 (sequence is synthesized)
tctatgtagaattggcttttcttttataagtgtttctatggtacaaagtaggaatctaagcttattttttttcagaagagagagtcagtttttttcaacttacttattcaattgaattat

SEQ ID NO: 865043 - DNA, 120 bp, Artificial Sequence
  ENSG00000203930_182 (sequence is synthesized)
ttccatactgatttggaattctctttttatcatgaactatatgggtatatttttttgtttcttttctgttcaactgataatatttctctagtactgagctagtacctcactgctttaatt

SEQ ID NO: 865044 - DNA, 120 bp, Artificial Sequence
  ENSG00000203930_183 (sequence is synthesized)
actgtagcattatgttttgacatatgatgggactgcttcccctacattattatttttttcagaatttttcgctattcttgtgcatcccatttttccagattaattttaaaattaactcat

SEQ ID NO: 865045 - DNA, 120 bp, Artificial Sequence
  ENSG00000203930_184 (sequence is synthesized)
gaatgcccataaaaaattaatcccttggaaatgcttcagacctttgagtaacatgtcaagaactgccatctttatgatagtgggttttgcatctagtaacgagggatctgtctcaattta

SEQ ID NO: 865046 - DNA, 120 bp, Artificial Sequence
  ENSG00000203930_185 (sequence is synthesized)
tttaaatttactgtagtctccatttagatattaaaagaattgttaggcttatttgtttatagttttaattcctcttacgtgaatgatattgcattttaaaaattcattatcattagtgca

SEQ ID NO: 865047 - DNA, 120 bp, Artificial Sequence
  ENSG00000203930_186 (sequence is synthesized)
tagaaaagctatttaatatttatcttgtatccaggtatcatattgaactctattcctagctctaacagtagtttttattttcatttgattatcttgatttcttagatacacaatcatgcc

SEQ ID NO: 865048 - DNA, 120 bp, Artificial Sequence
  ENSG00000203930_187 (sequence is synthesized)
atttgtaaataataaaacatttgtcttttccttgctaatgtttgtatctatttttttttcttttagcacattggtaaagactttataacttccaggacaatgcagattgatgttgattaa

SEQ ID NO: 865049 - DNA, 120 bp, Artificial Sequence
  ENSG00000203930_188 (sequence is synthesized)
taaagagcaggcaaccttctgtttttggctctaatagaaatgcctcattgtttaactattataattgccattgtttctgataaatgccccttttcaagttatggaaatgcccttctgttc

SEQ ID NO: 865050 - DNA, 120 bp, Artificial Sequence
  ENSG00000203930_189 (sequence is synthesized)
ttgattgacttataattttatcagggatggataaagaatgttatcaagatgcctcttctggcatctgacaagctgatatccaggtgatgatatggttattctctctaatccattaatgta

SEQ ID NO: 865051 - DNA, 120 bp, Artificial Sequence
  ENSG00000203930_190 (sequence is synthesized)
gttaattacataatgttgagctattcttagattcctggaataaaactgatttggtaatggtgttttggtatgtcattattttatttaggatataaaactctatattaacaaatgcctata

SEQ ID NO: 865052 - DNA, 120 bp, Artificial Sequence
  ENSG00000203930_191 (sequence is synthesized)
gaagtgccctattacctctttcacatcatggcaccctggggtaaatagacaagattgctcagggcaaaggcaacttggcttcacaggatctgcctggttgacccaacgtcttaggagata

SEQ ID NO: 865053 - DNA, 120 bp, Artificial Sequence
  ENSG00000203930_192 (sequence is synthesized)
aagattacagtacacatacaacccattcacaggacaccagtgtgctgaggtacacttgttgggaaactcttatttattgttttcctttctgcgatacccctttcctgatttgatattagg

SEQ ID NO: 865054 - DNA, 120 bp, Artificial Sequence
  ENSG00000203930_193 (sequence is synthesized)
attatgatatttttgtgaataaagatttttctttttccacaatgtaaataacttagacacaagttgttccttaaacaattggtaacactcaccaatataactgttttgtcctagtacatg

SEQ ID NO: 865055 - DNA, 120 bp, Artificial Sequence
  ENSG00000203930_194 (sequence is synthesized)
cttggggcctagaaatttaaatctttccacttcttgtatgattattttatccaagattttctcctcttctggagtcaattttgtcaaaactgtccatttcatctggattttcaaatgtat

SEQ ID NO: 865056 - DNA, 120 bp, Artificial Sequence
  ENSG00000203930_195 (sequence is synthesized)
tgattggaaattacacataatacttcctaatgtgccttaatttgcatatatgtggctatatgcttttttattttctctggtacgactttccttagatttgtatattttattttcagttat

SEQ ID NO: 865057 - DNA, 120 bp, Artificial Sequence
  ENSG00000203930_196 (sequence is synthesized)
ctatttttttaaaataccaagtgttttcaaatatcactttctgcttttgtaaattccttcttgttacattctttagttctgtttgatctctttctagattctctaggtaatgtttagttt

SEQ ID NO: 865058 - DNA, 120 bp, Artificial Sequence
  ENSG00000203930_197 (sequence is synthesized)
acttttaattctttcttttctgtttagtgcatttaagttaagttaaaaaatttcctctaaatacatgtttgattgtaccccatagttttcagcattttcatgtttgtttgtttgtttgtt

SEQ ID NO: 865059 - DNA, 120 bp, Artificial Sequence
  ENSG00000203930_198 (sequence is synthesized)
tgtcacctcatatttaaagctttgttttcctgtttaattcaagagttatttagaagtgtatatatttcagtgtggttaggttttagttgatgttttgcttcctatccccttttcccttaa

SEQ ID NO: 865060 - DNA, 120 bp, Artificial Sequence
  ENSG00000203930_199 (sequence is synthesized)
ttactacttatactatctcatggatggagaatgtttcttgcatgagttatacctcttggaatattttcttcgtattctatatgaaatttttataaatattccatgaacaattggagaaaa

SEQ ID NO: 865061 - DNA, 120 bp, Artificial Sequence
  ENSG00000203930_200 (sequence is synthesized)
gaacaattggagaaaatatatattttttgttggggtaaatattatatcatgcttctacaaattaagtcaaattagttcattgttattcaaattttctatttttgtctgatttatctaaat

SEQ ID NO: 865062 - DNA, 120 bp, Artificial Sequence
  ENSG00000203930_201 (sequence is synthesized)
ataaaatgtctcacttcatggttttattacagtctcctatttctaacttttttggcttgacatatttgaaattgcttttcagggtttttttaatgattatcttattggattgtattagtt

SEQ ID NO: 865063 - DNA, 120 bp, Artificial Sequence
  ENSG00000203930_202 (sequence is synthesized)
cacaatgtatattaattcaaaaagataccttccttgatttatttaatgatttttgttttgactcttctatgctacctctactttatctttgttaccatttgcctactatattcataccag

SEQ ID NO: 865064 - DNA, 120 bp, Artificial Sequence
  ENSG00000203930_203 (sequence is synthesized)
tattttcagcttttctctgttgttttggtttgggtatatcttttcaagactgcatgtgatgagtttttttactcgatctcgcaatgtctgccttaatatttcacaattaaacctttcata

SEQ ID NO: 865065 - DNA, 120 bp, Artificial Sequence
  ENSG00000203930_204 (sequence is synthesized)
tttattataatttggtaatattcattaatttttctgtctttttaaagtcttgatagatttgtcaaagtatatgtactttttcctatgctggtttagaagttcgaaatatcacttctaata

SEQ ID NO: 865066 - DNA, 120 bp, Artificial Sequence
  ENSG00000203930_205 (sequence is synthesized)
tcgaaatatcacttctaatagtaattatgctcaaataggtacacatatacatacatatttattttttactttatatacttttgtgcaattggaacttttgaagtatgtaatatttttgta

SEQ ID NO: 865067 - DNA, 120 bp, Artificial Sequence
  ENSG00000203930_206 (sequence is synthesized)
agacagcctcagagctggtggggagacagcatgccactggaaaaattcgtagacatggaattcctggatcaaatgatgtaaaatggggatgctaacagcatgtttagaacagtgtctggc

SEQ ID NO: 865068 - DNA, 120 bp, Artificial Sequence
  ENSG00000203930_207 (sequence is synthesized)
gctgctgtttgcccccactccttcagtgcgacagacagcctcagagctggtggggagacagcatgccactggaaaaattcgtagacatggaattcctggatcaaatgatactaaggggga

SEQ ID NO: 865069 - DNA, 120 bp, Artificial Sequence
  ENSG00000203930_208 (sequence is synthesized)
ctcagcctcccaagtagctgggattgcatgcatgtgccaccacgcccaactaatttttgtatatttagcagagacggggttttccatgtttgtcaggctggtctcgatctcccaacctca

SEQ ID NO: 865070 - DNA, 120 bp, Artificial Sequence
  ENSG00000203930_209 (sequence is synthesized)
tacagatttgaattaacaattttataggaaatattcataatttatttggcaaaggcagtattcatataaaaataatcaacaaaatcagatttactttcagaaaaagtgtctgacttcatt

SEQ ID NO: 865071 - DNA, 120 bp, Artificial Sequence
  ENSG00000203930_210 (sequence is synthesized)
tttcaaggaaaaaatattaatatacgttttgaggtgcattattaaaaccatggataaatcaattatggagcaccttgttaaataactagcaaagtaaatatcatattaaaataaatatga

SEQ ID NO: 865072 - DNA, 120 bp, Artificial Sequence
  ENSG00000203930_211 (sequence is synthesized)
ccaaagaaactgcgggatcaactaagatcagcttgaggactcaacctggttacccaggagttatggcactaccagaaactctcaggctctagagagaaaaaagactactgggagagaact

SEQ ID NO: 865073 - DNA, 120 bp, Artificial Sequence
  ENSG00000203930_212 (sequence is synthesized)
ccagacacttgtggatggatagtcagatgtttattccaacaccattttttgagtagtccatcctttccttaatgttcggaaatactaccagacaactgtaaaaatattaaaaatgaataa

SEQ ID NO: 865074 - DNA, 120 bp, Artificial Sequence
  ENSG00000203930_213 (sequence is synthesized)
gtgaacatatttgtattatcttattgggggaaagacttttcaaagcaaggcagaaacagttgactacataaatacttgaagcaactttatggcaaaagacaaaagcaataaaattcgaaa

SEQ ID NO: 865075 - DNA, 120 bp, Artificial Sequence
  ENSG00000203930_214 (sequence is synthesized)
agacagcctcagagctggtggggagacagcatgccactggaaaaattcgtagacatggaattcctggatcaaatggtcaccgattgtttcagcatcacttattgaataatccaacgcaac

SEQ ID NO: 865076 - DNA, 120 bp, Artificial Sequence
  ENSG00000203930_215 (sequence is synthesized)
ggtttagctattaaaatctgccctttgaagagcatgcacattttagcatataatgtttagtatgatttcatgtttttggagaatttttgaggataatctcaaggcatttcatttctttcc

SEQ ID NO: 865077 - DNA, 72 bp, Artificial Sequence
  ENSG00000203930_216 (sequence is synthesized)
agacagcctcagagctggtggggagacagcatgccactggaaaaattcgtagacatggaattcctggatcaa

SEQ ID NO: 865078 - DNA, 82 bp, Artificial Sequence
  ENSG00000203930_217 (sequence is synthesized)
aggagatggaagattgagagcagagtgcaagaatgggaagagggcttcgtgccctgtgcacgtttgccacctagtgaccaaa

SEQ ID NO: 865079 - DNA, 120 bp, Artificial Sequence
  ENSG00000203930_218 (sequence is synthesized)
cttcgtgccctgtgcacgtttgccacctagtgaccaaactgagtaagtaccgtatttgtggattgctcagaaacgtccctaaaacttcactcattgcaaggttgtgtaaccaccctggtg

SEQ ID NO: 865080 - DNA, 120 bp, Artificial Sequence
  ENSG00000203930_219 (sequence is synthesized)
aataagcacgtatacatcaagttatagcgatttctgctacatatgtagaaatttttaaaaagtcataaaataaaaagaaatctttctctctaacttttccccctgccgtcccaaatttcc

SEQ ID NO: 865081 - DNA, 120 bp, Artificial Sequence
  ENSG00000203930_220 (sequence is synthesized)
ccgtggaattcattgagaccgtgttctatagcagtgatctttgtactttctaattatttaccacctaacatcattttggaaaatggtctactccatcacacatcttgaagtgaacacctg

SEQ ID NO: 865082 - DNA, 120 bp, Artificial Sequence
  ENSG00000203930_221 (sequence is synthesized)
aattggtttcatcaaatttttgcatgcaatgaaataaaaataccatacccatttgatattcataattgttgatttaaaaaaacatgaacaaggtcttctttagcagtcagaaattttacg

SEQ ID NO: 865083 - DNA, 120 bp, Artificial Sequence
  ENSG00000203930_222 (sequence is synthesized)
taatgtttctatctccttgaacttgccattccattcaacttccctcacataatgtataataatgaatacattttcaatatttaaaggccccttattcgtcaccttaccatacatgcctgc

SEQ ID NO: 865084 - DNA, 120 bp, Artificial Sequence
  ENSG00000203930_223 (sequence is synthesized)
aaaaagcatacaagaattgaaaaaaaatttctgtgactctatgcctcaaaagattaaaatttttatcataaatttattagtagtacacaatcagaagaacttaaaatattacacatttgg

SEQ ID NO: 865085 - DNA, 81 bp, Artificial Sequence
  ENSG00000203930_224 (sequence is synthesized)
tagtacacaatcagaagaacttaaaatattacacatttggtaagtaatcagtaaaatgaaaagtaaaattggttggaaata

SEQ ID NO: 865086 - DNA, 120 bp, Artificial Sequence
  ENSG00000203930_225 (sequence is synthesized)
catcacttactagttcaatgatttgaggtcattttcttgtcttctcacctgtaacatgagagtaatattagcacctatcttttagagttctttgaagatgtagtgaaatgaagggcttag

SEQ ID NO: 865087 - DNA, 120 bp, Artificial Sequence
  ENSG00000203930_226 (sequence is synthesized)
cccagtgcttagaatgtcatagatgttgctgcttattgctgttatcttttggttttggtacaaagtgcttagctagataggatttggtttttgtggtcaaactgcatgattatatcatag

SEQ ID NO: 865088 - DNA, 120 bp, Artificial Sequence
  ENSG00000203930_227 (sequence is synthesized)
agatgtattaatcaactttttttgtaaaggtattaataaagaataatttattaatgtaatatagattacatccacaaacaaggtcatttctgaaattctcagcggtgataagggattatt

SEQ ID NO: 865089 - DNA, 120 bp, Artificial Sequence
  ENSG00000203930_228 (sequence is synthesized)
actgtctctggcaaatggaaagacctgaaacaaatatttcctgctagtgtggtttgttgttattactgtcgttagtattcttttcctcttttcaggaggagatggaagattgagagcaga

SEQ ID NO: 865090 - DNA, 120 bp, Artificial Sequence
  ENSG00000277352_0 (sequence is synthesized)
ccagagaagctgcaagaagctttgctggaatcaggttttgcatctccgaatcggagctccatttgttgggtcggggaccatgcttagtggttcaagaactgacagaagaggtgtttgcaa

SEQ ID NO: 865091 - DNA, 120 bp, Artificial Sequence
  ENSG00000277352_1 (sequence is synthesized)
aatgcttgttgggaggataaacagctaaaggaaattttatctgagcctgagaaccgcctgcaccagcacaaaagtaaagccccagcgccctcgggccaggcctgctggaaaaattcccat

SEQ ID NO: 865092 - DNA, 120 bp, Artificial Sequence
  ENSG00000277352_2 (sequence is synthesized)
aacgcaggaaatggccctgctcttctgctggcccctcttccaccatcgaggccgctcatccaagcggcgggaagtaagagggtcaacttttgcacggccattgagaggtttcctggaaac

SEQ ID NO: 865093 - DNA, 120 bp, Artificial Sequence
  ENSG00000277352_3 (sequence is synthesized)
ctggctctctccccaccgttgccccatgagcatggtggtgacgagcttgggctctgagatcagaaagtctcaagtgtgaaacctcagtcttcttccttattagctgtgagactttgggca

SEQ ID NO: 865094 - DNA, 120 bp, Artificial Sequence
  ENSG00000277352_4 (sequence is synthesized)
aattacttaacctctctgaaccttagtttcctcaaactgtaaaatggggcaaatgttgggtgacactcagcataacgtcagaaatagtgcccaataaatgttgatctcatcggccccaca

SEQ ID NO: 865095 - DNA, 120 bp, Artificial Sequence
  ENSG00000277350_0 (sequence is synthesized)
gcaacagggccataacatcaacactcttggtaattgcattggtaccaaaacttatctgtgacaatatcttgaacattaatgcctttaagagaaatgcccttaaaaatacctttagcaagc

SEQ ID NO: 865096 - DNA, 120 bp, Artificial Sequence
  ENSG00000277350_1 (sequence is synthesized)
atttccttagcaaacacgctcctagcaacagagagtaagttttgtaagggcatgtgaatacaaaggcagagactggagtgatgccaagaaatgtgaaagatttccaggaaccatcagaag

SEQ ID NO: 865097 - DNA, 120 bp, Artificial Sequence
  ENSG00000277350_2 (sequence is synthesized)
caaggaaaaacgcatggaaaagattcagagtgctcagaaggaagcaaccctaccaccacctgatttggacttctaagctccagaactagccctggctgtgttcactgaatggatctagtc

SEQ ID NO: 865098 - DNA, 80 bp, Artificial Sequence
  ENSG00000277350_3 (sequence is synthesized)
gggaagattacgaggtcaagagatcaagactatcctgggcaacatgatgaaatgctgtctctactaaaaacacaaaaaat

SEQ ID NO: 865099 - DNA, 75 bp, Artificial Sequence
  ENSG00000277350_4 (sequence is synthesized)
agattacgaggtcaagagatcaagactatcctgggcaacatgatgaaatcgagcctgtagtcccagctactcagg

SEQ ID NO: 865100 - DNA, 120 bp, Artificial Sequence
  ENSG00000277350_5 (sequence is synthesized)
gaaaaaaaaaaaatttcagggatatttatgtagtgacctgttatttaatttttcaataatataaatctgtttcaagaaaaagaaattttaaacaaactcttatgattttctttctcctga

SEQ ID NO: 865101 - DNA, 120 bp, Artificial Sequence
  ENSG00000277350_6 (sequence is synthesized)
ctgaaaattattccagaacttaaaaaaaaggagaaacaaaacagagtaagtacattagctttattcaacataccatcttgtctagtagtaaactactaaaaacagtctcctgagtggaaa

SEQ ID NO: 865102 - DNA, 120 bp, Artificial Sequence
  ENSG00000277350_7 (sequence is synthesized)
aaatataaatttttgtctatagcatcagtgttgtcctgcgtgttttcattattttctccaaataaattggctcaatatgctgctaagtattaccatttatgtttattttgaagttctata

SEQ ID NO: 865103 - DNA, 120 bp, Artificial Sequence
  ENSG00000277350_8 (sequence is synthesized)
tcttgtctttcctgtttcatctgtaaacaggcaattattgcctcagtgtgtattctgatacattttctctctaaatctattgtccaacatcttgcatataaaatctggcttttctctcat

SEQ ID NO: 865104 - DNA, 120 bp, Artificial Sequence
  ENSG00000277350_9 (sequence is synthesized)
atatcaaaatcacaggtcacatagtctcagtgccaagagttataagaacaactgctttatttcactcccatctctgtgaatacaaaacttcaatctctaaagtattttgtatctatttat

SEQ ID NO: 865105 - DNA, 120 bp, Artificial Sequence
  ENSG00000277350_10 (sequence is synthesized)
aacactatgttcctggtttattattatattatttcattattagttcttaaaaacttaacaaggtgctgaataattttgtgaaatattccatggagaactaccattaaaatagtgattact

SEQ ID NO: 865106 - DNA, 79 bp, Artificial Sequence
  ENSG00000277350_11 (sequence is synthesized)
ccttccccatatcagtttggtacacaggtaaacttgtgtcatggaggtttgttgtacagattgtttcatcatccagagt

SEQ ID NO: 865107 - DNA, 120 bp, Artificial Sequence
  ENSG00000277350_12 (sequence is synthesized)
catggaggtttgttgtacagattgtttcatcatccagagtgctgaaagagtgagccaggacagcctttcgacattgaacaaggcaattcccaatctcttgagccctggctgtgttcactg

SEQ ID NO: 865108 - DNA, 120 bp, Artificial Sequence
  ENSG00000277351_0 (sequence is synthesized)
gacaaaaacgacccgaacgaacccaggagcacgtggagcctggaggggcagagactggaagtgggagtgactcaaatatttattaaaagccatcgcatgtgtggaggagcactgttctgg

SEQ ID NO: 865109 - DNA, 120 bp, Artificial Sequence
  ENSG00000277351_1 (sequence is synthesized)
gagtgaggaggactgagccactggcgagttctgggacccttgcaaaggacatctcgggtcttcgcctgcctgttcagcgtccgcacctggcttctacgagcccacagcgcgcccacgcgt

SEQ ID NO: 865110 - DNA, 120 bp, Artificial Sequence
  ENSG00000277351_2 (sequence is synthesized)
tcccttgggtgtcatgcggtagccaatcacaggcctgtgtttccccacatgtcaaaggctgggcctatcacgcctctctcctggggattggcacgcctacgacacagagaggagaaaagg

SEQ ID NO: 865111 - DNA, 120 bp, Artificial Sequence
  ENSG00000277351_3 (sequence is synthesized)
gaaaagtgccggagggaaaggcagctgccggctcctgatgctgagagggcaccccctgccccgaccccgagagctttttttttctttttcttttttttttggacaagttagcagaattgg

SEQ ID NO: 865112 - DNA, 120 bp, Artificial Sequence
  ENSG00000277351_4 (sequence is synthesized)
tttctgttatttgcaagggaagaacttgaatccatgctctctggataaatcccttacttcgtgtaggcctatttccatcccaactattaataataaactgaacctcagtcaatctcaaaa

SEQ ID NO: 865113 - DNA, 120 bp, Artificial Sequence
  ENSG00000274918_0 (sequence is synthesized)
gccattttgatcatgtgacatgtatgttaccatgattccttactgcatctgcccactctgcattccatcctgcacatgtagtgatgctcacctacctcatgaattatgcatgtcatcctc

SEQ ID NO: 865114 - DNA, 120 bp, Artificial Sequence
  ENSG00000274918_1 (sequence is synthesized)
gttaagacaccgtgatgcagtctcctcagggactcagccagagaaccctttttcctgtgctgtttcccttatgcccaacatttctgggcataaatcttaataaaacttaatctcagaaaa

SEQ ID NO: 865115 - DNA, 120 bp, Artificial Sequence
  ENSG00000283286_0 (sequence is synthesized)
gcttccactcaatgccaacagcagtgctgcaagcatctcagcctctatccaccgccaaacaggtcatctggcacagactattaaatgactagcacttcccgttctcagggtgatgtatct

SEQ ID NO: 865116 - DNA, 120 bp, Artificial Sequence
  ENSG00000283286_1 (sequence is synthesized)
gcttcctgatggtgttggctctgactatcttcctacttccacccagtggctccagctgtggctgccaagaaaaccccagctgatggaggatgagaggtgaaatcaggacacacaaagacc

SEQ ID NO: 865117 - DNA, 120 bp, Artificial Sequence
  ENSG00000283286_2 (sequence is synthesized)
tgttaccatcatctttcacctggattctcctaaagcaacagctgctcatctcatcactctgagttactaatccttctttctgagacaaaagcccaaaaggcaaatgggaaatgacttgtc

SEQ ID NO: 865118 - DNA, 120 bp, Artificial Sequence
  ENSG00000283286_3 (sequence is synthesized)
agatgacatcaccaataattgaacataaagcagactcaaattaggacaaaatcttttgtatttactcagtttatatcagtaatatgattatctcaaagttctaacaaagcagtctgccac

SEQ ID NO: 865119 - DNA, 120 bp, Artificial Sequence
  ENSG00000283286_4 (sequence is synthesized)
aaggggtaacaaaaaacatagtcactgatttgtcccagagcatctccagctgggacaacttattctaccatctctgctctgcccagacgaccacacacattgccttgcctagggaaaggg

SEQ ID NO: 865120 - DNA, 120 bp, Artificial Sequence
  ENSG00000283286_5 (sequence is synthesized)
gcagggaaatgatgcaggctttactgttccattgacccttgcagctaatccaaagggacataaaaatctctcatttcagacttttatgacatagcgtagccctccctggagataagtagg

SEQ ID NO: 865121 - DNA, 120 bp, Artificial Sequence
  ENSG00000283286_6 (sequence is synthesized)
acagccccagctgacccaatgtactttctctttagcctctcaacccttcttcctttggttgttcatgacaacctgagttttcagggaatttcaaattgatgatgacaagctgtttgtcct

SEQ ID NO: 865122 - DNA, 120 bp, Artificial Sequence
  ENSG00000283286_7 (sequence is synthesized)
gtctcaatctgctgaagatgtttaaaataaggagctatagtgaacagagagttgaaaaaaaaattctttggggtggatgacacattgacccaaaccattctgatcacacacaactctaag

SEQ ID NO: 865123 - DNA, 120 bp, Artificial Sequence
  ENSG00000283286_8 (sequence is synthesized)
ctcctatttggtggatgacattaaatgctgaaaaggtttggagtgcacatatattagctacttttcacagcctgtgtacaaaaagtcccatgccctactctgccatacatgttgactgac

SEQ ID NO: 865124 - DNA, 120 bp, Artificial Sequence
  ENSG00000283286_9 (sequence is synthesized)
tagcttcattagcaaggaagaacaaaatagtcaatgcaatctttttctgtgagttcagtgaagtcctagatctccttttggtgtcaaaccatcaccttccatgaaaggtttttgtgaggt

SEQ ID NO: 865125 - DNA, 120 bp, Artificial Sequence
  ENSG00000283286_10 (sequence is synthesized)
ggacacaattttcagaaggtagggtccaggttctctgacattagtgttaacctacttgaaatcttcctacttaatggctagacacagtattacttaggaattaagcttcaagcaacattc

SEQ ID NO: 865126 - DNA, 120 bp, Artificial Sequence
  ENSG00000283286_11 (sequence is synthesized)
ttaaagaacaggttatagaatttattatttgttagaatttctttatgcaaaagtgggaagtatctttaaaaatattttagccaaactacatgtcttgaataactttaatgttatcaatgt

SEQ ID NO: 865127 - DNA, 120 bp, Artificial Sequence
  ENSG00000283286_12 (sequence is synthesized)
gagcctgtttctagtatccatcatgttacctagccacaaatgtcacaaattaaagaaatatatctgacattcattatgctaaccaactgtctggtgttgatcctcgtatggatagctgaa

SEQ ID NO: 865128 - DNA, 120 bp, Artificial Sequence
  ENSG00000204666_0 (sequence is synthesized)
acaggctgccgtcagattctcaagcccctattcctctcggtggcctaaatccccaactgctcggggccacttttcaggccaaaatgggcccaaaatggggagggcaagtgatgaatgtca

SEQ ID NO: 865129 - DNA, 120 bp, Artificial Sequence
  ENSG00000204666_1 (sequence is synthesized)
ctagacagtggggccctcaaggacctggcaaatgggggcttggacctcggatcggcctcccacgcgaagcttgctccccaccagcatccccacgttggtggcgacgctgccccggcccca

SEQ ID NO: 865130 - DNA, 120 bp, Artificial Sequence
  ENSG00000204666_2 (sequence is synthesized)
cggatacttccgcgcctgtcagactccctgatgaactacccttcccagagtaccgcgggagctcgggctcctgagggcgacggtcctctgatggcagatgcgggagaaactctggcgtca

SEQ ID NO: 865131 - DNA, 120 bp, Artificial Sequence
  ENSG00000204666_3 (sequence is synthesized)
ggcggccctcgcgtggagcacacgaagtcgtggcttattctggcttcagtatgtggggtggagaaggcgatccacgcagctgcgtctatttcctgtggatcaatcgcaaaatacgttctg

SEQ ID NO: 865132 - DNA, 120 bp, Artificial Sequence
  ENSG00000204666_4 (sequence is synthesized)
taagccccgcccccactgcgtgcgggcggcttttgtctccacggcaaccgtcaactctggaaacgcctgtctttctccatggcaactgtctacgccgcaggctggagctgcccattaccg

SEQ ID NO: 865133 - DNA, 120 bp, Artificial Sequence
  ENSG00000204666_5 (sequence is synthesized)
gagcccatatggcaatgacccttggccagtctctgggaactaaactcctgggatgtttacacaggtgctgggtaagatgttcttccatatgctcaagaccacgggtcaagatgtactagg

SEQ ID NO: 865134 - DNA, 120 bp, Artificial Sequence
  ENSG00000204666_6 (sequence is synthesized)
gatgaaaaaaatcaaagcacagagaggctaagtgacttgcccaaggccacacagccaggaagcaatcagctgggatttgaacccacacaacccgactcccgagcccacgatgatcacccg

SEQ ID NO: 865135 - DNA, 120 bp, Artificial Sequence
  ENSG00000204666_7 (sequence is synthesized)
tgtgttccactgcctcacccctgagtgaacctcactgaccatgagagatggggtaggaagagggctcacacctgctggatatcctcacccacctgggcaggtaactcgccgggcctctct

SEQ ID NO: 865136 - DNA, 120 bp, Artificial Sequence
  ENSG00000204666_8 (sequence is synthesized)
ctcctgcctcagctcttcccctcgatccacacgggagatcacgtcggatttggacccaggcagccctgcccctggggaaagatacaagagttggctgtgggtgccagaatcacagggagg

SEQ ID NO: 865137 - DNA, 120 bp, Artificial Sequence
  ENSG00000204666_9 (sequence is synthesized)
tctacagggaaggtgcacgcactgagcgcctaatgattggacgtacaaatggccaacgccaagacttatttgttgtgtgcttagcacactgcagagaggctgagccaacttatttgttga

SEQ ID NO: 865138 - DNA, 120 bp, Artificial Sequence
  ENSG00000204666_10 (sequence is synthesized)
gtgcttaggacactgcagagaggctgagctctgacaaagctgtttaaggctccgcgtctgtgctgttcgagttaactgcactgtgacagtataagaaacatcgtcttctgtgtttcgaag

SEQ ID NO: 865139 - DNA, 120 bp, Artificial Sequence
  ENSG00000204666_11 (sequence is synthesized)
acttactaaagaaaaaaacagtaaaatctctcaatcatttgttaattgattattatttcagtgtgtcaagatgataagattttagatagcttgaggtgaataaaatgtattattaaaatt

SEQ ID NO: 865140 - DNA, 120 bp, Artificial Sequence
  ENSG00000255558_0 (sequence is synthesized)
caccgactcacccagaacaacttccagtcctgcaagctgcattcataagttctctaccttggcaaatggcaccaccatccatctgactggaccaagcacaagcttgagagccacgcttga

SEQ ID NO: 865141 - DNA, 120 bp, Artificial Sequence
  ENSG00000255558_1 (sequence is synthesized)
atccgctacctcctggctgactgagggcggatgtgttagataaatctgagaactcaaagaagcgcagaggttctattctgcaacccagtaaagatgaagaggaggaagctaattcccagg

SEQ ID NO: 865142 - DNA, 120 bp, Artificial Sequence
  ENSG00000255558_2 (sequence is synthesized)
tgcctacactgagctgacagacagatgcctctccctggtagctccagcacagtaaagcagaggcagactccaaggctccctttgctgagttgcctttgcttccagtgaaggagaacccaa

SEQ ID NO: 865143 - DNA, 120 bp, Artificial Sequence
  ENSG00000255555_0 (sequence is synthesized)
aggactttcctaatttttctacaatgagcatggcttttgaaatttaaaaaaagatgagaagactttggccaagatagattaagtaactggcccaagattacatggccagcaagtggcaga

SEQ ID NO: 865144 - DNA, 120 bp, Artificial Sequence
  ENSG00000255555_1 (sequence is synthesized)
acaataaattagaataaattaaccgttccaagcagaggattttagacttcatgcaacatgacagtacttctcaaagttgttcagggaataaaacactcagagaactcttattaatatgtt

SEQ ID NO: 865145 - DNA, 120 bp, Artificial Sequence
  ENSG00000255555_2 (sequence is synthesized)
taatttcatcaaccagattcagcaaaatcaccaacagaaaacaagactatgatacatgtggacaaaaagaatcacagatataaatatcctgtgctttctcaataaatgatgctgccttac

SEQ ID NO: 865146 - DNA, 120 bp, Artificial Sequence
  ENSG00000255557_0 (sequence is synthesized)
atctctccattaggatttggttgatgtcttctcctaattagatggtcggtatttctggcaagaatgtcacgcgacactggggacctacagtgctaccattgtcctcctacctgaaagcct

SEQ ID NO: 865147 - DNA, 120 bp, Artificial Sequence
  ENSG00000255557_1 (sequence is synthesized)
agtaaaggctgccccgctgtcgctttgcctcaggaccaagagctctaagaggaagactgaccctgactgtccaccgagaagctgttgctgccatacaacggagacaaggagtccatcgta

SEQ ID NO: 865148 - DNA, 120 bp, Artificial Sequence
  ENSG00000255557_2 (sequence is synthesized)
tccaggggatcccctgaaatatctctgaggattgccaggttcagtgacagtgttaatgaaagcctcaagtgactcaatacaagcagaataaccaaggactcagacccttcaggaatgaag

SEQ ID NO: 865149 - DNA, 120 bp, Artificial Sequence
  ENSG00000255553_0 (sequence is synthesized)
cctcctgcacgtgagtgatgcacctggatgctgcataaggagagatggaaatacctaaggtgtggtccttacttccaaggggcttatagcagaacgaagactcgaaagcaagcacaccca

SEQ ID NO: 865150 - DNA, 120 bp, Artificial Sequence
  ENSG00000255553_1 (sequence is synthesized)
caaccacaacacagccgctggcacacacagcaggaaagacaccgggtttaatggagcagagaaagggggcgtcatctccaggcacagctccatgaagaagatgacattgacctgggagct

SEQ ID NO: 865151 - DNA, 120 bp, Artificial Sequence
  ENSG00000255553_2 (sequence is synthesized)
ctgagccttcatataatgagtaagctttcagctggaagaaatcccaagtggagaaacaggaagctataaaagagcaatggttttggattcacaaaacctgcctgagtgaacctggggatc

SEQ ID NO: 865152 - DNA, 120 bp, Artificial Sequence
  ENSG00000255553_3 (sequence is synthesized)
atggctgtctacaagtggcaccccaaacagcaacacaatcaggcgcacaacaagtggcgtctgaacacaggacttcaaggatgtgagcgaagaaggtctgctggagcagaggaactgaaa

SEQ ID NO: 865153 - DNA, 120 bp, Artificial Sequence
  ENSG00000255553_4 (sequence is synthesized)
ttgacaaggcaaacacggaccccggaacgagtctgccagcagcagatataaggagatggataagccgtgtgggtgccctcaaggtgtgtgcgaccatggaacgggagacttgaggagccc

SEQ ID NO: 865154 - DNA, 120 bp, Artificial Sequence
  ENSG00000255553_5 (sequence is synthesized)
agggtggccaaccatgggcccggtccctccggtacgagccgtgagccagctgagcctgagtgcaaagacagagagaagtccgaccagagcccaatgacatcaacccccataagctgggga

SEQ ID NO: 865155 - DNA, 120 bp, Artificial Sequence
  ENSG00000255553_6 (sequence is synthesized)
caactcaagaaaaccatgcaggaagctgagaaactactgtagcatcagggacaggccagaacccctgattccatgttcttggccatgttagccataatgtccaatgtgatatgttttccc

SEQ ID NO: 865156 - DNA, 120 bp, Artificial Sequence
  ENSG00000255553_7 (sequence is synthesized)
tgtgcagaggcaaaaacatattgggcatatgttcccaatcccccagtagtatgacctattctttggagtgacactcctcctgagctttatcatgatcagggagagtgggctccaggactc

SEQ ID NO: 865157 - DNA, 120 bp, Artificial Sequence
  ENSG00000255553_8 (sequence is synthesized)
ctgactccccctgacatagaacagttagactctcagaataatgtcattaattatactgctccactggaaggacttcctttgtgtatcaccacaaagacatcgctcagccatagctgtctt

SEQ ID NO: 865158 - DNA, 120 bp, Artificial Sequence
  ENSG00000255553_9 (sequence is synthesized)
aaattcaagctcaaacatggttgagtcactatgaaaaagtcatgcacctgttaagtcttggttctattaacgtaactggtgtgctaaccaaccattcctggcccaatcaccctaattgtg

SEQ ID NO: 865159 - DNA, 120 bp, Artificial Sequence
  ENSG00000255553_10 (sequence is synthesized)
ctgattatacggaatgggttccattcagtatttcctacccccatctatggacccagtgtcttggtccactggctagaaaacaatctatgttaactggagacattgtggattggggaccta

SEQ ID NO: 865160 - DNA, 120 bp, Artificial Sequence
  ENSG00000255553_11 (sequence is synthesized)
aagatcaattagatggaaaagatgaaaatcagaaatcatggcacaaacttcgctggcattggtggcaagcttttaatgcttcttctttatacaatactgggatccaatcccagtctgcta

SEQ ID NO: 865161 - DNA, 120 bp, Artificial Sequence
  ENSG00000255553_12 (sequence is synthesized)
agggaggaaaggaccaattaaagagatgatgtggaaggcagcactcccatttacgaatcgcagcatctggattaggatactatccaataatagcaatagtaagcaatgcagtctaatgtt

SEQ ID NO: 865162 - DNA, 120 bp, Artificial Sequence
  ENSG00000255553_13 (sequence is synthesized)
acatttgtaaagatatcaccactcaatttacagtttgtgtgtttaatccttatgtctttttggcagctaagaaggaccagttccaggtaaacaataccgaattaacctgtaaatcttgcc

SEQ ID NO: 865163 - DNA, 120 bp, Artificial Sequence
  ENSG00000255553_14 (sequence is synthesized)
agttatataactgcattcatcatagcacatggcaaacacataatctctctactttgatgattttaggttgcatccctgggtgatggattcctgttaatctgtctgagccttgggctgcca

SEQ ID NO: 865164 - DNA, 120 bp, Artificial Sequence
  ENSG00000255553_15 (sequence is synthesized)
cacctgcctggcattttgtgaaacttcttctaactcagcttactcattgtgtctgtagagccttaggcatgataatttttgctatcgtttccttggtcacactaataacttttgtcgtga

SEQ ID NO: 865165 - DNA, 120 bp, Artificial Sequence
  ENSG00000255553_16 (sequence is synthesized)
ataacttttgtcgtgatgtcttctgtagctttgcataattctattcaaacagctcagtacgtggagaactggacgcacacagccaaacaagtgtggctacttcagaataaaattaacact

SEQ ID NO: 865166 - DNA, 120 bp, Artificial Sequence
  ENSG00000255553_17 (sequence is synthesized)
tggcaatgttaaaatccatggttctatggttaggagaacaagtacaaaacttgcagttgcaacagcaattgcgttatcattttaataacactcatatttgtgtaaacaacttagaatata

SEQ ID NO: 865167 - DNA, 90 bp, Artificial Sequence
  ENSG00000255553_18 (sequence is synthesized)
ataacactcatatttgtgtaaagtgggaccttgcgaaagcccatttgcagggagcgttcacatccaacatcacctttgatattggtgaat

SEQ ID NO: 865168 - DNA, 120 bp, Artificial Sequence
  ENSG00000255553_19 (sequence is synthesized)
aagaatttcagccttctttagaagactggactgaattccagcaaggcctggagagcctcaacccttggacctatctaaggcaccacattaccatcttatatgcagttcttggaataatgt

SEQ ID NO: 865169 - DNA, 120 bp, Artificial Sequence
  ENSG00000255553_20 (sequence is synthesized)
ggttttgtctctgtcttctgttcatagtctgtaaaattggatggaccgccaattggaaaatgagagctgcccagcctggccttacattctttcaattaatacataaacagaaaaggggag

SEQ ID NO: 865170 - DNA, 88 bp, Artificial Sequence
  ENSG00000255553_21 (sequence is synthesized)
cttacattctttcaattaatacataaacagaaaaggggagatgttgggtgctgaaaaggccaaagggatgtgatcaaacagcaaactg

SEQ ID NO: 865171 - DNA, 120 bp, Artificial Sequence
  ENSG00000255553_22 (sequence is synthesized)
cctgccgccaggaggcttgctgagggtcatcattccgtggcaccgggctccttaaagttatctactggtaaatctagcacctattgttcaaaggatgcagtcttgcaagcttgctgtgaa

SEQ ID NO: 865172 - DNA, 120 bp, Artificial Sequence
  ENSG00000255553_23 (sequence is synthesized)
tcaaactgccggctgacaaccatccccccttcttgttatctcttttaccaataaatacggagggctgtgtaaagcttggggcccttgtccactagaggcaagatgccccctgacccattc

SEQ ID NO: 865173 - DNA, 120 bp, Artificial Sequence
  ENSG00000255553_24 (sequence is synthesized)
cccggggaatgcaacagctgattcacctgctccacgctgattaataatcaaactaccattgtgtggggcctatcttcctactggacctcaaaacccacctactccacaagtttatcttca

SEQ ID NO: 865174 - DNA, 120 bp, Artificial Sequence
  ENSG00000255553_25 (sequence is synthesized)
aagcaccatccttgaaactgagagcaagccctcatcagtcagtgaatctgctgatgccatgttcttggaattcccagcttccagaactgtgagcaataaatgtacatagattgcaaatta

SEQ ID NO: 865175 - DNA, 120 bp, Artificial Sequence
  ENSG00000243069_0 (sequence is synthesized)
agatatgttcctgacccttccttcttgaagggacagctgtgtaaccattcaaccatctggccatcagtttccacatctgtgaaatcaacttctgcctcatggagccgtgagttcccaagg

SEQ ID NO: 865176 - DNA, 120 bp, Artificial Sequence
  ENSG00000243069_1 (sequence is synthesized)
aaatgctgagttaatgtgacccagcttgttcaaggagcagccaggataccagccagccgcagaggcctgaggaaagcaaaaggaaaccaacttgaggccacatgactgaatgacagtcca

SEQ ID NO: 865177 - DNA, 120 bp, Artificial Sequence
  ENSG00000243069_2 (sequence is synthesized)
ttgacagaaattccagtgagaagtttatgatacaactgcaacccagtgagtgtgatgaccatgagaatggagtggagagtacaaaaataacagcatttagttgcagattagaaacagatg

SEQ ID NO: 865178 - DNA, 120 bp, Artificial Sequence
  ENSG00000243069_3 (sequence is synthesized)
tgaagggcgaaaaagcaccatagggaaggacataagaggtccctggagtcagacttgggagatgtgagttttatcagttttgccattaggtagttgtgtgcacccttgggcatatagcac

SEQ ID NO: 865179 - DNA, 120 bp, Artificial Sequence
  ENSG00000243069_4 (sequence is synthesized)
ttttttggtaattctattttcgcacttttcaaatgagatgcaattagattagagactgtaaagtaaaagctgccatgcttcatttttttaaaccaataaagcattttataggagtttgaa

SEQ ID NO: 865180 - DNA, 120 bp, Artificial Sequence
  ENSG00000243069_5 (sequence is synthesized)
agtctgatgtgtcacaacccaacagggtggggctttatctctttttcaattgattacatgaaataattgtattaaatagaaaatataaaggtataaatgccttgatatttatttcttatc

SEQ ID NO: 865181 - DNA, 120 bp, Artificial Sequence
  ENSG00000243069_6 (sequence is synthesized)
agtccttatattccttagtagatctctatttaaagctctaaaattatttatcttctcctcccctgatacttcttttcagtctaaactctccaaattttgtgaatgtgaagaaacttacaa

SEQ ID NO: 865182 - DNA, 120 bp, Artificial Sequence
  ENSG00000243069_7 (sequence is synthesized)
aattttgtgaatgtgaagaaacttacaaactctgaatatttctgaaaacaatcttctattgtaaaagtaatatgatcccattaaacaaaatttgtaaaaaaaaaaaaaaagaaaagaaaa

SEQ ID NO: 865183 - DNA, 120 bp, Artificial Sequence
  ENSG00000243069_8 (sequence is synthesized)
ataaactgatacaaatgaatataatactgctttggtattttctctccatattttcttttacaaagcctagttatgattatattaagcactttacctcaggtaaagcactcagcttcccct

SEQ ID NO: 865184 - DNA, 120 bp, Artificial Sequence
  ENSG00000243069_9 (sequence is synthesized)
cgattctagcatttggcatctgagggccatgatctttggtagccatttttttatacttcaggagtttatatgccagaatcaggctgtcaaataggtccatattaatacctgttaaattct

SEQ ID NO: 865185 - DNA, 120 bp, Artificial Sequence
  ENSG00000243069_10 (sequence is synthesized)
gaaagttcagggacaaacttttaatctatccttagcaaaaagtgataaacttggaggtgctaagtaaataaaatgtcttaataaaattccattacaatgttcacatgtaccattctgata

SEQ ID NO: 865186 - DNA, 120 bp, Artificial Sequence
  ENSG00000243069_11 (sequence is synthesized)
ctgtatatttgcccttacagtcttgtctgcatagcaggatgctgtgccaaatcatctcagcaaaaggtctctacatcacgatgtaggcaaagacattagagtgggtgaagagaacctctt

SEQ ID NO: 865187 - DNA, 120 bp, Artificial Sequence
  ENSG00000243069_12 (sequence is synthesized)
attaccttttctgggcccaattttctcataatgaacctgcacaagatgatctctaaggtactgcatttcctggacacgatcttaattttcttaatacctccaccgacatttcaaatagcg

SEQ ID NO: 865188 - DNA, 120 bp, Artificial Sequence
  ENSG00000243069_13 (sequence is synthesized)
ggtggaggttgcagtgagccgaggtcgcgccactgcattccagcctgggcaacagcatgacactcccgtctcaaaaaattataataataataattaaatggcaccataaagaataaaaag

SEQ ID NO: 865189 - DNA, 120 bp, Artificial Sequence
  ENSG00000243069_14 (sequence is synthesized)
cataaagaataaaaagacaagcaacagaatgggacaaaatgtttgcgaaagactagtatttaaaattacgtgaagaactcattacaatcaattagaaaaacggacaaaacacttgagtac

SEQ ID NO: 865190 - DNA, 120 bp, Artificial Sequence
  ENSG00000243069_15 (sequence is synthesized)
acacttcaggcctggctgtggatcaagagtaaattctgctgcagtggggattctaaagcatctgggaagaaaggggctgcagaaacatgtgagtcctccaactacagaatccatggaggc

SEQ ID NO: 865191 - DNA, 120 bp, Artificial Sequence
  ENSG00000243069_16 (sequence is synthesized)
tcttgctgcttctcctgctgagtgtctttggctcagttattcttgaaccacaccagaacttgcactcaactcaggatatgttcctgacccttccttcttgaagggacagctgtgtaacca

SEQ ID NO: 865192 - DNA, 120 bp, Artificial Sequence
  ENSG00000243069_17 (sequence is synthesized)
ttcaaccatctggccatcagtttccacatctgtgaaatcaacttctgcctcatggagccgtgagttcccaagcagtgaaggcagtgaggggctgtggtgtgatccaggaggctgagaatt

SEQ ID NO: 865193 - DNA, 120 bp, Artificial Sequence
  ENSG00000243069_18 (sequence is synthesized)
atgcagtgggtgctgtcaccttgaagacatcagcgtgatcaggcagatcatcatggtactgcatttcctggacacgatcttaattttcttaatacctccaccgacatttcaaatagcgtc

SEQ ID NO: 865194 - DNA, 120 bp, Artificial Sequence
  ENSG00000243069_19 (sequence is synthesized)
ggccccgcccagatccgcctccatcgcagccagaagcaagaagctgtcttcccgcccccgcgtgcctacaatcagccccagtctccctgggaaaccgacgagcgcacctgagctgggttc

SEQ ID NO: 865195 - DNA, 120 bp, Artificial Sequence
  ENSG00000243069_20 (sequence is synthesized)
tgagctccagcgttttggggctagaagttgcggactagtagctgaggcggcacgggagtgtaggcgcgcggggtcgttgccgggggcacagagtgagaacaagcaagggagccctgctga

SEQ ID NO: 865196 - DNA, 120 bp, Artificial Sequence
  ENSG00000243069_21 (sequence is synthesized)
cttttgtgaagcagaagaagggaaattgttaaagggaatattttaactaaatttatttccataaaactatctttgtctttatatctcatggaaagtgttaggtagcctcaggattatatc

SEQ ID NO: 865197 - DNA, 120 bp, Artificial Sequence
  ENSG00000243069_22 (sequence is synthesized)
tccgttggaaaactgtagatgtaaaccttcttgctatctacatacttacatatttttctgttgttatttacttatgaatagcattttgattatagcagaaataaaatacattaaatgact

SEQ ID NO: 865198 - DNA, 120 bp, Artificial Sequence
  ENSG00000243069_23 (sequence is synthesized)
aagctcagaaataagaaaaaaaggtcaatggtgatcatttatttggaaactatgatattttaatgatattaatggtgtaattgacatttagttaaacatatttcatcgtaagtagagcac

SEQ ID NO: 865199 - DNA, 120 bp, Artificial Sequence
  ENSG00000243069_24 (sequence is synthesized)
tttaactcttacggtccacttaaaatgtaatcatacgtttatgtatttctagttaatgtatcaaactcaactgagtaatcaatgtacatcatttattttgctcctaagttaatacactaa

SEQ ID NO: 865200 - DNA, 120 bp, Artificial Sequence
  ENSG00000243069_25 (sequence is synthesized)
gttatgctttaaaattactaatttgctgcaatatccaatactctcttttaagtcttacgtctgcagaaaaggatataaacatttcatgacaccaaacccaagtatttttgatgcccttgg

SEQ ID NO: 865201 - DNA, 120 bp, Artificial Sequence
  ENSG00000243069_26 (sequence is synthesized)
cagtgtcagttgaacagacagtgtcatttaatgtttgagacagcatctgaattccttttattcttaaaattctattttaaaatgcagtttttggaaagttaatgtgaatagaaaaatttc

SEQ ID NO: 865202 - DNA, 120 bp, Artificial Sequence
  ENSG00000243069_27 (sequence is synthesized)
gcttagcatctcaaatctgaaaattcgaaatctgaaatgtttctaaaattcaactcttttgagtgctgatatgactttcaaaggaaaagctcattggagcatttcagattttggattttt

SEQ ID NO: 865203 - DNA, 120 bp, Artificial Sequence
  ENSG00000243069_28 (sequence is synthesized)
ggatttgggatgtttaaccagggtaaaatatagaatgcaaatattccaaaatctgaataaaattgaaatctgaaatgcttatggttccaagcattttggataagggataattaagctgta

SEQ ID NO: 865204 - DNA, 120 bp, Artificial Sequence
  ENSG00000243069_29 (sequence is synthesized)
taacttataaaactgaatataacaaaatttcccaacatgtggaaaatgatgtcttttttcaaaaatgtcaatagcagatacatggtacagtaagttaggggaaaaaatgaggtttcatat

SEQ ID NO: 865205 - DNA, 120 bp, Artificial Sequence
  ENSG00000243069_30 (sequence is synthesized)
cttctagtttcctaattaaaaggagcccattctgggttggaagaaagtgtcagtaagatcatttctcctatttgaaaatcatacaaagcttgtcagagtgactcaggccaggagtgtagc

SEQ ID NO: 865206 - DNA, 120 bp, Artificial Sequence
  ENSG00000243069_31 (sequence is synthesized)
tgggcgtgtagctaaatgatatctccccacatctatataataagctgttacctgctttaaaaggaaaagctctcagcatgactctaatgttgcatttctggaatacagcttgaaaagctc

SEQ ID NO: 865207 - DNA, 120 bp, Artificial Sequence
  ENSG00000243069_32 (sequence is synthesized)
ttctcagggttgaacagagcatgaaggtaatggttattatctactcacattaaaaaaaaaaaaaaagaaagaaaccaccacagaaaactacttactgtctttaggctctactttcaaaag

SEQ ID NO: 865208 - DNA, 120 bp, Artificial Sequence
  ENSG00000243069_33 (sequence is synthesized)
cacaccatggaatactatgcagccataataaaagatgagttcatgtcctttgcaaggacatggacaaagctggaaaccatcattctcagcaaacaagaacagaaaatcaaacactgcatg

SEQ ID NO: 865209 - DNA, 90 bp, Artificial Sequence
  ENSG00000243069_34 (sequence is synthesized)
tggacaaagctggaaaccatcattctcagcaaacaagtctaagtgggagctgaacaatgagaaaacatggacacagagaggggaacatca

SEQ ID NO: 865210 - DNA, 120 bp, Artificial Sequence
  ENSG00000243069_35 (sequence is synthesized)
gcagcttaggaagccctgaatcctggaggctctcgtgtgtattatctgattggaaagtctttacagctcactgacagcagtgaaggcagtgaggggctgtggtgtgatccaggaggctga

SEQ ID NO: 865211 - DNA, 82 bp, Artificial Sequence
  ENSG00000243069_36 (sequence is synthesized)
gagaacaagcaagggagccctgctgaattgcagcttaggaagccctgaatccccaatgatgcgatctcggctcaccgcaacc

SEQ ID NO: 865212 - DNA, 120 bp, Artificial Sequence
  ENSG00000243069_37 (sequence is synthesized)
ccttggcctcccaaagtgctgggaattgcaggtgtgagccaccgctcctggcctaagaaaatttttaagaaagaaattttccacattgggtggaagacatggctgattacatactcacat

SEQ ID NO: 865213 - DNA, 120 bp, Artificial Sequence
  ENSG00000243069_38 (sequence is synthesized)
acatgtaggtacatagactttttttttaatataaggtgttttctataccaacatgtattgctgttatattggggaaatataataaattaatttcagaagtggttaccgactgacaaatgg

SEQ ID NO: 865214 - DNA, 120 bp, Artificial Sequence
  ENSG00000243069_39 (sequence is synthesized)
agtattcacctaattcaaaatgcaacctgtgacctatgttaagaagctgtaaaaggtgatgtgagaaggtggcttttcttgaaattatgttgcttctacaaacaagtataaccaatattt

SEQ ID NO: 865215 - DNA, 120 bp, Artificial Sequence
  ENSG00000243069_40 (sequence is synthesized)
gtgacgacttcataggatcttcttacctcatttccaacagacaacaaaatacctaccaaaacaacaacaaaacaccaagctctggtccttcactgagggaagtttacaaactcacagacc

SEQ ID NO: 865216 - DNA, 120 bp, Artificial Sequence
  ENSG00000243069_41 (sequence is synthesized)
atgacaatatgttatgtcatatcgaatttttactttatacttagtgcttttagacacttatacatagatttgcttagtactgtgtgtatgtaggaaaggaaaatataagcaaaatgaatt

SEQ ID NO: 865217 - DNA, 120 bp, Artificial Sequence
  ENSG00000243069_42 (sequence is synthesized)
taccaaagtcccgaacattgagcctgattcttctgaataccttttcatgaaaagcattcatgtgtgtttttccacacaatattgttgatagtgcaccatttcttaaaaggatgttccaat

SEQ ID NO: 865218 - DNA, 120 bp, Artificial Sequence
  ENSG00000243069_43 (sequence is synthesized)
cttgtttctgggatttgcctcctagacaatgacactcattctgcagttgtgatgctggcactatcccatttgactaaacacatagttttcttgttcaactgaattgtatgtcactacaag

SEQ ID NO: 865219 - DNA, 120 bp, Artificial Sequence
  ENSG00000243069_44 (sequence is synthesized)
ctatgcagcttctctattaatggccaggagaaagtttctcacaaatggtagtttcatgccttaaccatagtcctgcatgatacatgaattggttatatcaacctctctttgctttagaat

SEQ ID NO: 865220 - DNA, 120 bp, Artificial Sequence
  ENSG00000243069_45 (sequence is synthesized)
ttctttcacctaatctgtcatatctggtaatttctcctgccttcaactatgtttcttggcatatggctttgacacaacaggactaaatttcatagaatttagtagaaatgataacaattc

SEQ ID NO: 865221 - DNA, 120 bp, Artificial Sequence
  ENSG00000243069_46 (sequence is synthesized)
atttatgcccatgttcaaaaataggcaatgccaactatatcatcactatcacctggccactggatgtttatttgatagtaagacacatcccagtttcaaagaaattaaaatgtggtacca

SEQ ID NO: 865222 - DNA, 120 bp, Artificial Sequence
  ENSG00000243069_47 (sequence is synthesized)
aattattcttaaaattgaagaaatacagtatgtcaaactatttgtaatgatattttccgctggtatattccaatggtatattgaactattagaatattcaatggtacaacgcaagatata

SEQ ID NO: 865223 - DNA, 120 bp, Artificial Sequence
  ENSG00000243069_48 (sequence is synthesized)
tatggctacatttactaaacaaattcacattggtcacaaattttgtgtcccaagcacaataatttggctaatttttaaatgcaaattgttagctagtcttattacaatatatgtccaatt

SEQ ID NO: 865224 - DNA, 120 bp, Artificial Sequence
  ENSG00000243069_49 (sequence is synthesized)
ttccagtatttcccatcccgtgtaccttttgtttatttatacattcaacaactatttattgggtgcattcaagtgccaagcattaagacaaacattcctgaaccttacagtttggctcat

SEQ ID NO: 865225 - DNA, 120 bp, Artificial Sequence
  ENSG00000243069_50 (sequence is synthesized)
tattaagaaatattatttcttgactgaaataaacattgttaagtaataattctaaagccaaagaagtacaaatgttaactataaaatgcctatttattcattgacaccatatttttcttc

SEQ ID NO: 865226 - DNA, 120 bp, Artificial Sequence
  ENSG00000243069_51 (sequence is synthesized)
agctgggattacagtttccagttcattttggaagcttaaaagttggccttttagcttcacttcatagacatgcagtgaaggcagtgaggggctgtggtgtgatccaggaggctgagaatt

SEQ ID NO: 865227 - DNA, 120 bp, Artificial Sequence
  ENSG00000243069_52 (sequence is synthesized)
cagcttaagaattaggaaaaaatcaattgtgttaaactaatttatattactgtataaatgactaaaaaatatatattgtttcagtaggacaataaaatgtatgcattctatttagctact

SEQ ID NO: 865228 - DNA, 120 bp, Artificial Sequence
  ENSG00000243069_53 (sequence is synthesized)
tagctacttataagtagctaaattttttcctctttctgcatgctttctaaaaatattctgacttatttcttatatgcatttctcacaataagttgagttcatatattagggtacttggtg

SEQ ID NO: 865229 - DNA, 120 bp, Artificial Sequence
  ENSG00000243069_54 (sequence is synthesized)
cacatttccccatgaagtagagctgcagatgatagctagcttatccaccagtcctccaaatccccatctaactcttcttgtaatttataaacagaggattattaataaatgttgcttaag

SEQ ID NO: 865230 - DNA, 120 bp, Artificial Sequence
  ENSG00000243069_55 (sequence is synthesized)
tgaataactgaatagaagttagacagggaggagggctcatccatgaagagggtctgtgggtagtattcagtgctagaagacacttcctcctcttttccagggcaaaacactgctctgggt

SEQ ID NO: 865231 - DNA, 120 bp, Artificial Sequence
  ENSG00000243069_56 (sequence is synthesized)
aaaattataatgctcacagagcatcttttgtatcataactctctactcatactttccaacctctttagatgctctcttcagtgctttcctaggtttataagtaaaatctttgatcttgcc

SEQ ID NO: 865232 - DNA, 120 bp, Artificial Sequence
  ENSG00000243069_57 (sequence is synthesized)
tttagtatgaaaataagctgatttaaacataagactccaagattgtttgtgctttaaaggaagatatatgttaacccaaaatatctccaacagtggagttttatgtagtctggctaattc

SEQ ID NO: 865233 - DNA, 120 bp, Artificial Sequence
  ENSG00000243069_58 (sequence is synthesized)
aatgtgacaattcaggcagagtgagagaatatattttcaaggggccaatctatagagtgtcttgactgtgtttctttctccagagttacctccctttcatatcatttcttctttctaggt

SEQ ID NO: 865234 - DNA, 120 bp, Artificial Sequence
  ENSG00000243069_59 (sequence is synthesized)
tttatttgggcggaggaaacaatggttaaattatgtagatcaattatctagaaaataaatatcaaacaaattgtcttgaaagtattataaaatttattcatgcttttttggaattgtttt

SEQ ID NO: 865235 - DNA, 120 bp, Artificial Sequence
  ENSG00000243069_60 (sequence is synthesized)
gaatgtttttataaattttttcatcctttttttcagcaattcaagaataatttgctttttgctatgttgcagcagtgaaggcagtgaggggctgtggtgtgatccaggaggctgagaatt

SEQ ID NO: 865236 - DNA, 120 bp, Artificial Sequence
  ENSG00000243069_61 (sequence is synthesized)
ggagatatttgtttgtctttgccaaagatgatagactcttttcctagactagtggtttccaaactggttccacattagaattgcctgggaaacttacaaaaatacagaagctaagtttcc

SEQ ID NO: 865237 - DNA, 120 bp, Artificial Sequence
  ENSG00000243069_62 (sequence is synthesized)
cagggctaataaaaatgcctcttttaacaagcaaactatcctacaaggattaaatccatgatgtacaatgaaggatggattggtttaaccaatttggctgggaagactaggaaatacagg

SEQ ID NO: 865238 - DNA, 120 bp, Artificial Sequence
  ENSG00000243069_63 (sequence is synthesized)
tgttctgatggtggaaaagaaagaatatgaatctttgcacactgtctggaaaagcaggtctgcttgggtgtgaacctccatgagaacacttgcagtggggtgggaccaagaccccaagat

SEQ ID NO: 865239 - DNA, 120 bp, Artificial Sequence
  ENSG00000243069_64 (sequence is synthesized)
atgttttgaccaagaccccacttgcacaggttatatacaaatactacaccatttttataagggatgtgagcatctgtgaactttggcattcaaggaagagtcttggaaccagtccctcag

SEQ ID NO: 865240 - DNA, 120 bp, Artificial Sequence
  ENSG00000243069_65 (sequence is synthesized)
ttagaggtcagtaggtccttctcctaaaacaggctatgtaatcattcatgcagactcctttaccaacttgtatgttcacttcagcaagtcaaccaaattcaattcagtgttcactttgat

SEQ ID NO: 865241 - DNA, 120 bp, Artificial Sequence
  ENSG00000243069_66 (sequence is synthesized)
agagctttttcttcatctgcaaaatgaaggtccagtacttcttgatctccaaggcttcttgaagctctacagcagtgaaggcagtgaggggctgtggtgtgatccaggaggctgagaatt

SEQ ID NO: 865242 - DNA, 120 bp, Artificial Sequence
  ENSG00000243062_0 (sequence is synthesized)
gtgctggcatccatacagtgatttaaaacagcagaagatgaaggctaagaaatgatttcctctttctgggaacgtaggacggtgcagaaggaggagaacccccgatccccacccaaggaa

SEQ ID NO: 865243 - DNA, 120 bp, Artificial Sequence
  ENSG00000243062_1 (sequence is synthesized)
gcaaagttactcagaccaatcctggtgatcatggggtgacagatgttacagccttcacatctggcctcttttgtagctttgaactaacctgcctaagaagagaggaaaactgttgatgta

SEQ ID NO: 865244 - DNA, 120 bp, Artificial Sequence
  ENSG00000243062_2 (sequence is synthesized)
agtccaatcaagatcggaaagcaggatcaagagaaagatgatcagaccggaacaggtaaacgttccatatagagatgcttcggaagtgcggagaagtgacagcttatcccctctcaggcc

SEQ ID NO: 865245 - DNA, 120 bp, Artificial Sequence
  ENSG00000243062_3 (sequence is synthesized)
gtcatgttctctcagcagaccctctgaattactgatgtcagaacttattggctgggctacagcacataagcaactcctagagttttaagacattaaaagaaggtgatttcagacaagaaa

SEQ ID NO: 865246 - DNA, 120 bp, Artificial Sequence
  ENSG00000243062_4 (sequence is synthesized)
tgagatgaggaagaatgtaggcacgagccttaactgtgctgagaaaagacggcacatgaaaatctgagctcaaaatgtaaaacctaactaacctgcctaagaagagaggaaaactgttga

SEQ ID NO: 865247 - DNA, 120 bp, Artificial Sequence
  ENSG00000246016_0 (sequence is synthesized)
gattagaatgggcgctcaggcttggctcagacaccccacatctttagggagacaccacctctttgcttctccaaggctgtttgctgcatctgaaaagacaatctggaacaagaggagagt

SEQ ID NO: 865248 - DNA, 120 bp, Artificial Sequence
  ENSG00000246016_1 (sequence is synthesized)
actgcactccagcctggtgacagacgagactccgtcaaaaaaaaaaaaaaaaggttaaaatgctacactttcttatcatagtttaccgcaattaaaaatcaaaacaaaacaaaacgaaaa

SEQ ID NO: 865249 - DNA, 120 bp, Artificial Sequence
  ENSG00000167459_0 (sequence is synthesized)
gggcccagtcactgggggcctggtcagtagggacatgaaattatccttgaaccagaaaaaaaaatccccaattcaacactccatttttgtgaagagctggttccgaattctgggtcactt

SEQ ID NO: 865250 - DNA, 120 bp, Artificial Sequence
  ENSG00000167459_1 (sequence is synthesized)
cgtgtcccgcgctcctgaacgccatcagccgccgcacctccatcttccctcctcccacgagtctcctgctccccgtgactctggcctcctcgcagtgttgctgggccacgtcaggaagtg

SEQ ID NO: 865251 - DNA, 120 bp, Artificial Sequence
  ENSG00000167459_2 (sequence is synthesized)
ctggaggacgtggcattgcaccaacaccaggcggccagccgtgtggctcatcccgcaaatcaggctcttcctgtgcatggagatggagtccctctggaggcagcccgtggccctgttctc

SEQ ID NO: 865252 - DNA, 120 bp, Artificial Sequence
  ENSG00000167459_3 (sequence is synthesized)
aggacctggccagtcagaacctcgtcagttaaggacctggccagtcagaatctcgtcagttaaggacctggtcagttgggtccagtcagtgggggcctggtcagtggagacctaggccat

SEQ ID NO: 865253 - DNA, 120 bp, Artificial Sequence
  ENSG00000167459_4 (sequence is synthesized)
gagcatggagacgactgggaacttcactagacacgcatccagccggttcaagggcttgtcgcgccgtgcaccagcttgcaggagaaagcccaacgcctcgccaagcacgaaggcctccct

SEQ ID NO: 865254 - DNA, 120 bp, Artificial Sequence
  ENSG00000167459_5 (sequence is synthesized)
agggagccgtcgagctccagcccaggcttggacctgaagaagctggcaacccgcgaacgccaacaggcacagtcgaaaaaagcaaaagaaaaatcccaaacaaaatcctgttctccctag

SEQ ID NO: 865255 - DNA, 120 bp, Artificial Sequence
  ENSG00000167459_6 (sequence is synthesized)
ccaaaggaccaggagagggggcagcccagcaagacaaaacacatttacacaattctggctaacctcagccagtccttggccgtgagttcgtttttctgccacctcactttggggctgggc

SEQ ID NO: 865256 - DNA, 120 bp, Artificial Sequence
  ENSG00000167459_7 (sequence is synthesized)
tggttctccaccctcgcagggtgcgtttctcaatccagacgctggggggcgctagtacctcgcgagctccgcgaggatcattcccgggacgccgcggagtcacctcccctcctagggacc

SEQ ID NO: 865257 - DNA, 120 bp, Artificial Sequence
  ENSG00000167459_8 (sequence is synthesized)
cagagcttcccagggccgcgcctgtaggttttccagaggtccccgaaaacgttaaagacctggaaggaaaaaaaaactgtaaaaccacacactttgatatttgacaacgtaaaagcaagg

SEQ ID NO: 865258 - DNA, 120 bp, Artificial Sequence
  ENSG00000167459_9 (sequence is synthesized)
ctgcaaaatcaaaatcaatgaacgcttgaaggaaatgtctacttagctagacatagtgccacctggattcactgttggctccagaatcccccccacggtgtcatcacgttggaaagtttt

SEQ ID NO: 865259 - DNA, 120 bp, Artificial Sequence
  ENSG00000167459_10 (sequence is synthesized)
tgtgggttagatgttctctgttggcaagaatgcctgtacatgcccaagaagcatatgagtttaatgggaccccaataacttcaaaagcaaaaagataacgatcctttctacttttttaac

SEQ ID NO: 865260 - DNA, 120 bp, Artificial Sequence
  ENSG00000167459_11 (sequence is synthesized)
aggaacttccgtagtaccgatgcctacaaaattacaacacgtggtgctgtttctactccatcaccatgttcgctctttatttcctatgtaattctctattcaaccggcctcagttgagca

SEQ ID NO: 865261 - DNA, 120 bp, Artificial Sequence
  ENSG00000167459_12 (sequence is synthesized)
agttgggcccaagtcagtgggagtctcatcagtggggcctggctagtggggcctggtcagtggaggtttggtcagtggggtcctgtgctgcatctgtgatctcaagtctctactggaatt

SEQ ID NO: 865262 - DNA, 120 bp, Artificial Sequence
  ENSG00000167459_13 (sequence is synthesized)
gcacctctgcccagtgcacctggatcgttcaccgtcatggagctgccatcccacttgtcgtcccagtcatcatcactgccctagctggcctagttgccaccaaggagctgctgaggccac

SEQ ID NO: 865263 - DNA, 120 bp, Artificial Sequence
  ENSG00000167459_14 (sequence is synthesized)
ggcttcagggcatccctaccgcctggaaatcctgcgctggctgctggaaggcactctgtggtggcaccagctgcggctgcagtagcagctggaaagcactgagagatggcttcaaggagg

SEQ ID NO: 865264 - DNA, 120 bp, Artificial Sequence
  ENSG00000167459_15 (sequence is synthesized)
caggcagtgcaccgggcagggccttgaaacctctgggtggtacaatggccatggcacagtgggtcaaggcacaggggcagccatggcgcgctgggccagtccagggttgcagaccacttg

SEQ ID NO: 865265 - DNA, 120 bp, Artificial Sequence
  ENSG00000167459_16 (sequence is synthesized)
cactgcagatataaggccagggttgctgaggccatgagcccctgcgagtcagcccttgatgtcctgctcactacacaggctcagcacttcatgttctcatagatcactctcaaattttct

SEQ ID NO: 865266 - DNA, 120 bp, Artificial Sequence
  ENSG00000167459_17 (sequence is synthesized)
cagtcagtgggggcctggtcagtggagacctaggccatcagtgggtcctggatagtgaggcctggtcattggggtcctggacccaggcccaggggatgcccaatgctgggaggaggctca

SEQ ID NO: 865267 - DNA, 120 bp, Artificial Sequence
  ENSG00000167459_18 (sequence is synthesized)
agccagaacctcatctgttggggccgtgtcagtgagctctagtcagtggggacctggcaatggaagcctcatcagtgggtcttggatagtgaggcctagtcactggaggactgcacagac

SEQ ID NO: 865268 - DNA, 120 bp, Artificial Sequence
  ENSG00000167459_19 (sequence is synthesized)
gggatgcctagcacaaaggatgcctggtgtgacaaacatccctccattccctggactgcagctcagcaaaaggtccagcacagacccaggcccaggggatgcccaatgctgggaggaggc

SEQ ID NO: 865269 - DNA, 120 bp, Artificial Sequence
  ENSG00000167459_20 (sequence is synthesized)
ggggacatagtcagaaaacacctagtaaatgggggtgttgtcagcagggacctgctcgcacagacccaggcccaggggatgcccaatgctgggaggaggctcagacagcaggaaggagag

SEQ ID NO: 865270 - DNA, 120 bp, Artificial Sequence
  ENSG00000167459_21 (sequence is synthesized)
gatcaacaggggccttgtcagtgggacctggacattgtggcctgctcagcggggcctgatcagtaggacctggacattgtggcctggtcagcgggggccttgtcagtgggacctgaacat

SEQ ID NO: 865271 - DNA, 120 bp, Artificial Sequence
  ENSG00000167459_22 (sequence is synthesized)
actttgggcccggtcagtgggacctggtctgagggggtcttgtcagttgggcccaagtcagtgggagtctcatcagtggggcctggctagtggggcctggtcagtggaggtttggtcagt

SEQ ID NO: 865272 - DNA, 120 bp, Artificial Sequence
  ENSG00000167459_23 (sequence is synthesized)
aggacctggtcagttgggtccagtcagtgggggcctggtcagtggagacctaggccatcagtgggtcctggatagtgaggcctggtcattggggtcctggagatggtgaatttcagccag

SEQ ID NO: 865273 - DNA, 120 bp, Artificial Sequence
  ENSG00000167459_24 (sequence is synthesized)
gtcagtggggcctggtcagtgacatcctggtcagcaggctcctagtcagagggagcccaatcaataaacctggtcatcgggggcctgaaattatccttgaaccagaaaaaaaaatcccca

SEQ ID NO: 865274 - DNA, 120 bp, Artificial Sequence
  ENSG00000167459_25 (sequence is synthesized)
agaatctcgtcagttaaggacctggtcagttgggtccagtcagtgggggcctggtcagtggagacctaggccatcagtgggtcctggatagtgaggcctggtcattggggtcctggccca

SEQ ID NO: 865275 - DNA, 120 bp, Artificial Sequence
  ENSG00000167459_26 (sequence is synthesized)
gggaacctggacattgtggcctggtcagccgaggcctggtctggtcagtggggacctggaccttgtggcttggtcaacaggggccttgtcagtgggacctggacattgtggcctgcacag

SEQ ID NO: 865276 - DNA, 120 bp, Artificial Sequence
  ENSG00000167459_27 (sequence is synthesized)
agtggggtccaggcagtgagggcctcatcagggggacctagtcagtgagtcagtgagggcttggtgagtgggggcctcgtcagtggggccttgtgcctgcacagacccaggcccagggga

SEQ ID NO: 865277 - DNA, 120 bp, Artificial Sequence
  ENSG00000167459_28 (sequence is synthesized)
ggggggcgagtgtgaagctgggcgcctggagcctaaggccagctgtccctccctgtgtcctggaggaggggccctgtcccaaaaagaccctcaggggcctggcctaaattatccttgaac

SEQ ID NO: 865278 - DNA, 120 bp, Artificial Sequence
  ENSG00000167459_29 (sequence is synthesized)
gagtgtgaagctgggcgcctggagcctaaggccagctgtccctccctgtgtcctggaggaggggccctgtcccaaaaagaccctcaggggcctggcctcacagacccaggcccaggggat

SEQ ID NO: 865279 - DNA, 120 bp, Artificial Sequence
  ENSG00000247765_0 (sequence is synthesized)
acaccggcttcagcgcccgagcgtgcgcgcgcgtctccgctcgtcgcccggctcggcgtcgggagtgcactctgtgtggccgctgctgcagtgttgttgtggttgtgagaaggcggcggc

SEQ ID NO: 865280 - DNA, 120 bp, Artificial Sequence; identical to SEQ ID NO: 830787
  ENSG00000247765_1 (sequence is synthesized)

SEQ ID NO: 865281 - DNA, 120 bp, Artificial Sequence
  ENSG00000247765_2 (sequence is synthesized)
tgtcctgctgcctgatggagtcttgctctgctgcctaggctggtgtggaatggcacaatctcagctcactgtgacctcagcttcccagattcaagcgattctcccccctcagcctcccaa

SEQ ID NO: 865282 - DNA, 120 bp, Artificial Sequence; identical to SEQ ID NO: 830789
  ENSG00000247765_3 (sequence is synthesized)

SEQ ID NO: 865283 - DNA, 120 bp, Artificial Sequence; identical to SEQ ID NO: 830790
  ENSG00000247765_4 (sequence is synthesized)

SEQ ID NO: 865284 - DNA, 120 bp, Artificial Sequence
  ENSG00000247765_5 (sequence is synthesized)
gtgaattaaaattatgtatgatagtagcggtggggatggagaggagaggatatgaggaatattgaggagataaaattgcaaaagcttcacacttggttggaagtggaagctgacatgtaa

SEQ ID NO: 865285 - DNA, 120 bp, Artificial Sequence
  ENSG00000247765_6 (sequence is synthesized)
gagaatcagcaatgattctcaggtttccaacttgagcaaaggggcggaggccactgatagactctgaggtcataaaacacaaggtggagcagatctaggcgggtatggaggaagagatgt

SEQ ID NO: 865286 - DNA, 120 bp, Artificial Sequence
  ENSG00000247765_7 (sequence is synthesized)
gaccattgaagtattttctttgttgttgtgttgttggaatatttcaagtcaaatccctgacatcatgttgttccatctctacacatttgaacatgtatcactaaaagtagggacactttc

SEQ ID NO: 865287 - DNA, 120 bp, Artificial Sequence
  ENSG00000247765_8 (sequence is synthesized)
taatcacattgctgtgatcgctcctgaagatgtactcaatgattctgattatcatcccatacatagtccacagtcatacatacttgattatcacaagtatttctctttttgcagtctgtc

SEQ ID NO: 865288 - DNA, 120 bp, Artificial Sequence
  ENSG00000247765_9 (sequence is synthesized)
tattggaatcagaatcctgacaaggtccaccctgcacaccactttctcacaaaggtcctctcatcctgagcagtcctccctgccactgatttgttgtccttcataatgtcccacaatctg

SEQ ID NO: 865289 - DNA, 120 bp, Artificial Sequence
  ENSG00000247765_10 (sequence is synthesized)
cacctgtctttgttctccctcatgatactgcttcacttctatgccctgaatttcctataatggggaaggagctctaaagcctggttgtaggaacacttcatgaacagtactgtgcatggc

SEQ ID NO: 865290 - DNA, 120 bp, Artificial Sequence
  ENSG00000247765_11 (sequence is synthesized)
acacaatctctagccatcccacttgtcacgctaaaatcgatgactcgcttctggtagtgtcagcctgactctttggacatgctgagtaagcagagcgagaaaggaagagggcttcgacca

SEQ ID NO: 865291 - DNA, 120 bp, Artificial Sequence
  ENSG00000247765_12 (sequence is synthesized)
gaggaagaggagcagagaaaacagggaaggagaattcagggaagtggggaaaatcgagggagcagcagcgtggggactgaagaaagaagggtcaggtgtcgctgggcagccaagaagaga

SEQ ID NO: 865292 - DNA, 120 bp, Artificial Sequence
  ENSG00000247765_13 (sequence is synthesized)
caaacaggtcagatggttttcacaactgatggctgataacttgtatgagagcagctttaatggagtgattaaggtgtaagtcagattgccctgtgatggaggtgtgaataggggtgggaa

SEQ ID NO: 865293 - DNA, 120 bp, Artificial Sequence
  ENSG00000247765_14 (sequence is synthesized)
gtggagggcaaggaatatcaataacaatttcaggaatttggctgtaagacaagggaaaaagatgggagacgtgagcataggaagagggatgttgaaaaaagaggttgtgtttattctgtg

SEQ ID NO: 865294 - DNA, 120 bp, Artificial Sequence
  ENSG00000247765_15 (sequence is synthesized)
gctcttttgatgggagacacattcatgctgggaggttgaatatttaggaaccataaggaactattactaacaaagaaagttccaaaaacattcctggttggaaggtttcactgttttgtt

SEQ ID NO: 865295 - DNA, 120 bp, Artificial Sequence
  ENSG00000247765_16 (sequence is synthesized)
cactaatttcatatatttttctaactctctacaattgctttttgttgtgagctcaactggtctaggagacacagattttgaaacgtgatgaaattattcaataaagctggtgttagatgc

SEQ ID NO: 865296 - DNA, 120 bp, Artificial Sequence
  ENSG00000257155_0 (sequence is synthesized)
ctttgggtttgttggctcaggaacccaatctgcatgatcttgtttatagccagctacaaacattttgcagcgttttactaaacgtttgtgaagtgttgtcatataaaacatctcttatga

SEQ ID NO: 865297 - DNA, 120 bp, Artificial Sequence
  ENSG00000257155_1 (sequence is synthesized)
ttttatggacaagaaaacggagaaagtttaaagagacttgacccagcttaacaaaaaagcagataaagccaatgcaagagagaagaagaaagtagatcataagagatcatgttaccatag

SEQ ID NO: 865298 - DNA, 120 bp, Artificial Sequence
  ENSG00000276408_0 (sequence is synthesized)
tagcttttcgagctgtgtacgtttgcgtaaaggctgggcggcgatagaacgtttccgtggaccagagtcgtggctgttgtctgtgttaacatttgtgtaaaataagatgcccataaaagt

SEQ ID NO: 865299 - DNA, 120 bp, Artificial Sequence
  ENSG00000276408_1 (sequence is synthesized)
tgacttgaacactgaggaggaagaactaaatatttaaatttcaactgacatggacacaaacaatggtcaccaagtccctaaacaggttgtgggagccccttgaggcgttcatccagcgct

SEQ ID NO: 865300 - DNA, 120 bp, Artificial Sequence
  ENSG00000276408_2 (sequence is synthesized)
cctttttgtgttccttgagcccagtcgcaaagggccctcgtgactgggcctcatgctagacaacatgttacaaaaagatctagggtcccagaccacgccaaaaagcttcatgagacctct

SEQ ID NO: 865301 - DNA, 120 bp, Artificial Sequence
  ENSG00000276408_3 (sequence is synthesized)
ccacgccaaaaagcttcatgagacctctcctcgtctgtgcactgacgagtggccggctctggagcccaggtcgttgcttcccagtctggaggtgaatcctccatagtctggtgagtgtaa

SEQ ID NO: 865302 - DNA, 120 bp, Artificial Sequence
  ENSG00000276408_4 (sequence is synthesized)
ttttccttctcctcttcccattgcaatttgcttattatatcaatctgcttattatattaatttgcttattataatatctgcattgccatttacgtgggataaagcttgcttacccttaaa

SEQ ID NO: 865303 - DNA, 120 bp, Artificial Sequence
  ENSG00000276403_0 (sequence is synthesized)
caaagcgggcagtggaggtgagttctctcagccaaatggtctctgatgcttctgggccctgcaacgggagctgatagactggcttttcttgatcgtatgtaatcaaaaccaagtgacttt

SEQ ID NO: 865304 - DNA, 120 bp, Artificial Sequence
  ENSG00000276403_1 (sequence is synthesized)
tgaaaaaaagtctctgagatgatttctatctgggactgtgtgggtctcatgaaaaacagaatttttaaaatgactgatgtattggcacaattagtgcttgtaaatatttgttcgtttgaa

SEQ ID NO: 865305 - DNA, 120 bp, Artificial Sequence
  ENSG00000276403_2 (sequence is synthesized)
ggctgtgcccagtgatctcacagatgaaactggcttccatctcgcctcgcagcttttacaaaatagcaatagcaggctctcagagggtttcagatctgccgcagcaaagagttggaagat

SEQ ID NO: 865306 - DNA, 120 bp, Artificial Sequence
  ENSG00000276403_3 (sequence is synthesized)
atatcctgtgctgggaagcatgagaggtttttgtgtctctttgattttttttttttttaagtagttaagctcaagcacatctgcagatctaaatgggggagaaatgccatcctgttcact

SEQ ID NO: 865307 - DNA, 120 bp, Artificial Sequence
  ENSG00000276403_4 (sequence is synthesized)
ttggcatctgtggtcagaaggagcagaacatacaccaggaaaacaagccaagaccgggttgttggcaggcccctcccagctgcacccagttgagcacatgcctgatacacgcacaaaacc

SEQ ID NO: 865308 - DNA, 120 bp, Artificial Sequence
  ENSG00000276403_5 (sequence is synthesized)
cccctgctcttaatgaagcttgtcagatgcatggctgagaggcagtacaagaaaagaacacgagatatgaataccagctagccagccacgcatccaaaaccaggacgttccagacaggat

SEQ ID NO: 865309 - DNA, 120 bp, Artificial Sequence
  ENSG00000276403_6 (sequence is synthesized)
acccactggcaagaagtcatcctttccctgccatcctcattcatgagaaacgtgctgttgaaaacacaggccccttgtagtgaagctttcactcgtttttctgatccacccgtcagggag

SEQ ID NO: 865310 - DNA, 120 bp, Artificial Sequence
  ENSG00000276403_7 (sequence is synthesized)
ctccatggttgagcccttctggagactaagtcatatatgtaaatgaccaccctgcaggcaccaggaagggacacaatccccagctggatccacggcgcttcctggctcagtccctgggtt

SEQ ID NO: 865311 - DNA, 120 bp, Artificial Sequence
  ENSG00000276403_8 (sequence is synthesized)
gagcattcattgtatttagtcttcctaacactgcacatttatgaagacaaatgggaaaatcaagaggactggatgtgttccaaattgaactaaaacaacgtcaatgagcgtgggcatttc

SEQ ID NO: 865312 - DNA, 120 bp, Artificial Sequence
  ENSG00000276403_9 (sequence is synthesized)
tgaacccctaggacaacacctttggtgtaagagaacccactccacgcttaccctgttatttgtctgggcaaggaaaacagcactttatctcagaacaggagagggatggctggacagatg

SEQ ID NO: 865313 - DNA, 120 bp, Artificial Sequence
  ENSG00000276407_0 (sequence is synthesized)
ggaggtggcaagccggaacaaggcacacaaatgccaggtgctcgtagagggctggatacaatgggggcttcactaccaggcctgtcagctgagtggaaggtcaaccagtccaacttctca

SEQ ID NO: 865314 - DNA, 120 bp, Artificial Sequence
  ENSG00000276407_1 (sequence is synthesized)
tgtttcagaagaggaaagcaagatatgtttcaaactttgatgaaaagcagggaagtttgggaagaaaatccaagacttctctggagagagattatctctgtgaatgtggtgtaggcagca

SEQ ID NO: 865315 - DNA, 120 bp, Artificial Sequence
  ENSG00000276407_2 (sequence is synthesized)
gcaaagcctggggtctacatgacaggctgagtcaatgcttggctgcatggggctttaaagggggccgccttccttccaagggcctcagtttccctaaatgagggaaattggactaaaccc

SEQ ID NO: 865316 - DNA, 120 bp, Artificial Sequence
  ENSG00000276407_3 (sequence is synthesized)
gctctggagacttttccagggctggcattcactgagaccatcagaaacagttttttcttctgaccctacccagaaaacagaggaacatagagttccaggtgagcagaagtggcctcccca

SEQ ID NO: 865317 - DNA, 120 bp, Artificial Sequence
  ENSG00000276407_4 (sequence is synthesized)
atgtttcagaagaggaaagcaaggtctggagagggaacgtggcttgcccaagatatgtttcaaactttgatgaaaagcagggaagtttgggaagaaaatccaagacttctctggagagag

SEQ ID NO: 865318 - DNA, 120 bp, Artificial Sequence
  ENSG00000276407_5 (sequence is synthesized)
ccaggaagctggctcccaaaaacctgggcttcctttgcaacctctacatgaggaagaggcaccagttagtgtgacccatcctggctgtgaactcatcgcctagggacagcgggtcttagg

SEQ ID NO: 865319 - DNA, 120 bp, Artificial Sequence
  ENSG00000276407_6 (sequence is synthesized)
aatccaaccccctcacccatcccagtcgcttggtggaggagacccctacagagtcccggccagaagtctcagatggctatcccatgcaagacagtctctcgagggctccattgttatact

SEQ ID NO: 865320 - DNA, 120 bp, Artificial Sequence
  ENSG00000276407_7 (sequence is synthesized)
caagttggcaggaataagcttcagccagctggcccgaggatccaagtgataccagctggtccccaacctacagagtgatcatgagcatgtctgtgaactggtatctgacagttcgctgtt

SEQ ID NO: 865321 - DNA, 120 bp, Artificial Sequence
  ENSG00000276407_8 (sequence is synthesized)
ccccatctccagttcctggaagggaagctacaacctaacggtgccaaggaggggtggcttgatgtggaaggcggttgtccctcactgtcccgattacccaccgcgtgcctctgcctccct

SEQ ID NO: 865322 - DNA, 120 bp, Artificial Sequence
  ENSG00000276407_9 (sequence is synthesized)
ttcccacactctgctgctttgctaccgtggtgccggtgctcagtttgtcaggcctcccaggctcagcaggcaggatgccgtaattctcaagaataaagaaaacattttagagtctgacaa

SEQ ID NO: 865323 - DNA, 120 bp, Artificial Sequence
  ENSG00000276406_0 (sequence is synthesized)
aagggagctttcttttctacctgattgttaaagctgtccaagtgacaaggaacagattgtcaggtttcccgcaaagaagtgtcttatgaaaccatttaataaacaatatgcttgaaacta

SEQ ID NO: 865324 - DNA, 120 bp, Artificial Sequence
  ENSG00000253811_0 (sequence is synthesized)
acactttacctaagaggccctggatatccatcttgggggctcctgactccctcagcccttactctttcagctctctagtaggtctcttgtcagaaaaataccagcttttcatttcaatca

SEQ ID NO: 865325 - DNA, 120 bp, Artificial Sequence
  ENSG00000253811_1 (sequence is synthesized)
aattactgtgatggcccagaaggtggtaaaatagtataagggttctctttgtcaggaaccttgaaaaagctgtatcttttattcggttgaaatttctactaacctgaagacatgaaagaa

SEQ ID NO: 865326 - DNA, 120 bp, Artificial Sequence
  ENSG00000253811_2 (sequence is synthesized)
tttagggaaatgtatcaaatagcattgaccgggtgactaagactccctattggctctaatgtctttggaaaaatcaaagggaatatgaagcaagtgtttcaatttggaaaatgaatgcta

SEQ ID NO: 865327 - DNA, 77 bp, Artificial Sequence
  ENSG00000253811_3 (sequence is synthesized)
gaatatgaagcaagtgtttcaatttggaaaatgaatgctaccacatgggtgggagtgagatacggagagagggaatt

SEQ ID NO: 865328 - DNA, 120 bp, Artificial Sequence
  ENSG00000253819_0 (sequence is synthesized)
aggttgggagttgctgccatggagaccacaagagtggagattttctgacacacagaaaggaatggattacagctccttcttatgtaaatttccatggaggggaaaaaagattaaaaggaa

SEQ ID NO: 865329 - DNA, 120 bp, Artificial Sequence
  ENSG00000253819_1 (sequence is synthesized)
aataattctgctttagtcgttttcctttaaggtgataagatcctttgattccatcgtggagaagaaggcaacagctgtttgtcacaaatgatgggaaatgtgccaacgtcacaacaaggt

SEQ ID NO: 865330 - DNA, 120 bp, Artificial Sequence
  ENSG00000253819_2 (sequence is synthesized)
gaggcacatctcatgctcggacatgaacacccgatcatcatgcttatgaactacaaaaggatctccagtatgggctcacggcagttggcccttgaataacatgaatttgaactgcctgag

SEQ ID NO: 865331 - DNA, 120 bp, Artificial Sequence
  ENSG00000253819_3 (sequence is synthesized)
tctgctaatatgtggattatcttctgcttctgcaccctgagacagcaagaccaacccttcctcttgcttcttttccttagcctattcaacgtgaagatgactaaggtgaggacacaatag

SEQ ID NO: 865332 - DNA, 120 bp, Artificial Sequence
  ENSG00000253819_4 (sequence is synthesized)
gatgaccatcagcaaaccaggaataatgccctcaacagacatctgatctgctgacaccttgatcttggacttctaattctgcagaactgtgagaaataaataactgtttttaaaaaccat

SEQ ID NO: 865333 - DNA, 120 bp, Artificial Sequence
  ENSG00000253819_5 (sequence is synthesized)
tgctattattactcttattaccattttccagtgggaagctgcttcttgggcagggtggatttccatctgcgtctccttttcggtgttgaaagctgatgggaaatgtgccaacgtcacaac

SEQ ID NO: 865334 - DNA, 120 bp, Artificial Sequence
  ENSG00000253819_6 (sequence is synthesized)
tccagaaagagggacgagcatgagcaaagatggcaacaaattgaaagaaggccagtgggctccaagcatgcctccctcctcccagagtgagttacccttctctaagaatcactggaaatc

SEQ ID NO: 865335 - DNA, 120 bp, Artificial Sequence
  ENSG00000253819_7 (sequence is synthesized)
ctgtctctgttcctgctattggatgcctggcgaggatcctgtaaaactaggcatctctatttcctgagacccagggatatttaaattaggccaattaataattttacagtggcctctaaa

SEQ ID NO: 865336 - DNA, 120 bp, Artificial Sequence
  ENSG00000253819_8 (sequence is synthesized)
tgttcagtggacaggagagtgacacatctctcactttaaatcacaagctagaaatgactaaacttagtaaggaaggcatgtcgaaagccaagataggcagaaaagaatgcctcttgtgcc

SEQ ID NO: 865337 - DNA, 120 bp, Artificial Sequence
  ENSG00000253819_9 (sequence is synthesized)
aaacaggctagttgtgagtgcaaagaaaaaattcttgaagaaattaaaagtgctactccagagaacacaaaaatggcaagaaagcaaaacagcctaattgctgatatggagaaagtttta

SEQ ID NO: 865338 - DNA, 82 bp, Artificial Sequence
  ENSG00000253819_10 (sequence is synthesized)
aaagcaaaacagcctaattgctgatatggagaaagttttagtgatctacgcagaagatcaaaccagccacatccttccctta

SEQ ID NO: 865339 - DNA, 120 bp, Artificial Sequence
  ENSG00000253819_11 (sequence is synthesized)
gacaaatgtgaagctagcagatatttatttataaagtttaaggaaagaaactgactctataacacagtgcaaggtgaagcagcaagtacagcaagaagctgcagcaagttatccgcaaga

SEQ ID NO: 865340 - DNA, 120 bp, Artificial Sequence
  ENSG00000253819_12 (sequence is synthesized)
gagaagagaagtcaattcctggcttcaaagcttcaaagacaggctgattctcttgtcaggggctaaggcatctagtgactttaagttaaaaccaatactcatttaccattccaaaaattc

SEQ ID NO: 865341 - DNA, 120 bp, Artificial Sequence
  ENSG00000253819_13 (sequence is synthesized)
cagggcccttaagaattagtctaaatctactctgcctgtcctttataaatggaacaacaaagcctggataaaaacacatctgtttacatcatagtttgatgtatattttaaacctgctgt

SEQ ID NO: 865342 - DNA, 90 bp, Artificial Sequence
  ENSG00000253819_14 (sequence is synthesized)
tgtttacatcatagtttgatgtatattttaaacctgctgttgagacccattgcatagaaaaaaaaaaagtgattcctggctgggtatggg

SEQ ID NO: 865343 - DNA, 120 bp, Artificial Sequence
  ENSG00000253819_15 (sequence is synthesized)
atgccactgcactccagcctgggtaatggagtgagactctgtctcaaaaagaaaaaagaaaaaatattcctttcaaaatattactccttgacaatgcacctggtcatccaagagctctga

SEQ ID NO: 865344 - DNA, 120 bp, Artificial Sequence
  ENSG00000253819_16 (sequence is synthesized)
catccaagagctctgatgaagatatatgtaaagattaatgttgttttcatgctctccagcaaaacattgattctgcagcccacagattaaggagtaattgactttcaagtcttactattt

SEQ ID NO: 865345 - DNA, 120 bp, Artificial Sequence
  ENSG00000253819_17 (sequence is synthesized)
aagaaatgcatttcataaggctatagttgccatagatagtgaatcctcttttggatctgggcaaagtccattaagaatcttctgaaaagaattcaccagtctagatgctgctaagaacat

SEQ ID NO: 865346 - DNA, 120 bp, Artificial Sequence
  ENSG00000253819_18 (sequence is synthesized)
tcatgattcatgggaggtgatcaaaaatatcaatgttagtgagtttggaagaagttgattccaactctcatggatgactttgaggggctgaaaactttactggagaaagtaactgcagac

SEQ ID NO: 865347 - DNA, 120 bp, Artificial Sequence
  ENSG00000253819_19 (sequence is synthesized)
actagaattagaagtggagcctgaagaagtgacggtttgctacaaccttatgataaaacttgcacgaatgaggagttagttcttatggatgagcaaagaaagtggtttcctgagatagaa

SEQ ID NO: 865348 - DNA, 83 bp, Artificial Sequence
  ENSG00000253819_20 (sequence is synthesized)
tgcacgaatgaggagttagttcttatggatgagcaaagaaagtggtttcctgagatagaaactactcttggtgaagatgatgt

SEQ ID NO: 865349 - DNA, 89 bp, Artificial Sequence
  ENSG00000253819_21 (sequence is synthesized)
atttttcatgaaaggaagagtcaatcaatgtggcaaacttcatcgttgtcttattgaaattgccacaactaccccagccttcagcaacc

SEQ ID NO: 865350 - DNA, 120 bp, Artificial Sequence
  ENSG00000253819_22 (sequence is synthesized)
cttattgaaattgccacaactaccccagccttcagcaaccagcaccctgatcagtcaggagccatcagcattgaggcaataaccaacagaaagattatgactcactgaaggctcagatga

SEQ ID NO: 865351 - DNA, 120 bp, Artificial Sequence
  ENSG00000253819_23 (sequence is synthesized)
gggaaaaaaccccataggaccggctcagcttcccgaggctggagggtgaggctgccccctagtggctgaagttcacgaccggacggacgttcaaggagtcccgggcgttccaatgctttc

SEQ ID NO: 865352 - DNA, 120 bp, Artificial Sequence
  ENSG00000253819_24 (sequence is synthesized)
tcccaggaagtgggctctgcaggctggagttgccctagtgtcagggtgaaggctgggagccaacgtctaatcatcaaggtgatggaactctgagggctgaagatgggaaatgtgccaacg

SEQ ID NO: 865353 - DNA, 120 bp, Artificial Sequence
  ENSG00000253819_25 (sequence is synthesized)
ttgtttcaagtttgctctggtgtcatcagctgacagatgagaagacagaagcatggagaaggtatatcgatattgttcttaaccactttggcctggaaggacacatcactttttttcacc

SEQ ID NO: 865354 - DNA, 120 bp, Artificial Sequence
  ENSG00000253819_26 (sequence is synthesized)
ttccttgggctaaaaccaatcacatggcctcatccaaatgcagagtgttggaaatgttaacagtgtttccaggaagaagaaatgggtttgctgagcatctaggcagtctctgcttactaa

SEQ ID NO: 865355 - DNA, 120 bp, Artificial Sequence
  ENSG00000253819_27 (sequence is synthesized)
cacactactcggactaacatactggcccaatagcaggtgagagttccaagtacagaactgttttttcttgatcatcaattctattgttcatccaaaaagaaagtaagaggcactggtcct

SEQ ID NO: 865356 - DNA, 120 bp, Artificial Sequence
  ENSG00000253819_28 (sequence is synthesized)
caaagttcttgcttctatataacctaaatgtattacgaaaaattatgtactcccttacgtgtttcttaaattgacttatgcattttttcttcataaatttaaatagtatcaaaggatgaa

SEQ ID NO: 865357 - DNA, 120 bp, Artificial Sequence
  ENSG00000253819_29 (sequence is synthesized)
ggcttggaggctgggtacatgaagtgagaattagtcatggccttgttcacaatctgagaacattcacacttgttgcacctgctcggagaagcttgaattcaatcagcaaattttgcattt

SEQ ID NO: 865358 - DNA, 120 bp, Artificial Sequence
  ENSG00000253819_30 (sequence is synthesized)
aagctctgctgagagaggcaggagaaagctgcatcagccacagtgttttcccaggcagggttctcctggggtgcccacgcttgcctgttcccagtgtgtgccttcaagcccgagccgcaa

SEQ ID NO: 865359 - DNA, 120 bp, Artificial Sequence
  ENSG00000253819_31 (sequence is synthesized)
aagagttttccttcatgaaatcgaccaagaaccatttaggacactgttccttggaagggacatattgggatgccaggttcttggctggaatcattaagtgaatttacatcctgatctgct

SEQ ID NO: 865360 - DNA, 120 bp, Artificial Sequence
  ENSG00000253819_32 (sequence is synthesized)
gcacgtgaaacatctatccggataggagaggctttagctgggtcttggatccttatgttttggggtactttgtttctcctttgtgctatctgttggcattcccaattgctgggcaattat

SEQ ID NO: 865361 - DNA, 120 bp, Artificial Sequence
  ENSG00000253819_33 (sequence is synthesized)
tcctgtatttcttatgttctctcttacctttcggcctctacctagaaaaattgccccctcttcttctcccatcctccataccagccctttagctttcagtttctacaccattctccctag

SEQ ID NO: 865362 - DNA, 120 bp, Artificial Sequence
  ENSG00000253819_34 (sequence is synthesized)
aaatctctcttgacccccaaagatttttggatggtttcttttccttcagcatcgtgtacttgcctccagtatgaggcttctaacacttgggttaccttggcctgtctctgtgtctatgtc

SEQ ID NO: 865363 - DNA, 120 bp, Artificial Sequence
  ENSG00000253819_35 (sequence is synthesized)
tgcctggaaaatgacctgcaggcccccagggactgtgttgtttgtttaaggctataaccctgggggcctggccaaaaaacgtacgcattaataaacaaaatgaataaatggataaaagaa

SEQ ID NO: 865364 - DNA, 120 bp, Artificial Sequence
  ENSG00000253819_36 (sequence is synthesized)
ggatctccagtatgggctcacggcaggtaattgttttgagacttatgtctgaaatgtttgtatcccacccaaatatttaattgttaactttgataggtgtagaattctaggctagaaata

SEQ ID NO: 865365 - DNA, 120 bp, Artificial Sequence
  ENSG00000253819_37 (sequence is synthesized)
atttttttctacagaattctaaagtcattgttacattatctttttgcttctactggggctgttgagaaattcacagtcattttggtattttgagcaatgatttttacctttttctgaaaa

SEQ ID NO: 865366 - DNA, 120 bp, Artificial Sequence
  ENSG00000253819_38 (sequence is synthesized)
tctgaaagtttaagatgatggaacttagtgtgagtttatttttatctattgtactgaatatttactgtaccttttaagtctagaaactcatgcccttcagtactgataaatttcttggat

SEQ ID NO: 865367 - DNA, 120 bp, Artificial Sequence
  ENSG00000253819_39 (sequence is synthesized)
tatttcttgtgtcttttttcttctatttttcaagttctttttctgaaattttagttactcagttgatgaactcctagaatgattttctatatttcttatcttttatatcatatcttccat

SEQ ID NO: 865368 - DNA, 120 bp, Artificial Sequence
  ENSG00000253819_40 (sequence is synthesized)
ctttttgatttttcattctactttctaagagatttccctaaatttatcttctaactatttgactgaaattttcattctggctgtcaaatttgaatttataattactatcttgttttacaa

SEQ ID NO: 865369 - DNA, 120 bp, Artificial Sequence
  ENSG00000253819_41 (sequence is synthesized)
ttgttttccttttgccagaatattgtttttatttaataaattacaataacttctcctatttgtctgaggatgttgatgatagtttccttttgaagtttttattttcctgcagagttttct

SEQ ID NO: 865370 - DNA, 120 bp, Artificial Sequence
  ENSG00000253819_42 (sequence is synthesized)
gctaaaattcctgccactacatctggatcccaggcagcaggaaggagaaatggaagaagacctgtcctgtccctgagacaatgccattcagcatgttccatacaatatctctgcttattg

SEQ ID NO: 865371 - DNA, 120 bp, Artificial Sequence
  ENSG00000253819_43 (sequence is synthesized)
agcgtatgtatttatagtctacttgattttaataaaggattgagtgcagcctaaggcatgtgcatgttatcctgtaggtaacaggggccacaaatgggttgtggctaatggaacatggct

SEQ ID NO: 865372 - DNA, 120 bp, Artificial Sequence
  ENSG00000253819_44 (sequence is synthesized)
gaagggtctgtgccagttctgagcctcaggaggcactgctgtttcttcttgcccttctgggacttttgccatgggaagaacccacagtcttggggtctttttcagcctgggttccagaat

SEQ ID NO: 865373 - DNA, 120 bp, Artificial Sequence
  ENSG00000253819_45 (sequence is synthesized)
gagatgcattctgaacatgaaggtggggcagatctgaacttgacccatcacctgaagccaaactgtccaaaccacctctcaaagctatgagcaacaaataaatgcttattttgtgcgcct

SEQ ID NO: 865374 - DNA, 120 bp, Artificial Sequence
  ENSG00000253819_46 (sequence is synthesized)
agatgactaagagaagcccaggttatttgcacccagtgatgctaattcagcttggctgcctcagcaggataaaataaatcgaccaatctactttttggaagcagaaggtgggaaagtggc

SEQ ID NO: 865375 - DNA, 120 bp, Artificial Sequence
  ENSG00000253819_47 (sequence is synthesized)
tactccctgagctgactgtgcaccaagggacagatccttgttttatataaattgactatgaaaattcccctagacgaacacaggagggaaatctggcacaagccccagagcaggataaag

SEQ ID NO: 865376 - DNA, 120 bp, Artificial Sequence
  ENSG00000253819_48 (sequence is synthesized)
acgtttgaaaatcctttcagaaatcataacttagatgcctcttccatctgcaccatttctgcctgttgtctgcaagaaatatgatcctctgtctcacaggttctcaatgtacaggacaaa

SEQ ID NO: 865377 - DNA, 120 bp, Artificial Sequence
  ENSG00000253819_49 (sequence is synthesized)
ctgctgcttttcacagtggacaattcaaaacctcatgggcccctctctgattagactctcagaggctgagagccctgtggtaagaagcctagtgagagatgtttctatcaatggctctcc

SEQ ID NO: 865378 - DNA, 120 bp, Artificial Sequence
  ENSG00000253819_50 (sequence is synthesized)
cttgtcccatcttccttcaggggaatctctgtgtactatgaacacagaaagcttcggccaacacagtaaaaaagggagggactaagggagatggcatgatttttaaaaattaaaatgaga

SEQ ID NO: 865379 - DNA, 120 bp, Artificial Sequence
  ENSG00000253819_51 (sequence is synthesized)
ttatgacactgtggtattcattaaggccattcatattttggctctattctgggcccatgctaagactgtactttttgacctcattaatattaggctgtatgacttgctgtggtcaatgaa

SEQ ID NO: 865380 - DNA, 120 bp, Artificial Sequence
  ENSG00000253819_52 (sequence is synthesized)
ctgtgagtgaaagtgaaatgtatcagttctgggaggaaatgttaacagccagtgtgatttgccatgttcttttcccctttgtcacaatgataggcaacatttgagatggtagttgattct

SEQ ID NO: 865381 - DNA, 120 bp, Artificial Sequence
  ENSG00000253819_53 (sequence is synthesized)
ttagctggggtgtgacggttaattttatgtcaacttggctaggctattgggtccagttgtttggtcaagaaccagtccagatgttgctgtgaaggtacttttagataagattaacattta

SEQ ID NO: 865382 - DNA, 120 bp, Artificial Sequence
  ENSG00000253819_54 (sequence is synthesized)
aatcagtaaaatttgagcaggcgatactccataacgtggataggcctcatctaatcagttgaaggctttaagaacaaagaccaaagtttcccaaagagaaaaaaattcttatcaagactg

SEQ ID NO: 865383 - DNA, 120 bp, Artificial Sequence
  ENSG00000253819_55 (sequence is synthesized)
caagatagaatccctgcatgaatttccagcctgctggtgtgtcctacagatttgagacttctcagcttcacaaccatgtgaaccaattccttaaaataaatctctttccatgtatatacc

SEQ ID NO: 865384 - DNA, 120 bp, Artificial Sequence
  ENSG00000253819_56 (sequence is synthesized)
ccatgagttctgtttccctggctgacacactaggtgaggatgcacaggagccaagcaccctcccaactcagaatgaaaatgtagtgtgagcaagaaataaacatttgttgttaaaagcca

SEQ ID NO: 865385 - DNA, 120 bp, Artificial Sequence
  ENSG00000253819_57 (sequence is synthesized)
actttattgtaagaatacaatatataatacatatatgataaaaaagtgtttagtgattgtttatgttattggtaagtcttccagtcaagagtaggctattagtagttaagtttttggaga

SEQ ID NO: 865386 - DNA, 120 bp, Artificial Sequence
  ENSG00000253819_58 (sequence is synthesized)
gtcaattgtatttttcaagttagggaatttcctcagagttttggtggtcattgactaaggctcacattttgaaatgagacgcttaaaagcaaattagaaactcagtgtgtgggggtggaa

SEQ ID NO: 865387 - DNA, 120 bp, Artificial Sequence
  ENSG00000253819_59 (sequence is synthesized)
cttgttaactctgaactcactacttgtaaggtgatttggccaatctgcttctccaggggtattctgttgttagtgctgctatatcttttcttggagtagatagacttcctagagaggtgt

SEQ ID NO: 865388 - DNA, 120 bp, Artificial Sequence
  ENSG00000253819_60 (sequence is synthesized)
gcttcagtctctggcaagcagagtgttaagtctggcttcttatgctctgagagctaaggtcctcatactcagtgtgtaacctctcactcaatcttcctgtgttcagtacactgtccctgc

SEQ ID NO: 865389 - DNA, 120 bp, Artificial Sequence
  ENSG00000253819_61 (sequence is synthesized)
cctcaacaatgctgtatatgccccactatgctttattctttccaggaattaagccttcagttgtctgggttggggaaggggcaggatgaggggcctggggagggtctatctacttcttaa

SEQ ID NO: 865390 - DNA, 120 bp, Artificial Sequence
  ENSG00000253819_62 (sequence is synthesized)
acatacttccagccagtcattgtgtcaacagactcaacttcccacctatgtccagtggtaccctgggattctgcagtgaaaatcgggcttgttcttattgttagcttggggttcaacttc

SEQ ID NO: 865391 - DNA, 120 bp, Artificial Sequence
  ENSG00000253819_63 (sequence is synthesized)
cttaggtctgttaagtgagttatcactggttcatctgcttcctagagccccagattttatttgtttatgttctttctggttatctttttcattgaggtttaatgcttaaaaaaaattttc

SEQ ID NO: 865392 - DNA, 60 bp, Artificial Sequence
  ENSG00000253819_64 (sequence is synthesized)
tatctttttcattgaggtttaatgcttaaaaaaaattttcatcacctgaagtcaggagtt

SEQ ID NO: 865393 - DNA, 72 bp, Artificial Sequence
  ENSG00000253819_65 (sequence is synthesized)
gcctggtcaacatagggggtgcctgtaatctccgctacttgagaagctgaggcgggagaatcgcttgaaccc

SEQ ID NO: 865394 - DNA, 120 bp, Artificial Sequence
  ENSG00000253819_66 (sequence is synthesized)
ttctgggagggagcagaaataatgtttatgttccatccaccacttttaagtggaagtctataatatcctcttacagcattgaacgattttatggtgagggtgagaagatgttttagcatg

SEQ ID NO: 865395 - DNA, 120 bp, Artificial Sequence
  ENSG00000253819_67 (sequence is synthesized)
tggctcaaaggaaatgggaacagctttttcggaattgataatagatgtaggaagttggcatggctgcctatcattctcttagattaaagcagagatcctagggaagaattagtgagaagg

SEQ ID NO: 865396 - DNA, 120 bp, Artificial Sequence
  ENSG00000253819_68 (sequence is synthesized)
atgtcttttgaaagcttgaccaaagtttggattccatttcatacttagagaaagagaatgagggatatctgtatttaggaagtactgcactggtgattttgtggagactctatgccaaga

SEQ ID NO: 865397 - DNA, 120 bp, Artificial Sequence
  ENSG00000253819_69 (sequence is synthesized)
acccagttcatatttctaggagaggttgaaaaccgtaggtcatcaattcctaggcaggtagcagtgccagggcccctacaaacttaactgtagtcaggttttgacttttacattgcaacc

SEQ ID NO: 865398 - DNA, 120 bp, Artificial Sequence
  ENSG00000253819_70 (sequence is synthesized)
aacacccacagatcattgatctctttttcagggggtggggtggggtagggcctgtagccatggggtttattatgttagaatttggactgatgcttttgggtgtaatgaattgtgacttgc

SEQ ID NO: 865399 - DNA, 120 bp, Artificial Sequence
  ENSG00000253819_71 (sequence is synthesized)
tgaaatggttagggaaaaggtttatataaaagtctcctaattagcaccacaatgctggaaaaggagaagaacaaaattatatcaagagaccatggaccattaaaacaattttgttgaaat

SEQ ID NO: 865400 - DNA, 120 bp, Artificial Sequence
  ENSG00000253819_72 (sequence is synthesized)
tcacaactgctctgaactactgctaccacgaccaccaccaccgctactacttataatggcaattatttattaagcacctgtgaggcttccagcaccattctaagtaatgggcataccttc

SEQ ID NO: 865401 - DNA, 120 bp, Artificial Sequence
  ENSG00000253819_73 (sequence is synthesized)
cctcatctgattcacatacaaaaatgtatgaagtatcatttgcacaggcagtcaatagttaagtgaataacaataactaacacttattacaagattactatatcccactcaatcttcaaa

SEQ ID NO: 865402 - DNA, 120 bp, Artificial Sequence
  ENSG00000253819_74 (sequence is synthesized)
gttcttcatatgcatgactcattacagcctcataatagctttacgaaatcagttcttcatactcactatttaatggataaagaatctgagcctcagaaggttaaggaacttctccaaggt

SEQ ID NO: 865403 - DNA, 120 bp, Artificial Sequence
  ENSG00000253819_75 (sequence is synthesized)
cagctgtggcagatttggagataacccaggtttgtattactcttcctattctacaaataagaggaagtgcctggattcaagaggagaaaagcatataccacattttggggaaatggtaat

SEQ ID NO: 865404 - DNA, 120 bp, Artificial Sequence
  ENSG00000253819_76 (sequence is synthesized)
agaaaaatgaggtaaagtccatcggagacacagttttctctctcagagtttggccaaaaatttgcctggtgtctgaaataggctaatgtatcaataatcctatgtaatatttccatagtt

SEQ ID NO: 865405 - DNA, 120 bp, Artificial Sequence
  ENSG00000253819_77 (sequence is synthesized)
ctttgttgtttggaaggcatacttgcagtcgcaatctgctttggtcctcacgataacccaggaaagtagaaaattcagggactgctgtctccatttcacagacaaggaaactgaactcaa

SEQ ID NO: 865406 - DNA, 120 bp, Artificial Sequence
  ENSG00000253819_78 (sequence is synthesized)
aaattaaaataatttgcccatattcgcacagacagtaagtgtgaaaatctcaggcatcatttcttcattcattcattcaaaacaaatataattttttgaagtctaccatgtacctggcag

SEQ ID NO: 865407 - DNA, 120 bp, Artificial Sequence
  ENSG00000253818_0 (sequence is synthesized)
aagctctgcttcagctgtgagcacagaaggcaggactcgggacaatcttcatcatgacctgctcccctctcctcctcacccttctcattcactgcacagggtcctgggcccagtctgtgt

SEQ ID NO: 865408 - DNA, 120 bp, Artificial Sequence
  ENSG00000253818_1 (sequence is synthesized)
catctcctgctctggaagcagctccgacatggggaattatgcggtatcctggtaccagcagctcccaggaacagcccccaaactcctcatctatgaaaataataagcgaccctcagggat

SEQ ID NO: 865409 - DNA, 120 bp, Artificial Sequence
  ENSG00000253818_2 (sequence is synthesized)
tcctgaccgattctctggctccaagtctggcacctcagccaccctgggcatcactggcctctggcctgaggactaggccgattattactgcttagcatgggataccagcctgagagcttg

SEQ ID NO: 865410 - DNA, 73 bp, Artificial Sequence
  ENSG00000240086_0 (sequence is synthesized)
acagctcccagcttgagctacaccctgcaaggtcattatcattagctgcactttacaggagaggaagctgagg

SEQ ID NO: 865411 - DNA, 120 bp, Artificial Sequence
  ENSG00000240086_1 (sequence is synthesized)
cattatcattagctgcactttacaggagaggaagctgaggctcagagaagcaaactgccctcctacttatgttgaagactttcccatcctatgagcccaggtgggagaagctgaaaatgg

SEQ ID NO: 865412 - DNA, 120 bp, Artificial Sequence
  ENSG00000240086_2 (sequence is synthesized)
cagaaggtcacttttccagctgccctgtgcctggtgagcctgtgacacagaccccgttgctcacatatccacccagtttggtgccataggtggtagtagtaattgtttcagataagattc

SEQ ID NO: 865413 - DNA, 120 bp, Artificial Sequence
  ENSG00000240086_3 (sequence is synthesized)
atcaatggatgttaaaataatgactgaaagaaagacgagaaataagatatttacatagcctccaaacacattccttcaattgtatgggggaaagaggaactttacagtgaagaaacctgg

SEQ ID NO: 865414 - DNA, 120 bp, Artificial Sequence
  ENSG00000240086_4 (sequence is synthesized)
taggcaccacctgaactcagtgataaaacttaatatcctgagtaacggaacaaatcaacaccagatgcctcttgatagaatgcagtgagctgaacacaccatcacttcctggaattcccg

SEQ ID NO: 865415 - DNA, 120 bp, Artificial Sequence
  ENSG00000240086_5 (sequence is synthesized)
caaaaatgcacaacctgaatttactcatagggaaacatcagaagaagccaaactgagcttcagtctacagagtaactggtttgttttcctcaacatcattttaataatttttattaagtt

SEQ ID NO: 865416 - DNA, 120 bp, Artificial Sequence
  ENSG00000240086_6 (sequence is synthesized)
tttttaaggtgttaggccacccaggtgttttgcaacctgcatagcaccgaaccaatgtaagggcattcttaaagttttggtgttgatgaaggccatgctgatgaggaaactacctaaatg

SEQ ID NO: 865417 - DNA, 120 bp, Artificial Sequence
  ENSG00000240086_7 (sequence is synthesized)
gagagggaacagaggagaacgaggaatgttggagagacgagggccctgaatacggtgttcagcatctagatcacaattaataactttgtgtctccgttttctaccctcatttgtgctcca

SEQ ID NO: 865418 - DNA, 120 bp, Artificial Sequence
  ENSG00000240086_8 (sequence is synthesized)
cggctgcaaaacgatgaaatattgattccttcctctagtgaatcaatgtggatgttgtatggcaaagatgaaggcagagagctcatgctttctttgtgccccaccctgaacactatacta

SEQ ID NO: 865419 - DNA, 120 bp, Artificial Sequence
  ENSG00000240086_9 (sequence is synthesized)
cgagccagtgtgttgcagtggttaagcgctcaggctccggaatcagtttcttcatctgtaaaatgcggataatgataatgcatggttcataggcatgatgtgaggagtaaatgggatatt

SEQ ID NO: 865420 - DNA, 120 bp, Artificial Sequence
  ENSG00000240086_10 (sequence is synthesized)
gagtataaggtgcttagcaccatgcctggtccaccatgaacactgaataaatgttggcattgagtgtgactagaagggctaatgcttgtactttgcatgccaacattctcctctggtgtg

SEQ ID NO: 865421 - DNA, 120 bp, Artificial Sequence
  ENSG00000240086_11 (sequence is synthesized)
aagtacagagaaattaagagtagcaaagggaatttggacttaagatcaaatactcatttcacagacaaggaagctgagtgctgggggagatgtctggtctcccctgggttagcacatggt

SEQ ID NO: 865422 - DNA, 120 bp, Artificial Sequence
  ENSG00000240086_12 (sequence is synthesized)
gcacctccaacgtttcccctccctattgccagggtcctctgtcacctccacttgtgctaaccttggtgcttggagaggtgggcagggagctcgtaactccataattgccttgtggatttt

SEQ ID NO: 865423 - DNA, 120 bp, Artificial Sequence
  ENSG00000240086_13 (sequence is synthesized)
atggggccatataacggtgtgctgtgcaaacttttatgagtatttattttacaatgtctattgaaaccattaacactttcattagctagattcaggggctgagagaagcttggcttcccc

SEQ ID NO: 865424 - DNA, 120 bp, Artificial Sequence
  ENSG00000240086_14 (sequence is synthesized)
gatgtatgaggtcaaggctgtctgaagaagatgaatatggtagagataaggaggattttccagtgattgaagagagacttcctagtcaaggactgtggttttggagcagagcagcagggt

SEQ ID NO: 865425 - DNA, 120 bp, Artificial Sequence
  ENSG00000240086_15 (sequence is synthesized)
cgtgttccctgtctctggcagtactctgaacattggcaggacctcagagtggtggcccaaggtgcctaggctgccagccttgccaaaacttcccttcaatcagcttggtgaggaaggaga

SEQ ID NO: 865426 - DNA, 120 bp, Artificial Sequence
  ENSG00000240086_16 (sequence is synthesized)
aggggctgaggcagtgggattctcagtggtaatccagggtgaaccaatgttctataataatattagagggacctccctatgtctgggccctgtgtcctaccttaggaccatggcacaact

SEQ ID NO: 865427 - DNA, 120 bp, Artificial Sequence
  ENSG00000240086_17 (sequence is synthesized)
ccctgtggggagagggaagagaaatccctgtgaatcactcaggctgaatttctcaccaacccagcaagatggaagctcagagttgaaatcaagttgattaataaaacattttaaaagaaa

SEQ ID NO: 865428 - DNA, 73 bp, Artificial Sequence
  ENSG00000240086_18 (sequence is synthesized)
gtctacagctcccagcttgagggttcagccatggatggtgatttaagatgagctccactgaattaatgctgta

SEQ ID NO: 865429 - DNA, 120 bp, Artificial Sequence
  ENSG00000240086_19 (sequence is synthesized)
gatggtgatttaagatgagctccactgaattaatgctgtacccccaggcttgtggaccactttgaaggggttaattgttcggggaatcttggccggtgattttagaagtgattggaggag

SEQ ID NO: 865430 - DNA, 71 bp, Artificial Sequence
  ENSG00000240086_20 (sequence is synthesized)
aaaagcttgctgactcctggtttagatgaggggctgggacttccttgggggaagaggagatggcacaagat

SEQ ID NO: 865431 - DNA, 120 bp, Artificial Sequence
  ENSG00000240086_21 (sequence is synthesized)
ggctgggacttccttgggggaagaggagatggcacaagatgaagaaataatggggtttgcttctttggaccaaatccaagacatctactgtgctgaattctatttgtgtttacatcttct

SEQ ID NO: 865432 - DNA, 120 bp, Artificial Sequence
  ENSG00000240086_22 (sequence is synthesized)
aaagaccaggattccaaggccacatggagcagcaccaccacctgctgcagggcaaaggacccaggctcgcttcccagctgtgggactctggacaagcgtttcccagccaaatcatccttg

SEQ ID NO: 865433 - DNA, 120 bp, Artificial Sequence
  ENSG00000240086_23 (sequence is synthesized)
gactaactacctgtgatctatagcacagaccatagctgtgaagaaaacgggtaaggtacccaactagacgcctatctggacacaatagtcaacaggatggatacagggcgttctctcctg

SEQ ID NO: 865434 - DNA, 120 bp, Artificial Sequence
  ENSG00000240086_24 (sequence is synthesized)
gagatgccagtcagttcatggagttgacttgacttgccacaggagcatggaggatggatcacctgcaccctcctccctcccatcctctttgcctctttatgagatgcctctttatgggat

SEQ ID NO: 865435 - DNA, 120 bp, Artificial Sequence
  ENSG00000240086_25 (sequence is synthesized)
agctcacaaggtgaacagcaactatctaataatccaactggtgtcccctctccaataagggttataacaatctcatgtggatatgagatccttacagggtaagaaatttcctccagtctc

SEQ ID NO: 865436 - DNA, 120 bp, Artificial Sequence
  ENSG00000240086_26 (sequence is synthesized)
attgtcagtagccatttttactcctgaagctatgtacttggagtgcctggaccaagatggagtaaacaagcaaataggtccctgagtcctgtgggcactctggtactcctagcagagtga

SEQ ID NO: 865437 - DNA, 120 bp, Artificial Sequence
  ENSG00000240086_27 (sequence is synthesized)
aggctgttctggagctattagcagcatcacaagccactgctcacaacctggaaggagaattcccatacccaaccactgtgtgtcccagcgtgtgatatccatccacaaggagttcattca

SEQ ID NO: 865438 - DNA, 120 bp, Artificial Sequence
  ENSG00000240086_28 (sequence is synthesized)
aaatgctctctggcaacgacacgtggttccatcctaacttttgaaatgtaagaatgggcaccacagaagagggtggtaccaagagcccagctgagggtcctgcaccccatcaagtcactt

SEQ ID NO: 865439 - DNA, 120 bp, Artificial Sequence
  ENSG00000240086_29 (sequence is synthesized)
cccaatcagtcacctgcttactttgtgacttttctgggcctctgatcccagtctcagtgagtgctgtcgactagaatgcaagctccacaaaggcacagatttttgtctgttatgtttgct

SEQ ID NO: 865440 - DNA, 120 bp, Artificial Sequence
  ENSG00000240086_30 (sequence is synthesized)
gctgtgttcccagtgtctagagcagtatatggcatgcagaaaggccttgaaaaatatttgacgagtaggcgaataaatgggagcccctaaaaagcagtacccttgagccagtacttgcaa

SEQ ID NO: 865441 - DNA, 120 bp, Artificial Sequence
  ENSG00000240086_31 (sequence is synthesized)
gcagtacttggtgagcagtcataaagaatgtgttaagtgaatgaatacatttccaaagttaaaatgcccaaacaaaccaatccctttgagagtggttgagtctcttctgtgttcctctga

SEQ ID NO: 865442 - DNA, 120 bp, Artificial Sequence
  ENSG00000240086_32 (sequence is synthesized)
gtggatcagggcttgtagcatcatcctaagcaacattccctaagttttcctgcaaggagccacagtggaggaagactccagattacatgactaatctgggagggatattaagatgttacc

SEQ ID NO: 865443 - DNA, 120 bp, Artificial Sequence
  ENSG00000240086_33 (sequence is synthesized)
tgtgggtcaccaggacacattctcatcaccactccccagccaaacacttacatactaatgctcatctgtggggactgaagccatctggcaaatatttatcaaggctctctgtgcctggca

SEQ ID NO: 865444 - DNA, 120 bp, Artificial Sequence
  ENSG00000240086_34 (sequence is synthesized)
ttgtgcggctgctctctcaggaaactggtggtaggtgagaaagtgtgactctccacatagctcaccatctggtggaggactgcgaggttgccaaggatagaagccaggacattggtcagg

SEQ ID NO: 865445 - DNA, 120 bp, Artificial Sequence
  ENSG00000240086_35 (sequence is synthesized)
ggcagtgccatctgccgaccctctgagctcaacggagaacacatcattgtttgcaaatggccagggcctttctgaggccacttggaagttccttcccaatgccagagcttaagaaacaat

SEQ ID NO: 865446 - DNA, 120 bp, Artificial Sequence
  ENSG00000240086_36 (sequence is synthesized)
aaaaacaaaattttctagaattaacaatgagaagaaagcaatgaaacaaactatgaaattgaattaagaacagtgaaaattttatttgcttaagttttttttaacttttctttattaact

SEQ ID NO: 865447 - DNA, 120 bp, Artificial Sequence
  ENSG00000240086_37 (sequence is synthesized)
tcgatgaaagttttctttcaagtccttctagtctttaaagttctcactcaatcttttctctgtgttggagcaaattttgcctgctaatttccaataagcacagcccttaaaaatgaactg

SEQ ID NO: 865448 - DNA, 120 bp, Artificial Sequence
  ENSG00000240086_38 (sequence is synthesized)
gcttcagcatatggatcttaacactccacatttttacaggcagcagtgtaatattgttttaatatttaattttgagatttacataatatctttcctccaaagagctcaatatattgcaat

SEQ ID NO: 865449 - DNA, 120 bp, Artificial Sequence
  ENSG00000240086_39 (sequence is synthesized)
ggggagattttgctttattctcaagactctgaagacccactgacagtctgctgttcataaaattccctttgtcatggaaagacacagccagcacttcagggccaaggagtttgaagaagt

SEQ ID NO: 865450 - DNA, 120 bp, Artificial Sequence
  ENSG00000240086_40 (sequence is synthesized)
ccaaggtagagctttctggaaaatcctctggagaggttgatcagaaaccttctcccacataaacaaaggacccaggaagaagctaaaaatgggccatgagattgtctttattcatcaagc

SEQ ID NO: 865451 - DNA, 120 bp, Artificial Sequence
  ENSG00000240086_41 (sequence is synthesized)
ctgaagttttctgactctatctttcttttcccgtggccactgttacctctccagaacagaccccatcacctgaattctgcctgagcctcgacagatatgctcagctgctctcccatgctg

SEQ ID NO: 865452 - DNA, 120 bp, Artificial Sequence
  ENSG00000240086_42 (sequence is synthesized)
gctgttgttaccccaacccacttaaaattccttgaggtcttagaagctctctcccaccaaggtgccgaaagaagtatttcacaggttctcagtgacaattgtttattgaaatttacactg

SEQ ID NO: 865453 - DNA, 120 bp, Artificial Sequence
  ENSG00000240086_43 (sequence is synthesized)
atgagaagtggtccctattaagggaattcaatccaaggagattggctctatactttgaaccgctgtggccaaataaatagatgactgcttgctgcaattatattgctgtggtctttgtat

SEQ ID NO: 865454 - DNA, 120 bp, Artificial Sequence
  ENSG00000240086_44 (sequence is synthesized)
tggaaagctgatttgtataatctggacaggtggcaaggaaacgtaactgtctgctcaagggagagcctgcctggggcagaggaagagagtctgagtagcatcccagttaagtgctcaagc

SEQ ID NO: 865455 - DNA, 120 bp, Artificial Sequence
  ENSG00000240086_45 (sequence is synthesized)
cctgaggtcaggctgcctgcatttgaatcctgattctgccaccaattttctaagtggcatggcaatgttcttaaacttccctttgtgtcatagtaagcaaccgaaaaatggtgctgagga

SEQ ID NO: 865456 - DNA, 120 bp, Artificial Sequence
  ENSG00000240086_46 (sequence is synthesized)
tagagaactccaaaaatagaaattattgctagaaggttcccttgcagtggatatcggggattcaatctgttagtatccagaaactagtttttctgttacttttgtgaaaccactcaagat

SEQ ID NO: 865457 - DNA, 120 bp, Artificial Sequence
  ENSG00000240086_47 (sequence is synthesized)
ctctgtttaacaagcctcccaaagatcttttttcaatatgtttatatgtcttggggattacagcacttgtgggtttcagcagaactctttttgcagaggtctggtggtgtaggaaaaggg

SEQ ID NO: 865458 - DNA, 120 bp, Artificial Sequence
  ENSG00000240086_48 (sequence is synthesized)
ctgtagactaggatctgggagacagacatgtctatgttgagacctgcctctggagcactggccaccctctccaagctgctgcagttctctgagatccaactgtctcccctgttacataat

SEQ ID NO: 865459 - DNA, 120 bp, Artificial Sequence
  ENSG00000240086_49 (sequence is synthesized)
caccacagttaaaatatcaaagtttatatcaaccccaaaagttacctcctgcttctttgtaatctttgcctccatccacccttattcctaggcaaccactgatctgttttatgtcaatac

SEQ ID NO: 865460 - DNA, 120 bp, Artificial Sequence
  ENSG00000240086_50 (sequence is synthesized)
agatcattttgcattctctctaatttcatatacattgcatcatactttatgcactcttttatctggatactttcacttaacataattattttcacatgcattcatgttgttgtgtgcaac

SEQ ID NO: 865461 - DNA, 120 bp, Artificial Sequence
  ENSG00000240086_51 (sequence is synthesized)
aacagtttattagttttcattgctgaatagtattccattgtgtggatataccacatttgtttagccactcatctgtgaatagacattcgggttgtttccagttacttggttatttcaaat

SEQ ID NO: 865462 - DNA, 120 bp, Artificial Sequence
  ENSG00000240086_52 (sequence is synthesized)
tggtaggtaagtgggagccccaaggaagctgctctggcagcatggtgctggtggcctggcctggtgccctgtgctgggtaggggagggatactggcagcatctctggtttggggaaggta

SEQ ID NO: 865463 - DNA, 120 bp, Artificial Sequence
  ENSG00000240086_53 (sequence is synthesized)
aggggccccagaggtctgtttggcagggcaattttgaccaaaattggaacattgcttttagctgggtagccccaagtctggctctatagcctttctaccaattcatgtgataatcaacat

SEQ ID NO: 865464 - DNA, 120 bp, Artificial Sequence
  ENSG00000240086_54 (sequence is synthesized)
ccttaaaaaatcattatctgggaacaatttcatacttataaaatattgcaaaaatagtacaaagaattcccataaacctttcacttagatttccaaaatgttaacactttatcacacttg

SEQ ID NO: 865465 - DNA, 120 bp, Artificial Sequence
  ENSG00000240086_55 (sequence is synthesized)
tggtagcatcctcactctcagagaatggagccatcacccatccagaggcacaggctggatacttggagtcatcctccgccatctgtcactttcacctgtaagtggcatctgctgtcaagt

SEQ ID NO: 865466 - DNA, 120 bp, Artificial Sequence
  ENSG00000240086_56 (sequence is synthesized)
ccttctgcatcaccccactagaacttctgggattcatttgctgcatcccaggcccattgccccgtagcctcctgatgcatcttcctgtctctactagtgcctctcccacccatcctccat

SEQ ID NO: 865467 - DNA, 120 bp, Artificial Sequence
  ENSG00000240086_57 (sequence is synthesized)
gctgcagtcaaggtaaatttaaaaatatatatattttattttgagacaacttcaaatatctataaaagttgcaagaatactacaatgaatgcctgtacactcttcccttaggcaccctat

SEQ ID NO: 865468 - DNA, 120 bp, Artificial Sequence
  ENSG00000240086_58 (sequence is synthesized)
tccagcccaacaattgtcctagagatgtcctgttaaggatcacatggtatacccagtatcatgcccctcaatctggagcagtttctctgtctccttgactttcacgaccctaacattttt

SEQ ID NO: 865469 - DNA, 120 bp, Artificial Sequence
  ENSG00000240086_59 (sequence is synthesized)
tgaagcgcataggccacacattcaatagaatgtacctcagttttaggtagtctgatgttttctcatgatgagacccaagttataaattttgaacagagtattgcaagtattatgttcttt

SEQ ID NO: 865470 - DNA, 120 bp, Artificial Sequence
  ENSG00000240086_60 (sequence is synthesized)
tcattgcatcctctaagttgcacagaatatttacctgtcctattattgctgatgttgactttaatcacttgattcagatggcatttgccaaacttctctgtaaagttactttctccctct

SEQ ID NO: 865471 - DNA, 120 bp, Artificial Sequence
  ENSG00000240086_61 (sequence is synthesized)
ttgtaataaataaatattttggggggagaaactttgaagatatgtaaaatcctgtttctctcctgatgttcaccttaagtttaagcatccatttatgtttcttatctgaattagctatta

SEQ ID NO: 865472 - DNA, 120 bp, Artificial Sequence
  ENSG00000240086_62 (sequence is synthesized)
atctgatggttgccaaatagtgagtttctaacatcatcattctttcctctacagggaagagctttctcttgtttctatttgttcatttatatgcatattagtgtggactcaatagccccc

SEQ ID NO: 865473 - DNA, 120 bp, Artificial Sequence
  ENSG00000240086_63 (sequence is synthesized)
atcttattcagtagattataacttgttactattattatatattgtgaggctcaaattatccagatttggaggcccttcaagctggatgttgtttttgttgtatgttcccattattctttg

SEQ ID NO: 865474 - DNA, 120 bp, Artificial Sequence
  ENSG00000240086_64 (sequence is synthesized)
cattttctggcacaaaaaaaagatgtgttggtctcatctcacattttccctctccaggccttggaaggggccatgtctctaatgagtcctggttgcttttaggggagtatatggaatcca

SEQ ID NO: 865475 - DNA, 120 bp, Artificial Sequence
  ENSG00000240086_65 (sequence is synthesized)
agatctgagagccagctgtactccttgctatgtagatgttactgcttcaaagccactctcagcctatatttatttctccatttctatatatttaaaaccaccggttcacactaatacctc

SEQ ID NO: 865476 - DNA, 120 bp, Artificial Sequence
  ENSG00000240086_66 (sequence is synthesized)
caattttgattccacagcatacaattcattctagcttttatgctttccatatttatacctctgttcccacagtttccattatttcaaatttatttttaaatctccctgtatatagcttgt

SEQ ID NO: 865477 - DNA, 120 bp, Artificial Sequence
  ENSG00000240086_67 (sequence is synthesized)
ctctcaatcttgctgagccagcagcccattcacacatgggtcctgatctctgctagggcttgcctcccttgtttagaacatctaccctggttgagtctgcttaatggctttttggtgaaa

SEQ ID NO: 865478 - DNA, 120 bp, Artificial Sequence
  ENSG00000240086_68 (sequence is synthesized)
gaaaacaggaagaaatccaagaaagttatttctaaagaaggcaaggaaagatattggaaggaaaaggctaaggaaaagccaggctatttttctaaaattcaaatccatcactttcgggcc

SEQ ID NO: 865479 - DNA, 78 bp, Artificial Sequence
  ENSG00000240086_69 (sequence is synthesized)
gaaaggtttcccattgctctaaggctgcaactcctatcacagcgtttggggaagatcctacatgatggactgctacag

SEQ ID NO: 865480 - DNA, 120 bp, Artificial Sequence
  ENSG00000240086_70 (sequence is synthesized)
acagcgtttggggaagatcctacatgatggactgctacaggcctccttggatgcttcctccctaaatctccaaatgccctaaacaggggtcccttctcagttccactccatcttccctct

SEQ ID NO: 865481 - DNA, 120 bp, Artificial Sequence
  ENSG00000240086_71 (sequence is synthesized)
tgccacagggcctttgtatatgctgcctctctgcctctgaagtccgacctgccacatttagttggggcagaatgctgtagattgaatgtttatgtgtcccccaaattcatatgtttaagt

SEQ ID NO: 865482 - DNA, 120 bp, Artificial Sequence
  ENSG00000240086_72 (sequence is synthesized)
cctaataatccccaattgggtgatatttgaaggtggagcctctgggaggtgactgcagttagtttatgtcatgaaggtggagtccccaagatgggattgatgtgctttcaaaagaggaag

SEQ ID NO: 865483 - DNA, 120 bp, Artificial Sequence
  ENSG00000240086_73 (sequence is synthesized)
aggcaagatctctctttctgtgcacatgccaacaaaaggcatctgaggacataaccaggaatagagccctcaataagaatccaaccatccctagttagcaccttgatcttggactcccaa

SEQ ID NO: 865484 - DNA, 120 bp, Artificial Sequence
  ENSG00000240086_74 (sequence is synthesized)
gcctacagatgacaagaaataaatgaccgctgtttaagccatccagggtgtggtagcttgctatgggagcccaggctgactaaaacagtgactgttctttaagtctctgctgtagcacca

SEQ ID NO: 865485 - DNA, 120 bp, Artificial Sequence
  ENSG00000240086_75 (sequence is synthesized)
tctcttcctctgcaagccctcctagacacagttaggcaattttgttatttattgttttatgcatgctctcgcaaaacatagcggcccttatttcagctggtaattatgcactcatttggg

SEQ ID NO: 865486 - DNA, 120 bp, Artificial Sequence
  ENSG00000240086_76 (sequence is synthesized)
catgtgtttgattaatgtccccagtcctcacttaactgagagcagtaacaatgtctccttttgatcatgattatgtccccagcttgtggcctaatgttgacacatagtagatactcaata

SEQ ID NO: 865487 - DNA, 120 bp, Artificial Sequence
  ENSG00000230500_0 (sequence is synthesized)
ccccgcccttcggccaccgcagcagaggccacgcgtgacatttaggaccacgcgtgaccaccgcgatcaaacgacggctacggtctgtgttcgtagggaagtgaagtcagacctctgctg

SEQ ID NO: 865488 - DNA, 120 bp, Artificial Sequence
  ENSG00000230500_1 (sequence is synthesized)
gatgtcgtgtgtcccctaggactgcgtcctcccgcgcagacagagctccagagcaccaccccactgtgcctcattcaggaagtgctgtgatcaagaaaccactactgctgctggtgccag

SEQ ID NO: 865489 - DNA, 120 bp, Artificial Sequence
  ENSG00000230500_2 (sequence is synthesized)
gactgtgattcccatcaacagcactgatggcctgcacctcacctctgacacccatgggactcttgtatgtggacaccagaaagtctgctaattctggaacaaaaacctgaaatgtctcca

SEQ ID NO: 865490 - DNA, 120 bp, Artificial Sequence
  ENSG00000230500_3 (sequence is synthesized)
tgagatggactgctgaaagaaatagaaaaccacagaggtgaggcctccaccgtacttccaaatgctgtattgcacatggaatgcatttgatttgtcagatcaatcactttcagaatccaa

SEQ ID NO: 865491 - DNA, 120 bp, Artificial Sequence
  ENSG00000230500_4 (sequence is synthesized)
gctgcaaaggagttttggaaacacagaccagagttttccagcctctgtcagacgagaaggctaaaaaagattggaatggatgatgggcattcatattcacataaattcgacttctatata

SEQ ID NO: 865492 - DNA, 120 bp, Artificial Sequence
  ENSG00000230500_5 (sequence is synthesized)
aaaatcacagagtttattggctttgtaaaacctgccacttcatcctgacaacattttggatctaagaagttataagttgaacaactcagcatcagttgtttttacactgaagtgttattt

SEQ ID NO: 865493 - DNA, 120 bp, Artificial Sequence
  ENSG00000230500_6 (sequence is synthesized)
aaaagaagcagatacagtcaacttcacaattttatgaacacttaaaaaaaatgaattgacaagaagagacagagtctcactctctcccaggctggaatgcaagtggtgccatcatagctc

SEQ ID NO: 865494 - DNA, 120 bp, Artificial Sequence
  ENSG00000278960_0 (sequence is synthesized)
agctggtgagcccaagagttggctggtccctgctgctgtgctgaagcccccactattcatcttctgagagtccattgtgaacatctctttccaagtctgcattcagcaaagcctaattca

SEQ ID NO: 865495 - DNA, 120 bp, Artificial Sequence
  ENSG00000278960_1 (sequence is synthesized)
tgagacctcagcatgcctacgcagccctgcaggagtgaaatcccaggatccaaaaatccaaggagcatttcggctctaatgaggtcacatgcccaatgggaggccacaaatacacgtcca

SEQ ID NO: 865496 - DNA, 120 bp, Artificial Sequence
  ENSG00000249106_0 (sequence is synthesized)
ggcatttcaatacagtgacccaattactttctgtcaacaaattcaccagcaaaataaaggggctaacacattaatgagatttcctgagactgccctgtagagatgcttgcaatcctttgc

SEQ ID NO: 865497 - DNA, 120 bp, Artificial Sequence
  ENSG00000249106_1 (sequence is synthesized)
tctggagaagccaggcaccatggcatgaggcagccctgtggagaggttcatgtggtacaggaccaggcctgcagcatcacttgagagaggcaacataactcttttactgactatcacaga

SEQ ID NO: 865498 - DNA, 120 bp, Artificial Sequence
  ENSG00000249106_2 (sequence is synthesized)
taggaccacaaaacagccttgtaaactcatcctagaggatctaaaagagaaccccctcataacagaatggcattcccagcttgcaggctctgagactccattgagtcatgccacatgtat

SEQ ID NO: 865499 - DNA, 120 bp, Artificial Sequence
  ENSG00000249106_3 (sequence is synthesized)
ggaaaatgatttttggagtgttattctatctaaggaaaaacaaagcaaattttccactttcaagattaaaggacattctgtctacattaagacaagcaggtacaaagaagtaagttactg

SEQ ID NO: 865500 - DNA, 120 bp, Artificial Sequence
  ENSG00000249106_4 (sequence is synthesized)
ttggattaagaatatccaagacaatggtcacaacttgaaagcacatggaaaaacatgaattatttttataatgtcagctaatccacagctgtgccacctgttagtatggatgctatccaa

SEQ ID NO: 865501 - DNA, 120 bp, Artificial Sequence
  ENSG00000249106_5 (sequence is synthesized)
accttgttatccaaatgcagaaatggcagctgaagagatgatttgtgacagcatttgctgagacgaagtctgtccactagatggataaaatcagttcccttttcatagcttgatcatcta

SEQ ID NO: 865502 - DNA, 120 bp, Artificial Sequence
  ENSG00000249106_6 (sequence is synthesized)
catctgctagtgacccagtccctgagagtcaccaagaattgattccactgaggcgatggcaggcggggctttggtgttggaaaagtcagtggttgatatggacagcacagactcacataa

SEQ ID NO: 865503 - DNA, 120 bp, Artificial Sequence
  ENSG00000249106_7 (sequence is synthesized)
gctgctggtttattacactagaaaaataagggatcccttgacccagctcggcaagtgtgaaatcacgaaataaatgaaggttaacaaagactggtctaaggaatagttcactacaatacc

SEQ ID NO: 865504 - DNA, 120 bp, Artificial Sequence
  ENSG00000249106_8 (sequence is synthesized)
gcaatgctcttctcactaatactcgactctgcatttcggtacttatatctgaaagatttgcaaataatgacaacattcgtgccagacattactgcaagtgaggaacagactaaaggagag

SEQ ID NO: 865505 - DNA, 120 bp, Artificial Sequence
  ENSG00000249106_9 (sequence is synthesized)
gaaggaacaaaatgccttccaagagagaaacattcattagccttactggcaagtgtctaaagcaaacaaggaaactgcaaaataattacttagttacaaataaacgcttttagcacagta

SEQ ID NO: 865506 - DNA, 120 bp, Artificial Sequence
  ENSG00000249102_0 (sequence is synthesized)
gggaacagtagaatcaacagcaatcaagactggcaagccaacatactggccaccataaaactgaaaagagagcttattgtacctcacgcacagcagcaggtttaacagaaaagtagacat

SEQ ID NO: 865507 - DNA, 120 bp, Artificial Sequence
  ENSG00000249102_1 (sequence is synthesized)
gtttatagtcccagatttacagcacaccttataaacaccttattacttagaatccagtctgctgtcccagaaactaagaatgtgactttgttaagcagtaggatttgttgacataaatgt

SEQ ID NO: 865508 - DNA, 120 bp, Artificial Sequence
  ENSG00000249102_2 (sequence is synthesized)
cttgactaagtttgccattgtggttaaccaaaacgcatttactcctgggaaagtaaacacaagcaaacaaaatgcctcttatactacaatacggttgcaaagtccaagatcaagggactg

SEQ ID NO: 865509 - DNA, 120 bp, Artificial Sequence
  ENSG00000249102_3 (sequence is synthesized)
gaatcttatgagggccttctgctatgagagtcacatggcagaagggcaagagaagacaagagagaatgcaagaggaggaaaaactcatccttttatgatggcactaattccactcatgag

SEQ ID NO: 865510 - DNA, 120 bp, Artificial Sequence
  ENSG00000249102_4 (sequence is synthesized)
ggtgtagccctaatggcctcatcacctcttaaaggacctacttcttacttctgttacactgacaaattgcaacatgagttttggaaaggacaaacattcaaaccatagaattatgctcct

SEQ ID NO: 865511 - DNA, 120 bp, Artificial Sequence
  ENSG00000249102_5 (sequence is synthesized)
gcccacccccacctaaactcatgtcctcacacacaaaatacattcgttgcttcccagtagtcccaaaagtcttaactcattctagccccagctcagaagtctaaagcccagagtctcatc

SEQ ID NO: 865512 - DNA, 120 bp, Artificial Sequence
  ENSG00000249102_6 (sequence is synthesized)
taaatcaaatatgggtgaagcccaaggcacaattcatcttgagggaaattctcctccagctgtgagtctgtgaaatcaaaacaaattatgggcttccaagacacaatggtaggacagaca

SEQ ID NO: 865513 - DNA, 120 bp, Artificial Sequence
  ENSG00000249102_7 (sequence is synthesized)
tagactagacattcccatatcaaaaggggtaaatacgcaagaaaaaaaggggtaactggtcccaagcaagtccaaaccccaacagggaaaacaacattaaatcttaaagctggagactaa

SEQ ID NO: 865514 - DNA, 60 bp, Artificial Sequence
  ENSG00000249102_8 (sequence is synthesized)
atactacaatacggaagattcctttttaatagacattacaggtttgtcaggtttgtctga

SEQ ID NO: 865515 - DNA, 120 bp, Artificial Sequence
  ENSG00000249100_0 (sequence is synthesized)
taaagttttctttcatttaaaagatcattcacaaagattgtatccatagatttactttcagtcatatagctaaagtatttggaattccattcttacatttaaaaggcaactggattgcct

SEQ ID NO: 865516 - DNA, 120 bp, Artificial Sequence
  ENSG00000249100_1 (sequence is synthesized)
agaagtttagatgaattctttttgttctttactttttccacattgaagatgtaattaggtcatctgaaaacattaggtttgattataactacatagtgcatgttattcttaagtattagt

SEQ ID NO: 865517 - DNA, 120 bp, Artificial Sequence
  ENSG00000249100_2 (sequence is synthesized)
ataacattgcacaaatggttcttatctccaaagcagagaagatcacaggtggaaggaaggaaaggagagagagttctgtaaattgctgagaacttgtaacataaacaatgtaagagaagc

SEQ ID NO: 865518 - DNA, 120 bp, Artificial Sequence
  ENSG00000249100_3 (sequence is synthesized)
ggtctgctttccttaggtttctagctgctaactgaccctaaactgctcccaatgggacagactgcgactcaaatgcttagaaatttttcatttgtttacacaccggtgtgtaagctcaaa

SEQ ID NO: 865519 - DNA, 120 bp, Artificial Sequence
  ENSG00000249100_4 (sequence is synthesized)
agctattgcctaaccttctactcctgggtgagtgctaaatgctgtagatgagaacaataaactttgtcccaaagatgaggcagcatacctgaaaatttattgtcatctacagttatttta

SEQ ID NO: 865520 - DNA, 120 bp, Artificial Sequence
  ENSG00000249100_5 (sequence is synthesized)
aggttcttgacagctccacttagtaaaaatttcaattcatcaagtgaaataaagtgtcagattctaggcccattttcactatgaattaacaggacagtgggaagcacagcatctcattat

SEQ ID NO: 865521 - DNA, 120 bp, Artificial Sequence
  ENSG00000249100_6 (sequence is synthesized)
gctacttatactaaagaacagatgaacacaagagagatgaaaagcacaaggacaacagagatttgggggagaagcactgtcagccttataaagttagcccagtgcagctccagcaccacc

SEQ ID NO: 865522 - DNA, 120 bp, Artificial Sequence
  ENSG00000249109_0 (sequence is synthesized)
gggggatgcagagcagctgaggctccgtttggcaccacccctctgagggtgccctctgaggccccatcccaggggctgcggggaagccgggcctggggaccccctcccaccctgggctga

SEQ ID NO: 865523 - DNA, 120 bp, Artificial Sequence
  ENSG00000249109_1 (sequence is synthesized)
gcccccaccccactgcctgtgctgcctgtccccggcttccaggtctctgctcctgcgcgccaggcagcgctccacttccgcggcttcgcccttgacagcgccctgtggatcttccgattc

SEQ ID NO: 865524 - DNA, 120 bp, Artificial Sequence
  ENSG00000249109_2 (sequence is synthesized)
ggtaccccgaacccctgtagacgtggcctagggagccccggaccgccggcccctgcggctcccaaagccgaagaacttcttcaaggtgctacagcagaaagcaaaggggatgcagaggtg

SEQ ID NO: 865525 - DNA, 120 bp, Artificial Sequence
  ENSG00000249109_3 (sequence is synthesized)
aaggtccacagccagttcctctactgattccctccaggcataaatgttcaatctaacggctttggttggcactttcacctcagcacttacctatgcctacagcaatgcgagtgggagagc

SEQ ID NO: 865526 - DNA, 120 bp, Artificial Sequence
  ENSG00000249109_4 (sequence is synthesized)
caggaacccagtctccgagcgggacaccacggattgttttatgaaaatggcagctgggacgtggaggaagagccacctgccagttggactggagccacaagctgcactgtgaacctggtc

SEQ ID NO: 865527 - DNA, 120 bp, Artificial Sequence
  ENSG00000249109_5 (sequence is synthesized)
acttggcaccaatgccgtcggcccgtgggtatctgaggggacctgccaattggactgccaaattccccagtttgctcccagatattatagaaaattatttgtataaataatgtaaagaaa

SEQ ID NO: 865528 - DNA, 120 bp, Artificial Sequence
  ENSG00000249109_6 (sequence is synthesized)
caaagatcagccaaatctaggtaaattccggtaaatatactatattcaaccttaaagcttaccaccattacatgcatggctatggtagtatggtatcaacatctgaactagtgaatctaa

SEQ ID NO: 865529 - DNA, 120 bp, Artificial Sequence
  ENSG00000249109_7 (sequence is synthesized)
cacaggtaagaattttaaaatgcccccagatgacttcaaggccaaatttctgctaaggtctccacaaaatggctattttcaaatatagcatattctgactgggttttctgaggtactttc

SEQ ID NO: 865530 - DNA, 120 bp, Artificial Sequence
  ENSG00000249109_8 (sequence is synthesized)
cctcatactttttttgttctgggactgggggctgtggaaggaaagactgctttgcaatgctgcataataaatatggttttaaaagtgcaagtgttacaaatgtcttccctaattaatcac

SEQ ID NO: 865531 - DNA, 120 bp, Artificial Sequence
  ENSG00000249109_9 (sequence is synthesized)
actcctatataagtgaaaaggtaatctgaaattttggtggaaaattacttctgctgaaactaatcttaaggttggacttctttattcattagtttctctttgatattcatatcatcccct

SEQ ID NO: 865532 - DNA, 120 bp, Artificial Sequence
  ENSG00000249109_10 (sequence is synthesized)
taacttactcctctctcacaccaacatgcacccccccaaggctgtcgtaaagaattatctttaaaaaatcttaaaagcagctacaacattttcattccagttatcaaagaggtcattcat

SEQ ID NO: 865533 - DNA, 120 bp, Artificial Sequence
  ENSG00000249109_11 (sequence is synthesized)
ggttctgtaactagaacagaagtgttagaaaaaggataaaatctattgtagttgtacataaagaatattacttccaatgttatatagaactgtaaattaaaaataaactaatggaaaata

SEQ ID NO: 865534 - DNA, 120 bp, Artificial Sequence
  ENSG00000241357_0 (sequence is synthesized)
ttttaggcctccaagaagagtcccatttattagcaaaattactttattctaacaaatagtttaacacaaaaatacgaactagccctccagggatctttggggtctacgcttcccatcgcc

SEQ ID NO: 865535 - DNA, 120 bp, Artificial Sequence
  ENSG00000241357_1 (sequence is synthesized)
agggtgcggggatgcgggggtcgcagacgctccaacggtcaggggacacagcctggctgccgcctcctttcccccgcccctcctagacgccgctaccggaaaccgttaaccctttccttc

SEQ ID NO: 865536 - DNA, 120 bp, Artificial Sequence
  ENSG00000241359_0 (sequence is synthesized)
aacctggatgttgacggggccacctctgatcttgtgaggaactagtcggcgagcaattgctgaagctgcaaaagacttctgaattaacaatgaagaattcagagcatcttttactctcga

SEQ ID NO: 865537 - DNA, 120 bp, Artificial Sequence
  ENSG00000241359_1 (sequence is synthesized)
acaaaaagaacgcagctaaccagagacaaccagtggctgagctggggcgtgagggccctgtcctatggatttctgagcagtggttccatgtggcttacctgagctatcctgagctcatca

SEQ ID NO: 865538 - DNA, 120 bp, Artificial Sequence
  ENSG00000241359_2 (sequence is synthesized)
cttgaagaaaccaaatggactggatgccaaaagcaactttgtgaccccctatcagaggaagtcaagactggcattaacagagccaagactgcaagtgatacagcctaggcatgtgtaaca

SEQ ID NO: 865539 - DNA, 120 bp, Artificial Sequence
  ENSG00000241359_3 (sequence is synthesized)
gaaacagctttgacctctaacaacatccagaaccaatgattcctcctcatggaaccaagaagatgggacatgaccagaacctgctgcaatatgaccgccggcactctttcaaagcaaggg

SEQ ID NO: 865540 - DNA, 120 bp, Artificial Sequence
  ENSG00000233082_0 (sequence is synthesized)
ccggggacgagtggagggcgggggcgccggtgtccatacgaggagaagtctgctcagcatggctctagacagcgggtgtccccacggggtgtccagaagctgctgcatggaccatgcatc

SEQ ID NO: 865541 - DNA, 120 bp, Artificial Sequence
  ENSG00000233082_1 (sequence is synthesized)
attgaaatattttcaagctgattacaccgcagcccgaggctagcctggttgctaagggtgagctccgcggttgctagggggagtaaatcatcttgcattatttgatttttgttatagata

SEQ ID NO: 865542 - DNA, 120 bp, Artificial Sequence
  ENSG00000233082_2 (sequence is synthesized)
tgaaaccgctactcccgcgattaaatgtctctcagcctaacacctatgggacctggggagagggaagagaaaggctccaaccttgaccctgtcaaataaatatctctaactttttctgtc

SEQ ID NO: 865543 - DNA, 120 bp, Artificial Sequence
  ENSG00000233081_0 (sequence is synthesized)
agaggaagtgtgaaaggtatctgagataccagcttagaaaacaactctttagctcctcctggtgattaggacaccactaaacaacaggatgaaggatctgtccccagggccgaagtgatg

SEQ ID NO: 865544 - DNA, 120 bp, Artificial Sequence
  ENSG00000233081_1 (sequence is synthesized)
aggccggagtaactgtaaagtcagatggataatgagaattcaggacgttagccacacgtggactgtggcaaaaagaaagtgacccactgaagaagactgtttttcagctctctcatcaat

SEQ ID NO: 865545 - DNA, 120 bp, Artificial Sequence
  ENSG00000233081_2 (sequence is synthesized)
tgctgtttccaggagcccacagctccaattactcaaaagaacgttgacttttttttttttggtaaaatatcctgattttcaggttaggcaagcaattcattaaaaaataaaagactgcac

SEQ ID NO: 865546 - DNA, 120 bp, Artificial Sequence
  ENSG00000233086_0 (sequence is synthesized)
agggctctcctgctattcagaaagttacaactgtgccctctccagcaaagtctggatctcagccagccctaagagtgtgtctgtgtcttggaggagctctttttgagatgctgtatctca

SEQ ID NO: 865547 - DNA, 120 bp, Artificial Sequence
  ENSG00000233086_1 (sequence is synthesized)
gccctagggtgcaagcccagaggcagtctataccccaactcaactggctggtcctcaatgctgcctgcttccgtgcccaacttagaactacacatctgctgcctcttggtaacatgtcat

SEQ ID NO: 865548 - DNA, 120 bp, Artificial Sequence
  ENSG00000233086_2 (sequence is synthesized)
tataagcccgaagtggacaaaagcaagtgaaggcattcaaacaaatcattcaaagttggaaacagggtttgatgggacatctatagcatgtagaaatatttatgaaaaatggggaaaggc

SEQ ID NO: 865549 - DNA, 120 bp, Artificial Sequence
  ENSG00000233086_3 (sequence is synthesized)
ctgcagggagcacagtggggcgattccttataaaatcacttggaagtgctgggggcttcttcatcagccctaaccctgccaaccactcctgcctcactgaatgtgccaacggattgctca

SEQ ID NO: 865550 - DNA, 120 bp, Artificial Sequence
  ENSG00000233086_4 (sequence is synthesized)
ggatactttataccctctacattgtccattagcaacacaacctagagctaggatggagaaagaaaatgccaaaatgctaatgaaaaatgttcagatgtatcacatattaagcatacatga

SEQ ID NO: 865551 - DNA, 120 bp, Artificial Sequence
  ENSG00000233086_5 (sequence is synthesized)
tctcaaatattttgcctgatttatgctatgcatgctattttccatgttgtgtaggctctgatgctagtctacatttacagaaatctccatcagctgtacaaatggcaatttaaatacatt

SEQ ID NO: 865552 - DNA, 120 bp, Artificial Sequence
  ENSG00000233086_6 (sequence is synthesized)
taactatgtgctaataatctcataatacaatttatcatgtatgattggcagaagaaattatttggggcaaaagctatgattgtattgttgtaagttattatgaatgctgggcagtgtagg

SEQ ID NO: 865553 - DNA, 120 bp, Artificial Sequence
  ENSG00000233086_7 (sequence is synthesized)
gcatggcacttgctaccacctcccagaaatgtgtaagggctgttgaaggtgccttgttcttctttcttcttcaatataagcaaagctatttatatcataaagctgaaacttgaaattcca

SEQ ID NO: 865554 - DNA, 120 bp, Artificial Sequence
  ENSG00000233086_8 (sequence is synthesized)
ggcagtctataccccaactcaactggctggtcctcaatgctgcctgcttccgtgcccaacttagaactacacatctgctgcctcttggtaacatgtcattataagagtttcactctgttg

SEQ ID NO: 865555 - DNA, 89 bp, Artificial Sequence
  ENSG00000233086_9 (sequence is synthesized)
ttgttagccaaaatccatttcccatctatgtctttggtagccaagccttgaacttctcaggagccagtttcatgtatgctttaaaattt

SEQ ID NO: 865556 - DNA, 120 bp, Artificial Sequence
  ENSG00000233086_10 (sequence is synthesized)
gaacttctcaggagccagtttcatgtatgctttaaaatttaacaatctatttctgattcagtgtccacagttgagcatatgcactaaatttagttaattttttttctagggcctaattgt

SEQ ID NO: 865557 - DNA, 120 bp, Artificial Sequence
  ENSG00000233086_11 (sequence is synthesized)
gaattctgtctcctactaagagtgaagagaagtcacaactggagaaagcaagcggagacacaaagaagtaaaatgaatttccctaaatttattctgaagattgccatttgaaatgctctt

SEQ ID NO: 865558 - DNA, 120 bp, Artificial Sequence
  ENSG00000233086_12 (sequence is synthesized)
tgagggatgcgaagtcaaccctggatccaaagtagctttgatgtttgtcaggaaaatgctggaattctatacactacagtttctacagagcatgaagaactccaacttcagacaacctgc

SEQ ID NO: 865559 - DNA, 120 bp, Artificial Sequence
  ENSG00000233086_13 (sequence is synthesized)
cctcagaaagatgtctttctttctaagaatatattgcacttaaggataggaggtgtctcctttggacgtctatgtgccaaatatgtgttgtaaattacttttgtttctcttaataaccag

SEQ ID NO: 865560 - DNA, 120 bp, Artificial Sequence
  ENSG00000233086_14 (sequence is synthesized)
gggtgaagttctcaacagtatttgctgaggatggtacaagatttaagaagaaaacatatttttacatctttccctttggagtgcagtggtgctatctcaattcactgcaagctccgcctc

SEQ ID NO: 865561 - DNA, 71 bp, Artificial Sequence
  ENSG00000233086_15 (sequence is synthesized)
ccatttcttcattttagaatgatactatcagggaaataaagatgaaacgtagaaactttggtgaataatta

SEQ ID NO: 865562 - DNA, 120 bp, Artificial Sequence
  ENSG00000233086_16 (sequence is synthesized)
ggaaataaagatgaaacgtagaaactttggtgaataattaagatcatacacacaagcatatccatgaagtaaaatattttctgcagacctcccctcacctttccaaatcatagtcataaa

SEQ ID NO: 865563 - DNA, 120 bp, Artificial Sequence
  ENSG00000233086_17 (sequence is synthesized)
atactgaaaatcttaagaatgttaaaatgatatgatgaccagaggcctcgaagtaaatggccactttatggaagacattacataattctgttgacaaaattcatatttatatgttcgtag

SEQ ID NO: 865564 - DNA, 120 bp, Artificial Sequence
  ENSG00000233086_18 (sequence is synthesized)
ttgtctttttaactattattaagaatctatttcaaggaaatatatgaatgattccacatcctcacattcattgaatactatttttctttttggtagttaaatcttttcaaacaaactgag

SEQ ID NO: 865565 - DNA, 120 bp, Artificial Sequence
  ENSG00000233086_19 (sequence is synthesized)
tcctcagaacaggaatgacaattatcatgagtttgttattctaatgcttgacttttcttttcttttcttttctttttggttctgaaaacccattgactttctgaattgaaaaacctagct

SEQ ID NO: 865566 - DNA, 120 bp, Artificial Sequence
  ENSG00000233086_20 (sequence is synthesized)
ccggagaatgtatcattgaacttaaataaatttgtgtaaataattataaacataatggtaaattttggccattgtctattataatacctacaaaccattatttttttgttcaatacttgg

SEQ ID NO: 865567 - DNA, 120 bp, Artificial Sequence
  ENSG00000233086_21 (sequence is synthesized)
gcaggtaggggaatgcatattgtagaactttgttaatagagaatctttctggaatagattgataagtatccaagaagcacttggacagctttaaacaaaaatggctccagattataaatg

SEQ ID NO: 865568 - DNA, 120 bp, Artificial Sequence
  ENSG00000233086_22 (sequence is synthesized)
gattacttgatggcatctatactccaatggatcagtctagaaatgttccattagtcaattaaaaaggagactttggattcagtaaggcattattacagattgatggaaggtgattagata

SEQ ID NO: 865569 - DNA, 120 bp, Artificial Sequence
  ENSG00000233086_23 (sequence is synthesized)
ggaatatcatcaatagcttttactttaaaagatcatattttattttgctttttttaaaaaaaaatttatttattttgagaccaggtctcactctgtcacccaggcttcagtgcactgggg

SEQ ID NO: 865570 - DNA, 82 bp, Artificial Sequence
  ENSG00000233086_24 (sequence is synthesized)
ccaggtctcactctgtcacccaggcttcagtgcactggggtgatcacagctcactgaagccttggcttcccaggctaaagca

SEQ ID NO: 865571 - DNA, 120 bp, Artificial Sequence
  ENSG00000233086_25 (sequence is synthesized)
cccaggctggtctcaaactcctgagctaaagtgatccacacacctctgcctcccaaagtgctgggattagaagcatgaggcaccgtgcctggcctttattttgctttctttacttacaac

SEQ ID NO: 865572 - DNA, 120 bp, Artificial Sequence
  ENSG00000233086_26 (sequence is synthesized)
tattttgctttctttacttacaacaataatccaatatattagtgtatatactatagtgtacagcactttcatatatattacttcatataaatctgcatgagcatatttacaatgggaaaa

SEQ ID NO: 865573 - DNA, 120 bp, Artificial Sequence
  ENSG00000233086_27 (sequence is synthesized)
gtagactagaaccttcaaaaagttaaattcaaatggaaggattcacaaagtaatataataatttctgcttgcaaaatatggtggaaaaactgtttcttagggtacagcacatcaagacta

SEQ ID NO: 865574 - DNA, 120 bp, Artificial Sequence
  ENSG00000233086_28 (sequence is synthesized)
taagaatatccacaataatcttccaatttaatatattctgctattttcaatcttttctttttttagtgggctctttttgttgttcttgacttattggtggtgtaggggggcactagtttc

SEQ ID NO: 865575 - DNA, 120 bp, Artificial Sequence
  ENSG00000233086_29 (sequence is synthesized)
ggggggcactagtttcatttcagataaaatgtaaaatatatatgattttataagataaaatggataatttttctttggaatgacagaagaatgaacttaagtttttaaaaaataaatgtt

SEQ ID NO: 865576 - DNA, 120 bp, Artificial Sequence
  ENSG00000233085_0 (sequence is synthesized)
gagaggaaaatgatagaaaatgttctgtctttgaagcactccagccatttgttcccactgagcttggctctggcttgtggatagattccacgggtggaatgccggcatgttcttggagca

SEQ ID NO: 865577 - DNA, 120 bp, Artificial Sequence
  ENSG00000233085_1 (sequence is synthesized)
aaagaaagtgtattccatgtggtgcattccaggccttagaataaaattaaaagggaaatcaatgaagacacatccactgttcacactctcatcttcaatgtttgaccagtggctgaactg

SEQ ID NO: 865578 - DNA, 120 bp, Artificial Sequence
  ENSG00000233085_2 (sequence is synthesized)
tttggagttgcagattgatatttctcttttatagttttaggtgcttgtaattgctctttaatgctcatgtttactcttattctgtgtgtctttaactcataaagacagttttccatgaga

SEQ ID NO: 865579 - DNA, 120 bp, Artificial Sequence
  ENSG00000233085_3 (sequence is synthesized)
ggaatatttacattatactaccagttgagcatcccaaatcagaaagtccaaaatctgaaatactccaatgagcattgcctttgagagtcatgttggtgctcaggttttagattttggagc

SEQ ID NO: 865580 - DNA, 120 bp, Artificial Sequence
  ENSG00000233085_4 (sequence is synthesized)
attttgaatgtgaaattttctgattagggatactcaccctgtactagatctgatcaaagagatatacgtggaaatacaatatcaacttctgggatgcattcttaaagaaagcggtctgcc

SEQ ID NO: 865581 - DNA, 120 bp, Artificial Sequence
  ENSG00000272405_0 (sequence is synthesized)
atggaataggccaatgatgcagcaagagaattgaaggttagactacaggcaggacttcctagagatcaggtttattccactggctgtgcactcccattccaggcccactgtttatccccc

SEQ ID NO: 865582 - DNA, 120 bp, Artificial Sequence
  ENSG00000272405_1 (sequence is synthesized)
atcttccctgccctctcagcatctgccttcatacctgtccctgcactttcctaagcctgagatgatgggaaatttcctacttttcccagatcctcccacctccctgccatcataaccccc

SEQ ID NO: 865583 - DNA, 120 bp, Artificial Sequence
  ENSG00000272405_2 (sequence is synthesized)
atctcccccactgtgtctggatatcattccctagggtcagagttgggagaggagtggcacaaccagatgcttagggcctctctctgacctttcagagggaggaggttcttgatggggcca

SEQ ID NO: 865584 - DNA, 120 bp, Artificial Sequence
  ENSG00000272405_3 (sequence is synthesized)
gattagaggtgcggagaccagctccaggcattggggtgcttgggaggactgttctggggctggagtggggaccattgggcaggagcagccagtgcccaccgggtgctgggaagactgttt

SEQ ID NO: 865585 - DNA, 120 bp, Artificial Sequence
  ENSG00000272405_4 (sequence is synthesized)
gccatgcatctgagctgtgccagggcctgggcctggcccccttctggtgccctccctcccttctctctgggctggagctggagctgctcacagacctggctcccatctctctgacgggca

SEQ ID NO: 865586 - DNA, 120 bp, Artificial Sequence
  ENSG00000272405_5 (sequence is synthesized)
gcccagagacccatatagttggagtcattttggggccaacaccctggaccaccctttcacctctgtctgacagtgggagagtgagggaagagggcctaaggccaatgaggacctaactgc

SEQ ID NO: 865587 - DNA, 120 bp, Artificial Sequence
  ENSG00000272405_6 (sequence is synthesized)
tctggaacatggagggcaacctacccttgaccccaaaaatgggagtcactgaccagtgaggccaagagggtagccccgtgcagttctgagagagctctgtctctccagtctcgggcctca

SEQ ID NO: 865588 - DNA, 120 bp, Artificial Sequence
  ENSG00000272405_7 (sequence is synthesized)
gcctcccaattgcagctaggagccctgaggaaactcagacttccccacatccggtaccagcctcagaacccaggggtccagggttctgtggccttctctatcccacacaccactcatctc

SEQ ID NO: 865589 - DNA, 120 bp, Artificial Sequence
  ENSG00000272405_8 (sequence is synthesized)
cacttcctcttctcttcctccagagcaggccacacctctccaactctaaccctgagagctcagcagtcatgcggtccgttcccttgacgccacaacatccccctctctgtttcagctcca

SEQ ID NO: 865590 - DNA, 120 bp, Artificial Sequence
  ENSG00000272405_9 (sequence is synthesized)
gcgtctgtatctctgcccttgttttgaatttcttgagctgttcaggaaactttcctcttgtcacatcatttctgtctgacccgggatgtccatctccctcacagtcttcatagacccaac

SEQ ID NO: 865591 - DNA, 79 bp, Artificial Sequence
  ENSG00000272405_10 (sequence is synthesized)
catgcacgtgtgtacacacatctaacaacacccaccacctccatgctgaatgcccatcagccggcagccaaggtctgtc

SEQ ID NO: 865592 - DNA, 120 bp, Artificial Sequence
  ENSG00000272405_11 (sequence is synthesized)
tccatgctgaatgcccatcagccggcagccaaggtctgtcccataggaactgagctccagcactcagcagggtcagcagggaggcacaagaagccagagctttggctatagcaggaggga

SEQ ID NO: 865593 - DNA, 120 bp, Artificial Sequence
  ENSG00000272405_12 (sequence is synthesized)
agctctctgctacccccttaacggcttcatgaggagcaacatgagcctacacaatataagcagggccttagggcctgtagaagtaattgcaatcatcatataaatagtcctttttattgg

SEQ ID NO: 865594 - DNA, 120 bp, Artificial Sequence
  ENSG00000272405_13 (sequence is synthesized)
gttagccatagcaacataggcactggtaatactgtgggtgggtctaagggtaacactgttccctgatcttactgtcatcatctgcaatctaagtaatgcagataataatggtgccccttg

SEQ ID NO: 865595 - DNA, 120 bp, Artificial Sequence
  ENSG00000272405_14 (sequence is synthesized)
gacttgacgccaatctcttggtcctattagaaccatgtaggcagagctattccaataggtgggggaatacctgacaggatatggaaatacctgggagagggaattcccaggcccctggca

SEQ ID NO: 865596 - DNA, 120 bp, Artificial Sequence
  ENSG00000272405_15 (sequence is synthesized)
gtgctaggaaggaatgcaatagtggtaaccgaattccagctaatagttactgatgtctacctgagccagttctcctaaatgcttcctgtggataacctcaactgtgagaaaaagattgtt

SEQ ID NO: 865597 - DNA, 120 bp, Artificial Sequence
  ENSG00000272405_16 (sequence is synthesized)
tatgttttgctcattacaccgatgaggaacccgaggttcagagaagtcaactaactaccccaaggtcacagagcaaggagccgagttgggattccagccgaaatgggcactccgaccacc

SEQ ID NO: 865598 - DNA, 120 bp, Artificial Sequence
  ENSG00000272405_17 (sequence is synthesized)
ccctagagcggctctgatcggctgtcctgccggactacagtaaggtgtccccagaagggttgctggccgctgctcctggagctgcctgtgcgtgggggcacggaggcaaggactgatccg

SEQ ID NO: 865599 - DNA, 120 bp, Artificial Sequence
  ENSG00000272405_18 (sequence is synthesized)
gaacgctaccgccctgcctgggacaaggtcggaaatctcggcggccgcgctgggacaggagcgcgcagcagggaagatgcgaggacccgaggggttgctgatcagactgcgagcagcagg

SEQ ID NO: 865600 - DNA, 120 bp, Artificial Sequence
  ENSG00000272405_19 (sequence is synthesized)
ggggctgccactggcagagctggaagcatgtagatcagagatggcagcagcagctgcaggcgctcggggctgtccagcagcctaccccgctgcggtgtcaggagtcgacgagttgggtgc

SEQ ID NO: 865601 - DNA, 120 bp, Artificial Sequence
  ENSG00000272405_20 (sequence is synthesized)
cccagagcctcgaggcaagggctgacaggcggggggcgcagaccaggcaggcactcccttctccctgtccccgaccccacggcgggcggcggggctgcggaggcactcacctacccaggg

SEQ ID NO: 865602 - DNA, 120 bp, Artificial Sequence
  ENSG00000272405_21 (sequence is synthesized)
ctggggttgggtcgcggcactgcgaagtttgtcgcctcctccgggggtctcctccgggtgcacggctcagtcctgcagctgcagctgagactgcggcggagactgcgcgagcgtgaggag

SEQ ID NO: 865603 - DNA, 120 bp, Artificial Sequence
  ENSG00000272405_22 (sequence is synthesized)
gagcgtgaggagaggctggggccgcaggacattcggaagagggcgccggccctcccggcgcagcacaaaaccccctttcttccccccgcccctgccccgccctccccggggccgcccccg

SEQ ID NO: 865604 - DNA, 120 bp, Artificial Sequence
  ENSG00000272405_23 (sequence is synthesized)
gagcgcggggctctcgggacggtcacgggacccgctgccttctctgcttcggctccggcagcagcggcgagagcaaggacgagcgaagtaggacatcgttcagcggatgagaagccgagg

SEQ ID NO: 865605 - DNA, 120 bp, Artificial Sequence
  ENSG00000272405_24 (sequence is synthesized)
gcttggagtagggaggaggggcaggaggggcggggagggagcgttcgcccagcgttcgctgagctaaaggatgacgatgttgcagctggaggggtggaagttggacaactggagagtctt

SEQ ID NO: 865606 - DNA, 120 bp, Artificial Sequence
  ENSG00000272405_25 (sequence is synthesized)
ctcgttgttcaaagaagaaggaggagggagtcaattagactgtaagaagtggatgaagggagaatgggggctttgctcctgaaaagagacaccctttctaataaaaaaaatggaaaactc

SEQ ID NO: 865607 - DNA, 120 bp, Artificial Sequence
  ENSG00000279145_0 (sequence is synthesized)
gatatcatttgaggttaagtgtaattaagacagcaactttaatgaaatgacaatttttgaaatttactgttcttaaaaaaattagtacagcaacgatattaattctagtataattgttgg

SEQ ID NO: 865608 - DNA, 120 bp, Artificial Sequence
  ENSG00000279145_1 (sequence is synthesized)
aggaactgtcttacagtcagtgctgaaatgcctgctaatcttgttatcaaataagaattctaaattttatcaatacccactttatgagcaatttcagcattaattagattaaaaaatgtt

SEQ ID NO: 865609 - DNA, 120 bp, Artificial Sequence
  ENSG00000279145_2 (sequence is synthesized)
tattgtgtgtctgctatgtgtgaggcattgcttgcctcatttagcaacaaaataattagctcgtgttatatttgagaaatctgaattatagggaagtgtattctagatatagatcatgtc

SEQ ID NO: 865610 - DNA, 120 bp, Artificial Sequence
  ENSG00000279145_3 (sequence is synthesized)
ttttaggaccatttaaatctaatatttattgcacttgtgccaattttcaagttctccaagttgttgagattattgccaataagaatactgtctttgttccagggcatgaacgtttggatg

SEQ ID NO: 865611 - DNA, 120 bp, Artificial Sequence
  ENSG00000279145_4 (sequence is synthesized)
ctaagtgtcagggttcatctaaggtaagaagtaggctttgaagttgcctgatgtgttacttgatttcttctttaaaaaaatttaattttttttagagacagggtctagctctgttaccca

SEQ ID NO: 865612 - DNA, 120 bp, Artificial Sequence
  ENSG00000279145_5 (sequence is synthesized)
tgcagtggtgcaatctcagctcactgtaaaactgccaggctcgagcaatcttcctgccttatcctcccgactactagtgtgccatttgaattgtcttcctaacaactgatgtggcaaaga

SEQ ID NO: 865613 - DNA, 120 bp, Artificial Sequence
  ENSG00000279145_6 (sequence is synthesized)
ggcaaagaatctaagatcatgttctctcaatgcaccacacacatgacaatatttcatccccactgttagttatatggactcccagaaataaagtttaccttactgaacaagttttctttc

SEQ ID NO: 865614 - DNA, 120 bp, Artificial Sequence
  ENSG00000279145_7 (sequence is synthesized)
tttgagttgagaagtctccattagagattaggtatccaggaggatttgggtcaaagcagcagaggatgagctccagtagcattgagagagaggcctcaaatctgattgcatattagaatt

SEQ ID NO: 865615 - DNA, 120 bp, Artificial Sequence
  ENSG00000279145_8 (sequence is synthesized)
atctggggcaggtttataattgccagtgcctgggcctctcccagaataattaaatgaaaatctctgggattggggcccaggtgctggtatttttaaaaagccaccaggtgatcctaatgt

SEQ ID NO: 865616 - DNA, 120 bp, Artificial Sequence
  ENSG00000279145_9 (sequence is synthesized)
gttcccaaggttcagaactagtgatctatgtaatagctagaatttcttagtttaggcaattaatgtaaaggtgttttcaaatagtgccttttcaagaggcatgttgtgaaacactgtatt

SEQ ID NO: 865617 - DNA, 120 bp, Artificial Sequence
  ENSG00000279145_10 (sequence is synthesized)
tatgttatcaagtggctcaccaaaataatgagaacatttttagattgatgcttggataactacggtagcagttacataattttccaaatacctaataggactgcactatgatagttagct

SEQ ID NO: 865618 - DNA, 120 bp, Artificial Sequence
  ENSG00000279145_11 (sequence is synthesized)
ggatgttccttgagctgtaaaacagggtacaaagacaatcgttttcattttttattggagtttgattaatattctctctgggtcgatgcgaccttggaattaaacagtgaggattgcatg

SEQ ID NO: 865619 - DNA, 120 bp, Artificial Sequence
  ENSG00000279145_12 (sequence is synthesized)
gtccatttgccaggatctacatattttatctttaattctcccaattatgaaggcctggctaagacttctgcttggatcctaaatgaggcactcatcataatcttgtccttccattggtgc

SEQ ID NO: 865620 - DNA, 120 bp, Artificial Sequence
  ENSG00000279145_13 (sequence is synthesized)
atggtttatcacacacacaaaaactcacctaactttaaaaggaggtgaagaggacatatgcagggaggacattggggtttttattccaagataagtgagttgtaccatctgtggacaggc

SEQ ID NO: 865621 - DNA, 120 bp, Artificial Sequence
  ENSG00000279145_14 (sequence is synthesized)
atagcagtaagtggaatattacttgaagcattttatcagaacctctttgctacagtttggatgtttgttccctccaaagctcatgttgaaatttggttgccattgtaatagtattgagac

SEQ ID NO: 865622 - DNA, 120 bp, Artificial Sequence
  ENSG00000279145_15 (sequence is synthesized)
acagtatctttaacaggtgattaggccatgaaggctccactcttgtgggtgggtttaacgcctttaaaaaatggctctgggagtgggctctgtctctcccatgtgttttcttgccctttg

SEQ ID NO: 865623 - DNA, 120 bp, Artificial Sequence
  ENSG00000279145_16 (sequence is synthesized)
cttttctgccattgaatgccgcagatagaaggccctcaccagatgcgagtccctcagccttggacttccagcttccagaactgtaagaaacaaatttattttccttgtaaattacccagt

SEQ ID NO: 865624 - DNA, 120 bp, Artificial Sequence
  ENSG00000279145_17 (sequence is synthesized)
ctcaggtagtctgtttagcagcagcaaacagactaagacattctaccatcagatttgtgtttccccaatgacattggagttcaaggtccattagtgagatatggacaggtacagtgtgtt

SEQ ID NO: 865625 - DNA, 120 bp, Artificial Sequence
  ENSG00000279145_18 (sequence is synthesized)
agtgcagatgaactattcaatctcattttggagggtttccatcataaaacacaaatgatttagtcaaagcagcatcttctgaatttcttagctgacttataaaaacaaataagccacttt

SEQ ID NO: 865626 - DNA, 120 bp, Artificial Sequence
  ENSG00000279145_19 (sequence is synthesized)
ctgtctttattattttcttcccaggaagggagctttacagtcatgagggtagtaaataagtattactttttaaagaagctctggagctatggggatttaataaatagttcattgcttccc

SEQ ID NO: 865627 - DNA, 120 bp, Artificial Sequence
  ENSG00000279145_20 (sequence is synthesized)
tatctccaccaaaatctcttcactctaactgcagccttgaaacccaagtgttcgggtttggacttttttttttttcttttgagacacagcgtcactcttgcccaggttggaatacagtgg

SEQ ID NO: 865628 - DNA, 75 bp, Artificial Sequence
  ENSG00000279145_21 (sequence is synthesized)
cgccagtctccggagtatagctgggactacaagcacctgccaccacttgcccagctaatttttgtattttcagta

SEQ ID NO: 865629 - DNA, 120 bp, Artificial Sequence
  ENSG00000279145_22 (sequence is synthesized)
agtgctgggattacaggcgtgatccaccgctcctatctaggttttggacttttaatctacctcttcttaatacccttccctcttctctaaaagcaagatatatttatagcctatttatta

SEQ ID NO: 865630 - DNA, 120 bp, Artificial Sequence
  ENSG00000279145_23 (sequence is synthesized)
attactttgggatcaacttcaaatgtttatttttggataagatgagtgagttacaaaactagcaacctgcaaagtgtttgaaagtttaactgctattttttcggttatccattcacccat

SEQ ID NO: 865631 - DNA, 120 bp, Artificial Sequence
  ENSG00000279145_24 (sequence is synthesized)
tcaatgaatattattgaggtgctactatgtgccaggcacttctagacatggtggggatattatagtaaatggaacagatggcaatccttgcacacatggaatagtgagggaaagaaagtc

SEQ ID NO: 865632 - DNA, 120 bp, Artificial Sequence
  ENSG00000279145_25 (sequence is synthesized)
acagaggctgacaccaatcacaaatggaaaatgatacaaggtgtgttaagggttttaaaagaaaaatgacataaaaaatatacaaaaacttgactcggaaattgtacttaagaaatatat

SEQ ID NO: 865633 - DNA, 120 bp, Artificial Sequence
  ENSG00000279145_26 (sequence is synthesized)
cgtaaggaaataattatgtgcccaaatatgcacgtactaaaatattcactatattttttagcacaacattgaaaagaagaactagttaaataaagttaaggactgattaaggactagtta

SEQ ID NO: 865634 - DNA, 120 bp, Artificial Sequence
  ENSG00000279145_27 (sequence is synthesized)
aattagatgctgcagtcatgtgtcgaatgacatagaaagatgcttacaatacattaaatgaaaattgctggtttcaaaattgtatgatatgattcctctaaaagagtagttttcaagcag

SEQ ID NO: 865635 - DNA, 120 bp, Artificial Sequence
  ENSG00000279145_28 (sequence is synthesized)
gagtgatttttgcctctgaggggccatttgtgaatgtctggagaccctttaggttgttacaagcagggtggaggttggtgctactggcctttagtgattagcagtcaggcatgccgctga

SEQ ID NO: 865636 - DNA, 120 bp, Artificial Sequence
  ENSG00000279145_29 (sequence is synthesized)
acatcctgcaatgcacaggacagccccctaccacaagtaattatttggctcaaaacgtcagtagtactgagatttagaaatcctgcttttaaacaattacaaataccattgcaaggacaa

SEQ ID NO: 865637 - DNA, 120 bp, Artificial Sequence
  ENSG00000279145_30 (sequence is synthesized)
atattttctgaataaatagcattatggatgttttaaatgttatttttctttgtgtgttaattcagatgttgctttaaatgagaagtactgactttgtaattaaaaacaaaaactatttta

SEQ ID NO: 865638 - DNA, 120 bp, Artificial Sequence
  ENSG00000279145_31 (sequence is synthesized)
aaatgtgctaaattttggacctatctcagcctgagaaggtttttttctaaaaaggttcaggcatctttttattttcctactgctctccttacctgtgcacacctcattgcctgtatctgt

SEQ ID NO: 865639 - DNA, 120 bp, Artificial Sequence
  ENSG00000279145_32 (sequence is synthesized)
gatgcctctatttggagggaacctgggttatgcctgggcctggtttactcccataacatgggttgctgtacttgcccacttaattgtgagctctatccatccaggaaagtaatctgttcc

SEQ ID NO: 865640 - DNA, 120 bp, Artificial Sequence
  ENSG00000279145_33 (sequence is synthesized)
ttattttgaatagcgtgttcttagaagttcatgggttctaattgaaggaaactagagggaccccttccatccttcagcaagggtccccaaagataggcagggtgcccagagaatgcctca

SEQ ID NO: 865641 - DNA, 120 bp, Artificial Sequence
  ENSG00000279145_34 (sequence is synthesized)
actgctgagaactccaccctttcaggtccagtgcaggctcatctccagaaaagctgggttagagttgtctcactgtttgggttggaatattgtgatttctaggagtggaaatgcacttgc

SEQ ID NO: 865642 - DNA, 120 bp, Artificial Sequence
  ENSG00000279145_35 (sequence is synthesized)
taatttagctatctcctctttataagacgctcatggaaataaagattagccataaaatacctttaatgagcttccaaattttatctgcaaggaacccagggcctgtggcattatactggt

SEQ ID NO: 865643 - DNA, 120 bp, Artificial Sequence
  ENSG00000279145_36 (sequence is synthesized)
ttgtagaagactcctgtggtgtctgcagaaactttctctggtgaatatctagaatttccattactttgaatgtgtacatgttattaatcaaggaattaatcatccccattctctttgatt

SEQ ID NO: 865644 - DNA, 120 bp, Artificial Sequence
  ENSG00000279145_37 (sequence is synthesized)
gaaagtcacattaccttggaaggacaaggtgttgtcaaatgggcaaggcagatcatatgttttcttttactggactccttatttttctaattacagcctgtgtatcctgtgctagagagc

SEQ ID NO: 865645 - DNA, 120 bp, Artificial Sequence
  ENSG00000279145_38 (sequence is synthesized)
ctcttgaaattaacttaatttactatcacacttgtaacatacccatttatttgggcctgtgaatatgtgtgcactccatttgattacatctaatgttctccctaaataaagagtacaatt

SEQ ID NO: 865646 - DNA, 120 bp, Artificial Sequence
  ENSG00000279145_39 (sequence is synthesized)
aattcattagaggatggtttgtttccaggggtaagtgccagtttatgatgattccatcaacacttgcaccacattaatttatttccaatttaatcagtgtttaaattgaactgggatcag

SEQ ID NO: 865647 - DNA, 120 bp, Artificial Sequence
  ENSG00000279145_40 (sequence is synthesized)
gcagaacaaaacacatggttttgcataattataatggagcaaatggaaatagtcatagcacttcagcattagaaacctcactgcagaagcacagatgggttaggagatgttgattaaaaa

SEQ ID NO: 865648 - DNA, 120 bp, Artificial Sequence
  ENSG00000279145_41 (sequence is synthesized)
agatgtctaggaataaatcctctgtaagcactgtattaaaatccaagtgcctgcaggacaagcgactttgcattaattactaaaaaatttcttattctgggtatagctttctgtagaaat

SEQ ID NO: 865649 - DNA, 120 bp, Artificial Sequence
  ENSG00000279145_42 (sequence is synthesized)
cctacagattgagtaaactgtggaggcactccttttcatgctccatttaacttaaattattagctggttcagaaagttgtttcttcccagacttgtctaggaagttcaatatttagcaat

SEQ ID NO: 865650 - DNA, 120 bp, Artificial Sequence
  ENSG00000279145_43 (sequence is synthesized)
tacccctttgtgcttctcgaaccttctccaagccagtgtcgttgaaggacagatttgccatgtgggaaggtgggctaccttggaaaacagatttttggttcggagcttgtctgaaactct

SEQ ID NO: 865651 - DNA, 120 bp, Artificial Sequence
  ENSG00000272406_0 (sequence is synthesized)
aagccccgccccccagtgggcggagaaggcgttacaagccaagggtgcctggtgtcaaatcttatgtactgggactcctaaaacatctgaagtctaccatctccttcctagcctcatctt

SEQ ID NO: 865652 - DNA, 120 bp, Artificial Sequence
  ENSG00000272406_1 (sequence is synthesized)
cctgggcccttaaatacctcttcctagatgaaggcagcaccttgagactaaattcaacccaacactacaggttgggttgcagatatggccttgaagcaatggtaaaggaaaaagaatcag

SEQ ID NO: 865653 - DNA, 120 bp, Artificial Sequence
  ENSG00000272406_2 (sequence is synthesized)
tgctagaatgtgtgccggctatgagcagggtcactgtctgtcttgttcactgctagatcctcagcacgtggaactatacctggaacatggaaggaagtcaagcaatatttatttaatgtt

SEQ ID NO: 865654 - DNA, 120 bp, Artificial Sequence
  ENSG00000272406_3 (sequence is synthesized)
aaataagtgaatctctgtagcattaatggtaaaaagacttccatatttgccttcaattagattttaagatgacagtctataaaaaacagcttgcaatatacagaagttcatttaagaata

SEQ ID NO: 865655 - DNA, 120 bp, Artificial Sequence
  ENSG00000272402_0 (sequence is synthesized)
ttagctggatgtggtggcacacgcctgtagtccagccactcgggaagctgaggtggataacctgcgcccaggaggtcaaggctgcggtgagccatgatccatatgccagtgtactccagc

SEQ ID NO: 865656 - DNA, 120 bp, Artificial Sequence
  ENSG00000272402_1 (sequence is synthesized)
aaaataaataaaagatttaagcatatcctggggtaagggactagaaaaaagccaaagtattaccagttaaatcaaaacccttatttttaaaaagtagttaccatttgaacatccaactta

SEQ ID NO: 865657 - DNA, 120 bp, Artificial Sequence
  ENSG00000272402_2 (sequence is synthesized)
attacaaagttcatcttttcttcactatctagcacctctaaaaggcaaaataaggactctgactttgaagatgtctgaagtagcctacaaatgtaaataaacctatacatatgtaatata

SEQ ID NO: 865658 - DNA, 120 bp, Artificial Sequence
  ENSG00000258891_0 (sequence is synthesized)
ccagagaggagcaagtgtttcctagagagccctttcttttctccagaagatatggcttttgaaggcataagcagagcccaaaaaaaaggaaagaatacctgctcttgttaggttaagaag

SEQ ID NO: 865659 - DNA, 120 bp, Artificial Sequence
  ENSG00000258891_1 (sequence is synthesized)
ccgtctggacccacattcacccgaaggcttctcaaaacagctgaggaagggacctccttggaggagttagaatgatttgtagtatcatctagtaaagggaaaataccacagctttatgta

SEQ ID NO: 865660 - DNA, 120 bp, Artificial Sequence
  ENSG00000258891_2 (sequence is synthesized)
gcacctatctctaggagcccaccattttgatacacagcacccaacatctcttggaagctaacatccttatagcaacagacagcattctcattacacaaataaaaactttgtctcacagaa

SEQ ID NO: 865661 - DNA, 120 bp, Artificial Sequence
  ENSG00000258891_3 (sequence is synthesized)
agaagtgcacttgaaaaaaagaacaaagcagatgagagtattcagtggctggagatacacaaaaagaagtctcaagcaatgtccaaatctgtgaccttgcgtgcaaaagccatggatccc

SEQ ID NO: 865662 - DNA, 120 bp, Artificial Sequence
  ENSG00000258891_4 (sequence is synthesized)
cataaaagcctggaggaagtgttcaaagcaaagctgaaagagaaccggaacaatgaccgtaaaagagcgaaagaatataagaaagaactggaggaaatgaagcagcgaatacaaacaagg

SEQ ID NO: 865663 - DNA, 120 bp, Artificial Sequence
  ENSG00000258891_5 (sequence is synthesized)
ccctatctctttgaacaagttgccaaggatctagccaagaaagaagcagaacagtggtatctagacaccctgaagcaggctgggctggaggaagactttgtgagaaacaagggtcaaggc

SEQ ID NO: 865664 - DNA, 120 bp, Artificial Sequence
  ENSG00000258891_6 (sequence is synthesized)
acccgggctgttcaagagaaagagaccaaaatcaaggattttcccaggcacacagtaggcactgaataaatgcatgctgacctcacctgttaagtttttcagagaagagggcctggcctg

SEQ ID NO: 865665 - DNA, 120 bp, Artificial Sequence
  ENSG00000258891_7 (sequence is synthesized)
tgtaacttgggtgaaatttctataccagagaggagcaagtgtttcctagagagccctttcttttctccagaagatatggcttttgaagaaacggggcttcactgtgttgcccaggctagt

SEQ ID NO: 865666 - DNA, 120 bp, Artificial Sequence
  ENSG00000258891_8 (sequence is synthesized)
ctgctcgcctcagcctcccaaagtgccaagattacaggcataaaccactgcgccctgccaacgatgacaacctaacagcaacgggcacatggcacccagactgtggttccaactataagg

SEQ ID NO: 865667 - DNA, 120 bp, Artificial Sequence
  ENSG00000258891_9 (sequence is synthesized)
cagactgtggttccaactataaggaaccaggactccatggaggaatagctgattccaagtccaaggtaagcctgggaactgttgttgtgttagaaagcagagaggctataacaagacaaa

SEQ ID NO: 865668 - DNA, 120 bp, Artificial Sequence
  ENSG00000258891_10 (sequence is synthesized)
tgggtcatgtcaaaagcataaatacagcatgagaagctccaaaaataacaaccaggccaggcacggtggctcgtacctataatcccagtactttgggaagccaaggcaagtgaatcactg

SEQ ID NO: 865669 - DNA, 120 bp, Artificial Sequence
  ENSG00000258891_11 (sequence is synthesized)
aaggcaaaaccccatctctactaaaaaatatgcaaacattaacaagacattggtggtggacgcctgtagtgccagctgctcaagaaactgtggcatgagaatcacttgaaccagggaggc

SEQ ID NO: 865670 - DNA, 120 bp, Artificial Sequence
  ENSG00000258891_12 (sequence is synthesized)
gcatgagaatcacttgaaccagggaggccagtataattaccctcatagaaaagctaaagatatcacaagaaaacattacagaccaatatcgctcatgaacatccagactccttttcctcc

SEQ ID NO: 865671 - DNA, 120 bp, Artificial Sequence
  ENSG00000258891_13 (sequence is synthesized)
ttcctttccactctcccgccctccttctctatctctcccttcctctcatccttccttccttccctccctccctctctcttactgatttattattttttgtagaggacaggtctccctatg

SEQ ID NO: 865672 - DNA, 69 bp, Artificial Sequence
  ENSG00000258891_14 (sequence is synthesized)
actgatttattattttttgtagaggacaggtctccctatgctgcccaggctggtccagaactcctaggc

SEQ ID NO: 865673 - DNA, 120 bp, Artificial Sequence
  ENSG00000258891_15 (sequence is synthesized)
tatgacaaaaccaagtctagcaccacataaataggactatacaccctgaccaaatgggatttaccctagaaacacaaagttggttttacatccaaaaaccaactactagcagtaaaatta

SEQ ID NO: 865674 - DNA, 120 bp, Artificial Sequence
  ENSG00000258891_16 (sequence is synthesized)
gtagcatacagtacaaaaacaagatcatctcaacagacacacgaaggtgtttgacaagatccaatacccattcataataaaaattctcaacatactaggaagagaaggtaaattccttca

SEQ ID NO: 865675 - DNA, 120 bp, Artificial Sequence
  ENSG00000258891_17 (sequence is synthesized)
aacccgggaggcagaggctgcagtgagcccagattacgccattgcactccagcctgggtgacagtgggagactcagtctccaaaaaaaaaaaaaaaaaaaggaaattaaggccaggtgca

SEQ ID NO: 865676 - DNA, 120 bp, Artificial Sequence
  ENSG00000258891_18 (sequence is synthesized)
aggccaggtgcagtggctcatgcctgtcatcccgacattggaaggctgagacaggaagactgcttgatcccaggagtgtgaaaccagcctgggcaatatggcaagaccctgtctctataa

SEQ ID NO: 865677 - DNA, 69 bp, Artificial Sequence
  ENSG00000258891_19 (sequence is synthesized)
ggagtgtgaaaccagcctgggcaatatggcaagaccctgtctctataacaattttttgaaaaaactagc

SEQ ID NO: 865678 - DNA, 120 bp, Artificial Sequence
  ENSG00000258891_20 (sequence is synthesized)
ttgcagtgagctgagattgcgccactgtattccagcctgggcaacacagcgagactcaaaaaaaaagctgggcatgtgcctgtagtcccagcctcgggagactgatgtggaaggactgcc

SEQ ID NO: 865679 - DNA, 120 bp, Artificial Sequence
  ENSG00000258891_21 (sequence is synthesized)
aaccatgatcatgccactgcactccaacctgagcaacagagggagaccatgtctcaaaaaaaagcaagaaagaaaggaaattaaaggcatctagcttggaaaggcagaagcaaaactatc

SEQ ID NO: 865680 - DNA, 120 bp, Artificial Sequence
  ENSG00000258891_22 (sequence is synthesized)
aggcatctagcttggaaaggcagaagcaaaactatctttactctcagatgacatgatcttttatgtagaaaacactaagaaatctattttttaaaaactactaaaactcagccaagtgtg

SEQ ID NO: 865681 - DNA, 120 bp, Artificial Sequence
  ENSG00000258891_23 (sequence is synthesized)
gtggctcatgcctgtaatcccaacaacattttgggaggccaaggtgggaataccacttgaggccaggagttcaggacgagcccaggcaacacaaagactccatttctacaaaataataga

SEQ ID NO: 865682 - DNA, 120 bp, Artificial Sequence
  ENSG00000258891_24 (sequence is synthesized)
aattagctagatgtggtggtgtgagcctgtagtcctattgcaggaaactgaggactggagagactgatacggagaacaggaggattgtttattttaggtacgcaccagctcagtggattc

SEQ ID NO: 865683 - DNA, 120 bp, Artificial Sequence
  ENSG00000258891_25 (sequence is synthesized)
acatccaaaaagctgagcattaaacaaagacggagtggggtttttgtaagcggacttacaaaagtaaaacaaaagcagttaatcatgacaggtcacatactttatagcatagcataactt

SEQ ID NO: 865684 - DNA, 120 bp, Artificial Sequence
  ENSG00000258891_26 (sequence is synthesized)
gtggccttgcatagctggtgaccttatagctgcattgaaagaaaaataagaactggctaaatacagacatttgcaaaacacagttatgcttaagaagccagggaaaggagtaacagtaaa

SEQ ID NO: 865685 - DNA, 120 bp, Artificial Sequence
  ENSG00000258891_27 (sequence is synthesized)
ggaatttgtctttcctttttttttccttcaaccttgctctggaagagggggtgtctggagtccattcctttggccttggcttctcaaacagcgttatcttataactgtccttgaagtgag

SEQ ID NO: 865686 - DNA, 120 bp, Artificial Sequence
  ENSG00000258891_28 (sequence is synthesized)
gttatcttataactgtccttgaagtgagcttgctaggcagaggaaaacttgttcttttctttttaacccttgccttgcctgttacttttcttggagtgaatgaatgcatatttattttta

SEQ ID NO: 865687 - DNA, 89 bp, Artificial Sequence
  ENSG00000258891_29 (sequence is synthesized)
agatcacttgttcccaggagttcaaaggcttcagtgagctatgatggtgccactgcactctagcctgggcaatagagtgagactttgtc

SEQ ID NO: 865688 - DNA, 120 bp, Artificial Sequence
  ENSG00000258897_0 (sequence is synthesized)
gcaaaagaccgattgtacttgaggaacaaaatcggggatgatcatcctttagtggcgggaagctggaaaatgagggactgtgggctgtgaggagagagaaagaggcttgagaaaccagaa

SEQ ID NO: 865689 - DNA, 120 bp, Artificial Sequence
  ENSG00000258897_1 (sequence is synthesized)
agatttttctgagatggacagtgcctctcactgaccccgcccccagtatcctacgaccaaggaaaagaatctcatgtgtcatttctgtgggccacggtagttaaggaaactccatgtatt

SEQ ID NO: 865690 - DNA, 120 bp, Artificial Sequence
  ENSG00000265496_0 (sequence is synthesized)
agcagtgttgcccaaggggcgcggcgaggcttccggctctgcggcctgcaggtagcgcgaaagtcctgcgcgtcccagatgcccaactaaaagcttcgctgcgggaagaaagcctgacct

SEQ ID NO: 865691 - DNA, 120 bp, Artificial Sequence
  ENSG00000265496_1 (sequence is synthesized)
gactacacccagacccagaacgcaggatctcggtaaaggatgatgcctgtgcaaacggcgcggcacccacacggaaggtggcagctaggccgttgaggcaactgtggataagctattagt

SEQ ID NO: 865692 - DNA, 120 bp, Artificial Sequence
  ENSG00000265496_2 (sequence is synthesized)
aaagtactgacgctcgctaggatgtcagtacgtgttggcgaagttgtgtgaaaactgggaccctcataaaccgttggtggaaatgtagcgtgcagcctttttggaaatatttggaagttc

SEQ ID NO: 865693 - DNA, 120 bp, Artificial Sequence
  ENSG00000265496_3 (sequence is synthesized)
ctcagatgtttactcagtaactacagcactgcttccacagaagtagccacacgggcctcaccaatccagtcaaccctttggaagaaaatacagcctgtttcaatccaatgctggatcttc

SEQ ID NO: 865694 - DNA, 120 bp, Artificial Sequence
  ENSG00000265494_0 (sequence is synthesized)
ctaatatagtaaattggtaccagtggagtggggtgttgctgaaaagatatgaaagcaactttggaactggctaacaggcagtggttggaatagtttggaggactcagaagaagaaaggaa

SEQ ID NO: 865695 - DNA, 78 bp, Artificial Sequence
  ENSG00000265494_1 (sequence is synthesized)
ttggaatagtttggaggactcagaagaagagaatcgctttgaccaaaagtctgatagcgatatggacaataaggtcca

SEQ ID NO: 865696 - DNA, 88 bp, Artificial Sequence
  ENSG00000265494_2 (sequence is synthesized)
tgggaactggagcaaaggtgactcttactatgttttagcaaagagaccggtggcattttgcccccgagatgatttagggtatctggca

SEQ ID NO: 865697 - DNA, 84 bp, Artificial Sequence
  ENSG00000265494_3 (sequence is synthesized)
aacttgagctgcagcaaagcattcaagagttgacttgggtgctgttaaaggcattcagatttataagggaagcagagcataaaa

SEQ ID NO: 865698 - DNA, 120 bp, Artificial Sequence
  ENSG00000265494_4 (sequence is synthesized)
gagaagaaaagcccattttttgaggagaaattcaagccagctgcataaatttgcataagtaacaagaagccgcatgttaatccccaagacaacggagaagacatctccaggacatatcag

SEQ ID NO: 865699 - DNA, 120 bp, Artificial Sequence
  ENSG00000265494_5 (sequence is synthesized)
aggtcttcacagcagcccctcccgtcacaggcccagaggcctaggagaaaatggtttcctggacctgtgcagcctaggtacttggcaccctgtgtcccagctactccagtagtggctgaa

SEQ ID NO: 865700 - DNA, 120 bp, Artificial Sequence
  ENSG00000265494_6 (sequence is synthesized)
aggggccaaagtacagcttacgccatggcttcagagggtgcaagcgccaagccttggcagcttccgcatgctgttgagcctgcaaatgcacagacgtcaagaatttggatttgggaacct

SEQ ID NO: 865701 - DNA, 120 bp, Artificial Sequence
  ENSG00000265494_7 (sequence is synthesized)
cctctgctagggcagtgtggaagggaaacatggggtctgagcccccacacagaatccctactgaggcaccacctagtggagctgtgagaaaagagccaccatcctccacaccccagaatg

SEQ ID NO: 865702 - DNA, 120 bp, Artificial Sequence
  ENSG00000265494_8 (sequence is synthesized)
acagcttgcaccatgcacctggaaaagccgcagacattcaacaccagcccgtgaaagcagccaaaagggggaatatatcctgcaaagccacaggggaggagcttcccaagactatgggaa

SEQ ID NO: 865703 - DNA, 120 bp, Artificial Sequence
  ENSG00000265494_9 (sequence is synthesized)
gcagccaaaagggggaatatatcctgcaaagccacaggggaggagcttcccaagactatgggaacctacctcttacatcagcacgacctttgtgtgagacctggagtcaaaggagatcat

SEQ ID NO: 865704 - DNA, 120 bp, Artificial Sequence
  ENSG00000265494_10 (sequence is synthesized)
tttggagctttaaaatctgactgccctgctggatttcagacttgcatgggccctacaacccctttgttttggccgatttctccaatttggaaaggctgtatttacccaatacctgtaccc

SEQ ID NO: 865705 - DNA, 64 bp, Artificial Sequence
  ENSG00000265494_11 (sequence is synthesized)
ctgggagacgtttgggacggcatgattggttttgaaatgtaaggacaggagatttggaggggcc

SEQ ID NO: 865706 - DNA, 120 bp, Artificial Sequence
  ENSG00000265494_12 (sequence is synthesized)
attggttttgaaatgtaaggacaggagatttggaggggccgcatgtggaataatatgatttggctgtgtccccaccccaatctcatcttgaattatactcccataattcccatgtgttgt

SEQ ID NO: 865707 - DNA, 60 bp, Artificial Sequence
  ENSG00000265494_13 (sequence is synthesized)
ccataattcccatgtgttgtgggagggaactggtgggagataatttgaatcatgggagca

SEQ ID NO: 865708 - DNA, 120 bp, Artificial Sequence
  ENSG00000271171_0 (sequence is synthesized)
gaaagcgggagatttggcaaccagtgcgcgtgggtgcgccggcccttgcagctggggactctggaggcagaccttgcccaaagccagaggcaggaactccccagatcctcccagggtagc

SEQ ID NO: 865709 - DNA, 120 bp, Artificial Sequence
  ENSG00000271171_1 (sequence is synthesized)
atgggaggatgccgcctcctccaggaagctctctagcgcttttccgagtcctggagccaggcgggacttctctgtggtcgcctagaagggtatgaacttagggcatccccatctgggctg

SEQ ID NO: 865710 - DNA, 120 bp, Artificial Sequence
  ENSG00000271171_2 (sequence is synthesized)
tgaaggtttctgacttggggaccaggtgctcagaccttcctggatgctgctttccacaatatctctaccaggcaggcaggttctcttcattttgcaaatttggtgaaacagcatttgtaa

SEQ ID NO: 865711 - DNA, 120 bp, Artificial Sequence
  ENSG00000271171_3 (sequence is synthesized)
aactttagaagcttccttggctcacacaggtggtagtggccctgtcaggatttgacccaggctctcggattccagagttcctgaatttaaccacctgtactgtgatgcctccttatcatg

SEQ ID NO: 865712 - DNA, 120 bp, Artificial Sequence
  ENSG00000271171_4 (sequence is synthesized)
tgtgcatcgtgcattactattttttatagcctgtagggtactgagcaccatgcacacctacagtgatcacaggcactgcctactggaaggtcttctttggctgggttccagtttcctcag

SEQ ID NO: 865713 - DNA, 120 bp, Artificial Sequence
  ENSG00000271171_5 (sequence is synthesized)
acgatgtagggcagggagttccacttgttagcatatcccacagggcctttctcttcaaatggaccccagcagccaaccacacagctgcctcagcaagcgtaggagatggcacatcagaga

SEQ ID NO: 865714 - DNA, 120 bp, Artificial Sequence
  ENSG00000271171_6 (sequence is synthesized)
cttactgagctttgcagctacctacacagttgtgtgtggcatctcctcctgggtgcaaggacatgagatgacatcaggtgggtgcaggatctatcctggcttaaaagcctatgccccatg

SEQ ID NO: 865715 - DNA, 120 bp, Artificial Sequence
  ENSG00000271171_7 (sequence is synthesized)
gacaccaatatctctggtaataatttcatggacaactttcagggtcctggttgaaatggatgacttacctttcttaaatgtcatcttaagtggatgacttaactttttccagtccactat

SEQ ID NO: 865716 - DNA, 120 bp, Artificial Sequence
  ENSG00000271171_8 (sequence is synthesized)
catggtatgcattttgtgtatatgtgtgtgtgtacatatagatagacatttatatatatatatatgcatgtatatatatgcacatactcacatatatgtgtatatatacatgcacatata

SEQ ID NO: 865717 - DNA, 120 bp, Artificial Sequence
  ENSG00000271171_9 (sequence is synthesized)
tatctacgtctatctatctgtctattggtatgtagtaggatacagcaaaaataattgcttttttatatggcacctcagtaaattcctttcttatctcttgtagtttctttgtatatcggg

SEQ ID NO: 865718 - DNA, 120 bp, Artificial Sequence
  ENSG00000271171_10 (sequence is synthesized)
tagtgttttctacatatacaattatgttttctatgcatattctttttaatctgtatgattttatttttcttaccttttacagttactgtgatctccagtaaaatgtttaatacaagtgga

SEQ ID NO: 865719 - DNA, 120 bp, Artificial Sequence
  ENSG00000271171_11 (sequence is synthesized)
gacaatagataaccttttccaactcctgatcggggggtggaaagtgctcagtgtgctattaacttaaggcttttatagatgtgctttatcatgtaaaggctgttccctccaattctttct

SEQ ID NO: 865720 - DNA, 120 bp, Artificial Sequence
  ENSG00000271171_12 (sequence is synthesized)
atactgagaaattttttcaaagaggtgttaaattttttcaacccatgtcacaaatctgcatatgtactcccctaaacctaaaataaaagttggaaagaaaaataaaactattacttgaaa

SEQ ID NO: 865721 - DNA, 120 bp, Artificial Sequence
  ENSG00000271171_13 (sequence is synthesized)
gatgacatcagggtcttgctgtgtcatccaggctggagtgcagtgatatgagcatggctcactgcagcctcgacctcccagcttcaagcaatgctcccaccttggcctcccaaagcgctg

SEQ ID NO: 865722 - DNA, 120 bp, Artificial Sequence
  ENSG00000271171_14 (sequence is synthesized)
cctggccattgccattgcagtaagttttgaaatcacttcagctggttctcctgaaccttgaattatcttaggaaagattgtattttcaggaattaagtctattggagacacagcaggact

SEQ ID NO: 865723 - DNA, 120 bp, Artificial Sequence
  ENSG00000271171_15 (sequence is synthesized)
ccacagccagctagatttggataaaatgtagactgcctcaaggccagtgtgttgacttctgaccagtctcatctgaacccacaccctttaacatatatacaaaacacctgaagggttggg

SEQ ID NO: 865724 - DNA, 120 bp, Artificial Sequence
  ENSG00000271171_16 (sequence is synthesized)
ctgccagctttctttaggatgatagagggcaggttaagtttgtttgacataactagaagaggtggagcctcttcctaatggagcaaggtccatttatggcaaactgtggtcccccaccac

SEQ ID NO: 865725 - DNA, 120 bp, Artificial Sequence
  ENSG00000271171_17 (sequence is synthesized)
tatcagctacttctggatagcttttgcttaaagttgatgagatattgtttctttcactagaagaaaatgaatgagttggtgatcccaaactttggcctccaaaggaagcctgggcaggtg

SEQ ID NO: 865726 - DNA, 120 bp, Artificial Sequence
  ENSG00000271171_18 (sequence is synthesized)
acaaatgtgtcctaagcgagactgctgcttccatgctcatgctggaggtacatttgccctgaaagatggagcaaaagtgctgaagcttagcacagaggattaatgaataagaacaaggct

SEQ ID NO: 865727 - DNA, 120 bp, Artificial Sequence
  ENSG00000271171_19 (sequence is synthesized)
atgttatatcatatttgtatagcaatctggaaaagaaagaacggggcttgttaaggcaaatgggcaagacaaaacgggatatctataggcagcaaggggtcctgccagtctaagactaat

SEQ ID NO: 865728 - DNA, 120 bp, Artificial Sequence
  ENSG00000271171_20 (sequence is synthesized)
ggaaaactggcccatagccaggtattttctcaatggtgttcactacaccaagtcagagggctactttgtctagatagagcccaggtattgtgagtgagtgcaggaatagaagtgtcttcc

SEQ ID NO: 865729 - DNA, 120 bp, Artificial Sequence
  ENSG00000271171_21 (sequence is synthesized)
tctggctgcctcaacctcccaaagtggtaggattacagacatgagccactatgcccagcctataatcttgtttgtaaacttagagggaaagcatccaaatttaatcattatgatgtttgc

SEQ ID NO: 865730 - DNA, 120 bp, Artificial Sequence
  ENSG00000271171_22 (sequence is synthesized)
atgtttgccgtgggttttttgtacttgctcttatcaggttgaggaagttcatttttatactactttgttgagtttttaaaaaattattattatggccaggcatggtggctcacacctgca

SEQ ID NO: 865731 - DNA, 77 bp, Artificial Sequence
  ENSG00000271171_23 (sequence is synthesized)
caggcatggtggctcacacctgcaatcctagcattttggaaggccaaggccagcagattgcttgagttcagctatta

SEQ ID NO: 865732 - DNA, 120 bp, Artificial Sequence
  ENSG00000271171_24 (sequence is synthesized)
tgaaaagatgttgaattttgtcatatgtttcttctgcatgtgttgaaatgaccatatgatttgttttttgttctactgatattatgtattacaatagtttatttttggatgttaaaccaa

SEQ ID NO: 865733 - DNA, 120 bp, Artificial Sequence
  ENSG00000271171_25 (sequence is synthesized)
gcgcgtgggtgcgccggcccttgcagctggggactctggaggcagaccttgcccaaagccagaggcaggaactccccagatcctcccagggtagggagctggctcacagggaaggtgcct

SEQ ID NO: 865734 - DNA, 120 bp, Artificial Sequence
  ENSG00000271171_26 (sequence is synthesized)
ggggaggggccgggcggtgctgtctcctgactccgcccaggcagccccgccgctgcagccggcctgggctaaggtggggagaagacaccagcacaggcagggagcaagagcccccagctg

SEQ ID NO: 865735 - DNA, 120 bp, Artificial Sequence
  ENSG00000271171_27 (sequence is synthesized)
aaggacatgagatgacatcagctacgagcctatatccttcaacccttggaagccactgatctgctttctgtttctatggatcccctgttctggacatttcatataaatggaactgtatga

SEQ ID NO: 865736 - DNA, 120 bp, Artificial Sequence
  ENSG00000271171_28 (sequence is synthesized)
atgaccaaataacattctattatatggatgtaccgcttttgtttacccattaatcacctgggcatttggattgtttctaccttttagccattatgaataatgctgcaaacactcatatac

SEQ ID NO: 865737 - DNA, 120 bp, Artificial Sequence
  ENSG00000271172_0 (sequence is synthesized)
ccgttcctgataaaaatggcaaactgtgcctaaactgtgcagaccttatggtttatgctaaacacttgccttgcttctggaggcctggaattttggtacctgctaggtaaagtgtgtcta

SEQ ID NO: 865738 - DNA, 120 bp, Artificial Sequence
  ENSG00000271172_1 (sequence is synthesized)
cgttaccatccgcaataaaaaccctgggtactgagtccgtgatgaacatccttggtagacaacatttcacatgtgttgttacaaattgtaggtggggaactaagagtgtcctgtgtgact

SEQ ID NO: 865739 - DNA, 120 bp, Artificial Sequence
  ENSG00000271172_2 (sequence is synthesized)
cttagcttcatgtgccttttccctttgctgcttttctttgtattctttcaccatagtaagtcatagatgtgaatatgactatatctgagccctgtgagtccttctagtgaacaaccttgt

SEQ ID NO: 865740 - DNA, 120 bp, Artificial Sequence
  ENSG00000271172_3 (sequence is synthesized)
ggttgtcttgggcacttccaacacaacttgtcttggtgatatttggccagcaaatgtcaacattaccaaagaaaagttggaggtggatggctttcacaataaaatttatttacagaactc

SEQ ID NO: 865741 - DNA, 67 bp, Artificial Sequence
  ENSG00000279762_0 (sequence is synthesized)
ggcgtgatctcggctcacccctgagatcacaggcgcccaccaccacacccgactgattttgtatttt

SEQ ID NO: 865742 - DNA, 120 bp, Artificial Sequence
  ENSG00000279762_1 (sequence is synthesized)
caattctcctgcttcagcctcccgagtacctgagatcacaggcgcccaccaccacacccgactgattttgtatttttaatagagacggggttactccatgttggtcaggctggtcttaaa

SEQ ID NO: 865743 - DNA, 120 bp, Artificial Sequence
  ENSG00000279762_2 (sequence is synthesized)
ctgaatctcaggattcctgcctcccagtaatcctggaaaattatctgccattatctcttcaaatattgccttctctgtctcccttctatcttggaaatcttattacatccaccactcagg

SEQ ID NO: 865744 - DNA, 120 bp, Artificial Sequence
  ENSG00000279762_3 (sequence is synthesized)
agaaaaaatattagacactagacacagactattaaaattcatgctcctcacattagttctaaataatagtgtgtactcagaataaaatatccatgtaacggtgattgagatgactctggt

SEQ ID NO: 865745 - DNA, 120 bp, Artificial Sequence
  ENSG00000279762_4 (sequence is synthesized)
tccgtagaagtaactgacctaagatcagaacttttaaaatgaaacaccttttaccaatatcattcaaagatacaccttgacgcccacttcctctccttctctagtatccccaatgataaa

SEQ ID NO: 865746 - DNA, 120 bp, Artificial Sequence
  ENSG00000279762_5 (sequence is synthesized)
gtatcaagatcttgtcattgtcctttctccgtgcaggtctggaataccaaaattcaacacactaagtcaaatgccaacatcttgcaagtcccacatacaggtgcattctcatactacttg

SEQ ID NO: 865747 - DNA, 120 bp, Artificial Sequence
  ENSG00000279762_6 (sequence is synthesized)
ttgagccaattcagatcttcccaaactacactacaaagatgccattacatgtgcagtgaagagctagtccaagccctaattgaatcctttatgagtgaacattaacgtcttcttctgtcg

SEQ ID NO: 865748 - DNA, 120 bp, Artificial Sequence
  ENSG00000279762_7 (sequence is synthesized)
taataaatttctgttcacacttgaatcccaacagaaagctgccggaagcgactggctgggattcccatttcagttttcctgttgtgtgtaggtgtaagaccatcgttattacagcgttaa

SEQ ID NO: 865749 - DNA, 120 bp, Artificial Sequence
  ENSG00000279762_8 (sequence is synthesized)
gaaattttaatttttccggcaacatgcagccgacccgttccaaagaattccctgaactccgcggctgacaactaactcccttaactcacttccaacccctacaggcagtctggaaagatt

SEQ ID NO: 865750 - DNA, 120 bp, Artificial Sequence
  ENSG00000279762_9 (sequence is synthesized)
agtcacctcctctagccaggcggtcccgctccaacacctcactcttacaccctacacagagcagatgagcgtctcggccacctccacaaaccaaatgccaatctgaggtgtgtgtcaccc

SEQ ID NO: 865751 - DNA, 120 bp, Artificial Sequence
  ENSG00000279762_10 (sequence is synthesized)
ctgaatttcccacattctgaaagagaccctcctcttagtggagctttctgccgtggggctgaggagtagcagctcccagcgtcccgtggaaggaaactcccagagaagagcaagcgctcg

SEQ ID NO: 865752 - DNA, 120 bp, Artificial Sequence
  ENSG00000279762_11 (sequence is synthesized)
cgctcccacccggagcaggctgtgctgattacaacggcgggaaatgcctgtccagagctggtttcgccaaggcctttcaagtagagactctaggaccagtccgtgacaagcacgccggcc

SEQ ID NO: 865753 - DNA, 120 bp, Artificial Sequence
  ENSG00000279762_12 (sequence is synthesized)
ggcactgctccgggtcccagaccagctcgtgcgggccagagccggggacatggctagggagggatccccgggggcccggctcggcccactctcccaccctacgctgagccccccgtgagt

SEQ ID NO: 865754 - DNA, 120 bp, Artificial Sequence
  ENSG00000279762_13 (sequence is synthesized)
cagcagccggcgaggggacccggggattgcctcaagccctcccacaagagtgagacctgggaggctctggggagctccgagcggcctgcgcccccggcccggcccccctcacacagtgag

SEQ ID NO: 865755 - DNA, 120 bp, Artificial Sequence
  ENSG00000279762_14 (sequence is synthesized)
tcagcagcatcagagccggctagccgggcccctctccgctgccgccgaccgacataagccgagctgggccggcggggccggggaggcggcgcggcgacctttaccgatggagtggaggat

SEQ ID NO: 865756 - DNA, 120 bp, Artificial Sequence
  ENSG00000279762_15 (sequence is synthesized)
gtcgatggaggcctcccggtcggtgctgagtagagactgggctctctggaactccaccaccgccgccgccgccatcttaccgctctcacaccgtccccggccgcggccgccgacgccgga

SEQ ID NO: 865757 - DNA, 120 bp, Artificial Sequence
  ENSG00000279762_16 (sequence is synthesized)
tccgcctgtagctcccgtggctccgttcccagagcactccgggagttgtagtctctccgccgggcgcgggctgaggggtggggagagcgggaccgcctcgcaggtgggctgcaagctccc

SEQ ID NO: 865758 - DNA, 120 bp, Artificial Sequence
  ENSG00000279762_17 (sequence is synthesized)
cagcgcctcctagcgggcggccggcgaggaaaagaggcggtgccccgcagtgggagctctagatcggtccccgcccaccccaaaagaggcttcttgattccggccccgctcgcgcacccc

SEQ ID NO: 865759 - DNA, 120 bp, Artificial Sequence
  ENSG00000279762_18 (sequence is synthesized)
tgagaggggttcctgagtactgggctaggtattgagtcaaagctgcgtggctttctttgcggcttccacgatttaaccattcattcgggacgataagtgaccttataaagtgctcgctat

SEQ ID NO: 865760 - DNA, 120 bp, Artificial Sequence
  ENSG00000279762_19 (sequence is synthesized)
gtggcaaagaatagcaccattcgaatgcgttccagtgtctgacgcctgtgcgccgcacacacgctttccaggcttgactcccgcagaacgctggccggcaggtgggcaaacccgccagga

SEQ ID NO: 865761 - DNA, 120 bp, Artificial Sequence
  ENSG00000279762_20 (sequence is synthesized)
ccggagaaaactgtcctcacgcgcccatttaaccttgggacagtgctggacgtgatgaagtgaaacatcacctttgctccattcacgccacaaatacctcttgggaatccacagaagcct

SEQ ID NO: 865762 - DNA, 120 bp, Artificial Sequence
  ENSG00000279762_21 (sequence is synthesized)
cacccagctccccagctcaaagaaaaaaaaaaaaaaaggaaggaaggaagggagggagggagggacggaggaaggaaaaaattgaattattcttcccaatatcttcagccccttcaacta

SEQ ID NO: 865763 - DNA, 120 bp, Artificial Sequence
  ENSG00000279762_22 (sequence is synthesized)
aagtcacagatatcagtgaagacgtcgtgtggacggaaaaatgacattctatgagaccacttagggttaaacttaagaaaggtgctaaaaggatacaaagacaattcagtattaaggaag

SEQ ID NO: 865764 - DNA, 120 bp, Artificial Sequence
  ENSG00000279762_23 (sequence is synthesized)
tcagccactgcccgcagcccaacagacagggtcctggtctgtcacacaagctggaatgcagtgtgtggtggtgcgttcttggctcactgcaacttccaactcccaggctcaagcgatcct

SEQ ID NO: 865765 - DNA, 120 bp, Artificial Sequence
  ENSG00000279762_24 (sequence is synthesized)
agcctcccaagtagctgtgactgcaggtatgcaccatcacactcagctaatttttttgatttattttttgttatagaggctgtttctcccagtgttgcccaagctggcctcaaagtcctg

SEQ ID NO: 865766 - DNA, 88 bp, Artificial Sequence
  ENSG00000279762_25 (sequence is synthesized)
aagtggaagcacgagccaccacacccagctgatcttcacttctttctctttttttttttcctgggttcacgccattatcctgcctcag

SEQ ID NO: 865767 - DNA, 120 bp, Artificial Sequence
  ENSG00000236617_0 (sequence is synthesized)
tccggattggaagccccaaggattctgagagccccgctaatctggggatgactcctaggagtagaagacggtccatcttagttgtcacgagtatctcacttcttggaatccggcggcgtt

SEQ ID NO: 865768 - DNA, 120 bp, Artificial Sequence
  ENSG00000236617_1 (sequence is synthesized)
cacgtgtgtgctccagagaagggcgccagagggtattccctgaaagtgaaaggtcggcgaaagaggagtaaagacggcgagacgcgtccacgcagggggagtctgtgcggtttggaggaa

SEQ ID NO: 865769 - DNA, 120 bp, Artificial Sequence
  ENSG00000236617_2 (sequence is synthesized)
ttacgcctgtaatctaagtgctttggaaggcctaggcaggaggatctcgagcccaggagttcgagattagcctgagacctcatcgctaccaaaataaataaagtaggcatccatttgtgt

SEQ ID NO: 865770 - DNA, 120 bp, Artificial Sequence
  ENSG00000236617_3 (sequence is synthesized)
aaaacaaaccatatatacacacatatatacatatataaacatttgtatatataggtataggcatagttatctataccttgtaaaccaaaaataaaattgtaagcctccccaaccaactga

SEQ ID NO: 865771 - DNA, 120 bp, Artificial Sequence
  ENSG00000236618_0 (sequence is synthesized)
gccgccgccgcagcctctgccccactcgtgagggatccgagggctccgtccttgtgctgtcttcgccccggctcccaggggtcaaacgagggtcgggggtggggacacgcagcctagcca

SEQ ID NO: 865772 - DNA, 120 bp, Artificial Sequence
  ENSG00000236618_1 (sequence is synthesized)
ctgtcctgcctgggatccggtctcccccgccccccggctgcagggtggataaagaggaagatgtgaagaggaggcagacaaaagcaaaaggacatcctgtcagtaggaaacggccgaatt

SEQ ID NO: 865773 - DNA, 120 bp, Artificial Sequence
  ENSG00000236618_2 (sequence is synthesized)
cacgtgcaaaaattttcagacacacctttgtacctcttcctaatcctgccctggtaaaatggcggttatcagtgcaagtttgaggatacatacagctggaaaatggacatcaccaaactg

SEQ ID NO: 865774 - DNA, 120 bp, Artificial Sequence
  ENSG00000236618_3 (sequence is synthesized)
gactccagaaagttctgtctaggattttattagactgctttttttctcaatatacctgtattggaagattgagacaaaaaggcacaaactcacattaaataaacaaggtaatctaatcaa

SEQ ID NO: 865775 - DNA, 120 bp, Artificial Sequence
  ENSG00000261488_0 (sequence is synthesized)
attacagatgggccatgggagtttttccactacagatatttacgtttataaatcacgttgtcttcttagaaaagtcagaaggaggttaaaacagtcaagccacagacctgtagaaaatat

SEQ ID NO: 865776 - DNA, 120 bp, Artificial Sequence
  ENSG00000261488_1 (sequence is synthesized)
agtatcaacaactctcaaatctgaaaacaaacacccagtaacaaaatgggcaaaatatttgaacagacatttcaccaaaggaactatacagatgaacattaaaagatgctaaacattgta

SEQ ID NO: 865777 - DNA, 120 bp, Artificial Sequence
  ENSG00000261488_2 (sequence is synthesized)
gttattagggaagtgtaaatcaaatccacaatggaacacttttacatacttattacaatggctataaaaccctgacaatatcaagtatggcaaggtatgcaaagcaactggaagtctcat

SEQ ID NO: 865778 - DNA, 120 bp, Artificial Sequence
  ENSG00000261488_3 (sequence is synthesized)
gcattgctgatgagaatgcaaaatgacagcctttttggaaagaagtgataaggacagaaggcagggctttactgggtagaagagggtggttcactggcaaaggtcccaccctcaagcctt

SEQ ID NO: 865779 - DNA, 120 bp, Artificial Sequence
  ENSG00000261488_4 (sequence is synthesized)
gaaaccgaagccctaaatgagaacagttatccctgttatcctgcccaaatgttactctttagcctgtccagcccccctatcccgtgcccatataaaccccagacctcagctggcagacag

SEQ ID NO: 865780 - DNA, 120 bp, Artificial Sequence
  ENSG00000261488_5 (sequence is synthesized)
acaagcggctgaacatcaagaggagaagaagcaactgagtgtcagagatgtggcttaacttcaggtggcatgacttcagggaggagcccggccagagacagcagacttcagggaaaggtc

SEQ ID NO: 865781 - DNA, 120 bp, Artificial Sequence
  ENSG00000261488_6 (sequence is synthesized)
actttcttcctgcaccatcccctttgcagctccccttccactgagagccacttccaccatttaataaaatcgtccacatccatcaactttcaaaccattcatgcaacctgattcttcctg

SEQ ID NO: 865782 - DNA, 120 bp, Artificial Sequence
  ENSG00000261488_7 (sequence is synthesized)
gatgctgaacaagaacctgggtaccaacagggcagggtgtaaaaggctgccaccctgactctccattgagtgggttaacacttagctgtccacggatggcaactgctaaaagagcatgaa

SEQ ID NO: 865783 - DNA, 120 bp, Artificial Sequence
  ENSG00000261488_8 (sequence is synthesized)
atgctgctgttgggctggagcccaaaagtgctcatcgaagccctggcacccgcttgcctgcgtgctcccgctcccacagagagtttgagcatggtggtggccaagtaagtaggccacacc

SEQ ID NO: 865784 - DNA, 120 bp, Artificial Sequence
  ENSG00000261488_9 (sequence is synthesized)
cctgtcgcaagtcccgagaaggggtcaagggaactctcccatctcagaagtatggcaatttcttataaaattgaacatagggttactgtacaacctggcaatttcactcctaggcattta

SEQ ID NO: 865785 - DNA, 120 bp, Artificial Sequence
  ENSG00000261488_10 (sequence is synthesized)
gccaagtgaaacttatgtcctctaagactgtgtgtacaaatttttatatgtgctttactcataatagccgaaataccctggaaatagcccaactgatcttcattgagtgaattgctaaat

SEQ ID NO: 865786 - DNA, 120 bp, Artificial Sequence
  ENSG00000261488_11 (sequence is synthesized)
aagctctgtgttatattacatccacacaacagaatcctgaccatcattgaaaaggagtggactattaatacatgcaataacttggatcaatctcaaatgcattacactaagtgaaagaga

SEQ ID NO: 865787 - DNA, 120 bp, Artificial Sequence
  ENSG00000261488_12 (sequence is synthesized)
ccagacttaaagcctaccttctgtgacattagagataaggtgaaaccacaggaacagaaaacatattagtgttgccaggagcaaaaggtgggggaggtgttgactttcaaagcacaggag

SEQ ID NO: 865788 - DNA, 120 bp, Artificial Sequence
  ENSG00000261488_13 (sequence is synthesized)
gaaattttttgttgttgttctttatcttgattgtgttagtgcccacatgactgtatgcatttctcataattcacagaactgtatactaataagggtgcacttcactgcacataaatgaat

SEQ ID NO: 865789 - DNA, 120 bp, Artificial Sequence
  ENSG00000261488_14 (sequence is synthesized)
ctcaacagacaaaaggttaaaaaagaaagaaatctcgggacaggaatcatggatttttgtattatccttgtatttgatggttgtttccagtttggtcactcatctgtttgttcattcctt

SEQ ID NO: 865790 - DNA, 120 bp, Artificial Sequence
  ENSG00000261488_15 (sequence is synthesized)
taacaagtatgtgtcgagtgcctactatgtgctgggcactgtaggttcaatggtaagaaaagcagatacaggactgctcttgtgaagttccttgaaagaaataaaacaaagtgcaaaata

SEQ ID NO: 865791 - DNA, 120 bp, Artificial Sequence
  ENSG00000261329_0 (sequence is synthesized)
ttctccagctctacaagaacttctagtgctctgggcagctgcgaggggtcaagaaaccacatccccaaatccagcgggatctcagagagaaaggctgatgggaagctgcccagggctgac

SEQ ID NO: 865792 - DNA, 120 bp, Artificial Sequence
  ENSG00000261329_1 (sequence is synthesized)
ctggcacatgctgggaaaacccctcggtgccagggcaggaggcagagcgtctgcagctcctccctccccaacacagggggtaaggaatacagcagaacgggaatcgggcgccttcatgct

SEQ ID NO: 865793 - DNA, 120 bp, Artificial Sequence
  ENSG00000261329_2 (sequence is synthesized)
gctgttaccgcccttggttcatggcttctttcacttggaaaccccaggaggtgggcattgctgtaccgcatgtgctactgaccaaaacaggccaaagctcagcgaggggtgggatcacct

SEQ ID NO: 865794 - DNA, 120 bp, Artificial Sequence
  ENSG00000261329_3 (sequence is synthesized)
aaggttgtgcagcacctacgtggtggagtgaggatccgagcctccatctttcatgcattaattcattctgtctctggattcccctagaagcagaccctgaggcaaggatccacatgtaag

SEQ ID NO: 865795 - DNA, 120 bp, Artificial Sequence
  ENSG00000261329_4 (sequence is synthesized)
tagcttatttagacagagcagaaaatatcaatgggagagtgaagaagtgagacaaggcagggaaggtggctcataaagggtatgttttcaagacagctgctcctgtgggcaactggagct

SEQ ID NO: 865796 - DNA, 120 bp, Artificial Sequence
  ENSG00000261329_5 (sequence is synthesized)
taatccccccagggaatctgggagccagggtggaacaggcctcagagtgactgcaccaatggggcccgggagttggggtataaataccaactcccaatgttggttgagtgctgctcctgg

SEQ ID NO: 865797 - DNA, 120 bp, Artificial Sequence
  ENSG00000261329_6 (sequence is synthesized)
ggggcttctatttctctctgtatggaaggtaaagcgggccctggaggccacaaaaagaatcctccaggaaagaaatctcagtgctgccattcagaaaagcagtcagcatgccctgaagtg

SEQ ID NO: 865798 - DNA, 120 bp, Artificial Sequence
  ENSG00000261329_7 (sequence is synthesized)
ctagggcaaaagggtggaagcaggcactgacatatctactccataacttgcccaacaaacactgtacagggtccctcctaggagactgatgctgagccagacccggggcatgtgcaaggg

SEQ ID NO: 865799 - DNA, 120 bp, Artificial Sequence
  ENSG00000261329_8 (sequence is synthesized)
aacctgacccaccaggtcctagcagctctgtgctatgagggaaggcaaacaggtaatgtttccaagaaaaaaaaaatcaagtagggacacattctaggaaaaaaataagagagaattatt

SEQ ID NO: 865800 - DNA, 120 bp, Artificial Sequence
  ENSG00000261329_9 (sequence is synthesized)
aatggcccatggaacagctattttagaatgaatggttaaagcaggcttctctgagcaggtaactttctaactcctaaaccaaaggtggctttttaactccagtattaacataacactgaa

SEQ ID NO: 865801 - DNA, 120 bp, Artificial Sequence
  ENSG00000261329_10 (sequence is synthesized)
tagcaacctgcagggagatactgcgctgccctcagaagtagctccaatttaataaattattgcattaaaaaggaacaaactattgacacacacaacaatttggaaggatgtcaagggcat

SEQ ID NO: 865802 - DNA, 120 bp, Artificial Sequence
  ENSG00000261329_11 (sequence is synthesized)
aatttggaaggatgtcaagggcattacgctgagtgaaaaaagcgagtctcagaaaggttaccaactctggtaatgacataaatgctacataaattggctgggcgcagtggctcacacctg

SEQ ID NO: 865803 - DNA, 90 bp, Artificial Sequence
  ENSG00000261329_12 (sequence is synthesized)
gtcgcacaccagcctgggcgacagtgtgagacttcgtctcaaaaaaaaaaatgctacgtaaatggtatgattccatttacgtagcattct

SEQ ID NO: 865804 - DNA, 120 bp, Artificial Sequence
  ENSG00000261329_13 (sequence is synthesized)
atgctacgtaaatggtatgattccatttacgtagcattcttgaaacgacaaaatgtaggtagaggaacagatcagtggtttccattgtcaggactgggcatggggaagtgtggctgtaca

SEQ ID NO: 865805 - DNA, 120 bp, Artificial Sequence
  ENSG00000261329_14 (sequence is synthesized)
agaggagcccaagggaactccttggtggtgatggaactgctctgtatctcaaatgtctgtatctttagaaagaaatctacatatgtgataacactgcatagaaatatatacatgtacaca

SEQ ID NO: 865806 - DNA, 120 bp, Artificial Sequence
  ENSG00000261329_15 (sequence is synthesized)
caagtgaatgtatgaaggtctgtacattataccaatgtcaaggtcctggttttgattatgtactacagttacatagaatttaccactggggaaagctgggtaaaggtgtgtaagatttct

SEQ ID NO: 865807 - DNA, 120 bp, Artificial Sequence
  ENSG00000261329_16 (sequence is synthesized)
attcatatagcataaagttcgccattttaaagcgttcagttcactggtgttttagtatattcacaaggtttttcaaccattaccattatcttcttccagtacattttcaccaccctccaa

SEQ ID NO: 865808 - DNA, 120 bp, Artificial Sequence
  ENSG00000261329_17 (sequence is synthesized)
aagataaccacattcattagcagtctctccccattcctgcttcctcccagcccctggcaatgactaatctactttctgccttcagatttgcctattcgggacatttcatataaatgaaat

SEQ ID NO: 865809 - DNA, 120 bp, Artificial Sequence
  ENSG00000261329_18 (sequence is synthesized)
gaaattatacaacatatagccttctgtgtctggcttccttcacttggcataatgttttcaaggttcatccaggttgtagcatgtagcaatagttctttcctttttagggctgaataatat

SEQ ID NO: 865810 - DNA, 120 bp, Artificial Sequence
  ENSG00000261329_19 (sequence is synthesized)
tccattttgtggaaatactacattttctttattcatccattgatggacatctggctgtttctactactttttggctattctgaataatgctgctatgaacatgcatgtacaagttttttt

SEQ ID NO: 865811 - DNA, 120 bp, Artificial Sequence
  ENSG00000261329_20 (sequence is synthesized)
tttttttaaataaatgtatgtttttagttatcctgggtatgcacctaggaatggaattgctaggtcatgggtaaccctacatttacctttttgagaaattgctaagctgttttccacagg

SEQ ID NO: 865812 - DNA, 120 bp, Artificial Sequence
  ENSG00000261329_21 (sequence is synthesized)
ggctgcaccattttacatttccacaagcaaagaatgaaggttccaatttctccacatgctcaccaatacttattttctcttttcttttttaaaattacagctgtcctagtgggtgtgaag

SEQ ID NO: 865813 - DNA, 120 bp, Artificial Sequence
  ENSG00000261329_22 (sequence is synthesized)
tgatatctcattgcggttttgatttgcatttccctaacaacttatgatgttaagtatctttaatgtgctcattagccatttgtacattttcttggagaaatgtctattcaaagtcctttg

SEQ ID NO: 865814 - DNA, 120 bp, Artificial Sequence
  ENSG00000261329_23 (sequence is synthesized)
gccatattttaattgggttgttcatctttttgtcattacggtttttttctttgtatattctgaatattagacccttatcagatatatgatgtgcagatattttctcccttttgtaggttg

SEQ ID NO: 865815 - DNA, 120 bp, Artificial Sequence
  ENSG00000261329_24 (sequence is synthesized)
tatttttactttcttgacagtgtcatctgaagcaaaaatgtttttaattttgatgaagtctgacttatccgttttttcttgtttttggttgtttgtgctttggatgtcatagctaagact

SEQ ID NO: 865816 - DNA, 120 bp, Artificial Sequence
  ENSG00000261329_25 (sequence is synthesized)
tcattgacaaattcaaggctatcaagatttacacctttgtcttcttctaagagtttgaaagttttagctcttacatttaggtctttgatccattgagttagttttgcataaggcatatgg

SEQ ID NO: 865817 - DNA, 120 bp, Artificial Sequence
  ENSG00000261329_26 (sequence is synthesized)
tggaagtccaccttcattttctcgcatgtggaaacgcatttgtcccaaggccattttttgaatgactatgcttctcccattgaacagttgtggtatccttgttggaatcaattgactata

SEQ ID NO: 865818 - DNA, 120 bp, Artificial Sequence
  ENSG00000261329_27 (sequence is synthesized)
aatccatgggtttacttatggatgctcaattctatttcattgatctatatgtctatcctatgccagtaccatgcagtctttattactgcagagttggcgtatgttttgaaattgaagtgt

SEQ ID NO: 865819 - DNA, 120 bp, Artificial Sequence
  ENSG00000261329_28 (sequence is synthesized)
gagttctactttattctttttcaataatgttttagctttccaagtcccttgaaattccctataaattgaagaatcagcttgtcaacttgtacaaagaaatcagcagagattctgatagtg

SEQ ID NO: 865820 - DNA, 120 bp, Artificial Sequence
  ENSG00000261329_29 (sequence is synthesized)
attttgctgaatctgtaggtcagtttggggaagtattaccatctcgacaatgttgtcttctgatccatgaacaggggatgcttttccagtttcttagatcttaggtttctttcaacaatg

SEQ ID NO: 865821 - DNA, 120 bp, Artificial Sequence
  ENSG00000261329_30 (sequence is synthesized)
ttttgtagttttcagagtaaacattttgtacttcttttgttaaatatatttctaagtattttattcttttgatgctactgtaaacataattgtttcttaatttcattttctcttgtaatc

SEQ ID NO: 865822 - DNA, 120 bp, Artificial Sequence
  ENSG00000261329_31 (sequence is synthesized)
ctttttatttctgtaaggtcaatagcaatgttctctctatcattcttgattttagtaattttaatcttctcccccatctttttttggttagtttagctaaaggtttgccaatgtgttaat

SEQ ID NO: 865823 - DNA, 120 bp, Artificial Sequence
  ENSG00000261329_32 (sequence is synthesized)
cctctcaaagaaccaacttttgatttcattgactttctctattgttcttctgttttctgtactattttacaaattcctgtgagtctataattatctccaaataaaaagtttaaaaactgt

SEQ ID NO: 865824 - DNA, 120 bp, Artificial Sequence
  ENSG00000261329_33 (sequence is synthesized)
agctctacaagaacttctagtgctctgggcagctgcgaggggtcaagaaaccacatccccaaatccagcggagtctcgatctgttgcccaggctggagtacagtggtccaatctcagctc

SEQ ID NO: 865825 - DNA, 89 bp, Artificial Sequence
  ENSG00000261329_34 (sequence is synthesized)
aaacaattgtttcatgtaagacgctgagcgcaagcaagttgggcattctgttcaggcatttgttcatcattcattcacttactcattca

SEQ ID NO: 865826 - DNA, 120 bp, Artificial Sequence
  ENSG00000261329_35 (sequence is synthesized)
ctacggaactactttgtgcagtttgggattagagatgtgaataatgcaggcgacgaaacaagtttgctgagagtcatggtgtgcccagcaccacattttggttcatcatggttcagaaaa

SEQ ID NO: 865827 - DNA, 120 bp, Artificial Sequence
  ENSG00000261329_36 (sequence is synthesized)
gtttgtcttctcttggcacacccagctttgacggtgcacatgaataggatacagaggtgcaggcagaggccaggccagcccgagtcaaagcttaggaacagaggatgaagactgttgcaa

SEQ ID NO: 865828 - DNA, 77 bp, Artificial Sequence
  ENSG00000261329_37 (sequence is synthesized)
acctggccagattttgttgttcttcccctccctccactcatacccttaacacagatttaccaagggcagagaaaatg

SEQ ID NO: 865829 - DNA, 120 bp, Artificial Sequence
  ENSG00000261329_38 (sequence is synthesized)
ggcggcccagctccccaggcgtggctgtgttccggatatccacatcgtggggcgacacataaagctttgtgtcattcaagtcaaagaactcgacttctgtgagacccacccaccacgagt

SEQ ID NO: 865830 - DNA, 120 bp, Artificial Sequence
  ENSG00000261329_39 (sequence is synthesized)
tgccccagttggacaggatctccatggtcacgtagatggcatctttgatctcgtctgccctcattctctgtttgtccttaaagaagagaaaaataacaccaaaggattaagtcatgacag

SEQ ID NO: 865831 - DNA, 120 bp, Artificial Sequence
  ENSG00000261329_40 (sequence is synthesized)
gcttgaattcggctctgcctctgccaccactgccttcaaaaagttagttaaccttcagggtctcagtctctccatctgtacaatgaggataagaatagcacccactacctatggttatta

SEQ ID NO: 865832 - DNA, 120 bp, Artificial Sequence
  ENSG00000261329_41 (sequence is synthesized)
caatgattaaatgaattcatactgtaaagcattcaaaatagaggccctgtgtaactggcactctgtgagcattctgtttgaaagtttacaaataaataaaaatgtctaaaaagcattgaa

SEQ ID NO: 865833 - DNA, 120 bp, Artificial Sequence
  ENSG00000224592_0 (sequence is synthesized)
agcgtgcactgggcgctcctcggcgcgtctgcccggcccgtctcggctttccttctccttcctctagtcccagcgtcacaactccgccgacctcctctgccctgagagcgcgtccggtgc

SEQ ID NO: 865834 - DNA, 120 bp, Artificial Sequence
  ENSG00000224592_1 (sequence is synthesized)
gggcggagtcggacggactctggcttcacgcctcgcgcgggcacaccttctcccgggcactgaggcccagttattaggggaggcagagtccttctggagtttgacccttggattccatcc

SEQ ID NO: 865835 - DNA, 120 bp, Artificial Sequence
  ENSG00000224592_2 (sequence is synthesized)
aaagggaggagaagaaagaagatgaagagataccagccagccttaaggagtggacatcctgcctggtgaaactgaacaagacacctaccgcatatggagtttcgctctgtcgcccaggct

SEQ ID NO: 865836 - DNA, 64 bp, Artificial Sequence
  ENSG00000224592_3 (sequence is synthesized)
gccctctcccaccgctcctacactgctggtaaaaggcagccgcactgcctgctggaagacctgc

SEQ ID NO: 865837 - DNA, 120 bp, Artificial Sequence
  ENSG00000273445_0 (sequence is synthesized)
actttagtttttccactttgttgcaaacaattgcaagttgtccaggttttctgtcttcccccagcctgcaagtgctcagaggacacccaaccctatgatctcagccaactcatgaagttt

SEQ ID NO: 865838 - DNA, 120 bp, Artificial Sequence
  ENSG00000273445_1 (sequence is synthesized)
gatttcacaacttagtgatgtcttcccagtggaatcctaaatgataaggaaaatggtatagagccaagacttgaacattaacaacccaggagcacagaaacagcacagttagctgagagg

SEQ ID NO: 865839 - DNA, 120 bp, Artificial Sequence
  ENSG00000273445_2 (sequence is synthesized)
gaacagcgcccaccgtcacaaaaagaaagaccctcggcaggtactttagagtcacgttcatgctgtaatatgtggggaagaaagactattccaaatggatctggctttttaaaacaaggg

SEQ ID NO: 865840 - DNA, 120 bp, Artificial Sequence
  ENSG00000273445_3 (sequence is synthesized)
aattttccttgctcttgggaaccagcaaaatccagctgctcattgaactgcctgtctggaatctcacaaatttgcaccttgaagttgttaataaaggactaagttgataattcgaacaaa

SEQ ID NO: 865841 - DNA, 120 bp, Artificial Sequence
  ENSG00000273442_0 (sequence is synthesized)
gcaaagcagcctaatgttgacatgcgcttggcaagtattcacagaccacctcacacccagccaagcactgcaggtgagagcaacacaggagtgaggaagccggggtacttaccatcagtg

SEQ ID NO: 865842 - DNA, 120 bp, Artificial Sequence
  ENSG00000273442_1 (sequence is synthesized)
aggaccaatcttacagatagggaaaaactatatttcatccagttgaagacacccattttctacattttaaaattcctaaattaggctttatctttcaatgattttggatcattggatgaa

SEQ ID NO: 865843 - DNA, 120 bp, Artificial Sequence
  ENSG00000273442_2 (sequence is synthesized)
atacagtaacaacagcacaaagcagcattgtgccctgagaggtgtgcagagcctatagcaattagaacagtggtccaaggtcaggctacacattagatgtatctgggaaactcaaaaata

SEQ ID NO: 865844 - DNA, 120 bp, Artificial Sequence
  ENSG00000273442_3 (sequence is synthesized)
gtgtggaagggtgtggctgtacactggtatttcaaaaagcacctcatgggattctaatacgtaggcagagttgagaaccaggatagcaatttcaaatgagagtacacattaccctgaggt

SEQ ID NO: 865845 - DNA, 120 bp, Artificial Sequence
  ENSG00000273442_4 (sequence is synthesized)
tacatgaagactttccaaggggcacgccttggaaagtttagggcacacatcagtaaactagggcctatggcccaaatctgttctactgcctgtttttgtaccctccggggagctaagttg

SEQ ID NO: 865846 - DNA, 120 bp, Artificial Sequence
  ENSG00000273442_5 (sequence is synthesized)
gtttttacagtttcaaatggtcaggggaaaaaatcaaaagggaaataatatgtttggacaaatgaaaattatatgaaatttaaatgtaagtgtccataaataaagttttattagaacaca

SEQ ID NO: 865847 - DNA, 120 bp, Artificial Sequence
  ENSG00000224595_0 (sequence is synthesized)
agtgcaaaagtccaacatgagcctagcaggtggatgcaatggacaagcttaccattatacactgcacttttggtaaagctccagtgctctgcaatttacagccaaaggaagtagtttaca

SEQ ID NO: 865848 - DNA, 120 bp, Artificial Sequence
  ENSG00000224595_1 (sequence is synthesized)
aaaataagcaaacccaagacaagcatttcacagccacaacatcagataagccagaaagaaataatcttcaatgcacatcaaaaccacttcacaatgacaatttgtccaagcagatgttaa

SEQ ID NO: 865849 - DNA, 120 bp, Artificial Sequence
  ENSG00000224595_2 (sequence is synthesized)
aagatatttacagtaaagtaaacaatgcatagttgcaatgaaatggaaaattttcagctaatggtgtttgtcaatcctttgtcaatttttctgcctgccacagatgttttcttagctgtt

SEQ ID NO: 865850 - DNA, 120 bp, Artificial Sequence
  ENSG00000224595_3 (sequence is synthesized)
tcacaaaaacaggaatcaactagcagagaagaaagactttctctcccccaggaaaagagtacaaagccaagtctgtacacagcagatgcaaaagaaagtccatctgctaccagctcacaa

SEQ ID NO: 865851 - DNA, 120 bp, Artificial Sequence
  ENSG00000224596_0 (sequence is synthesized)
tggcagtgactccgcgctccacgttttgcaggctgccaccgtgtcggaggcgaggcgaggaagggagctggaataacaaagggaggtaatggggtagattggatacctctggggtcttgg

SEQ ID NO: 865852 - DNA, 120 bp, Artificial Sequence
  ENSG00000224596_1 (sequence is synthesized)
aagaagctatgacttatttactgtctactatgtggtggatggtgtttgaagtgaattgaattaggggacacccagctggcatctgctgcagaactgatgactcgcttgctggtgggcaga

SEQ ID NO: 865853 - DNA, 120 bp, Artificial Sequence
  ENSG00000224596_2 (sequence is synthesized)
aatctccataatctttctttagcagatgaggtcactgaggctcagagaggctgaagccacttgctcagagccgcacagcaagcccaccaccctgaacctccagattaccaactcagcatt

SEQ ID NO: 865854 - DNA, 120 bp, Artificial Sequence
  ENSG00000224596_3 (sequence is synthesized)
cctggtctgacagtctcagatgcagtcatggatggctttctggaggaggtggtacctggtctgtgggaagtaggggtcagcatcctggtctctgggagcatctgctccagatggtttccc

SEQ ID NO: 865855 - DNA, 120 bp, Artificial Sequence
  ENSG00000224596_4 (sequence is synthesized)
tggggcccccagaagcaggtgtttgcgctaacagctctgcaagcagagagcttcagtgcatggcccttcttgcccttgttcccaggcacatgctgttcccctggggctgaataccccact

SEQ ID NO: 865856 - DNA, 120 bp, Artificial Sequence
  ENSG00000224596_5 (sequence is synthesized)
tacttgtaaatcccagtgctctcctgttcattctgcagtgccagcacaagtctcctccttggggaaggctttctggacttcccagcccactggccattgttccgtcttgcaggtgccccc

SEQ ID NO: 865857 - DNA, 120 bp, Artificial Sequence
  ENSG00000224596_6 (sequence is synthesized)
agcattgcaaacacgctcccccccaaaccacaaacgcgcccccacacactcgcttactttccctcacaaagatgcccgcttacacggccacagcaggcacgctcagagacacgcagttac

SEQ ID NO: 865858 - DNA, 120 bp, Artificial Sequence
  ENSG00000224596_7 (sequence is synthesized)
acacacacatcgctgtacacaaccccacatacaatcaaaaaacaaaacacgaaacgttcccctgggcactaaatcctcacgttaacgtacacacacaaacacacgccctcctctcccact

SEQ ID NO: 865859 - DNA, 120 bp, Artificial Sequence
  ENSG00000224596_8 (sequence is synthesized)
tcctcttccataccccttcctcgaggccccccacccctgattttcggcacccccagtcccaatcataattggcgcccgcgcagccctctttggacacacacgcgccgcccacgcacgcgc

SEQ ID NO: 865860 - DNA, 120 bp, Artificial Sequence
  ENSG00000224596_9 (sequence is synthesized)
tcccctccccggcaggcgggggcggcttcggccgggagccggcggagcccgcttcggattccaggtgtggcagtgactccgcgctccacgttttgcaggctgccaccgtgtcggaggcga

SEQ ID NO: 865861 - DNA, 120 bp, Artificial Sequence
  ENSG00000224596_10 (sequence is synthesized)
ggcgaggaagggagctggaataacaaaggtggcagctgagcatccctggagagggtgggtggtatgaaagcacttccagacctctagggacaccagggagtcatggtcccagcacattgc

SEQ ID NO: 865862 - DNA, 120 bp, Artificial Sequence
  ENSG00000224596_11 (sequence is synthesized)
tgtgtgattgagcccctcctcagcctgtgggtggcctaagttcacagggaggtaatggggtagattggatacctctggggtcttggaagaagctatgacttatttactgtctactatgtg

SEQ ID NO: 865863 - DNA, 120 bp, Artificial Sequence
  ENSG00000224596_12 (sequence is synthesized)
agttttgggcatccttctatcagcccttatcccagggcaggaagaacagccttgatcctggatcccaggcacagctgggtgtcagacctggaggagaagctcccagagtgaccaagatag

SEQ ID NO: 865864 - DNA, 120 bp, Artificial Sequence
  ENSG00000224596_13 (sequence is synthesized)
cacctgggcagcactgaagcccagagcgggagagactggctcaagaccatgggccctgacattctccagctttcatggtgttcctgcaatccaagtgccgcttatctctctacaggtcca

SEQ ID NO: 865865 - DNA, 120 bp, Artificial Sequence
  ENSG00000224596_14 (sequence is synthesized)
ccagatgaccggctggcctcctaattgggcttcctgcattcctgcctgtgctcggagctcccttctccacttgcctgctggaggaggtttacaaacaaaatcagatcatggcactcccct

SEQ ID NO: 865866 - DNA, 120 bp, Artificial Sequence
  ENSG00000224596_15 (sequence is synthesized)
ggggccctgcatcctgtggccagcaggtcttggaaacgcccctgtaccccagaaacttcctgatcagtccctggtcagtgtatatcatgcttcctgtgacatgacatcaacttttcagtg

SEQ ID NO: 865867 - DNA, 120 bp, Artificial Sequence
  ENSG00000224596_16 (sequence is synthesized)
gaacttacactccaccatcaggccctgtcacaggagaacaaagaaggaaggcagaggagatcatgctccggccagcagggaatctccatttttttcagcctcataccttggaaagtacaa

SEQ ID NO: 865868 - DNA, 120 bp, Artificial Sequence
  ENSG00000224596_17 (sequence is synthesized)
aggagtgagagctgggactaccagccagagggttcatggaggtagtgggaggggaagatgggttctgcatggagccactccagggacttttcttctgtctcacagcctgacaatcacctc

SEQ ID NO: 865869 - DNA, 120 bp, Artificial Sequence
  ENSG00000224596_18 (sequence is synthesized)
tagctgttctcagtcccattctcatcaatgacctcgtctcctgattttgtacaatatctaggtgaccttctcttctttccatcttcaaacgcttgatcattgatgctcccttttctcttc

SEQ ID NO: 865870 - DNA, 120 bp, Artificial Sequence
  ENSG00000224596_19 (sequence is synthesized)
tctctcctcctgggaaaagagaaggaccaacatccccctttcccttcctcctgtgctgtcccgacccctctgagacctggctctagcagtaagtccctctctcttctgcagcaccagcct

SEQ ID NO: 865871 - DNA, 120 bp, Artificial Sequence
  ENSG00000224596_20 (sequence is synthesized)
ctgcccatccctgccctctgcacacaaagctctcacattgtctgcactttaagaacttttgtggcaaaccctggcaaatcctgccacttgtttccactcttctcaaatggctttgaggtc

SEQ ID NO: 865872 - DNA, 120 bp, Artificial Sequence
  ENSG00000224596_21 (sequence is synthesized)
atcattgacctatcccatttgaccctgtcctgtatctgatgttgtaccctttctccttgatcccactctggcaactctcccactcccctttcttggatcaactgtcttgctcctcagtct

SEQ ID NO: 865873 - DNA, 120 bp, Artificial Sequence
  ENSG00000224596_22 (sequence is synthesized)
tgatcaatgcctccttctctctctttagccttggccctttttggccagggaaataaatgtgaaatacataaagcttcattttatcttatgattatagctatgttgatgttacccaagacc

SEQ ID NO: 865874 - DNA, 120 bp, Artificial Sequence
  ENSG00000224596_23 (sequence is synthesized)
taaaagtcacactctctaattacacttccctcctgtgttctgggtcctcttggaccagtccttactctggctcccctcctggatgtctcccagacttctaattagaattactgtttccta

SEQ ID NO: 865875 - DNA, 120 bp, Artificial Sequence
  ENSG00000224596_24 (sequence is synthesized)
tatcaagctaattatctttcccaccaacctcctccatccttgggtgaaagcatcacttggttgcaaaagtcagaaatctgggtttcattcttgcggtaggtagaataatgcccccaggcc

SEQ ID NO: 865876 - DNA, 120 bp, Artificial Sequence
  ENSG00000224596_25 (sequence is synthesized)
ccaggttttgacatccgaatccctgggactttgcagatgtgattcagtttaggattttgagatggggagattatctgggagagcctgatgtcatcataaggttcttataagagggaggca

SEQ ID NO: 865877 - DNA, 120 bp, Artificial Sequence
  ENSG00000224596_26 (sequence is synthesized)
ggagggttagagtgagtagtaagagatgcaacagtggaagcaagaggttggggtgatgtggccacaagcccaggagtgctgacagacatcagaagctggaagggacaaggaatggtttct

SEQ ID NO: 865878 - DNA, 120 bp, Artificial Sequence
  ENSG00000224596_27 (sequence is synthesized)
cctctggagcctccagaaagaaccagccctgctgacaccttgattttagccttggaagactcattttggacttctgaccttgaacgttgtaagagaataaatttacatattttaaactgg

SEQ ID NO: 865879 - DNA, 120 bp, Artificial Sequence
  ENSG00000224596_28 (sequence is synthesized)
cttgtcacttacatgctccaagaggtctcagaactaggggacttcctcccctccctcctccttgtctggagctggcattaggccccacatcttccagacccaagaagggcatttactcca

SEQ ID NO: 865880 - DNA, 120 bp, Artificial Sequence
  ENSG00000224596_29 (sequence is synthesized)
ggagatggctgggcagaccctcagtaggtattccacgaaagtgttcatggcttaaacccaacacttgatttctccctgagccagtctctgtgaatgtcctcaccatcgtcctgtgtcact

SEQ ID NO: 865881 - DNA, 120 bp, Artificial Sequence
  ENSG00000224596_30 (sequence is synthesized)
atcctgtggccagcaggtagggcttctgcgacctggccctggccacctttggcctcccgtcctcccattccttccaggccccactgtgccttggtgtccctgccctcctttctcctcccc

SEQ ID NO: 865882 - DNA, 120 bp, Artificial Sequence
  ENSG00000224596_31 (sequence is synthesized)
aacttcacccaccagttcccatctcccttcctttgcagggtgtttctgctgctggaattctttgcccctgggtctccgtgtggttagctccctttcaccacgctcagtcaaggtctaata

SEQ ID NO: 865883 - DNA, 120 bp, Artificial Sequence
  ENSG00000224596_32 (sequence is synthesized)
ttgtccccccaccacctcctgcattcactctccgtcccattaccctgttttactttcttcagagcactacgttgttttgttgtcctctccactaccctaaatagaatgtaagctccaaga

SEQ ID NO: 865884 - DNA, 120 bp, Artificial Sequence
  ENSG00000224596_33 (sequence is synthesized)
tgcgagggcatttcctgtcccatacattctgcatcccagagcctgggctggagctgagaaggtgctcaaggaatgtttgtcgcatgagccaatttcatagtgctccaggctcccaggtgg

SEQ ID NO: 865885 - DNA, 120 bp, Artificial Sequence
  ENSG00000224596_34 (sequence is synthesized)
ccaggcatcagaggaaggcagctgactgcactcggccacatcccaaaagtgcctggaaggggagggaggaagcaggcgcttcagaaggcactactgtgtgtcaggactcatgctaggaac

SEQ ID NO: 865886 - DNA, 120 bp, Artificial Sequence
  ENSG00000224596_35 (sequence is synthesized)
ctgtattcttagtgatttgtccaagcccaccctgggagataggggcggtgccaggctagcacccagttctcctgggttctctgagaaagttcctaccttcttccctggctcacaagtagt

SEQ ID NO: 865887 - DNA, 120 bp, Artificial Sequence
  ENSG00000224596_36 (sequence is synthesized)
acttaagcagttttggttgttaaagaaaatactgaatttattcttccaaccactcatatatatatataaatcagtgttattgagaaacaatttacaaaatgcacccattttcactgtaca

SEQ ID NO: 865888 - DNA, 120 bp, Artificial Sequence
  ENSG00000224596_37 (sequence is synthesized)
gttcagtgaattttaacaggtgtgtacagtggtgtaaacactgccacacccaagatatcacacatttccatcacccctcaaaatctcctcataccccttcctgatcaatccctcttcctg

SEQ ID NO: 865889 - DNA, 120 bp, Artificial Sequence
  ENSG00000224596_38 (sequence is synthesized)
cctcaggcaacatttgatttgattttatcaatatcgattagttttgcatgttctagaatgtcctataaattgtgattaggcagtatgtactttctgtgtagtgccatgcatgttgtatct

SEQ ID NO: 865890 - DNA, 120 bp, Artificial Sequence
  ENSG00000224596_39 (sequence is synthesized)
tgcatgagtagttcggccctttgcattgctgggtagtattctggagaatggacattccacaatttgtttatctgttcaccaattgatagaatttgggttatttccagtttggggatttta

SEQ ID NO: 865891 - DNA, 80 bp, Artificial Sequence
  ENSG00000261320_0 (sequence is synthesized)
caggcgggacaacgcgatccagccggcggcggccagcacggcgagtgcggccggcgggggcagcaggcgctggcacagcc

SEQ ID NO: 865892 - DNA, 120 bp, Artificial Sequence
  ENSG00000261320_1 (sequence is synthesized)
tgcttgggagagggcccgtcggtccagcccgggtgcccggcctcagctctccgccgcgcccccacccacacgcccggggccgccaagccgccgcgctcaggtgagcacatgccactcacg

SEQ ID NO: 865893 - DNA, 120 bp, Artificial Sequence
  ENSG00000261320_2 (sequence is synthesized)
cactcacgcttgttcgggacacctgaggacacgcacaaccggcatcccggtgccctttgctgatcgcaccaccgcggccgccaagcctgcaggaacaccgcgaggaaccagccggtgctc

SEQ ID NO: 865894 - DNA, 120 bp, Artificial Sequence
  ENSG00000261324_0 (sequence is synthesized)
ctaatagagtggtataaatcaaatgctattggtatacaaaaggacaaattttgtcagccaagtgtatgggtatcttcaaagagcacaggtgccatctgttctgagctaatgacccattga

SEQ ID NO: 865895 - DNA, 120 bp, Artificial Sequence
  ENSG00000261324_1 (sequence is synthesized)
agaaggccacaccaaatttgggggaaaagcagcataaacaaatgccagagtattttccaggcaggttgtatttggagaatctcctaatgttgtatatttaatttgtcctttgtccaagaa

SEQ ID NO: 865896 - DNA, 120 bp, Artificial Sequence
  ENSG00000261324_2 (sequence is synthesized)
taatgcaatgaactaggcaactagttgaataaaaattgaaaccaagttcaaacaagcctattgaaaaatgggcaaaagactggaaaaacatggccaataagcgtaagaagagatgttcag

SEQ ID NO: 865897 - DNA, 78 bp, Artificial Sequence
  ENSG00000261324_3 (sequence is synthesized)
tggaaaaacatggccaataagcgtaagaagagatgttcagcttgatcagtcatcaagaaactacaaatcaagaccaca

SEQ ID NO: 865898 - DNA, 88 bp, Artificial Sequence
  ENSG00000261324_4 (sequence is synthesized)
acacacctgtaatccctgttactcgggggctgaggcacaagaatcacttgaactctggagagagaggttgcagtgagccgacatcagc

SEQ ID NO: 865899 - DNA, 120 bp, Artificial Sequence
  ENSG00000261324_5 (sequence is synthesized)
tgaactctggagagagaggttgcagtgagccgacatcagccactgcactcaagactctcgatctctctctctcaaaaaaaaaaaaaaaagaccacaatgaaatacaactttggactcagt

SEQ ID NO: 865900 - DNA, 120 bp, Artificial Sequence
  ENSG00000261324_6 (sequence is synthesized)
agactgacaaaaattaacaaatgttacacagaatctcttatattgctggtaggagtataaattgtttcaattatttttgaaactaagggtttgcattatcttgtgaagtttaagatagat

SEQ ID NO: 865901 - DNA, 120 bp, Artificial Sequence
  ENSG00000261324_7 (sequence is synthesized)
tcacatatatgctcaagcagcaattccacctctgggtatttacctaaaggaaatgatagcatgaatgccccaggagacatggtcattaaagttcttagtagaactgctcacaatagcaac

SEQ ID NO: 865902 - DNA, 120 bp, Artificial Sequence
  ENSG00000261324_8 (sequence is synthesized)
aacaaaccaaatgcccattgacgagagtggatgaataaattacagtgaaatattttgcagtcaaaattaacagataaatccaatatgacttaacagtggtttacagcgaatgttttgttt

SEQ ID NO: 865903 - DNA, 120 bp, Artificial Sequence
  ENSG00000261324_9 (sequence is synthesized)
ctctgctgacacatcaatacttgtgtcttcatatgtttagcatttttattctgaacttatatgtggttgaaggtcatctgtgggagtcagaaactaaattgagcatgctgcctccagaga

SEQ ID NO: 865904 - DNA, 120 bp, Artificial Sequence
  ENSG00000261324_10 (sequence is synthesized)
gaattagcatttgcttgtttttttcgggtaacatactgctatggactggggccactttagccctgtttgagtatcctaggctattagtagagtcaacttttacttcttacagcttattcc

SEQ ID NO: 865905 - DNA, 120 bp, Artificial Sequence
  ENSG00000261324_11 (sequence is synthesized)
caaggcttattctccagtgtaaccctagatttattttttattatttttatcttttttaagattcaagggatacacatgcaggtttgttacatgagtattgcataatgctgaggttcaggc

SEQ ID NO: 865906 - DNA, 120 bp, Artificial Sequence
  ENSG00000261324_12 (sequence is synthesized)
ttctgatgaccccatcacccaagtagcaaacatagtacccgataggtagttttttagtttttcaacccttgccccactccctcccttcccatgaatccccagtgttagaaatgcttgttc

SEQ ID NO: 865907 - DNA, 75 bp, Artificial Sequence
  ENSG00000261324_13 (sequence is synthesized)
gcacttgaacataaatttaatttcagcagttttgtcaccagagtacacagaacaaaggagacagggtcatttata

SEQ ID NO: 865908 - DNA, 79 bp, Artificial Sequence
  ENSG00000261324_14 (sequence is synthesized)
tcactagcagttttgtcaccagagtacacaactactgctgtgtctgatttccactggctggaacgggacctcacattct

SEQ ID NO: 865909 - DNA, 88 bp, Artificial Sequence
  ENSG00000261324_15 (sequence is synthesized)
gcaaatatttaggctaaattgtgggagataacataaagtacattgatttctttattacagatagcagatatttaagaatgttggaaag

SEQ ID NO: 865910 - DNA, 120 bp, Artificial Sequence
  ENSG00000261324_16 (sequence is synthesized)
aattttgcttctaaggaaagttactgtttattcctaattagatggggaagaaagtctttgaagaggaacgtctactttttttttttacaccagtgtctattgttcctatctttgtgtcca

SEQ ID NO: 865911 - DNA, 120 bp, Artificial Sequence
  ENSG00000261324_17 (sequence is synthesized)
tgtgtacacaatgttgagttccaacttacaagtgaggacatgcagtatttgtttttctatttctgcattaatttgattaggctaatggcctccagctacatccatgttgctgcaaaggac

SEQ ID NO: 865912 - DNA, 89 bp, Artificial Sequence
  ENSG00000261324_18 (sequence is synthesized)
caccattgatgggtacctgggttgattccatgcctttgctattgtgaatggtgttgtggtaaacatgagtgcaggtgtctttttggtag

SEQ ID NO: 865913 - DNA, 120 bp, Artificial Sequence
  ENSG00000261324_19 (sequence is synthesized)
ggtgttgtggtaaacatgagtgcaggtgtctttttggtagaacgatttattttcctctgagtatatacccagtatgggattgctgggtaaataataattccatttttagctctttgagaa

SEQ ID NO: 865914 - DNA, 120 bp, Artificial Sequence
  ENSG00000261324_20 (sequence is synthesized)
atctccaaacagctttccacataggctgaactaatttgcattcccaccaacagtgtgtaattgttcccatttctcaaccctggaagggttattcagatagtgtttgccagactgctggaa

SEQ ID NO: 865915 - DNA, 120 bp, Artificial Sequence
  ENSG00000261324_21 (sequence is synthesized)
atatgtcttccgtgacttatctgtaaattccttgaaagaaggaacttctgacctaaaattttgaataaaacattaaagttttagggaaatttggctgggtgcagtagctcatgcctgtaa

SEQ ID NO: 865916 - DNA, 120 bp, Artificial Sequence
  ENSG00000261324_22 (sequence is synthesized)
aggattgcttgagcccagaagttcaagaacagcatgggcaacatagtgagaccgccatctcaaaaataacaaataaaataaagttttggggaaaattcttatatatttagatactatggt

SEQ ID NO: 865917 - DNA, 120 bp, Artificial Sequence
  ENSG00000261324_23 (sequence is synthesized)
aaattcttatatatttagatactatggtaacgttttaataaaataaactgagttgcttttcatgtatttctgttttctaaaaattatgtgctatattaattacctgttcctgccctggag

SEQ ID NO: 865918 - DNA, 120 bp, Artificial Sequence
  ENSG00000261324_24 (sequence is synthesized)
atgatgtttggttatattttcaggttctttcactatttttatttttgtctgtttggacttacaacttttatctatgttaaatctggtatttatacttccctttaaagccatatattttat

SEQ ID NO: 865919 - DNA, 120 bp, Artificial Sequence
  ENSG00000261324_25 (sequence is synthesized)
caaaaaattattagagaaaatttatactcacatggtattttctaatattaaaaactccttaaaaaaactcatgtctgtcaccttgctcatttcctttttttattttttgagacagagttt

SEQ ID NO: 865920 - DNA, 120 bp, Artificial Sequence
  ENSG00000261324_26 (sequence is synthesized)
ggcatgagccaccacgcccggcccaccttgctcatttctaattttgttttatcttctgattatattttttcagaaatttgtctgttagtttcttcaagaaattatcaatttatcctttta

SEQ ID NO: 865921 - DNA, 120 bp, Artificial Sequence
  ENSG00000261324_27 (sequence is synthesized)
gaaatgtttaataatttctattgttatttcttatattctaaccttttttaatttttatgtttttgtttttgtttttttgcatttcttcttttctcctcagttcattttcgattctttgtt

SEQ ID NO: 865922 - DNA, 120 bp, Artificial Sequence
  ENSG00000261324_28 (sequence is synthesized)
tcagttcattttcgattctttgtttttaaaataacaccattggcctggcgtggtggcgccacctgaaatcccagcattttgagagtttgagatgggtggatcacttgagcccaggagttc

SEQ ID NO: 865923 - DNA, 70 bp, Artificial Sequence
  ENSG00000261324_29 (sequence is synthesized)
taatgacttgagcccgggaggtcaaggctgcagtgagccactgcactctagcctgggtgacaaggcaaga

SEQ ID NO: 865924 - DNA, 120 bp, Artificial Sequence
  ENSG00000261324_30 (sequence is synthesized)
cagtgagccactgcactctagcctgggtgacaaggcaagaccctgtctcaaaaattaaattaattaaataacaccataatttatgggtgtgtatttatttatagctttagccacatataa

SEQ ID NO: 865925 - DNA, 120 bp, Artificial Sequence
  ENSG00000261324_31 (sequence is synthesized)
actcttaaaatgttatagtgtattttattacttctaagtaacctatgattttatttttacttcatcttaactcacttattgaagaggttaatattttaggtagttgaaatgttttcctgt

SEQ ID NO: 865926 - DNA, 120 bp, Artificial Sequence
  ENSG00000261324_32 (sequence is synthesized)
tttaattgtcagtattaatttctagttataaatttggactaaagaatgtgacctgagcaatttcttcattttggatattactgaagttttatttgtgaccaatatttgaaaccatttcat

SEQ ID NO: 865927 - DNA, 120 bp, Artificial Sequence
  ENSG00000261324_33 (sequence is synthesized)
ggttcctgaacaagaaagcatggtatgtgcttcaaaatacaacattcaacttatagctgtattcagtgttgttaattgtattttgaaagtaaaaactaaccattggtttttgtctacctg

SEQ ID NO: 865928 - DNA, 120 bp, Artificial Sequence
  ENSG00000261324_34 (sequence is synthesized)
atatatatgtgcctgatagtatcttgttgtcccctgctatgtttttgtttctgtcaatgtatcatattttaaatcatagttattttataaaatgtgattgtgagttattatttaaaccat

SEQ ID NO: 865929 - DNA, 120 bp, Artificial Sequence
  ENSG00000261324_35 (sequence is synthesized)
gccttctttagaggttggaccttttatcagtgtgaataactctttttgtcccttggatatcaattaaattgaattctaatttttttttttaaccttacctcaggtgctgtttggctcctg

SEQ ID NO: 865930 - DNA, 120 bp, Artificial Sequence
  ENSG00000261324_36 (sequence is synthesized)
cagccaaatacactgatgatttaattaaaatgtttatctcccccaaattttaagaactttatttgggttatttggaataatgtataaaatatctatatagattattatataattcagggg

SEQ ID NO: 865931 - DNA, 120 bp, Artificial Sequence
  ENSG00000261324_37 (sequence is synthesized)
gaagcaaattatcagaacaatttcatgttatacaaataacatcagaaaaatatcttaaattatatggcatattctattgattcatccacaaatttataagtccttaccacctttcattat

SEQ ID NO: 865932 - DNA, 120 bp, Artificial Sequence
  ENSG00000261324_38 (sequence is synthesized)
attggtactaggcattatagtagtgctaggcactatagtaatgctggggtataaacaagaataaaacaaaataagttccttatttcaggtaacttacagtataggtcagtggttcttagc

SEQ ID NO: 865933 - DNA, 120 bp, Artificial Sequence
  ENSG00000261324_39 (sequence is synthesized)
ttgctttttaattatgaattcctttgaaagtctagtaaaataatccaacaccattattccccattgcacatacccccagatgttttagacatattttcaattgctccatggaccttaaga

SEQ ID NO: 865934 - DNA, 120 bp, Artificial Sequence
  ENSG00000261324_40 (sequence is synthesized)
aaacttggttggtgtgcagtttggtgtattatgggtaagactggacctggtgttagaaaatctgcatttgaggctttgttctgacagtgtctagtgtaaacatgggcagaccacttaaac

SEQ ID NO: 865935 - DNA, 120 bp, Artificial Sequence
  ENSG00000261324_41 (sequence is synthesized)
ctctctttagtcttctctgtagaatgatgataataccatctaattagcaggattgttgttttattcagtgagacagcatatgtaaataacttagtaaaataaaaagcaacgtgtttataa

SEQ ID NO: 865936 - DNA, 120 bp, Artificial Sequence
  ENSG00000261325_0 (sequence is synthesized)
ttaacatcacttccccagggcgaggaactccatgtgaggctctgggggaacctgactatgtgcagtcgtttacagcctgggtctcctggagcctatgaaatgagaagcagtcattagcac

SEQ ID NO: 865937 - DNA, 120 bp, Artificial Sequence
  ENSG00000261325_1 (sequence is synthesized)
agcaagcggccctcatccttccttctcaataataacactgtcaccagaggatggaaaattaccctgacgtctctgtatctccaaattgcacttcagagacagactgcgtaaggcaaacag

SEQ ID NO: 865938 - DNA, 120 bp, Artificial Sequence
  ENSG00000261325_2 (sequence is synthesized)
accctgagtgaaaacctcctggctagacttccaagccaaggcctaataaataaccctgaaatatacaaagtgatggcagctttgctctgtggctcgtggcttctgccctgggaaggacca

SEQ ID NO: 865939 - DNA, 120 bp, Artificial Sequence
  ENSG00000261325_3 (sequence is synthesized)
tgaatttcagcgtctgacagatggggtcagaaagtggagtctgcctggtgggttgaggatctgcaaattaaccccatggtggtggtttcagaacaagtgtgcctgctcacgcaaagacta

SEQ ID NO: 865940 - DNA, 120 bp, Artificial Sequence
  ENSG00000261325_4 (sequence is synthesized)
acctctaagaaaggagcaggcccggaggtgaggccccctgggcgtgaaagaatcaaccccagtccacaaagtccggagatgagacatcctgcctggaggagggagccctgtgcatcgcag

SEQ ID NO: 865941 - DNA, 120 bp, Artificial Sequence
  ENSG00000261325_5 (sequence is synthesized)
aagaagccaaacaggatctttagtggtgaccgaaaatgctcatgaggagaaaggctgcatggcattaagtgaaccccattgaaagggcccagtgaacagagcccctggacattgccggaa

SEQ ID NO: 865942 - DNA, 120 bp, Artificial Sequence
  ENSG00000261325_6 (sequence is synthesized)
ggaaaggagaaagcccagcaaagcacacaacgtatcaggcttttcatgtgtcattgggtgaaagggagtcacatgggccaaggaggggaagcaggtgtcatcagagcagttccacagccc

SEQ ID NO: 865943 - DNA, 120 bp, Artificial Sequence
  ENSG00000261325_7 (sequence is synthesized)
tctaggcacagtaacaggcatgctttctgtccttctctccttttagattgtaagctacccaaagtccatctccatgggtttttttccttatgtgcaaactaccatatgacaggtgtgcct

SEQ ID NO: 865944 - DNA, 120 bp, Artificial Sequence
  ENSG00000261325_8 (sequence is synthesized)
gacaataactcaggtatagctgagaatgatcctgtagtccaagaatgttggttctgagctctgaactaaggaatctgggagctgccaacccagaggtttactccttatctatggagcata

SEQ ID NO: 865945 - DNA, 120 bp, Artificial Sequence
  ENSG00000261325_9 (sequence is synthesized)
ggtgaacccctggcccatttcttggaacagcatgtgcggggaaccaaggccctttgttttgagctaggtggaggtggccaggtagaggtcgccaggaagaggtggccaggtggaggttgc

SEQ ID NO: 865946 - DNA, 120 bp, Artificial Sequence
  ENSG00000261325_10 (sequence is synthesized)
taagcaaagattgctatattaactgggtgctttttagaaaccatagtggttaccccattcatccagccactcctggactccctgtacgtttaagttgcccaataaaacttatgtcttgct

SEQ ID NO: 865947 - DNA, 120 bp, Artificial Sequence
  ENSG00000261326_0 (sequence is synthesized)
agagcaaaagcgtctccagaggaggacatctgtaaatcccaaatctgatctccttcatcatcattaggcaacagataggataagacttcatgaagagaattttggtggctttagattgtt

SEQ ID NO: 865948 - DNA, 120 bp, Artificial Sequence
  ENSG00000261326_1 (sequence is synthesized)
gagaaagtatatataggaaaaaactggaaattatgtccaagattttttgtctaactccttatcctgatattgttaacatttcacaactaaaataattttaacagacaattagtttttaaa

SEQ ID NO: 865949 - DNA, 120 bp, Artificial Sequence
  ENSG00000261326_2 (sequence is synthesized)
aatgtattttcatgacctgagactacagaaattgccattttcttaggacgtagtttacatttgactctgcttactgtgtccagggcatccccaaattgggagagattgccaagtcagttg

SEQ ID NO: 865950 - DNA, 120 bp, Artificial Sequence
  ENSG00000261326_3 (sequence is synthesized)
ccattttgccttacttttaccaaggactagcctacaggttcagttttgctcttgactttggccctgaattgagaactgagtcaagagaacagagtggaagtatggagacaaagccagcag

SEQ ID NO: 865951 - DNA, 120 bp, Artificial Sequence
  ENSG00000261326_4 (sequence is synthesized)
ctttactcaaaaaatatatatgagtctagtattttttttgtttttgaaagacatgttactgagcccaacccagtcagggatcactgaatattgggttaaataaaacaataatgttattca

SEQ ID NO: 865952 - DNA, 120 bp, Artificial Sequence
  ENSG00000261326_5 (sequence is synthesized)
tgtgtttgaaattaatgttttaaagaaccacgcacacactttaaaatgtaactggatttgctatataggccagagaaatatggctgttacgatgaaggcgtaacttctctggttcttgat

SEQ ID NO: 865953 - DNA, 120 bp, Artificial Sequence
  ENSG00000261326_6 (sequence is synthesized)
tatttacaccattagagaagaatgcaaatatgaatagctcagagtagtttaactttgaagtgagagtttatatgcacctttatatgtgggataactgatgtctttggaatagacttcaaa

SEQ ID NO: 865954 - DNA, 120 bp, Artificial Sequence
  ENSG00000261326_7 (sequence is synthesized)
tgaatgataaaaacacctgtaaagtgataggacctctactttttctcatgtccaatgttcagtttcttataaaccaggcatgaagagaaacaaaaagtaattaattctccagatcatgaa

SEQ ID NO: 865955 - DNA, 120 bp, Artificial Sequence
  ENSG00000261326_8 (sequence is synthesized)
gttgtcttcaacctaagcacagaggtataataattacatttctcagaagttccccctctgttttgagtctcaagggcaattgagatgtcagtgaggctgtgattaaatgtattggatatt

SEQ ID NO: 865956 - DNA, 120 bp, Artificial Sequence
  ENSG00000261326_9 (sequence is synthesized)
agaggattttaaatacaaacaagtattataggtgttaccactgaccccgaaggtaagatttactgtgaaaatttataatgcaaggaagaatgatcaagttggctgtcagaacaacaaaat

SEQ ID NO: 865957 - DNA, 120 bp, Artificial Sequence
  ENSG00000261326_10 (sequence is synthesized)
attacaaaccaggatgtctaagagcagaagtccgtggttgccacctctcaagcctcttagcttaatccaatctaggatgcatttccactctgcaacaaacagtatttatttttgccttat

SEQ ID NO: 865958 - DNA, 120 bp, Artificial Sequence
  ENSG00000261326_11 (sequence is synthesized)
ttgcagataacagttttaatgcaggtactgcccatggattagctttgagcagtgtctttttgctttggtttttttatttgtttggtttgttttgagactgagtctcagtcctccaggctg

SEQ ID NO: 865959 - DNA, 86 bp, Artificial Sequence
  ENSG00000261326_12 (sequence is synthesized)
tttggtttgttttgagactgagtctcagtcctccaggctgaggcttgagcccaggccttcaaggctgtagtgcacaatgactgtac

SEQ ID NO: 865960 - DNA, 120 bp, Artificial Sequence
  ENSG00000261326_13 (sequence is synthesized)
aaaaatagaagttgtggagagggaggaggatgcttgaatactttgaccgtacttggcataatagacattttgagggtttttttgttttcttaaaattcctctggatcagttttcattgtt

SEQ ID NO: 865961 - DNA, 120 bp, Artificial Sequence
  ENSG00000261326_14 (sequence is synthesized)
tctagtaattatatttatcgttaatgaattcatattctgctctagcccctaaagatagtttgatatgctaacttttgttttgcctttctagctgctaagatagataatggttattgcaaa

SEQ ID NO: 865962 - DNA, 120 bp, Artificial Sequence
  ENSG00000261326_15 (sequence is synthesized)
aaatggtctccagtgtggattgcttctgagctgctgatggattgaatacattgagaaggaatgtgtcatttggaatccaggaccagtcagcaaggataactgcctgattttatgatttcg

SEQ ID NO: 865963 - DNA, 120 bp, Artificial Sequence
  ENSG00000261326_16 (sequence is synthesized)
tgactgatgctgaaatggaagccaaccactgcagaaatttgggggaaaatgagatctgaagaatacaaggggaagtaggaattcatttctagcatttccaaacctgcttaatcgtgtctg

SEQ ID NO: 865964 - DNA, 120 bp, Artificial Sequence
  ENSG00000261326_17 (sequence is synthesized)
ctccaccacagtcagaggaaaagactgagttcatggaaattaccagctaagccttacatctgtctttaatgtttttaggaagtatactgaaaaggtaagtgagatgtctgttttgaagaa

SEQ ID NO: 865965 - DNA, 120 bp, Artificial Sequence
  ENSG00000261326_18 (sequence is synthesized)
agactcttactgggtaccttaaaacccgttgtttcctattagtaaagatgggcagcttctttattcctagcttcaaaaagccttgcccctgtttggtgtgtttctcagtattgtggagaa

SEQ ID NO: 865966 - DNA, 120 bp, Artificial Sequence
  ENSG00000261326_19 (sequence is synthesized)
ggtagtttctgagcaaggtggtgcttttcctctgcttctcagcagctaagacagaaattgcaccgaagtgtacaaagggccaatttttgttgtcctgttgtgctcaaatcctttttttta

SEQ ID NO: 865967 - DNA, 120 bp, Artificial Sequence
  ENSG00000261326_20 (sequence is synthesized)
aaaaagttatttcaatcaagtcttagttttattcctcactatataggaaaaaaatctttaatgcctcaaaagttccattcagcattacatttgcattactcttatttgcagcaaatatga

SEQ ID NO: 865968 - DNA, 120 bp, Artificial Sequence
  ENSG00000261326_21 (sequence is synthesized)
gtaaaattataggtttttaaaggtctctaataacatccacttatattggttttgtagataatccataaattaccagaaataaattattccacatttattacacacccatgtaatagatgt

SEQ ID NO: 865969 - DNA, 120 bp, Artificial Sequence
  ENSG00000261326_22 (sequence is synthesized)
cgtgccaggccctggaatatactaatggcatcacctcatgtggtaaaaagacacattccgccatcctggagtatacaaaggtagactagcatatagttcatgtgctcaaggagttcattt

SEQ ID NO: 865970 - DNA, 120 bp, Artificial Sequence
  ENSG00000261326_23 (sequence is synthesized)
ttattgacatgatacagatagaattgtagtttagggaatcaaaatctaataaaatgaggctaattccattttcccattaacactaataactagtgtgtaaatctgaatatgacacattct

SEQ ID NO: 865971 - DNA, 120 bp, Artificial Sequence
  ENSG00000261326_24 (sequence is synthesized)
atatgaaagaagctctgtgtgcatctacactaaatactcgtgtgtgccaggtactgttttaaactacgtatatttttttaattctcataactgttctctgaggtatgtactaatactaaa

SEQ ID NO: 865972 - DNA, 120 bp, Artificial Sequence
  ENSG00000261326_25 (sequence is synthesized)
gcttattgttaaaggaaggcagaaaaattaagtaacttggcctaagtttgcataactgtgatctgggatcaatatttgaacccatacaggctgattgcagagcctgcactcttaatttga

SEQ ID NO: 865973 - DNA, 120 bp, Artificial Sequence
  ENSG00000261326_26 (sequence is synthesized)
gtgtgatatttatgtgcagtacctggctataagtacccacaaaacgtttcaaattctttataaaatttgcttagttaaaaaagtaccaattgcataatatggttataagtctggtagaag

SEQ ID NO: 865974 - DNA, 120 bp, Artificial Sequence
  ENSG00000261326_27 (sequence is synthesized)
ttaggctttttacaagacatgctgcttactgcaccaaggaggcaagaaggctttttagagagcccagaatttcctttcctcaactcctgcttccaagacagtcattttgcatgataaccg

SEQ ID NO: 865975 - DNA, 120 bp, Artificial Sequence
  ENSG00000261326_28 (sequence is synthesized)
tttccccaaaaaacacagacacaaaatttaaagaactggaacagaggaagcagagcttatcatagtatatatgtttagtaccctgtcacttaggtccacccctctttctttgtggattgt

SEQ ID NO: 865976 - DNA, 120 bp, Artificial Sequence
  ENSG00000261326_29 (sequence is synthesized)
ggacattttgtttaactgctaaatcatgagaatatatgactgctgagacttttccaaggattttttaaaaaacacattaggctttgtgcagaagtaaagaaaaagtgctgtgagaacccc

SEQ ID NO: 865977 - DNA, 120 bp, Artificial Sequence
  ENSG00000261326_30 (sequence is synthesized)
aggtaggtaatttactttctattgtactcatagtttgtttgaaacctcttcacctctatcccttattgttttatactctgtaaatctgattttacctttaataaacttttctgaagtgag

SEQ ID NO: 865978 - DNA, 86 bp, Artificial Sequence
  ENSG00000261326_31 (sequence is synthesized)
ttttttttttttttttttttttctgagactgaatctcactctgtcgcccgggctatccacctttcaggttcaagcagttctcctgc

SEQ ID NO: 865979 - DNA, 85 bp, Artificial Sequence
  ENSG00000261326_32 (sequence is synthesized)
gatttttgtctttttggtagagatggggtttcactgcgttggtcacgctggtctcgaacttttgacctcaggtcatccacccgtc

SEQ ID NO: 865980 - DNA, 120 bp, Artificial Sequence
  ENSG00000261326_33 (sequence is synthesized)
tagagatggggtttcactgcgttggtcacgctggtctcgaacttttgacctcaggtcatccacccgtctcagcctcccaaagttctgggagtacaggcgtgagccaccatgcccagcctg

SEQ ID NO: 865981 - DNA, 120 bp, Artificial Sequence
  ENSG00000261326_34 (sequence is synthesized)
tcactttgtccctggcagtctgctggtgaccatgatttctaaggctcactcatgggaccaaaggcaagaagaaagggaggagggtggtaaccagataaactttgcaacccctttgatagg

SEQ ID NO: 865982 - DNA, 120 bp, Artificial Sequence
  ENSG00000261326_35 (sequence is synthesized)
actttttgggtgagaatttttatgaaaagtaatatatacttctactatagatctgcctctagtttcaacctctagttttagcactgattttttccccttaatttccagaagcatgatata

SEQ ID NO: 865983 - DNA, 120 bp, Artificial Sequence
  ENSG00000261326_36 (sequence is synthesized)
atatctttttcaaagaaagtgggaagaatgtccacagatgttaggagaagacaattatgtaggaaaaatattttctcaaattaaaatttaaaacaaaagtttgcagggaatggagtgggg

SEQ ID NO: 865984 - DNA, 120 bp, Artificial Sequence
  ENSG00000261326_37 (sequence is synthesized)
ttcagcattagggaggtaggagatgataaaaatacatattaagtaatttgtaccctgatatgctttgtatgtagattgcttacaactaacatgaaatgagcatttcattccttaagcatg

SEQ ID NO: 865985 - DNA, 90 bp, Artificial Sequence
  ENSG00000261326_38 (sequence is synthesized)
tctacaggcgtgagccaccatccccggccaagcagtatctttttgctttgaaagtgacttacatgtacatttgttttccttgtgaatgtt

SEQ ID NO: 865986 - DNA, 120 bp, Artificial Sequence
  ENSG00000261326_39 (sequence is synthesized)
aaagtgacttacatgtacatttgttttccttgtgaatgtttctttttaactgcaaactaagaaacattgagcccagcattcatatatttgcaaactctgtcttacttaatttctcagttt

SEQ ID NO: 865987 - DNA, 120 bp, Artificial Sequence
  ENSG00000261326_40 (sequence is synthesized)
ttccttttcttttttaaatttattttttctttatttttctttataaagtgaagagtaggtagcatgaattcctcttgccctttgctatttcagtctggcatcagtagcaattgttgctat

SEQ ID NO: 865988 - DNA, 120 bp, Artificial Sequence
  ENSG00000261326_41 (sequence is synthesized)
gtccagttttcattcatggatttttctgggattgaagatgagttcaatgttgattatttaattgggcagtataagtaaattcattggctctccttccagtttagtgaatactaaatatca

SEQ ID NO: 865989 - DNA, 120 bp, Artificial Sequence
  ENSG00000261326_42 (sequence is synthesized)
attttccaaaaaagcaagttttgtcagtctcagtgtttctctgatctagctactcacaattccattcccaaagtagtgacctagttctgtcacttgggtttcaaagggagttgaagtgtc

SEQ ID NO: 865990 - DNA, 120 bp, Artificial Sequence
  ENSG00000261326_43 (sequence is synthesized)
actgagtgagtacagcaaacctgtttaatgatttataggaagcaaataaaaagaattttgtttgctaacctagaagtatatcagattttggtttcaatttataattttgcaaaatataaa

SEQ ID NO: 865991 - DNA, 120 bp, Artificial Sequence
  ENSG00000261326_44 (sequence is synthesized)
gacatttcctggctaactccatccagatgaattattcagtattttttctcctatcttaatgaagttaatttgaatgctaatttcctataaccaagaaaacagttgaattaaataaccctt

SEQ ID NO: 865992 - DNA, 120 bp, Artificial Sequence
  ENSG00000261326_45 (sequence is synthesized)
atcttttaaacttaaagcttatactactaataatcatttaacattcacttccttttttctgacttaattggtaggtaaataaaatacttcaaatttgattggcaaattggaaaatcactt

SEQ ID NO: 865993 - DNA, 120 bp, Artificial Sequence
  ENSG00000261326_46 (sequence is synthesized)
agaacaatctgctagtattttttattccctttgttttttcctttacacatttgtactgcaaaataaatcaaggacaaagactcacactgaattgatcaacttgtgtttggtcttcatggg

SEQ ID NO: 865994 - DNA, 120 bp, Artificial Sequence
  ENSG00000261326_47 (sequence is synthesized)
aattacatcttttttcccctcaacatttattaaaggaacatacagaatttcagactatagcaaactaatacctttagcttgactaagagttgattttcgttaaggaacagaacttgtaat

SEQ ID NO: 865995 - DNA, 120 bp, Artificial Sequence
  ENSG00000261326_48 (sequence is synthesized)
ttatttcgacatactttaatgtatgactcatccctgttaaagttgtgagactcaaaactacgcccaaatcacttaattttatgtccttccctgtttactgtgtctgaccttcaagatttc

SEQ ID NO: 865996 - DNA, 120 bp, Artificial Sequence
  ENSG00000269139_0 (sequence is synthesized)
gcgagccagcgaccccgcccgggcctgcgggaggacggaaccccagccccgaggacccgcgagcacccacgacctcgccggggagtgggcagctgccactcccacctcccctggcacttc

SEQ ID NO: 865997 - DNA, 120 bp, Artificial Sequence
  ENSG00000269139_1 (sequence is synthesized)
ccctggcacttcgggccccccagcctgccctgtgcctgcattctcctccgcgatagaccccactcgagactccctgtttgtggggggacctcagtggccctaaaacactcatatgggcac

SEQ ID NO: 865998 - DNA, 120 bp, Artificial Sequence
  ENSG00000269139_2 (sequence is synthesized)
agggtccagccctgggcaaggcgtccacccactgcggctgcagttcctcactcgaccttgaccgcctcccacagcagccgcctgctcccacccccaccatcgcctcggccactcccgcgc

SEQ ID NO: 865999 - DNA, 120 bp, Artificial Sequence
  ENSG00000269139_3 (sequence is synthesized)
cagagaagacacttcagactccgtagctgctcttctgcaattcggtgttttattctttccaaatctcaggcttatgcacaagatggaagagcactgttaaaattaaaaaatggacctaaa

SEQ ID NO: 866000 - DNA, 80 bp, Artificial Sequence
  ENSG00000269139_4 (sequence is synthesized)
ggcggcccgggctccggctcagcccaccccacccgcccctggagcggcggagaccgaggcagggtccagccctgggcaag

SEQ ID NO: 866001 - DNA, 120 bp, Artificial Sequence
  ENSG00000224048_0 (sequence is synthesized)
ggggccctataggagagcactgatggcccacccctgattgtggccctggtcttcatgtctgcatcagcctcagccatctcaagaccacaacaggaacatagccaagtcagagaaggaaga

SEQ ID NO: 866002 - DNA, 120 bp, Artificial Sequence
  ENSG00000224048_1 (sequence is synthesized)
ccaaaagcaccagggcccttcatattattaagctgctaaattaactaatcttggaaacttctagactctacaattcttgttgtatgaggtaataaacccctcgttttataggtcattttg

SEQ ID NO: 866003 - DNA, 120 bp, Artificial Sequence
  ENSG00000224048_2 (sequence is synthesized)
gggggttcttttattaatcacaactaaagcattttaactgataggaaagaccacatattggtgaaaaaggtctacagagggaccagcaggagatggtaaagctaaaggagttttgctcta

SEQ ID NO: 866004 - DNA, 120 bp, Artificial Sequence
  ENSG00000224048_3 (sequence is synthesized)
atgttcaaatccatgtcacctgccctagagaatgctgttcctgcttttccctagccactgtgctgggcatgagaggccccctgtcctccttgggcccagagaacagaaaatgtcttcact

SEQ ID NO: 866005 - DNA, 120 bp, Artificial Sequence
  ENSG00000224048_4 (sequence is synthesized)
ccactcttggaaggtttaacaagttcaagagagaagatattggccaaatacaacacagaggctaaacacaacacctatgttgattgtttggtgcataagaattgagatgatggaaagagg

SEQ ID NO: 866006 - DNA, 120 bp, Artificial Sequence
  ENSG00000224048_5 (sequence is synthesized)
tcactgtgagcttcaggaatagcttgaggctaactgataaaacagaacttctagcaactaaccctggcatgaccaccagaatctgcagggctgagagaagaaagaaaggcaaaagtggat

SEQ ID NO: 866007 - DNA, 120 bp, Artificial Sequence
  ENSG00000224048_6 (sequence is synthesized)
gaatgcagctgaagatgctgtggaactcctatcacattccaagtgctgtgttgatatctggagatatagacaagatcgaagcagatgcagtctttcacatgaatatttgaatcaggcaca

SEQ ID NO: 866008 - DNA, 120 bp, Artificial Sequence
  ENSG00000224048_7 (sequence is synthesized)
ggatgcaggtgatgggtattggcctcagctttagagaccagaggttaaatctcagtgctgcctgccacaaaacgatccatgtaagtcaataaacaatgctttttaaaatattattataaa

SEQ ID NO: 866009 - DNA, 120 bp, Artificial Sequence
  ENSG00000224048_8 (sequence is synthesized)
acacgcagacactatgatgaactgaccagtggacatctttcatgagctccgaaatcctgtgcagaatgacctattgctgatcagagagaagatgttcacactttttttttttaaatttat

SEQ ID NO: 866010 - DNA, 120 bp, Artificial Sequence
  ENSG00000224048_9 (sequence is synthesized)
gtagcgttataactcattgctatccagaggaggaggtttctggaagataaaatgctgccatctgtggagcatgtatttatcaacagtaccaaagtccccttggaagggttaccaggaaga

SEQ ID NO: 866011 - DNA, 120 bp, Artificial Sequence
  ENSG00000224048_10 (sequence is synthesized)
ttaggttgacctttcaatcactgtctggcaggtctttcccaaaaacatgggaagcatttcctgtgtcatgaagcaagaaaataaattttttaaaatttcaatttttaaaaaaataaaatc

SEQ ID NO: 866012 - DNA, 120 bp, Artificial Sequence
  ENSG00000224048_11 (sequence is synthesized)
catactacacatgtttctttgataccagaaaaagattttccaaaatgggaagaagaaaccctgccaaaatgttcaagtgaaggctaataggaccttcagccaagagcatttacaagaatt

SEQ ID NO: 866013 - DNA, 120 bp, Artificial Sequence
  ENSG00000224048_12 (sequence is synthesized)
ctgaattaattcctggtgaagtatctatttcaaaaaaaacacataaaatgctgctattatagtcctcccgaagtcctactttatcatcaatgtatctgagtacatcttgaagtcatgatt

SEQ ID NO: 866014 - DNA, 120 bp, Artificial Sequence
  ENSG00000224048_13 (sequence is synthesized)
aagctcaatgcatttttctagtattcacttactggaaattttttctagcaaaatataagctcatgagaataatcaatcccagagacagaggagacaaataaagaaaaaaaaaaggtgttg

SEQ ID NO: 866015 - DNA, 120 bp, Artificial Sequence
  ENSG00000224048_14 (sequence is synthesized)
gaaggtagaggagataaatggatctgaataacaaatgaaattttctctctggtcccagtacttttctcccagatgaaagatgctggatgctggcattgctgacacttctgatgtgaggcc

SEQ ID NO: 866016 - DNA, 120 bp, Artificial Sequence
  ENSG00000224048_15 (sequence is synthesized)
aaggagatcaatgcaggaggagacctcttaaacaggggctttatcaagaatggcctaccacattcatccattggcccgctaccatctttgatgtccaagccagctagatcaagacatgat

SEQ ID NO: 866017 - DNA, 120 bp, Artificial Sequence
  ENSG00000224048_16 (sequence is synthesized)
tgtgtttttaactagcattcaacctttaggttttacaatagaattatttccccaaatctgccatgtgctgttttctagagtggattgacaattattctctggactttttggtaaccaaga

SEQ ID NO: 866018 - DNA, 120 bp, Artificial Sequence
  ENSG00000224048_17 (sequence is synthesized)
gcaaagtatctcccagattttttctttgatgatatatttgaaatcctaatgctgaaagttaaattatcagggttttaaaactagaagcagtcattatcagaattttatatactatttatt

SEQ ID NO: 866019 - DNA, 120 bp, Artificial Sequence
  ENSG00000224048_18 (sequence is synthesized)
tttaagaacgtaatttgactgtttaagtcttattataattttaagtgaagtactttgggcagtcataaataaagtaatgggcaggtatttagtattcatattgtgtggattcatatccat

SEQ ID NO: 866020 - DNA, 120 bp, Artificial Sequence
  ENSG00000224048_19 (sequence is synthesized)
actctgccactcagtatctctgggattttgatgaatgatcaaactctctgagcctcagttttctaatctgtaaagcagaaatgataatggtatgtagtgataattaaacaatttactagt

SEQ ID NO: 866021 - DNA, 120 bp, Artificial Sequence
  ENSG00000224048_20 (sequence is synthesized)
tgtaagtgcttagaacagttcctggaatagagaaaatttgcagagagatttttattgtttacaatttagttaatggaatggcttcaataatacagtaaaattaagatattcaaacaagca

SEQ ID NO: 866022 - DNA, 120 bp, Artificial Sequence
  ENSG00000224048_21 (sequence is synthesized)
aattcttgttgtatgagaaatcatctactacataaaattctggtttcatacttggccattcctgcttaacggagctaacaaagaaatttaagagtggattgacaattattctctggactt

SEQ ID NO: 866023 - DNA, 120 bp, Artificial Sequence
  ENSG00000224048_22 (sequence is synthesized)
tttctaatgccctgtccacctctaaaattctatagaactgtgatttgattccaatgggccatatcaggactcggcattattttcatcagtgaaccatttcattagaaatttatttttcca

SEQ ID NO: 866024 - DNA, 120 bp, Artificial Sequence
  ENSG00000224048_23 (sequence is synthesized)
aatgatattagtaaatattgaaggaggcttctcccacagagcttcttgtacaaattaaaacagggcagtagaaggttttcaggttggtgaagtcaactctggcttttagtcaaccattcc

SEQ ID NO: 866025 - DNA, 120 bp, Artificial Sequence
  ENSG00000224048_24 (sequence is synthesized)
aaaaaaacattttctttagaatccaagggcttgcaattgttctgaataaagcataaagaagctgttctgatttattaaataaaaagagtaccaaatatatgatttttaaaatgtttcaaa

SEQ ID NO: 866026 - DNA, 120 bp, Artificial Sequence
  ENSG00000224048_25 (sequence is synthesized)
atagttcctattttataaatggagagatgaggccctgagagctcttatatggtagaaccaggatttggatccaagtttgtctggtctggagtccatgtactttctattctgcactactgc

SEQ ID NO: 866027 - DNA, 120 bp, Artificial Sequence
  ENSG00000224049_0 (sequence is synthesized)
actatgcgataagatgtatgtatagcacatgaagtattcaggacagtgcctgccatgaagtaatgctcagtaaatgttatggccattatcagaacatactagcaatattgggactctaag

SEQ ID NO: 866028 - DNA, 120 bp, Artificial Sequence
  ENSG00000224049_1 (sequence is synthesized)
aagctcttaacaactggtttagtgtggaagacgaattggagaagagagagaacaaagtacccatctgataaagttacagaaggcatctcggattcacaacaaccctcaccagccccccac

SEQ ID NO: 866029 - DNA, 120 bp, Artificial Sequence
  ENSG00000224049_2 (sequence is synthesized)
acatcgtctggcaacaggaggcgtttgattacatttggatggaacgcctgcatcaactccagttgtccctgaattggaactgatgggcctcacgtgctgcagccaacagtttgccttcac

SEQ ID NO: 866030 - DNA, 120 bp, Artificial Sequence
  ENSG00000224049_3 (sequence is synthesized)
ccactcccctctccgaagggaacctttctttgggaaaacaagaaacctacgtgccatcctgggtgagagactaacaggagctgtgtcccagcattgccttccaggcgaagcagacaagag

SEQ ID NO: 866031 - DNA, 120 bp, Artificial Sequence
  ENSG00000224049_4 (sequence is synthesized)
tacactctcagaggtgtgaaactgcgagccgtgcttcaagcatcctagaaagaacctctaaaccaggggacccaattgccctcttcaaagtacctctatgcctctatgttcatttcaact

SEQ ID NO: 866032 - DNA, 120 bp, Artificial Sequence
  ENSG00000224049_5 (sequence is synthesized)
agtaaatgttatggccattatcagaacatactagcaatattgggactctaagaagctcttaacaactggtttagtgtggaagacgaattggagaagagagagaacaaaggcatccatccc

SEQ ID NO: 866033 - DNA, 120 bp, Artificial Sequence
  ENSG00000224049_6 (sequence is synthesized)
aaagatttcccaaagatgtcctcagtaaccaaagtgattcgaaaagctcagaaacatagatatcagagtctgcagttctcggcggtgtagcgactaagacactaacccccatgccaggct

SEQ ID NO: 866034 - DNA, 120 bp, Artificial Sequence
  ENSG00000224043_0 (sequence is synthesized)
atgcgcggggcccgctctaccgactcgccctagtcttttgctttctttttctgccctcggcctcgctcttgcgcacgggaccacaatgctccgcgccgcttgtcattgggaggcgccgaa

SEQ ID NO: 866035 - DNA, 120 bp, Artificial Sequence
  ENSG00000224043_1 (sequence is synthesized)
ggtggagaggtcggctcggaaggaaaagatcactcactcttgggggcatccagcagccatgttgtgaggacactcaagcagctgtgaagaggtgcacctggagaggaactgaggcctccc

SEQ ID NO: 866036 - DNA, 120 bp, Artificial Sequence
  ENSG00000224043_2 (sequence is synthesized)
accaaaaccaagcactgacatgccactcatggcaatcacaggaatatataaaacatgagcagaaagaggcctttggagaaatctggaccagcattctcattttacggatgagggaccacg

SEQ ID NO: 866037 - DNA, 120 bp, Artificial Sequence
  ENSG00000224043_3 (sequence is synthesized)
gcccatggaggtttccatagatgattggaaaaacccaagagttggtcctctgttccagaccccacacagacacaaacctacaagccaagggagccagtatttggccattcgtccatccat

SEQ ID NO: 866038 - DNA, 120 bp, Artificial Sequence
  ENSG00000224043_4 (sequence is synthesized)
ctgcatgtcccagggatgcacgaacagggaacacttcagcctttcggctgccttcaaagaagcaatgagagagagagagagggttactttgatgagtgagcagataccaggtactgtttt

SEQ ID NO: 866039 - DNA, 120 bp, Artificial Sequence
  ENSG00000224043_5 (sequence is synthesized)
ggggaaactgcttttctctgagtctatattggtctgcacaaataaactaaaatgctttttaagttgttttatgatctatatagaagagatattgacaaacttctcctgcttagaaaataa

SEQ ID NO: 866040 - DNA, 120 bp, Artificial Sequence
  ENSG00000224043_6 (sequence is synthesized)
aagggacacttggaattaacaaagggggttggtagatttaccattgaggttgatgaacttaatatatcatctggtaaaacaagcgtcaggaaatatccatcattcaaatgttttggctga

SEQ ID NO: 866041 - DNA, 120 bp, Artificial Sequence
  ENSG00000224043_7 (sequence is synthesized)
cagcaaaatgctcaaggactaatcccacagctgaaatgtaggggaaaatttcccctacatttggctccttctggctcctacttggtctacacttttggaaggactgctgagattgtatcc

SEQ ID NO: 866042 - DNA, 120 bp, Artificial Sequence
  ENSG00000224043_8 (sequence is synthesized)
ttggagtcagggcgagagtgccccctccttttccccacttggaaaccagagtttgtggaaagtgaagaagtgatgtgctggagccagaggctcagtgctgggctggggctggctggcctg

SEQ ID NO: 866043 - DNA, 120 bp, Artificial Sequence
  ENSG00000224043_9 (sequence is synthesized)
acccaagccacctggttactcagagcccagcactgggtggaatccctggggtctacaggcattcacccatccccagaagcccagatgagtctctgaacagttggctgtgagtgagatgac

SEQ ID NO: 866044 - DNA, 120 bp, Artificial Sequence
  ENSG00000224043_10 (sequence is synthesized)
ctcagaaatggaagaggtcagtgccttagccagacaggcactgacatgaatgtcataggcatgctccagggccttctgagaaatggaaataccatctggatggaatgacctttatgcaac

SEQ ID NO: 866045 - DNA, 120 bp, Artificial Sequence
  ENSG00000224043_11 (sequence is synthesized)
aaaaagtttaattaaaagaagtctcctcaacaggcattgaatattagtgctcgtcaagattcaaaagagatttcccttagaataattcctcaccacatatattgaggttctggagtgatt

SEQ ID NO: 866046 - DNA, 120 bp, Artificial Sequence
  ENSG00000224043_12 (sequence is synthesized)
catcctaccctcatacataaatgtttgtgctaaccaggctgatgcaatgtgacttgtgtacataagcatttttaaaatggaaaagcaattctgggacaacaagggattctggaagtgtca

SEQ ID NO: 866047 - DNA, 120 bp, Artificial Sequence
  ENSG00000224043_13 (sequence is synthesized)
ggaaaagggtaagttgaagaaaggacttttaattcaacaggtcttgggtagcagaagagatataagccttttaaagagagagaagctaattggtttctgataataggtgcctgttggaaa

SEQ ID NO: 866048 - DNA, 120 bp, Artificial Sequence
  ENSG00000224043_14 (sequence is synthesized)
tttggcaaaggtgcatggtcatggtatctcagtgggatttgactcctcatttggatacaagtttattctatgtgcctctggtggttcttttctttttaaaatttttcctttttatttttt

SEQ ID NO: 866049 - DNA, 120 bp, Artificial Sequence
  ENSG00000224043_15 (sequence is synthesized)
tgttaacttttatgttaagggtacatgtgcaggttggttatataggtaaattgcatgtcacaggggcttggcatacagattattttatcacccaggtaataaccattgtacccaataggt

SEQ ID NO: 866050 - DNA, 120 bp, Artificial Sequence
  ENSG00000224043_16 (sequence is synthesized)
agatttttgatcctcaccctcctcccaccctcatttctgttcagttcaaattaacatattgttgatctccttctatatgtggggtttgtagagaatagaaaaagaagttatactctcaca

SEQ ID NO: 866051 - DNA, 120 bp, Artificial Sequence
  ENSG00000224043_17 (sequence is synthesized)
attataattaacattgactgagaacttattatgtgcccaagctgttataagaattttataattattaactagtttaattttttgtgagatgcgcacttttactaccctcattttatggag

SEQ ID NO: 866052 - DNA, 120 bp, Artificial Sequence
  ENSG00000224043_18 (sequence is synthesized)
aagaaaactaaggcagatagaagctaacttacttaggccttgtggctgatagatggtggagctgggcagttggcactaccattcagtctgccttataccaataacgaagttgtttttgca

SEQ ID NO: 866053 - DNA, 120 bp, Artificial Sequence
  ENSG00000224043_19 (sequence is synthesized)
actgaaaactgacctgagcatgtatgattgggtttactcactaaaaagggaggtctaggagataaaggggacagttagacctttggagtaccaggatcaccttgagatgacaaagccaac

SEQ ID NO: 866054 - DNA, 120 bp, Artificial Sequence
  ENSG00000224043_20 (sequence is synthesized)
ctggctcatgataattcatttcagcacattattgacgcaaactagagagcagagaggcaggcaaaccttgctaaccaaacaaatatgctgccacccccaggacatcataagtcacctggg

SEQ ID NO: 866055 - DNA, 120 bp, Artificial Sequence
  ENSG00000224043_21 (sequence is synthesized)
gacaggatgtgctcctgaatcccttcagagactggatgtcctcaaaacagcccagttagaaggattgatgggtcgagctagtcacacaaatgaaaatatccatgtggacctcaaccggct

SEQ ID NO: 866056 - DNA, 120 bp, Artificial Sequence
  ENSG00000224043_22 (sequence is synthesized)
gctgttgcttcctaagtcccttagtaattcataaacccaaatccaatgaatgctaaaatgacttgcagctgaagtctcgatcacactgtgctgaaacaacttggatgcataagtaaataa

SEQ ID NO: 866057 - DNA, 120 bp, Artificial Sequence
  ENSG00000224043_23 (sequence is synthesized)
atcctctttcaaagctcattaaagtttctagaaaacattcactgcatcagctaaaccactgcagccagtaagcttcagggagttcagtatattgaggaacattaaatctttcaagtcatt

SEQ ID NO: 866058 - DNA, 120 bp, Artificial Sequence
  ENSG00000224043_24 (sequence is synthesized)
agaaggcaatttaacaggcaatctcctgactggtgggcagtcgccatagatacaaacatggaaaattttttgcctgtagttagacctcagtaaatactaaatgagtaaatgatcagtagt

SEQ ID NO: 866059 - DNA, 120 bp, Artificial Sequence
  ENSG00000224043_25 (sequence is synthesized)
cacagtgcctggtgagtccacaaacatctatttaagtcattattaaagattttgcatttataatgaaaataatagaaagcaatattattataattctaggagggaaataaaaaattaaaa

SEQ ID NO: 866060 - DNA, 120 bp, Artificial Sequence
  ENSG00000224043_26 (sequence is synthesized)
aatgcaattgagtaaagaattatgcatcatgaatcctggtactgagatgagaaggtttggttatagaaagagttgaaagtggaggaggaagaagaagactgatggagatgactgtggaac

SEQ ID NO: 866061 - DNA, 120 bp, Artificial Sequence
  ENSG00000224043_27 (sequence is synthesized)
tatggacacttgaagttggatatttcagaaatgaatggcactgaatttttgaacatacattttaccatgagatattttaagtatagaaagtataaacaataacacaatgagcatccctat

SEQ ID NO: 866062 - DNA, 120 bp, Artificial Sequence
  ENSG00000224043_28 (sequence is synthesized)
acccaccacctagtttcatcaaatgttaacattttcatggtattattttttattaggtattttaaagtacatttccaaaatatatgacttaaaaatatcttaattacagattggttaaat

SEQ ID NO: 866063 - DNA, 120 bp, Artificial Sequence
  ENSG00000224043_29 (sequence is synthesized)
gtcttttgctttctttttctgccctcggcctcgctcttgcgcacgggaccacaatgctccgcgccgcttgtcattgggaggcgccgaaggtggagaggtcggctcggaaggaaaagcaat

SEQ ID NO: 866064 - DNA, 120 bp, Artificial Sequence
  ENSG00000224043_30 (sequence is synthesized)
aatgctccgcgccgcttgtcattgggaggcgccgaaggtggagaggtcggctcggaaggaaaagcttccctcctgaagccagcaagaccatgaacccaccaggaggaacaaacaactcca

SEQ ID NO: 866065 - DNA, 61 bp, Artificial Sequence
  ENSG00000224043_31 (sequence is synthesized)
acccaccagaaggaagaaactccagatcaccacgagggtccacggcttcattcttgaagtc

SEQ ID NO: 866066 - DNA, 120 bp, Artificial Sequence
  ENSG00000224043_32 (sequence is synthesized)
agcaagaccaagaacccaccagaaggaacaaattccagacacattttggcacccaatgtggggcacattttggtgaccacaaaggaaccatcgactatcaccaagtggattgaggccatc

SEQ ID NO: 866067 - DNA, 75 bp, Artificial Sequence
  ENSG00000224043_33 (sequence is synthesized)
cagatgattttacaaatggaacgactcactggccctttcactggcctgaagagttcccctctggaggacactaca

SEQ ID NO: 866068 - DNA, 120 bp, Artificial Sequence
  ENSG00000224043_34 (sequence is synthesized)
gccccttctttgctcctattcagcaggaagtagctagagtggtcatcgcccaattcccaacagctgttggggtgtcctgtttagagggggtactgagaggtgaagccagctgggcttctg

SEQ ID NO: 866069 - DNA, 80 bp, Artificial Sequence
  ENSG00000224043_35 (sequence is synthesized)
gggtggggacttggagaacttttctatctagctaaaggattgtaaatacaccaatcagccactctgtagaaacgcaacag

SEQ ID NO: 866070 - DNA, 67 bp, Artificial Sequence
  ENSG00000224043_36 (sequence is synthesized)
atcagcactctgtgcctttgctctgtaaaacggaccaatcagcaggatgtgggcggggccaaataag

SEQ ID NO: 866071 - DNA, 120 bp, Artificial Sequence
  ENSG00000224043_37 (sequence is synthesized)
gcatttttaaaatggaaaagcaattctgggacaacaagggattctggaagtgtcaggaaaaggaacatggtttccttattccctgggcaagcctccctgcctgctttaagatgtgggatg

SEQ ID NO: 866072 - DNA, 120 bp, Artificial Sequence
  ENSG00000224043_38 (sequence is synthesized)
ggcatcatttcctccagaaggccttctctgatccttggtgcccaaatctctgccccttagcacctgatgtaaagggagtcctaacctttccatgctgcattgggttaactctgcacatta

SEQ ID NO: 866073 - DNA, 120 bp, Artificial Sequence
  ENSG00000224043_39 (sequence is synthesized)
tccagaccacaagtcctccagagcctgcattagtcatgtctgcatgccagctggaagctcaagaatattccctctgaactcggagaggacatatgatgcctctgaaaatgaagtcagacc

SEQ ID NO: 866074 - DNA, 120 bp, Artificial Sequence
  ENSG00000224043_40 (sequence is synthesized)
catgccctgggcagatctagactcccagctcactcttggggctcgttatttctagagggctttgcccacagccttcttctttttgctttttcctcttaccaaactcaacccttaataaca

SEQ ID NO: 866075 - DNA, 120 bp, Artificial Sequence
  ENSG00000224043_41 (sequence is synthesized)
ctgtcttctcccctttgtctccagtgttcaatttttccagcttgtgctcaaacctaactgtcccatttatttggtcagctttaatatactgtaataacctgtagagagcactaggtcact

SEQ ID NO: 866076 - DNA, 120 bp, Artificial Sequence
  ENSG00000224043_42 (sequence is synthesized)
agaaacaccaaggaaggctctggtctaaaccttgccctcactcctgtcttctggctcctgaccaccctggtgtcttcccctgtggccctgcaaggcatatcatgcttcctgtctctagga

SEQ ID NO: 866077 - DNA, 120 bp, Artificial Sequence
  ENSG00000224046_0 (sequence is synthesized)
tgcggccgcgccccgcccccagctccccgcacgctgcccctcccgctcgtctgtcccgctggcggcccagcgtgctggctgtacgcgtcacttccggctgtgtcggcgcgcgaaaaaagg

SEQ ID NO: 866078 - DNA, 120 bp, Artificial Sequence
  ENSG00000224046_1 (sequence is synthesized)
ggttgcagttcacaaaatacactttggcagtactttcataacgaaaacaaatgattacaaccagtttacaaatgctttgctttactggaggatcgacatgtttgactaattttcaaaaat

SEQ ID NO: 866079 - DNA, 120 bp, Artificial Sequence
  ENSG00000224046_2 (sequence is synthesized)
acttccggctgtgtcggcgcgcgaaaaaaggtcctgggttggaatgtttgtactggtctgtggcggtggttgtcggctgtcctgccaggaaaactcggcactgactatcccactgctgat

SEQ ID NO: 866080 - DNA, 120 bp, Artificial Sequence
  ENSG00000224046_3 (sequence is synthesized)
gctgtaaaagaggtccttctgctatgacgcaactgtggttcctctggttctggggacacttaggcctcgcgtgccgattttcatagttccctgtggctccgagccgagggagccgcggtg

SEQ ID NO: 866081 - DNA, 120 bp, Artificial Sequence
  ENSG00000224046_4 (sequence is synthesized)
tggaacggagggaaccagtgatctcagtgctgaagaaaacagggagtgtgtgtcttcatacttgatttgccttaccgcaggggcataatatgagatatctgggcgtgttaagtcgttctt

SEQ ID NO: 866082 - DNA, 120 bp, Artificial Sequence
  ENSG00000224046_5 (sequence is synthesized)
ttgcagccgtataaacccatcctaaatagaaaacgcgttttaatacccttataaacgaaaaggataaataagcctttgggttctgtaatgtgagccagcattctttgagtgcgtatgtga

SEQ ID NO: 866083 - DNA, 120 bp, Artificial Sequence
  ENSG00000261490_0 (sequence is synthesized)
cctggagagagaagaatgcaggcagcattttcaagctaatcgtttattggcaatctgtgatcacaaggttgagcaccaaatcggagtcattttgggagaggagagaagctggactccagg

SEQ ID NO: 866084 - DNA, 120 bp, Artificial Sequence
  ENSG00000261490_1 (sequence is synthesized)
catgacccagacggagctgatcctcacacctccgttgaaggcagaatatctttgtgcacatcagcttcattctgcagaccagctttggctacctggaacactgttcaggattccaagacc

SEQ ID NO: 866085 - DNA, 120 bp, Artificial Sequence
  ENSG00000261490_2 (sequence is synthesized)
tcgggctgcagtggaacaagacattgatctgagattaattatgaccagcaaggatcaacacctgtggatggagaggggaggggagggtgcaggcatctcctgtcatgctcattggtcagc

SEQ ID NO: 866086 - DNA, 120 bp, Artificial Sequence
  ENSG00000261490_3 (sequence is synthesized)
ttagagacttgcagacctggcactcgccctagaggaagcagtgtagtgagaagaaagccagacttaagggatgttggcttctgtttccagctctgacacaccgaccttttggttagaaga

SEQ ID NO: 866087 - DNA, 120 bp, Artificial Sequence
  ENSG00000261490_4 (sequence is synthesized)
agctcaactagaagacttagatcctaagagcttcttggggatgtagaacaaagtctgcttccattagggcactgcccttttgaaatgatcatgtagataacatgcatttgaacaattgga

SEQ ID NO: 866088 - DNA, 120 bp, Artificial Sequence
  ENSG00000261490_5 (sequence is synthesized)
tcagtttttgagaagtgaatgtgtgtgtgtgtgtgtgtatgcctgtgcagactgacaggatatggtggaatcgaatccctgctgcagagttttcacatttacagctgatcactgcattaa

SEQ ID NO: 866089 - DNA, 120 bp, Artificial Sequence
  ENSG00000261490_6 (sequence is synthesized)
caaaaatgtattgatcaccaaactgacattgtttagcataacaatttttcttcaaatgattactgtgttagcaaaaggatctcttgggttcaaccttaggccagtgtttgaccctgagcc

SEQ ID NO: 866090 - DNA, 120 bp, Artificial Sequence
  ENSG00000261490_7 (sequence is synthesized)
tgttagaacctcatgtgtcgtatctggacctctgagagctgggggcccctttgtgctgtaaaccagtacaatgtggtgctcttgacactaggaaattattgaagacccccaaagagcttt

SEQ ID NO: 866091 - DNA, 120 bp, Artificial Sequence
  ENSG00000261490_8 (sequence is synthesized)
tggttatgtatctttccaaaaatggaaagacaaaaaattttaaacatttattaatgtctctaccaattacaaacccattacatgttatcatagcaaactttaaagaaaaatctttttcaa

SEQ ID NO: 866092 - DNA, 120 bp, Artificial Sequence
  ENSG00000261490_9 (sequence is synthesized)
aacactagtagaagagtaacattgttttacattttggaaaatcacgtctgccttctccattcaatgtgtgaaatacattttttttttttttggaaatacataaagaaaatggtctcccac

SEQ ID NO: 866093 - DNA, 120 bp, Artificial Sequence
  ENSG00000261490_10 (sequence is synthesized)
agattcacagttggaaaaggaataagaacttgaatagcgttttcagagaactggatttttatccttggcactataccaaaatccaacaagtgaaaatttcttaaaggttcatgcagtgtg

SEQ ID NO: 866094 - DNA, 120 bp, Artificial Sequence
  ENSG00000261490_11 (sequence is synthesized)
aaatctgaaaccctatcaatgaatctttagcccccctgtcaaaatccacttggaacacaacttttatctgtgcacaattttgtgccattatttgattatttgaaaaaaagtgattcattg

SEQ ID NO: 866095 - DNA, 120 bp, Artificial Sequence
  ENSG00000261490_12 (sequence is synthesized)
agttatgctaatctttcaaatgtggacaaattttggaaagtatttttaaaaatcacatttctacaggttaccaccaatctcgacagagacatcatttaactgttaagaacccactaggct

SEQ ID NO: 866096 - DNA, 120 bp, Artificial Sequence
  ENSG00000261490_13 (sequence is synthesized)
cacggaacttgcagttccaaatgaatattccaggtcctggggtgtgtctgtcctcatgctttcccatcatctgtcttgtttgccaggctgaggctgagttgcatctacattttggtttga

SEQ ID NO: 866097 - DNA, 120 bp, Artificial Sequence
  ENSG00000261490_14 (sequence is synthesized)
gtgcagtcttcagggccacacccccgccatgtccactcccattttaggaggaactgttagtcagatgcagaagacgtaggaagacaagccacagttgtatggttgctgcctgtgaagcag

SEQ ID NO: 866098 - DNA, 120 bp, Artificial Sequence
  ENSG00000261490_15 (sequence is synthesized)
tgagccacctgtccctgtgtgcagcaaatggatggcagctcaaagggttaaactgaagataattgaatgaagggaccctttggagaggcgcaggtaggattaaggaagccaggaaggggt

SEQ ID NO: 866099 - DNA, 120 bp, Artificial Sequence
  ENSG00000261490_16 (sequence is synthesized)
ggaagcactcagaaagtagctcagaaggaagtcgttcccagtgctaggcctgcagacacaaggcggggggaacctgtacccaccaagaatgggagccaagagtgcgaggctgaggtgtat

SEQ ID NO: 866100 - DNA, 120 bp, Artificial Sequence
  ENSG00000261490_17 (sequence is synthesized)
cttggagcctcccattggcccaaacccaacaggagccataggaggccctggttcacagagcccctccccagctttgtagctgccaccgcttggcaactgcccttaggtgcacagcaagac

SEQ ID NO: 866101 - DNA, 120 bp, Artificial Sequence
  ENSG00000261490_18 (sequence is synthesized)
tgaataaccacagtgtccctgcagatgggggcagtcctgtgcacggcctccatgaaaccctcactgtccagctcccgtcctgtggctccaccagcttcagattgcatcttttgtcgtcat

SEQ ID NO: 866102 - DNA, 120 bp, Artificial Sequence
  ENSG00000261490_19 (sequence is synthesized)
gctgctgcctccacatcccatttgggcagctcgccctccaggatagcatctgcattctgggaaggaaagctgagaagggaaggtggaggaggaagcggttagtgcttagagtagcaaagc

SEQ ID NO: 866103 - DNA, 78 bp, Artificial Sequence
  ENSG00000261490_20 (sequence is synthesized)
aggtggaggaggaagcggttagtgcttagagtagcaaagctttttttgtttgtttgtttagacggaatctctctgtca

SEQ ID NO: 866104 - DNA, 120 bp, Artificial Sequence
  ENSG00000261490_21 (sequence is synthesized)
cctgagtagctggaactacaggtggtgccaccatacctagctaatttttcctctttttagtagagatacagggctgcgtggggattacatgaaatactccaagtaaagccctaaatgaat

SEQ ID NO: 866105 - DNA, 120 bp, Artificial Sequence
  ENSG00000261490_22 (sequence is synthesized)
acttgacccacagcaaatataattaatattaggaattatcattgttttagtagatgtgaaagaaaggctgttatcaaactataagtaatgtatacatgctagttaccactgtgaacacag

SEQ ID NO: 866106 - DNA, 120 bp, Artificial Sequence
  ENSG00000261490_23 (sequence is synthesized)
gacatgaaataagtatccaattagtgataatatacaatgaattgtgactgtgctcccagagaagccaggtgaaggccaggggaaattcagaggaccatctctggctgggacatcagggca

SEQ ID NO: 866107 - DNA, 120 bp, Artificial Sequence
  ENSG00000261490_24 (sequence is synthesized)
ggcttcctggagcaggaggtccctcaagactggagaggacactttcaggaagtcaaccaagactgaggatgtgactgacattcctggaaaatatcaaggtggaatttagtatcttccagt

SEQ ID NO: 866108 - DNA, 120 bp, Artificial Sequence
  ENSG00000261490_25 (sequence is synthesized)
gttcttacatggaatcatttgttcatttctcctgtggagattaaaaaactacaaacctcacattctttaccataaaaatctcccatttttaaaattcttatatttagtcctagatttctg

SEQ ID NO: 866109 - DNA, 120 bp, Artificial Sequence
  ENSG00000261490_26 (sequence is synthesized)
tgagtcttcctcatttgcccctggctatcatcatcctacataaaatcagggatggttggcatcctaactggcagctactaggaaaaggaaactgagagaagataggattctaaagctgcc

SEQ ID NO: 866110 - DNA, 120 bp, Artificial Sequence
  ENSG00000261490_27 (sequence is synthesized)
actgcctggaaaatcttgttagataatgatacaagttaggagcattgataacaacacgtttttcacttactgaggtctaagttttgggtcatccaattgtcatcctactctttaccttgt

SEQ ID NO: 866111 - DNA, 120 bp, Artificial Sequence
  ENSG00000261490_28 (sequence is synthesized)
caccacaaaaatgttcttgctgggtgagtcggaatgtattaattacctatcaaacaattgaatattatatcaataaattatgtaaatattaatattttaataaatagcaatacaaattaa

SEQ ID NO: 866112 - DNA, 120 bp, Artificial Sequence
  ENSG00000234617_0 (sequence is synthesized)
aactgtgaaaggcaagttaagatttgctcataaactgaatgttgggatgaaaaagtggatgacaccaagattttcagcttgaatgaaactattgaaggctaggagttgatatttattaag

SEQ ID NO: 866113 - DNA, 120 bp, Artificial Sequence
  ENSG00000234617_1 (sequence is synthesized)
atgggtgcgctagtaaaaggatttgaggggaaagattaggggttttgaacttgtaaaaattgagatgctgtagacacacagacacatccaagaagaaaagtcaaatagatagttgaaatc

SEQ ID NO: 866114 - DNA, 120 bp, Artificial Sequence
  ENSG00000234617_2 (sequence is synthesized)
cagtgttcccagggtatgtgggctaaatatattttgggcttctatcagcatatagatactagactaactgagatcaggagtcactgcagatagagcaggggtccagaattgaacattggg

SEQ ID NO: 866115 - DNA, 120 bp, Artificial Sequence
  ENSG00000234617_3 (sequence is synthesized)
acattccaaatttagaggttggaagaatgaggaaggaccagtggacatgaagagcagcaaggcagaagtgagatactgaaagatgggaagttcataaggaagaaagtgagcaattcatca

SEQ ID NO: 866116 - DNA, 120 bp, Artificial Sequence
  ENSG00000234617_4 (sequence is synthesized)
aattctaacatgggattgaaaattgatcacaggaagtggttgcatgaggctggagtaaagggagttgcggacaaggcagcatggtgaccagcagagtgaggaaaggagatgaaatagaga

SEQ ID NO: 866117 - DNA, 120 bp, Artificial Sequence
  ENSG00000234617_5 (sequence is synthesized)
aataaaatttctcttggactttcacactggaaaatgacaagccattctgtggatcaataatgtacttggtgctcccatgaagctgggagccgaggcagaggctcatgagtttgaggctct

SEQ ID NO: 866118 - DNA, 120 bp, Artificial Sequence
  ENSG00000234617_6 (sequence is synthesized)
caacgagctccccagcactgcgagaggccagctgcatggagttgctggggccggcacagcggcgtgtggtacccgatgtattggtggggttgccacccgagccgctggagggactgcccc

SEQ ID NO: 866119 - DNA, 120 bp, Artificial Sequence
  ENSG00000234617_7 (sequence is synthesized)
caccagcattgttctcactggggctggccttgtccacccctccactggcattgcttggcttgctctggcccccgccatccccctcactgccagggggcccctcgctgctatcccgtcggt

SEQ ID NO: 866120 - DNA, 120 bp, Artificial Sequence
  ENSG00000234617_8 (sequence is synthesized)
cgaactactgcagctggagccccggccctgacttttcctccggtggtagcgtttgtgaactgtacctggagaagctatattcatctttaacctgctcaacttgggaggcagattctcatc

SEQ ID NO: 866121 - DNA, 120 bp, Artificial Sequence
  ENSG00000234617_9 (sequence is synthesized)
catgtcaaactcatcgtcagattccccttcctcaaagatctggttgaggacgggcgcactcttcctggatgtcaggcggttggttacagatggcttccggcgcaaaaccacttgtgttga

SEQ ID NO: 866122 - DNA, 120 bp, Artificial Sequence
  ENSG00000234617_10 (sequence is synthesized)
gagggacatgggtttcttgtcctcctcatcttcctcttcatcttcttccaccctgaacagacacttccgcccactggctgtgggttttaagcttgcgggtggcaccgtagagagtgctgg

SEQ ID NO: 866123 - DNA, 120 bp, Artificial Sequence
  ENSG00000234617_11 (sequence is synthesized)
tccagccaactcagggaggtcatctttcttagctgagtcacacaggcctttgctcctgtggccattgaggacactgtcagcagcccgagcaggagactgagggacagtcgcgtgggacaa

SEQ ID NO: 866124 - DNA, 120 bp, Artificial Sequence
  ENSG00000234617_12 (sequence is synthesized)
aggagtggccgtgaggtcatcctcaaggtcctggggtacatcaattttggttggccatgactgcctatgtaacagatagattggggggaaaaaagccatataatcattatgcagatgata

SEQ ID NO: 866125 - DNA, 120 bp, Artificial Sequence
  ENSG00000234617_13 (sequence is synthesized)
gtaaagtacatcacaatgaacttactgggacaaaatctacagacttaaagaaaaaagcagcagccttgcaaacccattcaacatcctgtaaacatcagcaaggccaccagaagggcaaat

SEQ ID NO: 866126 - DNA, 120 bp, Artificial Sequence
  ENSG00000234617_14 (sequence is synthesized)
gtggttttgaaacatggttcagtttgtggcttattggccaagtgaaaacttcatcacaggtgtcagaaaagaaaatagggcaaagagctactccatcttttctatacaaaagctttatac

SEQ ID NO: 866127 - DNA, 120 bp, Artificial Sequence
  ENSG00000234617_15 (sequence is synthesized)
taaacattttttagaagcccatggaggttattggcaaagcaaaacctgaacaccacgtcttgtttctttggttcttagatcacataaaggtatattactacaaataaaattcacctgaaa

SEQ ID NO: 866128 - DNA, 120 bp, Artificial Sequence
  ENSG00000234617_16 (sequence is synthesized)
gttgctaagcactgcttttaagactcccagggcactgcatgaaaaaacagcaactggccccttccataatcagcaatttgcaatatacagtgtcctacaagatagaatgccacaacagat

SEQ ID NO: 866129 - DNA, 120 bp, Artificial Sequence
  ENSG00000234617_17 (sequence is synthesized)
gattatctggtcaaaaacagtctttgtacaggaataggttaaagcaagagttctttgattattgttttggcagaaaaaggcaaagtgaaaaacaattccagaaaaaaaagttacgaagca

SEQ ID NO: 866130 - DNA, 120 bp, Artificial Sequence
  ENSG00000234614_0 (sequence is synthesized)
ttccttccttctgggagtgtttgaatgaagattagactctccttgaccatgaatgaagagcaaccagttttttagtatacagtgatttagactctgggtctagagtgtagatatcatggg

SEQ ID NO: 866131 - DNA, 120 bp, Artificial Sequence
  ENSG00000234614_1 (sequence is synthesized)
cactgtgaaagcacagaaggagaaaaggtttttattttggtggggctttgtgtctgaattctggccaatggaaccacgtggaggcctggcccagaacatctccctgtggattctctcatc

SEQ ID NO: 866132 - DNA, 120 bp, Artificial Sequence
  ENSG00000234614_2 (sequence is synthesized)
tgattttggagtcatgtgttggagatcacaaagcttttgtcagccaggttcctgaatgactgctagacaccatgggctgaactttatgagctccagcaccacctccagccttcagtgact

SEQ ID NO: 866133 - DNA, 120 bp, Artificial Sequence
  ENSG00000234614_3 (sequence is synthesized)
gtctggagcaggcatccggatggaagagaagggggacaaccatgaacttggtgacccacggtcagcctgatttcccttgtggacacatttatgcccagtgtgcattcctcctgaggtctg

SEQ ID NO: 866134 - DNA, 120 bp, Artificial Sequence
  ENSG00000234613_0 (sequence is synthesized)
aacacagactggaaagatacacacaaaattcaggatggtaaaagaagaaaggagattcctcttgcaaaagaagccaagtataaacatggaagaacaactgcctaagcaagtagaaaagtg

SEQ ID NO: 866135 - DNA, 120 bp, Artificial Sequence
  ENSG00000234613_1 (sequence is synthesized)
ttccataatagtgcgcaatgaatgaagagttctggattaatctctggaactcaacctgcaccctgatctttattttgaatgggatctagaacgggatcttgaagtagctctttttggcgg

SEQ ID NO: 866136 - DNA, 120 bp, Artificial Sequence
  ENSG00000234613_2 (sequence is synthesized)
aggggacacagaatgaccctttgagggtggagcaggtaggggtgaattggaacgagactggctccttgatctgtattttgacttcatatcaccttttccattttctttggaagatcggga

SEQ ID NO: 866137 - DNA, 120 bp, Artificial Sequence
  ENSG00000234613_3 (sequence is synthesized)
gagaacaagaacaggagcccagatcagatttgggcatagatttgctccttgagctagatttcctgccttttgaacgagaacgtgatcgacctttgctccgcaacctgatcaggagtgact

SEQ ID NO: 866138 - DNA, 120 bp, Artificial Sequence
  ENSG00000234613_4 (sequence is synthesized)
ttttgagatacttcgagatctactgtggctgctcctgcgactcctacttcgtgaccatcttctagatctatacctggatctgcttccagaatcagatcgcctatggcttgtgcctggctt

SEQ ID NO: 866139 - DNA, 120 bp, Artificial Sequence
  ENSG00000234613_5 (sequence is synthesized)
accttcaataagcctaatatttctgcaccatccagtttgtccaaagcaagcttcatgtcaaaataggagtgaaactcaacgccctcacttgtgcattccttgtgagcatcaacataggtt

SEQ ID NO: 866140 - DNA, 120 bp, Artificial Sequence
  ENSG00000230978_0 (sequence is synthesized)
actactatgcggctttaaaaaggaatgaggaagctctctgtgtactgatggggacagaagttccaggacattttgtaaggtggctgaaaaacaaggtctataaaatgatacaggcagtgg

SEQ ID NO: 866141 - DNA, 120 bp, Artificial Sequence
  ENSG00000230978_1 (sequence is synthesized)
aaatgggtcacagagaatttacggttacaatgtgaaaacgtcaacccaacgccatggtctacttcgtgcttggaagcaaagcctggcctggatgcgcttggccccaggaggctgctgagt

SEQ ID NO: 866142 - DNA, 120 bp, Artificial Sequence
  ENSG00000230978_2 (sequence is synthesized)
gacatgtcaagctgtcctgagagcacacttgtttcccaaccacctgagtcatgacaaattgcttgaggcttgtaccagagtaaagtctgaaaatagttcttctcgccctccctaccagac

SEQ ID NO: 866143 - DNA, 120 bp, Artificial Sequence
  ENSG00000230978_3 (sequence is synthesized)
agatgcttccagaatcaatcaccgaatggtggatctacagccaaccacccattctcttcagtcactgagatgatatgatgctgctggtccaaggactacatttcgagaaccccaaccacg

SEQ ID NO: 866144 - DNA, 120 bp, Artificial Sequence
  ENSG00000230978_4 (sequence is synthesized)
tgaatcacaagatttccagggttttgtctgctgccttccctgcaagccctgccatccactgagacccaacctcagccattcttggcacatcagcccatgagaagtctgccactctttctt

SEQ ID NO: 866145 - DNA, 120 bp, Artificial Sequence
  ENSG00000230978_5 (sequence is synthesized)
cctaagcaaagcagcatccttcagggcctggagctcctggacacaaaagccatttttgggagaaaaatgtggataaagtcactcctgggccacctgtctgtgaggctgtatggaagctgc

SEQ ID NO: 866146 - DNA, 120 bp, Artificial Sequence
  ENSG00000230978_6 (sequence is synthesized)
ctactggtttgaggagaggctgctgggttctttcctttactaaggatttgcttaagtcagccctccaggatccaaaaaagagccagaaaaaagccagcaaaacagctgaggcacagacta

SEQ ID NO: 866147 - DNA, 120 bp, Artificial Sequence
  ENSG00000230978_7 (sequence is synthesized)
gatggtagtccaaggaccaagacctggccagccagagggaccaggtgtccagaccccggactgttttcaatacagttatacaatgaaatcaaataaatggatgtattgattgcttggcaa

SEQ ID NO: 866148 - DNA, 120 bp, Artificial Sequence
  ENSG00000230975_0 (sequence is synthesized)
cagtcatgctcctctggttcatctcgcatcctgtgttgtccacattgcacccctgtccctttccatttatcacgccagtcttgacaaagaggcatgctgtttttttccctgctttaacct

SEQ ID NO: 866149 - DNA, 120 bp, Artificial Sequence
  ENSG00000230975_1 (sequence is synthesized)
gtttcagaaatgctgaccttgcgaaggtcttcaccaccatgaagtttcccagagagactctcaccactgctgttcagacacaaggaccatgccataacctgtcatcaggaaagagactat

SEQ ID NO: 866150 - DNA, 120 bp, Artificial Sequence
  ENSG00000230975_2 (sequence is synthesized)
gttaaagaaggattttcatcctgtcttatgaagaaattccatttcaatgctgcgataatgcaaagtaattcttctcaaccatctgaaatcacaattgttcctttctggagatggcatgtg

SEQ ID NO: 866151 - DNA, 120 bp, Artificial Sequence
  ENSG00000230975_3 (sequence is synthesized)
cattccattgcctctcgctgctctgctgttgctttccaccagcgtaaaatcaattaagggaaaggcatggaaggaatgccctgtccaccgttgataaaattgggagaccctaatggactt

SEQ ID NO: 866152 - DNA, 120 bp, Artificial Sequence
  ENSG00000230975_4 (sequence is synthesized)
aagtcccagtaagaataaatccagatatccctggtaggttgtaaaatggtttgttggtcagaagcaatgttgtgggggatactatgacagtaaacaaggcatctggtaaatccccggggc

SEQ ID NO: 866153 - DNA, 120 bp, Artificial Sequence
  ENSG00000230975_5 (sequence is synthesized)
caaaacttagagaatgcaagaaaggcaaatccatattctcgcagagtacaaaaataaatatctattccagtgacaataaatcactttcttctctgtggacaaaaacgaatctcatgtaat

SEQ ID NO: 866154 - DNA, 120 bp, Artificial Sequence
  ENSG00000230972_0 (sequence is synthesized)
aactaggacaactaatatgcttcaaacttccaatgataatgtatagacaagaagacagctctgtcctctaggctgtgcttttagtgccaactttcttaataacatcacctattctgctga

SEQ ID NO: 866155 - DNA, 120 bp, Artificial Sequence
  ENSG00000230972_1 (sequence is synthesized)
cactcactctggaggaataaaactttagagcccctggctaaacaggatctgagaggaaggttggaatccagtggcagtatcgtggctcactgcaacctcaacctgccactctcatgccat

SEQ ID NO: 866156 - DNA, 120 bp, Artificial Sequence
  ENSG00000230972_2 (sequence is synthesized)
gcctccctagtagctgggactacaggtatacgccacaatgcccaggtttttactcctgggtctgaaaaagtcatcaaatcttggtaattcttagacactgacatcagtcaaagcctcatc

SEQ ID NO: 866157 - DNA, 120 bp, Artificial Sequence
  ENSG00000230972_3 (sequence is synthesized)
aaaatgaactgcttttgtgagacacggggccagaaattaaaactgttcaattgctctaggcccaagcattatttcagaagaggctggcatgaagtggctcaatctcagctcactgcaacc

SEQ ID NO: 866158 - DNA, 120 bp, Artificial Sequence
  ENSG00000230972_4 (sequence is synthesized)
cctcaaggattgaagcgattctcatgcctcagactccccagtagctggggttacaggtcaaaaactactaccgcaatgagtgggaagtcagatgattaatgtctgctgtttacacagaaa

SEQ ID NO: 866159 - DNA, 120 bp, Artificial Sequence
  ENSG00000230972_5 (sequence is synthesized)
cttgcagagatttacagcaagagcataagtatatcaagatgacaataacaacaatgtttaacatctagaagccacttccaacaaaaccatgtggaaggcgggagcaaattgcatagatgt

SEQ ID NO: 866160 - DNA, 120 bp, Artificial Sequence
  ENSG00000230971_0 (sequence is synthesized)
gatttcatggggcatgcaaagcaggcaggttccaagcggctaacaaggctgcttgtttgagctactttaagaataactggatgtgtaaaaatttgaatttgaggccagtgggcttttgag

SEQ ID NO: 866161 - DNA, 120 bp, Artificial Sequence
  ENSG00000230971_1 (sequence is synthesized)
ctgatggttcccagcctgctgtgaagaaataaactaccaagtggtcaatacccagaggccatcgtgggctcatttatagaatgccttacctgggttctgggcagttcttccaaagactgt

SEQ ID NO: 866162 - DNA, 120 bp, Artificial Sequence
  ENSG00000230971_2 (sequence is synthesized)
gacaaggtcactccctgaattgaatcactgtgttcttccccaaatgggaaataaacatatgacgagggagagcctgagccccactgggaacgatgtctctcctgtggagaaccacatgac

SEQ ID NO: 866163 - DNA, 120 bp, Artificial Sequence
  ENSG00000230971_3 (sequence is synthesized)
ctcagaccacatccacccagctccttactcagaatcacagcaacacacttctttggcatttctcttcaatgttggcttctatggatgttttctgttccctcttcgctggcctggagtcct

SEQ ID NO: 866164 - DNA, 120 bp, Artificial Sequence
  ENSG00000230971_4 (sequence is synthesized)
taagcctctacctcctgccttcaaatctgccttttcatttcctgaagtgactgtcgtcagctcgcctccatggttagagactagaatcgtggagcccaatgtttccaacagtgaggtccg

SEQ ID NO: 866165 - DNA, 120 bp, Artificial Sequence
  ENSG00000230971_5 (sequence is synthesized)
tggaacctaagtcttggagatattgactgagcacctggtgggatagatgctgcaacaacaacttcatcacctggacaaacaccaaattcagacttgcctctggttttctctctggggagc

SEQ ID NO: 866166 - DNA, 120 bp, Artificial Sequence
  ENSG00000230971_6 (sequence is synthesized)
ctgcacagtgaaaaaattacaggtttgggagtcagaggaatggacttttttaagccccagccctggcattcactagctagtccctggaggaaacactgtaaattttccaagcctcagttt

SEQ ID NO: 866167 - DNA, 120 bp, Artificial Sequence
  ENSG00000230971_7 (sequence is synthesized)
cctccctcttcaagagtctgctgggattccactgtcatggacaacatttcattcttatgaaattaaaatctcacctacaggcaggattctgccagtgcttatgctatacagacatatgga

SEQ ID NO: 866168 - DNA, 120 bp, Artificial Sequence
  ENSG00000230971_8 (sequence is synthesized)
atgcaaatgtcctcggaggagcacacagccttgttggcaggatgagacaggattcttgaaagctgtactaaatgtgactggtgctgaaaaaaaaatggatgtcttaggatatgttcttgc

SEQ ID NO: 866169 - DNA, 120 bp, Artificial Sequence
  ENSG00000230971_9 (sequence is synthesized)
tttttaatggaaaaagaaacgtgaatgcataaatatgtataatgtgagaatatctttcatacaaataggacattaaatgatagtgtctatggaagcatgatgagaagatatgctaggaac

SEQ ID NO: 866170 - DNA, 120 bp, Artificial Sequence
  ENSG00000230971_10 (sequence is synthesized)
gtgctgggcacaattaggggcacggtagaatgtgagatagtccaggctgtgagtacgggatctgtagccagaatgcctggttggaatccagcctctgtcatttctttgcagtgtgtcttg

SEQ ID NO: 866171 - DNA, 120 bp, Artificial Sequence
  ENSG00000230971_11 (sequence is synthesized)
agaaagtgactgaacatctcgctgtgcctcagtttctccctcttctaaaagaggatgatggggtgcctatttcatacggttgtgaggattaagtgatttgatgcatataaaatattcaag

SEQ ID NO: 866172 - DNA, 120 bp, Artificial Sequence
  ENSG00000230971_12 (sequence is synthesized)
atggtgcctggcatatgctaaacacgaagtaaatataacctattatcatcattatcaaggacttgcggataactgatgctactgagccgatggagcgtggtgtagcagaacagctcaggt

SEQ ID NO: 866173 - DNA, 120 bp, Artificial Sequence
  ENSG00000230971_13 (sequence is synthesized)
gctagaaatagccagtctcattgactcaactgtgtttcctcagagaatcccgattctcatttttcctatctgtaaatggaagggaggatagcaaataataataaatgttatttggtgact

SEQ ID NO: 866174 - DNA, 120 bp, Artificial Sequence
  ENSG00000230970_0 (sequence is synthesized)
gaagatgttgccactgtacgcagttgggagaagaaggacctggcacatgaggaagccaagtagttggatcagccctactttttttgtttggttgttgctcaaagtaaaaatgcgaggaaa

SEQ ID NO: 866175 - DNA, 120 bp, Artificial Sequence
  ENSG00000230970_1 (sequence is synthesized)
agagccccagagtagctgcatccccagctggcactgaccttgaggaggccgcaagggaccctggcacactgcccacctcaggctctggggtccggcttccaactgtccgtccgtgcgacc

SEQ ID NO: 866176 - DNA, 120 bp, Artificial Sequence
  ENSG00000230970_2 (sequence is synthesized)
ggctgagctctggggccacggtggggtgtgtccagccctggggtccccacccccttgaggttatgagcgcccatagggaagatgttgccactgtacgcagttgggagaagaaggacctgg

SEQ ID NO: 866177 - DNA, 120 bp, Artificial Sequence
  ENSG00000230970_3 (sequence is synthesized)
cacatgaggaagccaagtagttggatcagccctctccatcatggcgtttcccacacctctgattggactggaaactccctgaaaggaggaagcaagtcagattcacctctaggtccctcc

SEQ ID NO: 866178 - DNA, 120 bp, Artificial Sequence
  ENSG00000230970_4 (sequence is synthesized)
caggcctggagaggctggcatgctgttggcactcactgactgcctggtggccgactggctggatggaatggtgacctgtgaccagtctgtctctctcctcagctgatctgagagttcctg

SEQ ID NO: 866179 - DNA, 120 bp, Artificial Sequence
  ENSG00000230970_5 (sequence is synthesized)
tggggcagaggaactgctcaacaagttctggttgaacaaatggagggaacactaagagcgaataattattaagcgcttactgtgtgcgagcagctgctgtaagcaatggacactttatct

SEQ ID NO: 866180 - DNA, 120 bp, Artificial Sequence
  ENSG00000230970_6 (sequence is synthesized)
cagtgaaccctgcagagggttccaatgagggaatggagcagacctgatctaaccaagctaggggtggggaggtgcccggtggtaggtgccagcagacatgacaggcactcccgcacatgg

SEQ ID NO: 866181 - DNA, 120 bp, Artificial Sequence
  ENSG00000230970_7 (sequence is synthesized)
caccacagcaatgctgtcaaggttgcccgtggaatctgaaagctgaaacactcatctttatatacagagttggccaaagcaagacaccagcaaatcagtttacccaaaaatgtgcaaaca

SEQ ID NO: 866182 - DNA, 120 bp, Artificial Sequence
  ENSG00000230970_8 (sequence is synthesized)
agatttcctgtgcctgcctgtctgcagtttttctttcccctctctcttatataactcttgttgaaatcagtctatagatacatgttccttgtacagaaataaacagagagctaataatta

SEQ ID NO: 866183 - DNA, 120 bp, Artificial Sequence
  ENSG00000230970_9 (sequence is synthesized)
gctggtgtgacccacttcttagggcctcagatcctcagttgtaaaatgggcataccgctggccctggccctcactggggtggcagggggcatccggtgattcactccatgacaagagcct

SEQ ID NO: 866184 - DNA, 120 bp, Artificial Sequence
  ENSG00000230970_10 (sequence is synthesized)
tgctcataaacagaggctattagagagccacagacaccctgacccccagaggcccagaaaggctggattcacactcagaagtgaggccttccctgggtgacccacacacagcagggtctg

SEQ ID NO: 866185 - DNA, 82 bp, Artificial Sequence
  ENSG00000269799_0 (sequence is synthesized)
aaaagacaaaaattagctcggtgtagtggctcacatctgtagtccaagctacttgggaggctgtggtggtaggatcacttga

SEQ ID NO: 866186 - DNA, 120 bp, Artificial Sequence
  ENSG00000269792_0 (sequence is synthesized)
ctgcttccctcgccttgcagccttccacaaacagcctgcggcgttcctcgaaatcccgtagtaatctgaccggaatcatggagctaccatccagatactcgcggaacaacagctgccggt

SEQ ID NO: 866187 - DNA, 120 bp, Artificial Sequence
  ENSG00000269792_1 (sequence is synthesized)
taatttctaagaaagcgagctgctgatgggggtctggcgcggaggccaggcccgggacgctgctggggatgggcccgggcacagggcccggcatccgcgccatggaccgcgcagcttcgg

SEQ ID NO: 866188 - DNA, 120 bp, Artificial Sequence
  ENSG00000269792_2 (sequence is synthesized)
gccccccgcagtacgtcgctgacgccactcgcggtgcccacctgtgggacactgctatctccggggagctcggacatctccaacagcccagtcggctccgccatagtcccagcgtttcta

SEQ ID NO: 866189 - DNA, 88 bp, Artificial Sequence
  ENSG00000269792_3 (sequence is synthesized)
caacagcccagtcggctccgccatagtcccagcgtttctacggagactggaataacggcactgcactgctactgggtctcgccctgtc

SEQ ID NO: 866190 - DNA, 120 bp, Artificial Sequence
  ENSG00000269792_4 (sequence is synthesized)
gcctcagcctctggagtaactggaactacagttctcttggagagatggagttctcctacatgtgacatatatgcttcaaaaagcacatttgtgatattccacagaagacaaaagaaagga

SEQ ID NO: 866191 - DNA, 120 bp, Artificial Sequence
  ENSG00000269796_0 (sequence is synthesized)
ctgcttatctcctggaatctgagacacaacatagagcaacccccaggccagccatgactggagcctcccaagttgcagggaagggccctgtactaggccaagaacctatcctgaccagtt

SEQ ID NO: 866192 - DNA, 120 bp, Artificial Sequence
  ENSG00000262678_0 (sequence is synthesized)
aatatgagtgagcagactggacaggaagagttggttaggacctgatagaatctgggccagacacccagattcccaccctcaggacaacccaccctccggctgacagccctctctacgtag

SEQ ID NO: 866193 - DNA, 120 bp, Artificial Sequence
  ENSG00000262678_1 (sequence is synthesized)
ctccctctccccaaacgcctctgcctcccctggcctccaggcctagcctaccccatctaccgctctggctccagcctgagccccccgccctcctcggggaacagatgggagctggcggag

SEQ ID NO: 866194 - DNA, 120 bp, Artificial Sequence
  ENSG00000262678_2 (sequence is synthesized)
gctatgtgcagtgaagctggggttggggtaaggactccgccccagggcgcaggtgcgcagtcctggctaggcagcctgccagggtgcggagcgggagcgggtccttgggctgcacttggg

SEQ ID NO: 866195 - DNA, 120 bp, Artificial Sequence
  ENSG00000262678_3 (sequence is synthesized)
cggcgccggatcggacgcttggcactctgggcggccccccggcggagtggtggtcccaggagaacctccgaggtgggagggtcccgcccgcatagagggatgttctggagaagccgggag

SEQ ID NO: 866196 - DNA, 120 bp, Artificial Sequence
  ENSG00000233842_0 (sequence is synthesized)
cattttcaaagggatgggaaatacactcgactttttgaagaggagtggcaaggaacacctggaggctgatgaagacaataatagttaaaagaacagaaaacgtgaatggatatggaggtc

SEQ ID NO: 866197 - DNA, 120 bp, Artificial Sequence
  ENSG00000233842_1 (sequence is synthesized)
gtttttaggtatgtggtggttataagaagtttacagtatatcagtgcatagtttccagaagataggtggaaatctagagcttagaaaagcctgaactataggtgaaacaacattaagcag

SEQ ID NO: 866198 - DNA, 120 bp, Artificial Sequence
  ENSG00000233842_2 (sequence is synthesized)
tcagtcatgaactaaactacatggtagaagagaaaggaaacagagaaagtgttcacagctgaatcttaccggactcattgagtggcatgaaggaagagaaatagaagtcagtaaacaggc

SEQ ID NO: 866199 - DNA, 120 bp, Artificial Sequence
  ENSG00000233842_3 (sequence is synthesized)
agccaagaggggatccaggaacaacatagacaaaaataaggaagagcaccttttcaacattgaaggaatccatggtgtcaactgtcggagattaccgtctgcaacaatggagaaggactc

SEQ ID NO: 866200 - DNA, 120 bp, Artificial Sequence
  ENSG00000233842_4 (sequence is synthesized)
aaaagattttatgcagcactttaacagcagtggtcctttcccaggaatgattttgcaacgccccctgggacatttggaaatctctggagacatttttaattcttatgactggaggtgcca

SEQ ID NO: 866201 - DNA, 120 bp, Artificial Sequence
  ENSG00000233842_5 (sequence is synthesized)
gcccaggctgatcttgaactcctggcttcaagcaattctcctgcattggcttccccaagtgctgggattacagttctggagtccggaagtccaagatcaaggtgtcagtgggtttggttg

SEQ ID NO: 866202 - DNA, 120 bp, Artificial Sequence
  ENSG00000233842_6 (sequence is synthesized)
gttgcactgaggccacattccttggcttccagatgactgcccatttgctgcctcttcacgtggtcgtccctctgaacacccacccttggtagaaactatgccaatgtcaacaatttctaa

SEQ ID NO: 866203 - DNA, 120 bp, Artificial Sequence
  ENSG00000233842_7 (sequence is synthesized)
ggacatttagagaagacgggttgaagaaagaagttgcatgctggagaccaattaacaggttagaactctcacatttgttttgctggttcactctgcccgtgttctacaaaagccccagtt

SEQ ID NO: 866204 - DNA, 120 bp, Artificial Sequence
  ENSG00000233842_8 (sequence is synthesized)
gcagtctgagctgtggctcagcttcctctcctcatcatagaatgttggctctgggtaatcctcccctaacctgcccagtctcagttctgaaatgtttgctaatgttgcttgccatttctt

SEQ ID NO: 866205 - DNA, 120 bp, Artificial Sequence
  ENSG00000233842_9 (sequence is synthesized)
tgccaaaacctactcattcaattccatttgacctggacaattcgacggacacaaaggctgaaaacactgcagaaaaatcagtctccatgtgctcatcagagattttggtgactgaatctt

SEQ ID NO: 866206 - DNA, 120 bp, Artificial Sequence
  ENSG00000233842_10 (sequence is synthesized)
attttgggtggtggaagatgaagttataaatcaggatgtttttaaaatagctaaactctacgtaatgcctctatgatttccaagtgaaaaataaactcaaaggaaatttgaaatgtaaaa

SEQ ID NO: 866207 - DNA, 120 bp, Artificial Sequence
  ENSG00000233842_11 (sequence is synthesized)
accttagcgtttctccagcactgatgcaatatctgcaggatgccagaagagaaggagtaacattatttgaaaaatacaccctatggaaaagaaaggagagttctaatacctaaatgggag

SEQ ID NO: 866208 - DNA, 120 bp, Artificial Sequence
  ENSG00000233842_12 (sequence is synthesized)
tctgccaagggaagacacccctaggaatgtccttgtggggctggttgtacatcctcaatataagtaagatggaagaacagaaaaatgataccatcactgcaagttagaagtttaaaaagt

SEQ ID NO: 866209 - DNA, 120 bp, Artificial Sequence
  ENSG00000233842_13 (sequence is synthesized)
tagctttctaaccattcggggtagatgaatggaaactcagaattggatggcactgcaaacattctggccaaaatgaagatcccaggttagaactctcacatttgttttgctggttcactc

SEQ ID NO: 866210 - DNA, 120 bp, Artificial Sequence
  ENSG00000233842_14 (sequence is synthesized)
gtctgtaaatctttgtgaatgttatgaattttgtaccatattcatgtattcctttggaaaaaaattgaattatttaaaataaattaaacagaagagtcttgtaataatagatttgaactc

SEQ ID NO: 866211 - DNA, 120 bp, Artificial Sequence
  ENSG00000233840_0 (sequence is synthesized)
ttttctagtcaacaatacgcttattacataaaatatccatgaaaatgggacctgggcattatctctcaagtttggtttccttattattgtttaatgttaattttcttttccagaaggctc

SEQ ID NO: 866212 - DNA, 120 bp, Artificial Sequence
  ENSG00000233840_1 (sequence is synthesized)
tcatctggaccagagtcggtagttggagtacattggtgaatagtcaccactctctgcccttgtgaagcttgtattctatacaggtaactacacggcagaaaacttgtaagaatttagtca

SEQ ID NO: 866213 - DNA, 120 bp, Artificial Sequence
  ENSG00000233840_2 (sequence is synthesized)
tgatcaggaagattttcagcttattgatgtttcctcacagttcttgtccaaaaatgcgggtttccactgtattgaatcacttcttaaataaatattgattatgtgaaatagtaccaagaa

SEQ ID NO: 866214 - DNA, 120 bp, Artificial Sequence
  ENSG00000269867_0 (sequence is synthesized)
gccagctgcttcatggatggtgtccatttgataaggctttcagggtaggcagaaattcttttgtcaccaggcatcatgagggtcatcagctcctgctgtagccttttggctacagggccc

SEQ ID NO: 866215 - DNA, 120 bp, Artificial Sequence
  ENSG00000269867_1 (sequence is synthesized)
caggcagtgcccctgctgggctcagctcctttatgggcggtggcgacactaacagtggctgggtcaaagttttgtgaggctatctgggtggcactggcagagagacaagaactcagaaaa

SEQ ID NO: 866216 - DNA, 74 bp, Artificial Sequence
  ENSG00000269867_2 (sequence is synthesized)
taagttctcccatccaagtaggcgcgttcagggtggtatggccatagacggaaatagttttaagttctcaatca

SEQ ID NO: 866217 - DNA, 120 bp, Artificial Sequence
  ENSG00000269867_3 (sequence is synthesized)
ggtatggccatagacggaaatagttttaagttctcaatcaacttcaactgaatggttagtggtcagttttgtaatcacaatgacattcttgcaaacaaatacaatgtgtggcatctctct

SEQ ID NO: 866218 - DNA, 120 bp, Artificial Sequence
  ENSG00000269867_4 (sequence is synthesized)
ttgatatactggatagttaaaaattgttttaaagttttgcctaatattttgcgatttatctcaatgtaatctgtataagtagtaaaattatagatgactcctttcctttttttttttttt

SEQ ID NO: 866219 - DNA, 120 bp, Artificial Sequence
  ENSG00000236915_0 (sequence is synthesized)
attttattatgaaataatataaatatatatccacacattcacactgatacagaattatacatacagagaaagattggggagaggaaaaggactgggaaggtaaagaggaaagttcatatt

SEQ ID NO: 866220 - DNA, 120 bp, Artificial Sequence
  ENSG00000236915_1 (sequence is synthesized)
taatcccatatactgaaaatctgcctttgtgttttacaacaggaatgtatacgttgtataaaaggcagagaaaaggagaaaaaacagtctcttctccaatatgtgtaaggaatctaattt

SEQ ID NO: 866221 - DNA, 120 bp, Artificial Sequence
  ENSG00000236915_2 (sequence is synthesized)
taggtagtatttctggtttaatgattgatataatgggcaaatctgctttctatttcggatgagaaacaaagcaaaacaaaacaccctagcttttgacataatctgcatgccttgccatag

SEQ ID NO: 866222 - DNA, 120 bp, Artificial Sequence
  ENSG00000236915_3 (sequence is synthesized)
atgttagccaacaaaccaaaacttctcctcacctcaaaatgacataatttctttcctattacacttaagatcctggaatcatgtagttcactgcattcttcaatcttgaataaaagtgct

SEQ ID NO: 866223 - DNA, 120 bp, Artificial Sequence
  ENSG00000236915_4 (sequence is synthesized)
agactactggcaatgctattctctttcaaagagcttctttcccattatgcccatgtttttactttgaggactgaatgctcattccactttaaaataaagcttaactataattttatttta

SEQ ID NO: 866224 - DNA, 120 bp, Artificial Sequence
  ENSG00000236915_5 (sequence is synthesized)
tactttagttactgatattaccttgtgacttgagatgaagactaaaaggaaaagtaaaataacagtttggctcacattgttggaatttaagttaatatgactcatactagcaattagctt

SEQ ID NO: 866225 - DNA, 120 bp, Artificial Sequence
  ENSG00000236915_6 (sequence is synthesized)
cttgtcctgaaaggtaaatatcagtgtatttactgacgctttgaggtatgggagtaaggagacaacgccaccaaattatgtggtataagtttaagctcttaagttaccaaggaaaaactt

SEQ ID NO: 866226 - DNA, 120 bp, Artificial Sequence
  ENSG00000236915_7 (sequence is synthesized)
aaaaggatccacttgccagttacttaccaatatgatcatctaacaaacacctattatgagcaacccctatgctaagttccatgaaggacagcaatataagatataatcttttttttgtta

SEQ ID NO: 866227 - DNA, 120 bp, Artificial Sequence
  ENSG00000236915_8 (sequence is synthesized)
aacgatgtgcatacgtgagataatatggaaagttgaatctaagaaagcctggcttgggaggtattcaagtggtcgtggtagagttaaagatacccagaagtcttctaagaagcacaaaac

SEQ ID NO: 866228 - DNA, 120 bp, Artificial Sequence
  ENSG00000236915_9 (sequence is synthesized)
atgattcctgtactcagagacatgcagtcctattcacatgcaaagaggacctacactggctattgccaagtatcaagcgaggtgagtgctatcataagtcacagaatggatacattattt

SEQ ID NO: 866229 - DNA, 120 bp, Artificial Sequence
  ENSG00000236915_10 (sequence is synthesized)
gtagtcagataaatctcacagcatgaggcataagatgtctaataatgtctagaaagcaattggaaatatgtgattaaagcttgggaatgaacactgggttaaagatagacactttggagt

SEQ ID NO: 866230 - DNA, 120 bp, Artificial Sequence
  ENSG00000236915_11 (sequence is synthesized)
catttgcatggctgtgataaataagatttgaaatagaagataaacagaatgaaaagtaaaggaagattaaaatctgaagaaaacagcaagacactgtaaaaataaagacagttatagaac

SEQ ID NO: 866231 - DNA, 120 bp, Artificial Sequence
  ENSG00000236915_12 (sequence is synthesized)
aagacagttatagaactgacatgttcacaaatattaagcaaaacaagagttaactaagtggactgcattcaaaaagtttaagtaatctttttaacttttgcttggaatattgctgatcct

SEQ ID NO: 866232 - DNA, 120 bp, Artificial Sequence
  ENSG00000236915_13 (sequence is synthesized)
gtcaaggaaacttattttaaactattaatggccattaataattgagtaaggtatactactgtaaacaaaatttggagcatgttcatttatctccacctggttcctctaaaatttggagac

SEQ ID NO: 866233 - DNA, 120 bp, Artificial Sequence
  ENSG00000236915_14 (sequence is synthesized)
agttgtttgcatcagtgcaataagaatgcatttttctttgtcaacaggacacaattggataaactggttattttaccaaggctttggctgaaatggtgtgtttccctttaaggaatcaag

SEQ ID NO: 866234 - DNA, 120 bp, Artificial Sequence
  ENSG00000236915_15 (sequence is synthesized)
tgaaatggtgtgtttccctttaaggaatcaagcttgacatgcagagccaataaaagccccttggagaactggcctcataccttgtctatacagtccccgcacagggttcctaacctgtag

SEQ ID NO: 866235 - DNA, 120 bp, Artificial Sequence
  ENSG00000236915_16 (sequence is synthesized)
tcaataaagaatgtcactttctaacaggtctggaagctcggagtttctcttgggacctcaagaagtgaggatcacccaactcacagaagcaatcaaactccaaatggtgctgcaaactga

SEQ ID NO: 866236 - DNA, 120 bp, Artificial Sequence
  ENSG00000236915_17 (sequence is synthesized)
accccacatggacacgccattcttctgaggacccttagatccaccccaggaggagccctagctgctgttccccattcgatgccccttttcagccgaggtgataactggaagagagcagaa

SEQ ID NO: 866237 - DNA, 120 bp, Artificial Sequence
  ENSG00000236915_18 (sequence is synthesized)
agggagcatctgggatactgctctaagagcaggactgccatatgaggatgcagagactgtgccttgtgaaactccaggggcaccattcatacaagccaactggactccaagtgccacgag

SEQ ID NO: 866238 - DNA, 120 bp, Artificial Sequence
  ENSG00000236915_19 (sequence is synthesized)
aacagagattgggtctggtccccagcttcagtgcctccaaggcagaaactcaagagacgttgttgaactgtcagcctttacatttatgcattactattgaaggcctggaataaatggatc

SEQ ID NO: 866239 - DNA, 120 bp, Artificial Sequence
  ENSG00000236915_20 (sequence is synthesized)
agccctagctgctgttccccattcgatgccccttttcagccgaccttgccaggggcagtccatgaaagttgaatatgatctccttgaaacttagcctcgaggtctacaattttaccaggt

SEQ ID NO: 866240 - DNA, 120 bp, Artificial Sequence
  ENSG00000236915_21 (sequence is synthesized)
gagaacacctgagaatgattaccattaggaggcactcctgatacagtaaacgaccctccagagaaattgattaagaaaacttagagaacataaaataatagacctacctctgcaatacct

SEQ ID NO: 866241 - DNA, 120 bp, Artificial Sequence
  ENSG00000236914_0 (sequence is synthesized)
cgcggctaccctctgcaggcccggcccgcacaacagaggctgtatgcgagaggaatggaaatgagcctcaggccctgccgaaggagccccatccccttccccgcgcggggctgaggaatg

SEQ ID NO: 866242 - DNA, 120 bp, Artificial Sequence
  ENSG00000236914_1 (sequence is synthesized)
ctggccagccggaaaggaaccctcgctgggaacgccgctctcgcgcctctgaaaccccattgagaagaaccctttgatgcaattaaagcgcatttcattgcaggcctgggaggagggaac

SEQ ID NO: 866243 - DNA, 120 bp, Artificial Sequence
  ENSG00000236914_2 (sequence is synthesized)
gaccggcaagcttttttctgtctcggacgtgtgtatgcacctttgtgggccgggttacttagagaccaggcgggaacttgagctccctctctcgcagacgttctgtaacatcagaaaagc

SEQ ID NO: 866244 - DNA, 120 bp, Artificial Sequence
  ENSG00000236914_3 (sequence is synthesized)
gcgccttacacccaccttccctgctgtaaaggtttaggcggaaaagaaattgcgtttgcaggaggaagttgtttctgaggttactgctcagcattttccattttctcagtggtggggtgg

SEQ ID NO: 866245 - DNA, 120 bp, Artificial Sequence
  ENSG00000236914_4 (sequence is synthesized)
gccgtgtcgcatatccagaagtgatgtcacagccagacctgcaaaatgatgtaacctgcaagtgttgaaggacgacgatgggacagctattttgatactcgtattattttataacatttc

SEQ ID NO: 866246 - DNA, 120 bp, Artificial Sequence
  ENSG00000236914_5 (sequence is synthesized)
cctgctttttccattgagacaactgtgtgacctcagaaaatccacatagcctctctgaacttagtatttttgtgtgtgtgttaaaatgagtatcacaaagccggagaacgaatgtgatga

SEQ ID NO: 866247 - DNA, 120 bp, Artificial Sequence
  ENSG00000236914_6 (sequence is synthesized)
agttctgggtgcttgtggaattctttctaagttggaggtggacactttatctacctgcacaggtggaagatatgtgggtctggaactccggtaaacaaaaagatcctattgggacctcta

SEQ ID NO: 866248 - DNA, 120 bp, Artificial Sequence
  ENSG00000236914_7 (sequence is synthesized)
acatgaacctttaaacaacaacaacaacaataacaacacgaagacaaagtcctgtctgctctcccaggctagagtgcagcgtgcaatcgtgcaatcgcagcctacagtaagaagccagaa

SEQ ID NO: 866249 - DNA, 120 bp, Artificial Sequence
  ENSG00000236914_8 (sequence is synthesized)
ctggcctttttagtcaagttcctggagaagttagggtggagacttatttgtcctgtgtttggggcaataaaaggggaggggccgcctcctccagcctgttctaaaaagccaaaaagcaag

SEQ ID NO: 866250 - DNA, 120 bp, Artificial Sequence
  ENSG00000236914_9 (sequence is synthesized)
gctatttactcagacctgggctactaagtgctggggtggcccatgttgacttaaatgagcccttgcagttaggtggggctctctggagctgttagtcatgtgaggttgccagggcaactt

SEQ ID NO: 866251 - DNA, 120 bp, Artificial Sequence
  ENSG00000236914_10 (sequence is synthesized)
aatgtcttatgagttggaatgcttcaagaagtacaaagaggagactgcaagagtgcattacaacttacagtcatatgttcaataacatgtcatctttcctaatggggcttttatttttat

SEQ ID NO: 866252 - DNA, 120 bp, Artificial Sequence
  ENSG00000236914_11 (sequence is synthesized)
tttattttgtgggattgaaagatcagaagccggaaattatctggagaggataaagaaaaggaaaaattaaaggagggggctatttctgttccttatgtgggcagcgattaaacaaggaga

SEQ ID NO: 866253 - DNA, 120 bp, Artificial Sequence
  ENSG00000236914_12 (sequence is synthesized)
acatctggtcctggagcgggtctctgcagcactgcttttaattaccccgtcatttggtctcatgctaaattagtgactgtgggagcagcttagatctccaaactgacagccccgaagagc

SEQ ID NO: 866254 - DNA, 120 bp, Artificial Sequence
  ENSG00000236914_13 (sequence is synthesized)
tcaactcagcctgccacatagtcagaggggaaacacggagcttccggtttcatatttaaaccagggattgactcataattgtagctgtcaggagggtgatggagacattatgtaatctgg

SEQ ID NO: 866255 - DNA, 120 bp, Artificial Sequence
  ENSG00000236914_14 (sequence is synthesized)
ttcttatggcgatgtgtgtttaaggtttctgctctgtaaattccagaggaaattttgtgtccattgagggagagcttgctggctgctctgtggtgtgccctgcagggtaattacagtgct

SEQ ID NO: 866256 - DNA, 120 bp, Artificial Sequence
  ENSG00000236914_15 (sequence is synthesized)
attaaaggttcctaaatctgcctgaatccaaacatgaatgaatttccccctgaaaggccctcctgtttttccatagacttttaaatgtggatgaggttaggcgaaatctggcaaactgca

SEQ ID NO: 866257 - DNA, 120 bp, Artificial Sequence
  ENSG00000236914_16 (sequence is synthesized)
aagaggcagtatgctggcccaatagggaaatgtaataatggcaagccattcaggtccacaactattttttttctggaccacatagcttcccttactatttcccatcatttccagtctcag

SEQ ID NO: 866258 - DNA, 120 bp, Artificial Sequence
  ENSG00000236914_17 (sequence is synthesized)
cagccaaacctgtcttttattctgtatctcctgtgcccagagcagtccctggccctgataagggttcaacaaatatgttgagtgaatgaacaaatacattcaggagtgtagggattgata

SEQ ID NO: 866259 - DNA, 120 bp, Artificial Sequence
  ENSG00000236914_18 (sequence is synthesized)
tatctacctgcacaggtggaagatatgtgggtctggaactccggtaaacaaaaagatcctattgggacctctatttggttgactttgtgtcactttttactagggctaattgtctaatgt

SEQ ID NO: 866260 - DNA, 120 bp, Artificial Sequence
  ENSG00000236914_19 (sequence is synthesized)
cttataaatctaaataagaaatagggagagcatggtaggtatttggggtcctcggcgaggcgtaagttcaggagaagtttgaaggaaagggtaggaaaacatttttgagagcacaaacat

SEQ ID NO: 866261 - DNA, 120 bp, Artificial Sequence
  ENSG00000236914_20 (sequence is synthesized)
gctacaagtgtttcctgaaatgccccaaagaagagtgcagcactcaggtggaggagtcattttttccaactgagtggatggttaatactggcaaacatgaatcatgttttatattcataa

SEQ ID NO: 866262 - DNA, 120 bp, Artificial Sequence
  ENSG00000189196_0 (sequence is synthesized)
aagtactgcattcaaagaaatacaaacacaaccagaaagtattataagtctatattcagcatttcaaatctgtcctgtctatcaaggaaacaccgaaggaggaggtaaattcttaatgca

SEQ ID NO: 866263 - DNA, 120 bp, Artificial Sequence
  ENSG00000189196_1 (sequence is synthesized)
tagcagacatttaaaaattctctctcaccattgctgcccagtcactaccctgcatgtgaatgccagcttgtctcttgagttgtctctttcctattctcaacttccacccccaaacacatt

SEQ ID NO: 866264 - DNA, 120 bp, Artificial Sequence
  ENSG00000189196_2 (sequence is synthesized)
tagagcacaggtcttttctgtcacacttgccagtcttccttgcctgctcttattatgtaaatcaaattcaccactctgtcctgttttgttttcatctctgcttcactcaataccccgact

SEQ ID NO: 866265 - DNA, 120 bp, Artificial Sequence
  ENSG00000189196_3 (sequence is synthesized)
ccctcaggaccgtgttgcttctgccctgaatgagttcttttctcccgggctgcagggaccacagaggtcttcttcctattacttcatggactgtatgaattccacccagctggtgacatc

SEQ ID NO: 866266 - DNA, 120 bp, Artificial Sequence
  ENSG00000189196_4 (sequence is synthesized)
atggcaggtggtttggagatgaactggtatcctgccctgtgttaaatgtcctcagactggagctcagaacttttgagtattttcaaaagggtcaccgtgtctccagagaaatgctcccaa

SEQ ID NO: 866267 - DNA, 120 bp, Artificial Sequence
  ENSG00000189196_5 (sequence is synthesized)
cagtcctaactgaagtcagcactgaactgggcaaaggactcaagaaaaaaagtttccttcctcctcgatgtgttgctcaaagcactgcgtgagaccacacggagcagtatctaagcattg

SEQ ID NO: 866268 - DNA, 120 bp, Artificial Sequence
  ENSG00000189196_6 (sequence is synthesized)
agcaacactcagaagggcagcaggacaaatgcgtagctgctaatgacccctctcctgccaatgctttcctccctcagccccctctagggtcaccgaacagctgtaaatacaagctgacca

SEQ ID NO: 866269 - DNA, 120 bp, Artificial Sequence
  ENSG00000189196_7 (sequence is synthesized)
ccctcaaggagctgggatggagggaggttttctccagtctccagttctgcctttgcacctctgtggcctctcaaatgctcagccagtattttgagtacacccaacctcacccaggagata

SEQ ID NO: 866270 - DNA, 120 bp, Artificial Sequence
  ENSG00000189196_8 (sequence is synthesized)
gttctgcaaattaatgccatccaaacaatcctcgagaactatctaggaaaggacgaggaccaaattaccaagcctttggatctaatccatgtggcatcccatctgtgagctccagggaga

SEQ ID NO: 866271 - DNA, 120 bp, Artificial Sequence
  ENSG00000189196_9 (sequence is synthesized)
ttcaaagttggccagtgctggaggccaatcatatttataccatttccatatggcaccttttgattgagacttggcaagcacatgatcggattggaggaagacagagagcaagacgttgga

SEQ ID NO: 866272 - DNA, 120 bp, Artificial Sequence
  ENSG00000189196_10 (sequence is synthesized)
acaagcagcaggggtggagcctgggacacaaggtcagcacatagcaagcccttgctttggagcagaggtggccggtttccagggcagtgagtatttgaggcagtaattgtgatcttcagc

SEQ ID NO: 866273 - DNA, 120 bp, Artificial Sequence
  ENSG00000189196_11 (sequence is synthesized)
ttcactggtgcaagtatcacctgtgagaaagcaggcattgggtgtgattaattagtatgcttctttagcatatggggtgagggagggacaggggctaatttgagcagtcagggacaagga

SEQ ID NO: 866274 - DNA, 120 bp, Artificial Sequence
  ENSG00000189196_12 (sequence is synthesized)
gtcaacatcagtgtggagtgataacgtttgtacaccaagctggtaaatagacatcctagttacatatgattctattggcattgcctacagaggagaaaaaagtgatcaagtggttgtgga

SEQ ID NO: 866275 - DNA, 120 bp, Artificial Sequence
  ENSG00000189196_13 (sequence is synthesized)
ttttatgtttgcttacctgttttttaaaaaaaaggtgaataaggaactttataaagatgttggattccagcatgttagacattgtagtggattgaattttgatccccaaaaagatatgtc

SEQ ID NO: 866276 - DNA, 120 bp, Artificial Sequence
  ENSG00000189196_14 (sequence is synthesized)
ccaagtcttaacctcacagtagctgtcaatgtgagcttatatagagcctttgcaaatgtattaagttaagcatctccagacgagatcatcctggattcagtgtgggctctaaattcaatg

SEQ ID NO: 866277 - DNA, 120 bp, Artificial Sequence
  ENSG00000189196_15 (sequence is synthesized)
actggtggtggtataagagaaaggagagagagacaaacagacccagagacacacagaggggaaggccatcagaagacgaggcagctattggagttacgcagccagagccaagggatgcca

SEQ ID NO: 866278 - DNA, 120 bp, Artificial Sequence
  ENSG00000189196_16 (sequence is synthesized)
gaagccaacagaagctggaggagtcaaggaaggattctcccctagaaccctggaagggactgtggccctgctgacgctttctgggctccaaaactgagtgagaataaatttctgttgttt

SEQ ID NO: 866279 - DNA, 73 bp, Artificial Sequence
  ENSG00000265374_0 (sequence is synthesized)
cttcttgatgtgtaggaagcaagagcttcacaggtacatcttttaaggttcttccccggtaccaaggtgcaaa

SEQ ID NO: 866280 - DNA, 120 bp, Artificial Sequence
  ENSG00000265374_1 (sequence is synthesized)
gctacttgcagcagcagcgtgcgccagcaagatagcagaagcaggaagagagccagccggaagacatgtacctctgaagatcaagaaagaggctatccagaagagaacagcatcagggca

SEQ ID NO: 866281 - DNA, 120 bp, Artificial Sequence
  ENSG00000265374_2 (sequence is synthesized)
gaagcagtcataacaacagcaatagcaaatcaatgctgataaaagaaatcaagtacagagagttttaaggacattgtccaaagttgtacaagggcaccatttttaaaagttgacaacctc

SEQ ID NO: 866282 - DNA, 120 bp, Artificial Sequence
  ENSG00000265374_3 (sequence is synthesized)
ctgcagggatgttctgaaagacagagacatcttgtcggaattatgaatgtccttggtggatgaggcagaaagagttgactgtgtaggacattcctgacaagtcctcaggatttgaaatgg

SEQ ID NO: 866283 - DNA, 120 bp, Artificial Sequence
  ENSG00000265378_0 (sequence is synthesized)
atggacctgaggatgccagccgcacagagcacggtgttggccacagagcaggacgggcctgcgctgctttcctgtcatcacgcagggataatctttacctctcatttaaaaaggccaata

SEQ ID NO: 866284 - DNA, 120 bp, Artificial Sequence
  ENSG00000265378_1 (sequence is synthesized)
caggtggataacgtgtgctcgggcagaagagattgaaacccagcagggcggggaggcagggaggctggaagccagtgaagttcactccagcacggcgtccggcagctgaagaggccctgc

SEQ ID NO: 866285 - DNA, 120 bp, Artificial Sequence
  ENSG00000265378_2 (sequence is synthesized)
gtccacacaggcactgcggaaactcaccttgtcctgagatgagggaaggccagggagagcttccatgcgaccccctagctgcggacactccacacgctgagagtcagctgagcttgaaca

SEQ ID NO: 866286 - DNA, 120 bp, Artificial Sequence
  ENSG00000274492_0 (sequence is synthesized)
acagagaaacaagccctttaaaagggttagtttcacaatcgatgctagatctcagttcatagatccttatcttttactctgtagcaactagatatttctttaggttaatcagtcttaaat

SEQ ID NO: 866287 - DNA, 120 bp, Artificial Sequence
  ENSG00000274492_1 (sequence is synthesized)
caaatacctaaggtaatttaactttaaatgccaaagtttaaattttcttaaatgttaaattggaattattctgcacatttaacccaaaagaaaaacaaaaggcataaaatgagatatttt

SEQ ID NO: 866288 - DNA, 120 bp, Artificial Sequence
  ENSG00000274492_2 (sequence is synthesized)
cttggtcaacaagtatttgcccgggctctgtgcttggtggtaagaatgcagagatcaacaagacagatctcctggccggagagtacttatacacaaagagtaattagcacgaagagcact

SEQ ID NO: 866289 - DNA, 120 bp, Artificial Sequence
  ENSG00000274492_3 (sequence is synthesized)
ggacttaaggttagatttagcagccgtgttttctcaggcaaattaggaatcagtttaggatgatgattaagaagtggggtctgaggccgggcatggtggctcaggcctataatctcagca

SEQ ID NO: 866290 - DNA, 89 bp, Artificial Sequence
  ENSG00000274492_4 (sequence is synthesized)
aggcatgccattgcactccagcctggcagcagagcaagaccctgtcactaaaaaaaaaaaaaaaaaaaaattgggctctggggccagat

SEQ ID NO: 866291 - DNA, 120 bp, Artificial Sequence
  ENSG00000274492_5 (sequence is synthesized)
aaaaaaaaaaaaaaaaaaaaattgggctctggggccagatgttttgtatttgaaacctgactttttcatgcccttggcaaagttgtggggactttgtggaagggacttactggcctgtgc

SEQ ID NO: 866292 - DNA, 120 bp, Artificial Sequence
  ENSG00000274492_6 (sequence is synthesized)
ctcagattttttatccataatgtaacatgcatttgctgtattatttaagaattttcaattctgccctaaagaataggaaaaacaaatgggatagatgaaacttatctgtaagtatatgtt

SEQ ID NO: 866293 - DNA, 120 bp, Artificial Sequence
  ENSG00000274492_7 (sequence is synthesized)
acatcagttcatatgttaagtacagataataagtaaatcattaacccatgaaacatgttaaacatagaatagatatttacttcttagacatacgttaaaaggacaaaacaaacaagagtg

SEQ ID NO: 866294 - DNA, 120 bp, Artificial Sequence
  ENSG00000274492_8 (sequence is synthesized)
ttacttgtaaacagagatggaaagcaaaataaaccttaaatattcataaagcatggatcagtcttgttgcctcaaattgaccacccattggtatcatccattctaacccacttgttttgt

SEQ ID NO: 866295 - DNA, 120 bp, Artificial Sequence
  ENSG00000274492_9 (sequence is synthesized)
gcttaaaatgtatactgctgctcatcaggtcattgctgagctataggtgtagctcatacttacctctatctttttattatttttattgtttggggacaggatcttgctctgtcgtccagg

SEQ ID NO: 866296 - DNA, 120 bp, Artificial Sequence
  ENSG00000274492_10 (sequence is synthesized)
actcattgcctgctcactgcagcctcaaccttcaggtctcaggtgatcctcccacctcatcctcccgggtagttgggactacaagcacgcaccatcatgcccagctaatttttttttaaa

SEQ ID NO: 866297 - DNA, 120 bp, Artificial Sequence
  ENSG00000274492_11 (sequence is synthesized)
tttttaaattttttgtagagacgtggtctcgccatgttgcccaggctgttcttgaactcctggactcaagtactctgcgtgcttcaatcttccaaagtgttggaattacaggtgtgagcc

SEQ ID NO: 866298 - DNA, 120 bp, Artificial Sequence
  ENSG00000274492_12 (sequence is synthesized)
cagcaacctcagtctttttgatagagcaaacatagactggcaccatgaactttccatctctgaacattcttacctacactctggttcttgtaaccatgccatctttggagaaggcagatg

SEQ ID NO: 866299 - DNA, 120 bp, Artificial Sequence
  ENSG00000274492_13 (sequence is synthesized)
aggcagagagagaggcagaacatgtgaacattgagtgacccacagtagtgtggtcctttcacctgcatgatctaaatgtgttcacctactgaatctctttccccttgcttcccacttttt

SEQ ID NO: 866300 - DNA, 120 bp, Artificial Sequence
  ENSG00000274492_14 (sequence is synthesized)
tctaaaacaattcagtctccatagtgactgtcaaaaattgccagtgctgactatcttgcaagttgtcatggcagggtattggaaaaagttttcaattagcaataacctaggataaacctc

SEQ ID NO: 866301 - DNA, 120 bp, Artificial Sequence
  ENSG00000274492_15 (sequence is synthesized)
attggctaccatatttccactgtacaaagctaagactgtgtgttttaaattggtttaacaaactaatttatttgaccatcttaatctggcctttgagccagattataatgatagtgataa

SEQ ID NO: 866302 - DNA, 120 bp, Artificial Sequence
  ENSG00000274492_16 (sequence is synthesized)
tgatagtgaatattttatgggatgactgtggagatcacatcaatttacttcaagtaaggcacaattacattgtctttcaaagaacatagaaacacgttggcggggaatcagtaatgtatg

SEQ ID NO: 866303 - DNA, 77 bp, Artificial Sequence
  ENSG00000274492_17 (sequence is synthesized)
agaacatagaaacacgttggcggggaatcagtaatgtatgcagccaggtagctcctctaatttcagtcagactgaaa

SEQ ID NO: 866304 - DNA, 78 bp, Artificial Sequence
  ENSG00000274492_18 (sequence is synthesized)
gcagctgcaaggtcactagacagataatgtcaagtcgtaaaacatgttgttccttgaaaagtaagaaatgcttctgta

SEQ ID NO: 866305 - DNA, 120 bp, Artificial Sequence
  ENSG00000274492_19 (sequence is synthesized)
gcttccccctgcatagatctccccctgccccaaaaaatgcttaaaaggtagcttgactctctgttcgaggctcagtccttttgatgttaatccgactgggtcggtgcacctaaataatta

SEQ ID NO: 866306 - DNA, 120 bp, Artificial Sequence
  ENSG00000263234_0 (sequence is synthesized)
tatttgtgtgactaagatatttctacgtgagaagaacacagctctctgaggcctgaaaggtaaacaaaatcaactcaagattttaaataaaagagtttcctggtttcatgaaaatagtaa

SEQ ID NO: 866307 - DNA, 120 bp, Artificial Sequence
  ENSG00000263234_1 (sequence is synthesized)
ataaaccaggtctaataaaatggtagtatggcatatttgagatggtaatatttagggaccctttcctataattatgagttccagaacttggtgtcaattaaagagtcctcttaactgagt

SEQ ID NO: 866308 - DNA, 120 bp, Artificial Sequence
  ENSG00000263235_0 (sequence is synthesized)
ctgcagctccctgggcaccctcttcccacagtgtggaaggtggaggctcccagggcacaagcagaacacgtgccgccctaaggccaaggcggagctggctgctgtcgcttctgcccacat

SEQ ID NO: 866309 - DNA, 120 bp, Artificial Sequence
  ENSG00000263235_1 (sequence is synthesized)
tccatgggtgctgtcgagctgtaggtccaagccccacatcaggggagtgagtggggtacaatcctcccatgctgggccccactctggagataggcctggggaatgcccaagaaggaagcc

SEQ ID NO: 866310 - DNA, 120 bp, Artificial Sequence
  ENSG00000263235_2 (sequence is synthesized)
cagcccttctgggattttcacatccacagagaatgggtgctggcagccaacggcaacgaggagaaaagctgaccgccttctcagatcaggatgaggtgtttttacaccaaccccgaggat

SEQ ID NO: 866311 - DNA, 120 bp, Artificial Sequence
  ENSG00000263235_3 (sequence is synthesized)
ctgcagccttctcaggttaaattaaacctgtcacagacacaggaagggaaaagagcacataacaacaattatattgacatctaagccaggtcacatgctctgatttggctgaaattacag

SEQ ID NO: 866312 - DNA, 120 bp, Artificial Sequence
  ENSG00000263235_4 (sequence is synthesized)
cgtgcaggccagggagggtacccttctactgatcaagagggaaagcgggaaggacgcacagctgtggtttccaacctgcacggaggcacccccatgaactcacagagcaccatcagatcc

SEQ ID NO: 866313 - DNA, 120 bp, Artificial Sequence
  ENSG00000263235_5 (sequence is synthesized)
ttctgaattttgaaggaagcaatgatactctgctctgctcaaggccattcatggtctcaacattaacgttaccttgctttatagggtatcttccctctctctgccaggctgggttgtggc

SEQ ID NO: 866314 - DNA, 120 bp, Artificial Sequence
  ENSG00000263235_6 (sequence is synthesized)
agtcactgaacaagcaattactgtgaaggtcgacgtggaaaaatgaggcaatgagggtggcggtgttctaccagattccaagttgaagaggtgctcgacaggcacacacatcccatgact

SEQ ID NO: 866315 - DNA, 120 bp, Artificial Sequence
  ENSG00000263235_7 (sequence is synthesized)
aaacaaataacatgaacatttctctttatgtattacttttctagacatccactataagttgccaggacacaaatgcttattattggggtttacttatttaataaatggaactgtggggga

SEQ ID NO: 866316 - DNA, 120 bp, Artificial Sequence
  ENSG00000263237_0 (sequence is synthesized)
aggccaaattgagcccctgcagttgccctgcatgtaattggacaggggactttcgcaggatgtcagttccaggagggcaaggatgatcacctgttttgttcaccactatatcctcagtgc

SEQ ID NO: 866317 - DNA, 120 bp, Artificial Sequence
  ENSG00000263237_1 (sequence is synthesized)
ctacaatatatctgggaaataaccgtattcaataaatactgaaggaatgaagtttccaatgatcagcacagtgcaagaagatgaatttagcaccagttttggtgtcaagcttggtctcaa

SEQ ID NO: 866318 - DNA, 120 bp, Artificial Sequence
  ENSG00000263237_2 (sequence is synthesized)
cttaccagttgtgtgaccttgggcaaatgatctaacctttctgacacctacgtgcttcatatacaagatggggacaaggttttcaagtgccgtgcctgaaacacaggtgcttgataaatg

SEQ ID NO: 866319 - DNA, 120 bp, Artificial Sequence
  ENSG00000263237_3 (sequence is synthesized)
gcctttgttatcatcaccattgttgtcattatcatcaccataaccatcatcaccagcaccatcatcaccactgtcatcaccatcaccataacaatcatcgtcaccagcaccatcatcacc

SEQ ID NO: 866320 - DNA, 120 bp, Artificial Sequence
  ENSG00000263237_4 (sequence is synthesized)
attgtcattatcatcagcatagttaataatcattattaccagtaccatcattgccattgtcatcatcaccatcataacaattatcaccagcaccatcatcgccattgtcatcatcatcac

SEQ ID NO: 866321 - DNA, 120 bp, Artificial Sequence
  ENSG00000226115_0 (sequence is synthesized)
cacacgtgagatttccttttaccaacagagaatctccaaatccagccttttaccagaagcctctccgagaaactgggcgtctctcccaggaccacagccccccagcgaccgctcagcact

SEQ ID NO: 866322 - DNA, 120 bp, Artificial Sequence
  ENSG00000226115_1 (sequence is synthesized)
aggggtctttcccccgcaggaaacctcccacccttcttcaggctgtcagtgaaacggcagccacttttcaaaataacagtttctccctttacgtgacattaaagaggaaagcactctgcc

SEQ ID NO: 866323 - DNA, 120 bp, Artificial Sequence
  ENSG00000266774_0 (sequence is synthesized)
tagaaattccataaggatgaagatatttttccgttgtctgctgaatccctgaagcctagcatgtgtaagaagacacagaatgcatattcactgtatcatttagtcctgggctgctgagag

SEQ ID NO: 866324 - DNA, 120 bp, Artificial Sequence
  ENSG00000266774_1 (sequence is synthesized)
aaaatgcaatctctatgacaaagccagctccaccttctatcggtcccctactgttgggtgaatagtcctccaaatgctggcaggaaggggattgactgctaaggaaggaaatctcaggca

SEQ ID NO: 866325 - DNA, 120 bp, Artificial Sequence
  ENSG00000266774_2 (sequence is synthesized)
cttctcatatctgaaaggaaggcacaggaagagccgcaggatggaactcagactggatgaaactgggaagattttgctagacagaaattagaaacgctcctacaaagaaactgaagttcc

SEQ ID NO: 866326 - DNA, 120 bp, Artificial Sequence
  ENSG00000266774_3 (sequence is synthesized)
tagtgtcatactctacttgtaactctcacctaacaatgtgtcatctttactttttatgttatttatttacaagtgcattttcagtatcaaccccttcattcattaatcctaatgtggcct

SEQ ID NO: 866327 - DNA, 120 bp, Artificial Sequence
  ENSG00000266774_4 (sequence is synthesized)
tttccaatgtctacttaccattttaaatacttaccataatttacagggctttcttgaacatatccaaggtatattatatgagtctagcttaatggaaagtcttgtataccaaagcaggaa

SEQ ID NO: 866328 - DNA, 120 bp, Artificial Sequence
  ENSG00000266774_5 (sequence is synthesized)
aaaaaacacatttaatttatgatggctttgaattttgatcataatttactcctggagacctattcacacaaagcaataccaatacaatttttcagaagcaataaaaaataaaacaataaa

SEQ ID NO: 866329 - DNA, 120 bp, Artificial Sequence
  ENSG00000259986_0 (sequence is synthesized)
ggggcattctgtttcggagtgcaatttccatgtggcccatgtagcgtgcagtgccctcctctcctgagctagtaatctccatgaggggaagacttgttcatccctgtagcactactgcct

SEQ ID NO: 866330 - DNA, 120 bp, Artificial Sequence
  ENSG00000259986_1 (sequence is synthesized)
ggaagaaggcaaatggcagatgaaatgagatgtcaatatggaactactcgagcgtcagttgcaagggaaaatccaagacaacagataatacatttccattaagagccagctgccatgttg

SEQ ID NO: 866331 - DNA, 120 bp, Artificial Sequence
  ENSG00000259986_2 (sequence is synthesized)
tcagttattctatgaagcctacatggcaagaagcctaaggcaggctctggccaacatctcatgaagaaatgaggcccttaggccaacaacccatgaagaactgaatcccatcaacaacta

SEQ ID NO: 866332 - DNA, 64 bp, Artificial Sequence
  ENSG00000259986_3 (sequence is synthesized)
gagtgctgggattacaggcgtgaatcaccatgcccggcaatttaatatttgaaaagaacactgt

SEQ ID NO: 866333 - DNA, 120 bp, Artificial Sequence
  ENSG00000259986_4 (sequence is synthesized)
ccggcaatttaatatttgaaaagaacactgttaaaagaactgcaagcatgatgatatggaaacaccttccaaaatactagtttgaaaaaatgttccactgtttggtttaatatattaggt

SEQ ID NO: 866334 - DNA, 120 bp, Artificial Sequence
  ENSG00000259986_5 (sequence is synthesized)
agtactgtaatcacttttattgctacaataacttcaggaaactacccagggcagatgtcttcaaaaaaagagcaggaagaaggcaaatggcagatgaaatgagatgtcaatatggaacta

SEQ ID NO: 866335 - DNA, 120 bp, Artificial Sequence
  ENSG00000259986_6 (sequence is synthesized)
tcagttgcaagggaaaatccaagacaacagataatacatttccattaagaggtgggtaaccattaccagacttgcaaagaatgtggtaaagacccttgtaaactttcactctcgtacaac

SEQ ID NO: 866336 - DNA, 120 bp, Artificial Sequence
  ENSG00000259986_7 (sequence is synthesized)
gagaaggcaagaggagagttggaggttattaggagataatttttagtaaaagctatgtgtatgctgtgggtctcagcaccctttttttaaatttttattttttgagacggagtctcactc

SEQ ID NO: 866337 - DNA, 120 bp, Artificial Sequence
  ENSG00000245685_0 (sequence is synthesized)
ggcaccagcagagaggagcagagacgcccagaacacactgtcccccaatgccagccccaagcggggccagctcagggtgcggtgggcagagccatcctgcagctctgagatccgcaaggt

SEQ ID NO: 866338 - DNA, 120 bp, Artificial Sequence
  ENSG00000245685_1 (sequence is synthesized)
ggaggtgggagtagcgccaggctccactgtgttggagcttgccccgtttgagcccaatttgattccggagccatgacctgcagcacattggcgaccagaagacacccaaagctctttgtc

SEQ ID NO: 866339 - DNA, 120 bp, Artificial Sequence
  ENSG00000245685_2 (sequence is synthesized)
ctgggaagagtttgctgcatcttccagtttcagtaatcaaagaagcaaagttccctgcagttcttcaaggaaccttgagaattcagaaggtcttggggtggctgcatccatcctgcagac

SEQ ID NO: 866340 - DNA, 120 bp, Artificial Sequence
  ENSG00000245685_3 (sequence is synthesized)
aaatgccaatcagcagaggggccattcccagggacacatgtctggctgacttgggccttggccaggctttggattcaccttgaaaacatcccctctgaacatcagaagtccacttggtcc

SEQ ID NO: 866341 - DNA, 120 bp, Artificial Sequence
  ENSG00000245685_4 (sequence is synthesized)
gcttttcctattttctgtgttatcttcagcctgttaactgttgtcagccctggagagaaaccatcccttctccttaaaaacatgaaccacatactaagttgcttcttgcctcttaaagat

SEQ ID NO: 866342 - DNA, 120 bp, Artificial Sequence
  ENSG00000245685_5 (sequence is synthesized)
tcaggtcactcaggtacatcagactgagacaggacgctcaggtacatcatactgagacaggacactcaggtacatgatactgagacaaacactcaggtacatcatactgagacaggacgc

SEQ ID NO: 866343 - DNA, 120 bp, Artificial Sequence
  ENSG00000245685_6 (sequence is synthesized)
tcaggtacatcacaccgagacaggacatgttgattgttggtgtgtatttctcccaagccaccactcaaaccagtgtttgatttccatggaggttggctgatggcttttagcttgagcccc

SEQ ID NO: 866344 - DNA, 120 bp, Artificial Sequence
  ENSG00000245685_7 (sequence is synthesized)
aacagtgtgacttcatacaaggcaatttcttcagaaatatcatggaacttcagggacattatattattaaattaaaaaaacctaatatgttaattttttcattaaagtttatgagtttac

SEQ ID NO: 866345 - DNA, 120 bp, Artificial Sequence
  ENSG00000245685_8 (sequence is synthesized)
ggaaacagggcggaggcgtggagggagccgtgcagcgctggtgtgaggagcagcgagcaggccaggcctgtaaagcagagtgagggaaccaggatagagaaggctgtacaggaagcatgg

SEQ ID NO: 866346 - DNA, 120 bp, Artificial Sequence
  ENSG00000245685_9 (sequence is synthesized)
tgatggcatctgcatggcgcctgtggaggccccagggagcttttactcatgatggaaggcacagagggagtaggcacatcacatggtccgaggaggagcaagagaaaatgggagtggggg

SEQ ID NO: 866347 - DNA, 120 bp, Artificial Sequence
  ENSG00000245685_10 (sequence is synthesized)
cttcagggaaaacgtgtttgctcagctgcagtgattgaaaaattgaaggcaatgagagtcatatgttatgcttggttatgtcctgctctgatgccagtttggagtaaaggctgaactttg

SEQ ID NO: 866348 - DNA, 120 bp, Artificial Sequence
  ENSG00000245685_11 (sequence is synthesized)
ctgttgaaagccactgtggaaagtggaaacattgactgtgcgttgctgaggggaggaatgtatttacttacccagaaatagacgcatccttgtctcagtgggctgggagatagtatcaat

SEQ ID NO: 866349 - DNA, 120 bp, Artificial Sequence
  ENSG00000245685_12 (sequence is synthesized)
cctttctgttgcaacagatcccactgccttcttttttcaaaagagtaaatatttaaataggtaatacagaaaagttattgccatttttccttcatcagccatggctgggagtcaaaagag

SEQ ID NO: 866350 - DNA, 120 bp, Artificial Sequence
  ENSG00000245685_13 (sequence is synthesized)
gcgctgtggaaccgcctcctgctagagcagcgggctggcgacggtcctcgccggggcgggaagcggctcaggctgccctcgctggcctgcggcggcgcggctggaagcgcgggccactcg

SEQ ID NO: 866351 - DNA, 120 bp, Artificial Sequence
  ENSG00000245685_14 (sequence is synthesized)
ctcgtgcgtgggtcactcaggactgcgcctcgcgcgactgtgtgtgcaggaaacaagcaggaaataccctaaaagagaatgaagcgccatgttgagggtcgcggacgtcgcgagtgctgt

SEQ ID NO: 866352 - DNA, 120 bp, Artificial Sequence
  ENSG00000245685_15 (sequence is synthesized)
gggaatgtgggctgaggtggagagttatggtagcccgtgttacaggctcaggggtctgaaagaagcctaatcgtggaggcggcatctgaggagggtcttgaaggctgggcaggcatttgc

SEQ ID NO: 866353 - DNA, 120 bp, Artificial Sequence
  ENSG00000245685_16 (sequence is synthesized)
gtgcttgtggggcagcaggttgtaccaggggcaggtgcagacccctgcctcccttgccttcaccacagtcacaacaggccaggccagcccatccatcatgtctctaggatatctcagggg

SEQ ID NO: 866354 - DNA, 120 bp, Artificial Sequence
  ENSG00000245685_17 (sequence is synthesized)
caccatgtcaagttaacggcctgtgtccaaggcgagtgacttcgaggtcagcatagcagcataccattggatgcagcgggttctgcttctgcgcacagtgcctcatcagaacataaattt

SEQ ID NO: 866355 - DNA, 120 bp, Artificial Sequence
  ENSG00000245685_18 (sequence is synthesized)
tcaaataccagatgtgataaaagacaacatcgagctttctgttttttgaaggagaggagaaggagatcctggatacattctctgaaaggtgcctccacttcatcactgatcccgacacgt

SEQ ID NO: 866356 - DNA, 120 bp, Artificial Sequence
  ENSG00000245685_19 (sequence is synthesized)
gggaggaaggagaggaggacagtgaagaccatcagcaagggagagcaggttccctgccctggatccctgccctggtcccctgccctgattccctgccccatgttgtaggtctttgggcta

SEQ ID NO: 866357 - DNA, 120 bp, Artificial Sequence
  ENSG00000245685_20 (sequence is synthesized)
catttctacccattggctgaacataaaaactgtcctatgaactatttggcagcaagttcacagcaaagaatattaactctgtgaggcaccttagacaatgcctggcttaacccccacttg

SEQ ID NO: 866358 - DNA, 120 bp, Artificial Sequence
  ENSG00000245685_21 (sequence is synthesized)
acaaataaagacacatgttctgactcacccaccatcccaggagcaactgaccaggctgaggaactctgtccactgcctgcagcccacttggccttccactgtgacgtccaggctgaggaa

SEQ ID NO: 866359 - DNA, 120 bp, Artificial Sequence
  ENSG00000245685_22 (sequence is synthesized)
ctgtgtctgccacctgcagcccacttggccttccactgtgatgtcctttccaggactctgagcagagatgggtttataacaagcataaattgttattttgtatcgatctgcacatcaatt

SEQ ID NO: 866360 - DNA, 120 bp, Artificial Sequence
  ENSG00000245685_23 (sequence is synthesized)
tatatattttgaaaattaaaagaaatccaatgataagaatttttctcacaagttaattaaggaaactaggtcaatggaaatttcttaggttatgaaaatattgatgtgaatatgttatgt

SEQ ID NO: 866361 - DNA, 120 bp, Artificial Sequence
  ENSG00000245685_24 (sequence is synthesized)
cttaccgctatcaacgtattttctggtgttttcacagtgctgcgcttcctaatccccattccatggcaatccacatgccatgatgcccggagtcattaacaaaggagacacacaggggct

SEQ ID NO: 866362 - DNA, 120 bp, Artificial Sequence
  ENSG00000245685_25 (sequence is synthesized)
catgtctggctgacttgggccttggccaggtaagacacacagcatgcatgcctgcatttctgaatgccatagacctgacaagtcataaaatagcaaccaataattttatgttagagtgct

SEQ ID NO: 866363 - DNA, 120 bp, Artificial Sequence
  ENSG00000245685_26 (sequence is synthesized)
cccttcctcacagaaatctcagcatatgtgaagataggttggaatgtgtaaagaaaagctaagaaagcagatttctgataagaacagcgtgtgacttgtacagcagctctgaattacagc

SEQ ID NO: 866364 - DNA, 120 bp, Artificial Sequence
  ENSG00000245685_27 (sequence is synthesized)
ccgtaggatggaatgctgacagttccttcttccttacctgtgatggctagaattttatttagcacatcgtttttgagccaatctcaaaatgagaaaacttttgaggaattatgcatagtg

SEQ ID NO: 866365 - DNA, 120 bp, Artificial Sequence
  ENSG00000245685_28 (sequence is synthesized)
gaagctcaataatcacattactgcggacctccaaaattttacaaaggactgcatagctttggattcaccttgaaaacatcccctctgaacatcagaagtccacttggtccccgaacagtg

SEQ ID NO: 866366 - DNA, 120 bp, Artificial Sequence
  ENSG00000245685_29 (sequence is synthesized)
cacggaatactatgcagccataaaaataacaaaatcatgtcctttgaaacaacatggatgcagccggaggccattatcctaagtgaattaatgcaggaacataaaacaaaataccacatg

SEQ ID NO: 866367 - DNA, 120 bp, Artificial Sequence
  ENSG00000245685_30 (sequence is synthesized)
acactgggtactcatggacataaagatggaaagaataaacaccgggactactagaggggagaaggaggaaggcaaggtttgaaaaactacctattgggtattatgctcatgtattaatct

SEQ ID NO: 866368 - DNA, 90 bp, Artificial Sequence
  ENSG00000245685_31 (sequence is synthesized)
tactagaggggagaaggaggaaggcaaggtttgaaaaactacctattgggtattatgctcatgtattaatctgttctcacactgctgtag

SEQ ID NO: 866369 - DNA, 120 bp, Artificial Sequence
  ENSG00000245685_32 (sequence is synthesized)
aggaagcatggctgggaggcttcaggaaacttataatcatggcagatggtgaagggggaagcaaggcacgttctaccatggcggaaggagagcaagtgagccaggggggatttgccatat

SEQ ID NO: 866370 - DNA, 120 bp, Artificial Sequence
  ENSG00000245685_33 (sequence is synthesized)
gtttaaaccatcagatgtcatgagaactcacttaccatctaagaacaacaagggggaaatctgccctcatgagctaatcacctcccaccatgtcattccccctacattgggaattacaat

SEQ ID NO: 866371 - DNA, 85 bp, Artificial Sequence
  ENSG00000245685_34 (sequence is synthesized)
tcataccaaatcagcatctggatgatgggatcattcataccccaaaactcagcattatgagatatacccatgtaacaaactggca

SEQ ID NO: 866372 - DNA, 120 bp, Artificial Sequence
  ENSG00000245685_35 (sequence is synthesized)
tgaaatcagtaaacaggtgagagggatccatcgcaagagcatgggatgaaaggaggagtagtccacggtgattcctctgcagcggtgggtgttattaatcgcgtatgtgacaccaaaacc

SEQ ID NO: 866373 - DNA, 120 bp, Artificial Sequence
  ENSG00000245685_36 (sequence is synthesized)
accccactcaagctgtggctctttccctaaagtagaaaaccgagaccagttgggttccaagcatccacgaagatcttattaaattcgtgatccctggtggcaccatggagtcaggattgg

SEQ ID NO: 866374 - DNA, 120 bp, Artificial Sequence
  ENSG00000245688_0 (sequence is synthesized)
caggccacagagctcaaatgaaggcagtgggacagcgagaccccactgggaccacacagatgcacaagctgcttcaaacctttcagggcccttaaattcccagcaactaaaaggaaacag

SEQ ID NO: 866375 - DNA, 120 bp, Artificial Sequence
  ENSG00000245688_1 (sequence is synthesized)
gccgcctggggtgctggaaaccgccggcctggagtcagccgaaggttcgatttgtcctttctagaaaccgtgtacacatggactcctacaatccagtcctttgtgtctggcttctgtcac

SEQ ID NO: 866376 - DNA, 120 bp, Artificial Sequence
  ENSG00000245688_2 (sequence is synthesized)
tcagcgtcgcatttctggggctcatccatgttgtagcatgtagtggtattccattgattggctacactgtagtttctccatttgccagatgatggatgcttggattgtttccagtttggg

SEQ ID NO: 866377 - DNA, 120 bp, Artificial Sequence
  ENSG00000245688_3 (sequence is synthesized)
gctattttgaagaacgcttctatgagcatttgcatctgagttgtatggacgtatgttttcatttctcccggggagatcctaggagcggagttgctgcactgcatggtgaacgtatgttta

SEQ ID NO: 866378 - DNA, 120 bp, Artificial Sequence
  ENSG00000245688_4 (sequence is synthesized)
actctttaagaaactgcctcgctgacttctgaagcagctgcaccgtggcgtgttcccaccagcagcttatctcgtgtcttcacatctgctggaggatttgagcagaggagagatgtgatg

SEQ ID NO: 866379 - DNA, 120 bp, Artificial Sequence
  ENSG00000245688_5 (sequence is synthesized)
agacttgctcttcagaagattcctccagctgccgggtgagggtcactgagagggaaaggaagaggcaggagggagaagtctgggtcctaggctaaagctccggctctgggtggaccagag

SEQ ID NO: 866380 - DNA, 120 bp, Artificial Sequence
  ENSG00000245688_6 (sequence is synthesized)
gggatgtgttcaacagggtctggcatggaaggagcaggagccacagagactttggtaactggctcagcctcaatcagcaagtggctgagagagaaaagatggaggtgacttgggagcaag

SEQ ID NO: 866381 - DNA, 120 bp, Artificial Sequence
  ENSG00000245688_7 (sequence is synthesized)
acttccatctggactgcgatgatggtgccggggcctctggctcttgcctgtccatgcatcatgcatggccagatcagcagtcacatcccttcagaaggttcccacatcctgtaaggggag

SEQ ID NO: 866382 - DNA, 120 bp, Artificial Sequence
  ENSG00000245688_8 (sequence is synthesized)
tggctcccagtcctggctgcccttttgaatcacctggaaaactttaaaatctgctggctgggtcctgatgtaactgatctgcgcacagcctgggcatggagaggttcaagctcccaggtg

SEQ ID NO: 866383 - DNA, 120 bp, Artificial Sequence
  ENSG00000245688_9 (sequence is synthesized)
atttgaatgcacactgggctgagtcaagctctcaggcgcaggtgcacactgggagctccaggggagttttacaaactactaaagtgctgagtcccacccagagcttttggtgcagttggg

SEQ ID NO: 866384 - DNA, 120 bp, Artificial Sequence
  ENSG00000245688_10 (sequence is synthesized)
acagggggaagcctgtgcactaggagttgtaacctttccccgggtgattataacgcgcagccacgtttggggactgctgcttgaaggcaacttgtttggacccaagagtcagttctgagc

SEQ ID NO: 866385 - DNA, 120 bp, Artificial Sequence
  ENSG00000245688_11 (sequence is synthesized)
agatgcttctaatgctagcatttcctaaaagagtgttcttgattctctcgctctttataagtagacccagaaatcttttttttttccttctcaatgtacagattatttttctgaagcatt

SEQ ID NO: 866386 - DNA, 120 bp, Artificial Sequence
  ENSG00000264954_0 (sequence is synthesized)
agttccagcaggtctaggaagcggggttcagcaagcccacgccgggcctccgagtccccctccccctgacacccctgtcccgggggtgaagaatgggttggcgggttgtgctgcggggac

SEQ ID NO: 866387 - DNA, 120 bp, Artificial Sequence
  ENSG00000264954_1 (sequence is synthesized)
tcccagaggatgtgcgaggcagaagagggtagaaagagaacaagccattttgctcatcatcaacaaaccttgaccaaggaagtgtctgcgtgtgcaatgtgccatctgaaccctggaggc

SEQ ID NO: 866388 - DNA, 120 bp, Artificial Sequence
  ENSG00000264954_2 (sequence is synthesized)
ataagcagtatggtcacttgtcccagcattgttgggaagtgaaaatgtatccatggaaagagagcagaaagataagactacgccccggggataatgaaaaagagaggacttgaccgctga

SEQ ID NO: 866389 - DNA, 120 bp, Artificial Sequence
  ENSG00000264954_3 (sequence is synthesized)
gggatggagttccaaggaagtcagtccttgatggggccaagcagcaggggaagacgggcgctatcaggctggggacagagcccaagccaagacccaggtgtatgaatggacaggacctga

SEQ ID NO: 866390 - DNA, 120 bp, Artificial Sequence
  ENSG00000264954_4 (sequence is synthesized)
gatgacccggtgggtcaaactgtctgactgtagaagaggagctgggcagagagcagaggtccagggacaggccaaggtttggaatgccaaggtttggaatttaggcttggccctgtgggt

SEQ ID NO: 866391 - DNA, 120 bp, Artificial Sequence
  ENSG00000264954_5 (sequence is synthesized)
gtgctgtggccagccatgtttcaggaagattgttcttgtccacctttgtttatgtcaaccacatttagaagtaacaaatgtctgatagggggtcaggtgcggtggcttgtgcctatagtg

SEQ ID NO: 866392 - DNA, 120 bp, Artificial Sequence
  ENSG00000264954_6 (sequence is synthesized)
tcaggaggctgaggcaggaggatcgctcaagcccagggattcaaggatgctgtgagctacgatcacgtcactgcactccagcctgggaaacagggtgagacccagtttctaaaacaaacg

SEQ ID NO: 866393 - DNA, 120 bp, Artificial Sequence
  ENSG00000264954_7 (sequence is synthesized)
aacaaacgaacaaacaaatgtctgatggggatgcatcctcccaatagaatactattcaaccatggataatgtgggaatagaatatctctgttgatgtgaaaagttgtccaagacagttga

SEQ ID NO: 866394 - DNA, 120 bp, Artificial Sequence
  ENSG00000264954_8 (sequence is synthesized)
tgttgatgtgaaaagttgtccaagacagttgagtcaaaaatatcagtaagcatagtaagatcttatttttgttttaaaaatcatatgcataagtccaggcacggtggctcacgcctgtaa

SEQ ID NO: 866395 - DNA, 120 bp, Artificial Sequence
  ENSG00000264954_9 (sequence is synthesized)
ccgagtccccctccccctgacacccctgtcccgggggtgaagaatgggttggcgggttgtgctgcggggactcccagaggatgtgcgaggcagaagaggaaagagaacaagccattttgc

SEQ ID NO: 866396 - DNA, 120 bp, Artificial Sequence
  ENSG00000264954_10 (sequence is synthesized)
acacacttgcttgcacgcacacacttgcttgcacgcacacacttgccttcacaacccgctcgcacacacgtgcacgcacacccttgcacacgcacgtgaacacacacttgcacacacata

SEQ ID NO: 866397 - DNA, 120 bp, Artificial Sequence
  ENSG00000264954_11 (sequence is synthesized)
tgcatgtacacagccttgcacacacacacgcatgcacacagacacccacttgcacacacatacacacacacactcttgcacacacacactgccgcacacggtttcccccattctgtctcc

SEQ ID NO: 866398 - DNA, 120 bp, Artificial Sequence
  ENSG00000264954_12 (sequence is synthesized)
tgactctgcccctgccagcctggatgggggacacacccttcgcctcctccaagggtcaaaatcctacctggctttcaagggctggttctaagatcctctgctcctccaaggagcctgtcc

SEQ ID NO: 866399 - DNA, 120 bp, Artificial Sequence
  ENSG00000264954_13 (sequence is synthesized)
ccatcccccaaccctatgtgcacttgtgctttgtacctctccatgtgccatcacagccaacctggctttgtatccctaaccattcatttattcattcactcgttcaacaaatatcagctg

SEQ ID NO: 866400 - DNA, 120 bp, Artificial Sequence
  ENSG00000264954_14 (sequence is synthesized)
agcccctacacggtgtcaggcaccaggccagacgctcatgatgcatggggcagggttaccagggtgcctaccttcctggagccttaagtccagtgggggaggcactacagggaaacctcc

SEQ ID NO: 866401 - DNA, 120 bp, Artificial Sequence
  ENSG00000264954_15 (sequence is synthesized)
ttgaaaacaagacctcggtggtctggactttggggggtctcttccccgccccaacctttcatggaggctgaaacatgacagatgccaaacagccccagccagagagacgggctggcttcc

SEQ ID NO: 866402 - DNA, 120 bp, Artificial Sequence
  ENSG00000264954_16 (sequence is synthesized)
tgctcctctgtctcccagttcttttcccccctgaacaggaaccccaggtggatccgcatccctggacccacaggtgagcgaccccggcggcccacccacacgcacctgagggcagggcga

SEQ ID NO: 866403 - DNA, 120 bp, Artificial Sequence
  ENSG00000264954_17 (sequence is synthesized)
atggtgggggtggggtggggggacccgggagtctcaccttccttcacgcggcctggctgcgggggcgcaggtgggacggcccacgagaggggctgcaggaaggtgacccagggctggggg

SEQ ID NO: 866404 - DNA, 120 bp, Artificial Sequence
  ENSG00000264954_18 (sequence is synthesized)
tgtgcgcggagtcagccaggtggggtggggggaatggatggggacacgtcgcgagccccaacccccccggccagtggcctccctaaccccgcaggggccaggttctctcctccccgcccc

SEQ ID NO: 866405 - DNA, 120 bp, Artificial Sequence
  ENSG00000264954_19 (sequence is synthesized)
gcggcctccctgctccctgccacgcctcttcctctcggtttggggctgtctctcctcgtcccccacccctccaggatctggcccctccagggacagctccccactctgccgtctcccaag

SEQ ID NO: 866406 - DNA, 120 bp, Artificial Sequence
  ENSG00000264954_20 (sequence is synthesized)
cgctctgcggtggggagcgaccccagcttccgcccgccccagaggccatggctggcgccggttgccttggcgacgccgaggacgccaagagagaggggcttcctgccaggaaagagtggt

SEQ ID NO: 866407 - DNA, 120 bp, Artificial Sequence
  ENSG00000264954_21 (sequence is synthesized)
ttctggagcagaccaaggaaggaaacaccgcccgaattcacggaagaggctgaggactctggctggaaacacgtggccggcttctcgcctctctccttgcggctatttgccctgtttcct

SEQ ID NO: 866408 - DNA, 120 bp, Artificial Sequence
  ENSG00000264954_22 (sequence is synthesized)
actgcacttcagcctgggcaacagagactccatctaaaaaaaaaaaaaattcatatgcatatacatgtgtgtatgtacatgtgtgtgtgtgtgaatacacatacacacacacacacagat

SEQ ID NO: 866409 - DNA, 120 bp, Artificial Sequence
  ENSG00000264954_23 (sequence is synthesized)
gtgtgaatacacatacacacacacacacagatccaactgtggagcagctgtcagagttggccgacccgcagcctcccctagagtcttctgcagagggttcctgccctcacctacagcccc

SEQ ID NO: 866410 - DNA, 120 bp, Artificial Sequence
  ENSG00000264954_24 (sequence is synthesized)
tccacctgaggacacctggccacaggtaagacaggccagaaggtggcacaggagcagcccacaagcaataatggatgggagttgatagctaaactcgcagcctcctggtctcagtgcgac

SEQ ID NO: 866411 - DNA, 120 bp, Artificial Sequence
  ENSG00000264954_25 (sequence is synthesized)
aactctgaggtgtctcccacagagcctctcagtgatgcctgtgggcttgtgcccaggtggcccacagtgacctgctcagaaacacacactttactgccttttctcctctccctgtccctt

SEQ ID NO: 866412 - DNA, 120 bp, Artificial Sequence
  ENSG00000264954_26 (sequence is synthesized)
ctccactctctcgtagtgctcatttggatctccttccaaagaaacgactgctccccaagcctgtgtcagggtctgcttttgggggatcccaacgaagacatcagcctcctactcgctcca

SEQ ID NO: 866413 - DNA, 120 bp, Artificial Sequence
  ENSG00000264954_27 (sequence is synthesized)
catctgcctccaggctactgaaaactcctggaaaagggacttaagtagctctatgatacatctgcattcagagatgtgaaatactgaaatagacattgaagaaaatgagtttgggtgtac

SEQ ID NO: 866414 - DNA, 120 bp, Artificial Sequence
  ENSG00000258460_0 (sequence is synthesized)
agttgctcgctgcaggttctcctggctcggcggcgcggaggcaaaggcctgtttctgcaaagactttgtgaggccccatgactcttcctcaacctcccgaccgctggaggtccctgatag

SEQ ID NO: 866415 - DNA, 120 bp, Artificial Sequence
  ENSG00000258460_1 (sequence is synthesized)
ttgaataagctaagtgcaatgtgcccgcccagttctttcctggaagatgaaacacagctccctgagtcaggagacagaagaatggataaacattcctcaattgctgttgataggttctca

SEQ ID NO: 866416 - DNA, 120 bp, Artificial Sequence
  ENSG00000258460_2 (sequence is synthesized)
ccccagaacccaggcagtcggcctcatgctccagagtgcaggtcccataaggcgtgagtatgggggtgttttccaccatgacatcaagtgcatccccacactgcccccaaacgtaattag

SEQ ID NO: 866417 - DNA, 120 bp, Artificial Sequence
  ENSG00000258460_3 (sequence is synthesized)
catgtcctatggctgttggagattctggcttgtttcgagaactagcttcctggcactctagggctcaactgcaaagaaatgctcttttgtgataacgcatctggacatccagtgcaagaa

SEQ ID NO: 866418 - DNA, 120 bp, Artificial Sequence
  ENSG00000258460_4 (sequence is synthesized)
actgagcattagtccccctgaccctcccaccccccagaaagactccaactgaaaggttgcacaatggctgatcaaagtccaccacatttctttccagggctacgattttgttctgtctcc

SEQ ID NO: 866419 - DNA, 120 bp, Artificial Sequence
  ENSG00000258460_5 (sequence is synthesized)
actctggggagttggaaggctggagcacggacgagccatctctccccctacctcctggtgatgtttggaaatcttaattttgttttataggtcacaggtcagcccatccatgccgatcct

SEQ ID NO: 866420 - DNA, 120 bp, Artificial Sequence
  ENSG00000258460_6 (sequence is synthesized)
cccaaggggagccgtcaattagagccgtgcttgagcctaaggctgacctgaaccgtttgaaggcagatcttccatggagtgccccggtactacttcatttccaggaatcttaattacaag

SEQ ID NO: 866421 - DNA, 120 bp, Artificial Sequence
  ENSG00000258460_7 (sequence is synthesized)
gcattactctgatggattgaatgtattaagtagcctcaattcaccccagtttgcagccctttgggaggcggctcccctcccatcattttctgccccgctttgctgccccagtgccatggc

SEQ ID NO: 866422 - DNA, 120 bp, Artificial Sequence
  ENSG00000258460_8 (sequence is synthesized)
accaggagggctttgttccaaaccaactttgagctgtgagtattatcagaggcccctcccctgcctggaggcctttcggaaactactttatctcttgcaggtccttttctggaaaggtca

SEQ ID NO: 866423 - DNA, 120 bp, Artificial Sequence
  ENSG00000258460_9 (sequence is synthesized)
aagggatgagaggggtctctgcagtgtcctggatctggtttcaacctcaccttctccatgtatgagaagacaagtcacttggattcaccatgcctcggtttccccagatggcaagcagga

SEQ ID NO: 866424 - DNA, 120 bp, Artificial Sequence
  ENSG00000258460_10 (sequence is synthesized)
ctcagccttttgtacctggtccatcagaggacgagctttcacgtgttagccaacacctccgtcatcaccatcattgccatgatcatcgtcctcatcaccttgacacgctgagctttgtag

SEQ ID NO: 866425 - DNA, 120 bp, Artificial Sequence
  ENSG00000258460_11 (sequence is synthesized)
cttaaaaacaaaatgcctttaacaatgtgcaacaggtctaagatgccacctttgggatcagatgggagtttgggattatttctattttccaattgttcagccccctcccactaagtgcga

SEQ ID NO: 866426 - DNA, 120 bp, Artificial Sequence
  ENSG00000258460_12 (sequence is synthesized)
agcggagagccattaagttgcaatggatttgattcaccacgtggcccctcaaatcctttctggaacaagattggatgtaaaaataaatcaaataaatgcattttcagcgtgtgcagccca

SEQ ID NO: 866427 - DNA, 120 bp, Artificial Sequence
  ENSG00000258460_13 (sequence is synthesized)
ctccactctggggagttggaaggctggagcacggacgagccatctctccccctacctcctgacccaaggggagccgtcaattagagccgtgcttgagcctaaggctgacctgaaccgttt

SEQ ID NO: 866428 - DNA, 120 bp, Artificial Sequence
  ENSG00000258464_0 (sequence is synthesized)
agtccaactcctcagttaatagccagggaaacagaagcccagggagataaagacggtggcagaggaggaattctttcttagcagatcttccattcctaatccaggatcatttccagggct

SEQ ID NO: 866429 - DNA, 120 bp, Artificial Sequence
  ENSG00000258464_1 (sequence is synthesized)
ttgtaggcaaagaagctacttgtatttgccaaccacaccaggaggccagggtaaagtgcagtatctatacccagagtcacagcctgcagagcctctgggagaagccggccaccaggatgc

SEQ ID NO: 866430 - DNA, 120 bp, Artificial Sequence
  ENSG00000258464_2 (sequence is synthesized)
tcttcccagtgacgtagctggcatctgtagagtgcaggaaggacatggttcctgcacagtcctcttaacccctgcatggaaagagaacagaactgaggcctcagcctatgctctaatgaa

SEQ ID NO: 866431 - DNA, 120 bp, Artificial Sequence
  ENSG00000258464_3 (sequence is synthesized)
aaaaacaggtcactgaaaataatatcaggggaggaagtcaagaaggctgctgtattcattctgctttaatgagtagagctctcctctctctttctctcggctcccttgctttggagggag

SEQ ID NO: 866432 - DNA, 120 bp, Artificial Sequence
  ENSG00000258464_4 (sequence is synthesized)
ccagctacacagaaattcaggcagtctatgaagaggctcaccttgtgccagtgaccacttgagtgagccatcttagaagtggctcttccagccccagacaaactttcagaaactaaagcc

SEQ ID NO: 866433 - DNA, 120 bp, Artificial Sequence
  ENSG00000258464_5 (sequence is synthesized)
ctgcttcacatcctgactagaaccttatgagaaactctgagcccaacccacccagttaaaccactcctgaatccctgccccacaaaaactgtgagataataaatggtcattgtcttaagc

SEQ ID NO: 866434 - DNA, 120 bp, Artificial Sequence
  ENSG00000258464_6 (sequence is synthesized)
ggttaggagtttcaaaacaagtttgctgccaagaaaaacacacaaaaacccatagattcatgctctgtaaatctcaagaagcaactctgtcccatccccagtcatgccctacactgggtc

SEQ ID NO: 866435 - DNA, 120 bp, Artificial Sequence
  ENSG00000258464_7 (sequence is synthesized)
tgtcttagaattctatgtgcaaactggcccctgctacttatgacacccccgagggcctggctttcattcatcctcctatccaatcactatctggtccccagggtaaagtgcagtatctat

SEQ ID NO: 866436 - DNA, 120 bp, Artificial Sequence
  ENSG00000258464_8 (sequence is synthesized)
ggagaagactacctgtctctgctatccacaggggtttttaaaggagttttgcagagccagattatcttcaacctgaaaaaattcagaggctcagtgctaaatagaactgtgaagggccag

SEQ ID NO: 866437 - DNA, 120 bp, Artificial Sequence
  ENSG00000258464_9 (sequence is synthesized)
agaggctgccatggcagactcatgcccttgtgggcagatggccctgctcagtgctgggtctgcagtccctcgactgctcccagagaggacagccctggtgcagatacaggaagtgagagg

SEQ ID NO: 866438 - DNA, 120 bp, Artificial Sequence
  ENSG00000258464_10 (sequence is synthesized)
ctgctggtctcacaaagccatggccagactggggaaaccaacaaagtggttggtgggggcaactgggagctgctgaaccctcatcatgtggttaaagtcagttcttgatgattcctggca

SEQ ID NO: 866439 - DNA, 120 bp, Artificial Sequence
  ENSG00000258464_11 (sequence is synthesized)
acaggcggggcacctggataccctttggtgccagctctatagccaagggcttggtgagtcccagcagtgcagttttgctggtggtataggcctccagcatctaagaaggaaatgaaatgg

SEQ ID NO: 866440 - DNA, 120 bp, Artificial Sequence
  ENSG00000258464_12 (sequence is synthesized)
ataaggtgcactgcgctggaggagaggggctcttgctagacccccaaggctatggaggatgactatgcctgcacttacacctgcactcacaccagcactcacacctgcactcacatgttt

SEQ ID NO: 866441 - DNA, 120 bp, Artificial Sequence
  ENSG00000258464_13 (sequence is synthesized)
ctcccactccactccaggaaattaccagtgaacaaaatctgagcaggagcggaatgaagcctgggcttaaagaaaagtcaggaaggcagaggctgtgttcacccatgcttagcccagaga

SEQ ID NO: 866442 - DNA, 120 bp, Artificial Sequence
  ENSG00000258464_14 (sequence is synthesized)
gaattgcttagggtgcagagccagggaaatgcactaaagagacccatgaccagattcctgctctaccatgactggtcgcccttgggcaagtcacttatcatctccatgtctcaatctcct

SEQ ID NO: 866443 - DNA, 120 bp, Artificial Sequence
  ENSG00000258464_15 (sequence is synthesized)
cctctgccacagggagtttatcaggcctgctctgtgacagtcataggaatgtcatgcagggacactgatagcctatagtgccccctggtgtaaattttttaaaaaaactttcttctgagc

SEQ ID NO: 866444 - DNA, 120 bp, Artificial Sequence
  ENSG00000258464_16 (sequence is synthesized)
tctgaagttcccctgcacccagggctttgattcagatattgttggagagagcattgcatggctcatgactcactaggtggtggataagctcattgaggagaaatcttttgccacatttgg

SEQ ID NO: 866445 - DNA, 120 bp, Artificial Sequence
  ENSG00000258464_17 (sequence is synthesized)
agaaaggattgaagagaaatgagagcctggatgtgaagaaaacattaggaagctgcagcagtaacctatgtgagaaattaagagaacctaaatcagatccgttggccatcaagatttcac

SEQ ID NO: 866446 - DNA, 120 bp, Artificial Sequence
  ENSG00000258464_18 (sequence is synthesized)
ggagctgtgaaatgcgtggcctctgtagccctgtgaaggtcttgtttctatggcgatacaagagaaagtctttgcagagttgttgcagctggaagtcttcacttactttaagagctcatt

SEQ ID NO: 866447 - DNA, 120 bp, Artificial Sequence
  ENSG00000258464_19 (sequence is synthesized)
aaagctagtggaggtaaagggcaggtggagatcctgaaagtgcctagcagaggttgaaactttatagcaaagttaagagtcagtaggagcacacaaagaattcctttcttgtcattgtaa

SEQ ID NO: 866448 - DNA, 120 bp, Artificial Sequence
  ENSG00000258464_20 (sequence is synthesized)
ttaccttacataggcatgaaactttccaaacctatctaacatcaactttacatattcataatattttttacgtacagccttaacatttggtctgagacaactttttagacaatttagaca

SEQ ID NO: 866449 - DNA, 120 bp, Artificial Sequence
  ENSG00000258464_21 (sequence is synthesized)
atttttcaaactacttttttgaggaagcagagtattatatggcagctacagaatgataaaggatgactggagagttttctcttcagaaaaaagaacaaacttttcttcatgtgaaaggta

SEQ ID NO: 866450 - DNA, 120 bp, Artificial Sequence
  ENSG00000258464_22 (sequence is synthesized)
aacagagagagagaagttcagcagcataattaataagatggttctgcaatgtctaataacttctcctttttgtttgcctctgtacacaataaaagtgttaaagtataattttcaaaaaaa

SEQ ID NO: 866451 - DNA, 120 bp, Artificial Sequence
  ENSG00000258464_23 (sequence is synthesized)
acagaactgccaaaaggaagaaatagaaaagaaaaaagaagcaataggtccaaagtaagtccaaaacccaataaggcaaacaacactgtctactcattaaatactgaggcttgagaataa

SEQ ID NO: 866452 - DNA, 120 bp, Artificial Sequence
  ENSG00000258464_24 (sequence is synthesized)
gtcaagaaggctgctgtattcattctgctttaatgagtagagaactcttaccaaaacaggaatagaagacatagggtgcaaccatttctccaggctgaaacagagcccctgaggaaggag

SEQ ID NO: 866453 - DNA, 120 bp, Artificial Sequence
  ENSG00000258464_25 (sequence is synthesized)
tccatgaaatatcctagttcacatctgcctcctgcaaactactaggacatggacactgctcagccaagttctgtgccaatttgtaacaagaatggcctttcctcctatttccaataaggc

SEQ ID NO: 866454 - DNA, 120 bp, Artificial Sequence
  ENSG00000258464_26 (sequence is synthesized)
cccatcagcagagggaggagaagaggagaagcagctggacatcagagactatggttggacattggagagaagcagcttgacttcaaagggacggcttgatggcattgcttcggagaggag

SEQ ID NO: 866455 - DNA, 120 bp, Artificial Sequence
  ENSG00000258464_27 (sequence is synthesized)
ttcagccagggacagctggactctaggggaatattatcttcccacaccatccacttttcagctccccttcccactgagaaccactttcattggcaataaaatcccccacatttaccatct

SEQ ID NO: 866456 - DNA, 120 bp, Artificial Sequence
  ENSG00000258464_28 (sequence is synthesized)
gtgagaaaatggggagggagaaaactgagtgaatctcctcttagagtcattggcctcctaggggtgggctgttggctgcactcctgggcattttggcaccacttttaatgatccacatcc

SEQ ID NO: 866457 - DNA, 120 bp, Artificial Sequence
  ENSG00000249638_0 (sequence is synthesized)
acagatattccaaaaaaggagatataaacatgaccataaaagacatgaaaagatgtttaaccccattagtcatcgtggaaatgcaaatgaaaaccaccatacagacactagagtggttta

SEQ ID NO: 866458 - DNA, 120 bp, Artificial Sequence
  ENSG00000249638_1 (sequence is synthesized)
ctggatgtctcatgctcacaggcagaagggaaaactactgtgtgtgacaggaagatggacttacccaaccttcagcattctcaatctcttgtctattaacatgtgtttgaaacattatgc

SEQ ID NO: 866459 - DNA, 120 bp, Artificial Sequence
  ENSG00000249638_2 (sequence is synthesized)
attcaaagcaaacatctgggaggaagatgggagaagccttcttgcccctgttctacagaagtaattgaagttcatgacattcaagctcattcaccagtaaatgaatttgggtcatgcttt

SEQ ID NO: 866460 - DNA, 120 bp, Artificial Sequence
  ENSG00000187600_0 (sequence is synthesized)
gaaggagacctactgagtcctgaggacaaccaacaaaggccttaacggcacagaaggaagtcctgtcttctgggattgagtttggtaatccaccccttggagctaaacacagtagtatcc

SEQ ID NO: 866461 - DNA, 120 bp, Artificial Sequence
  ENSG00000187600_1 (sequence is synthesized)
ttagtcgttgggatggtgggagagggagaagaggaaggatgaaggaaagggctctttgctagtatctccatatctagaagatggtttaaactcatacccatagctctatatgagcatttt

SEQ ID NO: 866462 - DNA, 120 bp, Artificial Sequence
  ENSG00000187600_2 (sequence is synthesized)
tagagctagtgaattaggcaatttattaatattttttgttataactgatagaaaagatgcatcttgaacatggaattgttaagccacgtctgagcagtgtatgtcaggacttgttcatta

SEQ ID NO: 866463 - DNA, 120 bp, Artificial Sequence
  ENSG00000187600_3 (sequence is synthesized)
ggttggcagcagaagggcagaatgaagtataaagggagagatgtatgcaaatgtgtctatgtttacattttgatactagtcattgatatatgtgcaactcttttggctgtactataggaa

SEQ ID NO: 866464 - DNA, 120 bp, Artificial Sequence
  ENSG00000187600_4 (sequence is synthesized)
agcctaggcctgcagagactgctcagtcacagttgaaggagacctactgagtcctgaggacaaccaacaaaggccttaacggcacagaaggttgtgacatcagaaagttgatagacgtga

SEQ ID NO: 866465 - DNA, 120 bp, Artificial Sequence
  ENSG00000187600_5 (sequence is synthesized)
tcgctaagaatcttgccgaatattctaggactacaagtaaaagagaccctattttctgtgctgggaaaagaagtcccaccagtgtgatcaggaataaaacacttcaggtgcaacgtgatc

SEQ ID NO: 866466 - DNA, 120 bp, Artificial Sequence
  ENSG00000187600_6 (sequence is synthesized)
attattcaaaggttctgtgaagccaattaccccctttgcaaagtgaaaagtgcaactttggatttttctgatcagagtaatatagagaggagcccacccttttcttactatacagagaag

SEQ ID NO: 866467 - DNA, 120 bp, Artificial Sequence
  ENSG00000187600_7 (sequence is synthesized)
cacagcatctgagtggacctaacacagggcagtgaaagtgatgcagaacaaacttcaaagcctccaggagcacacgtgacctcaggaaatgaacagaaacaacctagctctccaaagagg

SEQ ID NO: 866468 - DNA, 120 bp, Artificial Sequence
  ENSG00000187600_8 (sequence is synthesized)
agtatttcattcaactccgaactgctcacacattatgcaactgtgaacaaggctcatttaaaaatccatgaagcttctaatgttttcaccacaaaatatattaagtattgaggtgctgga

SEQ ID NO: 866469 - DNA, 120 bp, Artificial Sequence
  ENSG00000187600_9 (sequence is synthesized)
tatgttgactagtttgatttaattattccacattatatgcataaatagtaacatcaccttgttccccataaaattatacaattataaattgtcaatttgcaattaaaacaataaaatcca

SEQ ID NO: 866470 - DNA, 120 bp, Artificial Sequence
  ENSG00000187600_10 (sequence is synthesized)
ctcactcagctcacccattaaaccctgcgggtctgtttcactttttccttcccacacaaacattacagtaacagtctggccttcccaaaccaccactggaaacttcaactgaactgatca

SEQ ID NO: 866471 - DNA, 120 bp, Artificial Sequence
  ENSG00000187600_11 (sequence is synthesized)
tatatcagtcaactctaggagaccagctctgattccaagaaactgtgacattgcctccattggaagttacaaccttcacctgccaacctggactcatcccataggttgtgacatcagaaa

SEQ ID NO: 866472 - DNA, 80 bp, Artificial Sequence
  ENSG00000227007_0 (sequence is synthesized)
tctcacacatatatgtaagtgattttatgctatgtatctttttttcttctgatatctttttctggtttcaatgttagttt

SEQ ID NO: 866473 - DNA, 120 bp, Artificial Sequence
  ENSG00000227007_1 (sequence is synthesized)
tttttcttctgatatctttttctggtttcaatgttagtttaatgctagcttcatcaaataagttgggaagtggtcttttactcatattttgaaagaatttgtgtagaattactataaatt

SEQ ID NO: 866474 - DNA, 120 bp, Artificial Sequence
  ENSG00000227007_2 (sequence is synthesized)
gttaaggagaatttttgtagaatttgctagtgaatatatttatgttttgaattttcttttgtggaaggtttttactacaaattccacttacttagtagaattaagattattcaagttatc

SEQ ID NO: 866475 - DNA, 120 bp, Artificial Sequence
  ENSG00000227007_3 (sequence is synthesized)
taattttttactgagtaattctggtctcattatgtctttcaagggaatttttttcattttttaatatcattttatagctttatattaaaagttctgaatatgagtggctctctgcctgct

SEQ ID NO: 866476 - DNA, 120 bp, Artificial Sequence
  ENSG00000227007_4 (sequence is synthesized)
ccctttcaccaccttaatatcttaagtgaataatgcattctcatcaagagggttaaaactaatcatcagctgatggcagttcactttttgaattacaaaaaactttccccctcaggccat

SEQ ID NO: 866477 - DNA, 120 bp, Artificial Sequence
  ENSG00000227007_5 (sequence is synthesized)
ttattttactcataagcaacctaactatattatagattctaaaatattatctccaaagcccctagaagatgcatacatttagtccaaaaggtttaataactccccaagctgatatttccc

SEQ ID NO: 866478 - DNA, 120 bp, Artificial Sequence
  ENSG00000227007_6 (sequence is synthesized)
tttctcctttgatatttccataatttggagtgcccattgtctgttttatttcatattgggacaagctgaacagggactaaggtgaaggcagagaggcattcagggcaaatcgtttaagga

SEQ ID NO: 866479 - DNA, 120 bp, Artificial Sequence
  ENSG00000227007_7 (sequence is synthesized)
ggtactacaaatacaaggtcaacacttgcaggaaactaagaaagagtgtctccttaaaatttgtgtcctaggtgtcttatctagttctggcctttttaatgtgaattctttttttttttt

SEQ ID NO: 866480 - DNA, 90 bp, Artificial Sequence
  ENSG00000227007_8 (sequence is synthesized)
ttctggcctttttaatgtgaattggctctgtcacccaggctagagtgcactggtgcgatctcgcctgactgcaacctccacctcctgggt

SEQ ID NO: 866481 - DNA, 120 bp, Artificial Sequence
  ENSG00000227007_9 (sequence is synthesized)
gcctcccaaagtgctgtgattacaggcatcaaccactgcacccagcttgaattctttgtgtcctctaaaaactcaaaattattttttagtattttaccagaaacatgggaggcatcaatt

SEQ ID NO: 866482 - DNA, 120 bp, Artificial Sequence
  ENSG00000227007_10 (sequence is synthesized)
taaaaggaatgcacagaagacacttcatcactacttccaaccaagcagtaatgggctggagatcctagattaagctactggcagatctggtgtctggcgagggctctgctcctggtttgc

SEQ ID NO: 866483 - DNA, 120 bp, Artificial Sequence
  ENSG00000227007_11 (sequence is synthesized)
agatgggtgtcctctcattatgccctcgcatggttgagagaaaaatcatcgttcttctgtttcttcttagaagggcactaattttattcatgagctccatcctcatgacctaatcacagc

SEQ ID NO: 866484 - DNA, 120 bp, Artificial Sequence
  ENSG00000227007_12 (sequence is synthesized)
ctaaaggcctcacctcctaatactattatattgggggtttagattgcaacgtatgtatttgggggggtcggcacaaacattcagctcataacatcttgtgaatcacttttaattgcaatg

SEQ ID NO: 866485 - DNA, 120 bp, Artificial Sequence
  ENSG00000227007_13 (sequence is synthesized)
ttgcaatgttggaacattgctttaaaatgatgcaggtcttatttccatatatgcattaggcagttcttgcattgctataaagaaatacaggaaactgggtaatttataaataaaagaggt

SEQ ID NO: 866486 - DNA, 120 bp, Artificial Sequence
  ENSG00000227007_14 (sequence is synthesized)
ctcacagttctgtaggctttacaggaagcatggtggtgctcagatctgcttggcatctagggaggcctcaggaagcttccattcatggcagaaggtgaagacagagtaggtatgtcgtgt

SEQ ID NO: 866487 - DNA, 120 bp, Artificial Sequence
  ENSG00000227007_15 (sequence is synthesized)
agtaaaagcaggaatacgcaagagacagagtggggggcggtgccaaacacttttaaatgaccacatctcatatgaattcagggcaagagctcacttaatcaccaaggggttggcccaaac

SEQ ID NO: 866488 - DNA, 120 bp, Artificial Sequence
  ENSG00000227007_16 (sequence is synthesized)
gggatctgcccccattatccaaatccctctgccagtctccaacattaggagttacacttcaacacgagatttgagtggggacaaatatccaaactatattaagaagaaacgcagcagttc

SEQ ID NO: 866489 - DNA, 120 bp, Artificial Sequence
  ENSG00000227007_17 (sequence is synthesized)
ccaattttgtctctcatcaccctcccacacaccaaatcatatatgtgaggagtacttttatatgcacaacttgccctatttagaactgttctggaatgagtgcatttcccatagtactat

SEQ ID NO: 866490 - DNA, 120 bp, Artificial Sequence
  ENSG00000227007_18 (sequence is synthesized)
ctaaaattccatcccctgcagttcccttcaagaaaccacatgacagtatcaataatgcattgcattttaggaataaagttaaatattttctaatttattttaaccattaataaactgttc

SEQ ID NO: 866491 - DNA, 120 bp, Artificial Sequence
  ENSG00000227007_19 (sequence is synthesized)
ttaactctttttataacaataatttttagatcagttcacaagtgattacaacacacacggcagcaagatggataattgctgtcctaatgcatacattacactaaacattattacatacaa

SEQ ID NO: 866492 - DNA, 120 bp, Artificial Sequence
  ENSG00000227007_20 (sequence is synthesized)
tgatattgccaaggatttaaaattttgatcagcagtttcaggaagctaggagcttttaactaaatggatgaatcatggagaagagtcccgccatttctcgttcaagattggtgactcagt

SEQ ID NO: 866493 - DNA, 120 bp, Artificial Sequence
  ENSG00000227007_21 (sequence is synthesized)
gtcagtgggacatgagacttctatgatctgaccttagaatgacccctttttatggtggaacaaggttttaagcaaggccattcccctggagccataaaggattgactagggaagattgca

SEQ ID NO: 866494 - DNA, 120 bp, Artificial Sequence
  ENSG00000227007_22 (sequence is synthesized)
ctgagctttgctatgaacagggctgctgcatttttgtgatttttccccagtctgtggtttttcctgagcctgtatccagacagtggtcattccaagtccagctttgctgtctgttacagc

SEQ ID NO: 866495 - DNA, 120 bp, Artificial Sequence
  ENSG00000227007_23 (sequence is synthesized)
ttctgtttgactatgtctttatactcttgccttattaagttataaaactgtttattgctttattgtctcagctcaaaggtgaataacaaaaccccaagcatatgtcagccttggaaattt

SEQ ID NO: 866496 - DNA, 120 bp, Artificial Sequence
  ENSG00000227007_24 (sequence is synthesized)
agtattgaccttcctgggccctcagtgcctgctcatttcctatacctagcatttacgtttccaatgcttcatctacaccttcattcactactacctatatgtcatttgccttattatcta

SEQ ID NO: 866497 - DNA, 120 bp, Artificial Sequence
  ENSG00000227007_25 (sequence is synthesized)
tggtacgtatactgagttctagtaaaatagtatttcaagtgcaagtttacacattccttatattaactttaattcaatacttgccatttcttttttgcttcagaaccaggagttgaaaat

SEQ ID NO: 866498 - DNA, 120 bp, Artificial Sequence
  ENSG00000227007_26 (sequence is synthesized)
atttccatttgtcttttaaagaggttataaaattgtcacaaggacatgggacatgctggctatttttccctttttactattttatagcatccaattaggtggataataaaattcttattt

SEQ ID NO: 866499 - DNA, 120 bp, Artificial Sequence
  ENSG00000227007_27 (sequence is synthesized)
ttccaatgagtagtccaagacttcacgaataaaagtaccatgcttaatgtcacactactaacaagcggcaggaccagtgtttaaatgtaaatatatcttatttcaaaatttgtttgtttt

SEQ ID NO: 866500 - DNA, 120 bp, Artificial Sequence
  ENSG00000227007_28 (sequence is synthesized)
accaaattttgtagctccttccaagactcccaaccttcaccttttctttctatccctaagaatacatatgattttcacatacgaagttcgtttataaccttttgctaattaattagtgaa

SEQ ID NO: 866501 - DNA, 120 bp, Artificial Sequence
  ENSG00000227007_29 (sequence is synthesized)
aaaagatgcaatgaattttgcaaaatgtcatgcaaaaaatgaagcaggaacagacaattaggaaatattaaaccatggttagtagcattgcatatcagcattggtttgattgtaatttca

SEQ ID NO: 866502 - DNA, 120 bp, Artificial Sequence
  ENSG00000227007_30 (sequence is synthesized)
ttgttctggactctcgcttgtttagttggtgtccctgaggcctgcagtccttccaggtgctgagagtggagcttcccaggccttcatcctctccaggacctcaaccttcctcgttccatg

SEQ ID NO: 866503 - DNA, 120 bp, Artificial Sequence
  ENSG00000227007_31 (sequence is synthesized)
tacagacatagagccctttccacttcctttttgtaagaaatagtattctttcccacagatgtccagctcacaccagcctgctgcttgcctttcactgaccccttcgatggatgctacgga

SEQ ID NO: 866504 - DNA, 120 bp, Artificial Sequence
  ENSG00000227007_32 (sequence is synthesized)
cttggatccactgccaaggaaacacgtcacagagcagtgtgtggttggcatactaagctccaccaagaaagaagacatcacccagagtcatgctgtattatccagaatacttatgtgtct

SEQ ID NO: 866505 - DNA, 120 bp, Artificial Sequence
  ENSG00000227007_33 (sequence is synthesized)
ccataccagagattgaccacccaaacttcttcatttataaaaagcttctccaagtacttgattgcttgaaattggactatagtagcttcaagaaacacttataaacattagccaattaca

SEQ ID NO: 866506 - DNA, 120 bp, Artificial Sequence
  ENSG00000267421_0 (sequence is synthesized)
cggggcttgcggcgaggggtgggaccgcagggccggagtaaaagggtgcttggctgtgacaggtctcctggcctcagtgatggaattaagatgacttctatctctgaatccaagggtgac

SEQ ID NO: 866507 - DNA, 120 bp, Artificial Sequence
  ENSG00000267421_1 (sequence is synthesized)
aggaaccaggtcctttgatgacatcatggagcaaagctgtcttcttgccttgacctgctacctacctacatgggaagctgttacttgagaaggcaataaaatctatcttctttattgaca

SEQ ID NO: 866508 - DNA, 120 bp, Artificial Sequence
  ENSG00000267421_2 (sequence is synthesized)
gcgggtcgctctcacttgtccctggaccgcagccgccgcataagtggtggccaacgctgggcctgggtgtggccggaagcagaggccgctctgactacacacccaccccccaaaggcttc

SEQ ID NO: 866509 - DNA, 120 bp, Artificial Sequence
  ENSG00000267421_3 (sequence is synthesized)
agaccgggtgaggcggggcttgcggcgaggggtgggaccgcagggccggagtaaaagggtgcttggctgtgacaggtgctaagggcctgggcgtcagctccttgcgggagcgtcactgcc

SEQ ID NO: 866510 - DNA, 120 bp, Artificial Sequence
  ENSG00000267421_4 (sequence is synthesized)
gaccgggaagggaaaggcaatcttgggggcctccggagtccggaggatcactctgatgggtgatgtgtgtgggctaggaagggggatgtagagagcttgtgggattgttttgggtgcccc

SEQ ID NO: 866511 - DNA, 120 bp, Artificial Sequence
  ENSG00000267421_5 (sequence is synthesized)
ctcaccttctcccattatctctggctacacgggcctcccatcctccaaaataccattttccattttgtaacctatgtatttgcacgtcctgggtcgaaatagtctaaccccaaattttcg

SEQ ID NO: 866512 - DNA, 120 bp, Artificial Sequence
  ENSG00000267421_6 (sequence is synthesized)
aaaataccagccctggcgacctcttaaagttcccttcctgtgtgaatcacggtctgaagttagctgatggatttattcttgaacatgtttaggaccggtctctcccccaggggccttatc

SEQ ID NO: 866513 - DNA, 120 bp, Artificial Sequence
  ENSG00000267421_7 (sequence is synthesized)
agaactggagagcttcatcctgggagccaagggccttgctggctcacaggcagtgatgctgttacaccagtcatcacagatgcactgacctctgcacgcccagtcacactgcacgcctgg

SEQ ID NO: 866514 - DNA, 120 bp, Artificial Sequence
  ENSG00000267421_8 (sequence is synthesized)
tctccttactcttgaattgatttctttcaggtctcctggcctcagtgatggaattaagatgacttctatctctgaatccaagggtgactgaaagccgcaagctgcagaaaggacaaggtc

SEQ ID NO: 866515 - DNA, 120 bp, Artificial Sequence
  ENSG00000267421_9 (sequence is synthesized)
tgccgaccgggaagggaaaggcaatcttgggggcctccggagtccggaggatcactctgatgggtgatgtctcctggcctcagtgatggaattaagatgacttctatctctgaatccaag

SEQ ID NO: 866516 - DNA, 120 bp, Artificial Sequence
  ENSG00000267420_0 (sequence is synthesized)
aacacccctcccctccccttagtgaggaaggatttgggccgcagacctgggtggtctcaggactccagcggcctgttggggtgaagtggggtggggtcggggcgcggcacagcttcccaa

SEQ ID NO: 866517 - DNA, 120 bp, Artificial Sequence
  ENSG00000267420_1 (sequence is synthesized)
ggaagtcacaggacctcgcctcgggatattcagaagtgctagtccagttctggcagcctgaactcttcctcctccaaggggtgctgtactcggcgtgtgggttttgaagcagtgggcgtt

SEQ ID NO: 866518 - DNA, 120 bp, Artificial Sequence
  ENSG00000267420_2 (sequence is synthesized)
tggcggaggagaatgacggtattcatgtgtttctgggtggttgcctgaacaagggagttcagcctttgggagataaagcaggatatgaagcctgaccaggtgggaggtcctgatgccctt

SEQ ID NO: 866519 - DNA, 120 bp, Artificial Sequence
  ENSG00000267420_3 (sequence is synthesized)
cccaggactgggcactgcggtggccccagcacagggcagggcccacctgaagcagtgtgacctgctgaagttgtcccggcagcagaagcagctctgcgggagggagcccagcctggctga

SEQ ID NO: 866520 - DNA, 120 bp, Artificial Sequence
  ENSG00000267423_0 (sequence is synthesized)
gtcttacgcatcagcagtgaacacgtccttggcgtctcacctcctacctcctgaggcatagcaacaaacaccatgacacagcaacaaacatcatggcacatcattttccagtttttctca

SEQ ID NO: 866521 - DNA, 120 bp, Artificial Sequence
  ENSG00000267423_1 (sequence is synthesized)
atagtgagcactcaattgtttttgagagcaggtttttcgtggaaagcctctgaaacgtctacctggagctctctgtgtagttgtatggatacctccccaggtgtgcctctctgagaggac

SEQ ID NO: 866522 - DNA, 120 bp, Artificial Sequence
  ENSG00000267424_0 (sequence is synthesized)
ggccgctgccgcttccactgccactcccgctgcccgcagcgtccaggatggaggtgcgagggctgcgggaacgccgggagggagcttcccggccccgtcgtcctggtctgggacgaggta

SEQ ID NO: 866523 - DNA, 120 bp, Artificial Sequence
  ENSG00000267424_1 (sequence is synthesized)
ccgcggagatggagatgttgaagcagtgacgggctccaggagcagccaccggtagggcgtggcccagagccgagcgacaaaggtaaggcagctgggctcacagccccttttttctgagag

SEQ ID NO: 866524 - DNA, 120 bp, Artificial Sequence
  ENSG00000267424_2 (sequence is synthesized)
tgggagccaagtcgggccgcaggtgatatcatcttcgcagttggcgaacctggagatggcgagtggagagcaccgcggacaggagcgcgcgagaccagcaccaaggagagctcccgcggt

SEQ ID NO: 866525 - DNA, 120 bp, Artificial Sequence
  ENSG00000267424_3 (sequence is synthesized)
gccaggggcggagtccgggccatggacggagagatgtgccagcaagggactcagcgagacggcgacacaaatgtgccgacaaacatatacagagacagacagagataacccaggcaaagg

SEQ ID NO: 866526 - DNA, 120 bp, Artificial Sequence
  ENSG00000267424_4 (sequence is synthesized)
cgcggacttgaggcgacaagctcctggtgaatacccggacccagcctcgccgtcgcccccgtcgtccagcaggggtcgctgttacccagcgaccgcgccctccgggaccttggggccaga

SEQ ID NO: 866527 - DNA, 120 bp, Artificial Sequence
  ENSG00000267424_5 (sequence is synthesized)
tactggccaccaccccttgggaagcccttctgtcccccagtgccaagactgggagttcggagggctcggacactctcctctccaactttgggaagcatggtgggtttggcctcacctgtg

SEQ ID NO: 866528 - DNA, 120 bp, Artificial Sequence
  ENSG00000267429_0 (sequence is synthesized)
agaatcatccagagctcctgtgctataatggcagtttgaaccgctggagccgagatttgagccccgggacccatcagtcctgctggaccgtctgtgaaactggtcctgaacccagtgacc

SEQ ID NO: 866529 - DNA, 120 bp, Artificial Sequence
  ENSG00000267429_1 (sequence is synthesized)
tccgcctctgggggcaattccatctccagtggtttttgccacaggctggacagggtcgaagttgcttcgtcttgctgcctgggcaatccttaaaatgccctggcctgccacatcaatagc

SEQ ID NO: 866530 - DNA, 120 bp, Artificial Sequence
  ENSG00000267429_2 (sequence is synthesized)
aactagcagatgcaccttggggattctggatgttgcaagcctgcaaagctgctgctagagcctctgtccgtctcccgagcttgctctctttcttttgggcatcctcctcctggtccatat

SEQ ID NO: 866531 - DNA, 120 bp, Artificial Sequence
  ENSG00000267429_3 (sequence is synthesized)
tattaaagaccgaagtggccactttcaggaggctctctaaggtgctgtctggtcctgtaccttggttttgtagtttccttctactatcaggagctgccttgtgtaataaacttgtccttc

SEQ ID NO: 866532 - DNA, 120 bp, Artificial Sequence
  ENSG00000267429_4 (sequence is synthesized)
attacgggataaggaggtatactctattagtgcctttccataaaggctacaggagtcttatctggcttttggtccattatagacagtttagagtatgataccttgttttaacctgaattg

SEQ ID NO: 866533 - DNA, 120 bp, Artificial Sequence
  ENSG00000267429_5 (sequence is synthesized)
gtatgataccttgttttaacctgaattgactctcccttagctgagagagccagacagacaccatcttggctccttcacttacagccccttactcacccccttcctcaaggacttaacttg

SEQ ID NO: 866534 - DNA, 120 bp, Artificial Sequence
  ENSG00000267429_6 (sequence is synthesized)
gataagatactgtggcaagctatatctgcagttcctaggaatttgcccagttgatagcacccagagccccccgcgtttgtgtccggttgataacacccaaagccccgcgcctatcacctt

SEQ ID NO: 866535 - DNA, 120 bp, Artificial Sequence
  ENSG00000267429_7 (sequence is synthesized)
gcctatcaccttgtgatggatttaaaacccctgcacctggaaccgtttgctttcctgtaaccatttatcctttttactttttgcctgctttatttctgtaagattgttttaactagactc

SEQ ID NO: 866536 - DNA, 84 bp, Artificial Sequence
  ENSG00000267429_8 (sequence is synthesized)
cccccaaccccttcttcagggccgagagaatcttgagcactagccgtctctcggtctctggctaataaaggactcctgaatttg

SEQ ID NO: 866537 - DNA, 120 bp, Artificial Sequence
  ENSG00000249631_0 (sequence is synthesized)
agacagactatgaagagatacatagggtgagaaacggaggccttcagccaacagctgggagaagctgagtcccatcagccattcaaaagactgcagccccagccaagagtttgatgtaac

SEQ ID NO: 866538 - DNA, 120 bp, Artificial Sequence
  ENSG00000249631_1 (sequence is synthesized)
ctcaggagagaccctgagccagaaccacctagaaatctccaagtgagaagaccttacttgtcttctgaaagtctggccaacgagctatacctagtgattccaaagtccacatatatttac

SEQ ID NO: 866539 - DNA, 120 bp, Artificial Sequence
  ENSG00000249631_2 (sequence is synthesized)
tctgttctcactgtacaaagtaaccactctgaagtcaaaaaagctgggatacatgaagactgccatcccttgagtcacttgccctgtagctgccactgttggaaaagggcttgcttctgt

SEQ ID NO: 866540 - DNA, 120 bp, Artificial Sequence
  ENSG00000249631_3 (sequence is synthesized)
gtccttgtgcccactttgaaaatccctgggaagtccttggagtcagatgagcaggcctccgccactctgccaaaaagtctgttcaggtatttttcctctggaaatgagctgactaggcac

SEQ ID NO: 866541 - DNA, 120 bp, Artificial Sequence
  ENSG00000249631_4 (sequence is synthesized)
gctacttctacttgaaaaagactgatgcttgtcttacaccattttgaggtcaccacagtacatgactcagaatcattagacaaatgttgattgaatatctcctacattccaaatactgtg

SEQ ID NO: 866542 - DNA, 120 bp, Artificial Sequence
  ENSG00000249631_5 (sequence is synthesized)
ctgtcatagaagagacacaacacactggtagaacacagcaatgaaatttgacttgtgatgtatgtccagaaaaagatagataacacattctctaaaagtttagaagaaatttttgtccct

SEQ ID NO: 866543 - DNA, 120 bp, Artificial Sequence
  ENSG00000249631_6 (sequence is synthesized)
tggattgtagtcttgactgattaagaaacagaacaacttagttgaatactgagcattgattcgcaatctaatggtgcctggggatgccacctgttttctcgcaattaaaatttaaaaaca

SEQ ID NO: 866544 - DNA, 120 bp, Artificial Sequence
  ENSG00000249631_7 (sequence is synthesized)
aaattatacaaagagcaattggagtttaaaacaactgtaaagaaaacaattagaacaaaaatccattaaattgaaaatagtaaaacaaagggaaaatgaacataataaaaaactgttttt

SEQ ID NO: 866545 - DNA, 120 bp, Artificial Sequence
  ENSG00000249631_8 (sequence is synthesized)
atcaaaagactaataaacaattttgattgaagacacaggttaccaacatcagaaatgaaagaggagatgatcaccaatcatcctgagacattaaaggataaaaacagaatactatttgta

SEQ ID NO: 866546 - DNA, 120 bp, Artificial Sequence
  ENSG00000249631_9 (sequence is synthesized)
actctatgcctacaaacttgacaactttcatgaaatggaccaattctatgaaaggtacaaactaccaaaattcccaaggagatataactaatttgaataaacctatttatgttaataaaa

SEQ ID NO: 866547 - DNA, 120 bp, Artificial Sequence
  ENSG00000249631_10 (sequence is synthesized)
caaagtttctcgttgctctaacaggaagtttcacatcactagagaagagagaagaaggacatttgtactgggaggagtcgaccggtcccagtaaggagaaagtagctacagcgtcatggg

SEQ ID NO: 866548 - DNA, 120 bp, Artificial Sequence
  ENSG00000249631_11 (sequence is synthesized)
tgagctgggtcccccaaaaaggaactttaagggaatggactgaatcaagtctgagatgtccccaaagcaagaccaaagaactgaggaagagaagcattcatcagaaaccaaaattcagct

SEQ ID NO: 866549 - DNA, 120 bp, Artificial Sequence
  ENSG00000249631_12 (sequence is synthesized)
acaagtgagcatccagatggaggtattatgaagaggaactgagactgagggcaaaaggtgccagccagaatcctggataggagagcaagaaccaggacctcatttaagagacaacctgct

SEQ ID NO: 866550 - DNA, 120 bp, Artificial Sequence
  ENSG00000249631_13 (sequence is synthesized)
taaggcagagtaagcacaaatgggcactcaacatcaatgaagtaacagcaaagtcacataataaaagcatggaattaagacaagctgaagattcggatgcaataaaacaaccacccatta

SEQ ID NO: 866551 - DNA, 120 bp, Artificial Sequence
  ENSG00000249631_14 (sequence is synthesized)
ttcaagtaggttaatgaacagacagtgtgtgcctataccacgaatttacaataataataagggtgctaataatcacatggaattgtagagtataatgaaaatatacacactggagagaaa

SEQ ID NO: 866552 - DNA, 120 bp, Artificial Sequence
  ENSG00000249631_15 (sequence is synthesized)
ttcaaaggtggacaaagtttctcgttgctctaagtaagtttaaaattgagccaaaaaggtcttgattgataagggtggctgatacatttttgaatgttttcactggcatgattcacaaaa

SEQ ID NO: 866553 - DNA, 120 bp, Artificial Sequence
  ENSG00000249631_16 (sequence is synthesized)
ttgtataaattgtatagtcccaggctatcccaccattaactgcctcatggggactgtctctaacttccccaggacttgatccatagggaaatgcttgcaagaataaaaagcattaatgaa

SEQ ID NO: 866554 - DNA, 120 bp, Artificial Sequence
  ENSG00000249631_17 (sequence is synthesized)
ctcaggagagaccctgagccagaaccacctaggagatgatgagctcctgggcaagactgaggtttgtgtcattttgcatccccagcaccgagaagagtacctggcacttattggtgcgca

SEQ ID NO: 866555 - DNA, 120 bp, Artificial Sequence
  ENSG00000249631_18 (sequence is synthesized)
aaaagtctgttcacacaaatgggcactcaacatcaatgaagtaacagcaaagtcacataataaaagcatggaattaagacaagctgaagattcggatgcaataaaacaaccacccattat

SEQ ID NO: 866556 - DNA, 120 bp, Artificial Sequence
  ENSG00000249631_19 (sequence is synthesized)
agtctgttcagagtccccaacccctgagccatggactgatatggagctatggtctgttaggaactgggctgcccaggaggagcaatggtgcttctacaatttccttataggaggagtgaa

SEQ ID NO: 866557 - DNA, 120 bp, Artificial Sequence
  ENSG00000249631_20 (sequence is synthesized)
gagtaagcatttggattggaccaggatttggagaacttgtcatgttgctctacgtgcatatgaaatacatcattgtaacttagaatgtgaattacagaacaaacatgaaagttagaaaaa

SEQ ID NO: 866558 - DNA, 120 bp, Artificial Sequence
  ENSG00000249631_21 (sequence is synthesized)
taagaattgataaaagcacccctaagggagctgatggcttacagaattacttccaagaggaaactctttcactcagatgactgcaaactggatcaaactgaactccacaagcacgctgca

SEQ ID NO: 866559 - DNA, 120 bp, Artificial Sequence
  ENSG00000249631_22 (sequence is synthesized)
ttttgaaaagtaattgtgctcaggatcgtcctggctgctgtgttgtaaacagactacctgggctaaagggcagaaggagatcagttatggcaatcctggctactgatgatgaaaacttgg

SEQ ID NO: 866560 - DNA, 120 bp, Artificial Sequence
  ENSG00000249631_23 (sequence is synthesized)
acccaggagttgcaatggaagcaatgaaaagagcagaagtttctggattcattttaaatttagaactgaccagtattaacaggtgcagtcttgtaaggtgattgagttatgatggctcca

SEQ ID NO: 866561 - DNA, 120 bp, Artificial Sequence
  ENSG00000249631_24 (sequence is synthesized)
ccttcacatgtgggattagcacccttttaagagggctccaagtggaagggagcactctcttgctcttctgctcttctgccatgtgagacggcagtgctcctcccctccagaggacgcaac

SEQ ID NO: 866562 - DNA, 120 bp, Artificial Sequence
  ENSG00000249631_25 (sequence is synthesized)
aataagatgccatcttggaagctgaaagcagccctcaccagatgccacttctgctagtgccttgatcttgaactttccagcctccagaatcatgagaaataaatttctattgttcataaa

SEQ ID NO: 866563 - DNA, 120 bp, Artificial Sequence
  ENSG00000249631_26 (sequence is synthesized)
caaaaatttctggatggaaaaaaggagatttgaggggcaaggctaaagccccccaaaccttcctcaggatgaacacaaaccccatctttattttcctgttgccactgttccatgttgctg

SEQ ID NO: 866564 - DNA, 120 bp, Artificial Sequence
  ENSG00000249631_27 (sequence is synthesized)
ggctctattccagcaaaattttggaaagcgttgctacagttctgctcatttctttctcacttcagaacaatgatgccctttccagataaagcatcttaattaaacagatgacatttgaac

SEQ ID NO: 866565 - DNA, 120 bp, Artificial Sequence
  ENSG00000249631_28 (sequence is synthesized)
cagatgaaaatcatatgaagacacagcatcatgtcaggcaatagagacaaaagcatcaacctttcgggatcatttgatggattaaacaggaaaaccaaaaatctccaagtgagaagacct

SEQ ID NO: 866566 - DNA, 120 bp, Artificial Sequence
  ENSG00000249631_29 (sequence is synthesized)
aacacctgttttcgaagtcctgaatctgtagtcataagattcagccctgtttccttccaaatcttgacttcatattcaaactagagaataaaaatttaaaaacaggcccttgtgcctagg

SEQ ID NO: 866567 - DNA, 120 bp, Artificial Sequence
  ENSG00000249631_30 (sequence is synthesized)
atgtagaaaaattactaattgttttcctatgtcccacgtaaaataccaaacagtttttaaccattatgaaaatgtatcgtaagacagcttcaaaataaagtattttcatgtaagtttaaa

SEQ ID NO: 866568 - DNA, 120 bp, Artificial Sequence
  ENSG00000249631_31 (sequence is synthesized)
taaatgtctctgacaaagacagaaatcaagggtaaattttagtgtggcatagattaattcactaactcaatatatatatatttacatagagagcatggatagatactagaaataaaacaa

SEQ ID NO: 866569 - DNA, 120 bp, Artificial Sequence
  ENSG00000249631_32 (sequence is synthesized)
aaaagacatggatgtgggggatcctgtgccatgtatttgaaacagtagctgccatataatatgctttcggtatatgaatgaattcaaaaggatattatcatgctcataccttctagatca

SEQ ID NO: 866570 - DNA, 120 bp, Artificial Sequence
  ENSG00000249631_33 (sequence is synthesized)
cgggttggcatctcagctttgtcatttactataacagtgaccttgggcaagttatttaaccactctctgcctcaatttcctgatcagtaaaatgagctaataatactttctttttatttt

SEQ ID NO: 866571 - DNA, 120 bp, Artificial Sequence
  ENSG00000184809_0 (sequence is synthesized)
cagatgtttttaaaaagagatgctaagcaaaaggcctgattatgaggaatgagccaaagtcatgcaaggcgtggggcgctatgggactgcgcagtgacgacccagtgaagtagatgcctt

SEQ ID NO: 866572 - DNA, 120 bp, Artificial Sequence
  ENSG00000184809_1 (sequence is synthesized)
gacgattcccatttcacggatgagacgactccggcacagagaagtcagagggcctgtcctgggtcacacagccacaggcggcccccagaacgggacttcagggtgcaccactgcacccca

SEQ ID NO: 866573 - DNA, 120 bp, Artificial Sequence
  ENSG00000184809_2 (sequence is synthesized)
gcagagacctccgcctggcacacagggaatgctggagcaatacttaaataggaacatacagtggcataagagagaccaacttggtgataactgatcataggattagaccaaggtgcagaa

SEQ ID NO: 866574 - DNA, 120 bp, Artificial Sequence
  ENSG00000184809_3 (sequence is synthesized)
gcaaacagaacctccataaaatgtaatgatgtcttgtgcctgcaatcctagtgctttcagaggccaaggtgggaagattccttgagctcaggagttcgagaccagcctgaacaacacaac

SEQ ID NO: 866575 - DNA, 120 bp, Artificial Sequence
  ENSG00000184809_4 (sequence is synthesized)
aagacctcgtatctatgaaaaaataaaaataataaaattagctgcacacctatttggtggcacacacctgtggtcccaggtactcgggaggctgagatgagatcatttgagcccaggaga

SEQ ID NO: 866576 - DNA, 120 bp, Artificial Sequence
  ENSG00000184809_5 (sequence is synthesized)
tcaaggctgcaatcagctgtgatcatgccactgccctccagcctggacaactgagcgagaccctgtctccaaaaaaagtaaaattaaaaaaaaaattaaaatgtgatggagtgcagagga

SEQ ID NO: 866577 - DNA, 120 bp, Artificial Sequence
  ENSG00000184809_6 (sequence is synthesized)
aaggtcagttgattctcactaagggttggacttcattggtgattttctgtctttttaagagttagaaactcctttttcaaatgaaacgtgtatggacctccaatgtcttcagccaggtca

SEQ ID NO: 866578 - DNA, 120 bp, Artificial Sequence
  ENSG00000184809_7 (sequence is synthesized)
gcttccagcccactgaacacccctgtcctgccatagccccagaggtaccaccttgggctctgcccagtgctgcttcaacacctccagatgggaggagagggacctttccttccagttcta

SEQ ID NO: 866579 - DNA, 120 bp, Artificial Sequence
  ENSG00000184809_8 (sequence is synthesized)
acccccacatcagtcaagggaaccctgtacaaaatgctgagaaagccaaagaaagtcagagtgcaggcagcttcttgtgacttactgcgggggctccttgtgtctcccctcctcctgcct

SEQ ID NO: 866580 - DNA, 120 bp, Artificial Sequence
  ENSG00000184809_9 (sequence is synthesized)
gttagacttctccttgctggctgggcccacgcgtggatgcacgggtgcggaggatgggaacccaggatcactcagcaacgtgcttcttgtcagcttcctgcaaaggggagaaatcacgcg

SEQ ID NO: 866581 - DNA, 120 bp, Artificial Sequence
  ENSG00000184809_10 (sequence is synthesized)
tcaaccagaagcttttaagtgaaaatctgaggacctcctaccttcatccaccagaatgctgcagctttcaaagtactttctagacaatgtcattcaagcttgtgataatcccactgggtg

SEQ ID NO: 866582 - DNA, 120 bp, Artificial Sequence
  ENSG00000184809_11 (sequence is synthesized)
ggatgagtgggaggtgttattatttcacagatgaaattgaggttcgttggtgactgagcacctcttgtcacctcactgtcccatgtccacaatggagatgcaggaaaggtgctttgaact

SEQ ID NO: 866583 - DNA, 120 bp, Artificial Sequence
  ENSG00000184809_12 (sequence is synthesized)
ttggtcagcacctagtaagccctcagtgcacgttagcactggtcattcggtagtgacccaggagctcatcactaggaagtggcggactgggaagcagaatcagacctccaaattcccccc

SEQ ID NO: 866584 - DNA, 120 bp, Artificial Sequence
  ENSG00000184809_13 (sequence is synthesized)
aggacctgtcgctcactctgctatttgagtgtccagcccagaagcattttcggatctccaaaataaagtcaaaagtgctagcaatgcttggtgaattaataacatgtgatgttggccagg

SEQ ID NO: 866585 - DNA, 120 bp, Artificial Sequence
  ENSG00000184809_14 (sequence is synthesized)
gaaatctgataggtgaggaggccggcgggccgcgcagggcggcgcgggctgggggacgcggcgggcggctccgggaggcgacgggacccccaggccggcagccgagtgaagaggcaggaa

SEQ ID NO: 866586 - DNA, 120 bp, Artificial Sequence
  ENSG00000184809_15 (sequence is synthesized)
ctgtctacaaatgctccggctccgaagccccgagggaaagagcatctttcacggagcaccaggaattgacgacggtggaatttgctcagatcccctgaggccggttctttgagtttctgt

SEQ ID NO: 866587 - DNA, 120 bp, Artificial Sequence
  ENSG00000184809_16 (sequence is synthesized)
ctggccctccgggagaaccgtcccaaagttaactttgaaaacactcacaggagagggaaggctgtggggtccttcgcttctcaaaccccagatgcccccggaaagaacaccgcccccgac

SEQ ID NO: 866588 - DNA, 120 bp, Artificial Sequence
  ENSG00000184809_17 (sequence is synthesized)
agtgcttggagagactggacttaagctcttgtcttcaacccagacccaaggactgcctgttcctttgcagaactgcctagtacacagagttaaacgtcgtgtagcttgtatgattgggaa

SEQ ID NO: 866589 - DNA, 120 bp, Artificial Sequence
  ENSG00000184809_18 (sequence is synthesized)
ggaagcagaaagtagaattctgaaataacataactgattttttttcaaccagcatggcagcttttcgtgtttggaagccttcagaatcatttcctaccctctcaaggaacccattcttta

SEQ ID NO: 866590 - DNA, 120 bp, Artificial Sequence
  ENSG00000184809_19 (sequence is synthesized)
gaggtacacaccgttcctgtcagagaggctatcttcctagtgctaaatgattttttgatgcactgaaaattaaattcacactcaaatttctgcatttgaggagattttcctgtacgctga

SEQ ID NO: 866591 - DNA, 120 bp, Artificial Sequence
  ENSG00000184809_20 (sequence is synthesized)
gctctgtcaaaagaggtatattgaagagagggtagttctgggaccatttgcaagacagcgcattgattggaagcctatacattctggagtgttggcttaatatgttgatcatcctttgag

SEQ ID NO: 866592 - DNA, 120 bp, Artificial Sequence
  ENSG00000184809_21 (sequence is synthesized)
gaaagagtgagactccatctcaaaaattaattaattaattaattaattaaaaaataaaacaacactgtgatgttaaggccctattttccaggatttatcatgattggttttattgagtaa

SEQ ID NO: 866593 - DNA, 120 bp, Artificial Sequence
  ENSG00000184809_22 (sequence is synthesized)
tttccaggatttatcatgattggttttattgagtaaagcctgggcaaaagacttaggtgtcaatttcgaaagactcatttaagtatctttttagaagtaacattatgtattattattgtt

SEQ ID NO: 866594 - DNA, 120 bp, Artificial Sequence
  ENSG00000184809_23 (sequence is synthesized)
atctcacgggctctgctggcttctgtgcttcgtctctcaaggccaaaatcaagatgtcatcagtgctgagctctggtgcaggatccacgtccaggctcactggggctgctggcagaattc

SEQ ID NO: 866595 - DNA, 120 bp, Artificial Sequence
  ENSG00000184809_24 (sequence is synthesized)
agctgtgtggggttgtaggaatgaagtccttgtttccttgctggctgttggccaggggctgccctcagcttctggaggccgcctgccctccctggttcatggcccatctcatcctgacag

SEQ ID NO: 866596 - DNA, 120 bp, Artificial Sequence
  ENSG00000184809_25 (sequence is synthesized)
gacctacctgaatcagccaggctaacctccccattttaaggtctgcagccttaattctacctgcaaagtcccttttgccatgtaatgtgccatattcacaggtgtcaggaatcagagggc

SEQ ID NO: 866597 - DNA, 120 bp, Artificial Sequence
  ENSG00000184809_26 (sequence is synthesized)
aggtatattgggggaccattattctgccaactacacagggccttatatggtctggctctgtgtccccattcaaatctcatcttgaattgtaatccgaattgtaacccccacgtgttgggg

SEQ ID NO: 866598 - DNA, 77 bp, Artificial Sequence
  ENSG00000184809_27 (sequence is synthesized)
cttgaattgtaatccgaattgtaacccccacgtgttggggggagggaccttgtgggaggtaattaaatcatgggggc

SEQ ID NO: 866599 - DNA, 120 bp, Artificial Sequence
  ENSG00000184809_28 (sequence is synthesized)
tcccccttttgctcaggactctccttcctgcagccaagtgaaggacaagtttgcttccccttccacaatgattgtaagtttcttgaggcctctccagaactatgagtcaattaaacctct

SEQ ID NO: 866600 - DNA, 120 bp, Artificial Sequence
  ENSG00000184809_29 (sequence is synthesized)
gaaaactttggaaccaagaatatttttatcagccatcctccagactcactcacgggttacctgaccgcactaaatccaaaatgagggtaaaaatccctgctgcaaattcctcctggcttt

SEQ ID NO: 866601 - DNA, 120 bp, Artificial Sequence
  ENSG00000184809_30 (sequence is synthesized)
gccatcttggccagtcattccaccaaaccgattgtgccttgcagataaaagtcgtaaaactgaaaggcaagtggcagatgcaaactgatttcctaattgatcccttggttcaacctgcat

SEQ ID NO: 866602 - DNA, 120 bp, Artificial Sequence
  ENSG00000184809_31 (sequence is synthesized)
ctacagggaagttactgtgtctggcacagtgctggacactgggatacaaacaaagggtgcatccaggaggtccttaagaagaagcagtcccagactgtagaagcctcccagaagaagaag

SEQ ID NO: 866603 - DNA, 120 bp, Artificial Sequence
  ENSG00000184809_32 (sequence is synthesized)
ggggagaagtgtgtgaatcatgactctgaagagcatgaagaaagatgtcaccgcagctgggggagtctcctcccaggtttcccagcccagctgcctcacctctggccagcaaggtccact

SEQ ID NO: 866604 - DNA, 120 bp, Artificial Sequence
  ENSG00000184809_33 (sequence is synthesized)
gcacacagaggtaaccactggaacaagcagctggaaacctcagcttctttccctgtaggctccaggagcttctaattcatgtctgttgtccacatgctgaggcttctatccatccctcaa

SEQ ID NO: 866605 - DNA, 120 bp, Artificial Sequence
  ENSG00000184809_34 (sequence is synthesized)
atcttcagcattggggctaccctatgccagctcaaggcccagctgagcccgcctggcccccaacttgcaccgtggagatggggacttggtcacagagattaaagtagacactgggggcag

SEQ ID NO: 866606 - DNA, 120 bp, Artificial Sequence
  ENSG00000184809_35 (sequence is synthesized)
cctccgcctggcacacagggaatgctggagcaatacttaaataggagcacacagcacgctgcactgtggggaccgctgtcctttggtctgcatgctgctcatcgcatctgggggagagga

SEQ ID NO: 866607 - DNA, 120 bp, Artificial Sequence
  ENSG00000184809_36 (sequence is synthesized)
atggaagggaacttaaataaggccacaggtaagtggattcatttgcttgggctgctataagacccacagactgggcagcttcactaacaggcatttatctgcccacagttctggaggcta

SEQ ID NO: 866608 - DNA, 120 bp, Artificial Sequence
  ENSG00000184809_37 (sequence is synthesized)
gaagtctgcaatcgaggggtcagcagggtggatttcttctgaggcctctgttaaatggtaaactgaggcaccataaaagttgagattttatttgttaaaaccccagtccaaacagcttca

SEQ ID NO: 866609 - DNA, 120 bp, Artificial Sequence
  ENSG00000184809_38 (sequence is synthesized)
aagtggttgggtacactactgagcaaacacagacaaagccagttaggcctcataagagatgtagatcttgcttgatttccaaacataagcaaaacttagcttcagctgtttcttgtaaat

SEQ ID NO: 866610 - DNA, 120 bp, Artificial Sequence
  ENSG00000184809_39 (sequence is synthesized)
ggctacattgaagaacaaggccagcccattagccctgaaactagggacttttcagcaggaaagactaaataaaacagctatacaattgtaatcaatcgcatgttttcttcgctttacttg

SEQ ID NO: 866611 - DNA, 120 bp, Artificial Sequence
  ENSG00000184809_40 (sequence is synthesized)
cgtgtgcaccctaggtttatcataaggttaaatgtcatggcgaatgtgaaaaaagccttttggaaacgatgtgtgtaaatatcattgcagtcaccttataaaaaggaagtttgaggagaa

SEQ ID NO: 866612 - DNA, 120 bp, Artificial Sequence
  ENSG00000184809_41 (sequence is synthesized)
aagggaaagcagcactctcttacgccccaggcaaatcgtggctgaaccaaatacaaccctgcgatgagcattcctggtgccccacagcttcccgcagatggcagatggtccatgctgtgg

SEQ ID NO: 866613 - DNA, 120 bp, Artificial Sequence
  ENSG00000184809_42 (sequence is synthesized)
gaggaagactcgtgtgtgcatatatatgaggctgccctgacagaccaggccaatcctgcttcccggtgactgtggcttccttgtctctaggaggcctcggttcaattaacttagcagatg

SEQ ID NO: 866614 - DNA, 120 bp, Artificial Sequence
  ENSG00000184809_43 (sequence is synthesized)
tttatgaggcactgaatatgtgtagcctagaaggtccatgagagaatgaagggccctgggtctgatttaggcaaccccgtatacctagcccctacgacacatctgtgtggcaccaacata

SEQ ID NO: 866615 - DNA, 120 bp, Artificial Sequence
  ENSG00000184809_44 (sequence is synthesized)
gcctcccaataaatatctgattgacagcagactatcaggcactgggctagggacaagggtcagagtgcagcaaaaggcgaccatcgcgtagatgctaaccactcaccgcatgcactttgt

SEQ ID NO: 866616 - DNA, 120 bp, Artificial Sequence
  ENSG00000184809_45 (sequence is synthesized)
tgagatagaagcaaaattctctaagcacagagaagaatgtgattcattctgctctgtcattaagggcagggaagtgctgctcagggatggccgtggaagctgggccttccaggacaggtg

SEQ ID NO: 866617 - DNA, 120 bp, Artificial Sequence
  ENSG00000184809_46 (sequence is synthesized)
agattttaacgtaatggcgagctaaagaacaggtgttcccagcagcagcagcagcacacaagaaagcatgcaaatgaggacatgtgcgggggcaatgtttcctgtggctgctggaataaa

SEQ ID NO: 866618 - DNA, 120 bp, Artificial Sequence
  ENSG00000184809_47 (sequence is synthesized)
tcccattttacagatgagaaaactgagccacagaggaaccaaataattggccctggtaaagcaatctcctgacaaacagaaatagcctgaagttataacatgcgcatattccttgttagt

SEQ ID NO: 866619 - DNA, 120 bp, Artificial Sequence
  ENSG00000184809_48 (sequence is synthesized)
tagtgcacctaatttctcccccactttttgggctgacttaggacttcgttgggttttgttttggttttcgttttgagacagagtctcactccatcacccaagctggagtgcagtggcaca

SEQ ID NO: 866620 - DNA, 89 bp, Artificial Sequence
  ENSG00000184809_49 (sequence is synthesized)
tcccacctcagccccccgagtagctgggattactcctcttttctgtagagatggggttttgccgcattgaccaggctggtcttgaactc

SEQ ID NO: 866621 - DNA, 120 bp, Artificial Sequence
  ENSG00000184809_50 (sequence is synthesized)
ccccctttttatcattaacagtatgaatctacagggaagggagagaattaggcctacagagcttcccactttagcctgaagtgaatgagaagctggcagtatttagcatagatgtatttc

SEQ ID NO: 866622 - DNA, 120 bp, Artificial Sequence
  ENSG00000184809_51 (sequence is synthesized)
aaagaaggaaatccataaagccataattagcccctgagctggaagccagatgaaattcctttaaaacagagataaggaactaattatcctactttcatctcaggcaaaacaccaagaaat

SEQ ID NO: 866623 - DNA, 120 bp, Artificial Sequence
  ENSG00000184809_52 (sequence is synthesized)
agggtgaagagcaataagaaaaattaattagaggcaaagtaaatatggaaaagggagatcgatgcaaaaaggagggagctcttctcttgagggccaggaaaagcctgccgcccatttccc

SEQ ID NO: 866624 - DNA, 120 bp, Artificial Sequence
  ENSG00000184809_53 (sequence is synthesized)
aaatttcctcctcttttacagactcaacaacatgacttagaaaggcttgtgtggtttgtgcattctagggtggtcttcacggaagtctgtaccctggctgttcaaaatgcatttagaaaa

SEQ ID NO: 866625 - DNA, 120 bp, Artificial Sequence
  ENSG00000184809_54 (sequence is synthesized)
aaaccaaaaaccactaaacagagtccgggatctcacgtgtgacaacttggggagaccctgtctgcacagttttataatgcaggccttctcagagcctttattgtgagctgacaattgatg

SEQ ID NO: 866626 - DNA, 120 bp, Artificial Sequence
  ENSG00000184809_55 (sequence is synthesized)
tgcaagaggagcatagggaatgcaatatttcccaagcatctgaaaatgaaacccatttttcaaagattgtgttgtaggactagagtttcaagagctctgctttgggtcatggtgttctaa

SEQ ID NO: 866627 - DNA, 120 bp, Artificial Sequence
  ENSG00000258285_0 (sequence is synthesized)
ccggtttcgcgcactgcgcggctaggggagcgccccgccccgccccggcccggaaaccgccgggaaggggaccccggagcccaccgctctggagtccccgttcgtgcagcagtgctcacg

SEQ ID NO: 866628 - DNA, 120 bp, Artificial Sequence
  ENSG00000258285_1 (sequence is synthesized)
tacctcgtcccttccgcacacctgctggatctggaaggaagcaggataagttaatgagatgtccaccagagggcctggcgtggacacagcacatggccacagaggctggtgggcgctatg

SEQ ID NO: 866629 - DNA, 120 bp, Artificial Sequence
  ENSG00000258285_2 (sequence is synthesized)
gaatcttgtcccctggagaggcacacagccagggcagaacatcaaggtcaaggctctcctgaaggctctgcagtgcttagtgacaccaccatcaatgaccgtcaggtatcaggaaaccat

SEQ ID NO: 866630 - DNA, 120 bp, Artificial Sequence
  ENSG00000258285_3 (sequence is synthesized)
ttggcacctcctctggaacgaaggtgtggccggccacttgagatctggctgttgaggcagaggtagtgcatgtgacccacgcggtgagaggtctgctccccgctgctgcagccatctgcg

SEQ ID NO: 866631 - DNA, 120 bp, Artificial Sequence
  ENSG00000258285_4 (sequence is synthesized)
gcagaaatgtgtccgtccccacggacagcctggcttagctgtccgtggctgtctcctgcggtggaggagcacactggagtggcccgtgcagtggaccagagcttccacccacactgtgtt

SEQ ID NO: 866632 - DNA, 120 bp, Artificial Sequence
  ENSG00000258285_5 (sequence is synthesized)
ctgtctcctttcctagaacacaactggacgtttcccacctccgtgcaaaatgagtggacataaggggtgccacttccacacctggctcatggaagctcccagatggtctcagccctccat

SEQ ID NO: 866633 - DNA, 120 bp, Artificial Sequence
  ENSG00000258285_6 (sequence is synthesized)
gctccccgctacttcaggcgggatggagatggacggctcaggttgctctgatgcctgcctgcataagggctgccctgccagcccattcccctgcccaatattatggaagcaaaaacgttc

SEQ ID NO: 866634 - DNA, 120 bp, Artificial Sequence
  ENSG00000258285_7 (sequence is synthesized)
tatggtgtttgagccattgttgcttttcgggtctatttattacagaactagcagagccctaatacagtcattgctacgtggccataatacatgtattctataattgcgcctaattttatt

SEQ ID NO: 866635 - DNA, 120 bp, Artificial Sequence
  ENSG00000258283_0 (sequence is synthesized)
aaagggaagcttagatttattgagcgcctactgtgtgccaggcagtgtgcaaggcgctttacatacattatcgcattaaatcctcacaacaaccctgcgaggtaggtgtttataaacccc

SEQ ID NO: 866636 - DNA, 120 bp, Artificial Sequence
  ENSG00000258283_1 (sequence is synthesized)
gtgatgtggccaagttcacatggctaataaatggcagacagaggaggtgagccctccttctgctttgttggttgttgctggacctatgcctcttctcccaagaacccctctgtcatctga

SEQ ID NO: 866637 - DNA, 120 bp, Artificial Sequence
  ENSG00000256538_0 (sequence is synthesized)
actgattcctgctaaacttgcatcatctgatggcctgtgcatccaaagaactgaggttatttttaggaagaaagaacagtgctctgctgtatacagtgaggagcaaggaaagcacgtccc

SEQ ID NO: 866638 - DNA, 120 bp, Artificial Sequence
  ENSG00000256538_1 (sequence is synthesized)
acacacagacccacagataaatgggtgtggagagaaaaatagttatttagagatgatagccaggtttcagttaaaactagaagaatggctctgtgagacaggccctccactctcctgtag

SEQ ID NO: 866639 - DNA, 120 bp, Artificial Sequence
  ENSG00000256538_2 (sequence is synthesized)
atcctgttgtaagtgatgcagaagccagagagaaggttgctctccatcggaaacatgaggagtttcggagacctccctaaaatatttggcctgaaagggtttgaagccaggaggagagat

SEQ ID NO: 866640 - DNA, 120 bp, Artificial Sequence
  ENSG00000256538_3 (sequence is synthesized)
gcagtcttaggagaaacgtttcatgagctgtagcaggtaccctatcagtctttctcagaataaagaagcctatattcataagaatgctgattcttaaagggctagaaaggccagttgaag

SEQ ID NO: 866641 - DNA, 120 bp, Artificial Sequence
  ENSG00000256538_4 (sequence is synthesized)
aaggccagtctgtagagatgcctgggaattctttgatctttttggaggctaaaggaagtaaaattctgctatggaaattgtcctattatatttctgctttcaagaagtggctacaagatt

SEQ ID NO: 866642 - DNA, 120 bp, Artificial Sequence
  ENSG00000256538_5 (sequence is synthesized)
atgaggttttgcaatgttgccctcctagtcctgtgtacattgctgtaaagactcccaggcatggaggccatcactggcactgttcctctcagcagttatttgggtgtgaagttcctcact

SEQ ID NO: 866643 - DNA, 120 bp, Artificial Sequence
  ENSG00000256538_6 (sequence is synthesized)
cctgcaagactcagcctgaaggagcatgtctacatgacccacctgcacaatctccccacttgtcagtaacagctgtgaaatctgcccctgttgtctttagaaactgaaagatggaaaaga

SEQ ID NO: 866644 - DNA, 120 bp, Artificial Sequence
  ENSG00000256538_7 (sequence is synthesized)
tctcagatgctgtgacccccatgtaacagatggaggaattgaatccaagagatgaagtgaccactttgcctaaaatcaaatagccatgtagcagccgagctaaaacaaacattcagtcct

SEQ ID NO: 866645 - DNA, 120 bp, Artificial Sequence
  ENSG00000256538_8 (sequence is synthesized)
cctgaatcctaactcagtgattttctcttaatatcatataataacatccattgttttcctgagtctcccctatcattttactattcttcttgatccattcatattagtttttttttcttt

SEQ ID NO: 866646 - DNA, 120 bp, Artificial Sequence
  ENSG00000256538_9 (sequence is synthesized)
aatcaaaatttgatatttacataagtatgatataaaataacttatatctatatttaataatttcttattttagttgatgctttcaaaaactgccagaaaacagatttttttgccacaagc

SEQ ID NO: 866647 - DNA, 120 bp, Artificial Sequence
  ENSG00000256538_10 (sequence is synthesized)
cagatttttttgccacaagcagttacagtttcatcttcatattccctctcttaacatgctgaaaaattaagcatacatagaaatgctaattagagttgtcttccttgtcaatgctgtgat

SEQ ID NO: 866648 - DNA, 120 bp, Artificial Sequence
  ENSG00000256538_11 (sequence is synthesized)
taaagagtgtcaaaatcctggcaagaaaatgtttcttaaagtcatagctgatgctagacactaagtaagtcaagtttcctattccatagtgaaaaagaaaaaaagcttttacgtctaaat

SEQ ID NO: 866649 - DNA, 120 bp, Artificial Sequence
  ENSG00000256538_12 (sequence is synthesized)
tcagtttcagtaaaagggaaagccttatatccaggtcaagatccaatccactaagatttgaatctattgagatattatatcttagaattcagagcttagcatgcttaatatttagaaaca

SEQ ID NO: 866650 - DNA, 120 bp, Artificial Sequence
  ENSG00000256538_13 (sequence is synthesized)
tgttaaaaagttaaaagtgctgcacagttagaatgacttcactgcaaaggtgaatattttcaaaggattctgattccattttgacagctttctttacttgacactcataggccccacact

SEQ ID NO: 866651 - DNA, 120 bp, Artificial Sequence
  ENSG00000256538_14 (sequence is synthesized)
tactaaagggctgagttggtaccacagcactgaaaggtacatcctttggttattaaaaggagtatgatgaaaagtgttacttgggaacatgtgggacttcctcttgattgattaaaaaaa

SEQ ID NO: 866652 - DNA, 120 bp, Artificial Sequence
  ENSG00000256538_15 (sequence is synthesized)
tactgttttcctccctcactgataatctcactccatgttgccaatattatagcagttttctgtatgatttcttacttgaaaacgctatggtagaagtgagagtctgagtttttttcctgg

SEQ ID NO: 866653 - DNA, 120 bp, Artificial Sequence
  ENSG00000256538_16 (sequence is synthesized)
ctcactcttaaatgtatccccaatatctctttcattttctaaactggggaggaaattaggaccccagcttccaactatcttaactgtattcagtaaaactttttttctacttaaaaaatt

SEQ ID NO: 866654 - DNA, 120 bp, Artificial Sequence
  ENSG00000256538_17 (sequence is synthesized)
tttattaaacaccaaataattataagcattggtttataattttacatggctcaagcaaaatgaaaatttttaaataagatacagaatatttcaaattttctctttcattttctgcaaggt

SEQ ID NO: 866655 - DNA, 120 bp, Artificial Sequence
  ENSG00000256538_18 (sequence is synthesized)
atctagtcctaatttgggaaagccagaaactttctgtaaagttatagagaaactttttaagtgtccagtgccactaaattttagcatagacatgtgcgctgaaaaaaatctagagttata

SEQ ID NO: 866656 - DNA, 120 bp, Artificial Sequence
  ENSG00000256538_19 (sequence is synthesized)
cccaagaaaatgtttttgtgctaaagtttaaattacagagagtagaactcttcatctgaggtttttcactgccttaagagattgagagggattcaatgctgccacgtgagccagccacac

SEQ ID NO: 866657 - DNA, 120 bp, Artificial Sequence
  ENSG00000256538_20 (sequence is synthesized)
aagcgaacactcctacaacagaggatgcagcagtaaggcaacttcttggaagccaagatggagcccttaccagacatcaaacctgctggtgccttgatcttggacttcacctccagaact

SEQ ID NO: 866658 - DNA, 120 bp, Artificial Sequence
  ENSG00000204904_0 (sequence is synthesized)
ttaccctgcagtgtataggatgtacaggatgaaaagatcccaagtgaggaccccaatcaggaggctgataaggaatgttaatctggattgggaagattccatggcactaggctgtaccac

SEQ ID NO: 866659 - DNA, 120 bp, Artificial Sequence
  ENSG00000204904_1 (sequence is synthesized)
tacatgttttattggtgatgcccaagcttatccctgaacactgggaaaagtgggaagatgtcaagagataaaagacagaggatgacagatctgagagggaccgagtgactaactttcctc

SEQ ID NO: 866660 - DNA, 120 bp, Artificial Sequence
  ENSG00000204904_2 (sequence is synthesized)
tgcaagctcaaagcaagaagttgactgctttttcatttgaactctgccccagcatcaacaaatcaccactctgggtttatgcaacttgtttcctaattgaataaaataagcctgaatatg

SEQ ID NO: 866661 - DNA, 120 bp, Artificial Sequence
  ENSG00000236305_0 (sequence is synthesized)
gcgctgctccagctccacgtgcgcccggggatgcaatgcagccctgcagacaagcgtctccggcaggacgtgggccgcgggtctcggagcctccttcacttaggaatcctccggaatccg

SEQ ID NO: 866662 - DNA, 120 bp, Artificial Sequence
  ENSG00000236305_1 (sequence is synthesized)
acgccagcagtcggaggcctggggcgtgctgcccacgtgactgacggccgggaaggaaagatggcggcgactatgatggcttcagagagagggcaaccaacgagaggacgccgcccgcca

SEQ ID NO: 866663 - DNA, 120 bp, Artificial Sequence
  ENSG00000236305_2 (sequence is synthesized)
gagcgtccacaccgccgctttttctgcggttgcgtcctgggaaggcgcgaattgtgtggctacgggcgggtcgtcctctccaccattttttaatggaaaaaataataattctcaaagacg

SEQ ID NO: 866664 - DNA, 120 bp, Artificial Sequence
  ENSG00000256287_0 (sequence is synthesized)
tagtagttaaatgtcatgttcgccttattagaaagaatgccttcaaatcagtattatcatgattaccatttatttaacatcttcagtatgcagggcatttataaaatctgtagaaattaa

SEQ ID NO: 866665 - DNA, 120 bp, Artificial Sequence
  ENSG00000256287_1 (sequence is synthesized)
ggaaacagtttcttcagaccttccagccacagtcagccctggtgacattgcatatcagcttctaaagggcctcgcacattccttggcttgtgatgtcccttccccatcatcaaagacagc

SEQ ID NO: 866666 - DNA, 120 bp, Artificial Sequence
  ENSG00000256287_2 (sequence is synthesized)
aacgaaacttcaggctaccatacctgcttcaactgtaggagaatcttagttctggagagttgaccctccaggcgaagcattaggctttgatacaatttgtctggtaccggctgtagatct

SEQ ID NO: 866667 - DNA, 120 bp, Artificial Sequence
  ENSG00000256286_0 (sequence is synthesized)
agtgtagtcttgtgtctaagctggtgtctggccaccaaaggcaggcgtgcagggccttggctactgcgctaggtctgctgatggccacaagcctttagtcccagctctgccttagcaatg

SEQ ID NO: 866668 - DNA, 120 bp, Artificial Sequence
  ENSG00000256286_1 (sequence is synthesized)
aagcctttagtcccagctctgccttagcaatgggggtgtctgaaggctcaggggatacacaggtcctctaggttcctggggagatgatgacggagtcttgctgtgttgccaggctggagt

SEQ ID NO: 866669 - DNA, 120 bp, Artificial Sequence
  ENSG00000256286_2 (sequence is synthesized)
caggagtggatactgaggagagcaaagatcacctggtgctcatcaagccggacttccagaggcaaagctccttaactgaagaattcagaaatgatccagtgcaggaccctgagaagccca

SEQ ID NO: 866670 - DNA, 120 bp, Artificial Sequence
  ENSG00000256286_3 (sequence is synthesized)
caggagaagaagaatccctaaagtgagagaaacctgggcccttgagtgactgcatggagaagagccccatcattgactcatgttagactgtgactgaaaaataaacctcttttgtgttaa

SEQ ID NO: 866671 - DNA, 120 bp, Artificial Sequence
  ENSG00000256286_4 (sequence is synthesized)
gacttccctattatccaaagcaggcatctggtaccagccttctttccccaaaatttataagtaactacaatttctatacagctccagaatgcatatacatcaaaactcattttgcacccc

SEQ ID NO: 866672 - DNA, 120 bp, Artificial Sequence
  ENSG00000256286_5 (sequence is synthesized)
ttgatgacatcaaggcaccagaatgcctaaaaatgtaatcatctatcatgacctacatagttaatatggtcccaacttacccttaagctcctgctctaaggtccatacacacccctaagg

SEQ ID NO: 866673 - DNA, 120 bp, Artificial Sequence
  ENSG00000256286_6 (sequence is synthesized)
aacatccactgcggtggactcagttctctcttgctgaggctcccactgaactcctctgcagcattatttctttctaataaaactttccttttcatccagtctatcattgatgggcattta

SEQ ID NO: 866674 - DNA, 120 bp, Artificial Sequence
  ENSG00000256286_7 (sequence is synthesized)
ggggtgtctgaaggctcaggggatacacaggtcctctaggttcctggggagatgatggaaagaagcttgcaataactaattagcagctccggccactggagaaagctcaatgccttgaga

SEQ ID NO: 866675 - DNA, 120 bp, Artificial Sequence
  ENSG00000256286_8 (sequence is synthesized)
agagctgaattaaagagtgagagtttcgaccaggagtggatactgaggagagcaaagatcacctggtgctcatcaagccggacttccagaggcaaagctccttaactgaagaattcagaa

SEQ ID NO: 866676 - DNA, 86 bp, Artificial Sequence
  ENSG00000256286_9 (sequence is synthesized)
ctattgtgaatagtactgcaatgaacatatgcacgtctttgaggaatcaagataacatgtccttcacagggacatagatggagctg

SEQ ID NO: 866677 - DNA, 120 bp, Artificial Sequence
  ENSG00000256286_10 (sequence is synthesized)
gaaagataacatgtccttcacagggacatagatggagctggaggccattctccttagcaaactaaactatgtaacaaacctatacttgtaccccagaacttaaaataaaagtttaaaaaa

SEQ ID NO: 866678 - DNA, 120 bp, Artificial Sequence
  ENSG00000256281_0 (sequence is synthesized)
catgagactaggaccagcttcactgaaatataatcttccttagccccaccttcagcaaactcattccaaaaggcccagagaagaaacttcaactatgccgagcgaagtctcaggtccaat

SEQ ID NO: 866679 - DNA, 120 bp, Artificial Sequence
  ENSG00000256281_1 (sequence is synthesized)
tggaagaacacagttcctccatggagacagtctcaagacctcttttggaacattttatattgcttgttttgatgcccagtttatggaattaaaaataaaacctctcactgaaatatgcaa

SEQ ID NO: 866680 - DNA, 120 bp, Artificial Sequence
  ENSG00000255427_0 (sequence is synthesized)
agtgtggaaattcttactcagaacacaaaggattgaagagtgcttggaggctgaactctggaaggactcttccctgaggcctcttggcatctggctcttgtttcttggagcggtggtatg

SEQ ID NO: 866681 - DNA, 120 bp, Artificial Sequence
  ENSG00000255427_1 (sequence is synthesized)
gcccacagtggaagaccacagcatgatgcatgaatttacatttcctcagacattctggtgctgatgaaggtaaagatggtgaggctgcgatgatggtttcagggatgggtgtgttgggcg

SEQ ID NO: 866682 - DNA, 120 bp, Artificial Sequence
  ENSG00000255427_2 (sequence is synthesized)
atggtcacattgtgggtgatgaatatgaccagaaagggaagactttcacagttcctacccgaactacaacatcgatattttcatttgtctttcctaggaactcttaccttaatcacctga

SEQ ID NO: 866683 - DNA, 120 bp, Artificial Sequence
  ENSG00000255427_3 (sequence is synthesized)
ccaatatgctgacgactaacatgttgcgccctgcctttcttccgggcctctctgccttgctgatctgttttgctggtgtgccctccactgtgctcttgggtctttgtctctcggtaaagc

SEQ ID NO: 866684 - DNA, 75 bp, Artificial Sequence
  ENSG00000256288_0 (sequence is synthesized)
aaggctctctgactgactccttcccagattttctcagcttagcagctgaagactgacgctgcccggtaactctca

SEQ ID NO: 866685 - DNA, 68 bp, Artificial Sequence
  ENSG00000256288_1 (sequence is synthesized)
cagcccgcctgcacccaggtgaaataaacgtgaaatttggtgccaaaacccgggtacatcttcctgaa

SEQ ID NO: 866686 - DNA, 120 bp, Artificial Sequence
  ENSG00000256288_2 (sequence is synthesized)
tgtgaaatttggtgccaaaacccgggtacatcttcctgaatcaggcttctgagaactgttccactttgcagtcctgttggatctatatcttgagaaataaattaaagagcttttccctcc

SEQ ID NO: 866687 - DNA, 120 bp, Artificial Sequence
  ENSG00000224294_0 (sequence is synthesized)
attcaatctgtgaggtggatgcgtgttggaaggaccccttttggtttctttttgctcagagctttcttttaataaattccgctctcctcacctttcaatgtgtccgtatgcctaattttt

SEQ ID NO: 866688 - DNA, 120 bp, Artificial Sequence
  ENSG00000224294_1 (sequence is synthesized)
cctggtcctgtgacaagaacctgattttagctgaactaaggagcgaaagatcctggatcattttggtgacccatactggtacatgaggaaagctcctattccagattctcagagtataga

SEQ ID NO: 866689 - DNA, 120 bp, Artificial Sequence
  ENSG00000224294_2 (sequence is synthesized)
ttctgactggattaccctggtccttgaagtatacctaggagatggaataacattgtataagcatccacgttgtcattaagaggaaagagtttccattaaaacagcaggtcacaaaaccct

SEQ ID NO: 866690 - DNA, 120 bp, Artificial Sequence
  ENSG00000224294_3 (sequence is synthesized)
cctgtgagaggaaccctctgtggaagaacagaatatgtcaccccaaaatatgaagaattgttgagctgaagatgattaagaagaagcggatgcaggaaagctctctgctctccctctatt

SEQ ID NO: 866691 - DNA, 120 bp, Artificial Sequence
  ENSG00000224294_4 (sequence is synthesized)
tgcttaaaagcaggataaacacttacaaagactaaagacgccacaatcaagaactcagaagggtagaagaaaaagatagtttcccttccctacacaggtgttgatcccttcataaatatt

SEQ ID NO: 866692 - DNA, 120 bp, Artificial Sequence
  ENSG00000224294_5 (sequence is synthesized)
atgcatgctaagccctatctcaaggtctacatccaggagaacccaacctgcaacattaagttactgactgtgcaagaaccctttgatcacgtaccttacagaccaagataagtgaggatg

SEQ ID NO: 866693 - DNA, 120 bp, Artificial Sequence
  ENSG00000224294_6 (sequence is synthesized)
cccatgtataacctgctgtctttctggtctcttatgtttttgtaccagaaagggacaactttttgggtaaccataggtctctagtatatctgtgattacaataaagatttttgatatacc

SEQ ID NO: 866694 - DNA, 120 bp, Artificial Sequence
  ENSG00000224294_7 (sequence is synthesized)
aaaactgatgaaccaaaattccactgaaatagcgagtaaatggagttcttttatcctttgcagtataccagggtgaactttttacatgatttcttgctccaaagggagaagtgttatgac

SEQ ID NO: 866695 - DNA, 120 bp, Artificial Sequence
  ENSG00000224294_8 (sequence is synthesized)
aaagtacatttaaggaccctaactgatcacagaaaaaatattaatggcattgggaaaaaaatgcagactaatgaatccactactaaattttatctatcttgtagctctaaaattgcactg

SEQ ID NO: 866696 - DNA, 120 bp, Artificial Sequence
  ENSG00000224294_9 (sequence is synthesized)
aagaatttaatttctcactcacattagccacatttcaagtgctcaacagacacatgtggctagtgtctaccatattggacagcatagatttaaagcacatttccatcattgcaacactgc

SEQ ID NO: 866697 - DNA, 120 bp, Artificial Sequence
  ENSG00000224294_10 (sequence is synthesized)
aatatggaggatgtatcctcaatacattgatattgccccctcaaaattcataacccctagatatcttatctctgtatgtgaggatagtgtattaacttgcacctggactgagatagataa

SEQ ID NO: 866698 - DNA, 120 bp, Artificial Sequence
  ENSG00000224294_11 (sequence is synthesized)
atgcttatctccagagatgtctgaaagtctggtactgacccttgtctaagataaggatggaatgtgctggttaatgatttatactgtgctatacaaagtccaaaattcctttggaggtat

SEQ ID NO: 866699 - DNA, 120 bp, Artificial Sequence
  ENSG00000224294_12 (sequence is synthesized)
cctctgctggcttgtctacattgtttaaggatggataggttgatggtttgcacctgctttaatcatttacacattctgattttatttgtgatcagtggaggataaaaccttcaataaact

SEQ ID NO: 866700 - DNA, 120 bp, Artificial Sequence
  ENSG00000224294_13 (sequence is synthesized)
tgtgtcttagcttccttgatattaagatatcttgcacatatcttagatttttataatctgaatgcaaagcacatcctttgcaattgagaaaggactctgtgagctgctcctggatatgtg

SEQ ID NO: 866701 - DNA, 120 bp, Artificial Sequence
  ENSG00000224294_14 (sequence is synthesized)
aaacccctcagtgactgaccgtattttctttcttctgctgtacttgcccttattaaagccttacatgtgaagtaagtcctttcaattgtctgactccgggtgattgttataccctttgat

SEQ ID NO: 866702 - DNA, 120 bp, Artificial Sequence
  ENSG00000224294_15 (sequence is synthesized)
atagtttggatatttgtgccttccaaatctcatgttgaaatgcgatcccctatgttggaggtggagcctagtaggaggtgttagggtcacgggaatggatccctgatgaatggcttggta

SEQ ID NO: 866703 - DNA, 120 bp, Artificial Sequence
  ENSG00000224294_16 (sequence is synthesized)
cacagtaatgagtgagtttgtgctttattagttactgtgagatttacttggtaaaaagagcctggcaactcctccctctcccttgctccctctcttgccatgtgacatgcttgctccagc

SEQ ID NO: 866704 - DNA, 120 bp, Artificial Sequence
  ENSG00000224294_17 (sequence is synthesized)
tgcaccttttgccacaattgtaagctttgtgagtccctcaacagaagctgagcaaatgctggcaccatgcttcttgtacagcctacagaactgtgaaccaaataaaacttttatttttat

SEQ ID NO: 866705 - DNA, 120 bp, Artificial Sequence
  ENSG00000259798_0 (sequence is synthesized)
acatgttttacttatttattggcattggcatttaaacacaattctgaaacatttttaaaatgcagaaaggtttccagagtaatacaagaacttctattaaatatctatcccatgcccaat

SEQ ID NO: 866706 - DNA, 120 bp, Artificial Sequence
  ENSG00000259798_1 (sequence is synthesized)
aatgtcctttatagcaaagggcccaatccaggatcacattctgcacccaattaccatgtctctctagtctccttcaacctggaacagttcttcgggatttcttgactttcatgatcttga

SEQ ID NO: 866707 - DNA, 120 bp, Artificial Sequence
  ENSG00000259798_2 (sequence is synthesized)
acagggtctcactctgtcacccaggaccatcttgaattcctggactcaagaaatcctctcacgtcagcctcccaaagtgctgggattatagccggaagtcaccgtgcccggccgtcatga

SEQ ID NO: 866708 - DNA, 120 bp, Artificial Sequence
  ENSG00000259798_3 (sequence is synthesized)
accgtgcccggccgtcatgaccttgatatttttaaagattacaggctggtcattttattttgttcttcaatttgggattgcctgatgtttcctcctgattagatccaatttaggtatctt

SEQ ID NO: 866709 - DNA, 120 bp, Artificial Sequence
  ENSG00000224292_0 (sequence is synthesized)
gacgttcacgcccgcacctttccggcctgtggcggtttcagccccagaccgtctgcctccggaggatttctggccatccaagaacaaacttccgaatctccaaatttccaagccttggaa

SEQ ID NO: 866710 - DNA, 120 bp, Artificial Sequence
  ENSG00000224292_1 (sequence is synthesized)
ttgtcaaacccactcaagttgagtcaacaatgacccacagcacctaccagaaatacttccctcaattgcaagacttggcatttaaaactggaagattcttaccacatgtgctcctgggct

SEQ ID NO: 866711 - DNA, 120 bp, Artificial Sequence
  ENSG00000224292_2 (sequence is synthesized)
ggatctaggttttaggatatataacgaacatctacaaatccgaagaggacaaacaatacacttggcaatagacattgggtacaaataggtaattcacagcagaagaaacctaaaatggtc

SEQ ID NO: 866712 - DNA, 120 bp, Artificial Sequence
  ENSG00000224292_3 (sequence is synthesized)
aatatgtataatatatgaaaagataacccaatctctttactgctcagggaaatgtaaaattaaaacaacagtgagatataataccattttacatctaccagatgttgtgcttcatatttt

SEQ ID NO: 866713 - DNA, 120 bp, Artificial Sequence
  ENSG00000224292_4 (sequence is synthesized)
tatcactggagcttagtagagggtggacactcaataaatgtctgtggtcattctaggttgtggtttctggggtgttttagatgagctctccataattaaagagatacaaattaaaaacaa

SEQ ID NO: 866714 - DNA, 120 bp, Artificial Sequence
  ENSG00000283914_0 (sequence is synthesized)
ggccctgaagaaagggctcctctctgacctagagcgaaggcctgccccgctgcctcccgagctctggtgacgggagctggaagggtgtccttcctgtccctacaccctgtcccagacact

SEQ ID NO: 866715 - DNA, 120 bp, Artificial Sequence
  ENSG00000283914_1 (sequence is synthesized)
ggaggaattcagtgtgtgctgacaagcatgggggaggtcctaaccctgagtgttgtgggggtgaaggggaccaaagagccccaggagcaggtaacacctcctctgctgcctgcttgctgg

SEQ ID NO: 866716 - DNA, 120 bp, Artificial Sequence
  ENSG00000283914_2 (sequence is synthesized)
gaacacctccactccctgcttccaccccagcccgggcacagggtcccggtcactccgtcctcaggactccaacggcctcagcacaaactcccacttcctcagcaccagttcagtgtccta

SEQ ID NO: 866717 - DNA, 120 bp, Artificial Sequence
  ENSG00000283914_3 (sequence is synthesized)
tggccagtgtgggccagctcatcagcactcacggcccgcaacccagccatgctcaccaccaccatgttcgtctccacgaaggtgggatcaactgagcagacggacaacaccagctcctgg

SEQ ID NO: 866718 - DNA, 120 bp, Artificial Sequence
  ENSG00000283914_4 (sequence is synthesized)
agtcctgggccaggtcctgaggtcccagcctggtgcctgggaagggggtttgcccctgagcagcctgtgctggctggaggatgcccagggccccaggtgagcaatgcctgctccttacct

SEQ ID NO: 866719 - DNA, 120 bp, Artificial Sequence
  ENSG00000283914_5 (sequence is synthesized)
gagccaccccaccctgctcatagacgtggaggtggcactcctgcccaaggaggagctgggagccccggcgccagcagtgacacatcactgagacagaaggagggcaggtcttggcattga

SEQ ID NO: 866720 - DNA, 120 bp, Artificial Sequence
  ENSG00000261242_0 (sequence is synthesized)
ggatgcagccgcgatctcgggcggtgcagccgccgcttccgcccggcagtggggcaagctgaagtgagaagccgctgggcctgagaggagctctttaattccgggaggtgtgcgactagc

SEQ ID NO: 866721 - DNA, 120 bp, Artificial Sequence
  ENSG00000261242_1 (sequence is synthesized)
ggatcagcgggctggctttccgtgctgtgcggagcctttgggcggcggtcgtcttggaccggaggattccaagggctcgggtcgtctaagggtcggggagccccggagacttgatcccgc

SEQ ID NO: 866722 - DNA, 120 bp, Artificial Sequence
  ENSG00000261242_2 (sequence is synthesized)
cctgcagctagtgtggcccctcagggtttggggagtcccactctggacgggaccctgtgatgcgtaggcaggaataagatcccccgcccgtgccggtgtgccactgcttgtgtaaatggg

SEQ ID NO: 866723 - DNA, 120 bp, Artificial Sequence
  ENSG00000261242_3 (sequence is synthesized)
ccccttgaaacccccagcagtcgctctccgctgaaccttcttcgaattttctctcacctcatctccttttccttaaacgtctgttttgaatatcagacccctgtagcgttgaagccagcg

SEQ ID NO: 866724 - DNA, 120 bp, Artificial Sequence
  ENSG00000261242_4 (sequence is synthesized)
aggtgggaacgctgtcgccacagtttgcagtctattcattcagaataacccgccagtcagccgactgctcagagctcggaaagacccagctccaaactaggagtttcgagattttaattg

SEQ ID NO: 866725 - DNA, 120 bp, Artificial Sequence
  ENSG00000261242_5 (sequence is synthesized)
gcaagttggacccgaaagagttaatggagaagactacttaaatctatctagaacaagtgatgagatatttggagatgtgtttgcatgcttggtgaatgcagacggccaaatggtacattt

SEQ ID NO: 866726 - DNA, 120 bp, Artificial Sequence
  ENSG00000261242_6 (sequence is synthesized)
ccagataatattcttggattaatgtatttgaatgcaccctacgtacattttttgagaggaaaaaaggaagaaagaaattattaatgctaactacaaacgtcagagtaccagttgttcaaa

SEQ ID NO: 866727 - DNA, 120 bp, Artificial Sequence
  ENSG00000261242_7 (sequence is synthesized)
acttagaaattggggggggggacaaaaaaattaacattcttattttctcaactcagagataaccacttacagtatttgcatacttccttttagtattttttctctttatgttaataatgt

SEQ ID NO: 866728 - DNA, 120 bp, Artificial Sequence
  ENSG00000261242_8 (sequence is synthesized)
gtgtcgatctgtagcctagttttttccctcagcattatatcatcttttcgatacggttagggaatagagctatatataaataaaactatatgtaccatatgtacaagtgacaacgaaaaa

SEQ ID NO: 866729 - DNA, 120 bp, Artificial Sequence
  ENSG00000240240_0 (sequence is synthesized)
gatcatttaaaagaaagtctctttcagtatgagagagagaaaacagaaggagtagtggttgtgagacaacttcaacaagaagtggctgacagcgtaaaaaaattaacgacgttagagtct

SEQ ID NO: 866730 - DNA, 120 bp, Artificial Sequence
  ENSG00000240240_1 (sequence is synthesized)
aacgacgttagagtctccactggaaggtatatcacgttgtcacattaatttggatgagacacaggcctcaaataagaaattatttcaagtgaaaagtcaaatataagaaactcctggaaa

SEQ ID NO: 866731 - DNA, 120 bp, Artificial Sequence
  ENSG00000240240_2 (sequence is synthesized)
tgacaataaatatgttaaatgtatttggaaatgaagactttgattgccatggagacttaaaaacagatcaactgaaaatggatattctgattaagaagctaaaacagaagtttgatgatc

SEQ ID NO: 866732 - DNA, 120 bp, Artificial Sequence
  ENSG00000240240_3 (sequence is synthesized)
ttacggcagagaaggaagctttatcttcaaaatgtgtcaatttggctaaagacaatcaagttcttcaacaggagtttttatctatgaaaaaagtacaacagcaatgtgagaaacttgagg

SEQ ID NO: 866733 - DNA, 82 bp, Artificial Sequence
  ENSG00000240240_4 (sequence is synthesized)
tagggtagaacttagtaaactacaagaatataaattggagctagatgaaaaggcagtgcaggcagtagaaaaattagaagaa

SEQ ID NO: 866734 - DNA, 90 bp, Artificial Sequence
  ENSG00000240240_5 (sequence is synthesized)
acaagcacaatatgaaaaacaattagagcagttaaacaaggataatatggcttcactaaataaaaaggaactcacacttaaagatgtgga

SEQ ID NO: 866735 - DNA, 82 bp, Artificial Sequence
  ENSG00000240240_6 (sequence is synthesized)
atggcttcactaaataaaagaaatgaaaactgcttatgaagaggttacaaccgaattagaagaatataaggaagcctttgca

SEQ ID NO: 866736 - DNA, 78 bp, Artificial Sequence
  ENSG00000240240_7 (sequence is synthesized)
acccataagaattcctatttcaagcccacagacttcaaataactgcaagaactcttagactgtgatggagctggactg

SEQ ID NO: 866737 - DNA, 120 bp, Artificial Sequence
  ENSG00000240240_8 (sequence is synthesized)
ataactgcaagaactcttagactgtgatggagctggactgtgtagaacaaataactagagaaacaaagagaattgttgctgtgttgaacacttgctcccgtctacttacttctctataat

SEQ ID NO: 866738 - DNA, 120 bp, Artificial Sequence
  ENSG00000240240_9 (sequence is synthesized)
ccactgccatggaatgagtgatttttcttagaagcagaggtggagccactgaggaagcacaggcgagccctccccagcacgtgctcactggtccccaacagaacaaccgctgccgcatcc

SEQ ID NO: 866739 - DNA, 120 bp, Artificial Sequence
  ENSG00000240240_10 (sequence is synthesized)
gtgctcactggtccccaacagaacaaccgctgccgcatccatgaggctcccattgtggtgggttgtgtcaccccacaatgtcactgttgctgagcccccatcgcctctgtgttgtggagc

SEQ ID NO: 866740 - DNA, 120 bp, Artificial Sequence
  ENSG00000240240_11 (sequence is synthesized)
aggaccgttttctaggtgagaggcacatctcaacacagctgactgatcagactcagccgttttgcacaccctggtcagaatgaaacattccttgggaactcgggccgtgagaagcatcct

SEQ ID NO: 866741 - DNA, 120 bp, Artificial Sequence
  ENSG00000240240_12 (sequence is synthesized)
tcctgatcacctgactgtagaaacatccttatcgcaccctcccgggcaaaggcccaacagcctgactgcaggaacatccttgccatatcctgccgggcagcaagctctaccgcccacacc

SEQ ID NO: 866742 - DNA, 120 bp, Artificial Sequence
  ENSG00000240240_13 (sequence is synthesized)
cctccttcccagtcccatgatcaccccagcctgtgagaggcagttggtgctggcagtaagctggtttcctcctctgcagggttttgctagtaataaaggtgttgctgttgaagccgtcaa

SEQ ID NO: 866743 - DNA, 120 bp, Artificial Sequence
  ENSG00000240240_14 (sequence is synthesized)
aataaggaaaataaatgcatttgaagccaatctctcttaattcaaagctcatttccatggtgacccatttggagcaggagtgcctgacattggcatctgggatcctgacaccattcataa

SEQ ID NO: 866744 - DNA, 120 bp, Artificial Sequence
  ENSG00000240240_15 (sequence is synthesized)
aagtgaatcaagcaagtttgtaccacccagagggaactgccacctgtattgggaagctctggcaactgtatctctgaaactcttaattcctcaaatgttaatgtttgccacaaatagtat

SEQ ID NO: 866745 - DNA, 120 bp, Artificial Sequence
  ENSG00000240240_16 (sequence is synthesized)
tgtgaaaggggattaggtgaaattaaagagatttcttgattattggacataaaatacagttttgtaatacttctcaaatacagatggtcatggagtctttctcttgcggtataatacttc

SEQ ID NO: 866746 - DNA, 120 bp, Artificial Sequence
  ENSG00000240240_17 (sequence is synthesized)
tgataaagcaaatattctttggaatatagtttaagagacactgctttagagatagtaatttagatcattaattaatgtaaaaaacttaaaatatttgctactgtgtcttagggttttagg

SEQ ID NO: 866747 - DNA, 120 bp, Artificial Sequence
  ENSG00000240240_18 (sequence is synthesized)
cccttgcctcaagaagctcttggtttcagtgggaaacaatgaaatgactacaatgtaccatgataagtgctgtgatcaaagcaaggattcttgggactagtaaatgtttaaagtgagttt

SEQ ID NO: 866748 - DNA, 120 bp, Artificial Sequence
  ENSG00000240240_19 (sequence is synthesized)
tggcaatgaccacagttaatccagggagacagaggagggttgtttgcaaggcaaagcacagcacatcagaaagcacagaggagtgagaatgaagggactgcttttcatttacttcctttc

SEQ ID NO: 866749 - DNA, 120 bp, Artificial Sequence
  ENSG00000240240_20 (sequence is synthesized)
tatattgtatgttgaagttcaaagcatcctggagaagattttcagttcagttgagaaatatgtaattttgtgaattattaattttttctgctgttttataggacaataataccccacttt

SEQ ID NO: 866750 - DNA, 120 bp, Artificial Sequence
  ENSG00000240240_21 (sequence is synthesized)
agaaaatggtggaatttttattgaaaaggaaagcaagttcacatgccgttgataggctgagacggtacagtagttctttttttaaaaataaaacctgagtattctagagtggtcactcaa

SEQ ID NO: 866751 - DNA, 120 bp, Artificial Sequence
  ENSG00000240240_22 (sequence is synthesized)
gagtattctagagtggtcactcaagtcagaaatattaataagaagattaacataattattggcatataatgaaaaatatcaccatgaataatcaggtagacaagcaaatatttggactga

SEQ ID NO: 866752 - DNA, 120 bp, Artificial Sequence
  ENSG00000240240_23 (sequence is synthesized)
gtaacataaagaatagtatatagtaggattcatcttctcttataatatacagagtttggtatttataatcagatgtttttcgtactgtaatcttttattagctaaagggttttgtattag

SEQ ID NO: 866753 - DNA, 120 bp, Artificial Sequence
  ENSG00000240240_24 (sequence is synthesized)
gattacaggcatgagacactgcacctgacaagttttattcattttcaaagtgtggacttttagtttatgactactagcattgtcattattattattgttgttgttgttgttttcagcctg

SEQ ID NO: 866754 - DNA, 120 bp, Artificial Sequence
  ENSG00000240240_25 (sequence is synthesized)
ttattattgttgttgttgttgttttcagcctgcagataactcttatctgacccctagctgatttgactaggaaagcaatggggaaatcttcatctaaatctttgcctactttagataagt

SEQ ID NO: 866755 - DNA, 120 bp, Artificial Sequence
  ENSG00000240240_26 (sequence is synthesized)
gtttcttggccatcaaaggactataagttagcaacttgtattatgtcttaccccagtgggacaagaggcttccctgttgtccctttcttttagccttggtgacaatttacaaagatgaac

SEQ ID NO: 866756 - DNA, 120 bp, Artificial Sequence
  ENSG00000240240_27 (sequence is synthesized)
acaaagatgaacacttgagcaccctagatgcttatagacccaagctagtacatgcaaatagttattacatctatactgacaggcggatattaaactggtaaagtgtatcaaactagcttt

SEQ ID NO: 866757 - DNA, 120 bp, Artificial Sequence
  ENSG00000240240_28 (sequence is synthesized)
ttaaaaaagtctttattaaagttcttgagtggagttatttctttgttgttttaggtcagctctcatgcttgctgtatactatgactcaccaggtattgtcaatatccttcttaagcaaaa

SEQ ID NO: 866758 - DNA, 120 bp, Artificial Sequence
  ENSG00000240240_29 (sequence is synthesized)
tattgatgtcttcgctcaagacatgtgtggacgagatgcagaagattatgctatttctcatcatttgacaaaaattcaacaacaaattttggaacataaaaagaagatacttaaaaagga

SEQ ID NO: 866759 - DNA, 120 bp, Artificial Sequence
  ENSG00000240240_30 (sequence is synthesized)
aagttctgatgaatctgcagtcagcattttccatgaactgcgtgtggattcattgcctgcatcggatgacaaagacttgaatgttgctactaagtgtgtccccgagaaagtgtcagagcc

SEQ ID NO: 866760 - DNA, 120 bp, Artificial Sequence
  ENSG00000240240_31 (sequence is synthesized)
gatcttcgcatgaaaaaggaaacagaatagtcaatggacaaggagaagggcctcctgcaaaacatccttccttgaagcctagcactgaagtagaagatcctgctgtgaaaggagcagtac

SEQ ID NO: 866761 - DNA, 120 bp, Artificial Sequence
  ENSG00000240240_32 (sequence is synthesized)
aaagaatgtacagacattgagagcagaacaagccttaccagtggcttcagaggaagagcaagaaaggcatgaaagaagtgaaaagaagcaaccacaggtcaaagaaggaaataatacaaa

SEQ ID NO: 866762 - DNA, 82 bp, Artificial Sequence; identical to SEQ ID NO: 581633
  ENSG00000240240_33 (sequence is synthesized)

SEQ ID NO: 866763 - DNA, 80 bp, Artificial Sequence; identical to SEQ ID NO: 581634
  ENSG00000240240_34 (sequence is synthesized)

SEQ ID NO: 866764 - DNA, 120 bp, Artificial Sequence
  ENSG00000240240_35 (sequence is synthesized)
aaaacaacttgaaccaactgttcagtcactagagatgaaatcaaagactgcaagaaatactccaaatcgggattttcataatcatgaagaaatgaaaggtctgatggatgaaaattgcat

SEQ ID NO: 866765 - DNA, 120 bp, Artificial Sequence
  ENSG00000240240_36 (sequence is synthesized)
tttgaaggcagatattgctatactcagacaggaaatatgtacaatgaaaaatgacaacttggaaaaagaaaataaatatcttaaggacattaaaattgttaaagaaacaaatgctgccct

SEQ ID NO: 866766 - DNA, 81 bp, Artificial Sequence
  ENSG00000240240_37 (sequence is synthesized)
gctgagaatacaaggctcaatgccgaactgttgaaggaaaaagaaagcaagaaaagactggaagctgacattgaatcttat

SEQ ID NO: 866767 - DNA, 120 bp, Artificial Sequence; identical to SEQ ID NO: 786471
  ENSG00000240240_38 (sequence is synthesized)

SEQ ID NO: 866768 - DNA, 120 bp, Artificial Sequence
  ENSG00000240240_39 (sequence is synthesized)
aacacgagatgtttctgtacaagtagaaatgagttctgctatttccaaagtaaaagatgagaatgagtttcttactgaacaactttctgaaacacaaattaaattcaatgccttaaaaga

SEQ ID NO: 866769 - DNA, 120 bp, Artificial Sequence
  ENSG00000240240_40 (sequence is synthesized)
taagttccgtaagacaagagatagtctcagaaaaaagtcattggctttagaaactgtacaaaacgacctaagccaaacacagcagcaaacacaggaaatgaaagagatgtatcaaaatgc

SEQ ID NO: 866770 - DNA, 120 bp, Artificial Sequence; identical to SEQ ID NO: 786474
  ENSG00000240240_41 (sequence is synthesized)

SEQ ID NO: 866771 - DNA, 84 bp, Artificial Sequence
  ENSG00000240240_42 (sequence is synthesized)
gttattcggcttcgggagccgcaggggccagacggcccagggctccatagaccacgtctacacgggttccggataccgaatccg

SEQ ID NO: 866772 - DNA, 120 bp, Artificial Sequence
  ENSG00000240240_43 (sequence is synthesized)
caaaggcgacgccgcggaggtggagcgctgcttggcgcgcaggagcggagacctggacgccctggacaagcagcacagaactgctctacacttggcctgtgccagtggccatgtgcaagt

SEQ ID NO: 866773 - DNA, 120 bp, Artificial Sequence
  ENSG00000240240_44 (sequence is synthesized)
ctgtgccagtggccatgtgcaagtggtcactctcctggttaacagaaaatgccagattgatgtctgtgacaaagaaaacagaacgcctttgatacaggctgtccattgccaggaagaggc

SEQ ID NO: 866774 - DNA, 120 bp, Artificial Sequence
  ENSG00000240240_45 (sequence is synthesized)
tggcgccaatccaaaccttaaggatatctacggcaacactgctctccattatgccgtgtatagtgagagcacctcactggcagaaaaactgctttcccatggtgcacatattgaagcact

SEQ ID NO: 866775 - DNA, 83 bp, Artificial Sequence
  ENSG00000240240_46 (sequence is synthesized)
ggaaagcaagttcacatgccgttgataggctgagacggtcagctctcatgcttgctgtatactatgactcaccaggtattgtc

SEQ ID NO: 866776 - DNA, 79 bp, Artificial Sequence
  ENSG00000240241_0 (sequence is synthesized)
gggttttgtctgcagctcgtcctgctacaatggtggttcctttataggatattcatgattccctaccttgaatcaatgc

SEQ ID NO: 866777 - DNA, 120 bp, Artificial Sequence
  ENSG00000240241_1 (sequence is synthesized)
ctttataggatattcatgattccctaccttgaatcaatgccgccatcttccttttaactcagcggcagcatgaacttctcccagtagcctctttgtccgtgaatatggacaagtggaaga

SEQ ID NO: 866778 - DNA, 120 bp, Artificial Sequence
  ENSG00000240241_2 (sequence is synthesized)
ttctttgctctatattgtgtgggtacttgccacaaagtttatgttttatctctaaatgtataacaaaaaagtatttcaaaagatgaatgtgagctttataaagtagtggttaaatactag

SEQ ID NO: 866779 - DNA, 120 bp, Artificial Sequence
  ENSG00000240241_3 (sequence is synthesized)
ggctttccagttaaatggacatggatttgaaaggtgattctagtactgtaaaggcaattttcttaacctctctatgctcaggtttctaaagttaaaataggaataaaaataatactaatc

SEQ ID NO: 866780 - DNA, 120 bp, Artificial Sequence
  ENSG00000240241_4 (sequence is synthesized)
gaaaagcaggcgagggtttctccctcctgtctcatttgatcatttttcatgctttacctgtgcttctaggggccaatctatctttttttttttttttctgccttctctgctttaaatgtt

SEQ ID NO: 866781 - DNA, 120 bp, Artificial Sequence
  ENSG00000240241_5 (sequence is synthesized)
cccagttctgtctggaacttgtctttgaacaaagaaagatttacttctttcttgattcttttattcccctcatttttgtttattctcttcctggctcttagagcttttctcttaacattg

SEQ ID NO: 866782 - DNA, 120 bp, Artificial Sequence
  ENSG00000240241_6 (sequence is synthesized)
actctgatttagccaaaaagattctccattctaaggactcctgtgatttgattgggagcctctacatcattcaggagaatcctctgacctcaagttctgtaacctgaatcacatcataag

SEQ ID NO: 866783 - DNA, 120 bp, Artificial Sequence
  ENSG00000247213_0 (sequence is synthesized)
gggcgtgcggatttggggcacactaggtggcgggcccggaaactggaagttccacggcggtcttttcctcgggtctcttcgtcccggagccgctgtcgtgtgcctcatttttcccggttg

SEQ ID NO: 866784 - DNA, 120 bp, Artificial Sequence
  ENSG00000247213_1 (sequence is synthesized)
tgaaatgaagatgctgatgcttttcaccccttcacccggaatctgtggcctgggaactcttcaagaaatgctgacatgaagtttgagaagtgctggttcagagaggcttgaaaaagcacc

SEQ ID NO: 866785 - DNA, 120 bp, Artificial Sequence
  ENSG00000247213_2 (sequence is synthesized)
tgggctttatttggaagcggagcagcagctgatgcctccctaaatgttctgcagatcccagagcaaagacctctgagtctaccgccccaccctgcccagccacggctcactcctgcggtg

SEQ ID NO: 866786 - DNA, 120 bp, Artificial Sequence
  ENSG00000247213_3 (sequence is synthesized)
ctcgactttctctgctcttcagtgtacaggatggaaaacacggatgcagtggcttcaggtttttatatgaaagtaacatcagccattcagagagagtctgacttgacatcgtgccacatt

SEQ ID NO: 866787 - DNA, 120 bp, Artificial Sequence
  ENSG00000247213_4 (sequence is synthesized)
caaaattctcaggatgaaaatggaaaggggacttcctctcaagacttgaccaaagggctgagctgaataaggcaggatttcagatccagctccatgtatatgtctgtgaagatcagagaa

SEQ ID NO: 866788 - DNA, 120 bp, Artificial Sequence
  ENSG00000247213_5 (sequence is synthesized)
agacattgtctaggtctttgaagaggtcctgaaatcttgttcaccttctttccattaccccaattccccaatctatttttgtttaactttttttgttgcaaatgacaaaaattcagccaa

SEQ ID NO: 866789 - DNA, 120 bp, Artificial Sequence
  ENSG00000247213_6 (sequence is synthesized)
actagctaaagctcctaaactgtttttattagtttatatgtctaagaggataggcatgaagatattgataggcacaacagaagccacggatcaaacaatgtatttgggactctttctcca

SEQ ID NO: 866790 - DNA, 120 bp, Artificial Sequence
  ENSG00000247213_7 (sequence is synthesized)
tgatggtgaagatgatcaccagttgtatcagatctttatcctaccagcttagcaacactggcagaaagggagcactttctctgcagatgttctagcaaaagtctcatggctgaatttcat

SEQ ID NO: 866791 - DNA, 120 bp, Artificial Sequence
  ENSG00000247213_8 (sequence is synthesized)
tgacttagcttgagtcacatgctcacccctgaaccactctgattgactgactatgcctgggacatgtgctcaccttggagttgagaggagggttagccccatccaaacaccaccaagtaa

SEQ ID NO: 866792 - DNA, 120 bp, Artificial Sequence
  ENSG00000247213_9 (sequence is synthesized)
gagaggtagaggtgctgcacaggaaatggggccctgaagccagaggactggggagtgggcgctgagcagacatgaagaatggacgttcacctccagggccaggctgggatcttatggatg

SEQ ID NO: 866793 - DNA, 120 bp, Artificial Sequence
  ENSG00000247213_10 (sequence is synthesized)
gatcttatgaagtagctcaggggctctccatggttttcaattctagagtcctgggatgttagggccagacaaaagctcagatcttatgcatcttctgcccaactctgcattttacagatg

SEQ ID NO: 866794 - DNA, 120 bp, Artificial Sequence
  ENSG00000247213_11 (sequence is synthesized)
agaaaactgagccttgagaagatgggggccatttgcccaaagtccctgagtatgaatcatctgaggaggagggcactgtatcaacagtgcttctctgagtgactcaaacccaatgctaca

SEQ ID NO: 866795 - DNA, 120 bp, Artificial Sequence
  ENSG00000247213_12 (sequence is synthesized)
caagaaggacttttacccaaccatgacgctaccaagcgtgtagcatcctagtagattgttcaccacttatcactcatatgtggtctagagaccagcagcatcagcatcacctgggagctg

SEQ ID NO: 866796 - DNA, 120 bp, Artificial Sequence
  ENSG00000247213_13 (sequence is synthesized)
gctagaaagagaatttcaggccctgccccagacctactgaaatggaaacttcatgtgaaaaaggtccccagctgattgtgtgcacgttgaaatttgagaagtgctggtctctaccacgga

SEQ ID NO: 866797 - DNA, 120 bp, Artificial Sequence
  ENSG00000247213_14 (sequence is synthesized)
tcaaggagttccaggtgactctttcatctggccaggattgcagttagtcctaaaacaagttctcttctcctaaaccttgcagaagaggaggattttgcaatctgtgagcttaccagggct

SEQ ID NO: 866798 - DNA, 120 bp, Artificial Sequence
  ENSG00000247213_15 (sequence is synthesized)
aaagaagttcctgcaagagaagagtggggcctgggtctgcctttcccattgccaagatgccgtctgctggcaacatcatccattatgactgatcatggcaaatgccggtcagctggcctc

SEQ ID NO: 866799 - DNA, 120 bp, Artificial Sequence
  ENSG00000247213_16 (sequence is synthesized)
acagcagttgttaggaaaatagtctttggcttgattatgttatctggctttccccaaggagcaacttctacaatcatcactggagagatgctttcccagccgcataggcagtgttaattc

SEQ ID NO: 866800 - DNA, 120 bp, Artificial Sequence
  ENSG00000247213_17 (sequence is synthesized)
agaaaggtgagcaagatgattcctgatggtggtaaggcctctccaaagaagcgacatctgagttgagaggaaaggagaaggagctggctgtgcagacacctggagcccatttccacagtg

SEQ ID NO: 866801 - DNA, 120 bp, Artificial Sequence
  ENSG00000247213_18 (sequence is synthesized)
tcctcagatatgttcaagcccaaaagaatcttatacctggaccccccagtccctagcccctggggactggagtttacctttgagcaggaccatcccttgattctgggtgtgagcacttgg

SEQ ID NO: 866802 - DNA, 120 bp, Artificial Sequence
  ENSG00000247213_19 (sequence is synthesized)
tgagaagaaaataagcaaaataactatccacggttcttggggatgccctgaaagctcaaatactgaagctgcagatggagcaggtgtgcattctcatccaagcatttgcttgctggagtt

SEQ ID NO: 866803 - DNA, 120 bp, Artificial Sequence
  ENSG00000247213_20 (sequence is synthesized)
gaggattgaggaccagatggtggcagaagggatatgcaggcttgctcttgctctcacctgaggctggagagaagtgccacgtctgggcctgtatccccatgtgggtgaatgtgagccatc

SEQ ID NO: 866804 - DNA, 120 bp, Artificial Sequence
  ENSG00000247213_21 (sequence is synthesized)
ctgccttctgggctgggggtgggagccgccccagcagaccacagcaatggcacagcaggatgtcaacaccagaaggacccgtgggcacattcctgagctcaggaaaagactcagaatgga

SEQ ID NO: 866805 - DNA, 120 bp, Artificial Sequence
  ENSG00000247213_22 (sequence is synthesized)
tggaagttgtttataaattctcctctgctgcatactgttaagaaggggaaagaggagtgctggactcaccctgaattctttcttacgcgagatccaagaattgtctcttggggtctgtgc

SEQ ID NO: 866806 - DNA, 120 bp, Artificial Sequence
  ENSG00000247213_23 (sequence is synthesized)
tgggactgctttcctgtaacatatttctggcgtccacagaagggactatagtgaggaaaccactgactttggatcactccctgcaggtgaagccaactgccatgttgtgcagaggctcca

SEQ ID NO: 866807 - DNA, 120 bp, Artificial Sequence
  ENSG00000247213_24 (sequence is synthesized)
gcctcccgtggagaggcccacacggagaggatctgccatcgccagcaggagctttccagccatatgatttctggcatgggagacactgaaccataaccacccagctaagctgcccctgga

SEQ ID NO: 866808 - DNA, 120 bp, Artificial Sequence
  ENSG00000247213_25 (sequence is synthesized)
ttcctgacctgcaagacatgaacagggcaagttaattctattgcgcccttacagatggagcaatgcacacccttctccatatgtatttgtgcacgtgtatgtctgttggaaagatgggtc

SEQ ID NO: 866809 - DNA, 120 bp, Artificial Sequence
  ENSG00000247213_26 (sequence is synthesized)
ctagaaatagagttgagagggtagaagtttatgcaagttttgaagtttgatggaatctgccattgcccttggaaaaagctgtgccttgtcattttgagtggaacctacactgtcagcttt

SEQ ID NO: 866810 - DNA, 120 bp, Artificial Sequence
  ENSG00000247213_27 (sequence is synthesized)
cctggttctcaggcctttggactcagactggaactgcaccatcagctctcctggggctctagcttgtcaattacaggcaaggattcctctcgtggtgacaagatggctgccgcagctctg

SEQ ID NO: 866811 - DNA, 120 bp, Artificial Sequence
  ENSG00000247213_28 (sequence is synthesized)
agaatcacatcctcacaagatagcatccagatccaggaagggaagacagccaaagcaggaaaggcactttctctgcatgtaccactcttttattaaagggactgtgaagattacctcctg

SEQ ID NO: 866812 - DNA, 120 bp, Artificial Sequence
  ENSG00000247213_29 (sequence is synthesized)
agatgtcccagctgaatggagcataaacaagaagtaaaccctggttgttataagtcactgacttttggggattatttgttattgcagcataatgtgacctatcctacctggtgcagttac

SEQ ID NO: 866813 - DNA, 73 bp, Artificial Sequence
  ENSG00000280758_0 (sequence is synthesized)
cctgcctaatttttgtatttttagtagaggcgatgtttcactgcattgaccaggctggtcttgaattcctagg

SEQ ID NO: 866814 - DNA, 120 bp, Artificial Sequence
  ENSG00000280758_1 (sequence is synthesized)
gcatgagccactgcacccagccttatttttaagacaaggtcttgctatatattgcccatgctggactttgagcaggtgtaggccaccatgcccaagtaatttttttcagagggagttttg

SEQ ID NO: 866815 - DNA, 120 bp, Artificial Sequence
  ENSG00000280758_2 (sequence is synthesized)
agagagagattccatgaagaaagaaagaaaagagagagagatagtgaagagccctagactgctttaggccaagggaaaagggtacaataatagcacatctggttcctgactttaagccag

SEQ ID NO: 866816 - DNA, 120 bp, Artificial Sequence
  ENSG00000280758_3 (sequence is synthesized)
gaagggaaggggtaccctggggggtggctgggtgaagggtctctgctgggccagagccccacgggcacttactttggtagcttcaagctgggattcgagggtccccgactcttccaccat

SEQ ID NO: 866817 - DNA, 120 bp, Artificial Sequence
  ENSG00000259840_0 (sequence is synthesized)
aaaggaagaacttccctgaggctttgtttcagaaaccttgggcctagcgcgtgaggccacccctggagagtgcagagtctgggacaatcatctctcccgcctgcgggtcagcctggccgt

SEQ ID NO: 866818 - DNA, 120 bp, Artificial Sequence
  ENSG00000259840_1 (sequence is synthesized)
gtttctgttcctgtcttgcccagagggcccttggagctgcagcctgagggggtgctggggtgggggcggtcgagaccctggtcactgccacatggttcccaccttcggccactgcgttct

SEQ ID NO: 866819 - DNA, 120 bp, Artificial Sequence
  ENSG00000259840_2 (sequence is synthesized)
ccccccagacacaggggagcggctgcggacaggtggctgcgccacggagtgccgaacaacccgctggggacaccacagtgccgggcacagaatagcagctgtcacggccagggcaggagc

SEQ ID NO: 866820 - DNA, 120 bp, Artificial Sequence
  ENSG00000259841_0 (sequence is synthesized)
aatcttgcttatgtgtgtcttctgtctaggccatgtgcacagggggcattgagaaatatctctggaccaatcacctaaaagatgtgactctcctcacttgcctggactctgctcagaata

SEQ ID NO: 866821 - DNA, 120 bp, Artificial Sequence
  ENSG00000259841_1 (sequence is synthesized)
gagatttcgacacatcagtgggttcaacacctaggtgatgcggctcttccttcttttctgggctcttccatcagagaagattgtgacattttctgagcccagcactcaagtgaggtgact

SEQ ID NO: 866822 - DNA, 120 bp, Artificial Sequence
  ENSG00000259841_2 (sequence is synthesized)
tgtctccctggactctccccacagacagcattgtgaaatatctttgggatcatcacctaggttactgggatctcaatgtagatgttatgtccagacagaggctgctgtgagctgaatcgt

SEQ ID NO: 866823 - DNA, 120 bp, Artificial Sequence
  ENSG00000259841_3 (sequence is synthesized)
ctgcttcccaaaattcctatgttgacaccttaacccccagcacctaagaatgtgactatatttggagatagcatcatcacagagtctcagggatgtctttatcagcagtatgaaaatgaa

SEQ ID NO: 866824 - DNA, 120 bp, Artificial Sequence
  ENSG00000259841_4 (sequence is synthesized)
ccaattcatcccacttcactgtttgaagaaaaactgctggctctatggggtcttcaatttactgaatgattcctagatgcctggccctaattcactcaagagtcaagaaaggtgccacct

SEQ ID NO: 866825 - DNA, 120 bp, Artificial Sequence
  ENSG00000259841_5 (sequence is synthesized)
tatggtgctcactgggcggttgtggatgtctaacctcagtgctagtcacacagaacctgaagccaggctggctgctcctgtaaatggcatggaatcccagggaatatcctgcattctcag

SEQ ID NO: 866826 - DNA, 120 bp, Artificial Sequence
  ENSG00000259841_6 (sequence is synthesized)
tgtccagctgtctgatgccacagttgtttatgatgatcgaggacaactacgtttttctgaggagacttaccacctcatggctgaggagtcttgcaataaagtggctgcttccaataccag

SEQ ID NO: 866827 - DNA, 120 bp, Artificial Sequence
  ENSG00000259841_7 (sequence is synthesized)
atggtatctctactgggacaaaattaaatttctgaattactttgaagaaaaatgatgattgagtgatattgagcatttctaccttagaacatgatttggttttccatttgtttatgctga

SEQ ID NO: 866828 - DNA, 120 bp, Artificial Sequence
  ENSG00000259841_8 (sequence is synthesized)
ttttcttatatttcaaggactttttatggtctttctcatatgcttaacaaatgtttgttagatttatgtatagctagtttattttatttagtcctgttaaaaagtaaactgtagcacaat

SEQ ID NO: 866829 - DNA, 120 bp, Artificial Sequence
  ENSG00000259841_9 (sequence is synthesized)
acaaattttaaaagttttcttggctgggaatggtggctcatatctgtgattccagcactttgagaggccaggttgaggggattacttgagcccagaagtttgaggccagcctgggaaata

SEQ ID NO: 866830 - DNA, 120 bp, Artificial Sequence
  ENSG00000259841_10 (sequence is synthesized)
ccaagtgtggtggtgcatgcctgtagttgcagctactcatggggctaaggtgggaggatggcttgagctcaggatgtaaggctgcagagagctttgattctgtgtacacactccagcatg

SEQ ID NO: 866831 - DNA, 120 bp, Artificial Sequence
  ENSG00000259841_11 (sequence is synthesized)
acaatagagcaagaacccgttttaaaaatattttcttgagaaagaagcaacttatgaattgtggaacaccagagcaagagaggctttccacttcaacggcaaagtgtcagagtcaacaag

SEQ ID NO: 866832 - DNA, 120 bp, Artificial Sequence
  ENSG00000259841_12 (sequence is synthesized)
atgaggtccctgaggatgtctaactgattctgtccactcgggaatgtttcggacttggtcttccttttaatttactttataaatcattttgtaatttttatctcctactcattctgtaac

SEQ ID NO: 866833 - DNA, 120 bp, Artificial Sequence
  ENSG00000259841_13 (sequence is synthesized)
agatattggatttcttacaagttgaaggctttttgcaaccctatattgagtgactctgttaacactatttttccaacatcatgtgacctttgtgtgtgtttacatctgtgtcagcttttt

SEQ ID NO: 866834 - DNA, 120 bp, Artificial Sequence
  ENSG00000259841_14 (sequence is synthesized)
tttgcaataaagtatatttttattaaggtaacacaactgaccagaagaaaaacagcctagatcctgagcattcagcctgtgtcttcacacaacaaacaccacctgagtcccatcaaagcc

SEQ ID NO: 866835 - DNA, 120 bp, Artificial Sequence
  ENSG00000259841_15 (sequence is synthesized)
tgtgttgtttcccaacatccaccattgagacatattccagagcagcctctcaaaatcacctaaacaagatggaacaagtgttggaccagtaaacaattcatctttcttatcaaggcaaag

SEQ ID NO: 866836 - DNA, 120 bp, Artificial Sequence
  ENSG00000259841_16 (sequence is synthesized)
gtgagctctaccatgccgtggctcgcagccatcacaagtatcgctgccagggtgaatgtgaaagggtaacacagtctctccaattttcacttcatgtctatgctcaaggacataagggtc

SEQ ID NO: 866837 - DNA, 120 bp, Artificial Sequence
  ENSG00000259841_17 (sequence is synthesized)
acatttagtttgcagctgaaccatctgttttccatgaacaattgttccattttgactgcctttatctacaaggacataacttcgttaagtcatggtcaaaataaatttctgcatgaaatt

SEQ ID NO: 866838 - DNA, 120 bp, Artificial Sequence
  ENSG00000259841_18 (sequence is synthesized)
tactgactccaacttcaggattcaaacagtatgctccaaatcattttctcaggtgatagacagacagacactgaattgttgacctatccaataatcaatcaatgcattacacaaaataat

SEQ ID NO: 866839 - DNA, 120 bp, Artificial Sequence
  ENSG00000259841_19 (sequence is synthesized)
aggataaaggaaagtaacagaaagatcctttcaacagacacagtgagcatttgaccaattcaatattccttcacaattagtctccctggaaaggaggagtataaggaaacttcctagatc

SEQ ID NO: 866840 - DNA, 120 bp, Artificial Sequence
  ENSG00000259841_20 (sequence is synthesized)
tgctgaagggcatcaatgaaaaacttacagctaaccccataataataaaatactggttgttgtgtcatgacatttgagaacaagaggaaaaggttaacatccaaagaaattacataagaa

SEQ ID NO: 866841 - DNA, 120 bp, Artificial Sequence
  ENSG00000259841_21 (sequence is synthesized)
aaataaacacagtcctccatgtgggaaaataagaggttagaaatgtctatcattgtagataacataacttgaatataaaaatttacaagaaattcattaaaacccactaaaaccaataaa

SEQ ID NO: 866842 - DNA, 120 bp, Artificial Sequence
  ENSG00000259841_22 (sequence is synthesized)
tgagttcagcatggtcacaatatataaaatcaatatacaaagttcaattgtattttatatactaccatgaccaacctgaaaataaaattaagaaaacaattccatttgtatatgtatgaa

SEQ ID NO: 866843 - DNA, 120 bp, Artificial Sequence
  ENSG00000259841_23 (sequence is synthesized)
gctcacaggtaaggttataacatatcactaagcctggtacttaatgatgtgactctctgatcctgtttgtgccctgccctcaagaagcattgtgacatcactgggctaagcaacaaggtt

SEQ ID NO: 866844 - DNA, 120 bp, Artificial Sequence
  ENSG00000276728_0 (sequence is synthesized)
cccagtcctctgcgccccttttatatagaagctttttcgccccgcccgtgcgcatgcgtaacggagttccctttgcggggcgccgggagtcgtagttcttatctttcgggcccgccgccc

SEQ ID NO: 866845 - DNA, 120 bp, Artificial Sequence
  ENSG00000276728_1 (sequence is synthesized)
tcgcgcgccgtgcgacgtagccaatcccaggacgcgtagggggcgtctccctggccgccaccttccatcgcttagacctcgctaaagaaacgcgagcggccattggtgaaaaatcacacg

SEQ ID NO: 866846 - DNA, 120 bp, Artificial Sequence
  ENSG00000276728_2 (sequence is synthesized)
actcgctgaggaaggacggccaatcgcagagaagatggggcgggttctggaccgtaccattctgtttcaggaatacgagaagattcgatggcctatgagagtcctcacagaatattttta

SEQ ID NO: 866847 - DNA, 120 bp, Artificial Sequence
  ENSG00000276728_3 (sequence is synthesized)
tgaaaaggtgcgttataaaggctattatcgtattttgttctcagcggaggggttccgaaggttatgaacctttattaactaacgcaagaatggtttattcctaaaaagtagtccctaaaa

SEQ ID NO: 866848 - DNA, 120 bp, Artificial Sequence
  ENSG00000276728_4 (sequence is synthesized)
tgtaaaagaattaaatcctataaagagagacgtcggcccacggctgctaactcgcgagtcttaagattatagaaatggcttcaaggcgggtggtgagtgcctgagactgacacttgcgga

SEQ ID NO: 866849 - DNA, 120 bp, Artificial Sequence
  ENSG00000276728_5 (sequence is synthesized)
aggatatcgcgagcacattttgtaaagaccgaagagcgcatgaagaagtaaacaaatgaagaataaaaagtgccgccttaaagggacagtgtgactgcgtttagcgccgcaggctcgcac

SEQ ID NO: 866850 - DNA, 120 bp, Artificial Sequence
  ENSG00000276728_6 (sequence is synthesized)
taggcctcggaagacgaagaggcgggttcgagtcccggtgacgcgactcccggactgacctcggtacccttagctgaaggtggcggagtcccagccccagcctggtctcagaaagccgcc

SEQ ID NO: 866851 - DNA, 120 bp, Artificial Sequence
  ENSG00000276728_7 (sequence is synthesized)
tcggaaagccggggccgggggcgggcgggggagtggagggggaagcgggggaaggccacgcccccacgcctcagcttctgtcgaagaaaatggcctcctggggccgatttggtcttttca

SEQ ID NO: 866852 - DNA, 120 bp, Artificial Sequence
  ENSG00000276728_8 (sequence is synthesized)
cttccgaccgagatcatttcctgagccgggacagaggaggtccgggacagccatgaggctgtttgttgggaagagttcggaatgattaatgagttgaaatcatcagccctggctatccga

SEQ ID NO: 866853 - DNA, 120 bp, Artificial Sequence
  ENSG00000276728_9 (sequence is synthesized)
gagggaagcaggtctcacccgcagaggcccttcctcatcagtgggcgctgggcaagactgggagggaagcatggaggaggccttgctccgaaacttgctgcaggggattctggcgcaggg

SEQ ID NO: 866854 - DNA, 120 bp, Artificial Sequence
  ENSG00000276728_10 (sequence is synthesized)
ctgggggggccgattcccccgggggcgtagtttctcagagagaaattctctagacccaagcccccagccctccataaacagggactgagaggacccagagaaccctccataccagtcact

SEQ ID NO: 866855 - DNA, 120 bp, Artificial Sequence
  ENSG00000276728_11 (sequence is synthesized)
gaggcctaaaatcttggcgccctttccacttctccttcgccacacacccagtgaccctttcttcttattgcttccttaatagcatccctgacattccagcacgtttgcactgtgtacctt

SEQ ID NO: 866856 - DNA, 120 bp, Artificial Sequence
  ENSG00000276728_12 (sequence is synthesized)
ttacgcacagagccatgtgacctcaccacagcctggcaagttagacacgataggaatgagtgtctccattttacagataaggcatctctaagacactggaaaataagtgacttgtccaag

SEQ ID NO: 866857 - DNA, 120 bp, Artificial Sequence
  ENSG00000276728_13 (sequence is synthesized)
gtcacatgacaaccatggggcagttctggctagagcgctggtctttgtgaccccccccgtgccatttttctttctgtcacaaacacaaaacccattttttcttaaaatcggggaatactc

SEQ ID NO: 866858 - DNA, 120 bp, Artificial Sequence
  ENSG00000255164_0 (sequence is synthesized)
tgcttactgtttacatgcccaggtcccccactacacaggaagaaaccctttctagctcatctgtttccttaagaccgagaatcagcctgggatgctctgactccagctcccctgagttct

SEQ ID NO: 866859 - DNA, 120 bp, Artificial Sequence
  ENSG00000255164_1 (sequence is synthesized)
ccagagaaaggaagcaagacctgaaaagtcatcccaggtagagggcaggatggacctgtggtctgagtctttgtgctggttgtgtccttccctgccacctggtctctaaccgtggagaaa

SEQ ID NO: 866860 - DNA, 120 bp, Artificial Sequence
  ENSG00000255164_2 (sequence is synthesized)
gacacaggcctctgcctaagctgaggaaaggtcaaaactagcttttcaggaggacggggagcatagataggacagtgttggggcctgaacacatcatggtagaggactcatagtagtggg

SEQ ID NO: 866861 - DNA, 120 bp, Artificial Sequence
  ENSG00000255167_0 (sequence is synthesized)
aataccttttcaaattgccagtcaagagtgaagtatgccaagaaaaaaggagaggctcctcaataaccctcaagacataatgtcattttctctcctgtggatgaagactctctatctgct

SEQ ID NO: 866862 - DNA, 120 bp, Artificial Sequence
  ENSG00000255167_1 (sequence is synthesized)
gaatatttattagtctgctgggtcacctgctagaaaacagacaattctccagcaacttcaaacactcttcttcactgaactacagtttggtatgagacgtcaaaggataagaatgtgcat

SEQ ID NO: 866863 - DNA, 120 bp, Artificial Sequence
  ENSG00000255167_2 (sequence is synthesized)
acctaaatggtcaaatgaagatgaatgttccatatggcttttgccccatactgcccaagactgtgttaaaaactaaatacatcaggatgctctaagccactgaagagccatgtttgccag

SEQ ID NO: 866864 - DNA, 120 bp, Artificial Sequence
  ENSG00000255167_3 (sequence is synthesized)
cattatactgggcttctctggttatacaaagggacacctaatgaagatattctgttgatataaaagcagtctcatggacagtaatctttctatatccttaggcagccacaatactgcctg

SEQ ID NO: 866865 - DNA, 120 bp, Artificial Sequence
  ENSG00000255167_4 (sequence is synthesized)
tcaaatataattaccagcagaagaacagaaaactaacacttacctattaccttgttaacatgtccacaatgagccaatatgaaatgaacataataatggtgtcatttgtggggaaaagcc

SEQ ID NO: 866866 - DNA, 120 bp, Artificial Sequence
  ENSG00000255167_5 (sequence is synthesized)
tgagagacatggtttatagtgctcaccaaggtctgaatgtcagaaagaatattatgtgataagactattttaacatgcaaatataatgggccaggttttccgtttggtttcctgctatat

SEQ ID NO: 866867 - DNA, 120 bp, Artificial Sequence
  ENSG00000225092_0 (sequence is synthesized)
gtaccagccccaaaccctgccagcagtatgggggaggatgcatttctccacaccttgctgaaggatggggacttggcagagttcagtgatgttttagggttggaacattgattcctttct

SEQ ID NO: 866868 - DNA, 120 bp, Artificial Sequence
  ENSG00000225092_1 (sequence is synthesized)
ctctctcttttttcccttttctccttgtgcctctcttcctgtgggtgcctgagaaaatactcagcctgtatgactgtggcctgagtcgagaaggagtgctagctctgagaagaaaaggtt

SEQ ID NO: 866869 - DNA, 120 bp, Artificial Sequence
  ENSG00000225092_2 (sequence is synthesized)
tatttccactctcatgtgactatccatctatccatctctccatccatcagcccattggacaatatgtacccagttcctatatccagctagctactgtaccaggtgccaggcatttcggga

SEQ ID NO: 866870 - DNA, 120 bp, Artificial Sequence
  ENSG00000225092_3 (sequence is synthesized)
agaataagacagacaaggttgtcgtcctcatccttctgctctaccaggaacaagtgaagtgataggaagagcttttcctcaaatagctctgagttgtcccaagtccagcctccagatcag

SEQ ID NO: 866871 - DNA, 120 bp, Artificial Sequence
  ENSG00000225092_4 (sequence is synthesized)
agaccgtggttagggccctggaggatgcccacagcacctcccatgtttgcatgctaactggaggctgcctcttcaggtgtgaggaggcaactgtgcaggtggggcagggctgcctttcat

SEQ ID NO: 866872 - DNA, 120 bp, Artificial Sequence
  ENSG00000225092_5 (sequence is synthesized)
ccccctcctttcttctccagggatctggtatgctgagtttgcttttgaaatggaggtcctggccagaggtagcctggtaaatacagttcttaatctaaaaaaacaaaactcagtggggag

SEQ ID NO: 866873 - DNA, 120 bp, Artificial Sequence
  ENSG00000225092_6 (sequence is synthesized)
ccattggtgtgagcttagagttccaggagagattagccacagccggatgctgacaagggtgccagattgtttcattatggaatggttagttatcacctcagcctcccaaagtgctgggat

SEQ ID NO: 866874 - DNA, 120 bp, Artificial Sequence
  ENSG00000225092_7 (sequence is synthesized)
ttaaaagattacatctgggtctgtagacctcctcccatataacttggattttgtggacctgtatgatggcctgcagcacagcactgccagcctcagagaaggctggggtgtcagttcatg

SEQ ID NO: 866875 - DNA, 120 bp, Artificial Sequence
  ENSG00000225092_8 (sequence is synthesized)
agtcaccccagagtcaacacaagtcagccccaccagccgcacagtgtgcctgctgtctattgcaaggtgaatgcaagatgattttttaaacaaatttgtctccctgtggctggtcacttg

SEQ ID NO: 866876 - DNA, 120 bp, Artificial Sequence
  ENSG00000225092_9 (sequence is synthesized)
gaggcctttttttttttttaaaacatgtatttacatcctattgatgtatcaccatcctgttggtaactttaaaaattttgtgtatgtaaaattgcctatctactaatttgacaacaatac

SEQ ID NO: 866877 - DNA, 120 bp, Artificial Sequence
  ENSG00000225092_10 (sequence is synthesized)
cccggaggtggaactcatccccaacttttggcctggctgtgagacatccctccttgttatgtcttactttgttgctgttgcttttgtttctccccacacccatgcccccatgggggtcct

SEQ ID NO: 866878 - DNA, 120 bp, Artificial Sequence
  ENSG00000225092_11 (sequence is synthesized)
tggccagctctactccgactgcagttgtagaactgggcagagaaggtatgacaccccctcccccattatacctcagaaagaactagaagtatgataaatgagtacgactgggaatttgtt

SEQ ID NO: 866879 - DNA, 120 bp, Artificial Sequence
  ENSG00000225092_12 (sequence is synthesized)
ttttccactatctctaggatgttcatgttttgtagaatccatatccttaattctttttgtgtgaaaatgtagagcatacctagttctcagacccaattccatagattagaaaaaagtttt

SEQ ID NO: 866880 - DNA, 120 bp, Artificial Sequence
  ENSG00000255160_0 (sequence is synthesized)
aatatcaccagtgggaatctactgtggaaaattgagtacaacactatcatcatatgatttgttttgctcatatttggctgtgccattggctgcggagccaggcagcgaactccacacaat

SEQ ID NO: 866881 - DNA, 120 bp, Artificial Sequence
  ENSG00000255160_1 (sequence is synthesized)
ggtagctggcttgtggtttacctggcctttggttagataactgtgcctgatccctatggccaggaaggaaggagctgaagaattcacatttgggctgatgggcctggggtagggatgacc

SEQ ID NO: 866882 - DNA, 120 bp, Artificial Sequence
  ENSG00000255160_2 (sequence is synthesized)
aacagaccacatgcttcttgtctcttctactccctgatcctctgatagacagggctaagtgatcatccactccttccaccctccagcctccgagtgggccacttttcaagcatggaattc

SEQ ID NO: 866883 - DNA, 120 bp, Artificial Sequence
  ENSG00000255160_3 (sequence is synthesized)
gtacaggcctacctcagagatattggagtgttcagttccagaccacgcaataaagtgaatatcacaatgaagagctgaagaattcacatttgggctgatgggcctggggtagggatgacc

SEQ ID NO: 866884 - DNA, 120 bp, Artificial Sequence
  ENSG00000255169_0 (sequence is synthesized)
aacctcaccattatttggtctatcaagtctttttcatcttgtttaatggtagtcaaatcttcagaaacctggctttttatatctaaactaatataaaaatgataatgggaggaatcagag

SEQ ID NO: 866885 - DNA, 120 bp, Artificial Sequence
  ENSG00000255169_1 (sequence is synthesized)
cttcaaaagtgagctgattccagccaccagctgtcatcatatgaggagctcttgtgagttgatcgcccatgaaagaggaatgagcctctaaacatggccacagctcagtgatactgacca

SEQ ID NO: 866886 - DNA, 120 bp, Artificial Sequence
  ENSG00000255169_2 (sequence is synthesized)
catcagagaaataagaccaatgcgaattttgtaagcagtatacaggcctgtcgaacatgattacttggaaaattactaactaaacctttttttagccttttcacattcagttaagatttc

SEQ ID NO: 866887 - DNA, 120 bp, Artificial Sequence
  ENSG00000255169_3 (sequence is synthesized)
atgaagagttgtaagagaaaagcttttccagacccagccatgagtactctgctttactcagaagaaccacaaactttgaacagcttgataatccagcatttctgaaacttttctttgcat

SEQ ID NO: 866888 - DNA, 120 bp, Artificial Sequence
  ENSG00000276727_0 (sequence is synthesized)
gatgcaagcagtgaagctcggttgcatcatctgcagggctcagagctggccggaaaggctcagcttgtgagaccaggccgaaaactccgctcatttgccagcaccgggtccgcggggcat

SEQ ID NO: 866889 - DNA, 120 bp, Artificial Sequence
  ENSG00000276727_1 (sequence is synthesized)
ccggggctgtcctctcccctaatgccacgtgaaatgggcggtcacgaggccctggggcgtctgatcgccagaatgaggacaggctcgcagttaactccacgcgcgcccaggggtcttggg

SEQ ID NO: 866890 - DNA, 120 bp, Artificial Sequence
  ENSG00000276727_2 (sequence is synthesized)
agcttcctttccactgattacccagcgtttggagccccattcttacccgagccgcccaaaacaaagagaagtacagcatcgcaactcggaagtcgcaggaggtccagccaccaactctgg

SEQ ID NO: 866891 - DNA, 120 bp, Artificial Sequence
  ENSG00000276727_3 (sequence is synthesized)
tctagggcagcaagctgtcggaagaagaccgttcggagaacgcatgcgcgagaagagctcgctgaggcgccaaagctaacgggagggatctacgcatgcgtagtggtggcccctttgtgg

SEQ ID NO: 866892 - DNA, 120 bp, Artificial Sequence
  ENSG00000276727_4 (sequence is synthesized)
ccttttgggaattgtagttcgcccactcaccgcttttttctttatgattcccgtctgtagccccagggttagaggcccttgcctggggggaaaaaaacaaaaaacaaaaacagaggtcca

SEQ ID NO: 866893 - DNA, 120 bp, Artificial Sequence
  ENSG00000267372_0 (sequence is synthesized)
tgggattataggtgtgagccaccgtgccctgccttgatttcttttattgtcttcataaagctgtgtgtccatcaacccaatcaactttagaacatttccatcattccaaaaggaaacccc

SEQ ID NO: 866894 - DNA, 120 bp, Artificial Sequence
  ENSG00000267372_1 (sequence is synthesized)
tcattccaaaaggaaaccccgttccctccccagccctggcacccacacttcccctccctgtctctgtggatctgcctgccctggacatttcatagaaatgggattgcacacctgtggcct

SEQ ID NO: 866895 - DNA, 120 bp, Artificial Sequence
  ENSG00000267372_2 (sequence is synthesized)
tctgtgtctggcgtctctcactgagtgtggcgtcctcaggatgcatctgcgctgtggcctgggtcagagcctcgctccttttcacggctcagtcgtgttccagtgggcagagggccatgc

SEQ ID NO: 866896 - DNA, 120 bp, Artificial Sequence
  ENSG00000267372_3 (sequence is synthesized)
cgtgtttgcccattcttgtgttgatggacatttgggctgtttcagacgtttctgagtgtgtagggaatgctgttcttgccaactcttccagtggccctggatttgggcctttgaccctca

SEQ ID NO: 866897 - DNA, 120 bp, Artificial Sequence
  ENSG00000267372_4 (sequence is synthesized)
cagaaggccaagcagaggctgggcaggtcccaccaaggccagaagcagagggcgtgttccccagcagggcctggtgtttggagcatgacacatggaaacagcttccaggcatgaccctgt

SEQ ID NO: 866898 - DNA, 120 bp, Artificial Sequence
  ENSG00000267372_5 (sequence is synthesized)
gccaccctgtgactctgtttctccgtcggcaaaggcggcggtgatggggactctgtggtggcagctattgtcaggcagcatggcagctgcacacgggggctcgcccatgtgagggaggct

SEQ ID NO: 866899 - DNA, 120 bp, Artificial Sequence
  ENSG00000267372_6 (sequence is synthesized)
ttccgcaggtggatgggttgcctgttcttccctgggggcgccaggggaagacctgtccctgccagagcaccgcggctggcagcccccagccctttggtggcagctatgccctggggtggg

SEQ ID NO: 866900 - DNA, 120 bp, Artificial Sequence
  ENSG00000267372_7 (sequence is synthesized)
cagggtgatgcgtaggtcatctgcccctgtggtgggcccagcgccctcctgtcttctcagaccctccagaggaggcaaaggaggtctctcaggcagagcgagaacatgtcattccttcag

SEQ ID NO: 866901 - DNA, 120 bp, Artificial Sequence
  ENSG00000267372_8 (sequence is synthesized)
ggacagcagaaccaccacaggtactgcccacctgggtcagacatcagagggacagagacagagagacagagacagtcagagacagagagacaaagggagacagagagagacagacgcagg

SEQ ID NO: 866902 - DNA, 120 bp, Artificial Sequence
  ENSG00000267372_9 (sequence is synthesized)
cagacagagtcagagatggagggaggaagagacggagagacagtgacagagacagaaggagacagagacagagagacagagacagagggagacagagagacagagatgggggagacagac

SEQ ID NO: 866903 - DNA, 120 bp, Artificial Sequence
  ENSG00000285987_0 (sequence is synthesized)
ccacatccttgtgatgtcagggtgctgagttgggaggaacttgggtccctggaagccttgagcaggaggctcaccccggctctgtaccatccacctcaactttattgggatgaaactaac

SEQ ID NO: 866904 - DNA, 120 bp, Artificial Sequence
  ENSG00000285987_1 (sequence is synthesized)
taacttttctcttgttacttttggtttttgcttttattttgcaccaaatgatacagtatttagtaggcaggagacactgtgtaaaactcttgtctgggcgtggtggcttatgcctgtaat

SEQ ID NO: 866905 - DNA, 60 bp, Artificial Sequence
  ENSG00000285987_2 (sequence is synthesized)
agtggaggttgcaatgagccaagatcgtaccagtgcactccagcccgggcgacagagcaa

SEQ ID NO: 866906 - DNA, 120 bp, Artificial Sequence
  ENSG00000285987_3 (sequence is synthesized)
aacaacaacaacaacaacaacaacaactccaagaggcctatgaggtctttcctgagcacacagaagatcaagaccacactcactgacttctcatagtcaagcaattttggccaattaaat

SEQ ID NO: 866907 - DNA, 120 bp, Artificial Sequence
  ENSG00000285987_4 (sequence is synthesized)
ggccaattaaatgtcagttggaaactcctgtgtcagcttctctgtggcggtgagaagtccctgtgtgacatcccaactctcccctcacctgcgttggcaaccaagaaagccttgtgttgg

SEQ ID NO: 866908 - DNA, 120 bp, Artificial Sequence
  ENSG00000285987_5 (sequence is synthesized)
aggtggggccacaagtttaaagctaagttaccacctcgagggcacattcctggagagcttcccaggcccacagtggcacgtgtatgagtgacagatccacttctttattacctttttgaa

SEQ ID NO: 866909 - DNA, 120 bp, Artificial Sequence
  ENSG00000285987_6 (sequence is synthesized)
gaacaggaacctttgtctggaaattccacaagtatgccttttgcaagattaaaagtgccacaaagaacaaaaatgagcccaggaccagatgcatgttaaaagccatcagacacgttaagt

SEQ ID NO: 866910 - DNA, 120 bp, Artificial Sequence
  ENSG00000285987_7 (sequence is synthesized)
ttcatctccattgacctgagccagttggagtgtgaggcttcagaatcgccttccaactctctgtgcactgcaccagctgcttcccatagactcctggtaaaatattacctatgactccag

SEQ ID NO: 866911 - DNA, 120 bp, Artificial Sequence
  ENSG00000285987_8 (sequence is synthesized)
gatttgccagtgaaagaagtcaacaatattttaactttgatcttaaccaaaaggccaagaagtgatgctaatattttcatatactacgacagttgcagtctccctgtctacagacacacg

SEQ ID NO: 866912 - DNA, 120 bp, Artificial Sequence
  ENSG00000285987_9 (sequence is synthesized)
tctatcatagctgggtagtaatccaggcaactctgccacaagtcatgggctcagccaccagtccacgaagtctccagtcacacatattgcttcggactattctctatccccagttgtcaa

SEQ ID NO: 866913 - DNA, 120 bp, Artificial Sequence
  ENSG00000285987_10 (sequence is synthesized)
ttaactaaaatattaaatgagagatggggttttgcaatgttgccctggctggtctcaaactctgggactcaagcgatccactcacctcggccgcccagagtgctggaattacagacatga

SEQ ID NO: 866914 - DNA, 120 bp, Artificial Sequence
  ENSG00000285987_11 (sequence is synthesized)
tccaccgtgcccaatcccacaaaggttctttaagaaagagaaactaattaggtgaaaaataacagaatatcaaggagtggcttcattcagcagaataatttgttttctgttgtttcttca

SEQ ID NO: 866915 - DNA, 120 bp, Artificial Sequence
  ENSG00000285987_12 (sequence is synthesized)
tttatgtaaagccaagggagagggtcaccgggagagggaaggaggaacagcagaaggagaggtccacacatgaaaatacttggaagcgccccagggcctatcagatgcaggtcttggcgg

SEQ ID NO: 866916 - DNA, 120 bp, Artificial Sequence
  ENSG00000285987_13 (sequence is synthesized)
aaattaccaaacatactttagacaggctgctgtgttgctgagtgtggactggcctcagggcctgctgatcaaagcaaaaggaagcagtgaaaaaaacatcaccatgtcttcttagagtct

SEQ ID NO: 866917 - DNA, 120 bp, Artificial Sequence
  ENSG00000285987_14 (sequence is synthesized)
aatctgggggcaagaggccagcatgcacagttggtgctgattttcttgggcggatagaggaaaggtgtaggcgtggccaacatttgagcagcatgtggttcctctcacacgccatgctgt

SEQ ID NO: 866918 - DNA, 120 bp, Artificial Sequence
  ENSG00000285987_15 (sequence is synthesized)
ttccggcctccttgcattttactcatgccatcctcctggtcacttctttgagatattaagtgcattctttaggactcagactcagctcaagggtcagtgcatccatgaagccttacctgg

SEQ ID NO: 866919 - DNA, 120 bp, Artificial Sequence
  ENSG00000285987_16 (sequence is synthesized)
atcccagagggagctctgtgctcctcctttgtctcctataggacccagtacatgcgtccagtattatccatacacactgaaatgatctagcatgtgtcttcccataggatttcaaattct

SEQ ID NO: 866920 - DNA, 120 bp, Artificial Sequence
  ENSG00000285987_17 (sequence is synthesized)
tagaatataggagtgatgccttcttcctacttatatttccagtgttaacagtgcctgtcaattgacttgaagataactaaaagtctggttgttaagggctgcttcccacctccaaatact

SEQ ID NO: 866921 - DNA, 120 bp, Artificial Sequence
  ENSG00000285987_18 (sequence is synthesized)
tccctggaagtcattgtatgggcactgacattggtaggtctccactggcttgtagatgcttctgattataaggtagtctcagatgccttcagaaagttctaagactgtataaaacatttc

SEQ ID NO: 866922 - DNA, 120 bp, Artificial Sequence
  ENSG00000285987_19 (sequence is synthesized)
cttcacaaccaataactgtgtattattgttcgtgtaattccagaagttatccttttgatagagagcaattactttattgattgagagttagctaattatgtaataaaggtaaagatttgc

SEQ ID NO: 866923 - DNA, 120 bp, Artificial Sequence
  ENSG00000285987_20 (sequence is synthesized)
atagagaagtgtaagagacatggagaagattcttggtgggtggtgagggcgggtacatttacaccagaccaagactgatctggctgtggcgctggagattaaactgtttaaatatgggat

SEQ ID NO: 866924 - DNA, 120 bp, Artificial Sequence
  ENSG00000285987_21 (sequence is synthesized)
cctaagaagacttctgtgcattctagacttcaagagacagattgcatttttttttaggaaatgtagataaaaccctttgactgaatgactctagaaaataatactgatttgagagagaaa

SEQ ID NO: 866925 - DNA, 120 bp, Artificial Sequence
  ENSG00000285987_22 (sequence is synthesized)
ggaaattctaaaacaaaatcctgacagcagaggcatgaatgatcctcatgaggaagaaatgagactctgcttaactacactgtagattttggtgtggaagaagatggaaggtgggtatat

SEQ ID NO: 866926 - DNA, 120 bp, Artificial Sequence
  ENSG00000285987_23 (sequence is synthesized)
agccaaattttgaatacaatagggcagcacaaaactgtgacaacagtggcagaaggactgaagtacagaatgtgtgaaagttgttgtgaaataaatagagagcaacagaaaaggactatt

SEQ ID NO: 866927 - DNA, 65 bp, Artificial Sequence
  ENSG00000285987_24 (sequence is synthesized)
ttgttgtgaaataaatagagagcaacagaaaaggactatttgggctgggcaatggtaatcccaga

SEQ ID NO: 866928 - DNA, 120 bp, Artificial Sequence
  ENSG00000285984_0 (sequence is synthesized)
gcctgggcttctactgcctacccagggggcatctgtttggggtgtggggtctgcttcatcttgccaaaccgggggcaggagtcttagacccactggagctttggatcctttacctcctgt

SEQ ID NO: 866929 - DNA, 120 bp, Artificial Sequence
  ENSG00000285984_1 (sequence is synthesized)
ccccttgctctggacacctggcccagctgcgtcctaggaggatgcctttgtacaggaatcccagaaattgaaaaacttgagtcccaggtctgccactcgctggcataacctgcacctcag

SEQ ID NO: 866930 - DNA, 120 bp, Artificial Sequence
  ENSG00000285984_2 (sequence is synthesized)
tgtacacctctgtaaaatggagagatgaaggatgaagctgcttcccctcacccacaaggtggtcatgagaatctgatgagatgtggattgtaagcagtggggttctatacaaagtcccta

SEQ ID NO: 866931 - DNA, 120 bp, Artificial Sequence
  ENSG00000285984_3 (sequence is synthesized)
tggtgacagggaggagtcctactcccaggcttctttacagatcacaggtatcatgtgactgaatttgccacagatttagctaacctgggagacatcaccagaattttgcaaccagcaaga

SEQ ID NO: 866932 - DNA, 120 bp, Artificial Sequence
  ENSG00000285984_4 (sequence is synthesized)
ttagtttggggccctgcaccctcctcttctccttctttccttgtgcctagttgcctgccaatggccattggtaggaacaggcttattctcctcctttcaggtatgacatcaaaagcatga

SEQ ID NO: 866933 - DNA, 120 bp, Artificial Sequence
  ENSG00000285984_5 (sequence is synthesized)
gcaacaagagaaaaaagagataaattggacttcatcaaatgtaaaacttatgtgcgtcaaaaggtattatcaagaaagtgaaaatacaatccacagatattgcaaatcgtatctctggag

SEQ ID NO: 866934 - DNA, 120 bp, Artificial Sequence
  ENSG00000285985_0 (sequence is synthesized)
ggacaccacccagccaggcccacctgaccggtcaggctcaaaccctctggtacccgccccacccataggaccaggtgtaaaccaggcagcgacaccccagacgtgtggtcttggtcagct

SEQ ID NO: 866935 - DNA, 120 bp, Artificial Sequence
  ENSG00000285985_1 (sequence is synthesized)
cccctgggctcctctccctccagctggcccttctctgcccaggaaacagttttctgaagagttctccgttctcgagccttccagctgcgtgggagagagttgaccccaaggctgggacca

SEQ ID NO: 866936 - DNA, 120 bp, Artificial Sequence
  ENSG00000285985_2 (sequence is synthesized)
caagaggccagggagggtgggcctgggatctgcagctcacgggctgtgtgactgtgggcacgagatttcatttcctgattcataaaggtggggaccgatcaaagctactccttggacctt

SEQ ID NO: 866937 - DNA, 120 bp, Artificial Sequence
  ENSG00000285985_3 (sequence is synthesized)
tgtgaagattaaatgagttcaacacggagcattcttgacccatgggccatccccagatgaggctgcagcattgccccgtgtgctctcagctggtgccagtgttgtctggaactgtctgga

SEQ ID NO: 866938 - DNA, 120 bp, Artificial Sequence
  ENSG00000285985_4 (sequence is synthesized)
cctacctggaaactgagtatttctctgaagaagtctgcagccctttggcagcgtggctgcagatggaaggaaggaaacagttcgccctggagaatggctaggcagcacctctgagccgag

SEQ ID NO: 866939 - DNA, 120 bp, Artificial Sequence
  ENSG00000285985_5 (sequence is synthesized)
catcccacccgctctgactggcccacaatcgtggggccagtggtatctcagagcccttctgtaaggagacctacagggttttgtcacttacagtgattgccatggtctgaatgcttgtgt

SEQ ID NO: 866940 - DNA, 120 bp, Artificial Sequence
  ENSG00000285985_6 (sequence is synthesized)
ccaagatgcggtgccctccatcagcatattgccacgcctttctctcccaggatgcattgctgggatggatgaacagggccatgcgataaatcctctaacgttgccacgtctgtgcttttg

SEQ ID NO: 866941 - DNA, 120 bp, Artificial Sequence
  ENSG00000285985_7 (sequence is synthesized)
cctcctttcctctccgttgtatggaggaagttctgacagctcacttcatttcacgtggtgtgcaagcttctgtcaaacaacggaacaaactatgagaaccacttccagccactgcttctg

SEQ ID NO: 866942 - DNA, 120 bp, Artificial Sequence
  ENSG00000285985_8 (sequence is synthesized)
cacacttctctgctaagtgagtctctgctgtgtgagtctcattggtaaaactaccctgatctaacattctgttacctcctttgtggtccaacactccaagagtccacggcctcagacgcc

SEQ ID NO: 866943 - DNA, 120 bp, Artificial Sequence
  ENSG00000285985_9 (sequence is synthesized)
cctgggtttctgctgatgtaaattggcaaaaacttgcattcagtgtgtatgtggctcctcttgggtctcactgtgtgtttatccctctgcacccaactctagtcatggctctgggaataa

SEQ ID NO: 866944 - DNA, 120 bp, Artificial Sequence
  ENSG00000285985_10 (sequence is synthesized)
tgagggtcggtggaggtggatctcaagggagatctgtcatcttgcaaggctgtttcctcaagtgaagccatcacagatctttgggcacagttttactcacctcagactctaaggaagagt

SEQ ID NO: 866945 - DNA, 120 bp, Artificial Sequence
  ENSG00000285985_11 (sequence is synthesized)
cacttctgcttacagggagactcaggaaggtctaatgttcaggggactcagagtcagagaaatccaccctctccagttctcgaggtctcattctttccaaataaatgccttaactttgac

SEQ ID NO: 866946 - DNA, 120 bp, Artificial Sequence
  ENSG00000285980_0 (sequence is synthesized)
gcctgggagaggtggtcacctaccggggtcactgggcagctttgcagagagctcagcgtggtgcttgtcactcctcgtttatgtggttgctccatttacattcccccagtggtccaggca

SEQ ID NO: 866947 - DNA, 120 bp, Artificial Sequence
  ENSG00000285980_1 (sequence is synthesized)
agtggtccaggcagctgcagaggctgctgggtctctctcactgctcgggaacaaggtgaagtcaaatggaaaagctctgaaggagaggagcaggacagcttggtgcaccagtggagtgca

SEQ ID NO: 866948 - DNA, 120 bp, Artificial Sequence
  ENSG00000285980_2 (sequence is synthesized)
ggaaggctgagaagtaacccaagatttgctaaatatggtggtaggggccttgaggaggcaagacatctctgcaagaagaggacctagcctctttcctgggaagagacgagaggccacctg

SEQ ID NO: 866949 - DNA, 120 bp, Artificial Sequence
  ENSG00000285980_3 (sequence is synthesized)
cctggtgtgtttgctaacacgcaggagctgtggcctgtaatcatcattagctctctttggtgtttactaactgttattaattagaatgagcaaacttggcattaatgtgcctgccataag

SEQ ID NO: 866950 - DNA, 120 bp, Artificial Sequence
  ENSG00000285980_4 (sequence is synthesized)
gatgaaggttcttactgcacaaccatcctgcataagcggctagactgggactcgtttaccaactgttaccaggatgatgcagggctacgggcaccagctgatgaaggactgggcaaggga

SEQ ID NO: 866951 - DNA, 120 bp, Artificial Sequence
  ENSG00000285980_5 (sequence is synthesized)
gagcgctcgaacctgtgcttctctgaaagttcagaattaggggaagctgtgctggagtagagggaagcagagcctctccccagctcatgtgggagctgctagcaggctttgggcagcctc

SEQ ID NO: 866952 - DNA, 120 bp, Artificial Sequence
  ENSG00000285980_6 (sequence is synthesized)
caaaagtagcccaggcaaacccccaaggtctttgatcaccagacagctttcctctggtgctggttgtagcaactttctccctaatcagaaaatcactgaacacaacttcctttacaagac

SEQ ID NO: 866953 - DNA, 120 bp, Artificial Sequence
  ENSG00000285980_7 (sequence is synthesized)
agtggatcagtgtcctgttgcccttcaggagagaccctgctcttctgtgggtcttgggaaagaggttagggatatgtaccgttgccaagaaagggaagacattatctggtgttctgatct

SEQ ID NO: 866954 - DNA, 120 bp, Artificial Sequence
  ENSG00000285980_8 (sequence is synthesized)
atcagtctgttctcttgtttctctggaagtgatgctatccctgcgtatttcctgtctaaaagagtagccttcagagaggagactgccactttatgggaagttttgaaaacaggggaggta

SEQ ID NO: 866955 - DNA, 120 bp, Artificial Sequence
  ENSG00000285980_9 (sequence is synthesized)
atggaacatgttagctagaaaagaagattgatttcttcctgcatggttacatggtcttgatgtagagaggagtctctggagaaaatggcagcgtttcaactggctcacaagtaggacaca

SEQ ID NO: 866956 - DNA, 120 bp, Artificial Sequence
  ENSG00000285980_10 (sequence is synthesized)
taaggtaggagatacgttcactctgctaagagaagtcacgtgttcatcctcagctccctgggaggcagcgtaactggcaaccatgtgggcaaggaaggcgtccagaggaaggggcaccag

SEQ ID NO: 866957 - DNA, 120 bp, Artificial Sequence
  ENSG00000285980_11 (sequence is synthesized)
ggacatgttctccaggctatgggcctcgtattttggattgttttgggaatcactgtgcttacatccctagaggatctgggtgtaggtcagacatactacagggctcaagcctaagcaacc

SEQ ID NO: 866958 - DNA, 120 bp, Artificial Sequence
  ENSG00000285980_12 (sequence is synthesized)
agggaaattagcaccgactctcacgtgggacaaagacttgacaaagagccaggctgcacacctcctcacccagaggctctttcttccttccctccctccctggttttcaggaaatcctgc

SEQ ID NO: 866959 - DNA, 120 bp, Artificial Sequence
  ENSG00000285980_13 (sequence is synthesized)
attgatatagacaatggtgtgctctgaatgtctctgctacctggagacacttaggctcttgaactaactcactagtggaagtaggggggattgtgagaagtagagggagctgataaatgt

SEQ ID NO: 866960 - DNA, 120 bp, Artificial Sequence
  ENSG00000285980_14 (sequence is synthesized)
gggtgctaaaatagggggtacatttgggtcagctgggaatttgaggaaaggataggttagggttctgtgtcaccaaaggcagcataaggtttcacagaagttcatagaagaaaacctcaa

SEQ ID NO: 866961 - DNA, 120 bp, Artificial Sequence
  ENSG00000285980_15 (sequence is synthesized)
gatgtcgccacatttctgagatgtcagcagctaagagaagaaaagattgcttagttacagaagttttacccatgggagcgtctggaaaatggcacttaacattgtcactgtcttcatgta

SEQ ID NO: 866962 - DNA, 120 bp, Artificial Sequence
  ENSG00000285980_16 (sequence is synthesized)
tcaagcacctagaagttcacagtgcagttctgaagacatgctcatttctctcttcttgtctcttcaggtgctacatggtgtgttggaaggctagtgacctgttaggcacttggaaaaatt

SEQ ID NO: 866963 - DNA, 120 bp, Artificial Sequence
  ENSG00000285980_17 (sequence is synthesized)
tatgcagcttcaaggctcatctcaaaagctaactctgaggccttcttgaccttccgagctgtgccgggtctctccatcccctgtgggctcattagaacttggatattcctttaatgcaaa

SEQ ID NO: 866964 - DNA, 120 bp, Artificial Sequence
  ENSG00000285980_18 (sequence is synthesized)
caacacatggaaatagaatggacaatcattcccatttagttgtcagctgttcaaggtcaatacttatgctctgttgatctctctaaccctctagatctggtgcctggcatgctgtagcta

SEQ ID NO: 866965 - DNA, 120 bp, Artificial Sequence
  ENSG00000285980_19 (sequence is synthesized)
ggagaagccatgaccaagaagacttgaaaaagttgttttattccagaataaaaaaaatactctctctgaagatgagtgtggcaaaccccataccccacacccttttagcaataacccagg

SEQ ID NO: 866966 - DNA, 120 bp, Artificial Sequence
  ENSG00000285980_20 (sequence is synthesized)
gcctcataattccctaaaattttattgcttcctgcctccaagctcttttgttgtctactgaccaagcatagctcttacttttgaccttttggtggccactgtgacttccatgagagagaa

SEQ ID NO: 866967 - DNA, 120 bp, Artificial Sequence
  ENSG00000285980_21 (sequence is synthesized)
cttttgcgacttcccctgcgactgtggttcctgggatccgtgcatgacagctacaagaacccaaacacagtgggactaaaaaagattcttttttcatctctacaaggagagcaatcttat

SEQ ID NO: 866968 - DNA, 120 bp, Artificial Sequence
  ENSG00000285980_22 (sequence is synthesized)
gaatgggacaagcatgatgcaagggaatacgaagaaatgctaacttacattcctgatttcagacatcagaaaaggaagtctaccacccactgtcggctttgagatcaggggcaaccagaa

SEQ ID NO: 866969 - DNA, 120 bp, Artificial Sequence
  ENSG00000285980_23 (sequence is synthesized)
aggacttctcagagcctttgtatgctgaagttcactgtgactctttcagaggaggcttctccccggcaatcataggagggggaactgtttcagaagacgaggccttggaggagcgggatg

SEQ ID NO: 866970 - DNA, 120 bp, Artificial Sequence
  ENSG00000285980_24 (sequence is synthesized)
tgcctgggagaggtggtcacctaccgggagttggcacgggtggctcaattaacagaatggcggggaaaagagggtcagccttggaaggctcgagactcacactgcgtggatgatgagtcg

SEQ ID NO: 866971 - DNA, 90 bp, Artificial Sequence
  ENSG00000285980_25 (sequence is synthesized)
ttggaaggctcgagactcacactgcgtggatgatgagtcgagcagcagtttggctctccttctgcatgccccttgcatctagcacacgtg

SEQ ID NO: 866972 - DNA, 120 bp, Artificial Sequence
  ENSG00000285980_26 (sequence is synthesized)
gtacggggagactccctcctggagaaagcagcataaaggagttcctgatttgtttttacatccttgtaaaggaatttgtacattctgcaagggagacttactggcgagcaagaacagaca

SEQ ID NO: 866973 - DNA, 120 bp, Artificial Sequence
  ENSG00000285980_27 (sequence is synthesized)
aatgcatctgtcaacttagcagcatcatttgagctcaatcagtgtggcgctggaggagtcccctaaatgtttaatttcttctcgcaccataagcgccgtgatagatcttatcaggattat

SEQ ID NO: 866974 - DNA, 120 bp, Artificial Sequence
  ENSG00000285980_28 (sequence is synthesized)
attgactgcacaaaatgagaccgggtgtggggcagttttctggaagggagagacgttaagagcacaagtcaggagtccatttaacaggtttctaataatatcatctcatatcgacatcac

SEQ ID NO: 866975 - DNA, 120 bp, Artificial Sequence
  ENSG00000285980_29 (sequence is synthesized)
attttcattcctaaccacttcaggcttgaggtgcacacaggttacccatccttttctaaaacccagtgttttctagtttggggctgataggacttcaggtagaacagaaatagaacttcc

SEQ ID NO: 866976 - DNA, 120 bp, Artificial Sequence
  ENSG00000285980_30 (sequence is synthesized)
ctaggcaaaagacgggcaactgagttacatggttgtgctgaggacatgggggctctagatgactccagtgaggtgccccaggtccagggtgttcagaagtcacggggcagagtccccaca

SEQ ID NO: 866977 - DNA, 120 bp, Artificial Sequence
  ENSG00000285980_31 (sequence is synthesized)
ggatctcagggccctttgcagatttctcagacatctttctagctcaactgcagaatggctcaaatgtatgataaatttttgctctaaaaatggagaacataaaggcacttacttgctcac

SEQ ID NO: 866978 - DNA, 120 bp, Artificial Sequence
  ENSG00000285980_32 (sequence is synthesized)
tcaattatgcatccaatatttattgagtaccatacaaagtccagacactgctctcacaatgccctgcggctggaaggggaaggagccatgacaacaaagatgttcagcccagcatggaga

SEQ ID NO: 866979 - DNA, 120 bp, Artificial Sequence
  ENSG00000285980_33 (sequence is synthesized)
atgccagcaaccgagctgtgtacaaggtgtggcaatggcatgagaacagaaccaaccccgctctcaccgcctgggaggcagcagcgaggcaggaggagacctggaaacctcacgaggaga

SEQ ID NO: 866980 - DNA, 120 bp, Artificial Sequence
  ENSG00000285980_34 (sequence is synthesized)
cgctctacctgggccaacaatattggttggatttttctggacagaaagaagagttcatgccatgccaggcagagagacaagcatggataagggcacagacaatgagaaacaaagtgttca

SEQ ID NO: 866981 - DNA, 120 bp, Artificial Sequence
  ENSG00000285980_35 (sequence is synthesized)
ggaagctactggtgtttggttgaggctggaggtggacagagaggcaggaggtccctggagaggcggtgaagggtcagctgcaggaagggggctgctccctgtgttcacaggggacagtgt

SEQ ID NO: 866982 - DNA, 120 bp, Artificial Sequence
  ENSG00000285980_36 (sequence is synthesized)
tggggtgagcagaccaccaacatgcgcgccagggtgtctgcagctccctcagaagtgctgttcttctcatgcagggggaggtaccgcaagcatctgcgatgtgagaaggaccaaagaagg

SEQ ID NO: 866983 - DNA, 120 bp, Artificial Sequence
  ENSG00000285980_37 (sequence is synthesized)
agtatgtcgtcctgtcccataccgcatggcggtgtaggtgacaggtactagaaacacagcaagggaaagggctttgcggcctgggcagtgcacacatgggcagacgtagaggaagcgaag

SEQ ID NO: 866984 - DNA, 120 bp, Artificial Sequence
  ENSG00000285980_38 (sequence is synthesized)
tgtgtgtatgtgtgtgtatgtgtgtgcatgtgagcatgtgtctgagcatgtgtgttgtaagaatattcttgcagggagcaacgtctgaagaaggctcaaagaggaaaatgaatattaaag

SEQ ID NO: 866985 - DNA, 120 bp, Artificial Sequence
  ENSG00000285980_39 (sequence is synthesized)
ggctcaaagaggaaaatgaatattaaagtcacaattgttaaggggctagatctcatggtacgtgctcttgccataagaaattaaaatttaaaataaaagaagtaaaatgaatggacatga

SEQ ID NO: 866986 - DNA, 120 bp, Artificial Sequence
  ENSG00000285980_40 (sequence is synthesized)
agaaactcttggaggtgatggatatatttgttaccttgatggtagtgatgataacatgagtatacacaaatgtccaaactcaccatgttgtatacaataattatgtgccatttttgtata

SEQ ID NO: 866987 - DNA, 120 bp, Artificial Sequence
  ENSG00000285981_0 (sequence is synthesized)
agaccttagtgctgcctgaaggaacacagtcctgcctatacttttactttacagccagtgaaattgattttggatttatctactgcagaactgtaaacatttttttaattgttttaagtc

SEQ ID NO: 866988 - DNA, 120 bp, Artificial Sequence
  ENSG00000285981_1 (sequence is synthesized)
actaagtttacagcaatttgtcagagtggaaataggaaattaatccactagttttggaaaactatttgttctgaatacaagctttttatccaatatatgctttacaaatgttttcttctg

SEQ ID NO: 866989 - DNA, 120 bp, Artificial Sequence
  ENSG00000285981_2 (sequence is synthesized)
ctggctttcaacagcatgttttgaagaccaggtatggacttatctgtactcagccaactgtagaagaacaacccttcagagctcctgagagttggtcgtcttcatacagctactctggat

SEQ ID NO: 866990 - DNA, 120 bp, Artificial Sequence
  ENSG00000285981_3 (sequence is synthesized)
ttagctaataacttggcctgccacagtctcatggatctggcagaagacatgaaactcctgggtcagaagaaaaggattttatgactcgcagtacaacaggcagctcttacttcgtcttca

SEQ ID NO: 866991 - DNA, 120 bp, Artificial Sequence
  ENSG00000285981_4 (sequence is synthesized)
catcagttacctttctcatctaagtcccgcaagggtgatgctgaggtcatcccagatggatgctaaacacaaaacatacggaatcttgctctgtcacccaggctagggtgcagtggcgcc

SEQ ID NO: 866992 - DNA, 120 bp, Artificial Sequence
  ENSG00000281404_0 (sequence is synthesized)
ctgagacagcagttgctgataccacaaacacttgtctgctgtttctgtggcctggctgagccaagaaaacatgttaaagcacagagcccacgcaagacagtgtgcttgcaggagacccta

SEQ ID NO: 866993 - DNA, 120 bp, Artificial Sequence
  ENSG00000281404_1 (sequence is synthesized)
ccaacaggaatcggataacaaggagctaaagagcctaatgggaggtgactggatcatgggagcagagttctcttggatggtttagcattatccccttggcgctgtctttgcggtacttct

SEQ ID NO: 866994 - DNA, 120 bp, Artificial Sequence
  ENSG00000281404_2 (sequence is synthesized)
ggggctgtttgccagaacacctacacatggcatgtccatggagctatttgacttcctcactgcaatggctgggttccaagagcagttatcccaagagaacaaggcagaagtgcatgactt

SEQ ID NO: 866995 - DNA, 120 bp, Artificial Sequence
  ENSG00000281404_3 (sequence is synthesized)
ttagaatcttgtctcacaagtcacacagagtcacttccaccatcccctgttggtcaaggaggacatgaaggtcttcctaggagcacggggagaagacagacttctaccacctgttggaag

SEQ ID NO: 866996 - DNA, 120 bp, Artificial Sequence
  ENSG00000281404_4 (sequence is synthesized)
gagtgtcagtgttacatagcaagagaagcacatggaatgggatgtattgtgatgcccatctttggaacagacaatttggcatatctgtgaaaattaaaagtctgatttggatataacaaa

SEQ ID NO: 866997 - DNA, 120 bp, Artificial Sequence
  ENSG00000281404_5 (sequence is synthesized)
agctatgggaaggtcagacagggcaaaagctaacctaccacctgaaaatgttacagttctgaaaaattgaatcttttaaatacaattgtgggatttatagtattacccatgtcaatttga

SEQ ID NO: 866998 - DNA, 120 bp, Artificial Sequence
  ENSG00000281404_6 (sequence is synthesized)
agagtttgtttctgtcctactattaaagatacttatcttcttgggctaagtggatcgttggaatttggatgctacagtacccgtttggtgaccccttttataatcactcagaggcttctg

SEQ ID NO: 866999 - DNA, 120 bp, Artificial Sequence
  ENSG00000281404_7 (sequence is synthesized)
gttctttctcttcttgactagaatggaaccattttccagtgactttttaaattcacaatatgaagtttttgtatcctagacccacaaaaagatgagctgcttgacagaggtcaagaaggt

SEQ ID NO: 867000 - DNA, 120 bp, Artificial Sequence
  ENSG00000281404_8 (sequence is synthesized)
tgtggagtgggtgggctgggacaggattcgggaatccttagcagtggcacaaagttctgaatacagcctgcgttagacatggacatattgggaagtatttgggtcttcttcgtatggaga

SEQ ID NO: 867001 - DNA, 120 bp, Artificial Sequence
  ENSG00000281404_9 (sequence is synthesized)
ctgccattttaagggactttgagttagactgtatatttcagaggctggaggaggaggagggaagacgagagatacaaacagaaaagtgtggaacagtatttgggtggatcagcaagtgag

SEQ ID NO: 867002 - DNA, 120 bp, Artificial Sequence
  ENSG00000281404_10 (sequence is synthesized)
gcagattttaagtatttcttattttattggcctaaatgcagtcttctagggaagggtaaaagtctggattatatttagaagcctcttcataccaattttttaagctgtattttaaaataa

SEQ ID NO: 867003 - DNA, 120 bp, Artificial Sequence
  ENSG00000281404_11 (sequence is synthesized)
attttatactcatgaagaattgcaaaagccaataccaccaattcctgtgtgtcttcacccaggattccccagatgccccaatgacaagatcttaggtaaccttgatacattatcagtact

SEQ ID NO: 867004 - DNA, 120 bp, Artificial Sequence
  ENSG00000281404_12 (sequence is synthesized)
aagtaatgggcattgattaatgctgttaactacactgcagactttattcgaattttgttacatgtctttttccagtgtatatttatatgaaatttagttatgttatagatgcatggtaac

SEQ ID NO: 867005 - DNA, 120 bp, Artificial Sequence
  ENSG00000281404_13 (sequence is synthesized)
tactgccataatcagtatacagaatatcctatcaccacaaagtctcttatgctacagttttataatcataccttcacagatgtgacccccagcaaccactgatgtgttctccgtcactat

SEQ ID NO: 867006 - DNA, 120 bp, Artificial Sequence
  ENSG00000281404_14 (sequence is synthesized)
catttggccatttcaatagtgttaggtaaatggcatcatgcagtacatagccttttaaaattggcttttttttttttgtactcagcaagtatccttgagagtccttcagcttgtcacatg

SEQ ID NO: 867007 - DNA, 120 bp, Artificial Sequence
  ENSG00000281404_15 (sequence is synthesized)
catcagtagtttcttcttttttattgctgagtagtattccattgtgtggacgaaccactgcttatccattcacttattgtaggacattgtggttatttctagctttcagctattataaat

SEQ ID NO: 867008 - DNA, 120 bp, Artificial Sequence
  ENSG00000281404_16 (sequence is synthesized)
aaagttgctataaccatttgtgtagatttttgtatggaaatgtgtttttatttctgtaggataaatacccagcagacttatggcaagtctgtgtttaactttataagaaactgccaaaat

SEQ ID NO: 867009 - DNA, 120 bp, Artificial Sequence
  ENSG00000281404_17 (sequence is synthesized)
ctttttcagagtagcgttttatattcccaccatcaggatatgagagttctagttgttctacatcctcactaacagcattgtggagttttgggcattatttatacatattattctaatagg

SEQ ID NO: 867010 - DNA, 120 bp, Artificial Sequence
  ENSG00000281404_18 (sequence is synthesized)
tgtatagtggtatatcaccatgactttaatttgcattttttagtagctacaatgttaaacatctgtgtttaacattgaataccacatgccatttgaatatcctctttagtaaagtgtctg

SEQ ID NO: 867011 - DNA, 120 bp, Artificial Sequence
  ENSG00000281404_19 (sequence is synthesized)
gttttgtacattttctaattggattttttgttttcttactgttgtatttagagttatttatatattctggatataaggtccttgtccgaactgcgaattggaaatattttctcccagtct

SEQ ID NO: 867012 - DNA, 120 bp, Artificial Sequence
  ENSG00000281404_20 (sequence is synthesized)
ataccttgtattttcatcctcttaacgtggcccttctcagagcaaaaggatttggttttgataaagtctactttattgatgtttttcttttatggtcatgattttagcatcatgtctaag

SEQ ID NO: 867013 - DNA, 120 bp, Artificial Sequence
  ENSG00000281404_21 (sequence is synthesized)
aactccacctaatcctagcctattaaaagatttatggtttcactcttcacatttggatctgtgatccatcttgagttaatgttcgtattaggtgtgaggtttaggtttaggtttgttttt

SEQ ID NO: 867014 - DNA, 120 bp, Artificial Sequence
  ENSG00000281404_22 (sequence is synthesized)
atgaccaagaatgtgcagttactctaacaccatttgttgaaaaaatcttttctcctttgaattggatttgcccttttgttaaaatcagttggccacagttgcatgggtctatttctggac

SEQ ID NO: 867015 - DNA, 120 bp, Artificial Sequence
  ENSG00000281404_23 (sequence is synthesized)
acactattctgttcctttgatctgcatatctgtccctccaccaggacttcattgccttaactgctatcactgtatagtattagaagactgaatattgtgattccaccagctttactttct

SEQ ID NO: 867016 - DNA, 120 bp, Artificial Sequence
  ENSG00000281404_24 (sequence is synthesized)
tttgtgttttttatgctttcatgtaaatttgaaaattttctcatatctacaaaaactccttctgaggttttgatgaaagtggtattaagcctctggatcaacttgaggggaattgacatc

SEQ ID NO: 867017 - DNA, 120 bp, Artificial Sequence
  ENSG00000281404_25 (sequence is synthesized)
aagcacagtttgtttctgtattgacttaggtctttttaagattttcttcatgagagttgtgtaattttctccgtacaaatcctatgcatagtttgttcaatttagattgaagttattttt

SEQ ID NO: 867018 - DNA, 120 bp, Artificial Sequence
  ENSG00000281404_26 (sequence is synthesized)
ttggagcagctgtataaagggttttgtgtttctaatttcagtttcaatacatttgttgctagtgtatagaaataagttccatttgtgtgtatgtgtgtgtgtgaactttgtatcctgcaa

SEQ ID NO: 867019 - DNA, 120 bp, Artificial Sequence
  ENSG00000281404_27 (sequence is synthesized)
ccctgctaactcacttattagttgttcccttccctgtttcccagaagagatggtataaagttactgttacttattcttttaatgtttgttacagttcagcagtgataccatctgggcctg

SEQ ID NO: 867020 - DNA, 120 bp, Artificial Sequence
  ENSG00000281404_28 (sequence is synthesized)
gagatttctttatcaaaaggttttaaactgttaattcaatttttttagtagttatgagactattcaagttatctgttatcttgggtgtttttatagtttggaattggtccatatcatcta

SEQ ID NO: 867021 - DNA, 120 bp, Artificial Sequence
  ENSG00000281404_29 (sequence is synthesized)
aattgtcaaatttatgtgcatagagttgtttgttgtattcctttattatcctgtaatgtctgctgggtctgtaatagtattccttctttcattaccaatattgatcatttatgtctttct

SEQ ID NO: 867022 - DNA, 120 bp, Artificial Sequence
  ENSG00000281404_30 (sequence is synthesized)
tgcactttcccccttcttaacttcctgtctcccctcctctcctctcctctctccttccctcttctcttcttctccccaccttttgtcagccttgcttgaggttgatcaatgttattgatc

SEQ ID NO: 867023 - DNA, 120 bp, Artificial Sequence
  ENSG00000281404_31 (sequence is synthesized)
ttttcaaagaataaacttttgctttcatttttctctattgtttttctgttttcaatttcattgactttttactcttacgtttattccttcctcctacttgctttgggtttattttgctct

SEQ ID NO: 867024 - DNA, 120 bp, Artificial Sequence
  ENSG00000281404_32 (sequence is synthesized)
tccgcttgtagtttcttgaggtggaagctttgttttggatctgagaccatcttccaatataagcatttagtgttaaatttataaatttctctaaaagtgaaactgctttaactgcatccc

SEQ ID NO: 867025 - DNA, 120 bp, Artificial Sequence
  ENSG00000281404_33 (sequence is synthesized)
aaagatttttatatgttgtattttcattcccttcagtgtatttttacatttcctttgagactttctctttgaccattggagtatttaaaagtgggttgtttaatttctaattgttttgtg

SEQ ID NO: 867026 - DNA, 120 bp, Artificial Sequence
  ENSG00000281404_34 (sequence is synthesized)
attttcctggtatctttctgttattattgatttctagttagattcattatgaacagataatatattttttatgatttcagtccttttaaatttgtgaaggtttgttttacatgacccagg

SEQ ID NO: 867027 - DNA, 120 bp, Artificial Sequence
  ENSG00000281404_35 (sequence is synthesized)
ataggatgtggtccatcttggtatctatttattagttgccaaggccattttttccttgctgaggggcttggcttagagataacttacatctcttttgcccacattccaatagttagagct

SEQ ID NO: 867028 - DNA, 120 bp, Artificial Sequence
  ENSG00000281404_36 (sequence is synthesized)
aaatcatatggccacacctaactgcacagaaggctgggaaatagattttagctgtgtgacttagaaggaaatgggaatcaagtctggaaattacataacactctcttgtttttgactttt

SEQ ID NO: 867029 - DNA, 120 bp, Artificial Sequence
  ENSG00000281404_37 (sequence is synthesized)
ttaaaattttctccctttattcccattcccaatcctatagttatttaactacataccctagtgtatttaatatatgtccttctgatctaccttctgtacattgaattagatttttatgaa

SEQ ID NO: 867030 - DNA, 120 bp, Artificial Sequence
  ENSG00000281404_38 (sequence is synthesized)
tctttcaaaaatacctaagatttcttttagtttttttttacatgtttataaatggttattgtctgatatagtttggatgttgtatcctctaaacctcatgttgaattgtaattccctttg

SEQ ID NO: 867031 - DNA, 120 bp, Artificial Sequence
  ENSG00000281404_39 (sequence is synthesized)
ttggaggtagagcctaatgggaggtgactggatcatgggagcagagttctcttggatggtttagcattatccccttggcgctgtctttgcggtacttctagcaagatctggctgtttaaa

SEQ ID NO: 867032 - DNA, 120 bp, Artificial Sequence
  ENSG00000281404_40 (sequence is synthesized)
ggtgtgaggcatctttcccctcgccctctgttgctcctgttttcaccatgtgacatgcctgctcctgctttgcctgctgccatgagtaaaagttccctgacgcctctccagaagctaagc

SEQ ID NO: 867033 - DNA, 120 bp, Artificial Sequence
  ENSG00000281404_41 (sequence is synthesized)
agatgccagcaccatgcttcctgtacaacctgcagaacttattggctggagttggcgatgactcagcagatcaaggctggaagactcattctcgtcaggtggttgacgttggctgtcagt

SEQ ID NO: 867034 - DNA, 120 bp, Artificial Sequence
  ENSG00000281404_42 (sequence is synthesized)
gataacaaggagctaaaggggtgataatgagaagcaatggactagaggattcaagtggaagagtcttcatcacccgcaggggaatcaggagcaatgttcatcagtgaatgaaaggagtgc

SEQ ID NO: 867035 - DNA, 120 bp, Artificial Sequence
  ENSG00000241111_0 (sequence is synthesized)
ggcagcagtcactccagatggcccgctgaagctgggagtcctgagttaatttcaagccaaatttctcactccctggaggagcagagtggagggtgtgtgtgcatggagaagtccaagatt

SEQ ID NO: 867036 - DNA, 120 bp, Artificial Sequence
  ENSG00000241111_1 (sequence is synthesized)
tcatatctggaaaagaagactgggagaggccagcatgaatggccactgtcctcgccaaatctggatggtatgtcttaggtgggattacatgaagaataagatgaagtcttacctcacctc

SEQ ID NO: 867037 - DNA, 120 bp, Artificial Sequence
  ENSG00000241111_2 (sequence is synthesized)
tgcaaaatgaagactgcctatagtaattggcagagaacatgaaaatggccaaggagtttcatcaatcaaggaacttaaaactccaaattggactcgcacaatttctaccagaaacctgcc

SEQ ID NO: 867038 - DNA, 120 bp, Artificial Sequence
  ENSG00000241111_3 (sequence is synthesized)
actttagtagcacggtattgcaaattatttcttaatcagtttgccaagcagtttacaaacttactatacaaacgtaatagagttaattctccggaggctcggataattaatgaagcattt

SEQ ID NO: 867039 - DNA, 120 bp, Artificial Sequence
  ENSG00000241111_4 (sequence is synthesized)
agatatgaagatagcatgcggaaaacagccacaaccaacatgtgcattgcttttttaaaaaaatcagtgacaatgacaaatgtcatattaatacctgaaaagcaaattattttaatacat

SEQ ID NO: 867040 - DNA, 120 bp, Artificial Sequence
  ENSG00000241111_5 (sequence is synthesized)
cccgaatggagtgccattaccatgtcctttacagccttcctttcctcagacccatctgggacggggtctgaaatgccacttttgacattctctccataaaaaatactagaaaatgttaac

SEQ ID NO: 867041 - DNA, 120 bp, Artificial Sequence
  ENSG00000241111_6 (sequence is synthesized)
tactatactgaaaagagatcacgctcacctcaccatggcagatggccactgagatacaccgggcactacatcgacagtacatctcactacaggtgggtcatccgatggattatttcaact

SEQ ID NO: 867042 - DNA, 120 bp, Artificial Sequence
  ENSG00000241111_7 (sequence is synthesized)
gccacaatccattaaggggaggaggaggatggaagaaaccaagtgcttcatttttaactgaagcaaggtagggagttttattttactataaacagcacaaccgttaaatgtcttcattaa

SEQ ID NO: 867043 - DNA, 120 bp, Artificial Sequence
  ENSG00000241111_8 (sequence is synthesized)
gcaaactcacttttgagcccattttctgaccaacagtcctcaaagttcaaaatggaaataccctcccaacaaagcctgtttttttaaagacattgcaccactgaaatctcagcagctcaa

SEQ ID NO: 867044 - DNA, 120 bp, Artificial Sequence
  ENSG00000241111_9 (sequence is synthesized)
ccttcctgggtaatccagatactctggttactaagctggttacactggactctttctacaatctctgggagctcttcgaggtggttgtcacctgtcctctgtttcatttccagttcttct

SEQ ID NO: 867045 - DNA, 120 bp, Artificial Sequence
  ENSG00000241111_10 (sequence is synthesized)
tttccctgacctgccttcagattctcctttaacttctacccttgacctgccttctgttttcaaatagccttgttccttctccaggcatgacatgtcacacaccgtccctcgcagagcccc

SEQ ID NO: 867046 - DNA, 120 bp, Artificial Sequence
  ENSG00000241111_11 (sequence is synthesized)
ctcagaatccttctgtccctcaatcccaaatgcttaagttcatttgctttgaggacaaccggttgtcaggctaaggcagcagttctgtctgccttggtaaaggaaagcagataatacaat

SEQ ID NO: 867047 - DNA, 120 bp, Artificial Sequence
  ENSG00000241111_12 (sequence is synthesized)
ccaggaaacatgagcaccagaacataatgccacattcaaaacaacgtcatgctgacatcacacaatggcaccactcacagtcacttttactttccccaagggatagatcaacattaagta

SEQ ID NO: 867048 - DNA, 120 bp, Artificial Sequence
  ENSG00000241111_13 (sequence is synthesized)
acttcaacattcccagcagggatggcatttctcacagaattttactgacaccggttggtttctctaattggcaaaaattacatttgcaatttaaaaaaaaattactaccactttgtagaa

SEQ ID NO: 867049 - DNA, 120 bp, Artificial Sequence
  ENSG00000241111_14 (sequence is synthesized)
aataaattctactgagggtgggagcagacttaaggatggctccttaagatggaacggagcataaaatgctttgggtctaacagttatgttttttcagccacaaaaagccaaattgaatat

SEQ ID NO: 867050 - DNA, 120 bp, Artificial Sequence
  ENSG00000241111_15 (sequence is synthesized)
gttcctttgaaaaaggtctcactgacatgtaacaaatttgtatagaaaaaaaaaaaaaaaaaaaaaaggtggtaccgggccacatttcaatactactcagagacaatggtggatgtgcat

SEQ ID NO: 867051 - DNA, 120 bp, Artificial Sequence
  ENSG00000241111_16 (sequence is synthesized)
gcaagtccccactgagtcctacgatatagaaattcctttgatattacaaaatacaaaaatattttatcagaactctcatttacattgcatttacaatggacatgtaaataacttagtctt

SEQ ID NO: 867052 - DNA, 120 bp, Artificial Sequence
  ENSG00000241111_17 (sequence is synthesized)
gggtcctggctaataaacaaattacttactgaaaaaagggtcctaaaagtaagagaaccagagaggataaaagcgagcaggaaacaatttaccatcttgagagatggcaactcaacacag

SEQ ID NO: 867053 - DNA, 120 bp, Artificial Sequence
  ENSG00000241111_18 (sequence is synthesized)
aactgatgggaaggaagtgaccaagcctggcctcgatagagtctactgtgtttccaaagtgaaatgtgcaaataatattcaacatgccaagaactgtgactacctattgagtcaacctgt

SEQ ID NO: 867054 - DNA, 120 bp, Artificial Sequence
  ENSG00000241111_19 (sequence is synthesized)
aaccttgcctccatctactgacagcattttcccttttctcccccataagccacccccaaaagcgctttaacatttaaaacagtgcaagtttctgactttacattcttagctcccatcttc

SEQ ID NO: 867055 - DNA, 120 bp, Artificial Sequence
  ENSG00000241111_20 (sequence is synthesized)
tcccattccctgatcccaatcatattaagaaatgatacagtttttgctcttctgtcttttcctgctgtgcaactgtcctctgccacctaatgtggaagatttggggaggccgtaggagct

SEQ ID NO: 867056 - DNA, 120 bp, Artificial Sequence
  ENSG00000241111_21 (sequence is synthesized)
gtatttgtgcagcagctcatcgcttgtgacgtatcgcaggcgcgctggctgggggatgggttctcctaggaaatagccctcgttgtcagactctgaagaggaggagcaggtggaacacca

SEQ ID NO: 867057 - DNA, 120 bp, Artificial Sequence
  ENSG00000241111_22 (sequence is synthesized)
atcatactcggcgaagtagggtccccagcggtccccaaaggcattctgcaaagccaggtccgacacagtcctagggcactggccgtacaggtccctccgggacccatgccccatgctctc

SEQ ID NO: 867058 - DNA, 120 bp, Artificial Sequence
  ENSG00000241111_23 (sequence is synthesized)
ctggaagctccgctggcgcataaattggtcatagtcctccctggctctcagagggggcctatcttttaaccgggagatggcctcgcgttcgctggccaggtggagggcgttgtcggagcg

SEQ ID NO: 867059 - DNA, 120 bp, Artificial Sequence
  ENSG00000241111_24 (sequence is synthesized)
agagcgtcgggaacgcctggacctgtgaggtcggaaacggcggttgtcgtcgcgtgaagtagctcttctccgggtgcgttcactcatgggctggatcctcacgccctcctgccctggcag

SEQ ID NO: 867060 - DNA, 120 bp, Artificial Sequence
  ENSG00000241111_25 (sequence is synthesized)
cttgctgcccgccatccctccatcaaaatcaaagctctgatgcatccttccgtgggactgcaggtctctgtagccaatggggttgctgagctggtggaggtttccctccatctcctggta

SEQ ID NO: 867061 - DNA, 120 bp, Artificial Sequence
  ENSG00000241111_26 (sequence is synthesized)
ctgctgggcagagagcaggctgcgaactgactctgcgctccggaactgcatggacgagttaagagtgcccatgttgctcagcttctcagacacattcattccagagtctttgctgaggtc

SEQ ID NO: 867062 - DNA, 120 bp, Artificial Sequence
  ENSG00000241111_27 (sequence is synthesized)
tcctggcgcttggcaccaccatcagcagagaggcctggggaagagaggaggggaccacagagattaatacagatgtgcagcaatgggtatcactgtcactgctggtcatctatctagggt

SEQ ID NO: 867063 - DNA, 120 bp, Artificial Sequence
  ENSG00000241111_28 (sequence is synthesized)
cattatataccgttgtgaagttgtgtactgcacaaaggccctctcagggggcacatgtgcctgtgagggggttctctccactccacagtaggtcactatctacctagagggggcacttac

SEQ ID NO: 867064 - DNA, 120 bp, Artificial Sequence
  ENSG00000241111_29 (sequence is synthesized)
ttaaaatgcttccagagatgtattttaccagttactagttcctccaaaggctcatcaaagttactaagagcccactgtgtatcctatgtatgatgcttcctctatttggagtttcacttt

SEQ ID NO: 867065 - DNA, 120 bp, Artificial Sequence
  ENSG00000241111_30 (sequence is synthesized)
gcaaagtactttaattacatttttgattctaatcatgcactataagctctgtaggacagatattttggatgagcaaactttaagctctagaggctggatcatgcccaagctgtttctggc

SEQ ID NO: 867066 - DNA, 120 bp, Artificial Sequence
  ENSG00000241111_31 (sequence is synthesized)
aataccaaacactggttccacaatattgggccagttcacttctctgttagcccgcagcagtttcctgctttgcctgctgtccctaagtggcaggtggctccctatcaaaagtgtcttgga

SEQ ID NO: 867067 - DNA, 120 bp, Artificial Sequence
  ENSG00000241111_32 (sequence is synthesized)
cactaagtgactccctagatatagatagagaaatatttactctctcagaccattcagtgaatgctccaaggttgtaaatgggtctctagcagccagaagatgtgtgtgggaccccaaggg

SEQ ID NO: 867068 - DNA, 120 bp, Artificial Sequence
  ENSG00000241111_33 (sequence is synthesized)
acctctcggtcgcacggggagggactttcaaaagtaaagcagtgggtttgatgctctcaaacagtgggtgccccagcaatggacctccatttcttaactgctgtcaaatgagctcttggc

SEQ ID NO: 867069 - DNA, 120 bp, Artificial Sequence
  ENSG00000241111_34 (sequence is synthesized)
atccctgagatgaaaaccattttgaaggtagtgggagatactgactgcagtaacttccattttgctcattttcaggcagagctctctaaggagatgtttaagaatgggccaggtggcaaa

SEQ ID NO: 867070 - DNA, 120 bp, Artificial Sequence
  ENSG00000241111_35 (sequence is synthesized)
gtctcagcattttccactcattacatattgcaaggatcagcaatttgccattcctggtcatagacaacatgcctttggattgcaatggcccattatcacccctgctactgattattcctg

SEQ ID NO: 867071 - DNA, 120 bp, Artificial Sequence
  ENSG00000241111_36 (sequence is synthesized)
tctcctactggggcctccaacttcctcttccgtgacaaaacctaaagcagtgttacgagcactttgcaaaattacttggcaatatttactaaagctaaatacacatatacgtatatgaat

SEQ ID NO: 867072 - DNA, 120 bp, Artificial Sequence
  ENSG00000241111_37 (sequence is synthesized)
tataaataaagccgctctgaatatccttggccattttttgtggacttatgaatttctgttgggtgtacgaccaagagtagaaattccacaattctccatcttcactcttgattatatatt

SEQ ID NO: 867073 - DNA, 120 bp, Artificial Sequence
  ENSG00000241111_38 (sequence is synthesized)
catcagaagttagtaagaaggtccaagaaatggacaagggtactcagagaagctttcttgtaatagcccagaaacggaaacaactcaaatgtcaattatcaggaaaatggataaatatat

SEQ ID NO: 867074 - DNA, 120 bp, Artificial Sequence
  ENSG00000241111_39 (sequence is synthesized)
tgtggttttttctaccattccccactaaaaggaatccaggctctttagaaagatggccaattccaggataaaggcaaggaaattaaaagaaccaggatcttgttatgccataaagtgaga

SEQ ID NO: 867075 - DNA, 120 bp, Artificial Sequence
  ENSG00000241111_40 (sequence is synthesized)
aagtattaaaaataagatatggcaggggtttgtcagaaggacacagggcctaacttgaaggggcccccactggccaaatctgaacaatttgagcactcaaatatttaagtgaagtaatga

SEQ ID NO: 867076 - DNA, 120 bp, Artificial Sequence
  ENSG00000241111_41 (sequence is synthesized)
tttataaaccactgaaacaaataggaattcacaagtccatgctgatagcagataaataaaaacataaataaatacacaaacagggaaaagagagggctctatgtatagtggaatgccaac

SEQ ID NO: 867077 - DNA, 120 bp, Artificial Sequence
  ENSG00000241111_42 (sequence is synthesized)
cgctgtcagtagagtaagttcacaagaaggaagggggtgccagatttggaaagtcattttataaccattggaggtagagtgcttcacacaagaatcaaaaagtgtgctaaatttaggggg

SEQ ID NO: 867078 - DNA, 120 bp, Artificial Sequence
  ENSG00000241111_43 (sequence is synthesized)
taaaatttgatgggggagagcattgttttaaagtgtttccctacacattgcttattagttgcaagggaagaattagtaactaaacaaaggtaaaatcagacaacaccttgaccttaagtt

SEQ ID NO: 867079 - DNA, 120 bp, Artificial Sequence
  ENSG00000241111_44 (sequence is synthesized)
caaacttaacatccctggtgagatgcaactgcaccctgcatgcctccagttgagatgtactcagaagggcacactatcccttatgtagtattccagtcaagaatgtattacccgaatgca

SEQ ID NO: 867080 - DNA, 120 bp, Artificial Sequence
  ENSG00000241111_45 (sequence is synthesized)
ttcaggaggaaacattagacagatgccaaaaggagggacatttgttatgaaaaaagggactgtagtcttaagaccagacaagactgagagaatgttctagatgaaagggtacgagggaaa

SEQ ID NO: 867081 - DNA, 120 bp, Artificial Sequence
  ENSG00000241111_46 (sequence is synthesized)
catggcaattacatataatacctgatcctggactggaacctgctctttagggaaactaaatgctataaagtaggggttcccagacctcaggctacagactggttaggagcagggccacac

SEQ ID NO: 867082 - DNA, 120 bp, Artificial Sequence
  ENSG00000241111_47 (sequence is synthesized)
agaaggaggtgagtggtcagtaagggaagcttcatctgcatgtacagccactccccattgctccaactactgcctgacctctgcctcctgacagatcagcagcagcattagactctcata

SEQ ID NO: 867083 - DNA, 120 bp, Artificial Sequence
  ENSG00000241111_48 (sequence is synthesized)
ggagtgtaaaccctgttgtgaactgctcatgcaggatctaggttgtgtgctccttacgagaatctcatgcctgatgatccataactgtctcccattacccctagatgggactgtctagtt

SEQ ID NO: 867084 - DNA, 120 bp, Artificial Sequence
  ENSG00000241111_49 (sequence is synthesized)
gcaggaaaacaagctcaggtctcccactgactctaccttaaagtgagttgtgtaattatttcagtatatattacaatgtagtaataatagaaataaagtacataataaatgtaatgcact

SEQ ID NO: 867085 - DNA, 120 bp, Artificial Sequence
  ENSG00000241111_50 (sequence is synthesized)
agaaataaagtacataataaatgtaatgcacttgaaccatcccaaagccatccccaccccctggccccagtctgtggaaaaattatcttccataaaaccggtccctggtgccaaaaaggt

SEQ ID NO: 867086 - DNA, 120 bp, Artificial Sequence
  ENSG00000241111_51 (sequence is synthesized)
tcaactgaaaaaaaaatggaacatgggcaatagataaaagtattatgctaaatttactgtggtcaattaataatggtgataatgtgggagaagatctttactcttgggaaatatatatgg

SEQ ID NO: 867087 - DNA, 120 bp, Artificial Sequence
  ENSG00000241111_52 (sequence is synthesized)
aaggatatggtggtaaatggcccagatggatgcaatttgctctcaaatggtttataaataaaatgtgtgtgtgtgtgcgtgtgtgtgcatgcatgtgaacatgaaagaacaaatgtggca

SEQ ID NO: 867088 - DNA, 120 bp, Artificial Sequence
  ENSG00000241111_53 (sequence is synthesized)
aaaggttaacaatggatcaatctacgtaaagagtacattacaggtgttgtttgttctatttttataactttttttaagtctgaaattatttccaaataaaaagtttctttaacattagaa

SEQ ID NO: 867089 - DNA, 120 bp, Artificial Sequence
  ENSG00000276093_0 (sequence is synthesized)
caaacttcatttcacaatggctgctgacatcaataatgtcagacaggataatcaagtttgcataatgtaacagttctccaagggtccctctgcacaatcacccctcccagcctgcatata

SEQ ID NO: 867090 - DNA, 120 bp, Artificial Sequence
  ENSG00000276093_1 (sequence is synthesized)
gggaaacagaccttagattaggcagaaaaggcccttagactgtcaaacacaagagtcctttctccacatgcgattttacaggagttagcctccatcagaaaagctgacttctgattccag

SEQ ID NO: 867091 - DNA, 120 bp, Artificial Sequence
  ENSG00000276093_2 (sequence is synthesized)
atcattgaatcatcctgtgcctcaattttctctgctttaaagtggaaataactctgtagtattctaaaagaatgtcgatcttgaatggcatatatgtaccatgtaattgatgaagtttat

SEQ ID NO: 867092 - DNA, 120 bp, Artificial Sequence
  ENSG00000276093_3 (sequence is synthesized)
taccatgtaattgatgaagtttattaagaataaaaatatggtgatagttcaataagttactttgtcaacttaatatttgttaacatacattgccaataatttatttggaaaataactaat

SEQ ID NO: 867093 - DNA, 120 bp, Artificial Sequence
  ENSG00000225542_0 (sequence is synthesized)
tgtttccctttttttcttcccgccgactttcactcgataaaaccctgctttattcaccctttaaaccttctccaaacctaaattttcctggccttgggacggacaagaacccagtcttca

SEQ ID NO: 867094 - DNA, 120 bp, Artificial Sequence
  ENSG00000225542_1 (sequence is synthesized)
gatgaaggaaggaaaagtcctgcaacattcttggcgtgcaacgttggggctcttgaagagctccagaattgggattctattttcaaggaatgtcctagacaacatggcattattaattga

SEQ ID NO: 867095 - DNA, 120 bp, Artificial Sequence
  ENSG00000225542_2 (sequence is synthesized)
gctactgtactgtgatgtgaaaataaaggacagttataacaaaatactgcaaactcagtggctgaaaacatcagaaatttatcatctcacatgtctggaagctagaaatttgaaatccag

SEQ ID NO: 867096 - DNA, 120 bp, Artificial Sequence
  ENSG00000225542_3 (sequence is synthesized)
gtgctgtcaaatccatgcttcctctgaaacctgtaggggaacatccttccttgccagccgtctctggtgccctttgtctcataggtacatcattccaatcctccccttttgcattgtatt

SEQ ID NO: 867097 - DNA, 120 bp, Artificial Sequence
  ENSG00000225542_4 (sequence is synthesized)
ctccctgtgtctctctgtctcggtgcccaaatttctccttttataaggctaccaatcatatcgaattaccctaatgacctcattttaacttgagtacctctgtaaaggctctgttaccaa

SEQ ID NO: 867098 - DNA, 120 bp, Artificial Sequence
  ENSG00000225542_5 (sequence is synthesized)
gggtcaaatgttgaaagctactgtactgtgatgtgaaaataaaggtaaggacaatatactttaatacataaattatagatggctaaattttaagaattttctcttattctaaaatatgtt

SEQ ID NO: 867099 - DNA, 120 bp, Artificial Sequence
  ENSG00000225542_6 (sequence is synthesized)
cttctgactttactgttaaaattttcttttatgaaatcctggtgctattaaagggagggatttattcatttacttattttttatgtccaggtttgaaaaaaagtaaaaatgagaaagtcc

SEQ ID NO: 867100 - DNA, 120 bp, Artificial Sequence
  ENSG00000225545_0 (sequence is synthesized)
tcttcattttaagtgtgacctgaagatagagtgagcttcctgctgcacggagtcactatagagcccagaagaaagaacaccaaaagagaagttttttaaaaagaaaagaaaaggaaaagg

SEQ ID NO: 867101 - DNA, 120 bp, Artificial Sequence
  ENSG00000225546_0 (sequence is synthesized)
gggtttccgctattgtttcgtcctcattttctcttgctgctaccatggaagaagcgactttcgcctcccgccgtgattctgaggcctttccagccatgtcaaactcaaaatgtgactgaa

SEQ ID NO: 867102 - DNA, 120 bp, Artificial Sequence
  ENSG00000225546_1 (sequence is synthesized)
gaggcctttccagccatgtcaaactcaaaatgtgactgaaaaacagaagcatttggaatacgtaacagaagtcattaaaaagagccatgtaatatgtgcctgcttccccttctgccatga

SEQ ID NO: 867103 - DNA, 120 bp, Artificial Sequence
  ENSG00000225546_2 (sequence is synthesized)
tgatgccttctcagccatgcagaactagtctcactctattgctcaggctggagtcagtggcgcaatctcagctcactccaacctccgcctcatgggttcaaatgattctcctgcctcagc

SEQ ID NO: 867104 - DNA, 83 bp, Artificial Sequence
  ENSG00000225546_3 (sequence is synthesized)
caagtagatgggattacaggcacatgcccagggtttcaccatgttagccaggctgttctcagactcctgacctcaggtgatcc

SEQ ID NO: 867105 - DNA, 120 bp, Artificial Sequence
  ENSG00000225546_4 (sequence is synthesized)
caggcatgagccactgcaccaagccttattctattgattattataagaagtgttaacatcttgaactatgattatatattcatcaatttaagcatatacatttgattttgttaagtcctc

SEQ ID NO: 867106 - DNA, 120 bp, Artificial Sequence
  ENSG00000225546_5 (sequence is synthesized)
aagtcctcctgaagaagtctgtttataatattaaatatcctagttgatcactgttttaaaatttacttttttatatattttttttcacttaatgtaactctgatcaatgctacttcagta

SEQ ID NO: 867107 - DNA, 120 bp, Artificial Sequence
  ENSG00000225546_6 (sequence is synthesized)
aaactggcttttaattttcaagtgagtcttatgtactcccccacatatttagacatatatgtatgtgtgcacgtgtgcctatatatacttatatacttcatatatatatacacacacaca

SEQ ID NO: 867108 - DNA, 120 bp, Artificial Sequence
  ENSG00000225546_7 (sequence is synthesized)
tatatgtgaagagagagagaatatgtatacacacataccacatttagcaagtttttaagtactttaggtgtcgagctgtgaatgagaaaaaagagcagggaattcaaataaaaataatgt

SEQ ID NO: 867109 - DNA, 120 bp, Artificial Sequence
  ENSG00000225546_8 (sequence is synthesized)
ggacttaatataattactggtaatcttagattttgtttctatttactgttgaattttaggtaaaaattcagaatatcttagaatagctcatcaaatttccagtccatgatataacccagc

SEQ ID NO: 867110 - DNA, 120 bp, Artificial Sequence
  ENSG00000225546_9 (sequence is synthesized)
cagccccatcccatagaacatgatacactgatttttacatattatagttcttttatatatttagtgagaagcattatttatcaattttctttaatgtcttattgtattgtgtattatata

SEQ ID NO: 867111 - DNA, 120 bp, Artificial Sequence
  ENSG00000225546_10 (sequence is synthesized)
attctatcagtatattcctgtttaaaaatgatttttgtaaggcttcactaagttgaaatttccagacaaagaaaaagttgtaccgtcccttttttcctttaacggaatcaagtaaatctg

SEQ ID NO: 867112 - DNA, 120 bp, Artificial Sequence
  ENSG00000225546_11 (sequence is synthesized)
aatgtgttagtggtctacatttccactgaggataattgacagacactgaggtctctccttttaagtaactgtcaaagagtatcctaagaggctctagggaatatggtaagcgattgctaa

SEQ ID NO: 867113 - DNA, 120 bp, Artificial Sequence
  ENSG00000225546_12 (sequence is synthesized)
tgatgtttatgtgtctaaatatcatcctaacaatgtaacactctcccattaacaaaattgtttctacaattaccatcaacattattccaataaatgtaatcttgttatttcattatgaaa

SEQ ID NO: 867114 - DNA, 120 bp, Artificial Sequence
  ENSG00000225546_13 (sequence is synthesized)
taacagaagtcattaaaaagaggactaggaaaggccatgtgaggacacggtgagaagggagccatctgcaaaccaaaaggggaactccaagcagacagtgactttgctaccaccttgata

SEQ ID NO: 867115 - DNA, 120 bp, Artificial Sequence
  ENSG00000225546_14 (sequence is synthesized)
ccaaagcagactaatacagactttccctggcaaacaaaaacaaacagtttattttcagcagaactgccttataagaaatgttgtacacgacagtgtattatgtgactatagcttatggaa

SEQ ID NO: 867116 - DNA, 120 bp, Artificial Sequence
  ENSG00000225546_15 (sequence is synthesized)
taaaaacaacattgtaagtagtgagaggcaggaattgagaatattctctcataaagtccctgtcctacctaggaagcagtacagtgttgtttgacagtggacatagattcgttttaagtg

SEQ ID NO: 867117 - DNA, 120 bp, Artificial Sequence
  ENSG00000225546_16 (sequence is synthesized)
attgacgactgtgagaatctgcagaaaaaaacagtatggaactacaacttcacgttcttgagaaaagcttgcagtgtaagatgcgtttgtttgtggtgcctgaggaagagagcagcagaa

SEQ ID NO: 867118 - DNA, 120 bp, Artificial Sequence
  ENSG00000225546_17 (sequence is synthesized)
tactgcctagccttgagaatggaggccccactgggtactcttcataagagatgccccaactcgtcaaaggaattatggagtctggaattttgataggtgctacgcagaaggtgccttatg

SEQ ID NO: 867119 - DNA, 120 bp, Artificial Sequence
  ENSG00000225546_18 (sequence is synthesized)
actatcccctaatagaaatcctaggcactaaatccctaatgagcttccctggtggacaacatttcatatatgttgtcaaaagttgttgctgagggaattaagcagagcccatatgattcc

SEQ ID NO: 867120 - DNA, 120 bp, Artificial Sequence
  ENSG00000225546_19 (sequence is synthesized)
acagggaaaggacttctagaaactttcatagctggtttccactggacattgccacatatgacatttccctttacttatatgctttgcatccttttactgtagtatatgatagccatgaat

SEQ ID NO: 867121 - DNA, 120 bp, Artificial Sequence
  ENSG00000225546_20 (sequence is synthesized)
aagactatgagtcctcctagcaaatcatcaaaccagaagattcatgcggtttttatatcaatggatttcctaatattgtatcaacatcatattcccagaataaatcacacttgatcaaaa

SEQ ID NO: 867122 - DNA, 120 bp, Artificial Sequence
  ENSG00000276095_0 (sequence is synthesized)
attttgatttttcttatggggaacctgtcttgctgcattcaaggtgactcgaagaagccttcccaaaggcgtgtgaaaaggcagccctactctactaccaaggtgacgtcagggagcaca

SEQ ID NO: 867123 - DNA, 120 bp, Artificial Sequence
  ENSG00000276095_1 (sequence is synthesized)
ccctactctactaccaaggtgacgtcagggagcacattcaatgagaatacaagaagatatgctgtgcacaccaaccagtgtaggagacctcatggctcccgggtaaagaagaagaggtac

SEQ ID NO: 867124 - DNA, 81 bp, Artificial Sequence
  ENSG00000276095_2 (sequence is synthesized)
gagggtggtgcaggtggcccctctgaggcttgaatctactccccatgaggacaccgtacacgacatcactaacgaggacgc

SEQ ID NO: 867125 - DNA, 120 bp, Artificial Sequence
  ENSG00000276095_3 (sequence is synthesized)
cccatgaggacaccgtacacgacatcactaacgaggacgccacacacgacatcgctaacgaggatactgtacacgacatcgctaacgaggccgccgacaagggcatcgccaacgaggacg

SEQ ID NO: 867126 - DNA, 120 bp, Artificial Sequence
  ENSG00000225548_0 (sequence is synthesized)
gggttcatcttcatgaggtgtaatggcgccgggatgcgctctcctcttctcatttgccaatttattgcagatccctcctcaaaaaagttttgggactaactcagccccatggagatcaag

SEQ ID NO: 867127 - DNA, 120 bp, Artificial Sequence
  ENSG00000225548_1 (sequence is synthesized)
gtgaattagaaaaacaacaaaacaaaacaagattcattttaacatctcatttttctatctccaactttccctcccctcctcccaccccaggaagaaaagactacgtttgtttctggtgat

SEQ ID NO: 867128 - DNA, 120 bp, Artificial Sequence
  ENSG00000225548_2 (sequence is synthesized)
acattcattgtaggtgggtgggtgacttctagaagaggaaaatcaagaagatttggagaaggagtcttggaagctctggtgaagttttccaaaactgggaaggacagagccacaggtctg

SEQ ID NO: 867129 - DNA, 120 bp, Artificial Sequence
  ENSG00000225548_3 (sequence is synthesized)
cctgttcttttgctttgccatttgtgtggatacctagtagagcaatttgggtgccattctttgaggaatccattggatctgtcagaaagctgagtctgctcagcctgtgttagtggagaa

SEQ ID NO: 867130 - DNA, 120 bp, Artificial Sequence
  ENSG00000225548_4 (sequence is synthesized)
gagggaaggaaactggctggaggccgctggacccacagaggacaatagacaatctcctgctagaaatgacaaaccagtatcttgagtaaaataatgacttggactgtaagaaattaatta

SEQ ID NO: 867131 - DNA, 120 bp, Artificial Sequence
  ENSG00000225548_5 (sequence is synthesized)
tgtagtggaagaaaaagaaaatgagacccagaagacccaaatcacaaatcaaaaggacctcacagaagattctacaattgagattatttatcctgggatgcccactggatccaaagagag

SEQ ID NO: 867132 - DNA, 120 bp, Artificial Sequence
  ENSG00000225548_6 (sequence is synthesized)
aaactctatagaattatgatctaggtttgactgactcctggcaagaagccctacccgccagccaatttggatgaggaacacagaatcacttgtggaattaagagataaggacagcaagta

SEQ ID NO: 867133 - DNA, 120 bp, Artificial Sequence
  ENSG00000225548_7 (sequence is synthesized)
gaccaaactataagctgaggttcaaggtggcataggctgggtgccacagtgctgtgtctcaggtcacaggggtcatccatctttccttctatgtgactggtttgctcttgcatatcatgt

SEQ ID NO: 867134 - DNA, 120 bp, Artificial Sequence
  ENSG00000225548_8 (sequence is synthesized)
tttccgctcttatgctccagatccatcatgagaagaacatgccctggattcctgctatccctttagccatggctccaaaattaacacacacaaggaagacctgaggtcaatccacagcct

SEQ ID NO: 867135 - DNA, 120 bp, Artificial Sequence
  ENSG00000225548_9 (sequence is synthesized)
ggattcaagtcacctaatacataggagaatcagagctacccagccacactcaatctacgttaactgaacctcagctgacctgcagatttatgagtatgagaataaaggcttgttaatgta

SEQ ID NO: 867136 - DNA, 120 bp, Artificial Sequence
  ENSG00000225548_10 (sequence is synthesized)
ggacaatagacaatctcctgctgatgcccactggatccaaagagagaaactctatagaattatgatctaggtttgactgactcctggcaagaagccctacccgccagccaatttggatga

SEQ ID NO: 867137 - DNA, 120 bp, Artificial Sequence
  ENSG00000225548_11 (sequence is synthesized)
acagtgctgtgtctcaggtgggctagaagtgcgaaacggacagtaccagaaggaaaacttgagggtcacaggggtcatccatctttccttctatgtgactggtttgctcttgcatatcat

SEQ ID NO: 867138 - DNA, 120 bp, Artificial Sequence
  ENSG00000225548_12 (sequence is synthesized)
ggaaacatgaaaaggcatgttgagagaagtgctttagtcctatacctgtatctactactggatcccctactccaccctgacttttggaggtccttgcccagaattgaacctaaaaatatt

SEQ ID NO: 867139 - DNA, 120 bp, Artificial Sequence
  ENSG00000225548_13 (sequence is synthesized)
cccaatattgagaagtttccaaagcaggcacacaaagtggttcttgagggaaaaggttggttttgaattccagtgaggcctggagaacacaaagctatgcgaatcgcagagatcattgcg

SEQ ID NO: 867140 - DNA, 120 bp, Artificial Sequence
  ENSG00000225548_14 (sequence is synthesized)
acccgctgggggcatgtaatggacaattgagatgccctagccacaagccagtaggaggagccacagacaagttttcagaggaagtgatcaagaaagcttgctggattttccttccagatt

SEQ ID NO: 867141 - DNA, 120 bp, Artificial Sequence
  ENSG00000225548_15 (sequence is synthesized)
ggcggtctctgcctgctccagcccactcaccagcaactactgagaaactcgttacagatttcaaacccactgcctgcctggcattggaaagtcccatcttaacctgcaggatgaagtgga

SEQ ID NO: 867142 - DNA, 120 bp, Artificial Sequence
  ENSG00000225548_16 (sequence is synthesized)
ataatgctggcaaaagagcaccccaaatgcaatttctgtatagatggtttagttccttgctttagagtggcacttggcatcctgtaaaacctcatcctgtaaaaaggaagagttgtattt

SEQ ID NO: 867143 - DNA, 120 bp, Artificial Sequence
  ENSG00000225548_17 (sequence is synthesized)
aacaccttgtcccacataaaataataaaaaatacacaagtgatgaatgagaaagcacactaaaatattatcagtgttaatattttattcaccttggaaaggtgaaatcatttttttcttc

SEQ ID NO: 867144 - DNA, 120 bp, Artificial Sequence
  ENSG00000225548_18 (sequence is synthesized)
attacaattttaatcttttatgcagtggatttgtagtacatgttttaagataatttaaaaaatcaagaccaagcaattcctagcaatttccaagacctaactcaaatgccatctcttcca

SEQ ID NO: 867145 - DNA, 120 bp, Artificial Sequence
  ENSG00000225548_19 (sequence is synthesized)
tgatgcccttcagattaccaaactaacaatattttctttctcttctgtaacaacaataacagctgacttatattgagtaatctaaggctggacttagattaccttatttaatcttcatag

SEQ ID NO: 867146 - DNA, 120 bp, Artificial Sequence
  ENSG00000225548_20 (sequence is synthesized)
tcacttcgttaaatagaagtttcgttattcctgttttgcagatgaagaaactgagcttatagaaataaataagtagcctaacttgcctaatattacaaagctgttaaatggcagagctat

SEQ ID NO: 867147 - DNA, 120 bp, Artificial Sequence
  ENSG00000225548_21 (sequence is synthesized)
catttaaacttatgtatatttattcggtccatttccttcttccctttgtattgatcaccaggcacaccgcacttattggtgtttttagtggacttaaacactactaagacatttttcctt

SEQ ID NO: 867148 - DNA, 89 bp, Artificial Sequence
  ENSG00000225548_22 (sequence is synthesized)
tgtccgaaaagcgcaatattcgcgtgggagtgacccgattttccaggatgcccactggatccaaagagagaaactctatagaattatga

SEQ ID NO: 867149 - DNA, 120 bp, Artificial Sequence
  ENSG00000225548_23 (sequence is synthesized)
tgacattcagttttttatttgttaaaagagggaaacaattctagggctttcatgataacaaacaagattattgtctgaaaaaaaaaactttgtaaatagtaaagtgatgtagaaatgcag

SEQ ID NO: 867150 - DNA, 120 bp, Artificial Sequence
  ENSG00000225548_24 (sequence is synthesized)
gactggagatatgttcctgagtgtctctgtctgaatccatctgtttacaacatatgaggccaattttctaagaagactgagctgccctgccaagactgtttaccagaggtggcttttagg

SEQ ID NO: 867151 - DNA, 120 bp, Artificial Sequence
  ENSG00000225548_25 (sequence is synthesized)
tgatatttgtgcagccattgatgctaactcatagtctgcaaatcctagctccacattttctttttcctgtgagatattgttttgaggatatggagctctgtggcctaagaaagcccacag

SEQ ID NO: 867152 - DNA, 120 bp, Artificial Sequence
  ENSG00000225548_26 (sequence is synthesized)
ttcccaagggatctttctgagatgcttctagaggggaagctatcgcttcctccttagtattttctgaaagcaatgaagtctcagctattttactaaatatgcttgcaacagttagaggcc

SEQ ID NO: 867153 - DNA, 120 bp, Artificial Sequence
  ENSG00000225548_27 (sequence is synthesized)
aagtcaggccacagacagttcctgtatatagcagtgcttcttttggcttctgtctgtaggtgttttctcaccacagaagagtgctcagccctctggaagttctctaaagagttagatctc

SEQ ID NO: 867154 - DNA, 120 bp, Artificial Sequence
  ENSG00000225548_28 (sequence is synthesized)
ccaggggtgatcatctatcaatgaaggatgggaattggtaaacaactattccagattccttgcttctcagtggaataattctgaggtgcattctacagtttctcagaaggaatcgagccc

SEQ ID NO: 867155 - DNA, 120 bp, Artificial Sequence
  ENSG00000225548_29 (sequence is synthesized)
tagttatttgcaatggtttctcactcattaatgcatctttatggctttactactttccgtatctgaggtcatcactttatcactatttcctgggaccacttcctaaataaactatataca

SEQ ID NO: 867156 - DNA, 120 bp, Artificial Sequence
  ENSG00000225548_30 (sequence is synthesized)
ggctgaacaaatacttgtcaaatgaatgattaagatcccttaaggtactaagtaggatatgaaaaaaattcgtggagaagaaagcatttgaagtgaatatctttaaattttaggggagaa

SEQ ID NO: 867157 - DNA, 120 bp, Artificial Sequence
  ENSG00000225548_31 (sequence is synthesized)
gagcattacattctgagattgcaggatatgcagagggcagatgcttaatataaaagtgcttaaaatgatgatggcagaagcctgctgaatgatgtggaataaagaagtatgtgataatga

SEQ ID NO: 867158 - DNA, 120 bp, Artificial Sequence
  ENSG00000225548_32 (sequence is synthesized)
ccgggaggagggggagtatcagaagggaacggctggctggaccccctttgcagaggcttccagaattggcagtctttcctgtgctacagctttgcacagcagcattgaggtgacatgtat

SEQ ID NO: 867159 - DNA, 120 bp, Artificial Sequence
  ENSG00000225548_33 (sequence is synthesized)
ctggcagggtcacaggatggaaagggcctgggtacccaaatcaccacctggaggaaagccacttaccaacccagaatactcaccttctactgttacataaataagaaacaaatattatat

SEQ ID NO: 867160 - DNA, 120 bp, Artificial Sequence
  ENSG00000286758_0 (sequence is synthesized)
gagcctcgatggcgagaggcccaggatgcgccaccaggccgggctcacttctttgacgccgaataaactgacaaaacaattagctggccggctggggaaggtggtgggtgactcaaatgc

SEQ ID NO: 867161 - DNA, 120 bp, Artificial Sequence
  ENSG00000286758_1 (sequence is synthesized)
cagtcggctgcgtgcccccgcgcttagatgagtctgggattctgggcagttgggactttcttttcaggaaaggaggtgagaggtgccggggaagcccacacgagcagccactcttggaga

SEQ ID NO: 867162 - DNA, 120 bp, Artificial Sequence
  ENSG00000286758_2 (sequence is synthesized)
aaagaacaggaggcaaaaataaagatgcttcccaccccaccaattcccttccctcgaagaaaaaaggaaagagaaagcaacccacaaagaatggaaaccgatcctagacatctgtgaaac

SEQ ID NO: 867163 - DNA, 120 bp, Artificial Sequence
  ENSG00000286758_3 (sequence is synthesized)
gtatcttaaaaattccactactgagttgggaaaagcagagagttcatgtttacttcattggcgaagtccagttgaatctacttaactcgaccagctttaatccaatctaataaaccatga

SEQ ID NO: 867164 - DNA, 120 bp, Artificial Sequence
  ENSG00000286759_0 (sequence is synthesized)
gcaatctccaacattgatggatagccaggagttgcacaggaaataccacttccggtccatcaccaggtcatagaccagcacccggctcacatacctggagaagggacccagagttttgag

SEQ ID NO: 867165 - DNA, 120 bp, Artificial Sequence
  ENSG00000286759_1 (sequence is synthesized)
gataaggtggagcaggggaggagacttcactggacatcaccaaggaagggcagccccgtaggaatgcaaaagccacctatgtcaaggtcacaggcttttctggggcagctgacatccagt

SEQ ID NO: 867166 - DNA, 120 bp, Artificial Sequence
  ENSG00000286759_2 (sequence is synthesized)
gatgcagtacctacagggatcaagacctgggtatttcaacccaacttgggacagctccagagctccccagtggtggaccacactgttgctgggctgcatcacagcttgacttttctgcca

SEQ ID NO: 867167 - DNA, 120 bp, Artificial Sequence
  ENSG00000286759_3 (sequence is synthesized)
aacctacagcggccacgcttaaaatattaatgcttaatcccataggtgaattaaagtgctattgtttttctaaagccgccagctactgatgggtggtcagactggacaccactcatctgg

SEQ ID NO: 867168 - DNA, 120 bp, Artificial Sequence
  ENSG00000286759_4 (sequence is synthesized)
gtcactcattttggcctcagaatgcagagaaccttgctccaaacttgccagctgtgtgaccttgggcaagtcacaggttgatgctgcaaaagggccaagggtggggctagcactgaagat

SEQ ID NO: 867169 - DNA, 120 bp, Artificial Sequence
  ENSG00000286759_5 (sequence is synthesized)
ggggctagctgtagcttccagtccttttcctagctaccgatccagtttgtgtggaccatgaaccagtgggcttttctgaccctcagtttcctcatctgtgaaacagagatcattctatgt

SEQ ID NO: 867170 - DNA, 120 bp, Artificial Sequence
  ENSG00000286759_6 (sequence is synthesized)
gtcttgcggaggcttgcgaagatcaggaaggaggcaaatgtacagtgcccagccctgggcctgtcactctgtagattctcaaggtttgtctgcccccaactcaccacgatggccggtccc

SEQ ID NO: 867171 - DNA, 120 bp, Artificial Sequence
  ENSG00000286752_0 (sequence is synthesized)
cacttcaaccttgctcaggtatgagttactaagtcacatgaaggacatggaataccatttaaatctcttcagagagagagagagttgcggtctacgcagatggtaaactgacgcaagaag

SEQ ID NO: 867172 - DNA, 120 bp, Artificial Sequence
  ENSG00000286752_1 (sequence is synthesized)
tacgcagatggtaaactgacgcaagaaggccctcagaagatgctggcaccttgatcttggacttctcagcctctagaactgcagtacaagcagcatggctggggaggcctcaggaaattt

SEQ ID NO: 867173 - DNA, 120 bp, Artificial Sequence
  ENSG00000286752_2 (sequence is synthesized)
aagtcacgtcctacatggccgtagcaggaggaagagagtgaaggggaaggtgctacacaattttaaacagccagatctcatgacaactcacccaatatcatgaaaacagcgaggggaaaa

SEQ ID NO: 867174 - DNA, 86 bp, Artificial Sequence
  ENSG00000286752_3 (sequence is synthesized)
tgacaactcacccaatatcatgaaaacagcgaggggaaaatccaccctcgtgatccagtcacttcccccgcggccccttttccaat

SEQ ID NO: 867175 - DNA, 120 bp, Artificial Sequence
  ENSG00000286752_4 (sequence is synthesized)
caatgagagatagtggctttgactagggtgacagcactgaagatggtgaggactgtccagatttgagaagtattttggaatagaagaaacagaacttgctgataggttcaatgtagaaaa

SEQ ID NO: 867176 - DNA, 120 bp, Artificial Sequence
  ENSG00000286752_5 (sequence is synthesized)
ttaataaaagaagaggacaaaggatgatccttaaaatcagagctcaattaactggtacatggtagtgtcattgactgagaatgatgaagactggaggaagactacatgggtttggagcaa

SEQ ID NO: 867177 - DNA, 120 bp, Artificial Sequence
  ENSG00000286752_6 (sequence is synthesized)
aacatggacattacgacgtaccaggctggaatggtcatgatttcatacagttatttcataaaaacaactatatttcatgaaataactacatgaaatccaaaaggagttatcaggtaggaa

SEQ ID NO: 867178 - DNA, 120 bp, Artificial Sequence
  ENSG00000286752_7 (sequence is synthesized)
agcttgcagtagaaaagcagagatggaaacataaatttgggattatcagcataaagatgatattgaagccatgagcctggatgagatcattcagtgaggaaaaggagacaagagaggagg

SEQ ID NO: 867179 - DNA, 120 bp, Artificial Sequence
  ENSG00000286752_8 (sequence is synthesized)
gcaagagcatatccaggaaaactcaaatcttgacaggccttattcatttttatagccctagcacctagtgctggcaaagagtgtccgcttcagaaattgctgataaacacaggaccaaca

SEQ ID NO: 867180 - DNA, 120 bp, Artificial Sequence
  ENSG00000286752_9 (sequence is synthesized)
ttctgggactccacactatgacgaattaagttataaaaatttaccactaagtaaattatagtaaaaacaaaggtaataaataatcaaagcccatcagttcctagatattttacaacattt

SEQ ID NO: 867181 - DNA, 120 bp, Artificial Sequence
  ENSG00000286752_10 (sequence is synthesized)
tactattattttactgtttaccacattttactattatcttactatttaccacattttactatttgcttttcagattagttattacatctattatactttcctaactccactgtcagtgat

SEQ ID NO: 867182 - DNA, 120 bp, Artificial Sequence
  ENSG00000286752_11 (sequence is synthesized)
gccacattagtagtggtgggagtatttacaccatggaaattggcaagtgctacaaatttattattttgccaattgttggactcaaaaaagagatagagaaaatgttaatcaggcagattc

SEQ ID NO: 867183 - DNA, 120 bp, Artificial Sequence
  ENSG00000286752_12 (sequence is synthesized)
catttaaaagtgtcacatttatagttatcacattgtgaatagcacacaaaaatagggaaatatttttccagtatgtgaaaattattacctgatttagtgaaaacattgctcatatcaatg

SEQ ID NO: 867184 - DNA, 120 bp, Artificial Sequence
  ENSG00000286752_13 (sequence is synthesized)
atgaataaatgaggttctaacaaatgtcttcactgtatgactttcaccttaatcattaacataaaggaaaatttcaatcaacattaatgtcagaattacacttgggaattaattgcactc

SEQ ID NO: 867185 - DNA, 120 bp, Artificial Sequence
  ENSG00000286750_0 (sequence is synthesized)
catcaaaagaacacagaagccagcctgaagacgctcccactggctcaatacaagatgatttgagaatgaaaattggtaatgatgatggtttgtacaataaaggggaagattaaagaatct

SEQ ID NO: 867186 - DNA, 120 bp, Artificial Sequence
  ENSG00000286750_1 (sequence is synthesized)
ctctgaaacatgacagacaagttggcaaattcatgtcatgccagcctgcccccacacccgcattctcctcagccctcctagctgtatctgcttcttctctacaaacataagaagaaatag

SEQ ID NO: 867187 - DNA, 120 bp, Artificial Sequence
  ENSG00000286750_2 (sequence is synthesized)
actgatagcctgatgaaaccacctgcttattgtctgacctgcttttcatctgtgaacacataaaaatgtggctctgttcattaacattaaggacatagaacggggaaaccttggctgcta

SEQ ID NO: 867188 - DNA, 120 bp, Artificial Sequence
  ENSG00000286750_3 (sequence is synthesized)
aaatcaaaggccatgacaagtttgctgtttgaagtcacatcagtgagaatggaacaagccactcttgcctggaagatggaacatcccagtcttgcctcagcagcatgcgggtcccttgac

SEQ ID NO: 867189 - DNA, 120 bp, Artificial Sequence
  ENSG00000286756_0 (sequence is synthesized)
acctactctgcctccgcctgctccaatgcaggggtgaagtcactgccaacgtttaaccctttccccacgtgggcctggctccagtcagatcgagggtctgggagggctgcagggatctct

SEQ ID NO: 867190 - DNA, 120 bp, Artificial Sequence
  ENSG00000286756_1 (sequence is synthesized)
cagtcgccaatggttgcagacaatccagtaagccacagctgttacttgctgcactgaaccctgcctgcgctgagtaccgaaagcaggagggaaggtagccacatctcttgagcccggcgc

SEQ ID NO: 867191 - DNA, 120 bp, Artificial Sequence
  ENSG00000286756_2 (sequence is synthesized)
ctaagaagccctctgtcatgctaccgatgttgcagaacacctggggcggagtagggagtgccaaagcgcaggggatgagtgcacagcagggagacttctatggtctgcagacaggtgaca

SEQ ID NO: 867192 - DNA, 120 bp, Artificial Sequence
  ENSG00000286756_3 (sequence is synthesized)
atgacaaacagcaataaaagccacacaccatagctcaggataacaagggctgagatgcgtttggacaatgagaagaaaataaaaattaaaaaaaacagctgattcaccaaatgaagggca

SEQ ID NO: 867193 - DNA, 120 bp, Artificial Sequence
  ENSG00000286757_0 (sequence is synthesized)
ggaccagagccatgcttactttaaacgctgatccgagagaccaagacaggaatcataccagtgaagcccatggcggctccttctcgtgactgtctaagcagcccagctccatctcgaaag

SEQ ID NO: 867194 - DNA, 120 bp, Artificial Sequence
  ENSG00000286757_1 (sequence is synthesized)
tcaatgtacaccagatctatggcttggagaccaaaggctttcgctatgacaacaatcttttgccgggcgtagagaatatccagggtttctttactacttgttgcacctgaaaatgggatg

SEQ ID NO: 867195 - DNA, 120 bp, Artificial Sequence
  ENSG00000286757_2 (sequence is synthesized)
ttaacagaaaaaggaggctttaactttggaaaccgcacccagatatttattataaaacctcagtttgtacagatatctaaacctccctggaaattgctcctccgcaaaataaaattattg

SEQ ID NO: 867196 - DNA, 120 bp, Artificial Sequence
  ENSG00000286757_3 (sequence is synthesized)
aaatacaaatgaagacagggacgcgtggaggccaagttaaacctcgaatgtgtctgtttaactgacaaggcatctttcaatagaattacttctacctgcattaagagaaggccccttccc

SEQ ID NO: 867197 - DNA, 120 bp, Artificial Sequence
  ENSG00000286757_4 (sequence is synthesized)
cattctgggaggctgggtcagggtcgcaagggactcctgatatatttttttccttcttatcatcgcttgaaaagtgccagtccaaagacagcaccacaaagggtggcccagcagctatgc

SEQ ID NO: 867198 - DNA, 120 bp, Artificial Sequence
  ENSG00000286757_5 (sequence is synthesized)
agggcaatggttcgtgtttcacagcaagcacagaactgtgtgtgctgcgattgccctgtccaaactgaagttctgagccaaatgcttcagcttcagggtctgtctggatggagaacttgg

SEQ ID NO: 867199 - DNA, 120 bp, Artificial Sequence
  ENSG00000286757_6 (sequence is synthesized)
ggagacgggagggcacttgttttgagagggctggaaagcatcgatatgccttctgtagcccgctgaaccgttggatacacaagtctcctggaaagactcgtattcaaataaattcagttt

SEQ ID NO: 867200 - DNA, 120 bp, Artificial Sequence
  ENSG00000286757_7 (sequence is synthesized)
tttcaccctgaggggagggaagtgtccctgtttacatttggaacatgccactccctgcctagggaaagtgcctgtcttcaggtcactggggctggtttctgtggcctcggcctcttttct

SEQ ID NO: 867201 - DNA, 120 bp, Artificial Sequence
  ENSG00000286757_8 (sequence is synthesized)
aaatgcttcacggtctccagtcaaacatgcagacccctcaagtgcagctcacaagggatggtgagaatcggtgaaaatcagcacatttaatactaagagttcgaaacatattgtaagaga

SEQ ID NO: 867202 - DNA, 120 bp, Artificial Sequence
  ENSG00000286757_9 (sequence is synthesized)
caattcattaaggcaaatgtgaaattgccttaaatttgcgttagaaatctagacagcccacagactgatatgaaaacaaaatactgaagcaacggtgaggctgttcacataatatattta

SEQ ID NO: 867203 - DNA, 120 bp, Artificial Sequence
  ENSG00000286757_10 (sequence is synthesized)
ttaggagcaaaggagatgccatatattcctgagcatgcctggggctgcaacaggctttctattgctcgtgtcttttataaatgaacagaagtaataatgcagtgctctagaagcagggca

SEQ ID NO: 867204 - DNA, 120 bp, Artificial Sequence
  ENSG00000286757_11 (sequence is synthesized)
gctatgaggagccctaaattatcaggaagtagtgtccattccattgtcatgaaaaaccattgtcatggttggcaaatatacattgttatgtaaatgtccatccttgaggggcaaagaaaa

SEQ ID NO: 867205 - DNA, 120 bp, Artificial Sequence
  ENSG00000286757_12 (sequence is synthesized)
aatatatacacacatatacacacacacacacagaaaaagagagagagagatgtctttgacacctatgctggctcgaaagtcttctcctccaaaaacgactgcatctagaaagagacctac

SEQ ID NO: 867206 - DNA, 120 bp, Artificial Sequence
  ENSG00000286757_13 (sequence is synthesized)
ttgaggcccgaccttcagggtttcttcacacactgcctgtaaaagagcagaacagaactaagtctcacggaaacgcgtgcgtcagagggaagaggcacggtgcatttcagtaacaggacg

SEQ ID NO: 867207 - DNA, 120 bp, Artificial Sequence
  ENSG00000286757_14 (sequence is synthesized)
acctgactcttaacacagtttggctgaaagcagtcctaaaaacgcagcccaaatttacccctttcaaaaggtatttaatatcatccaagataagtatattgtatatatttgctttgttta

SEQ ID NO: 867208 - DNA, 120 bp, Artificial Sequence
  ENSG00000286757_15 (sequence is synthesized)
atggattatatgaatatagttataatgttcaaattgtagttcatctcatttttggagaaactttgagttaactcattttgcttgcactataagttatttatatctttccagaattcgttt

SEQ ID NO: 867209 - DNA, 120 bp, Artificial Sequence
  ENSG00000286757_16 (sequence is synthesized)
ttgctttaagagactctcgtaaaaccacaggggagaaggaaggaattttaaaatcaaactaattgaattatttgcattaggatcaagcacatggtctcaggattaaagacagcacaaaaa

SEQ ID NO: 867210 - DNA, 120 bp, Artificial Sequence
  ENSG00000286757_17 (sequence is synthesized)
cctgcaactccggaggggaaaataaaaatgcaacaagtcatccaagatgtgttcataaagcaacttcgacatttatatatgaaagtcaaggcaaataccattcgtcgtagacataaccgt

SEQ ID NO: 867211 - DNA, 120 bp, Artificial Sequence
  ENSG00000286757_18 (sequence is synthesized)
gaatcttgaaaggtggagatataacctgctaataatatacgtgggtgggaaagaaacgaggaaccggtggggacactgttgattaatttcagacattgtaagtgcttctaagtacattat

SEQ ID NO: 867212 - DNA, 120 bp, Artificial Sequence
  ENSG00000286757_19 (sequence is synthesized)
ttaaagatctagagtctactttcctccgtgcgccgtgctcttcaggttgctgaattcttcaggaatccaggggaagaaacgcctcactcccctgtatgcagggccaggggtagagggaga

SEQ ID NO: 867213 - DNA, 120 bp, Artificial Sequence
  ENSG00000286757_20 (sequence is synthesized)
catcttctagatctgcgtctctgtcctccttcgcctcaccaaccaacgctccccctggcagagtccacactgtctgactgtgtcaccctttcaagtccccctcatactcacggctggaag

SEQ ID NO: 867214 - DNA, 120 bp, Artificial Sequence
  ENSG00000286757_21 (sequence is synthesized)
aaaattgcctcatcccgaactctcaagccctgaaatccacctctctaatgacagctcctccctgagctgccccttgtcgttgtcatctggtttaccttcccctgtcttccaagtcctggc

SEQ ID NO: 867215 - DNA, 120 bp, Artificial Sequence
  ENSG00000286757_22 (sequence is synthesized)
ccctgggcggtcagctcactgtcagattttcttgccaatctaccacctaccctggacttcctggttaactgtgcacagtgataccttcacagcatcctcaagtcttgtctctgttagttc

SEQ ID NO: 867216 - DNA, 120 bp, Artificial Sequence
  ENSG00000286757_23 (sequence is synthesized)
gctcttaacgagacccgggatccctttggagaggccctcgggagctggcgacagggctgggagtggcgtggggccaaggaaaaccatgacaatgtgtctggcaagttcttcccctgtgtg

SEQ ID NO: 867217 - DNA, 120 bp, Artificial Sequence
  ENSG00000286757_24 (sequence is synthesized)
gagtgtgaacaactgtgaggcgaggaaaggccgtggggaaaaacgctcctccagagggcttccagaagaaacagtggctcctggggatccttgaggtggattagcaagaggctgcctggc

SEQ ID NO: 867218 - DNA, 120 bp, Artificial Sequence
  ENSG00000286757_25 (sequence is synthesized)
tgaccccagctctcagaagggctctcagggtgacctgctacgactattgggaggtggcaaatatataagcatttttaagggtagtacttttccatcctattctttgtcaattttattttc

SEQ ID NO: 867219 - DNA, 120 bp, Artificial Sequence
  ENSG00000286757_26 (sequence is synthesized)
ttcaaaaatcaacaaggaaaagaaaaatataatgtggaaaaaccagaaaacgaaggagaagaaggacggccagcaggacacttaattttttaaaaaaggcagactgaggatcgctggaga

SEQ ID NO: 867220 - DNA, 120 bp, Artificial Sequence
  ENSG00000286757_27 (sequence is synthesized)
acagaggctgttacagctaagggccccccagcaaggaccaggcccccgggaggtggcttctcttcgcagcctgtcgcggtgtgccacagttcctctgaagatgtgtatcgtggagcaagt

SEQ ID NO: 867221 - DNA, 120 bp, Artificial Sequence
  ENSG00000286757_28 (sequence is synthesized)
ggcagagcctgcgtcatgtcacctagctcacaaacactgggagcttccgatcttctataattaaatgttttcctcgagcaaatgctaataaaacaatgccgtggctggcaccgcatttga

SEQ ID NO: 867222 - DNA, 120 bp, Artificial Sequence
  ENSG00000286757_29 (sequence is synthesized)
tttccatcgcgctttccaccttctcctcctgccagctcttcacattgactttttccgcagcttcattccttcactggtgccaggcaggcgcactgcacaaccacttgggttttcttccct

SEQ ID NO: 867223 - DNA, 120 bp, Artificial Sequence
  ENSG00000286757_30 (sequence is synthesized)
ctttttgcgcccggtgaattttcataaagcatttaacgtgagaacaagcaggttaatttcccgtgccgttgagccaggcgccctgcaacactgccatgttttggcttctgagtcagaggc

SEQ ID NO: 867224 - DNA, 120 bp, Artificial Sequence
  ENSG00000286757_31 (sequence is synthesized)
cttggtcccagtggcaaaaactcttgccagagccttctctgtgcagacaccaggtgtgatttagcataacagattgtgtggacgttcaacggcttctctaaaccgtgcgtcaaaacgaaa

SEQ ID NO: 867225 - DNA, 120 bp, Artificial Sequence
  ENSG00000286757_32 (sequence is synthesized)
gtgggaaaatcaccccaccttacaacatatgcctagtttcaggaccactaacgttctctttcacaatattagtacctggttaaaatcccccatcatatcacaacgctgttttcctctgat

SEQ ID NO: 867226 - DNA, 120 bp, Artificial Sequence
  ENSG00000286757_33 (sequence is synthesized)
ggtaggtaggcaatgaaggatttttaaaaaacataaaaagaggatggaaaaaatggaattgtacggaaatttaaaacctcattgaatccggtctttgatacctagtcaatggcttgaacc

SEQ ID NO: 867227 - DNA, 120 bp, Artificial Sequence
  ENSG00000286757_34 (sequence is synthesized)
atgcatgaagccctggttgacagtgactttgaatgcccacgcgctaggtgtcagctctcaggctatggggaagactttcagggaaaaagccgagctttgtggctgccacagtgtagaccc

SEQ ID NO: 867228 - DNA, 120 bp, Artificial Sequence
  ENSG00000286757_35 (sequence is synthesized)
gagatgagaacagcctgttttcgaagatggcaagattagtgtgcctcaagagaagggcaggcccgaagctgagacacaggtcaccccacagggagagtgactgaagtcacaagaggacac

SEQ ID NO: 867229 - DNA, 120 bp, Artificial Sequence
  ENSG00000286757_36 (sequence is synthesized)
cgaagatgatttgaggacaagcttagcaaacacgactgccagaatcaccggcctttttatccagaccactgccagggggatcttaacactgagtgatgtgcaggcagctaacagagagga

SEQ ID NO: 867230 - DNA, 120 bp, Artificial Sequence
  ENSG00000286757_37 (sequence is synthesized)
ccaatggtgtcccaatggtgtgccaacaccaggggcttggggacaaaatacatgtgttccaacgttcaaaatcacctgataacgatgatgtcaatatatacacagtcctcttctaacttt

SEQ ID NO: 867231 - DNA, 120 bp, Artificial Sequence
  ENSG00000286757_38 (sequence is synthesized)
tcaaagggctttcatgcctgtgatctcatttgccctcacaacagtcctgcagtgtggacagcacagattttattatccacatctgcctgaagaacagagaggttaggagacttctctgga

SEQ ID NO: 867232 - DNA, 120 bp, Artificial Sequence
  ENSG00000286757_39 (sequence is synthesized)
atccagacaactaggcagcacttgaggtgaggcagaactcccatcttgggctcccaatcttgcatttgtctgcagaacccttccttacaccctcgagggtcggtgagttacccgatagcc

SEQ ID NO: 867233 - DNA, 120 bp, Artificial Sequence
  ENSG00000286757_40 (sequence is synthesized)
gccaaattacctgctcactgaggctccaaaggaatgaccatgaggctccaactctcacagcctcctgcaagccatcctgcttcaagtcctcactgtgctgatggctgcctgtgtacgaga

SEQ ID NO: 867234 - DNA, 120 bp, Artificial Sequence
  ENSG00000286757_41 (sequence is synthesized)
cagggacagtctcttaacctcactgtgcctcagtttcctcatgtgaaagatggggataagaatagtgcttgactcaagggttggtgagtattgaaatcatataacgtaagtggttaataa

SEQ ID NO: 867235 - DNA, 120 bp, Artificial Sequence
  ENSG00000286757_42 (sequence is synthesized)
atgttaggttaaaaaaaaatgcctttttttccccccgcaaagggatagggttttgctatgttgcccagactggagggtagcggctatttataagcaccatgacagcttgctgctgcctca

SEQ ID NO: 867236 - DNA, 120 bp, Artificial Sequence
  ENSG00000286757_43 (sequence is synthesized)
aactcctgggctcgagggatcctcctgctacagcctccagagtagctgggaccacaggctgacaccacatggtctggctaatatatccctattttaacatgtaaactaaaattgcttttt

SEQ ID NO: 867237 - DNA, 120 bp, Artificial Sequence
  ENSG00000286757_44 (sequence is synthesized)
tttttaaaaaaaagggctgtacagatttaaactcccatttcctgtgcacacccacttggggttggttctgagttcatattaggttggccctgttttcagtaaccagatgtccttacacca

SEQ ID NO: 867238 - DNA, 120 bp, Artificial Sequence
  ENSG00000286757_45 (sequence is synthesized)
gcactctgaccacattgaggactgggaaggtagcttatttatagctcttgtgtccctagtgcctgaccaaaaggaaagaacaggaagctagtcttttggcaccaggagagagtcctagag

SEQ ID NO: 867239 - DNA, 120 bp, Artificial Sequence
  ENSG00000286757_46 (sequence is synthesized)
ggggcaaatcaactcacagacaacgagaggcagcctgttcattgatggggttcaggacacactacccaaaatgtacatttgagaaaacagcagaagcaggaaggtctttctctcaccttt

SEQ ID NO: 867240 - DNA, 120 bp, Artificial Sequence
  ENSG00000286757_47 (sequence is synthesized)
cccccacccttctccccaaagcagtcaaaaactttcattccagaggtgccctctctatccctaaaggaaaggaacatccttatccttgaagacacagagatgccaagaagaacctgaaca

SEQ ID NO: 867241 - DNA, 120 bp, Artificial Sequence
  ENSG00000286757_48 (sequence is synthesized)
aacaggccttgccaaattcccctcggtttattactgctagatcatgccccctcatccaatcacacttctacacgactgtcgacttgcatcaaatctaagcataaaaatacataggtgttc

SEQ ID NO: 867242 - DNA, 120 bp, Artificial Sequence
  ENSG00000286757_49 (sequence is synthesized)
gcttttatgggggcttttatatcctaggagtaatacaggttgtttaaaatgaggtttgagagggactgcattctaaatgtgttaacactacaggacagccttggtgagccattctcactg

SEQ ID NO: 867243 - DNA, 120 bp, Artificial Sequence
  ENSG00000286757_50 (sequence is synthesized)
tggaatgaacttgtcccccaagatctgacaagctggaaatgactgaataatggaattaaggcctttatcaacagttacattagaacttcgaagagactaattaccatagcgtgttctgga

SEQ ID NO: 867244 - DNA, 120 bp, Artificial Sequence
  ENSG00000286757_51 (sequence is synthesized)
tcatgtttgatccagaggtggactctgcccaggtcatagaggaagttggcacagattacaatctttgcaggcccccattctaaaaaatggtgttcccaaagttgccgcattcaatcgata

SEQ ID NO: 867245 - DNA, 120 bp, Artificial Sequence
  ENSG00000286757_52 (sequence is synthesized)
tttcgtgccatgctgctcagtgcagtggaccagtggctaataaacttgtccttatccataagccaccgtattaggtgactctgtctgggccaggaaccaaggcgtgctatgatttcagag

SEQ ID NO: 867246 - DNA, 120 bp, Artificial Sequence
  ENSG00000286757_53 (sequence is synthesized)
actggattcctatcacctggggaagagacacgctctggtgacgtaagaaagcggagaaatcaaccatcaccaaaacctgcagactctgaaattaaaggagaaaatatgcgtgcagttggt

SEQ ID NO: 867247 - DNA, 120 bp, Artificial Sequence
  ENSG00000286757_54 (sequence is synthesized)
tcaattggcacccattaaagctaataactaatcatcctcgcaagtttctagctcagaatgatcaaatctgcaaagaaaacaacatccgtccacttttacactccagtggaagaggtggtc

SEQ ID NO: 867248 - DNA, 120 bp, Artificial Sequence
  ENSG00000286757_55 (sequence is synthesized)
cctcgcggcagggcggcacagtctcgccatctggagaataaatcgagtgtgaagtacagtatagtttgggaccaagctccgtggcggcagctcagcagtcagttcattagttccaaactt

SEQ ID NO: 867249 - DNA, 120 bp, Artificial Sequence
  ENSG00000286757_56 (sequence is synthesized)
ccagggattagagcggcatcaattctactgtcggataggatgagacagacaggatacgagattcaagggggattgtgacaaccaagaggagccccttgggcttatttataaaactacaaa

SEQ ID NO: 867250 - DNA, 120 bp, Artificial Sequence
  ENSG00000286757_57 (sequence is synthesized)
gtataaacatacccaagtaagtgccttaaataatagcattatcacagtttcataacatctgaattatcacctttcccttcgcctcccagcccccgactcaaaccttgaatgttaatgtat

SEQ ID NO: 867251 - DNA, 120 bp, Artificial Sequence
  ENSG00000286757_58 (sequence is synthesized)
agttgttttcagaggaaatggcagagacagccctgggtgcaacaggaacaacgagaaagctatgtgcgacccaagatttggtaattaagaaataggaaagactttctagactccagggag

SEQ ID NO: 867252 - DNA, 120 bp, Artificial Sequence
  ENSG00000286757_59 (sequence is synthesized)
aatattttcatcctgcaaaaggcaattgccatgccacgtattcaaaaacgacagtaaattctatcccttctgaatgtgtccatctcatctgattttcatttcatctaatgtgtaaaatga

SEQ ID NO: 867253 - DNA, 120 bp, Artificial Sequence
  ENSG00000286757_60 (sequence is synthesized)
tgtcatgtcacgggcatgaagtggtccaaatttttagcagaaggccccaggagcatctctatgaaaatcttattgaaaatgtcaagatcaagtttggtttaaaataaaaaacggaacgaa

SEQ ID NO: 867254 - DNA, 120 bp, Artificial Sequence
  ENSG00000286757_61 (sequence is synthesized)
tttattctatttaaggacggcctttttcatataactttttatcaatttgtatttaaaaacagcattgcttaggacatagaccatcctcaccagtcaattatattggatttttctcataaa

SEQ ID NO: 867255 - DNA, 120 bp, Artificial Sequence
  ENSG00000286757_62 (sequence is synthesized)
tgtgtaaaaatttactgtaataatgatcagagactgttgtagtgactgcactgaaaaaaaaaggcaaatgaattctcagattattacaacctggtagtatgtttcaacaggcaaggtgag

SEQ ID NO: 867256 - DNA, 120 bp, Artificial Sequence
  ENSG00000286757_63 (sequence is synthesized)
tgttgagttttctatcctgttattttttccacatgaaaaagaaaacttagtttgcctgtttttgaaaaaaagaaaacctataacaatattgagcatactgtaggttaactggcttaaaat

SEQ ID NO: 867257 - DNA, 120 bp, Artificial Sequence
  ENSG00000286757_64 (sequence is synthesized)
tgtatgtgctgattcatcttacaaagcgttacatgccaggcaccctgtttactctgaaaatgtagattttggcagagcaaagtttttgatatgttaatcatgaaacatacattaaaacac

SEQ ID NO: 867258 - DNA, 120 bp, Artificial Sequence
  ENSG00000286757_65 (sequence is synthesized)
aggtttatagtgaaatgctaaattggctttcattcaaaagactaagaaggctgaggatgtgtatagatgggtagcttataatatataattggtatttctgcccttcagagatataattga

SEQ ID NO: 867259 - DNA, 120 bp, Artificial Sequence
  ENSG00000286757_66 (sequence is synthesized)
aaaagagaaaaccttaccaaaaaactccaacactaaaacacaataaacctatgaaaagaatttgttttgaaggtctccaaccaattaaaaatattttttaaagatgttagaacaatggct

SEQ ID NO: 867260 - DNA, 120 bp, Artificial Sequence
  ENSG00000286757_67 (sequence is synthesized)
ttgagtcatgcaaacctatacatttgtcagaattcatagaacatatactttaaatttgtgcatttcattgtatataaatttcacctcaaaaacacaaagagaactgtaaacaaatattga

SEQ ID NO: 867261 - DNA, 120 bp, Artificial Sequence
  ENSG00000286757_68 (sequence is synthesized)
actctagtcattcatatgcatgcaggagtacctaaggggaagtgtactgctgtctgcaatttactttgaaatggatatattaatacaaagcaaatcgatggatggagagagggacgaatg

SEQ ID NO: 867262 - DNA, 120 bp, Artificial Sequence
  ENSG00000286757_69 (sequence is synthesized)
gatggtcagatacagattaagtcaggcagagtaaacattaatgggagaatataggaggtgtgtatagtatattggtttctactgtacaatcttccaacttttctgatgcttgaaattttt

SEQ ID NO: 867263 - DNA, 120 bp, Artificial Sequence
  ENSG00000286757_70 (sequence is synthesized)
ttaataaagtgtaggggggaaagcaccctaaaacactgacaatttttggagctgattgatgagtatatgggagttctttatactactctctttacatttgtatatatttgaatatttcca

SEQ ID NO: 867264 - DNA, 120 bp, Artificial Sequence
  ENSG00000286757_71 (sequence is synthesized)
gttcagttcgagagagtcacagtccacccagttgtgaaaagaaagaaattctgttcattttattctctttttccctctctctgccacacacactgtacttcttgctaacagcgctctcag

SEQ ID NO: 867265 - DNA, 120 bp, Artificial Sequence
  ENSG00000286757_72 (sequence is synthesized)
ctctctcatctccaccacctcatccttcacgcttcacactttccttctttttctttctctctttctttggctcctggttggctctgaccatccctccaatatccatcttaggtggattag

SEQ ID NO: 867266 - DNA, 120 bp, Artificial Sequence
  ENSG00000204684_0 (sequence is synthesized)
aggacattccgttgggctagagagggagaaccactcagctggcttaatgaaagacacgggtgtgggactttgtcagcagatgcaagcctggagccaccacacagcagagaggagtaggaa

SEQ ID NO: 867267 - DNA, 120 bp, Artificial Sequence
  ENSG00000204684_1 (sequence is synthesized)
accagagtatggaagccccttcctctcctgcaccaaatcactcacagcaccatgatgggcagcagtagaaggattagaaaccacaccgccctgataggagttgaacttttcttcaactgg

SEQ ID NO: 867268 - DNA, 120 bp, Artificial Sequence
  ENSG00000204684_2 (sequence is synthesized)
ctcttaagctgacatgagattgcgctagttggaagataccaagatactcttaaaagagaagatgaagttctcatgtttcaacccctattactattgactgtcaacttcccaaaagacccc

SEQ ID NO: 867269 - DNA, 120 bp, Artificial Sequence
  ENSG00000204684_3 (sequence is synthesized)
agaaaaacatgttaatggaacaaaactaagtttattagatttactgtagtataagagaaaaccaccttggtagagtcttgatagtgcctcaggttgacaaagtcagggtctgcactgggg

SEQ ID NO: 867270 - DNA, 120 bp, Artificial Sequence
  ENSG00000204684_4 (sequence is synthesized)
gacttctaaggtagcttttgcaaggtggggagtagcttgggactgggcagggtttctaccctaacaattctcaattggtaagccccgcaaggccaaggatcctgaagcaaatctagataa

SEQ ID NO: 867271 - DNA, 120 bp, Artificial Sequence
  ENSG00000204684_5 (sequence is synthesized)
gaaagatactggattttataagctagctattttagtggatttactgcctcatttttggtaagcaagtcttcctgaagcaagcagagtcctttcagccacaagtcttaatagtttgtgtga

SEQ ID NO: 867272 - DNA, 120 bp, Artificial Sequence
  ENSG00000204684_6 (sequence is synthesized)
aatcgatttacaaataatgccagcatccttagcgacttcttcaggcaaggttatactgggggtttttgaggctaagcaggtgaactgggagtaccgcacacagcatggcttccagcctga

SEQ ID NO: 867273 - DNA, 120 bp, Artificial Sequence
  ENSG00000204684_7 (sequence is synthesized)
agtgactgtaaaatgccagtgaatagagaggctcaaggctgagtaaaggatcctgcacactcaacaggctcatccttctctgcacccgagttgttcatagagtcccagttacagagcttt

SEQ ID NO: 867274 - DNA, 120 bp, Artificial Sequence
  ENSG00000204684_8 (sequence is synthesized)
cagaaggcggaattcgtccacagcacactattgatgcctatcgaatctaaggaaattaactaagaagggaagaaataatcttcatagaaaagggatttgagaacccagaagagggtatgg

SEQ ID NO: 867275 - DNA, 120 bp, Artificial Sequence
  ENSG00000204684_9 (sequence is synthesized)
gcctggcagtgtgcatgctgcaaactatgcaccatcactggcctaaaacgcacctctgtgtgcatcatttactcacgtttaaaaatcaccctctacttgttctcctgtgaccctcattgg

SEQ ID NO: 867276 - DNA, 120 bp, Artificial Sequence
  ENSG00000204684_10 (sequence is synthesized)
actatatccagacagcactgaaagtgatagccagaaaaagtagaaacaacccatgtgttcatccactgacgaatggatcaaaacatgtggcgtgtccatccatacaaggggatattaccc

SEQ ID NO: 867277 - DNA, 120 bp, Artificial Sequence
  ENSG00000204684_11 (sequence is synthesized)
agcagtcaaaaggagcaaagaactgatgtataccacaccatggctgattctcaacagtatgttcagtgaaagaaaccagtcacaaaagcacatgtactgtatgtctatttatatgaactg

SEQ ID NO: 867278 - DNA, 120 bp, Artificial Sequence
  ENSG00000204684_12 (sequence is synthesized)
cttggaggaggcacctagtggttgccaggggcttggggtgggggtggagggcaggaatggggaatgcctgccccctccatggggtttctttgtggggtgattaaaatgttctaaaattgg

SEQ ID NO: 867279 - DNA, 120 bp, Artificial Sequence
  ENSG00000204684_13 (sequence is synthesized)
attgtgaaatctagtctccttgcaatctgtctgacctcagagaggcaaacaaaatgtctgtttgggagatggtacagatgaggaaatgaaagcctccggatgtaggttctctggaccaga

SEQ ID NO: 867280 - DNA, 120 bp, Artificial Sequence
  ENSG00000204684_14 (sequence is synthesized)
ctcctggggattcggaaaccccactccccttgccttcagaggcgctgccgctctccattgtggggcagaggtgaagaagcaaagaaagtgtccttttcatcctcgccatagaatgaaaaa

SEQ ID NO: 867281 - DNA, 120 bp, Artificial Sequence
  ENSG00000204684_15 (sequence is synthesized)
caattcatcaccacaattactcaccaaacctgagaggaggacaaaagaaaacatgtttacgttactttttctttcattaaaaagcaacacgtgtttttgcccatcagatagaaaacacag

SEQ ID NO: 867282 - DNA, 120 bp, Artificial Sequence
  ENSG00000204684_16 (sequence is synthesized)
atgcagaaaaaggaattgtgttggacccaatggacagcggtgttttctcagtgcatcaccactgggtcatctgaggcagaaaacaacaggagcttctggccatacggagttgcccagctg

SEQ ID NO: 867283 - DNA, 120 bp, Artificial Sequence
  ENSG00000204684_17 (sequence is synthesized)
gggagggatgcagatgccataatgagaggcaatgtgattgtctcctgttcacaccccatgtttctctcccacctgggcaattgcttgttgtccaaagagtaggttctagaaaacatgaca

SEQ ID NO: 867284 - DNA, 120 bp, Artificial Sequence
  ENSG00000204684_18 (sequence is synthesized)
aatgtctatagatggttgcctctgtcactaggaaattgctcataacaaaggaagatttttcctattttgaaaaaggccagtttccctcctcccggtgagggtggagtgtctgcacccagt

SEQ ID NO: 867285 - DNA, 120 bp, Artificial Sequence
  ENSG00000204684_19 (sequence is synthesized)
ctctgcatatgctgctttcttcccattagaaaaagaatgttaggcaaactagagtggaatacaaatgtggatttttaaaaaatgtttatttttaaatcagcaatgaacaattcagccctg

SEQ ID NO: 867286 - DNA, 120 bp, Artificial Sequence
  ENSG00000204684_20 (sequence is synthesized)
tctctattttttttttcttgttgattagaatggagatttggagacattgatgttctccaatatcaaagaaagttgccacaagtaaagaaaattactggggcaggaatgaaaacacagtca

SEQ ID NO: 867287 - DNA, 120 bp, Artificial Sequence
  ENSG00000204684_21 (sequence is synthesized)
tggctgttggatggagtggaaggcctgcaggagggcctgcctgctcacagcaaacacgacgggcagctatgggtgccagctgctgggcctggtgggccacatcaactgtggtcagggtaa

SEQ ID NO: 867288 - DNA, 120 bp, Artificial Sequence
  ENSG00000204684_22 (sequence is synthesized)
tcttgatgtaagagaatattttcatggcatgttccacattgagaaacctgatccagtgactcagaattatttctgaaacaatatccccttcccccaccctctgctcaatttcttctaatt

SEQ ID NO: 867289 - DNA, 120 bp, Artificial Sequence
  ENSG00000204684_23 (sequence is synthesized)
ataactctctgagatatttgcctctgataatcatagggaaagaaggggagagggaaaggagaagagaaaaggaatatagttcaattgccaatatgccaaaagtggaaagatggacccgag

SEQ ID NO: 867290 - DNA, 120 bp, Artificial Sequence
  ENSG00000204684_24 (sequence is synthesized)
tctcctctggcgcagtgtcaggactgtacagcacacactggccaggcccgtgccagaggcccattgtcagacaccatggtgggagcatgggaaccttctaaatgaacagccctgctcaac

SEQ ID NO: 867291 - DNA, 120 bp, Artificial Sequence
  ENSG00000204684_25 (sequence is synthesized)
tccttgggcctcatgtgggctgggaaaatagatctgattccacccttgttcctgcaatactcaacacaatgccaagcctgtactgggcgcccaatatatttttcttgaatgagttaataa

SEQ ID NO: 867292 - DNA, 120 bp, Artificial Sequence
  ENSG00000204684_26 (sequence is synthesized)
aacatgcagggaggacgccatgtgcaaccgtgggcagaggccgggctgatgggtctacaagcccaggaaagtccgagattgccagcaaaacaccagaagctggggggaggcatggagtgg

SEQ ID NO: 867293 - DNA, 120 bp, Artificial Sequence
  ENSG00000204684_27 (sequence is synthesized)
gttcttagaaggaacccaccctgcaacacctacatctcagacttcagcctctgaaactgtgagacataaaattttcgtgctttaacccacccagtttgtagaatttgttacacagccatg

SEQ ID NO: 867294 - DNA, 120 bp, Artificial Sequence
  ENSG00000204684_28 (sequence is synthesized)
gcaaacaaatgcacccaatgtctaaaagtcctttgattaacgactcacagttatcctttgaaaattcccagaataaaatgcaaatgtcaagactcacaggagtcaagattcaaacctttt

SEQ ID NO: 867295 - DNA, 120 bp, Artificial Sequence
  ENSG00000204684_29 (sequence is synthesized)
gtgtattttaagcatccacatttcactctttttgttaaaataagaagaaccattccaggtccaactgtcttctgcagaccttctgtgtggaatcttttcctggagttggaatagcagact

SEQ ID NO: 867296 - DNA, 120 bp, Artificial Sequence
  ENSG00000204684_30 (sequence is synthesized)
tggggatggtgctgtgggtttgtttggtttattgttgaaatcccaagaaagaactttcatttgcagctgacttggctgagccggtggacaagatttcaggaaggaactaagctctgagct

SEQ ID NO: 867297 - DNA, 120 bp, Artificial Sequence
  ENSG00000204684_31 (sequence is synthesized)
ttactgataggctggtatggaaaacctttctggactccttaaatatatccttcaagattttgacatttctctgattggaactgacaaatagatcttggtaggccaaaggttccacccttc

SEQ ID NO: 867298 - DNA, 120 bp, Artificial Sequence
  ENSG00000204684_32 (sequence is synthesized)
agccttccaagtagctgggattacagggcaaagtcttctagaacccaacctggtaactgcacctttggcctgatacctcccaattctgaaagaacatatcgatgctcagcagggacagag

SEQ ID NO: 867299 - DNA, 120 bp, Artificial Sequence
  ENSG00000204684_33 (sequence is synthesized)
agagggaagaatcaactccccatcatggaaaataaaatgttcagctgggcaataatgaagcaaatgagtaatgcccagaagacactacagagaatgtctactggggactacaaacagcca

SEQ ID NO: 867300 - DNA, 120 bp, Artificial Sequence
  ENSG00000204684_34 (sequence is synthesized)
tcagtatggtggatttgcagaagaaactgccctaagctgtgtgttaaaggtggatgggaaaccggaggagggcatggaaggacaggccagcttcagaggaaacccttggaaatggatccg

SEQ ID NO: 867301 - DNA, 120 bp, Artificial Sequence
  ENSG00000204684_35 (sequence is synthesized)
ccctctagcggttaacaagggagctgaggaataatgggatttgacatcattggaaagcacagccacacccaaaaacaggtgtgtgcacaagaatttctgaacacagattttaccagctac

SEQ ID NO: 867302 - DNA, 120 bp, Artificial Sequence
  ENSG00000204684_36 (sequence is synthesized)
acccacaccctcaattctacttgaaattaatcttaaagaaattttgaatttgctgataatttgagatcagtaaagattttccctgaaagttctaaggacttcgcttggggttttggattg

SEQ ID NO: 867303 - DNA, 120 bp, Artificial Sequence
  ENSG00000204684_37 (sequence is synthesized)
gattccagaggttggcacctacgctctaaaaaatctaaacagaaggagaaaataaatcaccaactggcactttaaagacaaagatttataccagatttaataaacttcctgtcttgctga

SEQ ID NO: 867304 - DNA, 120 bp, Artificial Sequence
  ENSG00000204684_38 (sequence is synthesized)
attttaccagctacacccacaccctcaattctacttgaaattaatcttaaagaaattttgaatttgctgataatttgagatcagtaaagattttccctgaaagttctaagcgtgtgtgct

SEQ ID NO: 867305 - DNA, 120 bp, Artificial Sequence
  ENSG00000204684_39 (sequence is synthesized)
gagttggaagggctgcagaagtgggtcacgctcacccaactggaactcgaaagactcatagagagcaagcactggacaatggcctggtgtccatgatgtatccctgcctgtcgttactaa

SEQ ID NO: 867306 - DNA, 120 bp, Artificial Sequence
  ENSG00000204684_40 (sequence is synthesized)
agctccagccagcaaatgcctcctacaaactaactttctccaagagtagcagggtggacatgtgtcccagggccaataatggaatgacatcctcaattagattggtcccctacccacccc

SEQ ID NO: 867307 - DNA, 120 bp, Artificial Sequence
  ENSG00000204685_0 (sequence is synthesized)
gcagcctccgcgggagcatgccgcctcccgcagggcccgccgcgagcttccggggcccaaggaaccagtccggaggggcgcaggcggtggtcgcagcgtccccctaaatggccggccacg

SEQ ID NO: 867308 - DNA, 120 bp, Artificial Sequence
  ENSG00000204685_1 (sequence is synthesized)
aacccgtctcacggtcccgcggccaggagccgccgctcatctgtctctgcagccaccgctgaggaagagtctcctctgaggggagagtcggtcatggcagcagacgccgggatggctccg

SEQ ID NO: 867309 - DNA, 120 bp, Artificial Sequence
  ENSG00000204685_2 (sequence is synthesized)
cgactgctacaccaggcactcctgggcccgggcagcagaccagtcagccctgtggctcctcggcgacctccagcgggcgcccggggccgggatgcagggcgcgcggacagaaacgagaca

SEQ ID NO: 867310 - DNA, 120 bp, Artificial Sequence
  ENSG00000204685_3 (sequence is synthesized)
gacagctcaggcccagcagcacgcaagctcccgcgccttccgcgactgccacacgcgcggcgcgcgcgcaccctactttttctccgccacctgggccgtgattgggcgcgacctgggctc

SEQ ID NO: 867311 - DNA, 120 bp, Artificial Sequence
  ENSG00000204685_4 (sequence is synthesized)
ctgggtgctcattggcgccgtgaagtgctcgtcaccgccccctcctgccccttcatgcatgcgcggaggccgcctgctagcaaggagggggctgtatgtggaattgcaaggccaaagaca

SEQ ID NO: 867312 - DNA, 120 bp, Artificial Sequence
  ENSG00000204685_5 (sequence is synthesized)
tctcgggtcaactcttctcaggaccagatccaagtcgccagtgagaacacacattcaggcagcctccaccagcgccctgcctcaggagcgaggctccctgcttcatgtgggcaagagctg

SEQ ID NO: 867313 - DNA, 72 bp, Artificial Sequence
  ENSG00000204685_6 (sequence is synthesized)
aagtgaagcacacactcctgcttccttccttccctgcagttgagacgggagtcttccactttggccttccaa

SEQ ID NO: 867314 - DNA, 120 bp, Artificial Sequence
  ENSG00000204685_7 (sequence is synthesized)
cttctcttactagctgagaactaagagaagacactctggagacagaggaggaaacagtgacgatgccacatgatgaatacataatggagggtgaagacaaggctccgtcaggggcaccaa

SEQ ID NO: 867315 - DNA, 120 bp, Artificial Sequence
  ENSG00000204685_8 (sequence is synthesized)
ggagggaaacccagttctgtggggaaggtatggggcagcttcacaagcccagtgtctgctccctttgtgggagacgtgttgtttcagcatccattcccccttcttttaggaaaagtgctt

SEQ ID NO: 867316 - DNA, 120 bp, Artificial Sequence
  ENSG00000204685_9 (sequence is synthesized)
gaatttccttttcatggaaccacccacctccctctcatccatgcattctattcccagtatcaggggtagacaagtgacttcaggcttggccaattagggttctgactcttggtcaaatca

SEQ ID NO: 867317 - DNA, 120 bp, Artificial Sequence
  ENSG00000204685_10 (sequence is synthesized)
gagtgaatcctgagtcatttgtaaactccaaggaaagggcttgctttgttttctgttgaatgcagtgctctgagatagccggaaatgaaactgctctcttgccacactgaaggctagaga

SEQ ID NO: 867318 - DNA, 120 bp, Artificial Sequence
  ENSG00000204685_11 (sequence is synthesized)
agggcctggccaggaaatgatgccagtgatcaggggtggagctggaagagggggagtgaggaggcccagacatcttgggagccccaaattcacctcaggatttaacttctccgctgctca

SEQ ID NO: 867319 - DNA, 120 bp, Artificial Sequence
  ENSG00000204685_12 (sequence is synthesized)
cgttcattgcaaggcgaaggaggcatgacaatggcacgtgaccatgggatcactggtcctgtcacattctgcaccacccagaagatactggcttgaacgaagagaagaaatgggctgttg

SEQ ID NO: 867320 - DNA, 120 bp, Artificial Sequence
  ENSG00000204685_13 (sequence is synthesized)
aaggcgtagctgagatgccagctcagagacgatgataccaagtgctgaacctgagagcagccccagtacactccctgcatgggaatctccatctcaaagtcagcctccagggagcccgcc

SEQ ID NO: 867321 - DNA, 120 bp, Artificial Sequence
  ENSG00000204685_14 (sequence is synthesized)
ctgaaacagattctgtcatggaactcaacagagtatcctggtgcggataaccagtgttgggagttagagcacggactctctccacctgcacggtgctggagctctgcacaccccctctgc

SEQ ID NO: 867322 - DNA, 120 bp, Artificial Sequence
  ENSG00000204685_15 (sequence is synthesized)
agccatccctcgccgctgtcccttagctgacgcccttgccctctgtgtgtccttcctcatggcctgcaggtttcagatcccaagctacagatcatgtcttctagtctgggctctggcaga

SEQ ID NO: 867323 - DNA, 120 bp, Artificial Sequence
  ENSG00000204685_16 (sequence is synthesized)
gagttcggaagcactcttattatcttagcagcagcatgtgtggaaatcatttctcattacagcggagggcaggcattgtgcagagggttaagtgggcctgcttgaagttggttgttgtta

SEQ ID NO: 867324 - DNA, 120 bp, Artificial Sequence
  ENSG00000204685_17 (sequence is synthesized)
gctctcatgtctatgccttggtccctttcccctcaggacttggagagcaagctgtttgagtctgatgcaacccctgggctttgactatcatgccaaaaggcagcaaataagtgccttttc

SEQ ID NO: 867325 - DNA, 120 bp, Artificial Sequence
  ENSG00000204685_18 (sequence is synthesized)
ttcccttcagaatacatggacaatccaaagctctattagtctattattcagaatgaaaagtgtttacaatattcgtcctcttactcctcagtatgtgagactgttcctcgtagcaggtaa

SEQ ID NO: 867326 - DNA, 120 bp, Artificial Sequence
  ENSG00000204685_19 (sequence is synthesized)
gtttttagtttttgcaactaaaacagcactgactaatacacccttaggtaagattagagcaagaatttccaatatctgtgttcttcatcctgaaatttggtgaggatatctaaggttctt

SEQ ID NO: 867327 - DNA, 120 bp, Artificial Sequence
  ENSG00000204685_20 (sequence is synthesized)
ttgtcttttaaaagaattctgttgcaatggaaagtatcaatccatatttttccatttctccaaaatgttttagtgtatatctatggggcacaaacttaatctctgtaggccctctgccat

SEQ ID NO: 867328 - DNA, 120 bp, Artificial Sequence
  ENSG00000204685_21 (sequence is synthesized)
aacttaatctctgtaggccctctgccatagttgctctgtgccacttgataaggggctggtatctagaatatataaaaactcttaaaactcagccgggcatggtggctcatgcctataatc

SEQ ID NO: 867329 - DNA, 120 bp, Artificial Sequence
  ENSG00000204685_22 (sequence is synthesized)
gaccagcctggccaacacggtgaaactctatctctctaaaaatacaaaaattaggcgggcgtagtggctcactcaagactgaggcagaagaaccacttgaacccaggagttggaggtttc

SEQ ID NO: 867330 - DNA, 120 bp, Artificial Sequence
  ENSG00000204685_23 (sequence is synthesized)
ttgaacccaggagttggaggtttcagtgagcccagatggctccacggcactccatcctgtgcaacagagtggcacaggatggcaaaaacaaacaaaagctcttaaaactcaacaataaaa

SEQ ID NO: 867331 - DNA, 120 bp, Artificial Sequence
  ENSG00000204685_24 (sequence is synthesized)
aaactcaacaataaaagacaacccactttagaaatgagaaaagggccaagtgtggtggtaatcccagcactttgggaagttgaggtgtgtagattgcttgagcccaggagtttgagagca

SEQ ID NO: 867332 - DNA, 120 bp, Artificial Sequence
  ENSG00000204685_25 (sequence is synthesized)
ggggtctggagcctaggaagcaaagtgaagcacacactcctgcttccttccttccctgcagttggtgagtatctggctcagtttaggttaatatcatctcttcagcctggcccagtttac

SEQ ID NO: 867333 - DNA, 120 bp, Artificial Sequence
  ENSG00000204685_26 (sequence is synthesized)
cctggaaatagatctgctcattgcagtgtggcaggtgcagagaaacagagccagctatagctggaagagaatcttagggcacagagatgcaccaacatgtatgaacaagtcgagacccaa

SEQ ID NO: 867334 - DNA, 120 bp, Artificial Sequence
  ENSG00000204685_27 (sequence is synthesized)
gtaccaagctgtagagttactgcaccatagcaacccaggccagcaggcaaggcaagagggcagttattacagagagccatggggcaagagtggagccaccttgacagtgggggtgaccag

SEQ ID NO: 867335 - DNA, 120 bp, Artificial Sequence
  ENSG00000204685_28 (sequence is synthesized)
aagccacatctaggagtgttggcccagagtctctgcatttcctcctgctcaggaccttaagagaggcccatcttaaatgccactgtctccatgagcttttggaaaccttaccagtttcct

SEQ ID NO: 867336 - DNA, 120 bp, Artificial Sequence
  ENSG00000204685_29 (sequence is synthesized)
cccctgttcagggagttccactagggtaacattcctgccttctctccacccctctattactttgccccagggaaaataaaagatgactgcttggataggtaggtggggaggggaaactgg

SEQ ID NO: 867337 - DNA, 120 bp, Artificial Sequence
  ENSG00000204685_30 (sequence is synthesized)
tcctgtgtaggccagtgggcccctccatcaccttgggggtgagctgcatgcagggtataaaatcccactgctctcgctgagggggctgcactcctgcaggactaaaggaggctttctctg

SEQ ID NO: 867338 - DNA, 120 bp, Artificial Sequence
  ENSG00000204685_31 (sequence is synthesized)
gttgagggctaccatggctgggcgggtgagcctgcctcctagtgggatttgcattagcagctcacttagttcacaggtctaaagctgtgtcctccagcccagccctctagcagtaattaa

SEQ ID NO: 867339 - DNA, 120 bp, Artificial Sequence
  ENSG00000204685_32 (sequence is synthesized)
gaggatattttggttcctgttgccactcctttgttttatttctcagggccctcaaagacaccccagaatagatttcctgtcccctttaatcttgcccttctttgagtccccattgcattt

SEQ ID NO: 867340 - DNA, 120 bp, Artificial Sequence
  ENSG00000204685_33 (sequence is synthesized)
ttgcattttatggtatatttctagcatgacctttcattctttcagtaattacctccttatttccttcacccctgcatttaaaaaaaaattttatagatgaggtctcactctgtcacccag

SEQ ID NO: 867341 - DNA, 78 bp, Artificial Sequence
  ENSG00000204685_34 (sequence is synthesized)
gggctcaagcagtcttgaccatgcccagctaactttttttttcttttttgtagagacgggagtcttactttgttgccc

SEQ ID NO: 867342 - DNA, 120 bp, Artificial Sequence
  ENSG00000279168_0 (sequence is synthesized)
atgagacaagaggtagaggggagaggtagaggtagccacgagctgataattacagacaagagatgcggagtatgtgggggctcattatcctgcatagtctatctttgtatatctttgaac

SEQ ID NO: 867343 - DNA, 120 bp, Artificial Sequence
  ENSG00000279168_1 (sequence is synthesized)
ttttcaagaataaaaaagcttaaaaagtatacatggcctggtcctaccagagactcacccaatgccagcctccagccagggagagccaagtttgcattttcacacgcatctcacactcct

SEQ ID NO: 867344 - DNA, 120 bp, Artificial Sequence; identical to SEQ ID NO: 151961
  ENSG00000279168_2 (sequence is synthesized)

SEQ ID NO: 867345 - DNA, 73 bp, Artificial Sequence
  ENSG00000279168_3 (sequence is synthesized)
ctgtacaacgctaccgctagaccacggtgggcttggcaacaggtgtcttcccagatgctggcgttaccgctag

SEQ ID NO: 867346 - DNA, 120 bp, Artificial Sequence
  ENSG00000279168_4 (sequence is synthesized)
gaagatatttaggtgacttacagcaaccaattgcaacaaaacaaaatgttaagaaatgatctttttatgaggcaattggaaatttgaacactgatcaactataggatgattggaattatt

SEQ ID NO: 867347 - DNA, 82 bp, Artificial Sequence
  ENSG00000279168_5 (sequence is synthesized)
aatttgaacactgatcaactataggatgattggaattattaattttgtaaaggtgtgataagatactgcacttggctgggca

SEQ ID NO: 867348 - DNA, 120 bp, Artificial Sequence
  ENSG00000279168_6 (sequence is synthesized)
gcctgggcaacgtggcgaaatccccgtctttacaaaaacaaacaaacaaacaaaaaagatattgcagttgtgttgtaagcgtccttatctttcagagctacatagtggaatgtttatgga

SEQ ID NO: 867349 - DNA, 120 bp, Artificial Sequence
  ENSG00000279168_7 (sequence is synthesized)
acatgagttcaggagttcgagaccagcctggcaaaccatggccaacatggcaaagcccatctctactaaaaacacagaaattagccaggtgcggtggtgcgcatctgtaacccctactac

SEQ ID NO: 867350 - DNA, 120 bp, Artificial Sequence
  ENSG00000224884_0 (sequence is synthesized)
ggcaccatgtctgctggcctggtggccacagtagaatctcttttctctttcttctttattccctaaagtcttaaagataactattttcacaagcaatatatgcaaatatattctcactgg

SEQ ID NO: 867351 - DNA, 120 bp, Artificial Sequence
  ENSG00000224884_1 (sequence is synthesized)
ctgggtgcagtggctcatgcctgtaatgccagcaccttgggaggctgagctaggaggattgcttgagctcgggagtttgagatcagcctgggcaacatggggagaccccatctcaacaaa

SEQ ID NO: 867352 - DNA, 84 bp, Artificial Sequence
  ENSG00000224884_2 (sequence is synthesized)
aggcctgggtgacaggtttaaaccagttttaattggatttccctcacttgcaacaaggaagacctgaataatattgcttctgtc

SEQ ID NO: 867353 - DNA, 120 bp, Artificial Sequence
  ENSG00000224884_3 (sequence is synthesized)
cacttgcaacaaggaagacctgaataatattgcttctgtctgtatgtccaaatactttcatttttcaagaagcaatgttataccaacgtcagaacaaaggaacactttatgctgatcctt

SEQ ID NO: 867354 - DNA, 120 bp, Artificial Sequence
  ENSG00000233866_0 (sequence is synthesized)
aaatttcccagggctacaaagccttcactgtatgagctgcaaatcaagccaaaatgttatcagagatgaagagatggggatagccatcaggcctggggatggacctccctggagctgggc

SEQ ID NO: 867355 - DNA, 120 bp, Artificial Sequence
  ENSG00000233866_1 (sequence is synthesized)
attcaagaggatgagtgcagcagaacgcgtatccagggagcctttcggtgactgtttgggcaaagcctcccttgtggtaaaagatgcctcacttctggggagaggaggctcctcatcttg

SEQ ID NO: 867356 - DNA, 120 bp, Artificial Sequence
  ENSG00000233866_2 (sequence is synthesized)
aggagtttgagaacagcctgggcaacaaagtgagacccaatctctacaaaaactagagaaaaaatagctgggtgtggtggcactcacctgtactaaggaggctgggctgggaggatctcc

SEQ ID NO: 867357 - DNA, 90 bp, Artificial Sequence
  ENSG00000233866_3 (sequence is synthesized)
ctagagaaaaaatagctgggtgtggtggcactcacctgtactaaggaggctgggctgggaggatctcctgagcctaggtggttgaggctg

SEQ ID NO: 867358 - DNA, 120 bp, Artificial Sequence
  ENSG00000233860_0 (sequence is synthesized)
gcagagagggtcgccctcaccaagaagccaaagggaagaggacagaatctatcttgtagggacgcccttggtcttcagaaggaacactttttctgtttcacagagatctgtggaatgtgt

SEQ ID NO: 867359 - DNA, 120 bp, Artificial Sequence
  ENSG00000233860_1 (sequence is synthesized)
gggttccctgaagaggtggacggacccccggggtcgcgcgttttctcagccctgggcccgtagcggagctcgatccttccagagctcagggccagaaatgttgcgattccgaacactttg

SEQ ID NO: 867360 - DNA, 120 bp, Artificial Sequence
  ENSG00000233860_2 (sequence is synthesized)
cctttcttctgagaggagccgcccggcagacgctcatcattaagaagcaacgtaattaacaacgaatgtttccccttggcgctaatgcgaacaccctggggaactgccaagtctgatgct

SEQ ID NO: 867361 - DNA, 120 bp, Artificial Sequence
  ENSG00000233860_3 (sequence is synthesized)
tgctgaatggctgacttctctgaaagggaaaacagcagaatctgagaggggagagtggagcggagttcttcctcccctgtgctaacagcctgtatcctgaccatccttgcccccgactcc

SEQ ID NO: 867362 - DNA, 120 bp, Artificial Sequence
  ENSG00000233860_4 (sequence is synthesized)
tctcccagcagctgagtggctttttggactgggttctttttccgaactgccagcaccaacttccgtgcgtcttacctgtgcttcagccgaagtttaacccctcctgaccacgctgctttc

SEQ ID NO: 867363 - DNA, 120 bp, Artificial Sequence
  ENSG00000233860_5 (sequence is synthesized)
ctgtgctgggggccagaggtgaggtgttctgggctgacgaagttagaggcaccagtatctgcatggcctgggtctgtgcacacatctctgtcaacaataggaaaagaagaagctgagcat

SEQ ID NO: 867364 - DNA, 120 bp, Artificial Sequence
  ENSG00000233860_6 (sequence is synthesized)
gatggtgttcatggacaggagcacaaatgaatcttaaaaaccgaaaaagcacatgaaaacgaaccccggagccagagcaaagcagcacagctaagtgcagggttctaagcctgcacctaa

SEQ ID NO: 867365 - DNA, 120 bp, Artificial Sequence
  ENSG00000233860_7 (sequence is synthesized)
caaagttctctgccctacgaaggcgaatccactactgagtgtcgtgtcttccttttttatccatgttcctctgaagcaataaagcattatttcccaatctcagaaaacccagattttcta

SEQ ID NO: 867366 - DNA, 120 bp, Artificial Sequence
  ENSG00000233860_8 (sequence is synthesized)
gggaaaaactggattcactgaagcaaactgtcaaacgaggtggtttgaaaccaagcctctgccacctcacttctcaagttctctttaaggagcgggatctccaagtgtaacaggccttgc

SEQ ID NO: 867367 - DNA, 120 bp, Artificial Sequence
  ENSG00000233860_9 (sequence is synthesized)
tctgttcagtgggtggcagctcagaagcacatgccaactcttgagcttgagctatttcagattgtttagattccactgcactgggaggcaagccttttgtgtgtccatttaaatccaccc

SEQ ID NO: 867368 - DNA, 120 bp, Artificial Sequence
  ENSG00000233860_10 (sequence is synthesized)
tcccacccccagtccctaacaccattcccataactctcttcctccatactcccagggagtcagagaaaaattttaagccctacatggccaatgtgttccgccatgggaacaggaacattt

SEQ ID NO: 867369 - DNA, 120 bp, Artificial Sequence
  ENSG00000233860_11 (sequence is synthesized)
cttctccttaggacagtgacaggtcatgaatttctaagcatcctgactgtgctcttgatgtctcatcagactgtcccctgcatcaggctttgaagttttgtcatcatctctgtttgtggg

SEQ ID NO: 867370 - DNA, 120 bp, Artificial Sequence
  ENSG00000233860_12 (sequence is synthesized)
gaaccagtggtttattttcaatttctgtcttcaaggatttttctaagcctctgagatctgactggtgggcccataaacagaatctggagaaggtacaaatgaggccgtgcctcctctgca

SEQ ID NO: 867371 - DNA, 120 bp, Artificial Sequence
  ENSG00000233860_13 (sequence is synthesized)
caggccatggctgagaggggaagggattactgaacagctgttaagaataagccccgtccatctggccttctatttcctggaacacagaacggaagtgaaagagctttctttcctaaatcc

SEQ ID NO: 867372 - DNA, 120 bp, Artificial Sequence
  ENSG00000233860_14 (sequence is synthesized)
taaggcaaatgaaaggatctctttttattctacagcatggggaagatggccaggaggccaacagggagtttccatttctaagctcaagttttcatgtttaccttagttatatctaagcac

SEQ ID NO: 867373 - DNA, 120 bp, Artificial Sequence
  ENSG00000233860_15 (sequence is synthesized)
caccacctccttctgtacattacttttctcaccgaatttaggattctcggctttggatatattcaatatagtgctagacttgaagtttgaaaattggttgaggttatgtcaataatgaac

SEQ ID NO: 867374 - DNA, 120 bp, Artificial Sequence
  ENSG00000233860_16 (sequence is synthesized)
tttttttttttttttttaaatccccaggaaggtctcagtgctgcaaaagctccatgaccattctgcttctaaactgacggagcaaacatatatttccagtggtaatgctaggaaatactt

SEQ ID NO: 867375 - DNA, 120 bp, Artificial Sequence
  ENSG00000233860_17 (sequence is synthesized)
tgctaaggatgttactttggtccttcagccagtggtcagagaacagaatgaccatactgcaaccacccatggtgaactgactggcacacctacaaaaatcttatctttggggtccccata

SEQ ID NO: 867376 - DNA, 120 bp, Artificial Sequence
  ENSG00000233860_18 (sequence is synthesized)
ttcacctcaattagtctgtttcccaaatctgaaaataaaagcagtgaaatggacaaggtgacagttaaggccttgaatcagaagagcctctgacaatgtgacaaatagcttagccattcc

SEQ ID NO: 867377 - DNA, 120 bp, Artificial Sequence
  ENSG00000233860_19 (sequence is synthesized)
tccaagactgagataaaatgtcactcttggttcaggagctgtggcagtaggagaacatcaggcaactagtcctagacttatcatcatccccatggaaggagtgtgattgtaagtctctct

SEQ ID NO: 867378 - DNA, 120 bp, Artificial Sequence
  ENSG00000233860_20 (sequence is synthesized)
gaatggctgacttctctgaaagggaaaacagcagaatctgagaggggagagtggagcggagttcttcctcccctgtgctaacaggtatgtgattcctattattgtctttggtgggaaggg

SEQ ID NO: 867379 - DNA, 120 bp, Artificial Sequence
  ENSG00000233860_21 (sequence is synthesized)
catgaggcaggcccctggtctacagtggaagtgaagcctgaggataggctaagaattagggaaattaacaggctcctaggagtcagaatgctcagcttctattcccagcactgcttaaaa

SEQ ID NO: 867380 - DNA, 120 bp, Artificial Sequence
  ENSG00000233860_22 (sequence is synthesized)
ttttcaggggaaagtactttataatccttgcagcatttggtgcctttattagaaaatccttttatgtgagattttgagtttcttattttctctcctcaccaggataatgcacagaaagag

SEQ ID NO: 867381 - DNA, 120 bp, Artificial Sequence
  ENSG00000233860_23 (sequence is synthesized)
ctgaggtgggagtccgagagacaggggtctgacatgtataatatactctgctgcacaggattatcatgagggttaaatgaaataataaatgtagattacacttagctcaggacctgccac

SEQ ID NO: 867382 - DNA, 120 bp, Artificial Sequence
  ENSG00000233860_24 (sequence is synthesized)
gttcacatctcggggaaacaaaccttccatcaggtccattgttgtcttcagcctggagtctggatccaaaatgtctgctagagatttgtcttggtggacaatttccttggccaaagcctc

SEQ ID NO: 867383 - DNA, 120 bp, Artificial Sequence
  ENSG00000233860_25 (sequence is synthesized)
tgttctgatgtcttctgaactcttctgaggatcaggactgactttcttttctaaaccctgagttccactgactggatcatggctgaggctttgagtctggatgggtgctggctgcccacc

SEQ ID NO: 867384 - DNA, 120 bp, Artificial Sequence
  ENSG00000233860_26 (sequence is synthesized)
aagagacccagcaagttgggcgtgaacgctcatgaaggagggtggtgtggactcagcctctgaacccttgatagaagtttggagtctggaagccagtgtctgactacctaccacatgggc

SEQ ID NO: 867385 - DNA, 120 bp, Artificial Sequence
  ENSG00000233860_27 (sequence is synthesized)
gagagaaagagagagtgataagagaagggtgatgataagagggtggagaaagactgagggagaagctttccacatcagggctgtagctttccacatcttccacatgttactgacagagct

SEQ ID NO: 867386 - DNA, 120 bp, Artificial Sequence
  ENSG00000233860_28 (sequence is synthesized)
aatgttaaagaatatggcttctgattataagtgggtctcctgatactgaaccccgaaactaaaaacatttacctacctagtcacaggtcatgctagacacacaaacatacatagatatat

SEQ ID NO: 867387 - DNA, 120 bp, Artificial Sequence
  ENSG00000233860_29 (sequence is synthesized)
acataggagtagggtgagatagtcacatttgagatcaaccccttctttagaaaacaacagcactctaaaggggctcctgagcccagcagctggtcaggaggttgtcatctcctgaggaag

SEQ ID NO: 867388 - DNA, 120 bp, Artificial Sequence
  ENSG00000233860_30 (sequence is synthesized)
atggactaggaattcagttctggtgaatgttgctgttagattccagagatttctgaaaggtctaggttaacaggggtagtggtagtaagtcactcttgtggtgtttaaagaaagccactc

SEQ ID NO: 867389 - DNA, 120 bp, Artificial Sequence
  ENSG00000233860_31 (sequence is synthesized)
aaaaggtgctgtcaggcaatgtgtttttttggtgttttgagagattacttgttctagggactatgtgttggggaatgcttctttctcattctcctagcttccaagaggttttccctaaac

SEQ ID NO: 867390 - DNA, 120 bp, Artificial Sequence
  ENSG00000233860_32 (sequence is synthesized)
attactgaccttgagccctactctttattcctccctatggacatggagtgattttggaaagagaagctgagcattcacatcccagtctctcttctcttttgagactgaggctgcctcaag

SEQ ID NO: 867391 - DNA, 120 bp, Artificial Sequence
  ENSG00000233860_33 (sequence is synthesized)
gctgtatatattaatatctatgtgtatttgtgtgtctaacatgacctttgatgaggtaggtaaagctgtttaacttgggggttcagtatcaagagacccacttacaatctgaagccatat

SEQ ID NO: 867392 - DNA, 120 bp, Artificial Sequence
  ENSG00000233862_0 (sequence is synthesized)
gtcctgctccctgcctgcccatcttcgacctcagccctcctcctccaaagcagtccctcagaacccctcctggtttcagtctggatcccaccacatgttgaatggcaccctctcaatctg

SEQ ID NO: 867393 - DNA, 120 bp, Artificial Sequence
  ENSG00000233862_1 (sequence is synthesized)
ggacagcgtccgttgattttctcctgtgataaatgaggactcacggagcgcagcccccagcagaggctgcctgctattacccagaaggccaatagagggctcccaagaacactgagcaaa

SEQ ID NO: 867394 - DNA, 120 bp, Artificial Sequence
  ENSG00000233862_2 (sequence is synthesized)
gaagacatcaagatgttcaactgtaatggcagtactggttattatccttctctaacatacaaactgataagactgtattcatatgataaaggtgcaaatggaagagcacctgccatgaat

SEQ ID NO: 867395 - DNA, 120 bp, Artificial Sequence
  ENSG00000233862_3 (sequence is synthesized)
gcaatagaagcagttgctgcattaaggaaacttggattagattagctttaagtttctttctgaacacaagccagtgtcttgaccggaagtatctcttctagaattagctgatgatagagc

SEQ ID NO: 867396 - DNA, 120 bp, Artificial Sequence
  ENSG00000233862_4 (sequence is synthesized)
tttataaaacacttgcatgttggatatgttcaagacttgattctgttcactatgttatcttggaaaaaattgcttaatatctctaggcattattttgtcttttttttaaatgatgggggt

SEQ ID NO: 867397 - DNA, 120 bp, Artificial Sequence
  ENSG00000233862_5 (sequence is synthesized)
cagcctcccaagtaactggtactacaggtataaattcagcctgagattccagaatattctgtgtattgaccaccacagcaagaagaaaaagtccatgtaggactgaaatgaggaagaatg

SEQ ID NO: 867398 - DNA, 120 bp, Artificial Sequence
  ENSG00000233862_6 (sequence is synthesized)
cttgcgtacttttccaatgccacttccaaattcatagtgaatagcatgattaggaggttttcacatggccctctctgttttttattcctctaaatgatttttaaagttgtccaaggtgaa

SEQ ID NO: 867399 - DNA, 120 bp, Artificial Sequence
  ENSG00000233862_7 (sequence is synthesized)
cagagaattgatacaaaaaatgatcatgtgaagaatttgcatcttctgcagaactaccggtatcagtcagcagtaggagattgtataaattcagcctgagattccagaatattctgtgta

SEQ ID NO: 867400 - DNA, 120 bp, Artificial Sequence
  ENSG00000233862_8 (sequence is synthesized)
ttgaccaccacagcaagaagaaaaagtccatgtaggactgaaatctgtggtacttctgcggtggcacttcttacacaagtgagaagcagcgacaccgtgacacctgcacgccggagccct

SEQ ID NO: 867401 - DNA, 120 bp, Artificial Sequence
  ENSG00000233862_9 (sequence is synthesized)
cagcgacaccgtgacacctgcacgccggagccctgcgttagtgagaagcagcgacaccgtgacacctgcacgccggagccctgcgttaggctgggtaagggcggggacctgggcatcaca

SEQ ID NO: 867402 - DNA, 120 bp, Artificial Sequence
  ENSG00000233862_10 (sequence is synthesized)
cagtcttagatgtgggcctgcctccaacagctccctcctgggtgtgatgctgaagggggtccttgacacctctgaagtctcagtctcctcaaggtcacacccagcttataggattgtgct

SEQ ID NO: 867403 - DNA, 120 bp, Artificial Sequence
  ENSG00000233862_11 (sequence is synthesized)
gctaaattgtgtttccccccaccgaaattcatgcgttgaatcctaatccccagtacctcaaaatgtgactgtatttggaggtagaaactttaaaaggtgattaagttaaaatgaggtcat

SEQ ID NO: 867404 - DNA, 120 bp, Artificial Sequence
  ENSG00000233862_12 (sequence is synthesized)
tagggtgggccctaatccaatctgactggtgtctttatgagaagaggagattaggccacatggagaaaccagggatgcctgcacacagagaaaagaccttttgaggatgtagtgagaaga

SEQ ID NO: 867405 - DNA, 120 bp, Artificial Sequence
  ENSG00000233862_13 (sequence is synthesized)
taccatctgcaaggcaaggaaaagggcctcagaagaaaccaaactcacaagaaagccaacaccttgatcttagacttccagcctccagaattgtgagaaaacacatttctgtttaagcca

SEQ ID NO: 867406 - DNA, 120 bp, Artificial Sequence
  ENSG00000233862_14 (sequence is synthesized)
cccaatctgtggtgttttgtggtggcagccctagcaaactaatacaggtagctactgtgaatgggaacttcccgtattatatattacatctctaaccagttatttgttttgtaggaaata

SEQ ID NO: 867407 - DNA, 120 bp, Artificial Sequence
  ENSG00000233862_15 (sequence is synthesized)
tgatgattttgtagtttattttcctggattttctggatggaaaaatgtttttatctgcaaatgatcacagttttgctgcccactttctagtcattttgccttttgtttttttttcttttc

SEQ ID NO: 867408 - DNA, 120 bp, Artificial Sequence
  ENSG00000233862_16 (sequence is synthesized)
tacaggcatgagccaccactcctggccttttatttctttttaaatccttgctcatatatctttgagtatatctgtgaatatttctatcagacaaattcataaaagttattactagtttgt

SEQ ID NO: 867409 - DNA, 120 bp, Artificial Sequence
  ENSG00000233862_17 (sequence is synthesized)
agacaaattcataaaagttattactagtttgtaatgttcctttttctaaagaatgggcatgcagttttattaaatatcttttagtgtccattgagatgaccatttttttccctttattct

SEQ ID NO: 867410 - DNA, 120 bp, Artificial Sequence
  ENSG00000233862_18 (sequence is synthesized)
gtttttttatatgtattacattagcccatctccaatattaaactagctttgtgtttctgggataaaaactcctttgacatttgacgtgtgctgacactgacattctttgagtaaataaaa

SEQ ID NO: 867411 - DNA, 120 bp, Artificial Sequence
  ENSG00000233862_19 (sequence is synthesized)
taaaaaacaggagtataccagtgtacaccaacataccctgctgctttattcgggttactgactatactttctgtctgaaattgtctgctgtgtcctcagtagatgactctatttagtaac

SEQ ID NO: 867412 - DNA, 120 bp, Artificial Sequence
  ENSG00000233862_20 (sequence is synthesized)
tacaaaccctgagtcaggctttcagaatgcccttctttttatttattagtagagatgagatcttgctatgttgccagcgctggtctcgaactcctgggctcaagtaatcctctctcctca

SEQ ID NO: 867413 - DNA, 120 bp, Artificial Sequence
  ENSG00000233862_21 (sequence is synthesized)
tacaggcatgagccactgttcctggccagagtgaccttctaatggtgcttccatggacctctcctttgctcctattttctttctcttgcttttggagctgctcctttagaggtgagacca

SEQ ID NO: 867414 - DNA, 120 bp, Artificial Sequence
  ENSG00000233862_22 (sequence is synthesized)
ctcctttagaggtgagaccacccttcaagtgggtgaaatcagctgtgagtctctcattgcttctgtgtacttcccacagcctagtaaattttctctttgctcctcaagccctggaacatt

SEQ ID NO: 867415 - DNA, 120 bp, Artificial Sequence
  ENSG00000233862_23 (sequence is synthesized)
gccttacattttctctgtttcagcatatcttcctctgtcacctattttctccaggtttggataaaaggtagtctctcctgataattctcaacacctgatggacacctattccaggagaac

SEQ ID NO: 867416 - DNA, 120 bp, Artificial Sequence
  ENSG00000233862_24 (sequence is synthesized)
actctgcatcctgaagctcattctgtcctaaatggatcccatatctcctctcaacgcagagacaaaaacaaacattccttaggcctaggaccatcacttcccttgtgtctgttcatggac

SEQ ID NO: 867417 - DNA, 120 bp, Artificial Sequence
  ENSG00000233862_25 (sequence is synthesized)
cacaataccttgcctgcttcaatggctgcaagtgtttatcatctctgtcttgtctgggccctgcatacaagtgacctgccctcatatccaacactccagtttagactccagtaacctctt

SEQ ID NO: 867418 - DNA, 120 bp, Artificial Sequence
  ENSG00000233862_26 (sequence is synthesized)
actggtgggttctaataaccttttaataacttccctctatcttgccccttgctttatattgagatcatattcattgtttcccctccatcttgctgcctggatcatgaatgatgtctatac

SEQ ID NO: 867419 - DNA, 120 bp, Artificial Sequence
  ENSG00000233862_27 (sequence is synthesized)
cacagggaccaggatgccatctagggacaatggagcaatgagctgggaggaacctggatcctgaacattgtgtggagtacagctgtcataaggctgaggttgcattgtgtgtgtgtgtgt

SEQ ID NO: 867420 - DNA, 120 bp, Artificial Sequence
  ENSG00000233862_28 (sequence is synthesized)
gtgtgtgtgagtgagtgtgtgtgtgtgtgtgttgtttactttaacctgagcttatgagagctctgggtaatgtaaatagaatagctcctttaggaagtgtcttagtcattttgggctgct

SEQ ID NO: 867421 - DNA, 120 bp, Artificial Sequence
  ENSG00000233862_29 (sequence is synthesized)
ataacaaaaatgctgtatactggtggcttaaataactatttatcataattttggaggctgggaagtccaagatccagacactggcagatctggcatcaggtgggggcctgcttcctggct

SEQ ID NO: 867422 - DNA, 120 bp, Artificial Sequence
  ENSG00000233862_30 (sequence is synthesized)
tatagacagttgccttcttgctgtatcttcacatagctgatggagagatcattttgctcttatgtcttcttataagggcactcatcccatttgtgaaggctccaccctcatgacctgatt

SEQ ID NO: 867423 - DNA, 120 bp, Artificial Sequence
  ENSG00000233862_31 (sequence is synthesized)
acctccccaaagcactacctgctagtaccatcacattggggattaggcttcaacctatacattttatgaggaaatgaacaatcagtccatatcagggagaaataaatatatgtaactata

SEQ ID NO: 867424 - DNA, 120 bp, Artificial Sequence
  ENSG00000233862_32 (sequence is synthesized)
atcacaagttaagtagttaaaataaaaaatatcaatatcttattctgtgtgtggccctgccaatttactaaaagctatcataaaggacactgatcataaaacttagccaatcattttagc

SEQ ID NO: 867425 - DNA, 120 bp, Artificial Sequence
  ENSG00000233862_33 (sequence is synthesized)
attttagcctgcacaaattctatacggtatttgaaataatcaaccaaacaataattcttcaaactttgtttcgttttgttttgttttgagacagtttcgctctgtcgcccaggctggagt

SEQ ID NO: 867426 - DNA, 89 bp, Artificial Sequence
  ENSG00000233862_34 (sequence is synthesized)
gcatactacagtttgtcctcggctgttacagagaattgatacaaaaaatgatcatgtgaagaatttgcatcttctgcagaactaccggt

SEQ ID NO: 867427 - DNA, 120 bp, Artificial Sequence
  ENSG00000233862_35 (sequence is synthesized)
gctgttacagagaattgatacaaaaaatgatcatgtgaagaatttgcatcttctgcagaactaccggtatcagtcagcagtaggagattgccagacacggtggctcacgcctataatcct

SEQ ID NO: 867428 - DNA, 77 bp, Artificial Sequence
  ENSG00000233862_36 (sequence is synthesized)
ggtgaaaccccatctctgggtcccagctgctgggaaggctgaggtgggaggaacatttgagcccagaagttgagccg

SEQ ID NO: 867429 - DNA, 80 bp, Artificial Sequence
  ENSG00000233862_37 (sequence is synthesized)
ggcgtggtggtgtgtacctgtggtcccagctgctgggaaggctgaggtgggaggaacatttgagcccagaagtcagcaag

SEQ ID NO: 867430 - DNA, 120 bp, Artificial Sequence
  ENSG00000226017_0 (sequence is synthesized)
attttgatctcagcatgtgctgatggagtaatgaaataaagacaacactctgcaaatggctggatacattaagtgagaagcaacttgtaaagcacccaggaaaatatctgacacattgaa

SEQ ID NO: 867431 - DNA, 120 bp, Artificial Sequence
  ENSG00000226017_1 (sequence is synthesized)
gatggcaggatctgcctcagggatctgctcaagcaacgtgggatccccactttttcactctgctgaatactcgaccatattacaaggcaacaactgttctaagctggaactagagcatga

SEQ ID NO: 867432 - DNA, 120 bp, Artificial Sequence
  ENSG00000226017_2 (sequence is synthesized)
actggaatgaggaaggaccagtaaggcaaagtgaaacacccaaaccaccagcatgctcccatccagaatggtacctgttcaggcttcagacccggcgggacccaggcatactcttccaaa

SEQ ID NO: 867433 - DNA, 120 bp, Artificial Sequence
  ENSG00000226017_3 (sequence is synthesized)
gcacagcctgagtcatcatctgaggtcgagttcctctgaaagtcaaacatgagtttgctgatggtcttctccatctccagcggcatcactgtcaccatgtgctcctcctggggacacttg

SEQ ID NO: 867434 - DNA, 120 bp, Artificial Sequence
  ENSG00000226017_4 (sequence is synthesized)
cagtgcaggcagatcttcctgcaggcagtaaaggtagaaggtgagaaagaggaaaaaacctttttttttttccaagagcctgccagtcactagcccctggatcccaaaccataaacacat

SEQ ID NO: 867435 - DNA, 120 bp, Artificial Sequence
  ENSG00000226017_5 (sequence is synthesized)
tccttggcaatgggcatcgggcaaaggcatcgcgagcagtgttccagaacatgactgtctttgcagagggcgtggtacacgcatgtgaaaacagcatgaaaggtcagaggccaccaggta

SEQ ID NO: 867436 - DNA, 120 bp, Artificial Sequence
  ENSG00000226017_6 (sequence is synthesized)
agcatgctaagggtgtttacatgtggaccccagccttctcttctaaatcaataccccaagaggaatggtaatatagtttttattttactaggtagaccactggatatggcccatgaccac

SEQ ID NO: 867437 - DNA, 120 bp, Artificial Sequence
  ENSG00000226017_7 (sequence is synthesized)
aatttccttgactgcaatagcaattaaatatacataatacatatgttgacctgaagtgttacttgtagatttaacaaatactgacaacatactgcttttataaaaggttcctaagccctg

SEQ ID NO: 867438 - DNA, 120 bp, Artificial Sequence
  ENSG00000226017_8 (sequence is synthesized)
gaaaatggagaaaatggttttaaaaatgcaggtaaaatgttctttaagaagaagagcaaacatacatattttttctcatgaaacgtatctggccctaagatctcataggaaagacaattt

SEQ ID NO: 867439 - DNA, 120 bp, Artificial Sequence
  ENSG00000226017_9 (sequence is synthesized)
cacctccattaaagatccctgtaggtttggaattctaattagaaacccaaattttccctatgttggtggggttttttatatacaagaagatcatgcatgtgaattatttcaaaaggtagc

SEQ ID NO: 867440 - DNA, 120 bp, Artificial Sequence
  ENSG00000226017_10 (sequence is synthesized)
tgttgatgtcagcaacacaaaagcatttctagcttccaccaataaaataaaaagagagaaaaaaagaatagaggaggaaaattttaaggaaataagttattccatgttcactctttttaa

SEQ ID NO: 867441 - DNA, 120 bp, Artificial Sequence
  ENSG00000226017_11 (sequence is synthesized)
aattattagtttccgtagcaccttataaaggtgataaaagagcccagaattttaatccccagatgtgcctgaacgttctgataacagctttgtgaagatacaatgtacaaaccataaaac

SEQ ID NO: 867442 - DNA, 120 bp, Artificial Sequence
  ENSG00000226017_12 (sequence is synthesized)
tcaccatttcaaagtgtacaattcatggactcttaatacattcggaattgtgaatcatcactatctaattttcatcccctccccaaaagaaaccccaggagcattggcagttatttccca

SEQ ID NO: 867443 - DNA, 120 bp, Artificial Sequence
  ENSG00000226017_13 (sequence is synthesized)
tatccctctgcccccaggctctaacaaccactaatctattttctgtctctatggttttgcctattttggacatttcatataaatgcaatcatataatatgtggttcttttgaagttggct

SEQ ID NO: 867444 - DNA, 120 bp, Artificial Sequence
  ENSG00000226017_14 (sequence is synthesized)
tctttcacacagaatgacttttcaaggttaatccaagttatagcatgtatcaatccttcatccccttttattgttgaataatatgccattgtatagatataccacattttcattgatcag

SEQ ID NO: 867445 - DNA, 120 bp, Artificial Sequence
  ENSG00000226017_15 (sequence is synthesized)
ttgatcagttgtgcacatttggactattttcacctatggcttttatgaataatgatgctctgattacttatgtataattttttgtgtggatatttgttttgttttgttttgttttttgag

SEQ ID NO: 867446 - DNA, 84 bp, Artificial Sequence
  ENSG00000226017_16 (sequence is synthesized)
ttttgttttgttttgttttttgagacaggttctcattgtttcccaggatggagtgcagtgatgcaatcacggctcacatcttag

SEQ ID NO: 867447 - DNA, 120 bp, Artificial Sequence
  ENSG00000226012_0 (sequence is synthesized)
cagaaggtagagcttcccaactgactaaagactcaggtcctgcagggccgtgtagaacttgtggccatccctgagcaccctgccaccaggaagctgaaaagaaggcccaggtgctccctc

SEQ ID NO: 867448 - DNA, 120 bp, Artificial Sequence
  ENSG00000226012_1 (sequence is synthesized)
gcaaaagccttcaccccagcctcatctctacccacaataaacgccaagccagtctctcttctctggattctaaagctatttttggatcattatgtaagcaataaacctttccatactttc

SEQ ID NO: 867449 - DNA, 120 bp, Artificial Sequence
  ENSG00000283138_0 (sequence is synthesized)
atgagtgctggaagccccaacacaattgtttgggaataaatggaagtgaggaatggagaagtaaggaggtaccactctcaaggaggctgtcagtagaggggacaaagagtgtgagagagg

SEQ ID NO: 867450 - DNA, 120 bp, Artificial Sequence
  ENSG00000283138_1 (sequence is synthesized)
aacaggacaagtaagacatgagcagtgactttctactctccatccagcagccaacaatagacttcgtcattcagatggagctgcagaggtacagacctgagagagctggaagtcatagag

SEQ ID NO: 867451 - DNA, 120 bp, Artificial Sequence
  ENSG00000283138_2 (sequence is synthesized)
gaggttctctctctgtgtctttctgactgtctgtctcggttctttgtttctcggcatggcaacagttgtggatgctgcctgcgtggccagggctcctagtagcactgacctgcaaggctg

SEQ ID NO: 867452 - DNA, 120 bp, Artificial Sequence
  ENSG00000283138_3 (sequence is synthesized)
catacagaagggcagcatctgccccacctcccagagcttcgccagcaaaggccaaatcaaacagcggcccagagcagagggctggccagctctacagagccagcaaacaccagagggaaa

SEQ ID NO: 867453 - DNA, 120 bp, Artificial Sequence
  ENSG00000283138_4 (sequence is synthesized)
tcaggctacatgcttatagctgcaattgaaaaattaggctagaatgcagggcctccctgaagatatttctgaaaatcatgtacttcctttaagggatttacaaatctggagtccttccaa

SEQ ID NO: 867454 - DNA, 120 bp, Artificial Sequence
  ENSG00000261799_0 (sequence is synthesized)
aatgtgtagtcttctctctctcaccccctttcacccttccccccaagtcaccagagtccattgtattagtcttattttcatcaccgtgggcgtaccctgtgggatgatgttaaacgtact

SEQ ID NO: 867455 - DNA, 120 bp, Artificial Sequence
  ENSG00000261799_1 (sequence is synthesized)
ctagactctgttggctatttctctagagttagacctctggagacttctcagatagctcatgggtctctggccttgccctgaaattactgggttctcagggagatgctggagatggcggag

SEQ ID NO: 867456 - DNA, 120 bp, Artificial Sequence
  ENSG00000261799_2 (sequence is synthesized)
gctcctcactctttgggtcctcctgtggctcattttgattgagttcctcattcagctggtcgcagtggccggatagtgtggcctgctcccttcctcaggttttcttgaggcagtggtctt

SEQ ID NO: 867457 - DNA, 120 bp, Artificial Sequence
  ENSG00000261799_3 (sequence is synthesized)
ttttgtagaggctttttttttttttttttttccctggaactcccttggaggtctcccttccctttcaaggttgtcttgggaaccttgatagtgcttctggacctaggttgagacagggcc

SEQ ID NO: 867458 - DNA, 120 bp, Artificial Sequence
  ENSG00000261799_4 (sequence is synthesized)
tttctcttcattacttcttgggtattggtgggtgggtggttgacagctaggctggaggctcatggtttcctggttattttcaccagcatctctcaacagtctcagctcgctcattcttaa

SEQ ID NO: 867459 - DNA, 120 bp, Artificial Sequence
  ENSG00000261799_5 (sequence is synthesized)
gatgtcagcttaaatgttatctcttcagaggcccccatgttctctcttgcaatggcctgttctattccattaggggactttgccatatatggcatatttgtgtaaaagttccatgagagc

SEQ ID NO: 867460 - DNA, 120 bp, Artificial Sequence
  ENSG00000261799_6 (sequence is synthesized)
agaggttttgtttcctttatccctccatacacagcaactggaacaatacaatgcatagagtaaacatgcaacagataacctgaaggaatgctgtttcatgccttcattccttcctataca

SEQ ID NO: 867461 - DNA, 120 bp, Artificial Sequence
  ENSG00000261799_7 (sequence is synthesized)
ttattgctcccctaatgttctctgtgtttggactgccataacctcatctaccttttctccttactaccttctcattcttcaaaattcagctcatccccaaattcctctgagaagtccttc

SEQ ID NO: 867462 - DNA, 120 bp, Artificial Sequence
  ENSG00000261799_8 (sequence is synthesized)
aggttgttcctctccatctaatctgaataagatgtcctttcttggagctctaatagcgtttagactagacactggtcctcagagtgaggtttctgcatggacagcatcaccgtcatctgg

SEQ ID NO: 867463 - DNA, 120 bp, Artificial Sequence
  ENSG00000261799_9 (sequence is synthesized)
gaattcattagaaatgcaaattatgaggccctaccctagacctcctgaaacagaaactctgggagtggggccaacaacctgcgttttaacaagccctgcaggtgactgtgacgaacacaa

SEQ ID NO: 867464 - DNA, 120 bp, Artificial Sequence
  ENSG00000261799_10 (sequence is synthesized)
agtttgaggaccactagaatatagtcactgtagaatatatctccaggatctgacacaacgcctagagcaggattattgtgaagatcgacctgaaatctatcttcctgtagcctcatcaat

SEQ ID NO: 867465 - DNA, 120 bp, Artificial Sequence
  ENSG00000261799_11 (sequence is synthesized)
cctggttgagaatatgaaaaactagttgagttgcatctctgttaggcagctttacaacatttgaggatagcgattatctctacttctccacctctcatccctagctcctctggtttaatg

SEQ ID NO: 867466 - DNA, 120 bp, Artificial Sequence
  ENSG00000261799_12 (sequence is synthesized)
tcttttttttcttatgtgctataactttgaatcccttcactttcttccttggacttacctggacaattccaacttacttcatatccatcttaagtgtatattcaaaatatccttttagct

SEQ ID NO: 867467 - DNA, 120 bp, Artificial Sequence
  ENSG00000261799_13 (sequence is synthesized)
tggaactatacatgtctgtaatcaccccagcaagacagagttcacaatgaacatagttagaattccatttgtacagttggaggtgttcctaggtgggcggattgcttgaggtcaggagtt

SEQ ID NO: 867468 - DNA, 75 bp, Artificial Sequence
  ENSG00000261799_14 (sequence is synthesized)
ccccgtctctactaaaaatacaaaattcagccaggtatggtggcatattgaacccggtagaggcggaggttgcag

SEQ ID NO: 867469 - DNA, 120 bp, Artificial Sequence
  ENSG00000261799_15 (sequence is synthesized)
tccagcctaggtgacagagggagactctgcctcaaaaacaaaccatccctgtcgctcccatcctagaccaatctaattgcaagtatctcacagggagcccaagtatcaatgtttttttga

SEQ ID NO: 867470 - DNA, 120 bp, Artificial Sequence
  ENSG00000261799_16 (sequence is synthesized)
gcccaagtatcaatgtttttttgaacagctttatggaggtataatctatataccataaaatccacttattttaatatatgattttagtaaatttaaagacttgtgcagcccttaccacat

SEQ ID NO: 867471 - DNA, 120 bp, Artificial Sequence
  ENSG00000261799_17 (sequence is synthesized)
catacaaaccagaatgtttccatcacccaaaaagaaacttcatgtctatttagtcactccctgtttctactcccagctctaggtggccattaatctgagtatctctagatttgtcttttc

SEQ ID NO: 867472 - DNA, 120 bp, Artificial Sequence
  ENSG00000261799_18 (sequence is synthesized)
tagacctaaacatcaggtttttgtttttctgcagccagagttgagaaccataattctaaatgcattatgagaaataatggtttttaaagattatatataatattttacgtattttcatat

SEQ ID NO: 867473 - DNA, 120 bp, Artificial Sequence
  ENSG00000261799_19 (sequence is synthesized)
ttatgactcccatccttacagtgaatgcgtctatcaccagtaagacaaagatcattaatttgataatggaacttaacagaccattctttccttttatacattttagtatcatattcaaaa

SEQ ID NO: 867474 - DNA, 120 bp, Artificial Sequence
  ENSG00000261799_20 (sequence is synthesized)
tggcctcccattctgtccccaagttattttaaaacatctccagtcttgcttttttcccctttagctcataaatgaatagtgctggaagatatctcaggagcattctccctgagatgatgt

SEQ ID NO: 867475 - DNA, 120 bp, Artificial Sequence
  ENSG00000261799_21 (sequence is synthesized)
cttcagtaatgatcgcacgtattggtgttgattccatccttgaagttactttcctttatctttcacagtggtgtttcttcactagaggttttgctgtctgattaacttctctgccaaata

SEQ ID NO: 867476 - DNA, 120 bp, Artificial Sequence
  ENSG00000261799_22 (sequence is synthesized)
aatggacttttgcttcataggtacacaaacatttctaaaactttttttggaaaatatatttctttcttaaaaaaacaaatagtgcatgcacatttttaaaaaaataaataaaaaataatc

SEQ ID NO: 867477 - DNA, 120 bp, Artificial Sequence
  ENSG00000261799_23 (sequence is synthesized)
taccccaaaatgaccagttaagatttactttcagacaactctgtgcatatttacatatgcttatatacaactatgtacacctttgcatagatgagatcacactctatgtactgctttgta

SEQ ID NO: 867478 - DNA, 120 bp, Artificial Sequence
  ENSG00000261799_24 (sequence is synthesized)
acttgcttctttcacttaatcctgagaacatttgtacatgaccatagatatagatttgtattgtttttaatggctgtatagttttgcattatactgaatcttgatgtttaagagctatgt

SEQ ID NO: 867479 - DNA, 120 bp, Artificial Sequence
  ENSG00000261799_25 (sequence is synthesized)
atattgaggacattatttctttgtcttgtgttgcaaattttttaccatgttattattagtcttttaaccttatttatagtttttttgttataaaagttaagttttatgatgtaaacttaa

SEQ ID NO: 867480 - DNA, 120 bp, Artificial Sequence
  ENSG00000261798_0 (sequence is synthesized)
cggccggtgtcgcgggtggggagaccccgaggtgctacctgggcgtggcgggtgggcaggcggcccgggcgaggggctcgcagcctgggcgtcagcgtggtcatggccgtcgtggcttcc

SEQ ID NO: 867481 - DNA, 120 bp, Artificial Sequence
  ENSG00000261798_1 (sequence is synthesized)
cagagatcctagggccgcggcgcccttccggtcccgccagtggtgccacccggccgccccgccgtcgcgtgcgcgggtcgccatggcatgctgcaggcgcctccttcccggcacctgctc

SEQ ID NO: 867482 - DNA, 80 bp, Artificial Sequence
  ENSG00000261798_2 (sequence is synthesized)
ctccttcccggcacctgctcagctgctcctccccgcgcccccacctggctcccgcgtgagcctgggcagcgccccaggca

SEQ ID NO: 867483 - DNA, 120 bp, Artificial Sequence
  ENSG00000261798_3 (sequence is synthesized)
tgcgcccccagtactgatccagcttcgcgggggagacgcgcacccgcctcctgcctttagccgggccaggagctctggggcccttctggagcacccgggagccacctgtgcacttctcag

SEQ ID NO: 867484 - DNA, 120 bp, Artificial Sequence
  ENSG00000261798_4 (sequence is synthesized)
ttcctgtgtggttcaggcgctgcggaaggagaaggcacctagactgtactgggaaggctcctggagttgacctggagcgccaggaaaggtcagtggaggaaagtgctccaagcagaggga

SEQ ID NO: 867485 - DNA, 120 bp, Artificial Sequence
  ENSG00000261798_5 (sequence is synthesized)
agagcttgtgccaaggccctgagaccccggcgggggagcctaataatggcaggtaacagtcagcacttgccacgcgcgaggcatgttctcagtgtgtgtcttgtgtcatttctgtgatgc

SEQ ID NO: 867486 - DNA, 120 bp, Artificial Sequence
  ENSG00000261798_6 (sequence is synthesized)
ttgcacatcgtcagggggtacctaccactggaacctcctcttttaacaaatgaggaaactgaggcacacagcggttaagggacttacgctaggtcacacagcagtagagctgggctgggg

SEQ ID NO: 867487 - DNA, 120 bp, Artificial Sequence
  ENSG00000261798_7 (sequence is synthesized)
cagggggcagctcctcaagtggaacctggagagcccacggggcaaatggcggaggctggaggggctggcaagggagggactgcaaagggcctcacaggggctagacgagggccctgggca

SEQ ID NO: 867488 - DNA, 120 bp, Artificial Sequence
  ENSG00000261798_8 (sequence is synthesized)
ccagtgattatggtgcccccccatgtggattgaagattaaacctcgaagcaagtgtataatgcccccaaaaatcacatttagaagtcatcacttcaataaaaatttctatattaaataaa

SEQ ID NO: 867489 - DNA, 120 bp, Artificial Sequence
  ENSG00000253230_0 (sequence is synthesized)
tccagaaagctttaatgtgtgtgggagtgttctgggtctattaggtctgtgcgcatgggtgtgggcatttgcctgtgtccaccgggtgggtctcattatgaaatgtatgtttatgtaggg

SEQ ID NO: 867490 - DNA, 120 bp, Artificial Sequence
  ENSG00000253230_1 (sequence is synthesized)
ctttaatggctgaaaatggcaaagagatgaatagaccacttggccccatgtgtaattgccaggccccttctgtgctcaaatgaggtgtccgagtgaaggtcagcccttcccttctgtatt

SEQ ID NO: 867491 - DNA, 120 bp, Artificial Sequence
  ENSG00000253230_2 (sequence is synthesized)
tggggcctatttatgccaccagtaattttataagaaatctgaatagttctcccctttgagtgcatttaactctttagtatcttctctcttacctatttgagcccctctagctacagtctg

SEQ ID NO: 867492 - DNA, 120 bp, Artificial Sequence
  ENSG00000253230_3 (sequence is synthesized)
agaaaaagtaggacacggttgaggcagtttgctgactgaatacgcgaagaaggacctgatgggctcatatgcaccactgccatcacagtccccatcgtgatgcaagcttatatgattctt

SEQ ID NO: 867493 - DNA, 120 bp, Artificial Sequence
  ENSG00000253230_4 (sequence is synthesized)
gaggtaactctaccagatacttccagatttagaaatgtgtcaaaggaaaaattggtgatactcttctttcccctgccagaaacagcccagatctcctcttaagcggaaaagagattgacc

SEQ ID NO: 867494 - DNA, 120 bp, Artificial Sequence
  ENSG00000253230_5 (sequence is synthesized)
ttctagcagaggcaaagaatggagtcttctgggggcagctgcaaagcgttctccctaggacagatggagcctccctttcctcatctactctgtgggtggtttcagggcccacgagtcaac

SEQ ID NO: 867495 - DNA, 120 bp, Artificial Sequence
  ENSG00000253230_6 (sequence is synthesized)
atgaggagttgtgctggtggtatgtgtgttggaggctgggctggctgattcacagtgacgaggatgtcaataataacaagaatgagaatgatggtacctaataaagactttttttcccaa

SEQ ID NO: 867496 - DNA, 120 bp, Artificial Sequence
  ENSG00000253230_7 (sequence is synthesized)
aatggggctggctgagcaccgtgggtcggcgagggcccgccaaggaaggagcgaccgaccgagccaggcgccctccgcagacctccgcgcagcggccgcgggcgcgaggggaggggtctg

SEQ ID NO: 867497 - DNA, 120 bp, Artificial Sequence
  ENSG00000253230_8 (sequence is synthesized)
gagctccctccggctgcctgtcccgcaccggagcccgtggggtggggaggtgtgcagcctgtgacagacaggggcttagagatgcaaacagactcagggagagaaacagaagctgattct

SEQ ID NO: 867498 - DNA, 120 bp, Artificial Sequence
  ENSG00000253230_9 (sequence is synthesized)
gtgacagaagcagatctgtgcagcacagatgcggtgtgcgtggggagggggtcgcctgggagcgcattgcggagtgcttgtgtgtgcagatttttctctgggctcaggactcattgtatg

SEQ ID NO: 867499 - DNA, 120 bp, Artificial Sequence
  ENSG00000253230_10 (sequence is synthesized)
tgggtcaacaccttcctccgtgactgtgtttttgttctgagctgagttttttggtttgcccttaaaaaaataataatttggcatccagagactggcagactgcctcagggcctggactgc

SEQ ID NO: 867500 - DNA, 120 bp, Artificial Sequence
  ENSG00000253230_11 (sequence is synthesized)
ggatatattgtgttctgcttgaggtttggggaggagggcaggcggtaggaagggagagggggagctgtttgtcacactttgctgtagagctgagagcacctgacaagcttaaggaagtcg

SEQ ID NO: 867501 - DNA, 120 bp, Artificial Sequence
  ENSG00000253230_12 (sequence is synthesized)
ttgggctatgtggacaagaaggagccagctcccagcgggttcacaagctctatcggagttgaaagcgtggtcatggctctaaggagcacctcacgccctccctgtagctgttattgcagt

SEQ ID NO: 867502 - DNA, 120 bp, Artificial Sequence
  ENSG00000253230_13 (sequence is synthesized)
ttcaggcagagatccaggagctgcagaggaagggagaggcacaataacctacatggacccaagggagacatgtgttcctttaaaaatgtgaacagaaggaaaaacagaatgtgtgcaact

SEQ ID NO: 867503 - DNA, 120 bp, Artificial Sequence
  ENSG00000253230_14 (sequence is synthesized)
gggggtctgaggaaagactgttttgaaagaggctgtcagggaatggaaagggttaagcttttcatcctgaagaacctgcttcccaaatcaggccttcctcccatcactagaccctgagca

SEQ ID NO: 867504 - DNA, 120 bp, Artificial Sequence
  ENSG00000253230_15 (sequence is synthesized)
gcagctggtcctagagacccccctcgtactgcgctgccacagtctcatcccatttccagctctgtattaaccaccaagctgcagcggatggggcaagacctaagctcattaatttccagg

SEQ ID NO: 867505 - DNA, 120 bp, Artificial Sequence
  ENSG00000253230_16 (sequence is synthesized)
tggaggaaatggaggaggggcaggtccctgcagtagagggaggagcagagaaaggaggccaagagctggatccttctgcccaggaagcctgctgcatcccttcccccgagcatggcagag

SEQ ID NO: 867506 - DNA, 120 bp, Artificial Sequence
  ENSG00000253230_17 (sequence is synthesized)
gcctggctttgcaaggccaaggccataagggatgcttaggagattaatttgattcctgacacaataatcaagccctaagagtctccactgaagcttactgaggacttctttcctctccaa

SEQ ID NO: 867507 - DNA, 120 bp, Artificial Sequence
  ENSG00000253230_18 (sequence is synthesized)
agcctcagtctagcctgctaaataaattagtattcagtgatgccttggatcagggcccctccccggcctcagtttccccaaatatttattaagtacctactgtgtgcaatccttgtgtaa

SEQ ID NO: 867508 - DNA, 120 bp, Artificial Sequence
  ENSG00000253230_19 (sequence is synthesized)
ttattaactcttaggctcttcatttgccctcctaaagcagtgtttagagtcaggcagaggttaagtgtgttgcacctcacctagatacttccagaaccttctctgggtctgcagaatgtg

SEQ ID NO: 867509 - DNA, 120 bp, Artificial Sequence
  ENSG00000253230_20 (sequence is synthesized)
tggctgcaggacagaaagggagaacagcttctctcacccctgagccttcacaagcccttgtctatttgccgttgccttcaaaatatacctcccccgaaaccagtagctttctgagtcctg

SEQ ID NO: 867510 - DNA, 120 bp, Artificial Sequence
  ENSG00000253230_21 (sequence is synthesized)
gtgtcccctccgccctttctggacaggtttgggaagaagaaagcagtcagtgctgggccttattggggtgtgaagcgccttgctctgccccttctgctcactgtgaaggccgctggatgc

SEQ ID NO: 867511 - DNA, 120 bp, Artificial Sequence
  ENSG00000253230_22 (sequence is synthesized)
ttctcttaggcatggtttaagcctccgattactaaaccccttgccccacaaacgtccacattgacgagcctctttttagtaactgcttccccgtaattccttcagaggttgctgtaccct

SEQ ID NO: 867512 - DNA, 120 bp, Artificial Sequence
  ENSG00000253230_23 (sequence is synthesized)
tcgctgatgtgctgccctcctgtaaaacctccagatgccttcccacgtaatgcccctttcagatgctttaagctgagagcttaaaccacaggtaccatggctgacgcctgccaggtttct

SEQ ID NO: 867513 - DNA, 120 bp, Artificial Sequence
  ENSG00000253230_24 (sequence is synthesized)
taagttacttctgttaccaaagggaggggggcggcttttgtgaatgtatgaggagcttttgccagagagatattcggaggaggggtgtgcccatatgcacacatatattttcccgcataa

SEQ ID NO: 867514 - DNA, 120 bp, Artificial Sequence
  ENSG00000253230_25 (sequence is synthesized)
ccgtatccaatgctagcatttagaggaaggcatttagccaccaaaagtccatccatctatgctgcttccacagagaaaacattttctctttcctcctcttgaacttacataatatcctcc

SEQ ID NO: 867515 - DNA, 120 bp, Artificial Sequence
  ENSG00000253230_26 (sequence is synthesized)
gtagatccactgcctttggttgggccggctgaatcgctggggactgcggccagtctcttaaaaaaggagaacaaaaagccgaagaccttgtgtggccgccgggacaaagcaccttgggtt

SEQ ID NO: 867516 - DNA, 120 bp, Artificial Sequence
  ENSG00000253230_27 (sequence is synthesized)
cggcgagaagggacgcgcaggagcgctgaacccagaacacgcgtggccgctgcggaagggcgtccgcccggcgtgcggaacgctgaggggactctcatcctctgtctcgccccctttttt

SEQ ID NO: 867517 - DNA, 120 bp, Artificial Sequence
  ENSG00000253230_28 (sequence is synthesized)
ccccggaccgcggcaactcgcccctgcggcacgcccggcccggctgcgcccccactcagcgatggaggaaaaagcctggatgcgaaaggatgggggagaacaaagagcctttggaagacg

SEQ ID NO: 867518 - DNA, 120 bp, Artificial Sequence
  ENSG00000253230_29 (sequence is synthesized)
tcgctgttatctcattgtctgtgtgattgggggagctgcggcggggaggatgctgtggtcccttcctccggcgttccccacccccatccctctccccgctgtcagtgcgcacgcacacgc

SEQ ID NO: 867519 - DNA, 120 bp, Artificial Sequence
  ENSG00000253230_30 (sequence is synthesized)
gccgctttttatttctttttcctggttttcttattccatcttctacccacccctcttcctttctttcacctttccttccttccttcctcctttccttcctcaggagaaaggcctctctct

SEQ ID NO: 867520 - DNA, 120 bp, Artificial Sequence
  ENSG00000253230_31 (sequence is synthesized)
gccgcagtgatgtcaaccgcatccgccgcagtccccggcagccctaaaacgcgccgcggcccgcggaaaccccagcccggctcctcccgccagggccgaggaggagaggacgcgcgggtc

SEQ ID NO: 867521 - DNA, 120 bp, Artificial Sequence
  ENSG00000253230_32 (sequence is synthesized)
cccggagtcccccactccgtctgcctaagccgtggagaccgggagtggacgcacggcggtgcctggacccccggggaggtggaagaagaggagagggaagggagctgtggagtcaggtgt

SEQ ID NO: 867522 - DNA, 120 bp, Artificial Sequence
  ENSG00000253230_33 (sequence is synthesized)
gtgtcgatttgacgcccgcggccgccgaggggactctgcccggcactggtgccgcctggggggcgttcagggagcgtggggcgccgaccgctgcagatgcggcggcgcgcgtgggctcgg

SEQ ID NO: 867523 - DNA, 120 bp, Artificial Sequence
  ENSG00000253230_34 (sequence is synthesized)
gcgcccccttttcccgggatagaaacggataaacggaagcgcgtgtgagtgtgggggtgcgaatcgccacctccggccttggctttcccgctcttccgagctctcccacttctcactttc

SEQ ID NO: 867524 - DNA, 120 bp, Artificial Sequence
  ENSG00000253230_35 (sequence is synthesized)
cccaaatccgcattttccttggcacagctctccccgagcacgaaggagagggaggtacccgggggcagtgagaatgacgtgtgctggtgcagagggggtgggggtctgcgggcctggatc

SEQ ID NO: 867525 - DNA, 120 bp, Artificial Sequence
  ENSG00000253230_36 (sequence is synthesized)
tcctcttgttttcggaaccgtcagcagatgcggcttcctttacctgaataatcctttaaaggagtaataatttttaaaaaggagctcgacctcagccaaagaggacggcgcacgagatta

SEQ ID NO: 867526 - DNA, 120 bp, Artificial Sequence
  ENSG00000253230_37 (sequence is synthesized)
ctgtggcttgctttcacagtgtctacgtaggagaggggtcggggttgttggggtctctttttttttctgggaggggtagctgaattgtgggagacctaggtggacttgacttggctttcc

SEQ ID NO: 867527 - DNA, 120 bp, Artificial Sequence
  ENSG00000253230_38 (sequence is synthesized)
tgctactctgcgtctccttctcaagatgcgggggttggaaaggggacaggggactcaaggcttagaaaagagaaggagccctctgctgcctggagggctaagggagtagagagtggagat

SEQ ID NO: 867528 - DNA, 120 bp, Artificial Sequence
  ENSG00000253230_39 (sequence is synthesized)
ttaaagaaaatgtattcaatacttaattgcatcacaaatgtagacatagaagaaaggacttcaaacggaatttatgggaggcaatgtgtgcggctttttgccttatagagctgtgtagaa

SEQ ID NO: 867529 - DNA, 120 bp, Artificial Sequence
  ENSG00000253236_0 (sequence is synthesized)
acttttttatgaggtcactgagacttatgaaggctatggaacttcctcaaggtcatgcagaatcagaatgcagacatgtttgattgcaaagctcaagtctatttaaccactatattactc

SEQ ID NO: 867530 - DNA, 120 bp, Artificial Sequence
  ENSG00000253236_1 (sequence is synthesized)
tctgtgcacagaacaaaatgtcaataagaaattttacttggttttacctatgttttaaagatctaagcagataattttttcaaaatttatccagattttctgaatcttcttataaaggaa

SEQ ID NO: 867531 - DNA, 120 bp, Artificial Sequence
  ENSG00000253236_2 (sequence is synthesized)
aaatatcttatgcctgcataaatgaaaggagaccaagattattgacttattcatttagcaaatacatagtgagcccctatcctccactaggcattgtgctaaatactaaggatatagtaa

SEQ ID NO: 867532 - DNA, 120 bp, Artificial Sequence
  ENSG00000253236_3 (sequence is synthesized)
tgataagatacataatcctttacctcatcaggctctgctcctagtgggtagacaaaagaaaagcagaaaaagatgacaacacaacgggctgaaatgaccataataccggtatgtgccagg

SEQ ID NO: 867533 - DNA, 120 bp, Artificial Sequence
  ENSG00000253236_4 (sequence is synthesized)
tactgagagaggacgaaggcttcacgagcgtgtttgaaaccaagacttgataggaattttactttaacggaagatagcggtgagggcttgaacactaaggaattaatgagagatcagccc

SEQ ID NO: 867534 - DNA, 120 bp, Artificial Sequence
  ENSG00000253236_5 (sequence is synthesized)
atataacaggaacaactggaagagcaagtgcagcatcaggttggtgcatttcttctgatcaaaaggtcgaattgcaactggtctttgaagagtgtgctggtgacagtgtgcaacctttgc

SEQ ID NO: 867535 - DNA, 120 bp, Artificial Sequence
  ENSG00000253236_6 (sequence is synthesized)
agtagctcctggactggccctagactgctgtcaaattaaaccagcactgtaaagaagagagcaagttgaatgaagttgaatgaaggggcatcttaattccaatcctggctctaatgctga

SEQ ID NO: 867536 - DNA, 120 bp, Artificial Sequence
  ENSG00000253236_7 (sequence is synthesized)
ctgtaagcatgaccccggatgagttattcactctctcagtctcagtctcctcatccacaaagcagggatcacaataaatgaatagcacctttcacagaacccaccatatatactgagtgt

SEQ ID NO: 867537 - DNA, 120 bp, Artificial Sequence
  ENSG00000253236_8 (sequence is synthesized)
tcaataaataccgtgttcatcatctaacatcataacacattgagcatccatcaaagcagaagtagttcgcacctggatatttctgtttctttttttttttttgctatcctactggtgttt

SEQ ID NO: 867538 - DNA, 120 bp, Artificial Sequence
  ENSG00000253236_9 (sequence is synthesized)
tacttaaatttagtgtggtaatatgaaagaaaattactgctcttctgctatttagttagcatttttatgctttttaaaaaatattgcaataaaattaataaaatttgaattcagtctttc

SEQ ID NO: 867539 - DNA, 120 bp, Artificial Sequence
  ENSG00000253235_0 (sequence is synthesized)
ggggcttggaattgacaggccggaggtggggcccgagttcctgtctccagcccacgatttgccgatccatctgtcttcctcagagagagagggcggataatgcagactgcgcttccttgg

SEQ ID NO: 867540 - DNA, 120 bp, Artificial Sequence
  ENSG00000253235_1 (sequence is synthesized)
aagacggcaggctccaggccagacaaacgaatgtatcaaccatacagatgaagagctgaggctcagggaaggaatttgccaaggtcacgaagctgtaagacacagaacctggggtgtctg

SEQ ID NO: 867541 - DNA, 120 bp, Artificial Sequence
  ENSG00000253235_2 (sequence is synthesized)
cctgtagagctcacactgactctacagccactgatccaaagcttcaatgagcaagagatgaagtgacccctccaaccccacagctcagcgtctttcttgaagctccaactccagggccat

SEQ ID NO: 867542 - DNA, 120 bp, Artificial Sequence
  ENSG00000253235_3 (sequence is synthesized)
tgttttcctgttctccccgctccaaggcctctcctctctccttggcccaactctctgacagtgatgcaggtacttggcaaatttaaatgggagggactgcctttaaaaaccaatgaaccc

SEQ ID NO: 867543 - DNA, 120 bp, Artificial Sequence
  ENSG00000253235_4 (sequence is synthesized)
cttccgaatgaacatattctattgaatgccatatgaagaaaaatctaggggtttgtactggtttcctgaggctgccagtaacaaattgccacaaactaggtggtttacaacaacagaaat

SEQ ID NO: 867544 - DNA, 120 bp, Artificial Sequence
  ENSG00000253235_5 (sequence is synthesized)
ggggagaatccctccttgcttcttccagcttctggtggctcatggcaataccttgacttgtagacatatccctccaatctctacttatgccttcatatcaccttctcttctcttatgaga

SEQ ID NO: 867545 - DNA, 120 bp, Artificial Sequence
  ENSG00000253235_6 (sequence is synthesized)
acagttgtcattggatttaggacccaccctaatcgaagatgatctcacatgtagtttaattacatctataaaatatgcttttcagtaaggtcacttccgtggtttgaatgccccctccaa

SEQ ID NO: 867546 - DNA, 120 bp, Artificial Sequence
  ENSG00000253235_7 (sequence is synthesized)
aacttaatgttgaaacttaatccccaacgtggcagtactgagaggtggggccttttagagctggttggattgtgaaggttctgtcctcatgaatggattagttccattcatgaattaata

SEQ ID NO: 867547 - DNA, 120 bp, Artificial Sequence
  ENSG00000253235_8 (sequence is synthesized)
aattaataggctcatggattagtgggttaccatgggaggggaactggtggctttataagaggaggaagagagacctgggctagtacattaagattctcagcccccttaccatgtggcgac

SEQ ID NO: 867548 - DNA, 120 bp, Artificial Sequence
  ENSG00000253235_9 (sequence is synthesized)
ctgtgccacctggggacactgcagagtccccaccagcaagaaggctctcaccagacttagcccctcaacattggacttagcctccataactgtaagaaataaactccttttcttcataaa

SEQ ID NO: 867549 - DNA, 120 bp, Artificial Sequence
  ENSG00000253235_10 (sequence is synthesized)
agcctctatgtggatgacttcaggatcccagcaccaacctgtttcccgagggccaggattattcgcctgtctgccagctattgtcacccggcatctcaaatgcaacatttctaaatcaga

SEQ ID NO: 867550 - DNA, 120 bp, Artificial Sequence
  ENSG00000253235_11 (sequence is synthesized)
cctgtagagctcacactgactctacagccactgatccaaagcttcagtaagggggtctttctagcagggctcccccaggatgagcaagagatgaagtgacccctccaaccccacagctca

SEQ ID NO: 867551 - DNA, 120 bp, Artificial Sequence
  ENSG00000253235_12 (sequence is synthesized)
cctgtttccacacagactgttgtaacctcacatggcagaaaaggcaaaaaatctctctggcgtcacttttataaggacactaatcctattcatgagggttctacccatatgacctaatca

SEQ ID NO: 867552 - DNA, 120 bp, Artificial Sequence
  ENSG00000253235_13 (sequence is synthesized)
ccttccaaggccccacatcctcatatcatcacattggaggttaggatttcaacatatgaattttgaaggtatgcaaacattcagcctataacaacacacaaatacaagaatgggattata

SEQ ID NO: 867553 - DNA, 120 bp, Artificial Sequence
  ENSG00000253234_0 (sequence is synthesized)
ccagtctgccctgattcagcctccctccgtgtccgggtctcctggacagtcagtcaccatctcctgcactggaaccagcagtgatgttgggagttatgactatgtctcctggtaccaaca

SEQ ID NO: 867554 - DNA, 120 bp, Artificial Sequence
  ENSG00000253234_1 (sequence is synthesized)
gtcaatactcagccctcaggggtccctgatcgtttctctggctccaagtctggcaatacggcctccatgaccatctctggactccaggctgaggacgaggctgattattagtgctgctca

SEQ ID NO: 867555 - DNA, 120 bp, Artificial Sequence
  ENSG00000253239_0 (sequence is synthesized)
atggcctggacccctctcctcctccagcttctcaccctctgctcagggtcctgggcacagtctgcgctgacccaggaagcctcggtgtcagggaccgtgggacagaaggtcaccctctcc

SEQ ID NO: 867556 - DNA, 120 bp, Artificial Sequence
  ENSG00000253239_1 (sequence is synthesized)
tatgctgtgggctggtaccaacagatttctcacggtgctcccaaaactgtgatgtttggaaattctctgccctcagggatccctgaccgcttctctggctcaaagtctgggaccacagcc

SEQ ID NO: 867557 - DNA, 120 bp, Artificial Sequence
  ENSG00000253239_2 (sequence is synthesized)
tccctgactatctcgggcctctagcctgaggacgaggctgattattactgttcaacatgggactacagcctcagtgctcacacagtgctgcaggcacatggggaaccgagacaaaaacct

SEQ ID NO: 867558 - DNA, 120 bp, Artificial Sequence
  ENSG00000253238_0 (sequence is synthesized)
gggttggtgttcatctgcttgcagaggaaagccaggtccatacccctgaacttctcaaatatttccaatgctcatcactgggtcttttgcatggtcaaaagggttgcaggtgattcttct

SEQ ID NO: 867559 - DNA, 120 bp, Artificial Sequence
  ENSG00000253238_1 (sequence is synthesized)
gtgttgtaaagttgaagagcagcttaatccacacttcctttttggtctcacttctcccctttgttccggtcaaaccctgactgcttcaaaaggaaaactgaagaaagagctcgatgtgag

SEQ ID NO: 867560 - DNA, 120 bp, Artificial Sequence
  ENSG00000253238_2 (sequence is synthesized)
actagctcatgcgggagaattggagtgatcatttaaatcagtctccctgaaggctcagaggttagggtttttatggacaacttgggtctgactctgtggcccaggctggagcacagtggc

SEQ ID NO: 867561 - DNA, 120 bp, Artificial Sequence
  ENSG00000253238_3 (sequence is synthesized)
gctgagactacaggcatgcaccaccatgtttggctaatttttaggttttcttttttttttaagagacaaagtcttactaaattgcctaggcttgtctagaactcccagactcaagcaagt

SEQ ID NO: 867562 - DNA, 120 bp, Artificial Sequence
  ENSG00000253238_4 (sequence is synthesized)
aagtctcctgcctcagtctcccaaagtactgagattacagtatttatcctgattgcctactcactagagttctggacctgttttccaaagaattccacagtgggggccaccttgtactgg

SEQ ID NO: 867563 - DNA, 120 bp, Artificial Sequence
  ENSG00000253238_5 (sequence is synthesized)
ctggcagttgaaaaacaggaaatagacagagatcatccatttcccctgagttcactgaaacactccagtaagaagattgaaaatagcagaccggggccgagcgcagtggctcatgcctgt

SEQ ID NO: 867564 - DNA, 120 bp, Artificial Sequence
  ENSG00000253238_6 (sequence is synthesized)
gggggtccggaagctgcagctgggggtccggaagtgttaggagcctcgcgaagggttggtgttcatctgcttgcagaggaaagccagacagagtatttctctgttgcctgggctggaatg

SEQ ID NO: 867565 - DNA, 120 bp, Artificial Sequence
  ENSG00000253238_7 (sequence is synthesized)
agtgaaatggtctgagcagtgcagtgaaagtgaccccatcttacggcgtgcccagtggatggaagtgaagccaaatgactgcttaagaagcaactgccaaaaataggacggtggcagaga

SEQ ID NO: 867566 - DNA, 120 bp, Artificial Sequence
  ENSG00000253238_8 (sequence is synthesized)
ggaagaaataaagagcagggatgagagatatgtcagagttgggacccacacaactctagttgatgtggggtggtggcatggaggagaggaagaatgtgatcactaccattgtctcaaatt

SEQ ID NO: 867567 - DNA, 120 bp, Artificial Sequence
  ENSG00000253238_9 (sequence is synthesized)
ccaaaacaaagggatgcgtgtgttcaccttgggcaggaagaactgaggacctggggtgtgggtgtgtggagttcaaggtgatccgaggagatgaagaggttcatcaggcagatgaaaact

SEQ ID NO: 867568 - DNA, 120 bp, Artificial Sequence
  ENSG00000253238_10 (sequence is synthesized)
cagaagtttttgagatgagacccgaggtcctgatggtgggctctgatttcacagccctctgcctgggagtgatggttggagtcgctggctcctgtgcaggtgttgtgcgtgagtggcttc

SEQ ID NO: 867569 - DNA, 120 bp, Artificial Sequence
  ENSG00000253238_11 (sequence is synthesized)
ccattaaaggttaactgcataaacaccattgacttaaaaaaaaaaaaaaagggtatccgaaaacaccggtaaaaggagttttggactcacatccagttaaataaagaacaaagattgcta

SEQ ID NO: 867570 - DNA, 120 bp, Artificial Sequence
  ENSG00000253238_12 (sequence is synthesized)
gctggttaaactaaaaagttacttaaaagattactaaaaagttacttaaaagttaatgaaatcagttttgaaacactgagattttcctatagattagaaggatcgtaattgaagttaatt

SEQ ID NO: 867571 - DNA, 120 bp, Artificial Sequence
  ENSG00000253238_13 (sequence is synthesized)
atagtcatgctagatttcctctctgatgtttatttttcttctggttatatttcagacaattaatagctcctaatgactcagggttccaagtaattaccaccaacacttataatctgtctt

SEQ ID NO: 867572 - DNA, 120 bp, Artificial Sequence
  ENSG00000253238_14 (sequence is synthesized)
attggaatgttctcttcacgcgggggctctgaaactgaaggaaatttgtgattgttcatgaaagtccttccataggttgttaaaaaaatcagactttaaaataaatgtattcttcattta

SEQ ID NO: 867573 - DNA, 120 bp, Artificial Sequence
  ENSG00000253238_15 (sequence is synthesized)
gggggtccggaagtgttaggagcctcgcgaagggttggtgttcatctgcttgcagaggaaagccagagacggggtcttgccacactgtcccagctggtctctaacttctgggctcgagca

SEQ ID NO: 867574 - DNA, 120 bp, Artificial Sequence
  ENSG00000253238_16 (sequence is synthesized)
aggaaaactgatcctcctgtccatggtctacctcgaggctggtgcaatcatttccggaatacgatctggtcacgaggcttccctgaccctttagagctctctctgtggtatgacactcaa

SEQ ID NO: 867575 - DNA, 120 bp, Artificial Sequence
  ENSG00000253238_17 (sequence is synthesized)
acgggatgcccagggcttcagtcccattccttcatgtttctgctggctgacttcactgtatcctttgagacttagccaaagcattgcctcccttgaagaaaggaaacatcaggggtcctt

SEQ ID NO: 867576 - DNA, 120 bp, Artificial Sequence
  ENSG00000253238_18 (sequence is synthesized)
tccacgatgttttaccatggcggatttaggtgcctgttcgcccacacgcccccttactggactgtaaggttctcgagtagaggaatggtatctttgatgccagggcagtaggaggaattc

SEQ ID NO: 867577 - DNA, 120 bp, Artificial Sequence
  ENSG00000253238_19 (sequence is synthesized)
cgtgagagcagactacataagcacaattttgctgcctgtactttttttctatagcacaattctattgaaatatcctttctggtttaaattatggagagaaaataaataaactaaaaatgg

SEQ ID NO: 867578 - DNA, 120 bp, Artificial Sequence
  ENSG00000253238_20 (sequence is synthesized)
aaaggaaaactgaatccatgagcatagagactatattgatcttgttcactgatgaatgcctagtacagagctgctgtgtagtaaatatgcaataaaaattcattacatgggagccaggca

SEQ ID NO: 867579 - DNA, 120 bp, Artificial Sequence
  ENSG00000253238_21 (sequence is synthesized)
cagtggctgactcctgtaattccaacactttaggaggccaacgcaggaggatcgcttgaggccaggagctcagcaccaccctgggcaacagagcgagaccttgtctctaccaaaaattta

SEQ ID NO: 867580 - DNA, 120 bp, Artificial Sequence
  ENSG00000253238_22 (sequence is synthesized)
ctataatcccagaactttgggaggccgagacagaaaggctactgtccctagagcctaaagaggcaaagtacctctaccaaggcagtgaacgacagtcaagtttgaccctcaaagatcagc

SEQ ID NO: 867581 - DNA, 67 bp, Artificial Sequence
  ENSG00000253238_23 (sequence is synthesized)
ctcagctcactgcaacctccgcctctcagcgccaccacacctggctaattttttgaatttttagtag

SEQ ID NO: 867582 - DNA, 120 bp, Artificial Sequence
  ENSG00000253238_24 (sequence is synthesized)
gtgagccaccgtgcccagcaaaataaaaatttttaagtccattttcatttcccatcaccttgatcctagataagtaattaacttcagtaactcttccctctttttatgggggtggaggct

SEQ ID NO: 867583 - DNA, 120 bp, Artificial Sequence
  ENSG00000253238_25 (sequence is synthesized)
gtggtgattaacatataataaatgtatttattttcaaaatgcctagaatgaaaaaaaaacacgcattaaaaacagagcacaagtattattatggcattcttccatatgtggcacatatta

SEQ ID NO: 867584 - DNA, 120 bp, Artificial Sequence
  ENSG00000253238_26 (sequence is synthesized)
tacagcctcacttggcagagttctcttatttcttaagggtacgaattaggtcaagatcagactccactgtcttaagcttcccagcaactaaaacaaagcaggacaaaacaaacaaacaaa

SEQ ID NO: 867585 - DNA, 120 bp, Artificial Sequence
  ENSG00000253238_27 (sequence is synthesized)
caaacaaaaacaccctacaactgtacccacctgaagaactatatcagaatttcaagctcttggtcactggtggccaggtgacaatatgtttattaccggaaaaataactcaaagccaaaa

SEQ ID NO: 867586 - DNA, 120 bp, Artificial Sequence
  ENSG00000253238_28 (sequence is synthesized)
catgtaatctacaagataaaaccaatgttttttgtttgatatacaacactgctcatcaacaggtactaaaaattacaatgaatgaagtgaatgttgctttgaataaatgtatacaattaa

SEQ ID NO: 867587 - DNA, 120 bp, Artificial Sequence
  ENSG00000253238_29 (sequence is synthesized)
atcttcggcagccgcctgggaaagcacatctttttattgttctaatcgttaacagataaggaaagtgccacaggcactgagacggggtcttgccacactgtcccagctggtctctaactt

SEQ ID NO: 867588 - DNA, 120 bp, Artificial Sequence
  ENSG00000253238_30 (sequence is synthesized)
gggggtccggaagtgttaggagcctcgcgaagggttggtgttcatctgcttgcagaggaaagccagagtatttctctgttgcctgggctggaatgcagtggcgccatcataactcactgc

SEQ ID NO: 867589 - DNA, 120 bp, Artificial Sequence
  ENSG00000250166_0 (sequence is synthesized)
gagggctggaatcagctgaaattcactctctcacgtctgacagcaaggctgctgtgtgctgagaccgtcgctggggctgacagccgctttatgtgttctcttcacataagccagcttgag

SEQ ID NO: 867590 - DNA, 120 bp, Artificial Sequence
  ENSG00000250166_1 (sequence is synthesized)
cttcttgaaaacatgatggatagctttccaagaagatcaaactctcccaaaaagtagagattaaacaacaactaaagatggcgaatcatagaagagaacaatagagtgaagaaaaaggat

SEQ ID NO: 867591 - DNA, 120 bp, Artificial Sequence
  ENSG00000250166_2 (sequence is synthesized)
accaaccagtgatctctggctgctgcttagaagaaacaagagggatggctaattaaacaggttgaagtaaaggagccagcccaaacccaccaaaaccaaaatggtgacgagagtgacatc

SEQ ID NO: 867592 - DNA, 83 bp, Artificial Sequence
  ENSG00000250166_3 (sequence is synthesized)
gagagtgacacgacagtttacaaattctatgacaatgtcaggaagttaccctatgtggtctaaaaagaggaggcatgaataat

SEQ ID NO: 867593 - DNA, 87 bp, Artificial Sequence
  ENSG00000250166_4 (sequence is synthesized)
gcaatctgcagcccccaggctgctctgtctatggagtagctgttctttttttcttttactttcttaataaacttcctttcactttgc

SEQ ID NO: 867594 - DNA, 120 bp, Artificial Sequence
  ENSG00000250166_5 (sequence is synthesized)
cattcctggtattggtcccagttcttctaagaatatttttgatgcaagagctgttttatcttgaatcctacatagcttattttccatttttccattcaaataaaacaacaagagaacaat

SEQ ID NO: 867595 - DNA, 120 bp, Artificial Sequence
  ENSG00000250166_6 (sequence is synthesized)
tggataggtgcggcgctgcttccctggagggaaacgctccatcttgcgggccgaagcgcgagtgctgctctgtgacagcctccggccgcggccttcccagctgctaccgccgcttttcgg

SEQ ID NO: 867596 - DNA, 120 bp, Artificial Sequence
  ENSG00000250166_7 (sequence is synthesized)
atgggctgtgatagatggagtagcagcgaagactgctagaagagcgttttcagtcggcctttagtgattcgtaaaaccaaattagctggtttctacttggaaggggtacagaagatcaaa

SEQ ID NO: 867597 - DNA, 61 bp, Artificial Sequence
  ENSG00000250166_8 (sequence is synthesized)
caaccctgcttattcctgtaaaccaaccagtgatctctggctgctgcttagaagaaacaag

SEQ ID NO: 867598 - DNA, 120 bp, Artificial Sequence
  ENSG00000250164_0 (sequence is synthesized)
gcaagggccagccacccatggtatcattttaaatttgtgacttcagttccacatagcctgaactttttcatggtaatctaaggaatgaggaccttcttgggaacacaagtagatccagag

SEQ ID NO: 867599 - DNA, 120 bp, Artificial Sequence
  ENSG00000250164_1 (sequence is synthesized)
gcttgagcactctgccatgtggtacagaatgctggctggcaggttcctggggcaggattatggggctggagtattggggagctagctctctgaggtccagtggcacagcaattcacacca

SEQ ID NO: 867600 - DNA, 120 bp, Artificial Sequence
  ENSG00000250164_2 (sequence is synthesized)
cagggagtgggaaggcgacctgggcatttggaaaacaactccttgagcacggtacaaggattggatggttctgccaccaggcggagcagaagtcagtgttggacatgcccgggaagctgg

SEQ ID NO: 867601 - DNA, 120 bp, Artificial Sequence
  ENSG00000225457_0 (sequence is synthesized)
cctgaagtaggtgcatctgagaaaaagggcagagacctccccaaaggtcaaacagaagcaaggcagcaggcagcattgcaggggaggcaactgctgggaaagacacagcaaggaagagct

SEQ ID NO: 867602 - DNA, 120 bp, Artificial Sequence
  ENSG00000225457_1 (sequence is synthesized)
attatgggatgcctctctgtgagagatgaggtggggatggtccatgaagatgaatgactgcttcctaagacactgtggcgaggaggctgtggaaagatggcagcagcagactgtggagag

SEQ ID NO: 867603 - DNA, 120 bp, Artificial Sequence
  ENSG00000225457_2 (sequence is synthesized)
aaaaactgtagcttctttggtttaggagtttcctgagcctgtctcagggcaataacgccttctgggttaactggagacttcgtcagagacagatgggagctaactccaaagagtcatcat

SEQ ID NO: 867604 - DNA, 120 bp, Artificial Sequence
  ENSG00000225457_3 (sequence is synthesized)
gataactgcggttgttcagattctttatttctgggcatcacatagaatttagattgggactccttttctatctaactgagggatgggaatcataattgcatatttaattttgtcattaga

SEQ ID NO: 867605 - DNA, 120 bp, Artificial Sequence
  ENSG00000225457_4 (sequence is synthesized)
aacacagagagtcagggccagccaaatggaaattgtctgctcataggagaagccccggggccatactctgaaagaggtagcttggcgacagacaaattttctaagagagacagtatgggg

SEQ ID NO: 867606 - DNA, 120 bp, Artificial Sequence
  ENSG00000225457_5 (sequence is synthesized)
agaagaaaaggcaaaggtccaagactcaaaaaatgaatgaatgttaaaacatcagaagagcaagataaacgagttaagaagatggcacaggagccgcagagaggtggaagatggcttgga

SEQ ID NO: 867607 - DNA, 120 bp, Artificial Sequence
  ENSG00000225457_6 (sequence is synthesized)
ggtccatgaagatgaatgactgcttcctaagacactgtggcgaggaggctgtggaaagatggcagcagcagactgtggagagaagtcaattcactgtgagtggtcagacaatacctgaac

SEQ ID NO: 867608 - DNA, 120 bp, Artificial Sequence
  ENSG00000225457_7 (sequence is synthesized)
caagaagacacatgggacaacctcttgggaacagaaagttcagaaaagggctaagaaataggatggagatagggatactcaatgatctagtcataagggatcaaaatgggaatgcaatta

SEQ ID NO: 867609 - DNA, 120 bp, Artificial Sequence
  ENSG00000225457_8 (sequence is synthesized)
ggaagtagaaggcctgagatagacagcagccactgggattggaagcaattttaggatgatttcccaaagggtagagatgttccaacaatagcttgatgataaattttgtattttttcagg

SEQ ID NO: 867610 - DNA, 120 bp, Artificial Sequence
  ENSG00000232808_0 (sequence is synthesized)
ggtggcaggatgatttcctttcatcccaacctttatttccacagtgaaatcatcatgaaggagcactgtgttggcatcctcgagctccagctgttctgtagagaaactggcgtgaattga

SEQ ID NO: 867611 - DNA, 120 bp, Artificial Sequence
  ENSG00000232808_1 (sequence is synthesized)
ttgaaggttacttacgggccactcttcatttactaagactatgtaattctcagagaggacacacaacctgtgaagagttggatgtaaatgatgaagagtcattgagaaaaggctgcctga

SEQ ID NO: 867612 - DNA, 120 bp, Artificial Sequence
  ENSG00000232807_0 (sequence is synthesized)
cacagttggtgaaacttgggccgtctgcctcaagtccccgcttggcaaaaccactccctcctggtggacgccctcaccatgaagagttatagtaaggtgttggtgaggctggctgctctg

SEQ ID NO: 867613 - DNA, 120 bp, Artificial Sequence
  ENSG00000232807_1 (sequence is synthesized)
gttgctaagagagacccggcctgccacactcctaagagacacagaagaccagcctacccttcccttgcctcccgtgacactgccctgcaggtggctggccaagagaagcctgcccggcga

SEQ ID NO: 867614 - DNA, 120 bp, Artificial Sequence
  ENSG00000232807_2 (sequence is synthesized)
aaggaatgcctgggagcagctgagccgagcccctgccaccagcctcctccgcacgcccgtggaatcagcactttctgcttcccgcccctgagagccttgctctggggccactcacagcca

SEQ ID NO: 867615 - DNA, 120 bp, Artificial Sequence
  ENSG00000232807_3 (sequence is synthesized)
attaagtggggatgttgtaagagactctaaaatacgtggagctggctgaggacgcgggaccgaccccattatgtgtgtgtgaggctgattaaagtgttacctgtcaccaggtgtcgccaa

SEQ ID NO: 867616 - DNA, 120 bp, Artificial Sequence
  ENSG00000232807_4 (sequence is synthesized)
gtaggattgaacacagttggtgaaacttgggccgtctgcctcaagtccccgcttggcaaaaccactccctcctggtggacgccctcaccatgaaggtggctggccaagagaagcctgccc

SEQ ID NO: 867617 - DNA, 120 bp, Artificial Sequence
  ENSG00000232807_5 (sequence is synthesized)
atggctgctgggcagccaggtcaaccggacggcaaggcaggggttggccggggaagcactgcgccgcccctgcatgccctgcatcctcgggtcctgggagggctgctcagtaactggaag

SEQ ID NO: 867618 - DNA, 120 bp, Artificial Sequence
  ENSG00000232807_6 (sequence is synthesized)
gaaaatgaaactgaaaaagagcaagggtcccgtaggattgaacacagttggtgaaacttgggccgtctgcctcaagtccccgcttggcaaaaccactccctcctggtggacgccctcacc

SEQ ID NO: 867619 - DNA, 120 bp, Artificial Sequence
  ENSG00000232807_7 (sequence is synthesized)
atgaagaacatcccccacttccctgaccagatacatccagaggggaggcaagtggagactggctgtctgtagggagtggagaaatggcaggtccagcttgggctggtgtcctcttcctca

SEQ ID NO: 867620 - DNA, 120 bp, Artificial Sequence
  ENSG00000232807_8 (sequence is synthesized)
gaaagtgctgtgggtgaacccagagtctcagggagcagaagcccccctcgctggctttcttcacgcggggtcctcggcaagctgctctgcactgcggagaacgtgcgccttgtcctcaga

SEQ ID NO: 867621 - DNA, 120 bp, Artificial Sequence
  ENSG00000232807_9 (sequence is synthesized)
agacgaggaagagcagggcctcatgccggggcagtacgatgttctccacagtgcgctccatggcgcgcacctgctccggggaggctgtcaggaacgccaggggcccgatgcgctgctccg

SEQ ID NO: 867622 - DNA, 120 bp, Artificial Sequence
  ENSG00000232807_10 (sequence is synthesized)
cacaggagtggcagaggtagccccccttgttttccttcctgttgctctgtggtgatggacaagagagagagctaaggggaacaaccaaagaacatggattttccagcaaaaagcatggag

SEQ ID NO: 867623 - DNA, 120 bp, Artificial Sequence
  ENSG00000232807_11 (sequence is synthesized)
ttatcatcacagctgcccagggacaacgcatttggattctgatgttttcagaggggtgcacatcctcagagtaacacctcccacagcaccaccaactaggtggcctcaacacccccaaat

SEQ ID NO: 867624 - DNA, 120 bp, Artificial Sequence
  ENSG00000232807_12 (sequence is synthesized)
tccctgagctcagaaacagtcatttatccagtcaagataaagaaccaagaaaagctgcgctgggaccccagggaacagctctctctctaagcgtgtatcacaacccagcctcccagacct

SEQ ID NO: 867625 - DNA, 120 bp, Artificial Sequence
  ENSG00000232807_13 (sequence is synthesized)
gcggcttcagcacagccaggcagcatcacgtgccctgacctctgaccctgggacagaccacacacctcttgtgcctctcatatgaaaagcccctaataaaggatcacacagctctctctt

SEQ ID NO: 867626 - DNA, 120 bp, Artificial Sequence
  ENSG00000232807_14 (sequence is synthesized)
atctcctcacctacaacccagataagcacagagctcacaagcaaaaaatgcaaatggctgaattaagttccacagacagcagacgtacataggtgatgggcagcttcttcatggtaagga

SEQ ID NO: 867627 - DNA, 120 bp, Artificial Sequence
  ENSG00000232807_15 (sequence is synthesized)
cggtgtcaacagggatggcattgttgcactgtcccacgcagcagcgcaccacgcctgtttttaagacgttgcttgtcagctctgcttgcaagaagtactcctgagaaagaaagagcgaga

SEQ ID NO: 867628 - DNA, 120 bp, Artificial Sequence
  ENSG00000232807_16 (sequence is synthesized)
aagagagtcatggcgacacctccgttagggtctactggaaacactgatagcggcggctctgtgagaaccctttagatgcactgtaagtcccagagagaaaaaccccgcctaacccgttct

SEQ ID NO: 867629 - DNA, 120 bp, Artificial Sequence
  ENSG00000232807_17 (sequence is synthesized)
cccttacttcctctaacttttccctgcctccaaagctatcgacagtccaactgacagtccaattgctttttaaatatatatatatttaacagataaacatgcaaaactattgcctgtaat

SEQ ID NO: 867630 - DNA, 120 bp, Artificial Sequence
  ENSG00000232807_18 (sequence is synthesized)
gacatttccagaatatttctggattttattttatgctaaggtatccccagctcaatcttcagaaaactattgtgtattcacattataagccaggcaggcaacacagaggacatgaagaaa

SEQ ID NO: 867631 - DNA, 120 bp, Artificial Sequence
  ENSG00000232807_19 (sequence is synthesized)
cccaaacatccctgcgtatttccaccgtcccgtgctgctggctgtgctagtgagcaaatgacagcctcgctaagcctgtgtctttatccataaatgcagatggcacggtgcctgcttcag

SEQ ID NO: 867632 - DNA, 120 bp, Artificial Sequence
  ENSG00000232807_20 (sequence is synthesized)
gtggctgctgaggagaagaaacccttcaatgcatgcaaagcactcacgcctggcacgcagggagcacccagaggaagcactagtgacctcccaggctggaaacaccacaaggacagggca

SEQ ID NO: 867633 - DNA, 120 bp, Artificial Sequence
  ENSG00000232807_21 (sequence is synthesized)
ctgtcagcttcgctgctgccctgtggggctccacatcacagactgatatgctagcaggaccgcacacatctgctgcccaggaaaggacggtttcgtattttctggattatgaccagctat

SEQ ID NO: 867634 - DNA, 120 bp, Artificial Sequence
  ENSG00000232807_22 (sequence is synthesized)
tgatctacttattctacaatctgtaacctacgttttgatttatttggtcttttctcttagacggcctgcctaccagctatgaaaaagaacagaaaaccaccaggcaaacactccagttat

SEQ ID NO: 867635 - DNA, 120 bp, Artificial Sequence
  ENSG00000232807_23 (sequence is synthesized)
ggccaacaagtactaacagctgacgaggtgaaatcctgtctgaagtcacagattttgctgaagtcccttggactgtcatctcaatttccttcccgagagacagccaagaccatgaacctg

SEQ ID NO: 867636 - DNA, 120 bp, Artificial Sequence
  ENSG00000232807_24 (sequence is synthesized)
gcgaggtccctccaacccacggtgaaatagcttctcgtttacacgtgtccaaggacacaggtctccttttatagatgtctaatttacatgaatgttacgcttctggcttcctcctcacct

SEQ ID NO: 867637 - DNA, 120 bp, Artificial Sequence
  ENSG00000232807_25 (sequence is synthesized)
aggttttctaaaatgctgtagaggactcagtcacagcgctctcttgtatttcatttacccattcccttgctgtggttactcggttgtttccaaactatttccaacaatgcagcaatgaac

SEQ ID NO: 867638 - DNA, 120 bp, Artificial Sequence
  ENSG00000232807_26 (sequence is synthesized)
atcctgtacctgactccctgtccactccagaagtttctccagggctaggctctcaagccgtttttgacgcagttaccattataatgctatacatacgcacatatgtaagaaacacacatg

SEQ ID NO: 867639 - DNA, 120 bp, Artificial Sequence
  ENSG00000232807_27 (sequence is synthesized)
gaagaaaagtttcacaaaacatgacttaacctaacatgcagtgttctctgatttctttagattttatgccatttaactctttttaagcctctcataacccaccagattaactgtttttat

SEQ ID NO: 867640 - DNA, 90 bp, Artificial Sequence
  ENSG00000232807_28 (sequence is synthesized)
ttttaagcctctcataacccaccagattaactgtttttatttatataaatttaaggggtgggggctgaagtgggaggatcacttgagccc

SEQ ID NO: 867641 - DNA, 120 bp, Artificial Sequence
  ENSG00000232807_29 (sequence is synthesized)
aaagcaagaccctgtatctaaacaaataaacaaaaagaatctaagattctgtgagaccaagaagctgtctttggccagacatagtggctcaagcctgtaatctcagcaatttgggaggcc

SEQ ID NO: 867642 - DNA, 120 bp, Artificial Sequence
  ENSG00000232807_30 (sequence is synthesized)
aaaaaaaaaaaaacaaaaaaaaaaacctgtctttgaaacataacttcatgtcacttaacacctcaacaatgtaataatttccttcactttcccaaaacttaaagaaacaaatgaacaaaa

SEQ ID NO: 867643 - DNA, 120 bp, Artificial Sequence
  ENSG00000232806_0 (sequence is synthesized)
gcagagtgccaaaggggaagagatgcggagcaaagaactggaaacttctcaggcattcacattggcaactcctgttccaagaataattatttatgacagatttcaattttcggggcaggg

SEQ ID NO: 867644 - DNA, 120 bp, Artificial Sequence
  ENSG00000232806_1 (sequence is synthesized)
tgatgtcaaccctggctgaacactggaatcacctgggaagatcaaaaagcaacacctcctgcatctaggtttggtctggatattggaattttttaatgtcctggtggttttaatgggcac

SEQ ID NO: 867645 - DNA, 120 bp, Artificial Sequence
  ENSG00000232806_2 (sequence is synthesized)
gcaaggttgagaactacttatttatagttttcatcaaaagtctgtctggtaaactcttaagtctttttcagtctgaagtctttattttgaattcaatcttaataaaaatttggtggttta

SEQ ID NO: 867646 - DNA, 120 bp, Artificial Sequence
  ENSG00000232803_0 (sequence is synthesized)
tgctgagcgggtgttgcccttgccgctgtcctgtgacgtagcccttttcaaaaccacctctcccaagtgctgcaccactcctcctccatgcccagggaccgcgggtgcttggggccccga

SEQ ID NO: 867647 - DNA, 120 bp, Artificial Sequence
  ENSG00000232803_1 (sequence is synthesized)
cgcgtacccaggtgccatctggccctcacctcccgccgtagctggctgtgacgcccgccatgggcacactggggcagtgcagtgagaagacgaggatgcccagcaggctgacaacggtgc

SEQ ID NO: 867648 - DNA, 120 bp, Artificial Sequence
  ENSG00000232803_2 (sequence is synthesized)
agaacaggcagaacttgatgaccgcggagccccggagcctgagcttgttcacaaagaagccgcccaggaaggtgccgccaccacccgctggcaccaccagtgtcgctgacttgaacccct

SEQ ID NO: 867649 - DNA, 120 bp, Artificial Sequence
  ENSG00000232803_3 (sequence is synthesized)
ggagggcggctctttcctctcggccacacctagagcctggttccgatgaacgcaactctgaatgcctggaacattcaaatgctcttgtttgaggaggtggccaaatgtaaatggattctg

SEQ ID NO: 867650 - DNA, 120 bp, Artificial Sequence
  ENSG00000232803_4 (sequence is synthesized)
aagaatcaggaacagacggtgcagccctagttagcctctgagccccaacaggcccacaggtgccttgcagagctgatgttggcgtcagaaactccgctccagcctcacaggcactctgcc

SEQ ID NO: 867651 - DNA, 120 bp, Artificial Sequence
  ENSG00000232803_5 (sequence is synthesized)
tgcttggaggtgttcgctggctcgctcagactgacctcagcagccatgaacatgggttctttctgtccccttccctgattaaaatgggagagcccagttctttcaaaatttatttcctga

SEQ ID NO: 867652 - DNA, 120 bp, Artificial Sequence
  ENSG00000232803_6 (sequence is synthesized)
cagccacaccccctcctcccccaggggcctctgccgagtccctgcaggctgtgacaaggacatttgtcgaagcctgagtggccaccaacagtaaaaaattgcgattagctggcatctagc

SEQ ID NO: 867653 - DNA, 120 bp, Artificial Sequence
  ENSG00000232803_7 (sequence is synthesized)
ttctgggctgacaagtgaggagggcacagacctgcccagcctgggaaggccagcctgcctctggcaccgagaaacccccagctgcactgttccaggaggtcctgaggcaccagtgcctgg

SEQ ID NO: 867654 - DNA, 120 bp, Artificial Sequence
  ENSG00000232803_8 (sequence is synthesized)
ctcatggaacagccaggtccaaacccttcctgcaccaagtcacagaagccaagactaggtggctagggggtggagcccaccgtggacccttccacctacggagcatgtcccacaaagagg

SEQ ID NO: 867655 - DNA, 120 bp, Artificial Sequence
  ENSG00000232803_9 (sequence is synthesized)
atgtgccctgtctgggtctttctagaagatgcccttgaagactctgtttctgagaactgacataaaagcagaggacccccaagattcagttttctcaccaaacaaggtggcagcttctga

SEQ ID NO: 867656 - DNA, 120 bp, Artificial Sequence
  ENSG00000232803_10 (sequence is synthesized)
ggcactcaggctgaactgggactccaagaacttggggctgaacgtggacatgccggtgatgagagtggcctcggtggccccggccaggcagagcaggatgaacgtggggttcttcagcag

SEQ ID NO: 867657 - DNA, 120 bp, Artificial Sequence
  ENSG00000287939_0 (sequence is synthesized)
ttgttacaaagttcagctggagacttccttctccctgtgacattttccctgcacctctggctgccctccggaaggatccctgtggtgctatgcaggaatggcctactcagagatccagga

SEQ ID NO: 867658 - DNA, 120 bp, Artificial Sequence
  ENSG00000287939_1 (sequence is synthesized)
actcagagatccaggaaactcccagggcctttcccgctgcttcctctacccctttatttcactcagctctctaacttgactcagcatcagagacatcacccaggctggagtgcagtggtg

SEQ ID NO: 867659 - DNA, 120 bp, Artificial Sequence
  ENSG00000287939_2 (sequence is synthesized)
cctcctgagtagctgaaattacaggcctgagccagcatgtctgggtaaaaattataatgtctgtctctctgtctagctatacattcatacagcttcccagtattctattgtatggaaata

SEQ ID NO: 867660 - DNA, 120 bp, Artificial Sequence
  ENSG00000287939_3 (sequence is synthesized)
acattcatacagcttcccagtattctattgtatggaaatacagtaccttaatttctttatttaacatttgcattgcttctaacttttgtgttacaaataatagtgaataaataatcttgt

SEQ ID NO: 867661 - DNA, 120 bp, Artificial Sequence
  ENSG00000287939_4 (sequence is synthesized)
acatctatcattttgaaggtgtacaaatacatctgtaggataaattccaaaagtgaagttgctggatcaaacacatatgcattttaagttttgacaaatactgccaaattgatactgtat

SEQ ID NO: 867662 - DNA, 120 bp, Artificial Sequence
  ENSG00000287939_5 (sequence is synthesized)
gagaccaaaaataactttttttctgttttttttttcctacccattttatgttcatggctgaggtccctattacaaaagacagattaacaagagaaaagcatacaagttcatttaatttaa

SEQ ID NO: 867663 - DNA, 120 bp, Artificial Sequence
  ENSG00000287939_6 (sequence is synthesized)
gagacactagagctttcataaagatatgaagacccaaagaaggtaaacctgagtatctttatgctaggcttgatgaagaatggacagttgtggagaaatatgataaggtaaaaaataata

SEQ ID NO: 867664 - DNA, 120 bp, Artificial Sequence
  ENSG00000287939_7 (sequence is synthesized)
tgatctattgataataaagtggggaaatgtagaaaggcctttctgttcctttgtctttggagaaagggatgtttctttcctttgggtagagggatggcacctctcacatgagaatcttat

SEQ ID NO: 867665 - DNA, 120 bp, Artificial Sequence
  ENSG00000287939_8 (sequence is synthesized)
gacctgctttaggggagaggggtagggggaaggtcagagtgacctccctgcatctgctgttttatcaaattcattcagcttaaaatattcaacaccaagatgccatattttgggatggca

SEQ ID NO: 867666 - DNA, 120 bp, Artificial Sequence
  ENSG00000287939_9 (sequence is synthesized)
tgtccagaaaattattactcttcatggggactgcacaaatttgcatgtccgtctacctctgatggatgagtgactgtttccccacctctcaccatgcagggtatattactaaacatttat

SEQ ID NO: 867667 - DNA, 120 bp, Artificial Sequence
  ENSG00000287939_10 (sequence is synthesized)
atttttgccaatatcttaaataaaaattgatgtatcaatttaggttgctcatcttttcatgttaacggctatttgcatttccttttttgtgaacaatctgttcagatttgttgcctattt

SEQ ID NO: 867668 - DNA, 120 bp, Artificial Sequence
  ENSG00000287939_11 (sequence is synthesized)
ttccattagattgattttttttcccttctcagtttgtgggaactctttgtatgttagcaagattagctttgtatgttacataagtggcagatacttttctcaatttatttgtcttttgac

SEQ ID NO: 867669 - DNA, 120 bp, Artificial Sequence
  ENSG00000287939_12 (sequence is synthesized)
tttgcttattattattttgctacataatatggatatattatttctgtatgtgtaaaatttatcaatgttttatttcatggcactatggacttattttaatgtaaagcttaaaaatgtgaa

SEQ ID NO: 867670 - DNA, 120 bp, Artificial Sequence
  ENSG00000287938_0 (sequence is synthesized)
aatgtggggagccaggactttgatccccactaactggtaacaaaacctcgtgatagagccctgtcttgtaagatgtaacctcatgtaccctagaacagttctggaggccggaagtctgaa

SEQ ID NO: 867671 - DNA, 120 bp, Artificial Sequence
  ENSG00000287938_1 (sequence is synthesized)
agcagtatcagtaggtggaaatcagggtgcccagcttctggtggctgtgacattccttggcttaaggctgagctcattgatgaagaagtcttgagttcatcattttttcttctctaatag

SEQ ID NO: 867672 - DNA, 120 bp, Artificial Sequence
  ENSG00000287938_2 (sequence is synthesized)
aagtttcagaaggacacatgggaatcatttaaccaggccaataaaatcagctatttatacacttcccccggaagacatagcccttgcttcactgtctgaaggagagaaaatgcaaaaggt

SEQ ID NO: 867673 - DNA, 120 bp, Artificial Sequence
  ENSG00000287938_3 (sequence is synthesized)
ccatcgatatatacatataagaatttttccattagaatgctacacagtcagtggccaaaagcctgttggaaagagtgtgggcttagatgacatcaagacatacagttttagaacctactg

SEQ ID NO: 867674 - DNA, 120 bp, Artificial Sequence
  ENSG00000287935_0 (sequence is synthesized)
gcggggcctgggaggggggaagacgcaggatcagcggcagcgcgaacccacagccctgcagggtccccgcgcctgggcacggacgcgtttcgcacaggaggaggctctagcgtaagcgcc

SEQ ID NO: 867675 - DNA, 120 bp, Artificial Sequence
  ENSG00000287935_1 (sequence is synthesized)
gggagcgctcggagcccgggccatctcgagacacctgagggcctgggggctgagccagggacgctttgtcttcgcgtctgaatgacggattgacggccgtttgcagcggctctgaagcga

SEQ ID NO: 867676 - DNA, 120 bp, Artificial Sequence
  ENSG00000287935_2 (sequence is synthesized)
gtgcggacggtcttaggacggtttccctgacggatgcgcttccgggggagaaccaggagagacacacaacatcgcctggggccacctgcccgaaggtgcccgggaacacccacgaaaaca

SEQ ID NO: 867677 - DNA, 120 bp, Artificial Sequence
  ENSG00000287935_3 (sequence is synthesized)
cagaaacctgggcttcgttatgcaggagttttgttcctgaagatggcattgcttgcgacctccctccccaccccactcctttctccgggaacatgaacgtctctggatttctcaatctct

SEQ ID NO: 867678 - DNA, 120 bp, Artificial Sequence
  ENSG00000287935_4 (sequence is synthesized)
gaatttgccaacaccacgaaaattcacacccgatgctttgcaagagctgctatttataggagcgctgggtttcagtggcttctctccagagttgcaaagtcactctctaatgcagctgtt

SEQ ID NO: 867679 - DNA, 120 bp, Artificial Sequence
  ENSG00000287935_5 (sequence is synthesized)
tcatcaggcaccgccccgtgtcctgggcatctggtctttttacattcctttgggtgcacccataatattctactgggggccggaagagagaattttgggctccaatttagcttcatcatg

SEQ ID NO: 867680 - DNA, 120 bp, Artificial Sequence
  ENSG00000287935_6 (sequence is synthesized)
cagaatcgaccttccttttacaaactcatccagccatccactcactgtttgtgtgaactcagcaagttactgaaccccccaggctcagtttccccatttgtaagatggggccgagcagcc

SEQ ID NO: 867681 - DNA, 120 bp, Artificial Sequence
  ENSG00000287935_7 (sequence is synthesized)
cttatgacgagtccggggaattgtgaagtccccggtgcatgaatgtcaccgcgaatgttggctgtatgatcaccagtcactcagcagcacttgtgtgcacctgcatgggggccccgggcc

SEQ ID NO: 867682 - DNA, 120 bp, Artificial Sequence
  ENSG00000287935_8 (sequence is synthesized)
caccagactcggaggtgaccaatctcagtgctggtgagaagggctatgacaggggccctccagggcactggccctgagcccacatcccaggcagcagttaaagctgccaaggagagtgaa

SEQ ID NO: 867683 - DNA, 120 bp, Artificial Sequence
  ENSG00000287935_9 (sequence is synthesized)
aaaagccacccaggagcaacccagggctgggtcttgatgggatgaataggagttttccaggtagaaggtgggggagagggactcgtatgcagtggagtcaggagtcattctcagggacag

SEQ ID NO: 867684 - DNA, 120 bp, Artificial Sequence
  ENSG00000287935_10 (sequence is synthesized)
gtggagtgcagtggtctctaggaagagacaggtgcctcataccacatagaacaattagtttaaagtgggttaaagacctagatgtagaaattcaaactataaatcactgagaagacatgg

SEQ ID NO: 867685 - DNA, 120 bp, Artificial Sequence
  ENSG00000287935_11 (sequence is synthesized)
ggtgaatctttttgagcttggtttacttagatatgacccaaaaagcacagaaacaaaagaaaaagatagataaactgaattcctcaaaatcaacaaattttgtgcttcaaaggacaccat

SEQ ID NO: 867686 - DNA, 120 bp, Artificial Sequence
  ENSG00000287935_12 (sequence is synthesized)
caagaaaaccaaaaaacaatctgcaaaatgggagaacatatttgcaaatcacttgtctataagagacttgtatctggcatatataaagggggttatattacacaaagaacaattgcaact

SEQ ID NO: 867687 - DNA, 120 bp, Artificial Sequence
  ENSG00000287935_13 (sequence is synthesized)
cagcctgggtgacagtgtgagactctgtcaaaaaaaaagcaaaggatatgagtagacatttctccaagctgatgcacaaatgactgatcaacacaaaaacatgctccacataagtagccc

SEQ ID NO: 867688 - DNA, 120 bp, Artificial Sequence
  ENSG00000287935_14 (sequence is synthesized)
cataagtagccctcagggaaatgcacccactagggtggctacaatctctattaataattttgtttaactggaaaacagcaagtgttggtggggatgtggagaaattggaaacttcattca

SEQ ID NO: 867689 - DNA, 120 bp, Artificial Sequence
  ENSG00000287935_15 (sequence is synthesized)
tcgctggagggaatgtaacatggtgcggacaccgtggaaaacagtcgggcagttgttccaaacgttacacagagttgtcacatgacccagcaattctgctcccacatatatgcccaagag

SEQ ID NO: 867690 - DNA, 120 bp, Artificial Sequence
  ENSG00000287935_16 (sequence is synthesized)
aactgaaagtgtgtccacattaaaaacctgtccacaaatgttcatagcagcattattaataataccccgatgtgaaattaacctacatgtccatcaactgatgaaacatgggctgcatcc

SEQ ID NO: 867691 - DNA, 120 bp, Artificial Sequence
  ENSG00000287935_17 (sequence is synthesized)
atccaacggaatattatccggccataaaaaggaatgacatcgagttgaaggcagggtcttgaggagatatttgcacacccatgttgcatgttcattgcagcatcattcatgagaactgag

SEQ ID NO: 867692 - DNA, 120 bp, Artificial Sequence
  ENSG00000287935_18 (sequence is synthesized)
aggtggaggaaccctgtgcgctgaaattggggctggccgagccaggtaggaggtggacaggctccctggcggctctccagggacgtccttcagggacagcttcgaggacgtcccatgagc

SEQ ID NO: 867693 - DNA, 120 bp, Artificial Sequence
  ENSG00000287935_19 (sequence is synthesized)
agtgcccatgtggtcaagggcttcagtacccggcagcagctctcagccaccttgaccatgagcaaggagaggacatatctggtgcctcaaaagaacatctttgcctaaagctcatctggg

SEQ ID NO: 867694 - DNA, 120 bp, Artificial Sequence
  ENSG00000287935_20 (sequence is synthesized)
agagagagcaagcagactgcaaatttctgaaactgcttgaaccaagtgcatgaatttggtgcatcctgaagtccctctgcccagagagggctgctagtctgtgcatggcaggatggaccg

SEQ ID NO: 867695 - DNA, 120 bp, Artificial Sequence
  ENSG00000287935_21 (sequence is synthesized)
ctgctctgagtcacctttgctgagcagccaaggctgggcttcccttggaattgcttccggaatgagatattcagggccagtccttggctgtagtttctagacttctcctcgacagggcag

SEQ ID NO: 867696 - DNA, 120 bp, Artificial Sequence
  ENSG00000287935_22 (sequence is synthesized)
ctccttggtgcagctcctgctgcactgctggccccggtctggctctcttggtggctgtggccacccgtgccattgcatggtcctaacagtctctgtgtatattcagcttgcttcctgctg

SEQ ID NO: 867697 - DNA, 120 bp, Artificial Sequence
  ENSG00000287935_23 (sequence is synthesized)
tggggccccactcctactgcagaactcagcccctggttcaatgctgacctttgtaccccagtcccttaactacgcaggcatcttcctgtgtgtgtggtgttttgtaggtatacatctctc

SEQ ID NO: 867698 - DNA, 120 bp, Artificial Sequence
  ENSG00000287935_24 (sequence is synthesized)
tttcagcagctagctgaagtatgatttgcatacaacaagccgcatttatctaaagtgttatcagttgatatgttttgccttttgcaaatgacaccaaaagcatcaccacaatcgagataa

SEQ ID NO: 867699 - DNA, 120 bp, Artificial Sequence
  ENSG00000287934_0 (sequence is synthesized)
gccgagcagcttgttcccagagccgctttgccccttgacgctcctaaccggcttactgtgctccagaatcggagatggtcctttactatcagtttggggaataggatgggcggagatccc

SEQ ID NO: 867700 - DNA, 120 bp, Artificial Sequence
  ENSG00000287934_1 (sequence is synthesized)
cagattcctttggaggtagtgatggaagcctgctcaggctctcccagatgggactgcagccctcctgagactcagcagtcagcgtcatatctgagactaccttagcttctgaagacgagg

SEQ ID NO: 867701 - DNA, 120 bp, Artificial Sequence
  ENSG00000287934_2 (sequence is synthesized)
tctgtttggaagacaaagctaccccaagacaagcacagagaagtcaggtccagagcatacctggtttatcagccggtggagtaagcaagtcccgaatttgagggtccttgattcctactg

SEQ ID NO: 867702 - DNA, 120 bp, Artificial Sequence
  ENSG00000287934_3 (sequence is synthesized)
cccaccgaagatcaagggtcctgagaagggggcagctggaggtgctgagggcagagactgcagaccaggagcagcctgctaggaggaggtctttcagtcctgcaatggatggaatgagac

SEQ ID NO: 867703 - DNA, 120 bp, Artificial Sequence
  ENSG00000287934_4 (sequence is synthesized)
atgtaataatacactgtttcccagcatactcagagccgtaacgatctgagcaaagtgaacaaacttccagtctaataggagagaaggactatgcctaatcttttagtcatccagctcaaa

SEQ ID NO: 867704 - DNA, 120 bp, Artificial Sequence
  ENSG00000287934_5 (sequence is synthesized)
gatttccatggtatcctatactacatcttctagctttagtggtaaattgattgcttagttcccaccagagcaatacaagaaggagtgacttcctgtctttctaagagctcaaaatgctga

SEQ ID NO: 867705 - DNA, 120 bp, Artificial Sequence
  ENSG00000287934_6 (sequence is synthesized)
taaggagctgaccaaagtaacatctgactcaaatttcctctttagtggttatgctgaggagaactgcagggctggcagcaacactgattccgttctctttgctgtccattgcagtgattg

SEQ ID NO: 867706 - DNA, 120 bp, Artificial Sequence
  ENSG00000287934_7 (sequence is synthesized)
gcctgccagtccagagtgctgcctgggagactgacacttaagatggccctgggtaaacctcttgctaagcaacaatggcatgggactgctgccctacactgccctccagtgatgctaaga

SEQ ID NO: 867707 - DNA, 120 bp, Artificial Sequence
  ENSG00000287934_8 (sequence is synthesized)
agcactgccaataatgcaacttttcttgcccgcttcttctgggcccctggaaagacagcggcagggctgctcacttacctggcagcctattgacgagccatgtcagttgctttttagaga

SEQ ID NO: 867708 - DNA, 120 bp, Artificial Sequence
  ENSG00000287934_9 (sequence is synthesized)
tgttggtccaactgaggtcaaggctgactggctgcctcttgatgatgccactgagggcctggggcacaatggccttacacctactcaagtcaatttttgtccaaagtctcttgtcgcagc

SEQ ID NO: 867709 - DNA, 120 bp, Artificial Sequence
  ENSG00000287934_10 (sequence is synthesized)
acctgtgatagaagggaagagaactcgccttcattaacttgatcagtggagctcccatcacaggctgcttatggcttctgggaaaagcagagtacctggaggctcgttcttctacaagtg

SEQ ID NO: 867710 - DNA, 120 bp, Artificial Sequence
  ENSG00000287934_11 (sequence is synthesized)
tacagggatcacaccttatcattttttgcctcacagaataggcaaaaaattgccttgaactctacaacaactagacgctttgcaaacctacatgttgatagtatataacttgaccacttt

SEQ ID NO: 867711 - DNA, 120 bp, Artificial Sequence
  ENSG00000287934_12 (sequence is synthesized)
accctgatttattctggagtgtttgagaacacaacagttgttagggacccatagcaagcaacagtctatagccccttcatctgtattaaaatggcatggttcctgctgaagtgtatataa

SEQ ID NO: 867712 - DNA, 120 bp, Artificial Sequence
  ENSG00000287937_0 (sequence is synthesized)
aggcgggagtagaaatcctgggcccatcttacctccgacctcatttcctcctctgtaataatgtgggggtgggggaaagttctggtcatcagccctagcattccatggttcatttcctca

SEQ ID NO: 867713 - DNA, 120 bp, Artificial Sequence
  ENSG00000287937_1 (sequence is synthesized)
tcagtgatggaaaatcaccaagcaagagaacaggatggagaataaccggatgggtgcaatcggaggtgctatttcaggagctggccattcttcaagtcagaaggcctgagagaggagctg

SEQ ID NO: 867714 - DNA, 120 bp, Artificial Sequence
  ENSG00000287937_2 (sequence is synthesized)
cccaggtggtcttcatggggctgtgcggccagtcatcccccacaggttgacaatccttgcgtacttcatccttgttggatcctctgtatccctgacgatgagcaactgtgaggcccgttt

SEQ ID NO: 867715 - DNA, 120 bp, Artificial Sequence
  ENSG00000287937_3 (sequence is synthesized)
cagcactgagttccagtcaggaaaacatccacccacccaccacacgctcacacttacacacacattcacacatgcacacacgttctggctccgaaaaagaaaaaaaaaaagcaatttaaa

SEQ ID NO: 867716 - DNA, 120 bp, Artificial Sequence
  ENSG00000287937_4 (sequence is synthesized)
ataattctgatcctttgcttatttccacaaactccatgaaaattgtacattgtccaagcaacatttcttaatattctctttttctctcatatccattttccttactgctgtctccacctt

SEQ ID NO: 867717 - DNA, 120 bp, Artificial Sequence
  ENSG00000287937_5 (sequence is synthesized)
tctcttccaaactccctgttaaaatccctgccccagcgaacttttattcaattttgtggaatggaggctgctctgatttaaattaaaaaaaaaaaaaatccctactccatgtcccagatc

SEQ ID NO: 867718 - DNA, 120 bp, Artificial Sequence
  ENSG00000287937_6 (sequence is synthesized)
aattaaaaaaaaaaaaaatccctactccatgtcccagatccctagttgttttttgttttttgttttcctgagacagggtcttgtgtcttccatgctggagtgcagtggcatgatcatggc

SEQ ID NO: 867719 - DNA, 120 bp, Artificial Sequence
  ENSG00000287937_7 (sequence is synthesized)
gcctcagcctccccagtagctgggagttcaggtatgtgctaccatgcctagctaatttttttcttttattttgtagagacacggtcttgccaggttgcccaggctggtctagaacccctg

SEQ ID NO: 867720 - DNA, 120 bp, Artificial Sequence
  ENSG00000287937_8 (sequence is synthesized)
cccaaagtgctgggattacaagtgtgaggcactgcacccaggctggatccctgcatttttacagatttagcatcacaaaagtctaaacaattagactgactaaggcagaactgcccttat

SEQ ID NO: 867721 - DNA, 120 bp, Artificial Sequence
  ENSG00000287937_9 (sequence is synthesized)
agactgactaaggcagaactgcccttatgacagcagacataagaaggaaaaggccaaaacactgtgttaaaaattatccaaatgtgaggaaaaggcaaagagagtaggtgtgccttttta

SEQ ID NO: 867722 - DNA, 120 bp, Artificial Sequence
  ENSG00000287937_10 (sequence is synthesized)
caggagtccacaaatttttttttgtaaaagatcagatagtaaatcttttcagcgtgaagagcatgaggtctctgtcacaaatactcaaccaccattacaacatgaaagcagccaacagac

SEQ ID NO: 867723 - DNA, 120 bp, Artificial Sequence
  ENSG00000287937_11 (sequence is synthesized)
aacacatgacaaatgagtgtggctgtgttccagtaaatcttgattacaaaaacaggcaagaggccagagctgacccatgggccatagtttgctgaccccttctgtaaaggaaagtatttt

SEQ ID NO: 867724 - DNA, 120 bp, Artificial Sequence
  ENSG00000287937_12 (sequence is synthesized)
tgtttgacttgctgtttaccattgattgaacacaaggctctgtagagttacttgttaacttgcagaagattgatgagtggcaagtaatttttattcaccagaatataaaattatttctgt

SEQ ID NO: 867725 - DNA, 120 bp, Artificial Sequence
  ENSG00000287937_13 (sequence is synthesized)
tcagtagaaaagataaacccaactgttatattattgtcctgttttgtatgtaactttgcttcattttttaacaaattaatattattgccctaatttgtatataactatgcttcttttaaa

SEQ ID NO: 867726 - DNA, 81 bp, Artificial Sequence
  ENSG00000287937_14 (sequence is synthesized)
ctctcccaccttagcctactgcatagctgggattacaggcacaaaccactgcatgcagctaactttgcttctcattccagc

SEQ ID NO: 867727 - DNA, 120 bp, Artificial Sequence
  ENSG00000287937_15 (sequence is synthesized)
ggattacaggcacaaaccactgcatgcagctaactttgcttctcattccagcactttttattccactgattatatgtatatgtatatctgcatcatctctctctctctctctctctctct

SEQ ID NO: 867728 - DNA, 120 bp, Artificial Sequence
  ENSG00000287937_16 (sequence is synthesized)
atatatggaaatatctctctctctctatatatatatatggaaatatatatctcagtctctcctatcctcctttaatcagttttgctatcctgtcaattcccccaacgagtgtgatgttgt

SEQ ID NO: 867729 - DNA, 120 bp, Artificial Sequence
  ENSG00000287937_17 (sequence is synthesized)
gaaatatatatttgttcttcatctcctgtttcctgacatacagcttttaaaaacccttggaatctctggaataataagagtgtcttttgcatgctaatagatgactgctggctggcagcc

SEQ ID NO: 867730 - DNA, 120 bp, Artificial Sequence
  ENSG00000287937_18 (sequence is synthesized)
ccaatgcagtagcttcatgatggggtttgtcacaggaaagaccaaggcaggattggagacttgagactgttagccccactccccaaccactggagggagtggaggggctgaaggttgtgt

SEQ ID NO: 867731 - DNA, 120 bp, Artificial Sequence
  ENSG00000287937_19 (sequence is synthesized)
cagtcaccaatggccaatggttcggtcaatcatgtgtacgtaataaagccactcttaaaaacccaaaaaggacagggtttggaagggctcccagatagctggacacatgaaggttcctgg

SEQ ID NO: 867732 - DNA, 120 bp, Artificial Sequence
  ENSG00000287937_20 (sequence is synthesized)
agggtggtgccccagaggggcatggaagctccacaccccttctcacatgctttgctctgcgcatctcttcatctggtgttcatctgtatcctttgtaatatcttttagaataaactggta

SEQ ID NO: 867733 - DNA, 120 bp, Artificial Sequence
  ENSG00000287936_0 (sequence is synthesized)
tgagtgttggccaggatttggagagattggaatacttacacactgctaacagaaatgcaatacggtgcagtctctggaaaacagtctggcagtttcctcaaaaagttaaatatagagttt

SEQ ID NO: 867734 - DNA, 120 bp, Artificial Sequence
  ENSG00000287936_1 (sequence is synthesized)
ttatatgagccagcaattgtactactaggtatatacccaagagaattgaaaacatatattcacacaaaaaatatgtacaggaatgtccatagcaacacatttgaaatagctagaaagcag

SEQ ID NO: 867735 - DNA, 120 bp, Artificial Sequence
  ENSG00000287936_2 (sequence is synthesized)
aaacaaaccaaatgcctatcagctgatgactgaataaataaaagatggtatatccatataatgaaatattactcagcagtgaaaaggaataaagtactgatagatgatacaacatggaca

SEQ ID NO: 867736 - DNA, 120 bp, Artificial Sequence
  ENSG00000287936_3 (sequence is synthesized)
aattttgaaaatgttatggtaagcggaagaagccaggcataaaatactacatgctttatggttcccttcatatgaactgtccagaacaggcaaatgtatatggacagaaagtagatgagc

SEQ ID NO: 867737 - DNA, 120 bp, Artificial Sequence
  ENSG00000287936_4 (sequence is synthesized)
agttgctagagttgagggatggcaagtaggggaaatggtgagcaactgctaatgggtacagggtttcttttagaagtgataaaatgtcctgaaattgattatggtgatggttgctaaact

SEQ ID NO: 867738 - DNA, 120 bp, Artificial Sequence
  ENSG00000287936_5 (sequence is synthesized)
ctgtgaatataccaaaacacagcaaattatacatattagatggatgaattgtatggtatgtgaattatgtcttagtgaagctgttgtttttttttaaatctcacgcttcccaggcagctg

SEQ ID NO: 867739 - DNA, 120 bp, Artificial Sequence
  ENSG00000287936_6 (sequence is synthesized)
gagtttcttctaactgggctgtggagtacatgacatggaaggcaatgtggttaaaggcatgcgtttcagaatcagactcccctgggttccaacgctggctctgccttttattgtctgtat

SEQ ID NO: 867740 - DNA, 120 bp, Artificial Sequence
  ENSG00000287936_7 (sequence is synthesized)
aaacttgggcaactctgtgaacttgtgaaaatatttgtcataatatagtctttgtgactttgtgcagatgaaatgagatgatgcaggtaaaaggtttatcacagtattcaacttgcaagt

SEQ ID NO: 867741 - DNA, 120 bp, Artificial Sequence
  ENSG00000287936_8 (sequence is synthesized)
tgttacatattatttctgtcttcttccatttcttgtgtttccaccaccaaatcaaaataggaatcagaagttcgcatgcatttatctctactgacttcaaaagaagagggtaaaaaagtt

SEQ ID NO: 867742 - DNA, 120 bp, Artificial Sequence
  ENSG00000287936_9 (sequence is synthesized)
gtcctagtttagggatgcaaatgatttagcagtggcaggatgccctgagtgcgcattaccaggctttggagtttatgtcatcaggcatggggcgaaatggtagcttttgaggcataaaag

SEQ ID NO: 867743 - DNA, 120 bp, Artificial Sequence
  ENSG00000287936_10 (sequence is synthesized)
aggagcataagttctgtcctattaaagagatcaattgtccagtgtgtccaatattctgtcttccactctggccaagacagatgcttcagagaaggacataaaatccattaacatacttaa

SEQ ID NO: 867744 - DNA, 120 bp, Artificial Sequence
  ENSG00000287936_11 (sequence is synthesized)
ttacacactcttgtattatgggagatacattactgtcccaaacccagcctgtccttgcctaaatatccaacatccattatcttcaaggtagcttacagatttaaactaattaatctcttt

SEQ ID NO: 867745 - DNA, 120 bp, Artificial Sequence
  ENSG00000287936_12 (sequence is synthesized)
ttctccaagaggctttttcttaccagggggatgagagggctggttacctgctgcctgcccccatctgtgagctactgcgctgatgcctgattgtcaccttgtgcctgtttgaccttatgc

SEQ ID NO: 867746 - DNA, 120 bp, Artificial Sequence
  ENSG00000287936_13 (sequence is synthesized)
tcagtgggcatttggaactcctgcaccatcaatcatttgttgaagaccaactgtatgccaggaaaggtgccagacattggggcaaaaggaagactaggattttgttcctttatgagagga

SEQ ID NO: 867747 - DNA, 63 bp, Artificial Sequence
  ENSG00000287936_14 (sequence is synthesized)
ggcaaaaggaagactaggattttgttcctttatgagaggaactctaagtctactatggagcta

SEQ ID NO: 867748 - DNA, 120 bp, Artificial Sequence
  ENSG00000287931_0 (sequence is synthesized)
acgtttatccggactggagcccgccgctcccggccgggtttccgggtggttcgcgctccttctgaattggcagcgaggtcgcggcaggttcgaggctgtctgggaagtgagaatcctccc

SEQ ID NO: 867749 - DNA, 120 bp, Artificial Sequence
  ENSG00000287931_1 (sequence is synthesized)
taatggatgtttcacccaattaaataattaactccaagtgttgctaagcatcctcgcctctcaccttccagtcctggaggcgtcctcatgccaggctgcggctgctgctgagacaaggag

SEQ ID NO: 867750 - DNA, 120 bp, Artificial Sequence
  ENSG00000287931_2 (sequence is synthesized)
cctagtgggaggagccaggagtgggggacagtgcccctgatgcttctgtacaggatgagggagataaatgcacctgagagggaaggaattttaaagccagttggagtgaaaatgtcctca

SEQ ID NO: 867751 - DNA, 120 bp, Artificial Sequence
  ENSG00000287931_3 (sequence is synthesized)
tcttctctgggacaggaaatcctttttacctacatagaaaagttacgttattggaatttacatccctcctccataagaaaaaagacatcttctcttccaaatgtccaccatgctaatttt

SEQ ID NO: 867752 - DNA, 120 bp, Artificial Sequence
  ENSG00000287931_4 (sequence is synthesized)
atctctttcttattatatttaactttaaaaatcttgatcattataattgctgtgggtcgtatattcactgtgaatattctgtgagagatgacagttttattcttaataacctgcatatta

SEQ ID NO: 867753 - DNA, 120 bp, Artificial Sequence
  ENSG00000287931_5 (sequence is synthesized)
tatattacccttttttgcagaatcattctttgtagtgttagtgaaatatgccgaatattaaaataggaaccaaactttttataaaatgctgcctctgctgtctcacaatgcctaatgcta

SEQ ID NO: 867754 - DNA, 120 bp, Artificial Sequence
  ENSG00000287931_6 (sequence is synthesized)
cctctaaacgatagttattattcttttctgtcatataaagaaacatagtcatgccaattggttttttgccactatatatccagtgggaatcacacagagaatcaattcattacaatgata

SEQ ID NO: 867755 - DNA, 120 bp, Artificial Sequence
  ENSG00000287931_7 (sequence is synthesized)
aattacaccattaaatagtatattatgccagaataatctagaaggtcatgaaagaaagattaagagatgacaagagaatctacaatgtgtaagaaagtgcatgatacatgaaaaaatagg

SEQ ID NO: 867756 - DNA, 120 bp, Artificial Sequence
  ENSG00000287931_8 (sequence is synthesized)
ttttggtttgatatctaccaaatatgttaaatgaatatataaccctgtaaaaattgaaaaattacatacttgtaaaatcagaataaaacttgagatactcatcttttgtataacttacat

SEQ ID NO: 867757 - DNA, 120 bp, Artificial Sequence
  ENSG00000287931_9 (sequence is synthesized)
gaaattgtaccaagtgatgactttttaaatacagttctagttatttcatatttctactcaagtaatgtggtttgctccataggagttatttgaaaataaacctcttttcaaatgctcaaa

SEQ ID NO: 867758 - DNA, 120 bp, Artificial Sequence
  ENSG00000287930_0 (sequence is synthesized)
tgaagatggcaccaacaggaaatgagggtggcattgtcacctccaatttgggcagaaaaaaagcactgttgatggtaaaatcccattttattcattggaatttctgtgcaactacacatt

SEQ ID NO: 867759 - DNA, 120 bp, Artificial Sequence
  ENSG00000287930_1 (sequence is synthesized)
ttgttttgtttacattttcttttaaaataacgaggagagaggaagctgaaatggatcaggaagaaaagcaattgatagcttagcatccacatatcagtgagaacattcacaattgcaaaa

SEQ ID NO: 867760 - DNA, 89 bp, Artificial Sequence
  ENSG00000287930_2 (sequence is synthesized)
ttgcaaaatcgtggaccaatcgcactgtaatatatatgtacaatgggatactactcagctataaaaaggaatgaattaacagcatttgc

SEQ ID NO: 867761 - DNA, 120 bp, Artificial Sequence
  ENSG00000287930_3 (sequence is synthesized)
ggatgagattggacatattattctaaatgaaataactcaggaatggaaaactgaacgtcatagagccagcatttaaagtgtaaatgatgggctacggctttttctccctcctcactgcta

SEQ ID NO: 867762 - DNA, 120 bp, Artificial Sequence
  ENSG00000287930_4 (sequence is synthesized)
aggtggtagcctttcttccaccctgaactacttgcaccaaaatgaaagaagtaacatggtctgaattatgggtcaccaattcttctgaagcttactggtatctgctttcaacacgcttag

SEQ ID NO: 867763 - DNA, 120 bp, Artificial Sequence
  ENSG00000287930_5 (sequence is synthesized)
aagcctggatgcctcttgggatagtgtagtgaatttttgtaattttgtgttgcttgacatcaattttaaatacaagtttaactttctcagaccagaagcagggctcagtcacccttgact

SEQ ID NO: 867764 - DNA, 120 bp, Artificial Sequence
  ENSG00000287930_6 (sequence is synthesized)
cagtttccacttctgcaccacacccaaaaggctcaagctggtggccagagataagaacctagaggcatctctcctacttggaagactgggctcccggctttcccatggcttcctgtacaa

SEQ ID NO: 867765 - DNA, 120 bp, Artificial Sequence
  ENSG00000287930_7 (sequence is synthesized)
ggatcatcaggcatttgcttgtgaacttagtgccccacaccctattcccttgttcgtgctgccagtcaccaggtgtgctctctgcctgaactcttcattcctgcctcttcatgtctgcaa

SEQ ID NO: 867766 - DNA, 120 bp, Artificial Sequence
  ENSG00000287930_8 (sequence is synthesized)
gacccagggatataggactgctctgctgactcagtataccctccttgccccggtctgtaaagaaaatatttgaacttgtttcctgctgtggtgatgtaatgaatgtgtaccttctatctg

SEQ ID NO: 867767 - DNA, 120 bp, Artificial Sequence
  ENSG00000287930_9 (sequence is synthesized)
aagaactaggggctaccacagactgggtttgctccaggctgctggggagaaaacaaggtcaggctcccagcaccagagcaatggtcagacaaccataaattggacacgggtcagatgaga

SEQ ID NO: 867768 - DNA, 120 bp, Artificial Sequence
  ENSG00000287930_10 (sequence is synthesized)
gtcacaagggcatctgccagtataaacaagcttcccatgtgagggactcctgggcacagattggacaactaggcattataccatctgtcaaataataaaggcatctcatgaaaggcacat

SEQ ID NO: 867769 - DNA, 120 bp, Artificial Sequence
  ENSG00000287933_0 (sequence is synthesized)
agatggggacaggagctggtgagagatggttcatttgtggacactgctgaaggaagaggcaaagcaatgtgtctggaaatgaggtagagtgaagaaaggcccaactgaagacactttcct

SEQ ID NO: 867770 - DNA, 120 bp, Artificial Sequence
  ENSG00000287933_1 (sequence is synthesized)
gccttgctttgcagatttggaggaaaacagaatgaatcctacacatgtgtacaaacccgcaaatgaggggaaagcacagggagcttgtgtcaaattctccagcaaagatgtgcacagtta

SEQ ID NO: 867771 - DNA, 120 bp, Artificial Sequence
  ENSG00000287933_2 (sequence is synthesized)
gaattgaaaagcaacgggataaacaaggaaagtgcaaagaggatcatgtgttgttcttgtgtataaaagattccttgaagcatcttggattaagtcgtgcgcaagatggctgaataggaa

SEQ ID NO: 867772 - DNA, 67 bp, Artificial Sequence
  ENSG00000287933_3 (sequence is synthesized)
gtgcacagaagacaaactaagcttcacaagcaaaggagcaataaaatcctttacagacaagcaaatg

SEQ ID NO: 867773 - DNA, 66 bp, Artificial Sequence
  ENSG00000287933_4 (sequence is synthesized)
ctaaaagacacagactggcaaattagataaagagtaaagactcattgatgtgctgtattcaggaga

SEQ ID NO: 867774 - DNA, 120 bp, Artificial Sequence
  ENSG00000287933_5 (sequence is synthesized)
ataaagagtaaagactcattgatgtgctgtattcaggagatccatctcacgtgcaaagacacatacaggctcaaaacaaaggaatgggggaatatttaccaagtaaatggaaagcaaaaa

SEQ ID NO: 867775 - DNA, 77 bp, Artificial Sequence
  ENSG00000287933_6 (sequence is synthesized)
ggaatgggggaatatttaccaagtaaatggaaagcaaaaaaaaaagctaaaaatcaaaaaagacaaagaagggcatt

SEQ ID NO: 867776 - DNA, 74 bp, Artificial Sequence
  ENSG00000287933_7 (sequence is synthesized)
agggatcaatgcaacaagaaaagctaacaattctaaatatgtatgcacccaataagacttagactctcacacaa

SEQ ID NO: 867777 - DNA, 120 bp, Artificial Sequence
  ENSG00000287933_8 (sequence is synthesized)
ttaatattagacagaccaaaatgagacagaaaattaataagggtattcaggacttgaactcatctcttgaccaagcggacctaataaacatctacacaactctccaccctgaatcaatag

SEQ ID NO: 867778 - DNA, 90 bp, Artificial Sequence
  ENSG00000287933_9 (sequence is synthesized)
ctaataaacatctacacaactctccaccctgaatcaatagatgtacattcttctcagcaccacattgcacttattctaaaagtaacaaat

SEQ ID NO: 867779 - DNA, 63 bp, Artificial Sequence
  ENSG00000287933_10 (sequence is synthesized)
ataactgagatccaagagtggtttattgaaaagattaacaaaatagatagaccgctagacaga

SEQ ID NO: 867780 - DNA, 86 bp, Artificial Sequence
  ENSG00000287933_11 (sequence is synthesized)
aacccttcaaaaaatcaatgaatccaggaagtggtttattgaaaagattaacaaaatagatagaccgctagattagacatgaaaag

SEQ ID NO: 867781 - DNA, 61 bp, Artificial Sequence
  ENSG00000287933_12 (sequence is synthesized)
tcgaaaccagaaagaagttgaatgcctgaatagaccaataacaagttccgaaattgtggca

SEQ ID NO: 867782 - DNA, 120 bp, Artificial Sequence
  ENSG00000287933_13 (sequence is synthesized)
aagtcgaaaccagaaagaagttgaatgcctgaatagaccaataacaagttccgaaattgtggcagtaattaacagccttccaaccaaagaaaacccaggaccagacggattcacagctga

SEQ ID NO: 867783 - DNA, 79 bp, Artificial Sequence
  ENSG00000287933_14 (sequence is synthesized)
tataaaaagttatccaccataatcaagtcggtttcatccttcggatgcaaggcttactcaacatatgcaaaacaataag

SEQ ID NO: 867784 - DNA, 80 bp, Artificial Sequence
  ENSG00000287933_15 (sequence is synthesized)
atataaaaagttatccaccataatcaagtcggtttcatccttcggatgcaaggcttactcaacatatgcaaaacaataag

SEQ ID NO: 867785 - DNA, 84 bp, Artificial Sequence
  ENSG00000287933_16 (sequence is synthesized)
agaaaagtatcacaataaattaggtattgatgaaatgtatctcaaaataataagagcgatttatgacaaacccacagccaatat

SEQ ID NO: 867786 - DNA, 70 bp, Artificial Sequence
  ENSG00000287933_17 (sequence is synthesized)
catactgaacatctctctcaccaatcctattcaacatggtattgaaagttctggccaaggcaatcaggca

SEQ ID NO: 867787 - DNA, 84 bp, Artificial Sequence
  ENSG00000287933_18 (sequence is synthesized)
atcatctcattgggactgtttagacagttggtgcagcccacagagggcaagcagaagaatgaggcgtcgcctcacccaggaagc

SEQ ID NO: 867788 - DNA, 120 bp, Artificial Sequence
  ENSG00000287933_19 (sequence is synthesized)
gggcaagcagaagaatgaggcgtcgcctcacccaggaagctcaaggggtcagggaactccttaccctagccaagggaagccgtaagggactatgccgtgaggaacggtgcactccagccc

SEQ ID NO: 867789 - DNA, 120 bp, Artificial Sequence
  ENSG00000287933_20 (sequence is synthesized)
tccagcccagatactactcttttcccacagtctcagaaacccacagacgaggagattcccttgggtgccaatgccaccagggccctgggtttgaagcacaaaactgggcagccgtttggg

SEQ ID NO: 867790 - DNA, 120 bp, Artificial Sequence
  ENSG00000287933_21 (sequence is synthesized)
aagctagctgtaggagtctttttcataccccagtggtgcctggatcaccagcgagacagaaccgttcactcacctggaaagggggctgaaagccagggatcccagtggtctagctcagca

SEQ ID NO: 867791 - DNA, 120 bp, Artificial Sequence
  ENSG00000287933_22 (sequence is synthesized)
gatcgcacccccacggagcccagcaagctaagatccactgacatgaaattcttactgccagcacagcagtctgaagtctacctgggacactagagcttggtcagggaaggggcatccacc

SEQ ID NO: 867792 - DNA, 89 bp, Artificial Sequence
  ENSG00000287933_23 (sequence is synthesized)
aaacaaagccaccaggaagttcgaactaggcagagcccaccacagcactgcaaagccgctgtagccagatggcctctgtagccaaaggc

SEQ ID NO: 867793 - DNA, 120 bp, Artificial Sequence
  ENSG00000287933_24 (sequence is synthesized)
cctcctctctgggcagggcatctctgaaacaaaggcagcagccccaatcaggggcttatagataaaattcccatctccctaggacagaacacctgggggaaggggcaggtatgggcacag

SEQ ID NO: 867794 - DNA, 120 bp, Artificial Sequence
  ENSG00000287933_25 (sequence is synthesized)
acagcttcagcagacttatacattcctgcctgccagcaaagggaggcccactagactagcagcagatctctctgcaaaaaccccacatgccagaatagagtgggggacaatattcaacat

SEQ ID NO: 867795 - DNA, 79 bp, Artificial Sequence
  ENSG00000287933_26 (sequence is synthesized)
ttaactcaagatgcattaaagacttaaacgtaagacctaaaatcataaaaaccctagaagacaacctacactaaaagaa

SEQ ID NO: 867796 - DNA, 68 bp, Artificial Sequence
  ENSG00000287933_27 (sequence is synthesized)
aagtcaggaaacaatagatgctggagaaataggaatgctttacaccgttggtgggagtctatccagaa

SEQ ID NO: 867797 - DNA, 86 bp, Artificial Sequence
  ENSG00000287933_28 (sequence is synthesized)
attgaacaatgagaacatgtggacacagtgaggggaacatcacacaccagggcctgcaggggggtagggggctaggggagggatag

SEQ ID NO: 867798 - DNA, 80 bp, Artificial Sequence
  ENSG00000287933_29 (sequence is synthesized)
ggtggtaggtgatgggttaatgggtgcagcaaacaaccatggcacgtgtatacctatgaaacaaacctgcacattctgca

SEQ ID NO: 867799 - DNA, 120 bp, Artificial Sequence
  ENSG00000287932_0 (sequence is synthesized)
agtcaccacaaaggccagagctggtcctagagtctggcaaaaggctgagcatgaaacttccaatggtgccaggcttccagcaggaggaatagaggctgtggtaaaggaaaccgttggcaa

SEQ ID NO: 867800 - DNA, 120 bp, Artificial Sequence
  ENSG00000287932_1 (sequence is synthesized)
atgaaagaaaccagaaactgtcactacccataacaacgaaacaacaaaaaaatttacagaaaaggaaggggagacaaaggaaattgtttaaagtggttgaagcctgtacagtctgatgtg

SEQ ID NO: 867801 - DNA, 120 bp, Artificial Sequence
  ENSG00000287932_2 (sequence is synthesized)
atcattaggcgtgagggtgccgcagcatggtggtgcctaagacactgactccaattttccagtgagaacaggaaggctttaagcaccaaagccatgctgtccagtaatactgctgagcaa

SEQ ID NO: 867802 - DNA, 120 bp, Artificial Sequence
  ENSG00000287932_3 (sequence is synthesized)
gaaagcttttcttgaaggaagagaatagcgtttaattgagactatttttgtcagtctcctaacatgctcctcagaccactaatatgcaaaagaacctaaggatctggtcaccaagttacg

SEQ ID NO: 867803 - DNA, 120 bp, Artificial Sequence
  ENSG00000287932_4 (sequence is synthesized)
tcaaaagagtttaccccatagtcctttttactgccttttgcagaacaaacgtttaataatgtcgctattgttcattggttatcaagaaataactcattgtaactcagaagtgcttagcaa

SEQ ID NO: 867804 - DNA, 120 bp, Artificial Sequence
  ENSG00000287932_5 (sequence is synthesized)
agaatctatctcatatgtactttctttatttcaagaactttaaggaggcaggttttctacgtgtgttcaccaaagcgccaagattttttttaatattttgagaaaatattttcagtaaat

SEQ ID NO: 867805 - DNA, 120 bp, Artificial Sequence
  ENSG00000287932_6 (sequence is synthesized)
acatcaggagaatctgaacacagtgtagctgaagcatttcatcaccccccaacaagaaaattgctattttgccaactattctaccacattgcagtgtttctaagatctacatttttttca

SEQ ID NO: 867806 - DNA, 120 bp, Artificial Sequence
  ENSG00000287932_7 (sequence is synthesized)
catttatttctaaaaatcaaaatgtgaattgcagtcaactggtgacatcttagatctgatgagatatggtggttctcctggaaaagcaaaagttagtaattttcagcatatcattggcat

SEQ ID NO: 867807 - DNA, 120 bp, Artificial Sequence
  ENSG00000287932_8 (sequence is synthesized)
ccaatgtttaactctgggggggtcaaaagacatcttcaagcactagtgaagaagacatatttaatttgaggacatttttattataatttagtaggtaagtgatgttccttcaaggcattc

SEQ ID NO: 867808 - DNA, 120 bp, Artificial Sequence
  ENSG00000287932_9 (sequence is synthesized)
aaggaacccactctggaatagactaaagagactctgagtcagttagtgttgcccacgagggtcacagccggtcaatggcagacctggactgaggttcctgcccagtctggagggtcaaca

SEQ ID NO: 867809 - DNA, 120 bp, Artificial Sequence
  ENSG00000287932_10 (sequence is synthesized)
cagggtgtgttgtcctgctacctgtcagagcaggcacaaagcaagactcagtgaggcagaccccgatttgctctgaagcatccttctatctgggcattggcagaactcccaaatgagtgg

SEQ ID NO: 867810 - DNA, 120 bp, Artificial Sequence
  ENSG00000287932_11 (sequence is synthesized)
gtaaaggtaccaaaaaagttcagcctcaaatgagtgggtcagtaagacatgagacagtgaaacgttgttcaattgtgggacatgggattggcttggcagagtcactctgctccatgctca

SEQ ID NO: 867811 - DNA, 120 bp, Artificial Sequence
  ENSG00000287932_12 (sequence is synthesized)
gcctgcagcctcctccctggtatcaaggccttcctacttccaggttcatcttttgaaatacatcatttattttcaaaatatactgatgttaataaaaataatgccaaagatatactaaaa

SEQ ID NO: 867812 - DNA, 120 bp, Artificial Sequence
  ENSG00000243187_0 (sequence is synthesized)
cctccggcaccactcccatacttgcatttttctttgcatttttgtttgctaacatttaaagtgtggaatttcgcataaacgtctgtatttcctctgcttgaaaaagggctttgactccaa

SEQ ID NO: 867813 - DNA, 120 bp, Artificial Sequence
  ENSG00000243187_1 (sequence is synthesized)
tctctggaattagatcctgttatcaatgacttccacatggaaagatcattccaaaatgtgtaattaaccaagaaaatgcaaataaaccaatttgtacctgctatttagaggtaagacaca

SEQ ID NO: 867814 - DNA, 120 bp, Artificial Sequence
  ENSG00000286429_0 (sequence is synthesized)
atacagtctgtcactgactgaaatgttattatgtgctgcatgaacgcatctgttaaatgtataaactaaagagttgaaacaaatcccatgtttggccaatgtagaatctaagtagaagga

SEQ ID NO: 867815 - DNA, 120 bp, Artificial Sequence
  ENSG00000286429_1 (sequence is synthesized)
agacatagaactaaatttttcatccttttataactacaaatggatttaaatataatattaagtcttctgttcacatagtacatggttcaaatgtacatagaaagtacatataaatatctg

SEQ ID NO: 867816 - DNA, 120 bp, Artificial Sequence
  ENSG00000286429_2 (sequence is synthesized)
gaggaagattattccaggtggagagaactgcaagaccttgtggcaagaaggggctcagcatgactgacaaatagcaagaaggatgtcagctgtggcactggctaccttgacacatcttca

SEQ ID NO: 867817 - DNA, 120 bp, Artificial Sequence
  ENSG00000286429_3 (sequence is synthesized)
tctgaagaaaaaatacaaagaaggcctgccatgatgacaatttacttcatgaagagaacgggttctgaaacggtcattcttttccatttaaacaatgttaccatctcccaaagaacagct

SEQ ID NO: 867818 - DNA, 120 bp, Artificial Sequence
  ENSG00000286429_4 (sequence is synthesized)
ttggggtaggaaagaacagtatttcatttcaagctggactactcatctaccaaaaaaccattctgaccaaagaaacagatgcagaattacagtcacagctgcattctgcacagaacaagt

SEQ ID NO: 867819 - DNA, 120 bp, Artificial Sequence
  ENSG00000286429_5 (sequence is synthesized)
atggtattctaaattgctaattatactgttaatgattttttaagtgtcattgcagtactttgccacctttgtttaaaaatttttaaaaagcatgtagcaagttttctaaatggtaaattt

SEQ ID NO: 867820 - DNA, 120 bp, Artificial Sequence
  ENSG00000286429_6 (sequence is synthesized)
ctgttttgttaaataccagcgtgtcttccaaagaaaaattccatataaaacccatttattgaaatggcattcatatgtgaatttggaggagcctacttattgactagctatttgttttaa

SEQ ID NO: 867821 - DNA, 120 bp, Artificial Sequence
  ENSG00000286429_7 (sequence is synthesized)
tttactttctcaccaatttacctgcatttaagattactgaggtcataagtatctcagtattagtgtttctatctagatccatagttggtatgaaaagataataaactaacatatgtcatg

SEQ ID NO: 867822 - DNA, 120 bp, Artificial Sequence
  ENSG00000286429_8 (sequence is synthesized)
atatgctggcactgggaatgtgctacaactcaatttacaaaaagtaatggcaacagtacaatttaattttcattgtgataactgtggtgcaatttattacggtgttagtattatgctgtt

SEQ ID NO: 867823 - DNA, 120 bp, Artificial Sequence
  ENSG00000286429_9 (sequence is synthesized)
taatccatgccagcatagctgaggaaggtaattacatttttgatataaaaatgctactaatgttttcatttcattttagcagattatagtatgcagattaaaagtactgccattgtccca

SEQ ID NO: 867824 - DNA, 120 bp, Artificial Sequence
  ENSG00000243230_0 (sequence is synthesized)
tttatacaaaaaccttttattgactgtatttcttctccccataacctggaacccagccagcatctatggcttcctgctgtctgattcttgaaagtggggccttgggaacatgtttggagg

SEQ ID NO: 867825 - DNA, 120 bp, Artificial Sequence
  ENSG00000243230_1 (sequence is synthesized)
ctatggaaggtggggttttctgagtctactgggtagactcagacaatcaatccaaaaactttagaaagggctaagctccacagcactgatctcaaccctgggtgctcattagaatcaact

SEQ ID NO: 867826 - DNA, 120 bp, Artificial Sequence
  ENSG00000243230_2 (sequence is synthesized)
atctctggggcagagactcaggcatcactgtggtttaaagcatcccagactggaagccggaacctttacggaagagcctgaagcagtcagggcttggactagcatccattttagcgactg

SEQ ID NO: 867827 - DNA, 120 bp, Artificial Sequence
  ENSG00000243230_3 (sequence is synthesized)
tccttgtaacagtgggtactgcgcttctctcagcagtagcaatgtcttactctctccaatccatcctcattatgacacaaaaaagcacaggcaaaaactagccaacattagcaggtcatt

SEQ ID NO: 867828 - DNA, 120 bp, Artificial Sequence
  ENSG00000235659_0 (sequence is synthesized)
ggaggagttgaggcgccttgaattttccttcgcgagtttggagaccagccgatttttcatgaagcaagcaagggccgcggtcccggatcctgcaacatatacctcattttctccaggcct

SEQ ID NO: 867829 - DNA, 120 bp, Artificial Sequence
  ENSG00000235659_1 (sequence is synthesized)
ctacccactcctgcacagtttcccaaagtccagcgacctccgaccctccttggggaaaaaaataccagtacccagacacctctgcaccctgttatatgactgggcttgcttcaggaatat

SEQ ID NO: 867830 - DNA, 120 bp, Artificial Sequence
  ENSG00000235659_2 (sequence is synthesized)
cttacaaagaagaagaaggaggaggaacggcttggagtcatgtttacatctagttctactgatccgttcacatctggagagtttatttataactccctctataactctctgtttggaggc

SEQ ID NO: 867831 - DNA, 120 bp, Artificial Sequence
  ENSG00000261189_0 (sequence is synthesized)
tcgggctgggaatgcgtggcccggcttttgaggatttcctcggtccccgggcggaaatagctggaatggaggggcctctcgattggagacttactggtcaaatatttacttttgttgatc

SEQ ID NO: 867832 - DNA, 120 bp, Artificial Sequence
  ENSG00000261189_1 (sequence is synthesized)
actggaaacgctacctaccacgcattgactaggaccacagtgaggagggaacgctttagatgatagagttttgtttgggggcttttttttgttttgttttattccaggaattcaggaaat

SEQ ID NO: 867833 - DNA, 120 bp, Artificial Sequence
  ENSG00000261189_2 (sequence is synthesized)
tgccccagaagtccgatttctgatgtgtaaaacctttttttacagaaaaccacgacttcctggaaaagtcttcaccgtaaatattaatctctttggcatgaagaggaaaacactgcagct

SEQ ID NO: 867834 - DNA, 120 bp, Artificial Sequence
  ENSG00000261189_3 (sequence is synthesized)
ttccctttcgatggtctttttaaacgaggagtaaagatttcaacgccaggtccattttccaaattttgtaccagaaccttgaggatgcttgtctctcgcgcgcttctccgcagaccgaac

SEQ ID NO: 867835 - DNA, 120 bp, Artificial Sequence
  ENSG00000261189_4 (sequence is synthesized)
cctctccggaactcagagctgttcacccaagtcagcggaggaggcctcctgggacttgagcctgagggtggcgaagaaccctaggcagagatcatcaacttggtaccgatgagtgacgcg

SEQ ID NO: 867836 - DNA, 120 bp, Artificial Sequence
  ENSG00000261189_5 (sequence is synthesized)
gagcttgaacattccagcgacttgctccagggccactcccagttaagaggctgagtgttaactgcaagaggctgagtgttaactacgccgttggctccaggaaccgaaccgggtttggat

SEQ ID NO: 867837 - DNA, 120 bp, Artificial Sequence
  ENSG00000261189_6 (sequence is synthesized)
acagacccagtcacaccatccatgaaaagctgtttctataatatgaaaaattgttaaatgacgctttagtaaaagccatttaaagatcttttctaataaatttttcatctttccaaacaa

SEQ ID NO: 867838 - DNA, 120 bp, Artificial Sequence
  ENSG00000231574_0 (sequence is synthesized)
gccactgagagtgaaagaaaattccccctttgcacaatgcctttcacttaaatagcatttggatttcttaaaatccacaaagtttatattagagcgtcatccattaatgctttggctagg

SEQ ID NO: 867839 - DNA, 120 bp, Artificial Sequence
  ENSG00000231574_1 (sequence is synthesized)
tatattagagcgtcatccattaatgctttggctaggagggggtctatcgccctggttggagtgcagcagtgtaatcatagctcactgctgccatgaacttctgggctcaagcgatcctcc

SEQ ID NO: 867840 - DNA, 120 bp, Artificial Sequence
  ENSG00000231574_2 (sequence is synthesized)
gagccaccgtgcctcatcgtaagggtcttaaaagaaaccctatttcatactttcttgatgcacttgatatggattatataaatctatggacaaaaatgacatcagtacaatggaatattg

SEQ ID NO: 867841 - DNA, 120 bp, Artificial Sequence
  ENSG00000231574_3 (sequence is synthesized)
gagttttctaccataatctctgcatagtgcactgattttgacaatcacctatggatgaaaatacatttgccagagtctaggagttaaatggaaaagttaacagcacaccgttggagaaaa

SEQ ID NO: 867842 - DNA, 120 bp, Artificial Sequence
  ENSG00000231574_4 (sequence is synthesized)
atatctgggagtagatgcattcaagggagtaagaagaacaattacctgcatcacctcacccccagggtccacttcttagtgccaagatagactcccttcagcaggcaatttctcccatgg

SEQ ID NO: 867843 - DNA, 120 bp, Artificial Sequence
  ENSG00000231574_5 (sequence is synthesized)
ggaaaaggagagtataatgagtgagtatccagcttttccagctgtgtgaggcacatcccaagaagcccatctttctttcactcaactcagaatattgagggtattagcatggctaagtgg

SEQ ID NO: 867844 - DNA, 120 bp, Artificial Sequence
  ENSG00000231574_6 (sequence is synthesized)
ctgggacagggcagtagcaggaaagaaaggagaggactcacagcaaccaggacttgaaactcagtacagggtacatatcctttgaagcatttcacagagcccatcaggaggcccacccat

SEQ ID NO: 867845 - DNA, 120 bp, Artificial Sequence
  ENSG00000231574_7 (sequence is synthesized)
gaaccacttgggacaccatatctgtagcatctccctgcaactggcccataggagcccccgatgttttgtgcatattccccttccctttctcctatagtcagttgcctgcacatgcactcc

SEQ ID NO: 867846 - DNA, 120 bp, Artificial Sequence
  ENSG00000231574_8 (sequence is synthesized)
aaattgagcatttcagggcactgtcctagaggaaacaaacagaaagctttcaggacccagtttggttttgtggatttaagagaagacacacaatcatcagaatttcttctccacccatcc

SEQ ID NO: 867847 - DNA, 120 bp, Artificial Sequence
  ENSG00000231574_9 (sequence is synthesized)
aagaagtgtggattgggtgaatccatagaaaagatctgagagagcctcagattccctataggctcactgttgaagatatttctctcaaatccagtcagtaaagactagagaaagtgactc

SEQ ID NO: 867848 - DNA, 120 bp, Artificial Sequence
  ENSG00000231574_10 (sequence is synthesized)
tttcttcaaatgtgaagacagcagtgcaagactttgaggaacatgaaaaatcaaggacacctagtaccaccaaaggaacataattttctggtacccaaccacaaagaaatggagatacac

SEQ ID NO: 867849 - DNA, 120 bp, Artificial Sequence
  ENSG00000231574_11 (sequence is synthesized)
aaattgtctgacaaagaattcacaacaattgttttaaggaagtcagtaagctacaagagaacacagagaacttaatgatattaagaaagcgacacatgaacaaaataagatgttcaacaa

SEQ ID NO: 867850 - DNA, 120 bp, Artificial Sequence
  ENSG00000231574_12 (sequence is synthesized)
aaagatagaaattattaaaaacaaccatgattttcgagctgagaatacaatgaatgaaatggaaaacacaatagagtttcaatagcagacttgatcaagcagaagaaagggtctgtcaac

SEQ ID NO: 867851 - DNA, 120 bp, Artificial Sequence
  ENSG00000231574_13 (sequence is synthesized)
tcaaatactagtcatttgaaattattcagtaaaagaaataaaaaggaatgaaaaatgcttatgcgattgatgcaacaccatgaagagtagtcatatatgcactatgggagtctcagaaaa

SEQ ID NO: 867852 - DNA, 120 bp, Artificial Sequence
  ENSG00000231574_14 (sequence is synthesized)
agaaagagataaaggggaagaaaactaacttaaagaactagatcagtctctccttatctgtagttttgctttccttggtttcaggtacagtacaatgatatgttttaagagacagacaat

SEQ ID NO: 867853 - DNA, 120 bp, Artificial Sequence
  ENSG00000231574_15 (sequence is synthesized)
gaaagagaacatgcaaatattgacataatttttattacagtatattgtcatagtttttctattttgttattagttgttattctcttactgtgcctaatttatacattaaactttatcata

SEQ ID NO: 867854 - DNA, 120 bp, Artificial Sequence
  ENSG00000231574_16 (sequence is synthesized)
actcagtcagactctgacactcatcaggatgacaagcctgcaaataggatctacccattttgggtatgcactccactgagagctattctgtcactcaataaagctcctttctgccttgct

SEQ ID NO: 867855 - DNA, 120 bp, Artificial Sequence
  ENSG00000231574_17 (sequence is synthesized)
actccaaagaacacatttaacagccgggaagaaaattgtaggaaaagagagcactttggcacggaagggaatgcaaacttgatcttgactttaaggtcaaagcattttcagaatgtgcag

SEQ ID NO: 867856 - DNA, 120 bp, Artificial Sequence
  ENSG00000231574_18 (sequence is synthesized)
tcagcagagaattgaaaaaaaaaatcaatgtgaaacatattagagaagaataaggggaagagtgatgcagaagtgctgggaagtcatgcagggattggaaaccacaaagattctacagaa

SEQ ID NO: 867857 - DNA, 120 bp, Artificial Sequence
  ENSG00000231574_19 (sequence is synthesized)
agggtcttaaaagaaaccctatttcatccaattggatggtgctttttccagacccacaaatggctgcccatggaccaagcagtatgtacttcctccattctgagcccatgaaaaccccag

SEQ ID NO: 867858 - DNA, 120 bp, Artificial Sequence
  ENSG00000231574_20 (sequence is synthesized)
aaaggtacttagacatgttccccacaggatgtgttaaggtgttggccaatcatcaaatattgtcactccaaagaacacatttaacagccgggaagaaaattgtaggaaaagagagcactt

SEQ ID NO: 867859 - DNA, 120 bp, Artificial Sequence
  ENSG00000231574_21 (sequence is synthesized)
aacaggtgatcctagtgggagccctatatgctactgagttagtggggtgggagcctgtgctcccaggcatagctgcagctgcccagccatggctccagccctaggcatacctgtgctctc

SEQ ID NO: 867860 - DNA, 120 bp, Artificial Sequence
  ENSG00000231574_22 (sequence is synthesized)
aggggccctggaagtcccctgcccttacaggcttggaagtgcctgctcccattccctggcctctttccactgctggcacctgctctgtggcagagcaaagttgtggatgtgttgtgatag

SEQ ID NO: 867861 - DNA, 120 bp, Artificial Sequence
  ENSG00000231574_23 (sequence is synthesized)
ctgagcctgggagctgttgtgacgtggtcaggtgtgtgtgttcagggcagttctgatacaccagactccccactgcctttgccccctctggaaactgcttctgaggctgaaactttggat

SEQ ID NO: 867862 - DNA, 120 bp, Artificial Sequence
  ENSG00000231574_24 (sequence is synthesized)
attaatgagcaaggatggtgggggaggccaggacggctgagggcagctaggtgtgggcctgtggacaccccttagtgcggacagtctgggtgctgtggatggcatgttgatggcagcgag

SEQ ID NO: 867863 - DNA, 120 bp, Artificial Sequence
  ENSG00000231574_25 (sequence is synthesized)
aggcagacatgttcctaggtgggaacgggtgggtccctggtgaaacctcaccttcaagccagggacagcttgaagcatgggggcctggctgccagttccggttgcagtctgtgacctgga

SEQ ID NO: 867864 - DNA, 120 bp, Artificial Sequence
  ENSG00000231575_0 (sequence is synthesized)
gctttgatttatacagacttgtaggtttccctgtgaatctgggagcaggatgaagtgatgctcaaaggatcaagatcaaaaggcagtggaaagaaatgaaggatgcaggagaaagatgga

SEQ ID NO: 867865 - DNA, 120 bp, Artificial Sequence
  ENSG00000231575_1 (sequence is synthesized)
aagaaagcaacatggggaacatgcaagtggtgagggctaagaaatcttaataatgaagaaaccatggggactaagaggaagttgaagaaagctgctggagcaacctagagagacagaaga

SEQ ID NO: 867866 - DNA, 120 bp, Artificial Sequence
  ENSG00000231575_2 (sequence is synthesized)
gagcagagaagtgagtgaaaggaataaacctgggatgagagagaggatctgcactgtaactctgatattgaccaagaggattgataacctcccttttattaaatgccacatacatgccaa

SEQ ID NO: 867867 - DNA, 84 bp, Artificial Sequence
  ENSG00000279954_0 (sequence is synthesized)
ggcgcccaccaccacacctggctaattttgtagtattagtagagacagggtttctgcatgttggtcagattgttcttgaactcc

SEQ ID NO: 867868 - DNA, 65 bp, Artificial Sequence
  ENSG00000279954_1 (sequence is synthesized)
cccaccaccacacctggctaattttgtagtattagtagagacagggtttctgcatgttggtcaga

SEQ ID NO: 867869 - DNA, 120 bp, Artificial Sequence
  ENSG00000279954_2 (sequence is synthesized)
gtttttaaaagtaaaatccttcagaccttcctgggggcaaataataaatgccaagatgtggtgacccagaagacaggcctgtccctcggtcaccgcaggatcccttctctggacattgag

SEQ ID NO: 867870 - DNA, 120 bp, Artificial Sequence
  ENSG00000279954_3 (sequence is synthesized)
gctccttggaggagagcaggtgtctggtccgcaggcagatgtctgatgcgagggacccacggtaactccaccctgcagaccgggccacagaggcagcttctccggggccgcttggctctg

SEQ ID NO: 867871 - DNA, 120 bp, Artificial Sequence
  ENSG00000279954_4 (sequence is synthesized)
aggtgagtttctaatgggaaaagaggtcttgtctgtgggttggagaaataagcccaaatcccctttctgggacctgatgttcagctttcgtgtcaatgcacacatcccagaaacaggggc

SEQ ID NO: 867872 - DNA, 120 bp, Artificial Sequence
  ENSG00000279954_5 (sequence is synthesized)
cagccagagactccaggaagtgggctccccctcagggtctccccaggtccggcatgggctctggctcttcgaggatcttcctagagaaaggcaccgtgctcaggccagtggcccgagggg

SEQ ID NO: 867873 - DNA, 120 bp, Artificial Sequence
  ENSG00000279954_6 (sequence is synthesized)
acaggctcaggaacccgctcctagctggctgcacgggggaaggggttgggggaagaggggcaggcccttactcctcactcccacccctgccccgccccagtctacgcatttgggaagcaa

SEQ ID NO: 867874 - DNA, 120 bp, Artificial Sequence
  ENSG00000279954_7 (sequence is synthesized)
ggctggaagagacccagccgcctggcctgcagcccacatccatccccatgggaccagagaacccacagagggtcgtccagaacacctgggacacagaggcagttttgtgggtagagccag

SEQ ID NO: 867875 - DNA, 120 bp, Artificial Sequence
  ENSG00000279954_8 (sequence is synthesized)
gcacacatccagcggcagaggccctaggagcagggctcagggtagagactgagtgccctgaggcagcttctgggggtcttcaaaagaggacccatctcctggacacacagaacccacttt

SEQ ID NO: 867876 - DNA, 120 bp, Artificial Sequence
  ENSG00000279954_9 (sequence is synthesized)
gcccatgcaaagcccggggcccagtcctgatgacttaggagcaaagagacttgggagttatggtaaaattggggatactaacagcttccttgcagacctgtcaggaggactggattagaa

SEQ ID NO: 867877 - DNA, 120 bp, Artificial Sequence
  ENSG00000279954_10 (sequence is synthesized)
tgggcacccctaagcatcttcccatgtgtggagggggcgctcagagccctgatgtccttttcctatttgttccccgcaggagtggggtgaccagaagattctgggtctactggattttga

SEQ ID NO: 867878 - DNA, 120 bp, Artificial Sequence
  ENSG00000279954_11 (sequence is synthesized)
aaaaaggcagacagcagagtgagacggagacagtctggagagccagccagcagaactctgcacagctgtattctccacctcccaccttgcgccctgctgtccccggggtcgtggaccagc

SEQ ID NO: 867879 - DNA, 120 bp, Artificial Sequence
  ENSG00000279954_12 (sequence is synthesized)
gctgcagggtgtaacctgaggccctagcagggcccatggagcttctgctgcttttccccgggggccctgatgtgacatttctcgtccaggaagaggatggaaggtgaggtccctctccac

SEQ ID NO: 867880 - DNA, 120 bp, Artificial Sequence
  ENSG00000279954_13 (sequence is synthesized)
actgcacctgccaccctggggctccccacccacctgcgcaggagggaggagcaggggacacccttgggagggcgtttcctttaaaaacatcagaccacgaaccagggcccaatggggcgg

SEQ ID NO: 867881 - DNA, 120 bp, Artificial Sequence
  ENSG00000279954_14 (sequence is synthesized)
cccagaggcagtggaagggaaagcggagctcgatctgggtttcggccccagcaagtcccctcccccggttgacccaaatttcccactataaagtgaaggcgggagctggactccagctcg

SEQ ID NO: 867882 - DNA, 120 bp, Artificial Sequence
  ENSG00000279954_15 (sequence is synthesized)
cggaggaaatccggccgccgcgcagcgggctgaggtggaaggtgtcatcggtcatcctcgtcatcttgatattcacctgggacccttgtgggaacctctttccctagtttgccaccagct

SEQ ID NO: 867883 - DNA, 120 bp, Artificial Sequence
  ENSG00000279954_16 (sequence is synthesized)
ctgcctctccctcacccacctgtgacccaagcacattctcgtgacctctctgagcctcagtttccttatctgtcaagtcgagatcacagcactgacctccagggctcactgggaagcggg

SEQ ID NO: 867884 - DNA, 120 bp, Artificial Sequence
  ENSG00000279954_17 (sequence is synthesized)
gatgaggtggtgcgcattgcagtgactggcaccggctgtgagctcagaacacggcggctggagctatccgccagcaactcttaagccaaagccctcaccgggctgcctgccagctgtcag

SEQ ID NO: 867885 - DNA, 120 bp, Artificial Sequence
  ENSG00000279954_18 (sequence is synthesized)
agaccaagctccaggtgacccctccaccgagagcagttcccccttcccccttctgagcgccaggcaggtccacagccgccctgctccggagtgggtcccaggtggcaggcgggggtagag

SEQ ID NO: 867886 - DNA, 120 bp, Artificial Sequence
  ENSG00000279954_19 (sequence is synthesized)
aggattcagggtgctgccttctgtccttcacaccctgcaaggggccccttccaatcagaagctgtttccatggcaaccctgctgggccccatcctcccctttgcagccaaagactccacc

SEQ ID NO: 867887 - DNA, 120 bp, Artificial Sequence
  ENSG00000279954_20 (sequence is synthesized)
tcgggccggcctcgccactgtccctccttgaaggcatgattggtctcttctcccctgtgagtatgtccaacacgtttgaacagagtcgcttctcacagcccatcctcaaagccagcaccg

SEQ ID NO: 867888 - DNA, 120 bp, Artificial Sequence
  ENSG00000279954_21 (sequence is synthesized)
gggcccaacaccccgccccccacacgccgcccctctctcagctgtggccccgcctgcccagcagggcagattgcctggcaagcagtcagcttgtaattagcactcattagcgctccagca

SEQ ID NO: 867889 - DNA, 120 bp, Artificial Sequence
  ENSG00000279954_22 (sequence is synthesized)
atctgcagacaagtcacctgtggccaagtcccttctgaacgattgcaatgattcctgtgggtttcaaacatcaaaggatgcggagctgagcgagaggcaggcagcgccctttgtgcttat

SEQ ID NO: 867890 - DNA, 120 bp, Artificial Sequence
  ENSG00000279954_23 (sequence is synthesized)
ttctgccccttcccgctcttgcaccccagaaagttctcatctgtggaatgggccggggcagggagggtggctgaggtagcactcgcagcgggcctggggagctgaatggggctgggtcct

SEQ ID NO: 867891 - DNA, 120 bp, Artificial Sequence
  ENSG00000279954_24 (sequence is synthesized)
ggcctcccagccagctgcccttcctgagaaagcatctctgcaaacacggtgtgtccacgaggtccctgcaggaggatactcacatccagccagaagatgaggctgctgtgtcggtggcca

SEQ ID NO: 867892 - DNA, 120 bp, Artificial Sequence
  ENSG00000279954_25 (sequence is synthesized)
aggccttccagtgccggggctggagcgcctgcaggtggtgtaagcagagggggcgtcgtcctcggggagctcacagcctggggagaggcagaggggtcgtggggtagacccagggcccag

SEQ ID NO: 867893 - DNA, 120 bp, Artificial Sequence
  ENSG00000235972_0 (sequence is synthesized)
tgcagataaagatgctctgagagtaaagagcagaggggtgctctctggtggcccagcagttctgccccacgggagaggtttctcgtctgctgcaacgtaaaccaataggactctgcttca

SEQ ID NO: 867894 - DNA, 120 bp, Artificial Sequence
  ENSG00000235972_1 (sequence is synthesized)
tcccagaaccaaggggaccaggaatgaaggtcagagtgaggagctgtctgagtgtttcagatcacacagtgacatcctgattgacgacttcagaaatccttcatgagcgaggaggcagcc

SEQ ID NO: 867895 - DNA, 120 bp, Artificial Sequence
  ENSG00000235972_2 (sequence is synthesized)
cctgaggtgacagccccaaccacctcgaggacatcacatcagcaggagcagccacgtgggtatttgtttctgtccctggattctaagttcctgaaggactggacacatccatcacccaca

SEQ ID NO: 867896 - DNA, 120 bp, Artificial Sequence
  ENSG00000235972_3 (sequence is synthesized)
ggtttaagacacatgggaggaatccaatcatcagactaccccagggctgctagaactcagaaagggatccccatcatttgggggattggacgaaggtcttcatttctgttctttccagca

SEQ ID NO: 867897 - DNA, 120 bp, Artificial Sequence
  ENSG00000235972_4 (sequence is synthesized)
ccaacctccatggctccactcatccctactccttcctcctgttaagattggccagtcaggagaggtgtagaggcaggagcagctacacctggtctcctccaccacccacagtggggtgca

SEQ ID NO: 867898 - DNA, 120 bp, Artificial Sequence
  ENSG00000235972_5 (sequence is synthesized)
cccttgatgggacctggtgagcatgacagcccctgagccatggggacctggagcctctgcagccccacagagaccaggaggagctgttcagccacttgcagagacagccagagagtgctt

SEQ ID NO: 867899 - DNA, 120 bp, Artificial Sequence
  ENSG00000235972_6 (sequence is synthesized)
caaggactgcatggagctctgcagaagcagggcgttcagggccctcttttgaggggcatgagatatttaggcaggatcatgtctacaaaagaggctgtcactttggcttatcaatacttt

SEQ ID NO: 867900 - DNA, 120 bp, Artificial Sequence
  ENSG00000286426_0 (sequence is synthesized)
gtggagggccttctggaggacagcagcatggaataccacctcaaaaagaacacacagagaaccatccctgccatcgctcccttcttctcgtctcctcccagtgtctcccaccccagagaa

SEQ ID NO: 867901 - DNA, 120 bp, Artificial Sequence
  ENSG00000286426_1 (sequence is synthesized)
gcttaagaccctgaggaagggaggcgtggaggtgacaaagcagacctccccgccactgccgacagcaggaattgtctggaatttttgtggaatcatgagaaaatttgaacacaaatatct

SEQ ID NO: 867902 - DNA, 120 bp, Artificial Sequence
  ENSG00000286426_2 (sequence is synthesized)
cccgtggactaactgagcaagaactcatttatcaccaaggggatggtgccaagccattcatgagggatctgcgcctgtgatccgaacaccttccactaggctccacttccaacactggga

SEQ ID NO: 867903 - DNA, 120 bp, Artificial Sequence
  ENSG00000286426_3 (sequence is synthesized)
tgcctcttggctaaaaagagtttgaaaatcctgactcggcccattgtgttactttaaagatctgcgtgcctggggccttgggcttgatgaagctgagagaaacgggaaagcaagctttgc

SEQ ID NO: 867904 - DNA, 120 bp, Artificial Sequence
  ENSG00000286426_4 (sequence is synthesized)
tgttactgtgtgagctttgggatcccacatgacaacaagcaggtgtatagctaataatggctaacaggaaacctctaagactttagaactcctgctaccaacattctgctgattacctcc

SEQ ID NO: 867905 - DNA, 120 bp, Artificial Sequence
  ENSG00000286426_5 (sequence is synthesized)
accaggacaatcaggtcaaagccaataaaatttagctcctattaattgaggactactctgacatttcaatggaaagattttagattccctgtatcttttcttgctccaaatcccaaatcc

SEQ ID NO: 867906 - DNA, 120 bp, Artificial Sequence
  ENSG00000261182_0 (sequence is synthesized)
agagtgacattggtggcaattagagaagaaacacctatctgacagtgaaaatgaaggcagtgaaaatgaacacaagcctgaagaaataacatgaagtgaattaacaggacaaggcagctt

SEQ ID NO: 867907 - DNA, 120 bp, Artificial Sequence
  ENSG00000261182_1 (sequence is synthesized)
gtaaattgtagtttcgcaatagtttttagaaagaacaaacaaacaattttacctaaaatgaccattgatctttgttgattggctaaatggattccactagcaatgatagtttaaaggatg

SEQ ID NO: 867908 - DNA, 120 bp, Artificial Sequence
  ENSG00000261182_2 (sequence is synthesized)
ataaagcatcatattgcttcaattaaatatataaataacatggtaattcttagaatgtgatttttgatagttttatctttcaaatatatcagtagcatattcacatcccttgtgattctt

SEQ ID NO: 867909 - DNA, 120 bp, Artificial Sequence
  ENSG00000261182_3 (sequence is synthesized)
tgaagctgtttggaaggctgtacaggttataacccataggcagcattttgctctagtttttttcgaccacagaacattgaggcctacactgaatcttcacttgtgccattgtttttcact

SEQ ID NO: 867910 - DNA, 120 bp, Artificial Sequence
  ENSG00000261182_4 (sequence is synthesized)
tgtgtcagtttaaaaatgcatttcacatcttctgtaattggtaatcccattttatatctcttttatttattttctttgcttcagtttattattacatacaatcacatgcagtcctaacag

SEQ ID NO: 867911 - DNA, 120 bp, Artificial Sequence
  ENSG00000261182_5 (sequence is synthesized)
attttggtgacaaatacagtcaggtacaaacatagaaggaattcccacctttatatttgtagaagtattttcaattaccatcactcttgaaacaaaatcacaaagaacatacgggagaaa

SEQ ID NO: 867912 - DNA, 120 bp, Artificial Sequence
  ENSG00000261182_6 (sequence is synthesized)
ttgttattctcattttataaagacacaaatgcccaaagaagtgatatatcctatgtaaggacatacattgctaccttttaaacacaaaaaatgaataaaatccataaaaaatctaagcct

SEQ ID NO: 867913 - DNA, 120 bp, Artificial Sequence
  ENSG00000261182_7 (sequence is synthesized)
aaattttgtcaaatcatactcatgaaacttcacttgtcatcactgagatcctcatctgctttcatttctcaggggtacacacagtaagtctcagattttcttcacactgcctattcataa

SEQ ID NO: 867914 - DNA, 120 bp, Artificial Sequence
  ENSG00000261182_8 (sequence is synthesized)
acatattgatttaacatgggcaaccagatcaagtgaatgctcaatcatgggcataactcttaccttgttgaaaaaccaaactgctgatgcctgaagaaatggtatgtgttagtgtagaca

SEQ ID NO: 867915 - DNA, 120 bp, Artificial Sequence
  ENSG00000261182_9 (sequence is synthesized)
atcagtgcaggagttttatacttcagaaactctctctctgtctctctctggtatctaggcataattaaagtttaattgtgagaaatttccctgataattcctgatttatcaaagttcatc

SEQ ID NO: 867916 - DNA, 120 bp, Artificial Sequence
  ENSG00000261182_10 (sequence is synthesized)
caaaatataattcctacacattaatggtgtcagtactctcagatttgggcttaaatgaataagtcacttctaatataccaaaggaaatatgcttccttggagagtttgaaaagagcagaa

SEQ ID NO: 867917 - DNA, 120 bp, Artificial Sequence
  ENSG00000261182_11 (sequence is synthesized)
taaaatttgagaagaaatataataaatgaagttttcatactatttatatctccttttctgtaaaatgtcctttttagaagtagtagatctagtctaggtacatcataaaattcctaacac

SEQ ID NO: 867918 - DNA, 120 bp, Artificial Sequence
  ENSG00000261182_12 (sequence is synthesized)
ctatggctgaattaaatcaaagccaaatgaccatatggtaaaattattcaccatggaatactgctttttaaaattctttttacttaggctacagtagtccccagtcaatcctgatgcatt

SEQ ID NO: 867919 - DNA, 120 bp, Artificial Sequence
  ENSG00000261182_13 (sequence is synthesized)
aagaatgtctgacgcattagcatattttataattgagctgagaaattatgttactattaatttatttttgaaatattaacttgcttttaaaggaagtacaatgaataaatgtcagaaata

SEQ ID NO: 867920 - DNA, 120 bp, Artificial Sequence
  ENSG00000261182_14 (sequence is synthesized)
tttatgccaacacattgttatgtcaggtatgcccttgaaattccaagctacattaacaagaagactgctgggcctttgaagaaagtttgctttatatccaggcaaattgcagtttgaatt

SEQ ID NO: 867921 - DNA, 120 bp, Artificial Sequence
  ENSG00000261182_15 (sequence is synthesized)
gtgctatggggcaggccaatatgaataaataaagaatggcacaggcatcaaaaaataaactactattaatatgacataattaaagtaatatagttattattaacaataattcagaggaat

SEQ ID NO: 867922 - DNA, 120 bp, Artificial Sequence
  ENSG00000261182_16 (sequence is synthesized)
tatcaagtttatgcttatattgtttgttatgaaattgtattacacttttattttagagaatgatgtttggcgtttaattatgtgtggcaacatttttactgtaagaattctacttaaatc

SEQ ID NO: 867923 - DNA, 120 bp, Artificial Sequence
  ENSG00000261182_17 (sequence is synthesized)
ttgctttgttctaaaatttcaaattatttatggtaagaaaataagccaccttctacacatctttctcttataacatctattttattaaataaacttgtcttttatgttgcttcatataaa

SEQ ID NO: 867924 - DNA, 120 bp, Artificial Sequence
  ENSG00000261183_0 (sequence is synthesized)
aagtacccggacacacgcacgagcgcagaacaaagggccggacatgctccagcccgctccgcctgcgcctcggccttgcgcgcgggggcccgggttacctgcgcagagccagctgtgatg

SEQ ID NO: 867925 - DNA, 120 bp, Artificial Sequence
  ENSG00000261183_1 (sequence is synthesized)
taaagaagtttgtgctgcatgagagagatagcacctgaagaaaatgaggccctggaggatgagagactctaaaggaaaagggaagggcctgctgtcttccagccacgccagcccccaact

SEQ ID NO: 867926 - DNA, 120 bp, Artificial Sequence
  ENSG00000261183_2 (sequence is synthesized)
gccatcctcctgcctcagcctcccaaagtattaggattacagtgcccttggtgtggtggaagcaaggtgccatgtgataagtaagcctccagagaggcctgcatggcaggatccaatgtc

SEQ ID NO: 867927 - DNA, 120 bp, Artificial Sequence
  ENSG00000261183_3 (sequence is synthesized)
ccagagaggcctgcatggcaggatccaatgtctttagccaacagcatctgggaacctgagacctgccaacacccttgtgagtgagcctggaagtggacctcctgctcttgaaccttgagg

SEQ ID NO: 867928 - DNA, 120 bp, Artificial Sequence
  ENSG00000261183_4 (sequence is synthesized)
tgactatagtgctggctgacaccttgactgcagtccctgagctggggggcccagctgatctactcccagaatcccccctactaaaacagtgatataataaatgcttattgtttcaagctg

SEQ ID NO: 867929 - DNA, 120 bp, Artificial Sequence
  ENSG00000261183_5 (sequence is synthesized)
agttttaaaaatattttccaagatcccttcagtgaacatgggatgcttccataatgaagagagagacacaccgtgatgacctccacataccatatttgatgacagtcttccttgagccag

SEQ ID NO: 867930 - DNA, 120 bp, Artificial Sequence
  ENSG00000261183_6 (sequence is synthesized)
aatcatgagcaaataaatggctgtttctgttttaagcttttaaattttgggggtggtttatgtgtcaataataactgaaacagataatatatacagaataaactttagttttaataatct

SEQ ID NO: 867931 - DNA, 120 bp, Artificial Sequence
  ENSG00000261183_7 (sequence is synthesized)
ttttggggaactaatatggccataaatatcaaacctcctacaattttgcacattctttgactttgtagttctacatctataaacttctcttaagggaaatcatggatgccaacaaagaaa

SEQ ID NO: 867932 - DNA, 120 bp, Artificial Sequence
  ENSG00000261184_0 (sequence is synthesized)
tttgtgcagatggggaccctgggaagttagcagcaatggagaaaagcgtggaatgctctccaggtattaacaccactgccaccgccaccctggccatggaacactgcacagggagaaggc

SEQ ID NO: 867933 - DNA, 120 bp, Artificial Sequence
  ENSG00000261184_1 (sequence is synthesized)
aacagagcaaaacaagcatattgcatttctccagctgctccggaagtccttgggacaggaaccatgtgtgtttaggagaacacctccataagcctttggaagcagaaaacaagagcctgt

SEQ ID NO: 867934 - DNA, 120 bp, Artificial Sequence
  ENSG00000261184_2 (sequence is synthesized)
gggcttgagctggaagaagacaacaaagaaatgctagaccaccttacgttagaaaaaagtgccctaatgggggccagaaaggcagagtgagggaagagagaaggaagcggggaaagggat

SEQ ID NO: 867935 - DNA, 120 bp, Artificial Sequence
  ENSG00000261184_3 (sequence is synthesized)
aacagcgggcaggggaaatgtggcaggaaggacagcccaagtggacatgtccaagacttcaaaaaaccagactgtactcagtttgtacccctgtcctttatagcataaatctccatagcc

SEQ ID NO: 867936 - DNA, 120 bp, Artificial Sequence
  ENSG00000261184_4 (sequence is synthesized)
ccagagtttcagcacagctggaacacacacaggggtcttgaatgcaagggctgtgtgagggagggattgtgtgtgtgagggcctatgtgtgtagtgaagtgttcgtagacaaatgttcaa

SEQ ID NO: 867937 - DNA, 120 bp, Artificial Sequence
  ENSG00000261184_5 (sequence is synthesized)
aagaggatgctcagatcattaccgatgccctgtgttgttaagagtttatcatctgtgaatcgaagggtttataacaggataatgacagaaacagcagggtggacaccattgctatcccct

SEQ ID NO: 867938 - DNA, 120 bp, Artificial Sequence
  ENSG00000261184_6 (sequence is synthesized)
ttttgcagaagaggggattaatgcccaaggtcacaagcttatatgtgtctgggctcatccagttcttcacctcctcaacataagttaggatggcactttcctgatcctttgatgttagta

SEQ ID NO: 867939 - DNA, 120 bp, Artificial Sequence
  ENSG00000261184_7 (sequence is synthesized)
acctgtcacttccaggtaatcccatagtggcagcagtaacaacaatggcaacagcagcctggagagcaccgaaatacttaaagctctgagggaagcgagtcttccctccactagagaagc

SEQ ID NO: 867940 - DNA, 120 bp, Artificial Sequence
  ENSG00000261184_8 (sequence is synthesized)
gaaaactaaagacctagctttctaaccagaggacaaaaaaaatggggcttcagtgggccaaaaatgccagaataatctcagaaaggagactgctcaagagagcagttccatattaactcc

SEQ ID NO: 867941 - DNA, 120 bp, Artificial Sequence
  ENSG00000261184_9 (sequence is synthesized)
gaggcttacttctaagctgcacatggtgtgagaactgaactgtgcatgagactatgatccaggccaccaaatggccactgggcaacatacacacaacagattcccatagcactgcaaagg

SEQ ID NO: 867942 - DNA, 120 bp, Artificial Sequence
  ENSG00000261184_10 (sequence is synthesized)
ctttgaaaactgaactgatattagaaccacagtccacaggagaactcgagtctggagcctaattagactgattgcttgcaaaaacaaaacaaaacaaaattcaaaattcgctttaggatt

SEQ ID NO: 867943 - DNA, 120 bp, Artificial Sequence
  ENSG00000261184_11 (sequence is synthesized)
taaacaagacatggatcctcataatgtaatattcaaaatgttcaggacacaatccaaaactacttgacatatgaaagacaagaaaaacttcaacttatagggaaaagaacaatcaacaga

SEQ ID NO: 867944 - DNA, 120 bp, Artificial Sequence
  ENSG00000261184_12 (sequence is synthesized)
tgccacctgcaagatgacacaaatgttgaaattattaaagatgcaaaggcgactattataaacatattccaagaagtaagggaaaattctcttgaaacaaaaaagtctcaataaagacta

SEQ ID NO: 867945 - DNA, 120 bp, Artificial Sequence
  ENSG00000261184_13 (sequence is synthesized)
tagaagatacaaagaaggacaaaagagaaactttttggaactgaaaattacaatgaccgaaataaaatattccctggataagatcaatagcaaaatagagaaagtcagtgaattgaagat

SEQ ID NO: 867946 - DNA, 120 bp, Artificial Sequence
  ENSG00000261184_14 (sequence is synthesized)
tgaatagaaattatccaatctgaacaaaaggaaaaaattaaaaattaatgaacagagtattggaggcatgtgagacaatacgaaaaagtctaatattcatagtgttagagttccagaggg

SEQ ID NO: 867947 - DNA, 120 bp, Artificial Sequence
  ENSG00000261184_15 (sequence is synthesized)
agaaggggaagaataggatgcaaagaaacaaacaaaacccaaaggaaaccgtgcccagatgcatcgtaattaaactgctaaaaactagggcaaaacatcttgaaagcagccagagaaaaa

SEQ ID NO: 867948 - DNA, 120 bp, Artificial Sequence
  ENSG00000261184_16 (sequence is synthesized)
atataaagggaaacattgacttaaataactgtggattcctcaggaaaaaaaagtaggccagaggaaatggaataacatttttaaagtgctgaaagagaaaaaactgtcaatccggaattc

SEQ ID NO: 867949 - DNA, 120 bp, Artificial Sequence
  ENSG00000261184_17 (sequence is synthesized)
aatatccagtgaaaacatccttcaggaacgaagatgaaataaagacattctcaatgaatgaaatctggaagaattcatcaccaacagacatgttccaaaatcaatactaaagaaatactt

SEQ ID NO: 867950 - DNA, 120 bp, Artificial Sequence
  ENSG00000261184_18 (sequence is synthesized)
ttcctcctaagatgcagaacaaagcaaagatgttctggcaaaggaagaatgaaagtaatgggcaaacaatcagtggttgccagggattaggggtgggagatgtgtgaccacaaagggaag

SEQ ID NO: 867951 - DNA, 120 bp, Artificial Sequence
  ENSG00000261184_19 (sequence is synthesized)
aatgagagaatttgtgtatgatgaactgtctgtatcctattgtggtggtggttacatgaatctaaacatatgttaaaccttaccaaactgttatgccccaaaataaaatttaaaaataaa

SEQ ID NO: 867952 - DNA, 120 bp, Artificial Sequence
  ENSG00000261184_20 (sequence is synthesized)
gattgatgccatcagctgtgtttatgccatcagttagtctgtattgatccagggcgtattttgtgcagatggggaccctgggaagttagcagcaatggagaaaagcgtggaatgctctcc

SEQ ID NO: 867953 - DNA, 120 bp, Artificial Sequence
  ENSG00000261187_0 (sequence is synthesized)
tgttgttgttgttgttgtttgagacagaggctcgccctgtcgcccaggctggagcgcaattgcgcaatctcggctcattgcaacctccacttctcaggttcaagcaattctcttgcctca

SEQ ID NO: 867954 - DNA, 65 bp, Artificial Sequence
  ENSG00000261187_1 (sequence is synthesized)
ggattacaggcacccaccaccacgcccgactaattttattgacctgaggtgatccaccttggcct

SEQ ID NO: 867955 - DNA, 120 bp, Artificial Sequence
  ENSG00000261187_2 (sequence is synthesized)
aagtgttgggactacaggcgtgagccactgcacctgacttaatcttagcattcttaatgaagacttacagtacataagccatgatttttttggtcaggcaatcaatagttacttattagt

SEQ ID NO: 867956 - DNA, 120 bp, Artificial Sequence
  ENSG00000261187_3 (sequence is synthesized)
atgatttttttggtcaggcaatcaatagttacttattagtgtctactcaatgcaaagcacctttcttggcattctggagaaacaaagagagattataatttagggaaggagataaattaa

SEQ ID NO: 867957 - DNA, 89 bp, Artificial Sequence
  ENSG00000261187_4 (sequence is synthesized)
aatgataagtgcacagttgaagagatgtcacaagccaagaagactggcacaaatggtagtgctaaaggagttcttggtcatggtgccat

SEQ ID NO: 867958 - DNA, 120 bp, Artificial Sequence
  ENSG00000261187_5 (sequence is synthesized)
aaaaaaaaaaaaaaagttataaaaaaagataggttcaaatcctagctagggaaaaaaagatagaagtcactagactggcatattctacaaaagcataattgctagactttcttatgcgtc

SEQ ID NO: 867959 - DNA, 120 bp, Artificial Sequence
  ENSG00000261187_6 (sequence is synthesized)
gcataattgctagactttcttatgcgtcctgcctttgtaactgctgttgcctctgcctgatctcctttccacctactctttcccacaaactaattcatgtgcttcaaaactactattttt

SEQ ID NO: 867960 - DNA, 120 bp, Artificial Sequence
  ENSG00000261187_7 (sequence is synthesized)
ttcgtatcatttctaatatggtgcttgatgcctagaacatgtagtcatctatgtaatgcccattcccaacaaacttccaagcttttgttaatgctggaataaattaatataaacctaaag

SEQ ID NO: 867961 - DNA, 120 bp, Artificial Sequence
  ENSG00000261187_8 (sequence is synthesized)
tttatgaattagtataaacctaaatgtctgaaaataatagacatgtagtattgtattcttacctcaaaatatgttgaatcttgccaacattaaatcaacactggtgttcttgcctgttaa

SEQ ID NO: 867962 - DNA, 120 bp, Artificial Sequence
  ENSG00000248174_0 (sequence is synthesized)
acacacacacgcacgcacgcacacacacgcacgcacgcgcacacacacacgcgcacacacacgcacacgcccgcgcacacactctctcacacacacacagagattggagagagacaggag

SEQ ID NO: 867963 - DNA, 120 bp, Artificial Sequence
  ENSG00000248174_1 (sequence is synthesized)
agagacatgttttcatctatcctttgtggacttctgttgtttttactgctgtgaaatttgacttgcgatatctgcttgtaaaacatcatcaaatccaaattcattatattccactttttc

SEQ ID NO: 867964 - DNA, 120 bp, Artificial Sequence
  ENSG00000248174_2 (sequence is synthesized)
tattacatggtttctgcttcactgattcatatctgttttacctattctgtaagggaggagaagctgcaaagcaatgaagagaaaagctgaagtcagtgattaggagtgtctgtgtaagta

SEQ ID NO: 867965 - DNA, 120 bp, Artificial Sequence
  ENSG00000248174_3 (sequence is synthesized)
aaagcaacaggcaattactgagtgtggtgtgagaggcacggaaagattgggaattcagcaagaagaggaattgaagtcaaacctcacctacttcccagagtcttctggattttctgttag

SEQ ID NO: 867966 - DNA, 120 bp, Artificial Sequence
  ENSG00000248174_4 (sequence is synthesized)
aagcttcagtatctgagatattcctatgcattctactgctttaatcccacctaagtagagatgtccacaacagagagaatggagctgtcacatcgtttcaactgcccaggtagttcctac

SEQ ID NO: 867967 - DNA, 120 bp, Artificial Sequence
  ENSG00000248174_5 (sequence is synthesized)
tggatgaatgggattgtcaccttcacacctgctagaggcttggagcatgcaagagtttttttaaatggcttcacctttcttatgaaaatgcaaccactagtactcttccaataaaagctt

SEQ ID NO: 867968 - DNA, 120 bp, Artificial Sequence
  ENSG00000248174_6 (sequence is synthesized)
ttctcaagtgaaaggactcaggcaacaaataaacagctaagattttactagagtatgaaagggagagcactggagtgcagtgcggggatggagatgcagctgtggtggctggaagtacag

SEQ ID NO: 867969 - DNA, 120 bp, Artificial Sequence
  ENSG00000248174_7 (sequence is synthesized)
gagggcagctggaggcacctggcctctgaagcctgtcttcttcatctgggtgagatctgctggagtcaggaaggacttcctgctgcaaggataaagaatcccacccatcctaaggcatta

SEQ ID NO: 867970 - DNA, 120 bp, Artificial Sequence
  ENSG00000248174_8 (sequence is synthesized)
aaatctgacaaaaacaaataatggggaagaaattctgtatttaataaatgatcttgggaaaactggctagccacatgcagaaaactgaagctgggctccttccttacaccttatacaaaa

SEQ ID NO: 867971 - DNA, 89 bp, Artificial Sequence
  ENSG00000248174_9 (sequence is synthesized)
agacttaaacgtaagacctaaaaccatagaaaccctagaagaatacctaggcaataccattgaggacacagacatgggcaaatgactaa

SEQ ID NO: 867972 - DNA, 80 bp, Artificial Sequence
  ENSG00000248174_10 (sequence is synthesized)
tactatagagacacatccacctgtatgttggcaaatgcccatcaatgatcggctggataaagaaaatgtggcacatatac

SEQ ID NO: 867973 - DNA, 73 bp, Artificial Sequence
  ENSG00000248174_11 (sequence is synthesized)
gtgggagttgaacaatgagaacacatgaataccgggagggaacatcacacaccagggcctgtcagagggttat

SEQ ID NO: 867974 - DNA, 120 bp, Artificial Sequence
  ENSG00000248174_12 (sequence is synthesized)
acacacacacagagattggagagagacaggagagagacatgttttcatctatcctttgtggacttctgttgtttttactgctgtgaaatttgacttgcgatatctgcttaaagcaatgaa

SEQ ID NO: 867975 - DNA, 120 bp, Artificial Sequence
  ENSG00000248174_13 (sequence is synthesized)
aatacagtacagatctctgtactgtaaacgacaacaaggaccagtcacaatttcagttcttgttacattgataagactccttcagaaagcaatgaagagaaaagctgaagtcagtgatta

SEQ ID NO: 867976 - DNA, 120 bp, Artificial Sequence
  ENSG00000248174_14 (sequence is synthesized)
agacctaagaagcatcatgacctgagaaacagtttcacaggccactcttggcaggtgaagtgtggtggcgtaatcatgactcactgcagcctcgaactccgggactcaagctaatctctt

SEQ ID NO: 867977 - DNA, 120 bp, Artificial Sequence
  ENSG00000248174_15 (sequence is synthesized)
cttcccagcagctgggactacaggtatatgccaccaaacctagctaacattttaaaaaattttttcttttgtagaaacggggtcttgctatgttgaccaggctggttttaaactccttgc

SEQ ID NO: 867978 - DNA, 120 bp, Artificial Sequence
  ENSG00000248174_16 (sequence is synthesized)
attacaggcatgagccactgcgcccagctacaatatattttggatgctgactttatatcctgtgactttgctatggtcgcttattatttctagacatttttgtttttgacagagtctcac

SEQ ID NO: 867979 - DNA, 120 bp, Artificial Sequence
  ENSG00000248174_17 (sequence is synthesized)
tgctatggtcgcttattatttctagacatttttgtttttgacagagtctcactgttttgcttaggctggagtgcagtggcacaatcttcattcactgcaacctctgcctcctgggttcag

SEQ ID NO: 867980 - DNA, 73 bp, Artificial Sequence
  ENSG00000248174_18 (sequence is synthesized)
gcaacctctgcctcctgggttcaggctattctcctgccacagccttcagagtagctgggactgcaggcacaat

SEQ ID NO: 867981 - DNA, 90 bp, Artificial Sequence
  ENSG00000248174_19 (sequence is synthesized)
ggtttttttgatcctttaggattttctaccaagactgtcatgtcatctataatcaagtactcttttatttctttttttccaatttgtttg

SEQ ID NO: 867982 - DNA, 120 bp, Artificial Sequence
  ENSG00000248174_20 (sequence is synthesized)
aatcaagtactcttttatttctttttttccaatttgtttgtattttatttcttttttctcaaagcttattgtactgactaagatccccagaataatgttgaataaaagtattggaaacag

SEQ ID NO: 867983 - DNA, 120 bp, Artificial Sequence
  ENSG00000248174_21 (sequence is synthesized)
tggaatagaacagaggcctcagaaaaacgtcacccatctacaaccatctgatcttcaacaaatctgacaaaaacaaataatggggaagaaattctgtatttaataaatgatcttgggaaa

SEQ ID NO: 867984 - DNA, 120 bp, Artificial Sequence
  ENSG00000248174_22 (sequence is synthesized)
aagaagaggaattgaagtcaaacctcacctacttcccagagtcttctggattttctgttagaagcttcagtatctgagaatcccacccatcctaaggcattacatttagtcatcatagct

SEQ ID NO: 867985 - DNA, 120 bp, Artificial Sequence
  ENSG00000248176_0 (sequence is synthesized)
aacccgcgcgggtccctttccactctgtggaagctttgttcttttgctttttgcaataaaccttgctactgctcactttttgggttaacactgcttttatgagttgtaacactcaccgca

SEQ ID NO: 867986 - DNA, 90 bp, Artificial Sequence
  ENSG00000248176_1 (sequence is synthesized)
gacactactgtgtgggtttctgtggacagcagttctgccaaactgttttccagtgtggctgtaccattttgcattcccgccagcaatgaa

SEQ ID NO: 867987 - DNA, 120 bp, Artificial Sequence
  ENSG00000248176_2 (sequence is synthesized)
aaacgaagtttctaatgcttcaccttgtcaccagtatttgatattatcagtgtcctggctactcaaataggaaaagcttaagggaaagatttttctgtgagctggtgctgatgttgtatg

SEQ ID NO: 867988 - DNA, 120 bp, Artificial Sequence
  ENSG00000248176_3 (sequence is synthesized)
ttccagcagatcttcaaagaaatgtaagataatttattgaaataaggaataaacttttttctgagttctacttgattgcctaaaagttacatttttataaagataaaatttgtacaattc

SEQ ID NO: 867989 - DNA, 120 bp, Artificial Sequence
  ENSG00000248176_4 (sequence is synthesized)
aaatatatttaaataacttttcattgatcaagagctatcatcaaaccctcgattacactgtgtgaatgactgcatggacaagcatcatttttttttcattaataaaccaatatttatgca

SEQ ID NO: 867990 - DNA, 120 bp, Artificial Sequence
  ENSG00000248176_5 (sequence is synthesized)
actgtgttctgccgcttgtaagtaattaagaaacatttaaaaggctttatattcaagactgagttagactgtctgcaaaatgaaagaatggaaataaagattaagaatatgttagtcctg

SEQ ID NO: 867991 - DNA, 120 bp, Artificial Sequence
  ENSG00000248176_6 (sequence is synthesized)
gcaaaagaagagaattaacggattagccaaggaatctaaagtgtttccattattgctctgccacttactggatgtaatcttaggcaagttatttagtatctctgtgtcttagtttgtcag

SEQ ID NO: 867992 - DNA, 120 bp, Artificial Sequence
  ENSG00000248176_7 (sequence is synthesized)
ctgtaaaatggtgttaataataaaaataatagtatctacttcaagttgttgtcaggcaaaggagtgttaatatagaacaagacatctatttttatgcctagaaagattcctatgtctggt

SEQ ID NO: 867993 - DNA, 120 bp, Artificial Sequence
  ENSG00000248176_8 (sequence is synthesized)
tatgcctagaaagattcctatgtctggttttttttgaagtaataaataaaattattttcttatttagaaaaaaacacatcagctgtaaaaaatatggaagataaagaaaataacaaataa

SEQ ID NO: 867994 - DNA, 120 bp, Artificial Sequence
  ENSG00000249807_0 (sequence is synthesized)
attccaaggattaggatggggacatgtctttggagccaccattcagcccgctacaggaaagatgtgtcaaaatctctccaggattgtcaatttctccttgtaattcaaaggaatggctgt

SEQ ID NO: 867995 - DNA, 120 bp, Artificial Sequence
  ENSG00000249807_1 (sequence is synthesized)
atttcaaaggtttcctttcctcatatcttccctaaatctgaccagcggaagccacggcctggggtgttttctggttcagtcacaatttccagggtaggactgtattgtaagaagaatgcg

SEQ ID NO: 867996 - DNA, 120 bp, Artificial Sequence
  ENSG00000249807_2 (sequence is synthesized)
gtcactctccccaagcgcacattatcacacttcttttaagcaggagatcttaggactgtgtgagtggccagtcacatttccattttgccagaactaccattattcccacagcctctggaa

SEQ ID NO: 867997 - DNA, 120 bp, Artificial Sequence
  ENSG00000249807_3 (sequence is synthesized)
tttgagggattctgcagatgcgccaaaaaacacgtgtccggggtaaaagctgtggaaggtgctcggttctaaggagagggaaggaaagccaagtggaccctgtcatctgaaattgttttg

SEQ ID NO: 867998 - DNA, 65 bp, Artificial Sequence
  ENSG00000249807_4 (sequence is synthesized)
aaggaaagccaagtggaccctgtcatctgaaattgttttgtcatccactgacttttacaaataaa

SEQ ID NO: 867999 - DNA, 120 bp, Artificial Sequence
  ENSG00000249806_0 (sequence is synthesized)
ttcacaaagagatccatttaaagactttacaacgtacgtacactcatatgtgttagaggcactttcagtttggccttcattcagttcacaaagagatccatttaaagactttacagaaga

SEQ ID NO: 868000 - DNA, 120 bp, Artificial Sequence
  ENSG00000249806_1 (sequence is synthesized)
aaaatgacaggatgaaaactgtgcctcgaggagattaaactggaagcagaaggtatcaacccaggccatggagctgaatggagaagaaatgccttccatcccttccaaccatttggcttc

SEQ ID NO: 868001 - DNA, 120 bp, Artificial Sequence
  ENSG00000249806_2 (sequence is synthesized)
ggttttccgatttccagacccaggtcctgagcaactatgtaaatgcaaacaaacactggtgatgactgtaaggccatcaaactccaaacagtcatgcaaccagagcctctgaagatggcc

SEQ ID NO: 868002 - DNA, 120 bp, Artificial Sequence
  ENSG00000249806_3 (sequence is synthesized)
ccttctgccgggaacccttagatcagcctctgagggagttctgccatttccccaaaacagcgccccctgtcagcaggaagcggttaagatcagtcttcatccttatccttaatctaacca

SEQ ID NO: 868003 - DNA, 120 bp, Artificial Sequence
  ENSG00000249803_0 (sequence is synthesized)
ccaccgcgcccggcagcaaattttaagagttggatgtcaacctcctccctgctctggcctgagacacctgagctgaccacctgttgggattggacccagtccttcctcctgcctcatccc

SEQ ID NO: 868004 - DNA, 120 bp, Artificial Sequence
  ENSG00000249803_1 (sequence is synthesized)
catccccagctctattcacatgccttgcctggtatcatggttgcctttgtttctagccctgacaagcttttattcagatgtgttaattaaaacaataaaccttgctgttcccattttcca

SEQ ID NO: 868005 - DNA, 120 bp, Artificial Sequence
  ENSG00000249803_2 (sequence is synthesized)
attgcaaaagtgttcttgaatcaagggtgactcaaggagttcatgattacttctaatgagcagaccacaaaaatcaatcagtccctttgtagagaaacaacactcgagtgcagtcaccta

SEQ ID NO: 868006 - DNA, 120 bp, Artificial Sequence
  ENSG00000249803_3 (sequence is synthesized)
tcagatcagcaaggagggtagaagtgactccagaggtggcagattctgctaattaaaatctgccctaaaatgaactacttaccaagacattttagcctgaattttaaaacaaagacccaa

SEQ ID NO: 868007 - DNA, 120 bp, Artificial Sequence
  ENSG00000249803_4 (sequence is synthesized)
tattgtcttggtgtctttattctttttgccttttcttcatctaaacttatttaaagctatttctattgtaaaataagacacacatacagacagtgcataaaatatatatgtttggtttaa

SEQ ID NO: 868008 - DNA, 120 bp, Artificial Sequence
  ENSG00000249803_5 (sequence is synthesized)
attattataaagcaagctgcatgtaattgctttctcaggccaagaaattgaatgttgccagaaccccaggaaccacccagcctcttcccatatgaccacttccccacactctccaccttc

SEQ ID NO: 868009 - DNA, 120 bp, Artificial Sequence
  ENSG00000249803_6 (sequence is synthesized)
cttacttctatggtaagcacttatttgctttaccttataattttatcctttaggaatgaatctctaaacattatagttgagttctctctgtgaggtttaaataaactgaatcttacaaca

SEQ ID NO: 868010 - DNA, 81 bp, Artificial Sequence
  ENSG00000249803_7 (sequence is synthesized)
caaattttaagccaagaaattgaatgttgccagaaccccaggaaccacccagcctcttcccatatgaccacttccccacac

SEQ ID NO: 868011 - DNA, 120 bp, Artificial Sequence
  ENSG00000249803_8 (sequence is synthesized)
gaaccacccagcctcttcccatatgaccacttccccacactctccaccttccttacttctatggtattgatggatggttgggtgacatggactccagtatgtgccatgaaggatacgaag

SEQ ID NO: 868012 - DNA, 120 bp, Artificial Sequence
  ENSG00000249803_9 (sequence is synthesized)
atgaagctgtcatgaactctgctctcgagaagctactgtcaaagtttgttttttttaaacttgatatatttgaggtagaattgacaagattttagtattgatgaaataagataaaaggga

SEQ ID NO: 868013 - DNA, 120 bp, Artificial Sequence
  ENSG00000249803_10 (sequence is synthesized)
tggtgaaattaatgatgactttagccaaaataattaattcaggtggggaggagagaaggggattgactgaattctagttgactgaggcttactcatagtgggaagagctgtgagccatgt

SEQ ID NO: 868014 - DNA, 120 bp, Artificial Sequence
  ENSG00000249803_11 (sequence is synthesized)
actgttttatttattgttttgttttcgggttttgtttttcaataccaaaagtggatattcatggagtctgagaagctaggattagaaatgcagtatgtgacagcagaatggcaatgtcat

SEQ ID NO: 868015 - DNA, 120 bp, Artificial Sequence
  ENSG00000249803_12 (sequence is synthesized)
aaccgtcactgtgctaggttctagaaataaaatatagttgatccttgaacaacacagatttgaagtgcctgggtccacttacatgcagattttcatccacttctgccatccctgatacag

SEQ ID NO: 868016 - DNA, 120 bp, Artificial Sequence
  ENSG00000249803_13 (sequence is synthesized)
caagaacaacacctcctctttcttctcctcctcagccttctcaatgtgaacaccacaaggatgaagacctttataatgatccatctccacttaattaagaataaatattttttctcttac

SEQ ID NO: 868017 - DNA, 120 bp, Artificial Sequence
  ENSG00000249803_14 (sequence is synthesized)
tcatgattttattaatggtattttcttttctctagcttactttattataaaaatacagtatataatacatatagcacacaaaatatgtgttgatcgactatttatgttattgataaggct

SEQ ID NO: 868018 - DNA, 120 bp, Artificial Sequence
  ENSG00000249803_15 (sequence is synthesized)
tccggtcaaaagtaggctaatagtagctacattttttggcaaatcaaaggctaattacttggatctgatcactatacattatgtatatcacaacatcactatgtgccccataaatatgta

SEQ ID NO: 868019 - DNA, 120 bp, Artificial Sequence
  ENSG00000249803_16 (sequence is synthesized)
caattattgtgtttatttaaaatttggaaaataaaaagttacaaaacatttttttaaaatttaaaatttaaaagttctatgtggatttttgagtgcatgggtaagttgtcacccctaacc

SEQ ID NO: 868020 - DNA, 120 bp, Artificial Sequence
  ENSG00000249803_17 (sequence is synthesized)
cccgtggttccaggatcaactgtagtgtgtattcttactgactcaaaattctttatatttatctgcttctccaccactcgccacttcaaatgaacaattaacttgtcaaagattattttc

SEQ ID NO: 868021 - DNA, 120 bp, Artificial Sequence
  ENSG00000249803_18 (sequence is synthesized)
ctcaatacacaacttcctatttctcactctccctcatctcctctttctttcttcttgcctcttattaaaacccaaaagttgataagaaagtggaattaaagatagaatttgtgtataaac

SEQ ID NO: 868022 - DNA, 120 bp, Artificial Sequence
  ENSG00000249803_19 (sequence is synthesized)
gaccacttccccacactctccaccttccttacttctatgatgcccctggcttcagatagaaaggccctgaacatctactggggttttgagaagaatatcaacactttcctaagagaattt

SEQ ID NO: 868023 - DNA, 120 bp, Artificial Sequence
  ENSG00000249803_20 (sequence is synthesized)
acttaaatatacccttacaaaagaagtttataccaatacatcaagcgtacaacaaagtgaacacagtgactgcaaaccagatctgtaggcctcatgcctcaaataatgaaaattgtgatt

SEQ ID NO: 868024 - DNA, 120 bp, Artificial Sequence
  ENSG00000249803_21 (sequence is synthesized)
aaattatttttccaaatggagtaaatggattaaaataaaagaaagaaaaaccaaaaatattttcccttaaggacattagcagataatattaatatattcagaaaaagtttgaagcttgct

SEQ ID NO: 868025 - DNA, 120 bp, Artificial Sequence
  ENSG00000249803_22 (sequence is synthesized)
tgcttcagtttttgaaataaatatttatcagaaaaaacttcctattttattttgattcaaaattaattatcaggattcagttctttcagagaatatagtgatttttttttctattctcat

SEQ ID NO: 868026 - DNA, 120 bp, Artificial Sequence
  ENSG00000249803_23 (sequence is synthesized)
tgctcttgtcagttggaattcagtgaaatcataactaatcactgaaactattttataaaaatttcttttcatctgaaactaagtgactgagcctattatacgctttattcttgattgact

SEQ ID NO: 868027 - DNA, 120 bp, Artificial Sequence
  ENSG00000249803_24 (sequence is synthesized)
ttattcttttctgttagaaattatatttaggtatgcatttctacaaattgattacaccgaatattgctcattttactacttaacttttagtttggatttaatttttaaattcaataatgt

SEQ ID NO: 868028 - DNA, 120 bp, Artificial Sequence
  ENSG00000249808_0 (sequence is synthesized)
agctgatttgttccgtggagagtcaggctacctggtcatcctactcaatatccaggcctgcccgaacctcaagactgggtgggcaccgttcagaggcccccagcccctgcccttctcctg

SEQ ID NO: 868029 - DNA, 120 bp, Artificial Sequence
  ENSG00000249808_1 (sequence is synthesized)
cgagggccgagctcaccgtcaggtccctggggcttggaactaagtagccacttcataaacacatggattttggggtgccccggcccccataaagagatcaaattatgtctcctgcattct

SEQ ID NO: 868030 - DNA, 120 bp, Artificial Sequence
  ENSG00000249808_2 (sequence is synthesized)
gctgtaatgaaatgaatcataaaatatgttttagaagaaaattactataaaaagtttcaaaattgttatttaaaaaggagtcttcagttttcattccaagtcacaaagaaccacttgttc

SEQ ID NO: 868031 - DNA, 120 bp, Artificial Sequence
  ENSG00000249808_3 (sequence is synthesized)
ttcacatgaaaataaatatgtagagagagagagagcaagaaagagagagagagaaggaataattatgtacaaaggataaatcagctaaacaaaagtgatttggaacttaaaaagcaaaaa

SEQ ID NO: 868032 - DNA, 120 bp, Artificial Sequence
  ENSG00000249808_4 (sequence is synthesized)
ttctgtgcacaggaggaaggaaagaagtagtttaaggaaaggaccccgccaacacgcatattgacccaaggaatcttcgggatggactctgcttctgatcacatcttcacctgctcgagg

SEQ ID NO: 868033 - DNA, 120 bp, Artificial Sequence
  ENSG00000249808_5 (sequence is synthesized)
atcacctgtggcacgtcgggctctgaatgcaagccccaggacaccccatttcatgcgtctgcattcttaacctcactgcgcattaacatgcatctcaatgcatccaaaataccgcacccc

SEQ ID NO: 868034 - DNA, 120 bp, Artificial Sequence
  ENSG00000249808_6 (sequence is synthesized)
catcacatcagagagcattaaaaataagccagctcaatgcacaaaaatgagggcgacaatcggaaacacaatgatgtttctaaagaatgtccaaccttaactgcagcttttcagtttcca

SEQ ID NO: 868035 - DNA, 120 bp, Artificial Sequence
  ENSG00000249808_7 (sequence is synthesized)
aattctctcttctttatctcgtcatttccctgaatcactggggcccaacaacaccattctcagtcagatgtctgcctgagacacatcatttcaaattcaccggtaaaatgtttgcagtta

SEQ ID NO: 868036 - DNA, 120 bp, Artificial Sequence
  ENSG00000249808_8 (sequence is synthesized)
ccagaagtgaccttgttttacacaccaacgtgatgaatttatgtgggtggcttagtggagctgttcatttccagcttggtaatattttaattaattaaaagggaaaaatcaatgaacaaa

SEQ ID NO: 868037 - DNA, 120 bp, Artificial Sequence
  ENSG00000244302_0 (sequence is synthesized)
cttcatcaccatggcaacagccttatctgccgccctagagccttttccctataacagtgaaatcaacaatgactgtgtcaggagagatctttaacttattatttattacaagatattcta

SEQ ID NO: 868038 - DNA, 120 bp, Artificial Sequence
  ENSG00000244302_1 (sequence is synthesized)
atgtttaaagagcaatccaacataaatgaagagaacataagaaacagcatacacaatactggacatcacaggaccctctccggctggataccaggctgtagaaccaccagatgcttcaga

SEQ ID NO: 868039 - DNA, 120 bp, Artificial Sequence
  ENSG00000244302_2 (sequence is synthesized)
cgctgggcactctgtactttgcaacctaccaagtatcatcacaagagctatgaaagtgaagagagacatacgttatctaagaatctgagagagatgactcagtcagcatcctctctcttg

SEQ ID NO: 868040 - DNA, 120 bp, Artificial Sequence
  ENSG00000244302_3 (sequence is synthesized)
gtgtacaatggtagggacagctactgtgtcatctggagcatgacaatgagaacacagacactggatcgtcctgatatagcctgcagtccatctgggcctctagacattcatttgcatttg

SEQ ID NO: 868041 - DNA, 120 bp, Artificial Sequence
  ENSG00000244302_4 (sequence is synthesized)
cattcatgcgcatcccctactactccaactcctacaccttttggcaggatatatccacacagctggattggaatcacaagatgtttttattttttgcctcattaaactagtttctctcaa

SEQ ID NO: 868042 - DNA, 76 bp, Artificial Sequence
  ENSG00000273965_0 (sequence is synthesized)
gatgtccaggccgaggcaggcagatcacctgaagtcggcagttcgagatcagcctgaccaacatgtagaaaccctg

SEQ ID NO: 868043 - DNA, 120 bp, Artificial Sequence
  ENSG00000261019_0 (sequence is synthesized)
tttgatttcctgtaaactgaaaaggatatctaaaggctggattcaattctggttaaacattttgggcaagaatactttgtggttgatactgtgttcctcattttcgttacacgagggggc

SEQ ID NO: 868044 - DNA, 120 bp, Artificial Sequence
  ENSG00000261019_1 (sequence is synthesized)
acataatatctggtttttccactgttagtgatgttaagtattgttccttgaataaggtggtaacagccagaactctccattgtgaagttagtttttgccctcatgactagtaagtaaact

SEQ ID NO: 868045 - DNA, 120 bp, Artificial Sequence
  ENSG00000261019_2 (sequence is synthesized)
gtgaagtcatgctttggcgccactgtgaatgttcagttacccattgcccttttgcctaagattttagcatgcgttgatgattataaccctaatgaaatattccattcaagtgacaaaatg

SEQ ID NO: 868046 - DNA, 120 bp, Artificial Sequence
  ENSG00000261019_3 (sequence is synthesized)
gtgatttccccaattctatcatttcctttacacttatcagttatcattcttccataaagaagaggtttcccttaggaactggggccatttggctccccttctggaagggcaatatgtatc

SEQ ID NO: 868047 - DNA, 120 bp, Artificial Sequence
  ENSG00000261019_4 (sequence is synthesized)
cttgattctttctctccagttaatgatttcagaatgagggattcatgttatggtcacctccaataacatcaaatgaaccttttaggaggaagattctatcttgtgagtactatattggac

SEQ ID NO: 868048 - DNA, 120 bp, Artificial Sequence
  ENSG00000261019_5 (sequence is synthesized)
ttttaaacttattattttgagataattatagattcgtgtgaagttgtaagaaataatacagagagaacccatgtaccttttacgcagttttccctagtgggagcattttgaaaaactgta

SEQ ID NO: 868049 - DNA, 120 bp, Artificial Sequence
  ENSG00000261019_6 (sequence is synthesized)
gtacaatatcacaaggatattgatgttgatgatgtcaagatgccgagtatttccgttactgtaggatctctcatgttgcccttttatttatcattctttttgatgctttgactgtccaaa

SEQ ID NO: 868050 - DNA, 120 bp, Artificial Sequence
  ENSG00000261019_7 (sequence is synthesized)
ctttggccagtagaaacgcgttcaagattcctgtgtctttttcacataatcccatgctgtttgatttcatgctttctggcagtacaaggtgtctcagagttgcccgtgctttctgcctga

SEQ ID NO: 868051 - DNA, 120 bp, Artificial Sequence
  ENSG00000261019_8 (sequence is synthesized)
gacctggaatccactatttcttcaaggagcctttcctagttcgtggcatttccaaagaaaagtccaagggctaggggtactcagtgccactcagttgtcattgatcctgggctcttgcaa

SEQ ID NO: 868052 - DNA, 120 bp, Artificial Sequence
  ENSG00000261019_9 (sequence is synthesized)
tgcacaaaatggaaatgtttatatatttcaaattaattaaaatatcttcaactgatggggaagatcaaaattaacattatataacattcccagatttttacttaacattaatttcaaact

SEQ ID NO: 868053 - DNA, 120 bp, Artificial Sequence
  ENSG00000261019_10 (sequence is synthesized)
tttgtctcttgctctgcaaatcttttttcctaacatacttatttgctttatgctatgctatacataaaaaagtttcaaaatatgattattacggcttacaataaagtcactgaatcaata

SEQ ID NO: 868054 - DNA, 120 bp, Artificial Sequence
  ENSG00000272610_0 (sequence is synthesized)
ctttgtaatttgtagcaacaaacctggggtcagacactccactgcctgtgcatcttgcctgtttccggatccgccgtgtcacagacattttctatgtcagtgcctatggctctacccagg

SEQ ID NO: 868055 - DNA, 120 bp, Artificial Sequence
  ENSG00000272610_1 (sequence is synthesized)
gtgatgctgctgatctggtctgattcccaagctggaggtaatggcgtgtgtcctgccctagtgctgctccctgatggggagcatgctcagtttcctgcattcaggtacgagcagagactt

SEQ ID NO: 868056 - DNA, 120 bp, Artificial Sequence
  ENSG00000272610_2 (sequence is synthesized)
ggcaggatccgccccgttcagagttgcaggaagagccctggatgcctgtcgcaaattggaataagtgggagggagccacaggctggtacagagacaaggtattgctgtgttgtccaggct

SEQ ID NO: 868057 - DNA, 120 bp, Artificial Sequence
  ENSG00000272610_3 (sequence is synthesized)
ggtcacagactcctggctgcaagtgatcctcctgcctcagcctcctagagtgctgggattacagacgtgagctaccacacctggcttttcattccttttaatggctaaataatgttccat

SEQ ID NO: 868058 - DNA, 120 bp, Artificial Sequence
  ENSG00000272610_4 (sequence is synthesized)
tctatagatacatatttttttccccattcatcagttgaaggacatttgggttgttcctagtttttggctatggtgagtaatactgctatggatattcatgtacaggtttttgtgtgaaca

SEQ ID NO: 868059 - DNA, 120 bp, Artificial Sequence
  ENSG00000272610_5 (sequence is synthesized)
tatgttttcatttctcttgggtacatacctgggaatggaattgctggttcaaatggaaactctttaagtttttagtaactgccagactgcttcctaaagcagctgcaccattttacattc

SEQ ID NO: 868060 - DNA, 120 bp, Artificial Sequence
  ENSG00000272610_6 (sequence is synthesized)
acaccagcagtgtatgaaggatccagtttcttcacgtcgtcaccagcacttgcctgtctttgtacaccaatcaaaggtgtatgaagtcgatctcattgtgtttttcatttgtatatccct

SEQ ID NO: 868061 - DNA, 120 bp, Artificial Sequence
  ENSG00000272610_7 (sequence is synthesized)
gatggctaatgatgttgcccatctcttaatgtgtttatttggtcttttgtacatcatcttgtggaaaaatgtctgttaagatggtttgcccatttaaaaatagtgttatatgtcttttat

SEQ ID NO: 868062 - DNA, 120 bp, Artificial Sequence
  ENSG00000272610_8 (sequence is synthesized)
tattgagtaacagttctttatatgttgtggatacaagtcctttatcagatgtgtgattttaagtatgttctctcattctgtgggtcatctacacgttcttaaaaaattttttgagacaga

SEQ ID NO: 868063 - DNA, 120 bp, Artificial Sequence
  ENSG00000272610_9 (sequence is synthesized)
ggctttttaaacaaatttttttgagacagagtttacctcccaagctggagtccagtggtgagatttcggctcactacaaccaccacctcctgggtccaaatgatcttcccaccccagcct

SEQ ID NO: 868064 - DNA, 120 bp, Artificial Sequence
  ENSG00000272610_10 (sequence is synthesized)
agatggggtcttgctgtgttgcccaggctaatatcgaatgcttgggctcaagctatctgtctgccttgggttcccaaagtactgggactacaggcgtgagctgctacacctagcctgcat

SEQ ID NO: 868065 - DNA, 120 bp, Artificial Sequence
  ENSG00000272610_11 (sequence is synthesized)
tacacctagcctgcatcttcactttcttgatggtatcatttgcagcacaaaacttttatctattttttttcttttgtttgtggttttggtttatatttaaataggcttcacctgacccag

SEQ ID NO: 868066 - DNA, 120 bp, Artificial Sequence
  ENSG00000272610_12 (sequence is synthesized)
ggttttgaagatttacttttatatcttctaagagtttcatagttttaggttttacatttaggtatatggtccattttttttgtgtattgcataggaaagggtcccaacttcattcttttg

SEQ ID NO: 868067 - DNA, 120 bp, Artificial Sequence
  ENSG00000272610_13 (sequence is synthesized)
catgtggatgtgaagttttcccagcaccatttgttgaaaaggcgattctttttctgttaaattttcttggcacctgtgttgaaatcaaatatgcagaggtcttgacacactgttactgtc

SEQ ID NO: 868068 - DNA, 120 bp, Artificial Sequence
  ENSG00000272610_14 (sequence is synthesized)
cagtctctacacatgctgtccttctctcccacaaagtgtaataatgtaataatgcaataacgtgcctgataaccaaatgagtggatttcagcagtccccctttgtctgaaacctttgtga

SEQ ID NO: 868069 - DNA, 120 bp, Artificial Sequence
  ENSG00000272610_15 (sequence is synthesized)
tcagagggaataaacatcttagaggcatgaagcccttgctcagataaggagaagatagagaaccaaagtgccataatgtaccaagtaaaaagcatcagatgtgccagaaaataagcagta

SEQ ID NO: 868070 - DNA, 120 bp, Artificial Sequence
  ENSG00000272610_16 (sequence is synthesized)
ggaattaactttgagggttatcacaggaacactatgtagagtaagcacaagcagctcagctgtggacgagctttgctgtagattttgctgcaaacctctgcaggcctgagagcttgccgt

SEQ ID NO: 868071 - DNA, 120 bp, Artificial Sequence
  ENSG00000272610_17 (sequence is synthesized)
gggtccagagagcagcagatgtacttggctgtgacgtcactggatgtgtcctgatctactccttctccttctcatacatgaggttatctgaggtctcagccaagagacaaatcagcactt

SEQ ID NO: 868072 - DNA, 120 bp, Artificial Sequence
  ENSG00000272610_18 (sequence is synthesized)
tacccacggacagcaccaaagctcgccatcttggccgctgccccagaaccttggaaacttctgcagtgaaatggattctgattatttttattacctttgttctttttttagaattgaagt

SEQ ID NO: 868073 - DNA, 120 bp, Artificial Sequence
  ENSG00000272610_19 (sequence is synthesized)
ctggaatacataaagtgtgttaatattaagtgcaacttcgtgaccttttaattgaggtattactgtgtaaccatcaccagattaatatatggaacatcataagtaccctgggagactcct

SEQ ID NO: 868074 - DNA, 120 bp, Artificial Sequence
  ENSG00000272610_20 (sequence is synthesized)
tgtgctatttcccactcagtgctctcctcttaaagaggtcagcactgttccggttcttctattaccatatatttgttttgcctgctcatgaacttcaaataaataaaaactatggtatgt

SEQ ID NO: 868075 - DNA, 120 bp, Artificial Sequence
  ENSG00000275496_0 (sequence is synthesized)
tctttgtctcttgctggcgctggcacaggaacttgggatccgtctcctctttcgcctcctccgctttgggagccccgggctactctttcacagcccctgttgccctgtgatctgtaggtc

SEQ ID NO: 868076 - DNA, 120 bp, Artificial Sequence
  ENSG00000275496_1 (sequence is synthesized)
tgccctgtgatctgtaggtccttggggacgcacagttaagatgacaggacatcctggaagctgggaaatggctgaatgctatccagtgaatatacgtgccctgtttgttgaatctactca

SEQ ID NO: 868077 - DNA, 120 bp, Artificial Sequence
  ENSG00000275496_2 (sequence is synthesized)
tttcctaccaccgtagtggaagagagattttccctatctttacaactgatagcatttccaacagtaagctgtgagattctgcttgaaatcacctctcaaacaaataaaaaacagacctgg

SEQ ID NO: 868078 - DNA, 89 bp, Artificial Sequence
  ENSG00000275496_3 (sequence is synthesized)
tgttccctacatatgtttcctcctccgacatcagttcatcagtcaatcaagccatgtgagagtggaggccttgtattccctattattct

SEQ ID NO: 868079 - DNA, 120 bp, Artificial Sequence
  ENSG00000275496_4 (sequence is synthesized)
agccatgtgagagtggaggccttgtattccctattattcttgggcactctactccaagtaggaaaaggccaggaggtcctgttaaaggatgcactcagagcccgggctccctaacatatg

SEQ ID NO: 868080 - DNA, 120 bp, Artificial Sequence
  ENSG00000275496_5 (sequence is synthesized)
agagtgctaaccagcaggtgtagacttttcaggagtgaagaatgaggcaggcattccaaacctggaccttcatcaccttttgtttcatctcaagacaattctgagggactgttttggagc

SEQ ID NO: 868081 - DNA, 120 bp, Artificial Sequence
  ENSG00000275496_6 (sequence is synthesized)
gtgtctggaaggtgaaccttgaagaagagtgtgggctttgatgtgactcagttgagatctttcatggggaggcaggaattcaatgcccagaatctgggctggtgtctttgaggtcagtag

SEQ ID NO: 868082 - DNA, 120 bp, Artificial Sequence
  ENSG00000275496_7 (sequence is synthesized)
gttgcgtctttgtatccaagtccattgttactaggttggaggctggagattctaaatggcttccagaccatctctctgattctctttgggagatggggtctgaaagacaatgtcagtagt

SEQ ID NO: 868083 - DNA, 120 bp, Artificial Sequence
  ENSG00000275496_8 (sequence is synthesized)
tttgggaaattctagaaagtgtgcttggaaacgtgggaagagctcttgcctagtgcctaaatgctccatttgcagctctagccaagtagatacttggtaggtatagagccgggtttgcgt

SEQ ID NO: 868084 - DNA, 120 bp, Artificial Sequence
  ENSG00000275496_9 (sequence is synthesized)
gactcttggcaatgagtgttggatcctggctaaagtgccttgaatgcagcatgaggccaatccatgaatccaacttctcatggagaaatgttaatattttttcagtttgaatcaatcagg

SEQ ID NO: 868085 - DNA, 120 bp, Artificial Sequence
  ENSG00000275496_10 (sequence is synthesized)
gtgaaactaccatgctattggtttgcttactttttattatttcatgtaaaatctaagacaaaatacattaaatgcttattgacatatgtatttattcttcaccaggctgataatatctgc

SEQ ID NO: 868086 - DNA, 120 bp, Artificial Sequence
  ENSG00000275496_11 (sequence is synthesized)
ctaattttaaactttcttccattttgtaggtttcaacttattctattgtaagatactgttaaatctaatagaggcattgtcacttttacgtataattttattttatttcatatatttcct

SEQ ID NO: 868087 - DNA, 120 bp, Artificial Sequence
  ENSG00000275496_12 (sequence is synthesized)
attggctttttacatttaaattatggagcacttcatcatataaaaaacttcaattatatttaaacagtaagtctttggatttttttgccttgtaatttccatattacataataatgagat

SEQ ID NO: 868088 - DNA, 120 bp, Artificial Sequence
  ENSG00000275496_13 (sequence is synthesized)
aaacattaatgttttcagggtactttaaattttagataattactcattgtattcatgtgaaatttgtttttactgcatgtgtgggttggaggactgttttcacttctgattcatctttac

SEQ ID NO: 868089 - DNA, 120 bp, Artificial Sequence
  ENSG00000275496_14 (sequence is synthesized)
tcttatctcatcagagctcatacctcttgtagttgggggattgcagtttataattccaataaatggggcaaattcaataataacataatacaaatgagtttgaatgcaggacaggtcttc

SEQ ID NO: 868090 - DNA, 120 bp, Artificial Sequence
  ENSG00000275496_15 (sequence is synthesized)
aaagcatacacaacatgggcctacatatgtacaacaataataatttataagttactgtttggatggaaagtaaaagtacagaaaatttgttaaaggaaattaaaatggagatcatgtctc

SEQ ID NO: 868091 - DNA, 120 bp, Artificial Sequence
  ENSG00000275496_16 (sequence is synthesized)
aataatctctgagcagacaaaattagttaggtctcataagtgatctcaacctcgcttgatttgcaaatacaaacaaaacttaaattatttcttgtagctgcatattgaaaaaagagaaat

SEQ ID NO: 868092 - DNA, 120 bp, Artificial Sequence
  ENSG00000275496_17 (sequence is synthesized)
gaagctcaaccagtcagaagtagccaacaaccttatataaatagaaactgtccaacaaggtaaacagacaaacaaaaaacaataaaaaaagttgtgctaccaccaaatgatttctttgtt

SEQ ID NO: 868093 - DNA, 120 bp, Artificial Sequence
  ENSG00000275496_18 (sequence is synthesized)
tctacatttttcaaataaatacttgcttcttacactgtcaatgaagcactcaatatctttccgtctgatattttataatttatcaattgctcttactcaaataaacactttgcaatttca

SEQ ID NO: 868094 - DNA, 120 bp, Artificial Sequence
  ENSG00000275496_19 (sequence is synthesized)
tccagatatgcgatggggcaaatcctgaagcgtacatggctatctctcacagctaaagcacccctcacccctatccagcgcttcttacccctggcgcaagagagtcacctgcggggagga

SEQ ID NO: 868095 - DNA, 120 bp, Artificial Sequence
  ENSG00000275496_20 (sequence is synthesized)
aaactatcaaaatcccttaaacccaagttgtaaccgcacaactaaatcagaatccttggagctggatctgaaaaaaatacggttgaaagttgtgcaggtgattacaatgtgtaggcaagc

SEQ ID NO: 868096 - DNA, 120 bp, Artificial Sequence
  ENSG00000275496_21 (sequence is synthesized)
ggacatcctggaagctgggaaatggtaacttcttagaccaagtctagaaacagtctgaggacaataacaattccattctaaaaagaatctcccaacatttcttctatctcaacctcaact

SEQ ID NO: 868097 - DNA, 120 bp, Artificial Sequence
  ENSG00000275494_0 (sequence is synthesized)
ccgtcgcagccaccggtcacctcagctgtgaaccatgtaggagccgtctgggtgtagccctacctgccaggcggcgccccgcgggctgccgccgccgctgccttgaagaagcagttcaac

SEQ ID NO: 868098 - DNA, 120 bp, Artificial Sequence
  ENSG00000275494_1 (sequence is synthesized)
ctcatcagcaggtggccgacctgactatgggccggtcggctctggaccgaaccacagcccagcccgaggccagcgggacgcccgctgccgctcaatcgccccctggtccttggcgaccat

SEQ ID NO: 868099 - DNA, 120 bp, Artificial Sequence
  ENSG00000275494_2 (sequence is synthesized)
tgtccctaccccggcgagcattgccctgcgaggactacacccgatgcttctcctctcttccggaggacacagccagcctgggaccgctgccctgtgctaaaactccgatgacttctgtcc

SEQ ID NO: 868100 - DNA, 120 bp, Artificial Sequence
  ENSG00000275494_3 (sequence is synthesized)
ctaacgctgtgccgagcgctgtgctgtggggggcagcattgtcagactttccgggttgacccgctgttgggagtcctttaagtgcatggtagcaagaaataaagggatatatgaaagcca

SEQ ID NO: 868101 - DNA, 120 bp, Artificial Sequence
  ENSG00000275491_0 (sequence is synthesized)
tagtgtctggagggaagggggaagaatcttcatccactccattgtctgaattgttcacccggtaacttttgccatgacaattttacaaattaaggttttcttttaaaattgaggaataat

SEQ ID NO: 868102 - DNA, 120 bp, Artificial Sequence
  ENSG00000275491_1 (sequence is synthesized)
tgacatttcatcaagggcacagatcttcagcatggagcgtagacccaagggaccaccacaaagctcaagatgtaggacatctccatcaattcaggaggctccctccgggttacccccact

SEQ ID NO: 868103 - DNA, 120 bp, Artificial Sequence
  ENSG00000275491_2 (sequence is synthesized)
ccctccgggttacccccactccagagggtctcattttgttgctgaggctggagtgcggtggcacaaacgtggctcactgcaggcttgacgttctgggctcaagtgatcctcccatcttgg

SEQ ID NO: 868104 - DNA, 120 bp, Artificial Sequence
  ENSG00000275491_3 (sequence is synthesized)
ggccatgatactgctggtggtgcagaacggagtttagacaaggaggtgcatggccgagagcaatctggaaacgatcagagaggccagttgcgtaatgatggagaagccgctgttttgcag

SEQ ID NO: 868105 - DNA, 120 bp, Artificial Sequence
  ENSG00000275491_4 (sequence is synthesized)
ccacgaaaatcatgcctggagagagaatgttccgggatgtgaaattattcacaatctattgttcaaagaagacagttgattatgggacggaagggatgctatggccttccagagctccag

SEQ ID NO: 868106 - DNA, 120 bp, Artificial Sequence
  ENSG00000275491_5 (sequence is synthesized)
gagaagagagctaagccagcccttgggatgactacaagaggaccgggggagacagggaaacacaaggggagtagaaggcttcagtagaagatttcagtagaggctgaaatctactgatat

SEQ ID NO: 868107 - DNA, 120 bp, Artificial Sequence
  ENSG00000275491_6 (sequence is synthesized)
gtacacctccaaggacacatgtgtcacatcagaatagttgctgaatcccactgggcctctatttcctcatgtgtaaaatgggaataataaagctcctacttcacagggctgtggattaga

SEQ ID NO: 868108 - DNA, 120 bp, Artificial Sequence
  ENSG00000236137_0 (sequence is synthesized)
ccaacctcctgctgcaagaattccatttttggcattgccgacgaatcctacatgttaaagaacatctctttgatgatagtcaagaaagaatctagacattcgctcacctcctgcactgtg

SEQ ID NO: 868109 - DNA, 120 bp, Artificial Sequence
  ENSG00000236137_1 (sequence is synthesized)
agctccttgagggtttatcttttaaaaaccgtatacctgttttacaaggatctcacaaagattaacaatatgtatgctatgaaggatcccatctgcctcagagaagatacgcttttcatc

SEQ ID NO: 868110 - DNA, 120 bp, Artificial Sequence
  ENSG00000236137_2 (sequence is synthesized)
ttcttatctatttattctactgcaaaaactgccgattctacagagcctattaattccactgggaaaacatgtacggaatgtgctcatgagtatgggacttcctgtaattgttggaaagaa

SEQ ID NO: 868111 - DNA, 120 bp, Artificial Sequence
  ENSG00000236137_3 (sequence is synthesized)
gaaaaaggctgatagaaaaaacattttggcctggcactcaggagaaaacttctgctgaggaatgaacagggaaaaacaatgatggaccacctcaaggaacaaatcggatagcttcgactt

SEQ ID NO: 868112 - DNA, 120 bp, Artificial Sequence
  ENSG00000236137_4 (sequence is synthesized)
cccctctggaagccctgctgcgctgggatgcacctatccctacttcttagatgttcccatatgttctcaacagcattctgtccctcctaagcagtgtcactaaagctagctggtctctta

SEQ ID NO: 868113 - DNA, 120 bp, Artificial Sequence
  ENSG00000236137_5 (sequence is synthesized)
ttggcccgcgctgctgcttcctgtgtgtactggatgttctctaggctcgcccagcgtggaagccccgagttaccagccgcaacgtggaaaccacagaaggggaaatagatgacttttggt

SEQ ID NO: 868114 - DNA, 120 bp, Artificial Sequence
  ENSG00000236137_6 (sequence is synthesized)
tatccagatctctttgaatcttgttcctgtcaactgacttattagtgccatctcctaattctgtgtcaacttgacaagcctgctgtctttcccttcatccaagttgccaataaaaatgct

SEQ ID NO: 868115 - DNA, 120 bp, Artificial Sequence
  ENSG00000236137_7 (sequence is synthesized)
caacaaggcagagtgctttagcaagacctggagagatctcctacagggtctcaatggagcctgatgaatgaatcaattgcatgagtacattccacacatgggaacccagggatggctgcc

SEQ ID NO: 868116 - DNA, 120 bp, Artificial Sequence
  ENSG00000236137_8 (sequence is synthesized)
atcatgctatacaaagtacagatcatcactgaacattaggctggcagctctgaatggggctggcaaagagcagcagaggttcatggcctggattttctctgatctcatttgtatccttca

SEQ ID NO: 868117 - DNA, 120 bp, Artificial Sequence
  ENSG00000236137_9 (sequence is synthesized)
aagcttagcttattgctcacctcccaccttctccctgaaccccagcagaaagacatggacctgtcagatgctcccgatatttaagtgtctatgccaaaatctcatgtggaccttgtttgt

SEQ ID NO: 868118 - DNA, 120 bp, Artificial Sequence
  ENSG00000236137_10 (sequence is synthesized)
tcaaatgagttactattgagagagacagcaaagtcatcttctttagggaacctgaaaattgtcttcagtctgaaaattgtcttcagaaggagcaaaagataggtgagagggagaggataa

SEQ ID NO: 868119 - DNA, 120 bp, Artificial Sequence
  ENSG00000236137_11 (sequence is synthesized)
gaggagagccatgtattctcctgaccatgagctcgcggtagataaacccctggttacctgaaggcagcaccgtgagcaccatccgctgtgactcatcggatgcttgattaatccacttgc

SEQ ID NO: 868120 - DNA, 120 bp, Artificial Sequence
  ENSG00000236137_12 (sequence is synthesized)
ttgggtgtccatggagctgccactctgccaccctacaccagtacattcctgcatcctccatctccacctgatgaagcttcaggacaaagtctgtagaggatgaacggtaacagtgcaggt

SEQ ID NO: 868121 - DNA, 120 bp, Artificial Sequence
  ENSG00000236137_13 (sequence is synthesized)
gcctcctgagcccctcttccccatactccagcaagccatcatgttgcaagtgcaccagcaatttacttccagagttttctctgttccagtaccacatcacagagtacagagtggctgagc

SEQ ID NO: 868122 - DNA, 120 bp, Artificial Sequence
  ENSG00000236137_14 (sequence is synthesized)
tgcctacactctccaggctgcagcggatggccacttctctgtgctcagtcacattttcggtccagtacactttggagacacgtaccttacttcctagaaaataaaatggcagtaaattag

SEQ ID NO: 868123 - DNA, 120 bp, Artificial Sequence
  ENSG00000236130_0 (sequence is synthesized)
atggtggaaagctgcacttgaagtccaactctgtcctgggggaataattatgttccctgtcttgggagcctttcttcagggagcttgatggttccaacccacccaggagcctgggacatc

SEQ ID NO: 868124 - DNA, 120 bp, Artificial Sequence
  ENSG00000236130_1 (sequence is synthesized)
tgtgcccctgggcaatcccctgcagtttcctgattccaagatgagggggtagaatccgaagatctccaaggccttgatgagtgctaccagtctgcaaattcccaagccaagttcttcaat

SEQ ID NO: 868125 - DNA, 120 bp, Artificial Sequence
  ENSG00000236130_2 (sequence is synthesized)
gaatcaaatttcctccagtagccatttctaccaaaggagcaactgtttttccttcccactgacatggctatgtattcgaactggatataggtgagaggcatttttgtcctagcttctcgg

SEQ ID NO: 868126 - DNA, 120 bp, Artificial Sequence
  ENSG00000236130_3 (sequence is synthesized)
gcccctccaaggagctccaagaggcttaaggatcccagccatgttgggataaaaatacccaatcaatcaataaacattttatttaaaaatgatttatttaaaaaatcacacaatttgaga

SEQ ID NO: 868127 - DNA, 120 bp, Artificial Sequence
  ENSG00000236130_4 (sequence is synthesized)
gcaaatacagaagatatgaattagcaaaacgaacaaaattaaaatctcatacaatcgcaggacactgggacctgaagtcttggagaggatgtaatcactaagtcatcccaaggaagagtg

SEQ ID NO: 868128 - DNA, 120 bp, Artificial Sequence
  ENSG00000236130_5 (sequence is synthesized)
gatgcctacaagagagggatgcctacaagagagggatgcctaaattggttacccctaagcccaccgacttttaaggcatgtgtaagtgagtgggaacctgcaaaaagactggaaggagca

SEQ ID NO: 868129 - DNA, 120 bp, Artificial Sequence
  ENSG00000236130_6 (sequence is synthesized)
gccagagaggtaggaagaaaaccaggagtgcctgttgtcacggaagctgagggcaaggaggacagtggttgggagaatctgatgcagcagctccaaggaccatggccccaggaactaggc

SEQ ID NO: 868130 - DNA, 120 bp, Artificial Sequence
  ENSG00000236130_7 (sequence is synthesized)
acaagtgacaggagacacttgctatgtctaaacccagtgcaccctcagcccggcctcgccttttcaaggacggctagcacaggccatcatcctggcccacgatgaaggatctctctctgc

SEQ ID NO: 868131 - DNA, 70 bp, Artificial Sequence
  ENSG00000236130_8 (sequence is synthesized)
cagcctcaaactcctgcatgagagaacagaaatagagatttgggtggctttagctgtttaaaataaggtg

SEQ ID NO: 868132 - DNA, 120 bp, Artificial Sequence
  ENSG00000236130_9 (sequence is synthesized)
aatagagatttgggtggctttagctgtttaaaataaggtgaccaaacctcctttctgcctgttcctgctatttcaaacaccactgttctccacacaatgaaaatggccttgttccttaag

SEQ ID NO: 868133 - DNA, 120 bp, Artificial Sequence
  ENSG00000236130_10 (sequence is synthesized)
acagcgtcagggcggggagggcgcttggagatcccccgggtcggccccctccgcaccccgatcgactgaggcccggagagttcaggaaccggctcgggagacctcagcgcccgaactcgg

SEQ ID NO: 868134 - DNA, 120 bp, Artificial Sequence
  ENSG00000236130_11 (sequence is synthesized)
cagaatgaggaaaggccagagatttggactccaaagaccacagcttggattctaagctgtcacttaccagccaaaagggaatcttggcccagtcactgaagccccctgagtctcaactac

SEQ ID NO: 868135 - DNA, 120 bp, Artificial Sequence
  ENSG00000236130_12 (sequence is synthesized)
ctcatctgtaaagggtctcatcaggcccacattagattatctactcgaccatcagttcaagctctaaggtaaagatgtagagcaactggaactttcatacactgctgcaaccactttgga

SEQ ID NO: 868136 - DNA, 120 bp, Artificial Sequence
  ENSG00000236130_13 (sequence is synthesized)
gactatcagcattttccactaaagctgaacattatggtctagaaattgcactcctgagcagcttctgagagatgggggacgtggagcagtcctgggtctcatggtctgaagggagaagaa

SEQ ID NO: 868137 - DNA, 120 bp, Artificial Sequence
  ENSG00000236130_14 (sequence is synthesized)
gtggagcagtcctgggtctcatggtctgaagggagaagaaatcctgcccaggcagaccactgtgaatgtccaggcttgtttccacctgaacagactctcccttagctaagagaaccagac

SEQ ID NO: 868138 - DNA, 79 bp, Artificial Sequence
  ENSG00000236130_15 (sequence is synthesized)
cagtccccaagaattcatctgtttgataacgcccaaagccctgcatctataaccttgtaatagtcttaaagcccctgca

SEQ ID NO: 868139 - DNA, 80 bp, Artificial Sequence
  ENSG00000236130_16 (sequence is synthesized)
acagtccccaagaattcatctgtttgataacgcccaaagccctgcatctataaccttgtaatagtcttaaagcccctgca

SEQ ID NO: 868140 - DNA, 120 bp, Artificial Sequence
  ENSG00000236133_0 (sequence is synthesized)
agtggcaaagagcaaccaaagaactacatatttatcagtgatgaaattggacacactcgattttcctcccactggtaatatttgcagtcagcatgaatagactttctcagtacagttttc

SEQ ID NO: 868141 - DNA, 120 bp, Artificial Sequence
  ENSG00000236133_1 (sequence is synthesized)
aactcctggcacaacagtatcctttttccaaactatagcataaatcacagaaaagtatctcctcatttgtttgggatgagttttaattcagaaacaatttatagtaatattctaagagac

SEQ ID NO: 868142 - DNA, 120 bp, Artificial Sequence
  ENSG00000236133_2 (sequence is synthesized)
tgactgaatttgctttcccaactgaaaaaggaatcaactatttgttattatttaatgaagctttgaagcatgaggaagtcaattattcttcagtgcagtgatgtacaaaggggactcctg

SEQ ID NO: 868143 - DNA, 120 bp, Artificial Sequence
  ENSG00000236133_3 (sequence is synthesized)
cattttccctgttccctgaagagattaagaacttctgagtggagacaaacgggaaaaaatattgtttgtggaaccttgcctaggcttgatgagaaggaggaaagagctcttacagctaaa

SEQ ID NO: 868144 - DNA, 120 bp, Artificial Sequence
  ENSG00000236133_4 (sequence is synthesized)
actaatcagtaactgtggtttctccaaacatggaagaattttccatcaacagtcacaatggggagtgtctagttggaccatcatggaagatggatggatctggggagtttggatggtgta

SEQ ID NO: 868145 - DNA, 120 bp, Artificial Sequence
  ENSG00000236133_5 (sequence is synthesized)
atccattcccggtggtagagccttatcattcagtctggggagtggactggaatccagctggcattcatcgtccccctgtcctgccttggcaggggttgcagtacactagtgatgacacag

SEQ ID NO: 868146 - DNA, 120 bp, Artificial Sequence
  ENSG00000236133_6 (sequence is synthesized)
cagccacattgaggggagtagttctaattctactctcagggacacccatctgtggtgtatcattggtgtctggtggcttttggaaattccaatatatagcacagtcatttctgtttctaa

SEQ ID NO: 868147 - DNA, 120 bp, Artificial Sequence
  ENSG00000236133_7 (sequence is synthesized)
gaggagaggacttttcaacttagcaagagtataatgaaaaagtgggagttagcaactattaaagttttggtagcttctattgggcacctagaaacaaagcctaaatatgagaaaagatca

SEQ ID NO: 868148 - DNA, 120 bp, Artificial Sequence
  ENSG00000236133_8 (sequence is synthesized)
ataagccctgtggtagaatcacatgaaaaccttactttgggatatttttgtgcattttaatgatttctgacttttaaatttacttttccaaagctgccattctttctcaggctccaaact

SEQ ID NO: 868149 - DNA, 120 bp, Artificial Sequence
  ENSG00000236133_9 (sequence is synthesized)
aacactgagaagcaagatttaggggcactgaccatgcatctgataagtcattacttcaggaaatatgtactaagcccttttatgtgacaggcactggagtaaggaaaatgggcaaacagc

SEQ ID NO: 868150 - DNA, 120 bp, Artificial Sequence
  ENSG00000236133_10 (sequence is synthesized)
acttgcttcaaggagagaagagcaacatgtcagaaagccaaactgaattaaggagagaaaattaaatttctcatttaacagctgcaacaataacatacaaataaatttactgatcaataa

SEQ ID NO: 868151 - DNA, 120 bp, Artificial Sequence
  ENSG00000236133_11 (sequence is synthesized)
aagaaggttagcaggattaaatgaagcaaaaaggatggagccctaattcaataggaatgatgtgattataagaagagaaagagacaccaaagcacagaggcaagatggtgtgaggacaca

SEQ ID NO: 868152 - DNA, 120 bp, Artificial Sequence
  ENSG00000236133_12 (sequence is synthesized)
atgggaaggtggcatctgcaactaaggagagaagcttctggataaaccaaatttgctgacctcttaaccttggacatccagtctctagaacagtgaaaaaattaatttctgtggtttaaa

SEQ ID NO: 868153 - DNA, 120 bp, Artificial Sequence
  ENSG00000236133_13 (sequence is synthesized)
agtggcaaagagcaaccaaagaactacatgtaagtgtttcactgcttcatcccagagaaggcacaatatcaatattgcccacatttcatgaccatatcatatcatattagcctccctact

SEQ ID NO: 868154 - DNA, 120 bp, Artificial Sequence
  ENSG00000236133_14 (sequence is synthesized)
atcagaaatgcattaagatgttcacaaaaagaaatgtacaaaatgttcttagcaacattcttgtatttggttattctgagaataaccaaagcctaaaaacagtccagatgtccatcaagt

SEQ ID NO: 868155 - DNA, 120 bp, Artificial Sequence
  ENSG00000236133_15 (sequence is synthesized)
gtaatttgtataaattatgtttatttattccaaacaatgtaatttggcaatgaaaactaacagattacagctagacacagcaacaggaataaatcacaaacataatgttgagccaaagaa

SEQ ID NO: 868156 - DNA, 120 bp, Artificial Sequence
  ENSG00000236133_16 (sequence is synthesized)
ggaatcaggagactggttacccttgggggtcagtaacaaaaagggagtgaaaaggggctttctgagatgttgctaatatcctgatcctcaatttcagtgaatgctggttacatgcatatg

SEQ ID NO: 868157 - DNA, 120 bp, Artificial Sequence
  ENSG00000236133_17 (sequence is synthesized)
tgtcttttgtgaaaagccacagcaccatcacttatgcagctttttgtgtgtatattatacttcaataacaacaagcaagtgatagatctgggactcaaacccaggctttgaggctccaaa

SEQ ID NO: 868158 - DNA, 120 bp, Artificial Sequence
  ENSG00000236133_18 (sequence is synthesized)
attatattgtttaaatggttttatattccaattatatcagatagttttagatatctgtatctaattctttcacataatcgataccaacaactcttgtcttaaagatctagaacttttgcc

SEQ ID NO: 868159 - DNA, 120 bp, Artificial Sequence
  ENSG00000236133_19 (sequence is synthesized)
ggtggcttccatatttattgttttctcccatgaagcttagaagctggcagggcttttctgctcacaaaatgccctgcatgcttacactgagtggaagtttcccatgctgagtcatgctgg

SEQ ID NO: 868160 - DNA, 120 bp, Artificial Sequence
  ENSG00000236133_20 (sequence is synthesized)
gaatatggaaaagcccctggctttaaaagttcccagaaactatttaatcttcagttcatcaaacgcacccagattctaattatggcaagacgcagtacatggattttcacttcttacttt

SEQ ID NO: 868161 - DNA, 120 bp, Artificial Sequence
  ENSG00000236133_21 (sequence is synthesized)
caactcataatttttcatttaaatctcccaactatttactctttcacctaatttttttttaatctaacccatttttttccacatgatgaaatcaactgagacatgtttctgaagtgtggc

SEQ ID NO: 868162 - DNA, 120 bp, Artificial Sequence
  ENSG00000236133_22 (sequence is synthesized)
acaagccagaggaagggccctcatgtccacggattctctatttactaatttaaaaataattaaacctaaaaagtgttcatgtcaaagcctttaatatattttcattccttatcaacagtt

SEQ ID NO: 868163 - DNA, 120 bp, Artificial Sequence
  ENSG00000236133_23 (sequence is synthesized)
ctaattggcatttacatccatttctaggtctacattatcttatgataaaataactttattttactatgaaataaatatgattaaagaaagaaacataaccaaaatccttggagagtaaaa

SEQ ID NO: 868164 - DNA, 120 bp, Artificial Sequence
  ENSG00000236133_24 (sequence is synthesized)
aatatatacataggtcattttttccccttctctgctattataacacctcccgttatcagttctctaaaagaacaattccaaacctcagagtgtgctgagtcagtttatcagcttctctgc

SEQ ID NO: 868165 - DNA, 120 bp, Artificial Sequence
  ENSG00000236133_25 (sequence is synthesized)
cacttgcttactagtattttttggacaacaatcatacccacctctctgccacactcgcaggaaagatatttatttccacatatgccctcctggcttctgcacatctagattcctgttccc

SEQ ID NO: 868166 - DNA, 120 bp, Artificial Sequence
  ENSG00000236133_26 (sequence is synthesized)
ctctccaaaagctgttgctagcagtcacatttttttctgctgatcaaagaagaaaagcaaaatccatctctccttctctccctccctccttttctctctccctccctccttaaatccctt

SEQ ID NO: 868167 - DNA, 120 bp, Artificial Sequence
  ENSG00000236133_27 (sequence is synthesized)
tttcccacttaacttttggaaaaacaattgcgcaagaaattagaaaaccccaaagatagtattttcaaatttcaacaaaattataaaagatacacctttttatttgtgcctcaggatgca

SEQ ID NO: 868168 - DNA, 120 bp, Artificial Sequence
  ENSG00000235445_0 (sequence is synthesized)
gccatgtggagactctgaggaggcagatttagcttcagccttgtacttgggagtacagagtcagagtttggaggtgcagctgagtctgaaggacactgccggtctccatccttggggcgc

SEQ ID NO: 868169 - DNA, 120 bp, Artificial Sequence
  ENSG00000235445_1 (sequence is synthesized)
cagggttctgtcatgaggataataggtagagatggtctccatccttggggcgcacagggttctgtcatgaggataataggtagagatgagtgtgcccatagtcctgtgtggacttaggag

SEQ ID NO: 868170 - DNA, 120 bp, Artificial Sequence
  ENSG00000235445_2 (sequence is synthesized)
ttactagtgacagcagcaggtgaaattaagacccttggggggtgcagggagggtcccagggaaatggggaggggtgaagacccaaggaggttgaagggaaggtggtgcagcagtgtgaga

SEQ ID NO: 868171 - DNA, 120 bp, Artificial Sequence
  ENSG00000235446_0 (sequence is synthesized)
atagtttgatctctttctgcctagctctcatgtctgtctctggattgtttcaaatcctaagagaaaaggaatatcatttattgcctcttgcaaagtaaatactcctctatttaactgacg

SEQ ID NO: 868172 - DNA, 120 bp, Artificial Sequence
  ENSG00000235446_1 (sequence is synthesized)
ggatgaaccaatgatgtcatttaacagtttgtttgttggtgatctctactgctgaaatctcattaacatacacatttactcctttgatcttcacgataatcccatggaattggcaagtaa

SEQ ID NO: 868173 - DNA, 120 bp, Artificial Sequence
  ENSG00000235446_2 (sequence is synthesized)
aaggcattattgacattttacaggattataattcagattcttaagatcccctttggcattcttctctttggggtcaaacccatgtgaaaaatatattatactttatatgcacatataaat

SEQ ID NO: 868174 - DNA, 120 bp, Artificial Sequence
  ENSG00000235446_3 (sequence is synthesized)
atgaattagtagtattcaagatccacgcattgctcaagatatttgaaggcatccctctccctagcatgaagaaaatgtccagtgaggtatctgccaatcactccccaggatggtactgag

SEQ ID NO: 868175 - DNA, 120 bp, Artificial Sequence
  ENSG00000235446_4 (sequence is synthesized)
ggctggattctgaaatggatctgcatccagctatgacatctgagtattctctttgcctaatgatgcctgtgctaccaaaatctactgcaaataacctaataattgtacacagacatcttg

SEQ ID NO: 868176 - DNA, 120 bp, Artificial Sequence
  ENSG00000235446_5 (sequence is synthesized)
acataggccagttctcaacaacagtaaaattttgagcctggagtatgagagctgtagaaaggacagcagaaaagaagcattgaaaataaataaaaactggtcaggggaaatttgacagaa

SEQ ID NO: 868177 - DNA, 120 bp, Artificial Sequence
  ENSG00000235446_6 (sequence is synthesized)
attgacattttacagctttttcaggagttaagctgccttcgcaatgaggatcaaacctgcagcttacagcttatagactcgatgtatgtaagcaaaatggggaattgccaagtctacctt

SEQ ID NO: 868178 - DNA, 120 bp, Artificial Sequence
  ENSG00000235446_7 (sequence is synthesized)
aaaatggccatttgccatacagttacttgatagacccattaaattccagtaaattcaaaatgttccaatgtggctaattattccagaaatgccaataaaaatgaaatgtgatgttcccca

SEQ ID NO: 868179 - DNA, 120 bp, Artificial Sequence
  ENSG00000232490_0 (sequence is synthesized)
tgctgcgtgactgctcctggtgccaaggccaccgctgccatgagtctgaatggctaatgctgagattagcagggcctcccttctactggcctgtcctcctggctctcctcccttttgcct

SEQ ID NO: 868180 - DNA, 120 bp, Artificial Sequence
  ENSG00000232490_1 (sequence is synthesized)
ttgcaggggaaatcctcatctttcccactcactgctacactcactgtgatgtgtttatagaccttcggggaccacacctcctccagctgtctgccttactcgaaaattagacccagcttg

SEQ ID NO: 868181 - DNA, 120 bp, Artificial Sequence
  ENSG00000232490_2 (sequence is synthesized)
tccctgacttctagtagccagaaagtcttccacaagatccagccgcatgatacggagtacacacataaatgtgaaaacaaacccctccatcctttcccactgtaaatcaacagcacatgc

SEQ ID NO: 868182 - DNA, 85 bp, Artificial Sequence
  ENSG00000232490_3 (sequence is synthesized)
acaaacgaattgtttttttcaacttgacaagtatcctgcataaaactgcattaaaaaccagtaacatcagacccgggatggggac

SEQ ID NO: 868183 - DNA, 120 bp, Artificial Sequence
  ENSG00000232490_4 (sequence is synthesized)
ctgcattaaaaaccagtaacatcagacccgggatggggacggaaggtccaaatcagaacctccatggaatgcatctctacatattttcacatctgttttcaagcaaggagcaagaccagc

SEQ ID NO: 868184 - DNA, 120 bp, Artificial Sequence
  ENSG00000232490_5 (sequence is synthesized)
tgggatgtgctgtgcaaatcagctacctgggcttcccacctgtggatgctcactgacctggggccgcaccaggtgatttcaggacttcctcagagaaaacccaggcaagacaccagcaac

SEQ ID NO: 868185 - DNA, 120 bp, Artificial Sequence
  ENSG00000232490_6 (sequence is synthesized)
agagctaccctgataattattaaattagctctatgtggagaagccatatttgaataagttattagtggaggtcctttgtaaaccatgctccattatataaatggcagatgtcattattta

SEQ ID NO: 868186 - DNA, 120 bp, Artificial Sequence
  ENSG00000232490_7 (sequence is synthesized)
acatttaccacacttggctcttatagactggaaggacagatgctcttcctgagcaaaggggccgacctgcagaaagaaagtcagctcacaggaagcaggaccaaaatgttttgctcgccg

SEQ ID NO: 868187 - DNA, 120 bp, Artificial Sequence
  ENSG00000232490_8 (sequence is synthesized)
ctgtggctttatcaacaaaaatactatctgacactgacttattcgttgcataagtaaaggaaataaacagctggctttcccctatggaaatgaggaactgctgaagattctgaggaggct

SEQ ID NO: 868188 - DNA, 120 bp, Artificial Sequence
  ENSG00000232490_9 (sequence is synthesized)
ttgcgcaccatcctcctagtcacccaggcttgagacctgcaagttcccggacacctcccatctagagagccacctggcccaccatcccttcctttcctcatctttgctgctaccacaccc

SEQ ID NO: 868189 - DNA, 120 bp, Artificial Sequence
  ENSG00000232490_10 (sequence is synthesized)
taggttttgaccacataaatgtagggccctgccagcctcccagctcatccttctgctccagacgcctcctcttaacactgtcttgtaccacaccaccagagtgttcttccccagacaccc

SEQ ID NO: 868190 - DNA, 120 bp, Artificial Sequence
  ENSG00000232490_11 (sequence is synthesized)
cttttgcctcttctggatttcaggtaacaaagcaccacattagatactgaagatagaaatttgcttaagatatggtctcagcattcaacaggctggtgttctggttgagaaggagtacat

SEQ ID NO: 868191 - DNA, 120 bp, Artificial Sequence
  ENSG00000232490_12 (sequence is synthesized)
ctggatttcagggagcttttctgtgccaaaccaggaatcacagacatgcaggggcaagagggtctactctagcacggattaagacgacctcctaaagccatcttatgcccaagtaaataa

SEQ ID NO: 868192 - DNA, 120 bp, Artificial Sequence
  ENSG00000232490_13 (sequence is synthesized)
gtatccaataaacagacaatatctcaacagaaaaacagcacccactgaactcaagtgacctgcaactttcctgaaaacctatatggcaaggacagacaataaagccagctagagaatgaa

SEQ ID NO: 868193 - DNA, 120 bp, Artificial Sequence
  ENSG00000232490_14 (sequence is synthesized)
actaagcaagacaaacacaaagcagcaagtgcagtgaatcagagatagtatcccagcaaccagccccagaggaccagctgtggtttggaggtgacaggagcagcagccatccacacctgc

SEQ ID NO: 868194 - DNA, 120 bp, Artificial Sequence
  ENSG00000232490_15 (sequence is synthesized)
aatcaggagcatcacaaaccacagaacggttttgatttacaagtcattagaagcaagaggcatttactgttctttgcaggccaaaagggactgcatcatgaataatggaaaaagcaaaat

SEQ ID NO: 868195 - DNA, 120 bp, Artificial Sequence
  ENSG00000232490_16 (sequence is synthesized)
gcatcatgaataatggaaaaagcaaaatgcattaagaactcttcggcagataatgttataatgttctctccaggccacgcagaagaatttccatttcttcttcttcttttttttttttct

SEQ ID NO: 868196 - DNA, 120 bp, Artificial Sequence
  ENSG00000235448_0 (sequence is synthesized)
gagaagtttttcacattgaacacagaccagagaagtgtttccactaatttataggatgaaaaaaaaaaaaaaactactgcctttcatttctctactcttccgacaactctgagaacaatg

SEQ ID NO: 868197 - DNA, 120 bp, Artificial Sequence
  ENSG00000235448_1 (sequence is synthesized)
gttcctgagagtgacaatatctgaggaaagagcaggtcctgcaaccaacgagaaattctcctgcagcatttcaaagcaggcaagatggagagtatttgagcggtcaaatagaggatatga

SEQ ID NO: 868198 - DNA, 120 bp, Artificial Sequence
  ENSG00000235448_2 (sequence is synthesized)
gaagaaaaaaagaataacttctatgtggaaaatgattcttaaatttgtttgcatatggacaaactctgccattgcacctaacatcctatggaccaaagtcctgtggaatttccacataaa

SEQ ID NO: 868199 - DNA, 120 bp, Artificial Sequence
  ENSG00000235448_3 (sequence is synthesized)
gttgattcaaagatggtattttggtggctggaagaacgttagctgcaataaaatattaactattttcaatccaccaagtttggcgcattaattttgaatattggagaaatactatgcaac

SEQ ID NO: 868200 - DNA, 120 bp, Artificial Sequence
  ENSG00000235448_4 (sequence is synthesized)
aagcatgtgaagacatgggtatggaatatttaaagaaagaaggttttatctaaaggtggaaacgtgtgggtctccagtaaaagatgacgaatggaactacagaaatggacaagatcatta

SEQ ID NO: 868201 - DNA, 120 bp, Artificial Sequence
  ENSG00000235448_5 (sequence is synthesized)
aagaagaacagtaatagaagagagaattgttatgaagactaaataggatactatatcaatgcatttcatactatatcagatacataatatatgttcaataaaatgatagtttttcccttt

SEQ ID NO: 868202 - DNA, 120 bp, Artificial Sequence
  ENSG00000235448_6 (sequence is synthesized)
attgcctcatagagattctgtccaatttcactgccacaacacagggaagtagaacaaagggggatcgaacatgaaagttttctactattatgttatattcacatctttttttgtttcagg

SEQ ID NO: 868203 - DNA, 120 bp, Artificial Sequence
  ENSG00000235448_7 (sequence is synthesized)
caagatggagagtatttgagcggtcaaatagaggatatgagaagaaaaaaagaataacttctatgtggaaaagcacaaataataatatgatccaaggaggagaacagaaagctcaggaag

SEQ ID NO: 868204 - DNA, 120 bp, Artificial Sequence
  ENSG00000235448_8 (sequence is synthesized)
agatctacatgtggcagaaacttgacctgtgacagtggtggcattcagatcactggagaaaggatgctgggacaactgattaggcgtactcttactgtgttcactttggaagagctggaa

SEQ ID NO: 868205 - DNA, 120 bp, Artificial Sequence
  ENSG00000235448_9 (sequence is synthesized)
agcagctagggggcagacatcagtacaatatactccttttctgaaaactatcccccatatcagcttttgttttctaactttataactgcaagcatacatttggtttgcttcttttctttt

SEQ ID NO: 868206 - DNA, 120 bp, Artificial Sequence
  ENSG00000235448_10 (sequence is synthesized)
tttttcacattttcttaggaaacattttctgtgaaattccaacacaagacacatgacttctaagtagtgctaagaaaactaagaggattagtttatacaactagacatttccaaaataag

SEQ ID NO: 868207 - DNA, 120 bp, Artificial Sequence
  ENSG00000235448_11 (sequence is synthesized)
aaagttagcaagatattgaccaaactactcaagaaaggcagtgtaaaaatgtgtaggcactttctgtttcccctggagcaacttctagagtaccttgaacattctaggtgtttaatgaat

SEQ ID NO: 868208 - DNA, 120 bp, Artificial Sequence
  ENSG00000235448_12 (sequence is synthesized)
gcctggtacactgttactctataataaaagtagattttagtctgaattctctagtagaatgaagggcctttcaggcaacatatttaatctctttatctaaaaagaaattctgactccaag

SEQ ID NO: 868209 - DNA, 120 bp, Artificial Sequence
  ENSG00000235448_13 (sequence is synthesized)
ctatcatttggaacttactgttacaaagtgttcccagggtatcataatcttccaaggagtcacagaccactcgccattgagaaaagacagagtttgggcttattagagtggaatcaaagt

SEQ ID NO: 868210 - DNA, 120 bp, Artificial Sequence
  ENSG00000235448_14 (sequence is synthesized)
aatgaaaacatggactccccatattcacagcagagaagtttttcacattgaacacagaccagagaagtgtttccactaatttatatctgatatgtgaagggctaagaagtcatcactccc

SEQ ID NO: 868211 - DNA, 120 bp, Artificial Sequence
  ENSG00000235448_15 (sequence is synthesized)
atcttcataacaagaaaaaaagctgaacaaactggaaatcaacaactatgcttaggttcatcagaaaactgaggtcattggctaaattgcagccctggaagacagacacatggatacaga

SEQ ID NO: 868212 - DNA, 120 bp, Artificial Sequence
  ENSG00000235448_16 (sequence is synthesized)
gaatcatagcttaacaggaacagaaaactggaagcagaaggccttagctttctgtaggaacactaactgtcattggtgaattgctggaaggttagtgtggactagcttgtgagttaaaaa

SEQ ID NO: 868213 - DNA, 120 bp, Artificial Sequence
  ENSG00000235448_17 (sequence is synthesized)
atccaaagggacccagtctcaggggcaccccgcactttcatgagttttacctccaggaaacctaccaggttctcaatatcccctgtgcttctggcagggagaggaaagctctgaaataca

SEQ ID NO: 868214 - DNA, 120 bp, Artificial Sequence
  ENSG00000235448_18 (sequence is synthesized)
tccagacctctctgatctccttaaaaaagcttgtccctaagggaatctattttaccagaacctaacaggctggagttttaccaaagcctgatcaacaaaatatccaactcaggctcgcta

SEQ ID NO: 868215 - DNA, 120 bp, Artificial Sequence
  ENSG00000235448_19 (sequence is synthesized)
acagcaaaaagaactgcaggcctctgaccatatttaaagagtgccaaaggaaacccaaagacaatagagtagacaaaagcaaggatactagaggaaattttagtctctgacactatagct

SEQ ID NO: 868216 - DNA, 120 bp, Artificial Sequence
  ENSG00000235448_20 (sequence is synthesized)
acagcaaatagtaagcagaatctaactcctagtcacataaatataaaaccttgcactaaagacctatctatcacagttccttttatatcatatccagccttcaacaaagaattacaagcc

SEQ ID NO: 868217 - DNA, 120 bp, Artificial Sequence
  ENSG00000235448_21 (sequence is synthesized)
actctaaaaggcaaaaacaaagtctgaagagacaaagcaagcatcagaaccagactcaagtgtggcacagatttgggaactatcagacaaggaatttaaaacaactatgattaatacgcc

SEQ ID NO: 868218 - DNA, 120 bp, Artificial Sequence
  ENSG00000235448_22 (sequence is synthesized)
aatggttctaatggaaaaagtggacagtgcaagaacaagtgagtaataaaagcagagagatgaaagtgcaaagaaggaaacaaatgaaaatgcaagaaatcaaaaacactgtaacataaa

SEQ ID NO: 868219 - DNA, 120 bp, Artificial Sequence
  ENSG00000235448_23 (sequence is synthesized)
taatgcctttgatgggctcataagtagattggacatagctgaggaaagaatcagtgagcttaaagatgagtccacagaaactccccaaactgaaatgcaaaaagaaaaaagaaataaaaa

SEQ ID NO: 868220 - DNA, 120 bp, Artificial Sequence
  ENSG00000258913_0 (sequence is synthesized)
gtcctggggctgcttctgctctgatgaaggcacccactgtcactgtcccggccctcgctgagtgttcccggacccgtgggcccgcgtctgtgccaggccttggggagctccagcctcgga

SEQ ID NO: 868221 - DNA, 120 bp, Artificial Sequence
  ENSG00000258913_1 (sequence is synthesized)
gcctcttcccgttctcagacctcagtgcgaggaggaaatcgggtgcctagtggggcactacctgtctggaagtattttacacgaagtttaagccttgagatttcctggagcaggacctct

SEQ ID NO: 868222 - DNA, 120 bp, Artificial Sequence
  ENSG00000258913_2 (sequence is synthesized)
gaagtcaccatcacaaatggcaggcccacacaaggactgatttacttctgactcacccatggccttcaggcttagagttggggccttgtcggattcctctctcttaccaactctgggctt

SEQ ID NO: 868223 - DNA, 120 bp, Artificial Sequence
  ENSG00000258913_3 (sequence is synthesized)
tgactctgttgtccctaatgccatgctgataaataattaataactggctcttcataaaaaaaaacagttttgatctgtagcacctgccaattcccatggtgtaaacactcctgccatggc

SEQ ID NO: 868224 - DNA, 120 bp, Artificial Sequence
  ENSG00000258913_4 (sequence is synthesized)
tgacttcaagttaccaacacaacatcactgagtgtgggattggaaaaagatgcccatggctggctcttaagagtcctctgagccttgctggttctccctcacctgccattgagggggctg

SEQ ID NO: 868225 - DNA, 120 bp, Artificial Sequence
  ENSG00000258913_5 (sequence is synthesized)
atgggtgcaacagtcattcctgaggctgcaaagttctttaaagcagaagcagctgactcttgcttatgttttgcagtacttgctgggctctcaactcctccaaggttttggcctggtagt

SEQ ID NO: 868226 - DNA, 120 bp, Artificial Sequence
  ENSG00000258913_6 (sequence is synthesized)
tgctgggctctcaactcctccaaggttttggcctggtagtgcattctttgctacctgatttgctcttttctgctttaaagaagattggaaaaaaattttttttttgagacagggtctcac

SEQ ID NO: 868227 - DNA, 120 bp, Artificial Sequence
  ENSG00000258913_7 (sequence is synthesized)
ctcaagggatcctcctacctcagccccccaagtagctaagaccacaggtgtgcgccaccacattaggctaggttattattattttttttttgtatttttggtagtagagacggggtttct

SEQ ID NO: 868228 - DNA, 83 bp, Artificial Sequence
  ENSG00000258913_8 (sequence is synthesized)
attttttttttgtatttttggtagtagagacggggtttctctatattgtccaggctggtcctgagctcctggccacgagtgag

SEQ ID NO: 868229 - DNA, 120 bp, Artificial Sequence
  ENSG00000258913_9 (sequence is synthesized)
cagcttttctagttgtgttcagtggaagagttggtcctagtcactaatctgctacttatggacagagacatctcctattttctgttgtaaggacaggaaaaagcagaaaatatagaaaag

SEQ ID NO: 868230 - DNA, 120 bp, Artificial Sequence
  ENSG00000258913_10 (sequence is synthesized)
gaaataaagagcaaccatctctcaatagtactgctgcccaacaagaacactgctgacatttggaaactgttttccaatttgattcttattggaaagcataacaaccagccagggcctgtg

SEQ ID NO: 868231 - DNA, 120 bp, Artificial Sequence
  ENSG00000258913_11 (sequence is synthesized)
ctgctggagcgggcagttatgtgcagggagacagctggttacggctggctcctggcctcgacggagcttctcagcctcttggagcctctgtcccctcagctgctgaaggaacacatctcc

SEQ ID NO: 868232 - DNA, 120 bp, Artificial Sequence
  ENSG00000258913_12 (sequence is synthesized)
tgcacttctcaagttgctgccggtgcgaaggtgactccagattctgcagtttgggctccgtagctgctcagcaaatgtcagcaggtccagaagcaaggctcctcagctgcagagtgaatg

SEQ ID NO: 868233 - DNA, 120 bp, Artificial Sequence
  ENSG00000258913_13 (sequence is synthesized)
caaatgtccccattgtaaatggccgtggggcccagggctctgcaaccttggatgcccaggatcagaccagctgtccgccgctttggaatctgggtttatgggggacccgggcctcataaa

SEQ ID NO: 868234 - DNA, 120 bp, Artificial Sequence
  ENSG00000258913_14 (sequence is synthesized)
ccagcatggggcgtccagagttgttgccttgtggaccaagacagcccacagcccatggcagcttccagagccagaagaagaggagtcatctctgaagagccctggactacctccttgcgg

SEQ ID NO: 868235 - DNA, 120 bp, Artificial Sequence
  ENSG00000258913_15 (sequence is synthesized)
atctcattggccagaactttctggctctcatgctcaccacaaggccaatcactagcaagataaaaaaggagcaccccgaagggccgagaccagctgtgcctccgggcaggggaggggctg

SEQ ID NO: 868236 - DNA, 120 bp, Artificial Sequence
  ENSG00000258913_16 (sequence is synthesized)
agctgctgcagtaaagctgaagaagtggccgcgtgcagtcctaagctcctgtggcctctcggttgccagcaagtcctttccttggctgtgggccagtgactgtttgcgagaccgcagaac

SEQ ID NO: 868237 - DNA, 120 bp, Artificial Sequence
  ENSG00000258913_17 (sequence is synthesized)
ggcgagctacatgtgatcagccgttggaggagcctcttctccccggctcgccagccccacacgcccaccctgtctcagagagacttatttttccttcttcaatgtcgtcaggctttgcct

SEQ ID NO: 868238 - DNA, 120 bp, Artificial Sequence
  ENSG00000258912_0 (sequence is synthesized)
tctcactcatgccctctccctctagtgtgggaaaacaagaggaacctccaaaatttcctagctgcacaaagaaattggtggaaattcacttcattttgaagctcggggtttctatgtggt

SEQ ID NO: 868239 - DNA, 120 bp, Artificial Sequence
  ENSG00000258912_1 (sequence is synthesized)
tgatttaatcaaaatattaatgtgatttttctagaagaagaaaaagggaaaatataaaaatcatgctgattggatttgaatagattgtattgatcatatatgaatattatctttcatcca

SEQ ID NO: 868240 - DNA, 120 bp, Artificial Sequence
  ENSG00000258912_2 (sequence is synthesized)
gattggaaagtactgttttgaaatccagtccttcacacttccaaactgatcatttttaataagtaaatgtcattttggctttttttttttttttctggtcaggaagaaaaacaagaagtt

SEQ ID NO: 868241 - DNA, 120 bp, Artificial Sequence
  ENSG00000258912_3 (sequence is synthesized)
tccttccgcaaacttcctaaaaggtgccatgtgttttcctaaaaccaaggaaaattctaaaatagaactaccatatgattcagcaatcccacttgtaagtatatattcaaagaaaatgca

SEQ ID NO: 868242 - DNA, 120 bp, Artificial Sequence
  ENSG00000258912_4 (sequence is synthesized)
atcagtttgtcaaagaggaaattaaatcagtatgttgaagagatatctgcattgccgtgttcactgcggcattatttacaacagccaaggttattcaataatatgactccaggtattgct

SEQ ID NO: 868243 - DNA, 120 bp, Artificial Sequence
  ENSG00000258912_5 (sequence is synthesized)
gccctttcaaagcagaattttctcgggctagtagcagaatgggaattggaaatttaaagtgcaagaaggaactaatgtgaagaagattctccattgctgagatggagtggggcacgtggc

SEQ ID NO: 868244 - DNA, 120 bp, Artificial Sequence
  ENSG00000258912_6 (sequence is synthesized)
agggatctaagagtggcctccagaagctctaaatctccagaatctccagggattggaaccaagtgctttatctttaccatataccaatccatgaatcaactccaaaacagatctctagaa

SEQ ID NO: 868245 - DNA, 120 bp, Artificial Sequence
  ENSG00000258912_7 (sequence is synthesized)
acagacaagactgactactgcctgaaggtttctgacaccaagttcctgagaggaatacattctcttctcctttggctgcttaatcccttctcatgaaaaataaccttgacctttgcattc

SEQ ID NO: 868246 - DNA, 120 bp, Artificial Sequence
  ENSG00000258912_8 (sequence is synthesized)
tagatgtaccaaatatgaaataattttagaattcgatctcaaatggcccttttgcaaactccaaaatgttgtattgttatctgggagagaatcatttgcaagaaaagaataacttatcag

SEQ ID NO: 868247 - DNA, 120 bp, Artificial Sequence
  ENSG00000258912_9 (sequence is synthesized)
aaaggagaaactgcacagaagatccaaaggctcaactgttcccatgtgtactgggcttctgactcattctggttctcaggaaagagaggcaaacctctgtttcacagcaattttcagagg

SEQ ID NO: 868248 - DNA, 120 bp, Artificial Sequence
  ENSG00000258912_10 (sequence is synthesized)
gatttgggggctctcgggctgctatgagccagtggctgctgtgtgcatgcaggaggaggtcatcttgcagaggagtagagatgttagctttgcagggaaataaagaaagataaagaagga

SEQ ID NO: 868249 - DNA, 120 bp, Artificial Sequence
  ENSG00000258912_11 (sequence is synthesized)
tttaagcaaagaaacaacttgtcatctacctgtttacctctaacagaagcttatacacatatgcatgggcttggagaaaatgatattcacttaaaaacaatataataatgacatgtacag

SEQ ID NO: 868250 - DNA, 120 bp, Artificial Sequence
  ENSG00000258912_12 (sequence is synthesized)
agccatatagctccaaaacctttcaagtgctacgtccatttgtgaggacatatttatcagtctagtactaccttgtaacagtacaaaagtacattcacattattttttctaaaggagctt

SEQ ID NO: 868251 - DNA, 120 bp, Artificial Sequence
  ENSG00000258912_13 (sequence is synthesized)
agttcctagagggaaaaatacactcttctcaaagttttataataataattaacataccctacatgatgtttgtgagactcaaataaggaaaacaatggaatatgctatataagagcaaca

SEQ ID NO: 868252 - DNA, 120 bp, Artificial Sequence
  ENSG00000258912_14 (sequence is synthesized)
acagcctgagtgaccttggaagcatatctttctctagtcaagactccagataagtacacatctggacaacaccgtattttcagctttataagatcctaagtagagagccaagttaaaatt

SEQ ID NO: 868253 - DNA, 120 bp, Artificial Sequence
  ENSG00000258912_15 (sequence is synthesized)
tgctggaattctgacccaggcaactgtgagataataaaattttgtcactttaagttgctaaatttatggtaatttgctacatagcaaaagaaaaagttgctaataaataacttcaaatct

SEQ ID NO: 868254 - DNA, 120 bp, Artificial Sequence
  ENSG00000258912_16 (sequence is synthesized)
ataatctgctttggtttttaaaagtagtttagtcgtagaatactctgttcacataatttatgtattcacattaatcacataatttataaatcataaaatatgacgatagtggtaataata

SEQ ID NO: 868255 - DNA, 120 bp, Artificial Sequence
  ENSG00000258912_17 (sequence is synthesized)
taaacaatgatctaaaagtatgttaaaagttataatcttcgcatcgcactctcatgaagtaggttaatagacaatacatggcttgcctaattgcacatagaaatgactgtttgggccaag

SEQ ID NO: 868256 - DNA, 120 bp, Artificial Sequence
  ENSG00000258912_18 (sequence is synthesized)
gattcaaatctggggcatgcaggcagaagtcctgttctcttgatgttcattctatgctctttaaataaaccccattttagtcacattaatcatataaataaatatttgattgttaaccta

SEQ ID NO: 868257 - DNA, 120 bp, Artificial Sequence
  ENSG00000258912_19 (sequence is synthesized)
aacagccaaggtatagaaatgacctaaatgtccactggcagatatatggataaagaaattgtggtatattgatacaatgggatattattcagccaaaatgaggaaagcctgtcgttttca

SEQ ID NO: 868258 - DNA, 120 bp, Artificial Sequence
  ENSG00000258912_20 (sequence is synthesized)
attatatggatgaactagaggacatcatgctaaatgaaataagccaggcacaaaaagacaaatactgtattttctcattcatattgtggtatctaaaaaatgttgaactcatagaagcag

SEQ ID NO: 868259 - DNA, 120 bp, Artificial Sequence
  ENSG00000258912_21 (sequence is synthesized)
agaatagaacaatggcgtccagggtttggacagggtgtgtgaaatggggagatgatggttaaaaggtaaaaactttcaattctgacatgaaccagttctggaaatctaatgaacaacatg

SEQ ID NO: 868260 - DNA, 120 bp, Artificial Sequence
  ENSG00000258912_22 (sequence is synthesized)
ggtattgatgatagctgtgttaatttgactgcagtaatgaatacacaatctatatgcatataaagacatcacattgtacgtcctaaatatattcaatctttatttttcaagtaaatattt

SEQ ID NO: 868261 - DNA, 120 bp, Artificial Sequence
  ENSG00000258912_23 (sequence is synthesized)
tagaattaaaaaaatagaaattattttattgattgacaaacgaatagtttctaagagagctagattaaaatatacatcatactagcactggataagtgaatcaagtcttatgttaacatt

SEQ ID NO: 868262 - DNA, 120 bp, Artificial Sequence
  ENSG00000258912_24 (sequence is synthesized)
agttgaccaacattattttctaataggtttatcagagaggcatatatagacattggataatctcattgttgttctctttcacttagatcagaatctcttaacattcaaataatgactgaa

SEQ ID NO: 868263 - DNA, 120 bp, Artificial Sequence
  ENSG00000258912_25 (sequence is synthesized)
atgtgtgtatttcaagaagtggaaaataagttacaaccttttgtcagattctcaaagagattcttgaccagaaaagattctgaacctctgtgtagaagtaacatgtttttatccaacatt

SEQ ID NO: 868264 - DNA, 120 bp, Artificial Sequence
  ENSG00000258912_26 (sequence is synthesized)
tacaagttgaaaaaactgcttcagtgagtgagctacagtggtagaattctaagatggcattccaatgttccaatccccaggttattcaataatatgactccaggtattgctgtgagggga

SEQ ID NO: 868265 - DNA, 120 bp, Artificial Sequence
  ENSG00000258912_27 (sequence is synthesized)
tagagctattgatagcttagtggttttcttccttgccacaggaaatattatatcaggctaaaataaaataagaagataaaagaaaggtgaattactaagttttcttttggtcattttcta

SEQ ID NO: 868266 - DNA, 120 bp, Artificial Sequence
  ENSG00000258912_28 (sequence is synthesized)
tttaaaaccaagagcagtctgggggaaaaaaaagtcagtttcattatcctaatctaaaggatgaacaattaaagttattggaaagagatcaccactacaatttcactgtttgtttaatga

SEQ ID NO: 868267 - DNA, 120 bp, Artificial Sequence
  ENSG00000258912_29 (sequence is synthesized)
cttctagtagtttttaatgtttaaattctactctctgagctcacattctcattatacatttgttttaaatataaccaaattatgattatgaatttatgtatgaagtttttaaaaccataa

SEQ ID NO: 868268 - DNA, 120 bp, Artificial Sequence
  ENSG00000258912_30 (sequence is synthesized)
gaataaatttggttgcatcttataaatatagatttccaaacacatctaaaagaaatttatgattcggtgctcagaaaatacagaaaaaaaatctgtatttttcacataactgtaggtggt

SEQ ID NO: 868269 - DNA, 120 bp, Artificial Sequence
  ENSG00000258910_0 (sequence is synthesized)
agtcctgagccggctctgagccactggagtcagagggcccgggcgcctgccttctcggtgcgggctggggaggacctgctcgcgaagggctgccaactgaacttttcctgcaccagggct

SEQ ID NO: 868270 - DNA, 120 bp, Artificial Sequence
  ENSG00000258910_1 (sequence is synthesized)
gaccgcattgtggtgcaaagtgacaagtcgagtgttgacttggggactgcgatgagtagctggacactgcatctatcacaccagatattgggagatgcagggcagatgcttcatgctttc

SEQ ID NO: 868271 - DNA, 120 bp, Artificial Sequence
  ENSG00000258910_2 (sequence is synthesized)
ttcttcacaagtttgtaatctatccagtcaatattaaggagccctactacgtgaactgtcaacggagtagaagtcaagcaaaggtgacttgctgcctgccacatctgcctcccgctgtga

SEQ ID NO: 868272 - DNA, 120 bp, Artificial Sequence
  ENSG00000258910_3 (sequence is synthesized)
aatcacaacaaggcaaccacgaatagctggtaaaagtcccagtcttcaacgcagtggtgtaatttcctatgataaatagcttggaagaatgctaatcaaaattactttctggttctacct

SEQ ID NO: 868273 - DNA, 120 bp, Artificial Sequence
  ENSG00000258910_4 (sequence is synthesized)
cccgcgccttctatccctgcagattgagctctggccttcaccccgggcctcttaacttcaggtccgcccaagtgccctcctctcagcaggcggaggctcacagctctgtcgggagtaggg

SEQ ID NO: 868274 - DNA, 120 bp, Artificial Sequence
  ENSG00000258910_5 (sequence is synthesized)
agggctgaccgcattgtggtgcaaagtgacaagtcgagtgttgacttggggactgcgatgaccggccaccaggaagggaaccaggtatgctctggggtcccgggcggcgccctggcagcg

SEQ ID NO: 868275 - DNA, 120 bp, Artificial Sequence
  ENSG00000258910_6 (sequence is synthesized)
ggtagtgcgcgacttttgccccaggaagaagtcgctgctgcctgcagggtggccttggagaggctcgggcctccattgagactgctcacttccttttctccgggaccacggctcttcagc

SEQ ID NO: 868276 - DNA, 120 bp, Artificial Sequence
  ENSG00000258910_7 (sequence is synthesized)
tttttccgccctaggctcccgcgcctcctcagttccccatgggagagttatttgaaggctccccggagatgggatttggcccaccaatcctagcaagtcaaggcccgcccggctaggcgc

SEQ ID NO: 868277 - DNA, 120 bp, Artificial Sequence
  ENSG00000258910_8 (sequence is synthesized)
agagaggcggcctccctcccgctaccccgggtggggtagggaccccctttccccagagaccctctagcacctgagtgttgatgatcattactttaaattaaaagtctcttttctcctttc

SEQ ID NO: 868278 - DNA, 120 bp, Artificial Sequence
  ENSG00000258919_0 (sequence is synthesized)
gggaaatctgtccaggaagcagccaggcgggcatcagccaggcgggcatcagcatcttcactgtgcagatgagaaactgaggccgcagaggtgaagggacatgcccaggatcactaaggt

SEQ ID NO: 868279 - DNA, 120 bp, Artificial Sequence
  ENSG00000258919_1 (sequence is synthesized)
gatccctagaaacacagccagtggcccggaagctgcactgttttgtgcaccgcagggatgggcacagatggggctgcctgccctcctcctggaaggagggagaacccagtctggcctgga

SEQ ID NO: 868280 - DNA, 120 bp, Artificial Sequence
  ENSG00000258919_2 (sequence is synthesized)
cttgctgctgacctgggcaagtcgctgaagcctctccgtgcctcagtctgctcgtgcgtaagatgggcacagggcacactgcctacttgattgggctcaaccacgtgcagtaagtagctg

SEQ ID NO: 868281 - DNA, 120 bp, Artificial Sequence
  ENSG00000258919_3 (sequence is synthesized)
gtgtctggcaagagccctcaggaaacagtaaccccattaattcaaatgcacgtgcctggaacaggctctggggggccagcccgggagtcccactccatgatggccaccctggggcctggc

SEQ ID NO: 868282 - DNA, 120 bp, Artificial Sequence
  ENSG00000258918_0 (sequence is synthesized)
agaaaatatccacaatgaaatttctacaagattagaggaaggagagaggcaacggggattccatttctactaggagtatcaacctctgagagaaaaatatccatctctgtggatgtcatc

SEQ ID NO: 868283 - DNA, 120 bp, Artificial Sequence
  ENSG00000258918_1 (sequence is synthesized)
ccgtgtgtgtcacttaaccgaggaatcctgggaaagtaaaagttgtcaccacaaaatagctactgtagtggaagaacgtctctgtcattttctgtaatgaaaaatctggtaacatctgca

SEQ ID NO: 868284 - DNA, 120 bp, Artificial Sequence
  ENSG00000265511_0 (sequence is synthesized)
caaaccatcacaagaacctcaggcagggctggatcgaggtgagggctggaggacacctgtggaccccgtggggaccctctgccctgcccactgccttccacccctggacctcacactggt

SEQ ID NO: 868285 - DNA, 120 bp, Artificial Sequence
  ENSG00000265511_1 (sequence is synthesized)
ctgcctgtctgggagctgcaggaggcagggcagacgtaagcaaagatccaagcccaggctccaaccccaggcctggcaaccagcagcgaccccactgtgggcgccgagggggacaggagt

SEQ ID NO: 868286 - DNA, 120 bp, Artificial Sequence
  ENSG00000265511_2 (sequence is synthesized)
ccctgattgcacaacacgaagcaggaggcctgtgggggtccccgctgtgtcagcgtctggccagataatggctcatctctaatgagctcctggaccattgatgccatctctcagcacgct

SEQ ID NO: 868287 - DNA, 120 bp, Artificial Sequence
  ENSG00000265511_3 (sequence is synthesized)
actctcactccagggcacaagacactgctggggacactaagccactggggaggcaccgaaggttggggggttagggagggattcgtgcaggagggaacacttgacgttgggtttggaagg

SEQ ID NO: 868288 - DNA, 120 bp, Artificial Sequence
  ENSG00000265511_4 (sequence is synthesized)
actgacaaggggcataagtgggagggttctaggcgagggaacagtgtgtgagtgcatacatgcatgtgtttgtgcacacagaggagaggggggagccaggtgtgttgggaaccctaagcc

SEQ ID NO: 868289 - DNA, 120 bp, Artificial Sequence
  ENSG00000265511_5 (sequence is synthesized)
tgcagggacgacctgggtgggggggattgttttgagtttgggctcatcctgtggccccagtgggggtgctccatggccggtgagcctgggggcacatagtctgggccttagcaggcagag

SEQ ID NO: 868290 - DNA, 120 bp, Artificial Sequence
  ENSG00000265514_0 (sequence is synthesized)
agccagaatggagatacctgatcatcagaggctggaggaaagcagattcagaatttggctggatgctcctaaagagctactgaaatagactcaatggcagctacgatgcccaacagaagc

SEQ ID NO: 868291 - DNA, 120 bp, Artificial Sequence
  ENSG00000265514_1 (sequence is synthesized)
agcgatgcctggtgcacatagcaggttgctagcaggagtcatctggggtgattcacctgtcttgttggtgaggatatggacatcatctggggactctcagaaatccctgaagtgatatag

SEQ ID NO: 868292 - DNA, 120 bp, Artificial Sequence
  ENSG00000265514_2 (sequence is synthesized)
agtcccacatgagcttgcctgtggtgttttacaaaccaataacgtagtgttcataaaccaaagtcacttggagcttcagaattgtaaaatattctcaagaaggttttcaggccggcttat

SEQ ID NO: 868293 - DNA, 120 bp, Artificial Sequence
  ENSG00000265514_3 (sequence is synthesized)
cactagactctacccaggctcctctgagccctcttctcaactagatctcaactgtggtctataaaggcttaacactaacatagtttccaacagctcaaccccacatcccaaaggtgttct

SEQ ID NO: 868294 - DNA, 120 bp, Artificial Sequence
  ENSG00000265514_4 (sequence is synthesized)
tcactagccttaaagtgctggcctgagaaaactcaagactgccaaatgaatctgcgttttttccaggcatcacctgaagataaggcccctgtctcctagtctctgtgggaaggcgagaac

SEQ ID NO: 868295 - DNA, 120 bp, Artificial Sequence
  ENSG00000265514_5 (sequence is synthesized)
ctagcttggataagcgccagtcaaaaaacccacatggtttcccatggaccaactccactttaccacttttgggaatttttcactttcctaactgagcccctactttcccctctccctaat

SEQ ID NO: 868296 - DNA, 120 bp, Artificial Sequence
  ENSG00000265514_6 (sequence is synthesized)
tccttcttttatccttaaaatgcccagtcacttctgtacaactcgaagttgaattttgttcacactggactcttttccctattgaaatagttatcactgattaaaatctgtccttaccac

SEQ ID NO: 868297 - DNA, 120 bp, Artificial Sequence
  ENSG00000265514_7 (sequence is synthesized)
ggtgaagaagttggccttagccagaatggagatacctgatcatcagaggctggaggaaagcaggttcctcaaaaaacaaacaacaacaaaaaaacaacaaaacatgaagaagccaaatct

SEQ ID NO: 868298 - DNA, 120 bp, Artificial Sequence
  ENSG00000265514_8 (sequence is synthesized)
ggaggatgagttttccaaattaaacactgaatattgttgtagagtaaaatgatactgtttgtaaagagatgtttttactagacatcctcttcctagccacctattaaggaataactagaa

SEQ ID NO: 868299 - DNA, 79 bp, Artificial Sequence
  ENSG00000265514_9 (sequence is synthesized)
aggaacttggagaacttttctgtctagctaaagaattgtaaatgcaccaatctgcactctgtaaaaacacaccaatcag

SEQ ID NO: 868300 - DNA, 120 bp, Artificial Sequence
  ENSG00000265514_10 (sequence is synthesized)
agctctctgtaaaatggaacaaccagcaggatgtgggtggggccaaaaggaataaaagatggccactccagccagcagctgcaacccgcttggctccccttccatgctgtggaagctttg

SEQ ID NO: 868301 - DNA, 81 bp, Artificial Sequence
  ENSG00000265514_11 (sequence is synthesized)
gggtctgtggcttcattcctgaagtcagcgagaccacaaacccactgggaggaacaaacaactctggacatgccaccttta

SEQ ID NO: 868302 - DNA, 60 bp, Artificial Sequence
  ENSG00000265514_12 (sequence is synthesized)
agagctgtaacactcactgcgaaggtctgagtcttcattcctgagagaacaaactccaga

SEQ ID NO: 868303 - DNA, 120 bp, Artificial Sequence
  ENSG00000265514_13 (sequence is synthesized)
ctgaagaaacttacagcctgaccatgacaaaagggcctactctcaaatatctataatgttgactggcacaatctagtattttccttcacttgttcatgtcaataaaggaaaataaaaagt

SEQ ID NO: 868304 - DNA, 120 bp, Artificial Sequence
  ENSG00000265514_14 (sequence is synthesized)
ctagccacctattaaggaataactagaatatatattaacagcaagacatcggaaattatctttgcacctgacaaaatgttaaggtgagaggggaagccagctgggcttctgggttgggtg

SEQ ID NO: 868305 - DNA, 89 bp, Artificial Sequence
  ENSG00000265514_15 (sequence is synthesized)
acttttctgtctagctaaaggattataaatgcagcaatcagcactgtgtaaaaatgcaccaaacagcactctgtaaaatggaccaattg

SEQ ID NO: 868306 - DNA, 120 bp, Artificial Sequence
  ENSG00000265514_16 (sequence is synthesized)
aaccaatcagcaggatgtgggctgggccaaataaggaataaaagctggccaccccagccaacagcggcaacccacttgggtccccttccccactgtggaagctttgttctttcactcttc

SEQ ID NO: 868307 - DNA, 120 bp, Artificial Sequence
  ENSG00000265514_17 (sequence is synthesized)
acctttatgagctgtaacactcactgtgagggtctgtggcttcattcctgaagtccgccagaccatgaacccactgggaggaataaacaactctggacacaccacctttaagagctgtaa

SEQ ID NO: 868308 - DNA, 83 bp, Artificial Sequence
  ENSG00000265514_18 (sequence is synthesized)
accagaaggaaggtcagacacaccatctttaagaactgtagcactcaccgtgaaggcctgcagcttcattcttgaagtcagtg

SEQ ID NO: 868309 - DNA, 120 bp, Artificial Sequence
  ENSG00000265514_19 (sequence is synthesized)
attcttgaagtcagtgagaccaagaacctgccagaggaatacattccagacacattttggtgacccagatgggacacattttgatgacccagatgggacacattttggtgacccagatgg

SEQ ID NO: 868310 - DNA, 120 bp, Artificial Sequence
  ENSG00000265519_0 (sequence is synthesized)
taagctgaagatatatactgtataaagtgcttcatctacctaattctctgaagtcttttttttttctgtgttttaagactttatcattaaaaaaagaagaaattagagaagggaggtggg

SEQ ID NO: 868311 - DNA, 120 bp, Artificial Sequence
  ENSG00000265519_1 (sequence is synthesized)
agctgccatcttctggggaccaaggcccaggagcccagctcgggtcccaggcagaggtgaaggcagaagcggggctcagagcctggaggtaggcgttgagcggagaggcctttggaggtg

SEQ ID NO: 868312 - DNA, 120 bp, Artificial Sequence
  ENSG00000232140_0 (sequence is synthesized)
tggttgcctgtcagtgagaacactgagcgcagccctgtggagaggctgacaggatgaggaactgaggcctcccgccaacagccagcaccagtgtgccaggcctgtgagtgagcacatctc

SEQ ID NO: 868313 - DNA, 120 bp, Artificial Sequence
  ENSG00000232140_1 (sequence is synthesized)
acagccccaggaagcccagtcaacagggctgcgtgttcctggaggatgggaactgtgtcttatcattctgctggggactcatatgagaagaggaggttgagatctctgcagcagacattc

SEQ ID NO: 868314 - DNA, 120 bp, Artificial Sequence
  ENSG00000232140_2 (sequence is synthesized)
ccaaacctggtggagcatcagaaccaggaatagggtctcataggacaatgtctcagtacaacctcaaacttcttggctcaagcgaccctctcgcctcagcccccctagtagctgggacta

SEQ ID NO: 868315 - DNA, 120 bp, Artificial Sequence
  ENSG00000232140_3 (sequence is synthesized)
tctcgcctcagcccccctagtagctgggactacgggcacaccaccatgtctagctgggactacaggcacaccaccatgcctggctaattaatttttttttttttttttttagagataggg

SEQ ID NO: 868316 - DNA, 120 bp, Artificial Sequence
  ENSG00000232140_4 (sequence is synthesized)
caatcctcctgcctcagccttccaaaatgttgggattataggcgtgagtcactgcacctggccttgtaatgatctaatttcttgtatggtttatttatcagggtctgccttcctaacagg

SEQ ID NO: 868317 - DNA, 120 bp, Artificial Sequence
  ENSG00000232140_5 (sequence is synthesized)
tgtaggttcctcaagggttgggactgtgcctgtgttctgggcacctgcccatgcctggcaatttgaagaagctcaattgctacatgttgaaggaatgaataattgcatgagcaaccatcg

SEQ ID NO: 868318 - DNA, 120 bp, Artificial Sequence
  ENSG00000232140_6 (sequence is synthesized)
ataattgcatgctacaaccatcaaacttgcagggttcttccatggaataagtgagcttcagcaccacagaagagaccagagtctaccttgccagctcctctagcaccgaccacgtgccaa

SEQ ID NO: 868319 - DNA, 120 bp, Artificial Sequence
  ENSG00000232140_7 (sequence is synthesized)
ttcatgtcctgaatgctcacttcacttcttcaccttgcttcacttcacttactgcacgggaacagaaaagcctagagaggatggattacctgtgcggttgcctccctctgcagagtgggc

SEQ ID NO: 868320 - DNA, 120 bp, Artificial Sequence
  ENSG00000232140_8 (sequence is synthesized)
gtgtctcaggagcttctcttcttctccagcccagtgcggcctcgtgtcatccataggacccaccggcagagggcagggcctgcgagtggggccagcctcctggtgactctcgcctcctct

SEQ ID NO: 868321 - DNA, 120 bp, Artificial Sequence
  ENSG00000232140_9 (sequence is synthesized)
tttccagcggacgctaccagaggacgaaggtctgactctggccaacggcccagaatttctggcccagttttgcctgaggaagccaactgtgcaggaggtcaggatcccggtagggtgaga

SEQ ID NO: 868322 - DNA, 120 bp, Artificial Sequence
  ENSG00000232140_10 (sequence is synthesized)
gtgggaaagttaacattcccaagagactccaagcaacaggatttcctgacctgggactattacctttctcacattacatggccagatttacttcctgctattattaaaagtacgaaaaag

SEQ ID NO: 868323 - DNA, 120 bp, Artificial Sequence
  ENSG00000232140_11 (sequence is synthesized)
ggctgtaggatcatggcgctaacggcatttggagggctgggaagggactctagccctggctttacctgcctttgtcatcagctggagcaagcaactccgcaacctcggagcctcagtttc

SEQ ID NO: 868324 - DNA, 120 bp, Artificial Sequence
  ENSG00000232140_12 (sequence is synthesized)
cttttctgtaaaaggcggggagggtgggtggtaagtgcaatgctgaatcagaactcatagagctgctgggtggacatgtgaagtaaaagaggagacagcttttgctcctgaaggatgcca

SEQ ID NO: 868325 - DNA, 120 bp, Artificial Sequence
  ENSG00000260681_0 (sequence is synthesized)
aaccccataggcaagctactattattgcacctgtttcacagatagggaaaaggatcccagaagtggcaaacccaagttcacccttctgagaaatggtgtggaaactggagcccagagagc

SEQ ID NO: 868326 - DNA, 120 bp, Artificial Sequence
  ENSG00000260681_1 (sequence is synthesized)
ataagtaacctgtccagagatgcacaacacacaaatagtgcgcttccaaagctcatgttcgctctcacccaggccgctgctcagataaaaaacttaccggatcggacatggtgaagtaag

SEQ ID NO: 868327 - DNA, 120 bp, Artificial Sequence
  ENSG00000260681_2 (sequence is synthesized)
gcggccaggccgtgtgcattccccggaagctttcttaatgcaaagtgacagagcgcggcggtctggggctggagccgctgccccctccacgtgctccccaattccggcgcctggtggttc

SEQ ID NO: 868328 - DNA, 120 bp, Artificial Sequence
  ENSG00000260681_3 (sequence is synthesized)
tccccgcactccggcgccgcaccccgctggctccccgctcccagcccgtgctgccacgcttgggcgccccgcattggggacacccctcccagttcttcccagcctctctgggagccggcg

SEQ ID NO: 868329 - DNA, 120 bp, Artificial Sequence
  ENSG00000260681_4 (sequence is synthesized)
agggggctccgccaagacgcccctgctaggctggcagcccgggcgctggccccactcctggcgaacccgcctcacctcctggcgctcctgttgccgctgcttgcgctggccctcgggtcg

SEQ ID NO: 868330 - DNA, 120 bp, Artificial Sequence
  ENSG00000236799_0 (sequence is synthesized)
gaactccagaaccatcggctctgactgaaagtgaagcggcagccgcgttgtgggaaagctggctggagtctctctcataagcaggcattctttttctccagcccgtcactgtgttggttt

SEQ ID NO: 868331 - DNA, 120 bp, Artificial Sequence
  ENSG00000236799_1 (sequence is synthesized)
aatgaagcgaagagacaaggagcaatccaatgtgtaataaaaaaaggcagcctgaattgttgttgctgtttttgaaatttaagctggttttcaattaaattcagtaaatggtccaggact

SEQ ID NO: 868332 - DNA, 120 bp, Artificial Sequence
  ENSG00000223631_0 (sequence is synthesized)
aactgccactgggtttcaactgccacctgggagactgctggtaaagatgggaggtggcctttgccgctttccatcttctcactgcagtttcttcacgtgggccacttgtacttaaaatgt

SEQ ID NO: 868333 - DNA, 120 bp, Artificial Sequence
  ENSG00000223631_1 (sequence is synthesized)
cttcttaatttattctttttacttccccagctccaatttgtctacagatttacaaatttgttttatagttttatgactcaatttgtattttcggtcctatgaagctttttgccttaaata

SEQ ID NO: 868334 - DNA, 120 bp, Artificial Sequence
  ENSG00000223631_2 (sequence is synthesized)
tttttctctgtttataagaatgtgctgtttcctaggccagttttgtacacactcttccatagaatagatccagaagaaacacaacaatactgccttcatcatatcaggagatcttgatac

SEQ ID NO: 868335 - DNA, 120 bp, Artificial Sequence
  ENSG00000223631_3 (sequence is synthesized)
caaatacggtaagagacattccatgaaagggggattacaggccaaagtcttctgaatagagatgtgaaaatcttaaatcagatatcggaacatcttaaatccagagttttttaagaaaat

SEQ ID NO: 868336 - DNA, 120 bp, Artificial Sequence
  ENSG00000223631_4 (sequence is synthesized)
gggaaacataatagcctagttaagaggtttcgagggattgttttaaattaaagacatttttaaaagataaatacaatcaggtggatataaaaagttacaaaatagaaaaaatcattagag

SEQ ID NO: 868337 - DNA, 120 bp, Artificial Sequence
  ENSG00000223631_5 (sequence is synthesized)
gttataaaaggtttatgaaaatcttactttgtagtcaaaattgactagggtaagtgatttatttacaaggtcttattaaaattagctacaatattaaaaatacactaataccaaactaaa

SEQ ID NO: 868338 - DNA, 120 bp, Artificial Sequence
  ENSG00000223631_6 (sequence is synthesized)
aaaataagcttttcttaagatattaatttgttctcaatgaaattacaagaggtaataatttttcattctgaaatctattattttttaaacttctcagatttatacctcagaagttcgact

SEQ ID NO: 868339 - DNA, 120 bp, Artificial Sequence
  ENSG00000223631_7 (sequence is synthesized)
agaagttcgacttttactgtgtctctttacacgtaatttacaggtcccatattattgccttttgtttcttttctcctggaaaaggtgcatcttttccaggctgggatgataactctctcc

SEQ ID NO: 868340 - DNA, 120 bp, Artificial Sequence
  ENSG00000223631_8 (sequence is synthesized)
tgcaagatcctgagggctccaaagaatccactgtccgtcacaaatcgacggtccgccagctcagtttcagagacgtggtgctccgctgcaggcctcatcctcaggtgcaccctggcagtc

SEQ ID NO: 868341 - DNA, 120 bp, Artificial Sequence
  ENSG00000223631_9 (sequence is synthesized)
ccatctgaaggagggtggcccagcagcagctcagcctgtgctctcacccacctcctctgcacacaccagtcctcgtcctcagcacccaaggctgccagaggtccttcagcagctcccgtg

SEQ ID NO: 868342 - DNA, 120 bp, Artificial Sequence
  ENSG00000223631_10 (sequence is synthesized)
gctgacagtgactctacgtttcctagatttcagggaccacctggaggggagcggaccagagagacttcctcggaataggctgtggctcttcacaaggtgtcttctatgctttatttggga

SEQ ID NO: 868343 - DNA, 120 bp, Artificial Sequence
  ENSG00000223631_11 (sequence is synthesized)
gccattgccttgagcgttatttcccagatggttttctaatgtcaccaactgaagaaaagacccatgcacacaggacacagcatgatctgatgctcacagcgttttccttcctctctgaaa

SEQ ID NO: 868344 - DNA, 120 bp, Artificial Sequence
  ENSG00000223631_12 (sequence is synthesized)
acggactcagcgattctggcaagcggtacttactctgagatcacccgtttgctaaggaaaaatcttagtactgagaaaggtgacactttcctccctgcttttgctggagagacactttgg

SEQ ID NO: 868345 - DNA, 120 bp, Artificial Sequence
  ENSG00000223631_13 (sequence is synthesized)
ttatgagttatttctagcataacacagtttatttcagaagtccagctcaatagcagaccaaggcatgaacaacacatgaaaatttatgttgggaaaatatatattgtatgtctgcttgaa

SEQ ID NO: 868346 - DNA, 120 bp, Artificial Sequence
  ENSG00000223631_14 (sequence is synthesized)
agccatctgaaggtactatggaaattcagttactcactcttgggagcagaaggattccagaccattcctgtgtgcaccctggcagggagccatctgaagggaccacctggaggggagcgg

SEQ ID NO: 868347 - DNA, 120 bp, Artificial Sequence
  ENSG00000223631_15 (sequence is synthesized)
aaatgcaaatctagtggagggacaaaactcacagtaacagtatttcatcatagccaccatgaggcagtacattatgaagcatgtcagtgatgaattactggcaggctggtctgtcattga

SEQ ID NO: 868348 - DNA, 120 bp, Artificial Sequence
  ENSG00000223631_16 (sequence is synthesized)
agctacactctgtttctagcttctgttgcttctgctgtctctctcctaacatctgcatattcctccactttgtggtggaggaagcattagggctgatataggggatttccagtgagtgta

SEQ ID NO: 868349 - DNA, 120 bp, Artificial Sequence
  ENSG00000223631_17 (sequence is synthesized)
agaccttgaagaatgggtaggattttcaaaatcagagataaagacgcaagaaagagaattcagtttttcaagtttctaagcaatcatatttacatgcatagacattttgctggtttctgt

SEQ ID NO: 868350 - DNA, 120 bp, Artificial Sequence
  ENSG00000223631_18 (sequence is synthesized)
cttactaatgtatactacactgtgtctaatcactctgagggctggtatttcgggtctgttccagacactcaggaatcatttgttcagcttgttctatatgctggaaactgttgcagggat

SEQ ID NO: 868351 - DNA, 120 bp, Artificial Sequence
  ENSG00000223631_19 (sequence is synthesized)
ggatatatgcagtccttgtcccaaagcagcttatgactccaagagcaagggatagaatatgaacatgtgtctttgggttacttctaggggtaagaatgagttctgtgggcagatgcatac

SEQ ID NO: 868352 - DNA, 120 bp, Artificial Sequence
  ENSG00000223631_20 (sequence is synthesized)
aggaagtggggagagggagaatgagatacaaactatccaggcaggaggcattgcagtaatcaaagtgaactatgagagaagcctggggtgttgtaaaaagaaagaaactttgtcataagt

SEQ ID NO: 868353 - DNA, 120 bp, Artificial Sequence
  ENSG00000223631_21 (sequence is synthesized)
ggaatgatcagacaagtcttagaaggctgtattgcagccacagttctgactggctaccaatcagaagaagagggaaatgagaactcttcttggcttgagtacctgagtaaaggatctaac

SEQ ID NO: 868354 - DNA, 120 bp, Artificial Sequence
  ENSG00000223631_22 (sequence is synthesized)
cattcccagacaggcggcccacaagagagaagcaggttagaaggaaataccacgagttgtgttttggtcatgttaggtagaggacatttgaatgcagagtaagtcaaactcttagggcag

SEQ ID NO: 868355 - DNA, 120 bp, Artificial Sequence
  ENSG00000223631_23 (sequence is synthesized)
gggagtcaagaatgctccattgcagtggtgtcagcaaaatggcagggaaggcagctctaagctcccatccttccataggaatgttgaataaacaaccagacactgtcagaaccaactttg

SEQ ID NO: 868356 - DNA, 120 bp, Artificial Sequence
  ENSG00000223631_24 (sequence is synthesized)
tgagaaccgggaaaataatcaaaggtgtacggcaactaaaagaatgctggatcaacacaaaggaaacttaaaaatgatatgaaagctgtgtggcatttttgcttgtcccacaagtccagc

SEQ ID NO: 868357 - DNA, 120 bp, Artificial Sequence
  ENSG00000223631_25 (sequence is synthesized)
ttggtgatagtcttgaagacggcaggctggattccccaggctgggacccttatccctggttccagagaggagagcagatctgattcacaaatgattatgcttgtctgttttaatctttcc

SEQ ID NO: 868358 - DNA, 120 bp, Artificial Sequence
  ENSG00000223631_26 (sequence is synthesized)
agaggctgtctgaagaaggtattcatcatctctgttttacctgacccagaaaccattctgctaggaaaaacagtgggcattgcttgaaaacagtgttctgtggttgaaaaacccacagtc

SEQ ID NO: 868359 - DNA, 120 bp, Artificial Sequence
  ENSG00000223631_27 (sequence is synthesized)
accttgggctggtgggaatgtaaaatggcgcctcttctggatcatcgtttggcagtttctcaaaaggtcaaacgtagaatcactatttgatccaacaattctactcctaggtatatcccc

SEQ ID NO: 868360 - DNA, 120 bp, Artificial Sequence
  ENSG00000223631_28 (sequence is synthesized)
aaaagaattgaaaacaaggatgcaaacatatgcgtgtacactaatgtttatagaaaaaatattcacaataatcaaaaggcagaaacaacccaagtgtccaataacagaagaatgaataaa

SEQ ID NO: 868361 - DNA, 120 bp, Artificial Sequence
  ENSG00000223631_29 (sequence is synthesized)
tgccgtgcatttgtgtgctgcctgggtgaacactgcctacttcacagtgatgagggtggcttagacagagacccgaggctctgtcctccagggctctcctgatggtctcctttaccttcc

SEQ ID NO: 868362 - DNA, 120 bp, Artificial Sequence
  ENSG00000223631_30 (sequence is synthesized)
cttcagataactctaaaattgctacactatattcttctttatttcatgtgtgccaatttaaatgtacaagtcaatcactagtgctacaaatgcagaagtaaagatgtatttccacttcaa

SEQ ID NO: 868363 - DNA, 120 bp, Artificial Sequence
  ENSG00000223631_31 (sequence is synthesized)
tattgtgtatttttcaccaaaataatgatttaaaatccagtaatatagatggtaagtgcagaaggagcatatgtagattcaggaacgttaaacattgtaactttttttaaaaagaggata

SEQ ID NO: 868364 - DNA, 120 bp, Artificial Sequence
  ENSG00000223634_0 (sequence is synthesized)
gagcaatcactcggatgatcgattgaacactccttcaccaaacaaggctggaggcctgggatggacgccggtggtttgagatatgcagaagaaatgggtcctgccctccggaacactcca

SEQ ID NO: 868365 - DNA, 120 bp, Artificial Sequence
  ENSG00000223634_1 (sequence is synthesized)
gagaatatcatggcactttataacatcagtgtcaatcagcattgattgacaagccccctggactttggatgacttctctgaagccccagctgtgcctggctgggccatctcccttctcca

SEQ ID NO: 868366 - DNA, 120 bp, Artificial Sequence
  ENSG00000223634_2 (sequence is synthesized)
ggccacttttccagcctcagcttttcttaggggcccagcccacttacaatagaaatttgccaaagactgggttggtaagtaatggataagttttcatatttactattttcatttctgaat

SEQ ID NO: 868367 - DNA, 120 bp, Artificial Sequence
  ENSG00000223634_3 (sequence is synthesized)
ctctctttacatgcagttaagccaggaaatcctgaaagaacactcttcagaatgtttttaagtaaaacaacaagtttctgttaatttagggccaacccatgagtaaacagatagagcctg

SEQ ID NO: 868368 - DNA, 120 bp, Artificial Sequence
  ENSG00000274723_0 (sequence is synthesized)
tttttgtaaaaattaagaaatattcaccaaaaaaaaaaaagtcaggagaatatgaagccactcattttacttctagaagtttttcttacagaaaatcaatcaaggagagagaattgtgta

SEQ ID NO: 868369 - DNA, 120 bp, Artificial Sequence
  ENSG00000274723_1 (sequence is synthesized)
ttaatttaattgtttggcctttagaatcatgttccttagagggcatcggtgcgacggcttcaccattctgcacatccacctgagttttaaaacacggtttctactaaacatctggtatct

SEQ ID NO: 868370 - DNA, 120 bp, Artificial Sequence
  ENSG00000274723_2 (sequence is synthesized)
tgtatacaggggatgaatgtggtcttgtttccttctttagctgctggaaaccttagagcaaaaaataaggccacttttgtaactgtgtctgactcagcagcataacttttccgttgtctt

SEQ ID NO: 868371 - DNA, 120 bp, Artificial Sequence
  ENSG00000274723_3 (sequence is synthesized)
cattcaatactctcctccaggtagagtttataattgtttgtagttgagaaaattggactagaatgaagccttgtggaatccaagaagaattcgttattctttagctgctttcatctccaa

SEQ ID NO: 868372 - DNA, 120 bp, Artificial Sequence
  ENSG00000274723_4 (sequence is synthesized)
ctgtgttaggcatcctcctaagatggtccccaagatggcagacccctggaatcatctgtacaatttcctctcttttcacaggcttttatgagttgatttttcagcgaaccttcaaggggc

SEQ ID NO: 868373 - DNA, 120 bp, Artificial Sequence
  ENSG00000274723_5 (sequence is synthesized)
taaggggaacattacccttggccactatactgccaacaacctatgagcctggaagaggatcccaagtctcagatgaaaccaggacctcagccaacaccttgatttcagcctcatgagatc

SEQ ID NO: 868374 - DNA, 120 bp, Artificial Sequence
  ENSG00000236790_0 (sequence is synthesized)
gcgtctaaatggctcaggcagcccttcaacccagcacaccatggaatcactctatttcctgggctcttctgttcaacctcctgcatttctgtttttttatctgtaaattggggctaatac

SEQ ID NO: 868375 - DNA, 120 bp, Artificial Sequence
  ENSG00000236790_1 (sequence is synthesized)
tcaccttccaagtttgttaaatagaagttaaataagatttatctataaatcttgcatctatctatctttctttttatctaactatctgtccatctgtctgactgtatatctatctgtcta

SEQ ID NO: 868376 - DNA, 120 bp, Artificial Sequence
  ENSG00000236790_2 (sequence is synthesized)
tctaccatgtctggcgcataacacacgaagttagggaggcaccaaagctggaataaacattggttcccttctcactgtgagctcctctgctcccttttccagcctccatgtatatagcct

SEQ ID NO: 868377 - DNA, 120 bp, Artificial Sequence
  ENSG00000236790_3 (sequence is synthesized)
cagattcgacagagcaggattgaagtttttgcctgttagtttgttttctttgtcttgtccaatatctcttctccatggctccgggccttctgctttgctgttttaagcgcacactgagct

SEQ ID NO: 868378 - DNA, 120 bp, Artificial Sequence
  ENSG00000236790_4 (sequence is synthesized)
caccagggagaacctgtgtctgaagccaccccctgcgactgccctgagcagagtcagttttccaggctccatgtagtgtcctcatcctgcattcttccttcacaccccccaagcctcctt

SEQ ID NO: 868379 - DNA, 120 bp, Artificial Sequence
  ENSG00000236790_5 (sequence is synthesized)
ctgcctctgcgcgatcctctgcgtggacgcatttcagaggcacggacatcattgtaacagaggtggtttcatatcacttccttgtcttttgtttcccagccttggaggaggctgtctgca

SEQ ID NO: 868380 - DNA, 120 bp, Artificial Sequence
  ENSG00000236790_6 (sequence is synthesized)
aacactggcagtattcttagaggaagcttgggtttggggcctagacacatccagtctccatgaaacgatgagaacagctgtcctgaaatgacagagcaagaaacctgcgcagcaacagcc

SEQ ID NO: 868381 - DNA, 120 bp, Artificial Sequence
  ENSG00000236790_7 (sequence is synthesized)
tcagagaggccccttaatataccttctctactatgaaaaatcagattttgtgaacaatttggcatgaggagagaaaggaacctgaagtttttagcaaggaagcttcctgtctccaagggg

SEQ ID NO: 868382 - DNA, 120 bp, Artificial Sequence
  ENSG00000236790_8 (sequence is synthesized)
agaaatatattgctgattggatgttgcctctctaattttggagaccatatgttctaggtattccgggaaaaatctgcatttcaaatcctggatccattgttcccaaaagccatgtaagaa

SEQ ID NO: 868383 - DNA, 120 bp, Artificial Sequence
  ENSG00000236790_9 (sequence is synthesized)
tcccaacagagataggtccctctcatggatatgtcctatgtcccagggataccgctcaaagcattttgtggctgaagacatttaatctttcatagaaactcctgaagaagatgttattgc

SEQ ID NO: 868384 - DNA, 120 bp, Artificial Sequence
  ENSG00000236790_10 (sequence is synthesized)
tattataatcatatgtatttggaaatgaagactttgaaaggttctaacttattcaacatttctcaaccagcatgtggcaaagttctgaaagtctgttattctaaccaacatcctaccttg

SEQ ID NO: 868385 - DNA, 120 bp, Artificial Sequence
  ENSG00000236790_11 (sequence is synthesized)
aggagcaatgatgttcacctgtctggttgccacaactcacgtccttctgtgggcagcagagttccaagacgttccccaagatctcattttctggaggtgcatgtctcccgtgaccccctc

SEQ ID NO: 868386 - DNA, 120 bp, Artificial Sequence
  ENSG00000236790_12 (sequence is synthesized)
tttggattgcccgcagagcccgtgaagatggtgttatcactcctgtgattactttactgatcaggtgactttgagtcaatcaaaaggtagattatccaggtgtgcctgatttgatcaggt

SEQ ID NO: 868387 - DNA, 120 bp, Artificial Sequence
  ENSG00000236790_13 (sequence is synthesized)
ggtcccttaaggaggcttaaaatgaccctttctgaagtagagtaattggaaaagtaagagggtctatgggtggggtcacctggcaaggaactgaactcagcctccatgagctctggccac

SEQ ID NO: 868388 - DNA, 120 bp, Artificial Sequence
  ENSG00000236790_14 (sequence is synthesized)
cagctgacctttagcaagaaagcaaatctttctttggtcagtctccacaacaggacgaagctggctgagcccttgcctttggccctgtgagatgctgacccgagtatccagcgaacacgt

SEQ ID NO: 868389 - DNA, 120 bp, Artificial Sequence
  ENSG00000236790_15 (sequence is synthesized)
gccagagtcctgacccatggaaactgagatgatgagtctgtgttgctttaagccactgtgtctacagtaattggttagacagcaatagaaaactaataaacctccctctttttcatttac

SEQ ID NO: 868390 - DNA, 120 bp, Artificial Sequence
  ENSG00000236790_16 (sequence is synthesized)
agaaagcagggattcaggaacaaggaaacaagccctccactgctgggagaggcgtggggaaaactgaaacaggggaactctcggaagaaatgacaacctgttcctcctgccttttgggat

SEQ ID NO: 868391 - DNA, 120 bp, Artificial Sequence
  ENSG00000236790_17 (sequence is synthesized)
tcggactcctgcagcacgcttctcccattttctatccccaacctcacacacaaaccagctatgttttatatgagtggaaatgggaactaaatgccattactgacaaggacaataaagtgc

SEQ ID NO: 868392 - DNA, 120 bp, Artificial Sequence
  ENSG00000236790_18 (sequence is synthesized)
cacataagcaaacatgtttgtgataaaacattcagacagcagacagggttccaagttgagggcccctaatgcatgctggacattctggaagcatggacacagatgagtttagaggtgagg

SEQ ID NO: 868393 - DNA, 120 bp, Artificial Sequence
  ENSG00000236790_19 (sequence is synthesized)
aagcacaggtcgtctgaggctgtgaatcagtgggaccaccctgaggcctgttcgcagatgccctacgcccaggtcgactcttgcgataatattgggttcagttgcatctcatgtccttat

SEQ ID NO: 868394 - DNA, 120 bp, Artificial Sequence
  ENSG00000236790_20 (sequence is synthesized)
agaaaccttctgcttttattaggttggtacaaaagtaattgtgatttttgccatttacttttgcaccatcctactttttgtcatcatgtttgcctgagcacaattatacctttagtggga

SEQ ID NO: 868395 - DNA, 120 bp, Artificial Sequence
  ENSG00000236790_21 (sequence is synthesized)
tattatatgccatgtattcccccaatgggccttcctactccttctccagaaactgtcctacctgctattttaattttaatccattcaatcttcataacaattctgtactacactgttgtt

SEQ ID NO: 868396 - DNA, 120 bp, Artificial Sequence
  ENSG00000236790_22 (sequence is synthesized)
attattatcattattatcgatatcttgattgtatggatttgaaaactgaggctcagaaagttaagtaaattgccccaggttatagaggtagtaaagaataaagctgtgtgttcctcccat

SEQ ID NO: 868397 - DNA, 120 bp, Artificial Sequence
  ENSG00000236790_23 (sequence is synthesized)
aattacaagctcctttactggtagaatgatggtttcaatcttttcttggagaccatagtcactggcatgtagaaaatgctcaattaatgttcactgattgaattaataaattcctaagga

SEQ ID NO: 868398 - DNA, 120 bp, Artificial Sequence
  ENSG00000236790_24 (sequence is synthesized)
ggagttctagagagtccaccccacggttcagccagacctgcccagacgtctcaatcgggattgaaagttttgcctgggctcccatggggcctcctgcttctggaaatgcattatgaagct

SEQ ID NO: 868399 - DNA, 120 bp, Artificial Sequence
  ENSG00000236790_25 (sequence is synthesized)
cttgactgagaacggggatggtttctgcagataaacacctgaaaaggaaagcaagtgacagtgacagggactgggaacctgggagcttctcagcatctccttttcacactctgcctctga

SEQ ID NO: 868400 - DNA, 120 bp, Artificial Sequence
  ENSG00000236790_26 (sequence is synthesized)
gcagctgggaatccttacccctccaatctcctgactgctcatctccctggagccaggaccctgaatcagtattcacggcctgttagtggcttgcaaggcagagcagacagatggacgtgc

SEQ ID NO: 868401 - DNA, 120 bp, Artificial Sequence
  ENSG00000236790_27 (sequence is synthesized)
tcgggaagcctattgatcagcccttggtgtgacctgcccagacctggttctgtttcaagcactgatcacgtggacaaggagtccttaattcctctcagcaccatttgagatgagcaacta

SEQ ID NO: 868402 - DNA, 120 bp, Artificial Sequence
  ENSG00000236790_28 (sequence is synthesized)
cacaagacaaagacgaaaggctttttcagctcaaaaatcctgtgattctttgattctaagaagagattttcttacaaggagtttgcctaagggactttgaatttgctgtgtcttctgctg

SEQ ID NO: 868403 - DNA, 120 bp, Artificial Sequence
  ENSG00000236790_29 (sequence is synthesized)
tgaagattcagaaccctttatactactccaacaccaaatatttaatctgtcaatctaatcttggatatttgaaatcttctccatacatatcatgagatattcttcaccagaataagcttt

SEQ ID NO: 868404 - DNA, 120 bp, Artificial Sequence
  ENSG00000236790_30 (sequence is synthesized)
tgtttcactaccaagaggtttggcctcctctccagcctgtgactactgggaagacagggcacctgtcctattcacctttgtatctctggtgtctcactcaggatccggcacagtgcttgc

SEQ ID NO: 868405 - DNA, 120 bp, Artificial Sequence
  ENSG00000236790_31 (sequence is synthesized)
caaggacctgctatgcgccaggggctgctggagctgggaacctaatgatcacagtgtcagcctctgccagcctttgtgtgtgtggcaggggttgttttgagtcccaccatcttccatccc

SEQ ID NO: 868406 - DNA, 120 bp, Artificial Sequence
  ENSG00000236790_32 (sequence is synthesized)
ttgagtcccaccatcttccatccctgatgcttggagaagctgaggacacacaggggtgtacagggagcatggtgccagcatctgcttctgatgaggcctcaggaagcttccaatcatggc

SEQ ID NO: 868407 - DNA, 120 bp, Artificial Sequence
  ENSG00000236790_33 (sequence is synthesized)
atcacatggttgaatggcgtctcacctgctgactatacgagtctgatgggaaaagcacgctgcttcctccattcccagcgggatcaaatacactgagcgcatcacccagccttgtagcct

SEQ ID NO: 868408 - DNA, 120 bp, Artificial Sequence
  ENSG00000236790_34 (sequence is synthesized)
tccgcatcctggggagaggggtcccagccagcactcgtggtgagaacagagctccctctcgggaccccgttatgctgaccctggcttccacttctaggagaaataaagcatagaaagtcc

SEQ ID NO: 868409 - DNA, 120 bp, Artificial Sequence
  ENSG00000236790_35 (sequence is synthesized)
cttcatatgtccctcccaactctttttttatccacctcttaaaggccaaggttatttactcatattttagtattatgtttaagcaataaaaaggtgtttttattaaagggtcaggtaaat

SEQ ID NO: 868410 - DNA, 120 bp, Artificial Sequence
  ENSG00000236790_36 (sequence is synthesized)
agaatttttaaaatacctaggtcagtaaatgagatttcagtcattgtacaggtgtctttgacttctgcactttctatagtgatggctgcaccagcacattcagaggtgtttggcacatgt

SEQ ID NO: 868411 - DNA, 120 bp, Artificial Sequence
  ENSG00000236790_37 (sequence is synthesized)
tctagcctctggacgctccgcttcttttgaattgactgagggatgtgcacgggtgggaggagtccctgatgttgacacaggtgttgtctttctggatcagtgttttttttttttttaatc

SEQ ID NO: 868412 - DNA, 120 bp, Artificial Sequence
  ENSG00000236790_38 (sequence is synthesized)
gaaaagaagagggatttcattcattgtgtacctgtagactgtgtgtcaatatctgtttattaactgcttactttggatttagagttaatctttgtatttacatacattagcttagggacc

SEQ ID NO: 868413 - DNA, 120 bp, Artificial Sequence
  ENSG00000236790_39 (sequence is synthesized)
tgaataactaattgaatatgtgacatctttttcagtcattgagttgatgttgattcttattggtttctttgatctaaatatgttaaacatgtggaacatgtaaaatgatacaaaaattca

SEQ ID NO: 868414 - DNA, 120 bp, Artificial Sequence
  ENSG00000236790_40 (sequence is synthesized)
ggcataccctcaagagaggttttaatttccttagtaaaatctaatcattcatttatttattcatccaatcagtgacattaactgagagtctactacatgccaggctctgtgctagctgtt

SEQ ID NO: 868415 - DNA, 120 bp, Artificial Sequence
  ENSG00000236790_41 (sequence is synthesized)
ataggatgctagagaggaataaaacattcttcattcacttccaataaatctcagaccaataggaatgacaaggcagatgtacaaagagctttaaaaaaggcaggaaatgataacagctct

SEQ ID NO: 868416 - DNA, 120 bp, Artificial Sequence
  ENSG00000236790_42 (sequence is synthesized)
gaaagaggaaccgattttgcacaactggatcagaggagagaaagagcacttcctctctggaggcaagacataagcacacgacaaagtttatgttggacacattgtattaagtgccaaagg

SEQ ID NO: 868417 - DNA, 120 bp, Artificial Sequence
  ENSG00000236790_43 (sequence is synthesized)
agtgtaacaagaataacaataacaaaaacaaatggctaattttagcactgtttcattgaattggcagtaggggaaaaggccattacacttgggactgaaagaagaaatacttgttgtctg

SEQ ID NO: 868418 - DNA, 120 bp, Artificial Sequence
  ENSG00000236790_44 (sequence is synthesized)
tatttagacttctctatcagaaagtctagccctttgctaggggagttgttggttttctattgcccaaatcttccccaaagaagcacaggagggcctgcatgacaatactccaacagtgat

SEQ ID NO: 868419 - DNA, 120 bp, Artificial Sequence
  ENSG00000236790_45 (sequence is synthesized)
attttttctaatttacatcttgtgtaaatattttctgatgcttcttaccaaaagagtttcagataaatggtttaaatgttgtggcagacagatcttagtagggtggccctatggtcttgc

SEQ ID NO: 868420 - DNA, 120 bp, Artificial Sequence
  ENSG00000236790_46 (sequence is synthesized)
catttaatcttttcctgtgatcaggctattttatatggtaacagtgatgggatattacaacacacaaatacacacacaaacatacacacacacaccccatctttatagcacacataagac

SEQ ID NO: 868421 - DNA, 120 bp, Artificial Sequence
  ENSG00000236790_47 (sequence is synthesized)
ttctctcccttggaggcttgaggaaggaatctgccatattgcaagagagtttatgggagggcaatgcaacaaggaaccataagacacctgtagagttgagagctgccttagccaacagcc

SEQ ID NO: 868422 - DNA, 120 bp, Artificial Sequence
  ENSG00000236790_48 (sequence is synthesized)
aacaagaaattgggaatgtcagttctgcaaatgcaaagagatgaattctttcaacaatctgagggaaatctgagggaagttagaagcagttcttcccccatccaacctctgatggaagtg

SEQ ID NO: 868423 - DNA, 120 bp, Artificial Sequence
  ENSG00000236790_49 (sequence is synthesized)
tagcccagaccgcaccttgattgctgccttgtgagatgctaagcagaggaaatagctaagctatgccaagactcttaacccacagaaaaagtaagataataaatgtgctgttttaatcca

SEQ ID NO: 868424 - DNA, 120 bp, Artificial Sequence
  ENSG00000236790_50 (sequence is synthesized)
tcatatgactgttcgccaaactggaataattgttgcatttgtgtgtgacttctcagtattcctatggcattaccaccatagcacccctatgtcaaatggtgaaagaattaggtgaggttt

SEQ ID NO: 868425 - DNA, 120 bp, Artificial Sequence
  ENSG00000236790_51 (sequence is synthesized)
tgtgaacgtttagagtaactttgtttttttgcatcaacattcaagaagcactccttcccttccactgcagtagaaccttgaggtccctctcagatttctgtggggtgtctgtggtctgct

SEQ ID NO: 868426 - DNA, 120 bp, Artificial Sequence
  ENSG00000236790_52 (sequence is synthesized)
actccaaagataagaatccttaagaactaactgtggaatgagaaacactgccaaatggaggctgggcacggtcgctcacacataatcccggcactttgggaggcaaaggtggatcacttg

SEQ ID NO: 868427 - DNA, 120 bp, Artificial Sequence
  ENSG00000236790_53 (sequence is synthesized)
caagaccagcctgagcaacacagtgagatctcatatctacaaaacatccggaaaattagctgggcgtcgtgacatgttcctgtggtactagctccttggaaggctgaggtcggggtattg

SEQ ID NO: 868428 - DNA, 76 bp, Artificial Sequence
  ENSG00000236790_54 (sequence is synthesized)
gtgacatgttcctgtggtactagctccttggaaggctgaggtcggggtattgcttaagcctggaaggtgaaggctg

SEQ ID NO: 868429 - DNA, 120 bp, Artificial Sequence
  ENSG00000236790_55 (sequence is synthesized)
gatttctccccgtggaataggggcgcgaaggctgccctgtcacacacggcccaagagattgattacctgggctctggcagcctctctggtgacagtgacagggactgggaacctgggagc

SEQ ID NO: 868430 - DNA, 120 bp, Artificial Sequence
  ENSG00000236790_56 (sequence is synthesized)
actacctcatgtcctaaaaggatgacatgtcctcatgtcctaaaacaactacctaccgtgctatctaactctctgcctttgtgtctttgtttccctttggctgcctgtctccagccacac

SEQ ID NO: 868431 - DNA, 120 bp, Artificial Sequence
  ENSG00000236790_57 (sequence is synthesized)
tccactggaacctcacaggtattgaatctcttctgtgcacatttggatgtggaaaatggaaacttgtaagtctacagaaactaaaccagagcaggttttatagttgggcctaaaatacag

SEQ ID NO: 868432 - DNA, 120 bp, Artificial Sequence
  ENSG00000236790_58 (sequence is synthesized)
ttcctagggttcagtttaaaaatattttctattttttcctggattttattgcaaatgttttgtcgttgttttgattctgtttttgtctacacctgggtttaattcctccactattaggta

SEQ ID NO: 868433 - DNA, 120 bp, Artificial Sequence
  ENSG00000236790_59 (sequence is synthesized)
aggatagagggtgctccacagacgcgaactgcatctttatgtttacatagaagggagagtgaaggagcaaatgtgggcaacagctgtcagtgacacatcattaccccaacagccagaaac

SEQ ID NO: 868434 - DNA, 120 bp, Artificial Sequence
  ENSG00000236790_60 (sequence is synthesized)
aagataagcgccttgcaggggcccttaactgactgctgggttcgatggttcaaagagaaaaagcacgtgataactttgaaggaggctgcctggctgagctgatcggatcacctagagact

SEQ ID NO: 868435 - DNA, 120 bp, Artificial Sequence
  ENSG00000236790_61 (sequence is synthesized)
ggaaatgctttctggatggacagattgaagaagaaagtgtcaggaccaaggattgaagaagaaagtgtcaggaccaaggaaaactgcccaggggaaaataattctcaacagtatgttgta

SEQ ID NO: 868436 - DNA, 120 bp, Artificial Sequence
  ENSG00000236790_62 (sequence is synthesized)
ttcctagtgaaggaacccccatccagtctggactcaacagtctgtagtttttcatcttaaaactgggaagaatgatatgaggaggatgttttcttactctccacatcactggttaagttt

SEQ ID NO: 868437 - DNA, 120 bp, Artificial Sequence
  ENSG00000236790_63 (sequence is synthesized)
tttgtttaatcaattgtattttaaagcagttcaacctgtcttaatagataaatgaatatcagtaaaactcaaccatattagaaggggcccgtgttattttcatctccaaggaggggccca

SEQ ID NO: 868438 - DNA, 79 bp, Artificial Sequence
  ENSG00000236790_64 (sequence is synthesized)
ctcatgagatctgatggttttataaagtggagttaccttgcctggtgccatgtaggacaaacctttgctcttccttcag

SEQ ID NO: 868439 - DNA, 120 bp, Artificial Sequence
  ENSG00000236790_65 (sequence is synthesized)
ggttcaaagagaaaaagcacgtgataactttgaaggaggctgcctggctgagctgatcggatcacctagagactggaaatgctttctggtctgaagtcacctgccctatctggacattcc

SEQ ID NO: 868440 - DNA, 120 bp, Artificial Sequence
  ENSG00000236790_66 (sequence is synthesized)
atagactaccacttttacccacgacttcgatgtggcatgctcattggaccagataagcaagcagtggcaagtggattggaggtcttggaatatgaaggcctggccctcgtctcagcttgg

SEQ ID NO: 868441 - DNA, 120 bp, Artificial Sequence
  ENSG00000236790_67 (sequence is synthesized)
aataaatctgaaggcccatcacagcttcagagatgcttggagaaggctgaggtctcccctgtaaccttatgagaaccttgagttgttgaactcattaattctttgggaccatcttcctga

SEQ ID NO: 868442 - DNA, 120 bp, Artificial Sequence
  ENSG00000236790_68 (sequence is synthesized)
tgttcaagtttgtgaaacaggctttccctttaagatttgttttcctcaaaatacaagactattgatgcttcagttttgaagtggattctgcactcaagaaatgtaccattgaagaatggg

SEQ ID NO: 868443 - DNA, 120 bp, Artificial Sequence
  ENSG00000236790_69 (sequence is synthesized)
actggtaggaagggaaaaaaactaaaaggaaacgcattttcgagttgcacatcatgatcaggcacagagtccagatacacttggagtagcaagcatccatccttgtggagacgcacatga

SEQ ID NO: 868444 - DNA, 120 bp, Artificial Sequence
  ENSG00000236790_70 (sequence is synthesized)
accaggactctctgcacccacccctctcaagttttattttccgacggctgtaatgttccaggacacctgccatcatggagggttatccagcacctggaggatacctgctacctattttgt

SEQ ID NO: 868445 - DNA, 120 bp, Artificial Sequence
  ENSG00000236790_71 (sequence is synthesized)
ggcctcaggaagcttccaatcatggcaaaacgtgaagtgggagcagacacatcacatggagaatctcccgagaacaccctctgatcagcactctgcatgcaatttccatctcagactctg

SEQ ID NO: 868446 - DNA, 120 bp, Artificial Sequence
  ENSG00000236790_72 (sequence is synthesized)
ctgatcagcactctgcatgcaatttccatctcagactctgtttctaggaagactttcaggcagctgacactggacgtggttgtgagttgcaggccctaatgaaaaattggagaggaagca

SEQ ID NO: 868447 - DNA, 120 bp, Artificial Sequence
  ENSG00000236790_73 (sequence is synthesized)
tcaggcaaactgtgaaagccagagcacttccttggcagcatttaagaaaaccccgatgatctgcagctggaaggcaggttggctggaggaccagtctgaaccctgagtaggttaagttct

SEQ ID NO: 868448 - DNA, 120 bp, Artificial Sequence
  ENSG00000236790_74 (sequence is synthesized)
cagtccttcagacacagggctctaatgggaaagaggtgagacccttacacttagggtgggagccctggacagttgggaaccctgaacacttacatgcccctgagtcccctgggcctgcag

SEQ ID NO: 868449 - DNA, 79 bp, Artificial Sequence
  ENSG00000236790_75 (sequence is synthesized)
cctgaacacttacatgcccctgagtcccctgggcctgcagaaatggcctatttctcatgtcatgtagaagattgtagac

SEQ ID NO: 868450 - DNA, 120 bp, Artificial Sequence
  ENSG00000236790_76 (sequence is synthesized)
gacactgagctagggtggccatgcctcgccctgacctcaggcccatgggccccgtggatgagcaggggcatgcaggacaggcctgcagggcagggcagggcagtagggttttcatcggca

SEQ ID NO: 868451 - DNA, 120 bp, Artificial Sequence
  ENSG00000236790_77 (sequence is synthesized)
ctggctgcatttatggagaccacagacaaaagatggaaacagcctccaccggcatggggatcaggcatggggcaaacacaggagacaaaacagtctgaagtcacctgccctatctggaca

SEQ ID NO: 868452 - DNA, 120 bp, Artificial Sequence
  ENSG00000236790_78 (sequence is synthesized)
gctgttccctgatgcggcacacttcctagaagaagcaagtgaatttaaagcagagtgaactgtagaggagttcacgaccaaatctctgatgctttccccagatctttcttcagggccaac

SEQ ID NO: 868453 - DNA, 120 bp, Artificial Sequence
  ENSG00000236790_79 (sequence is synthesized)
acatccattgctcagctgtgatagacagcagtcaggggtggctcacctctctcactgggaattgctctcagcagtagggaactcattcagggttaaggcatctccttgaggaggcccatg

SEQ ID NO: 868454 - DNA, 120 bp, Artificial Sequence
  ENSG00000236790_80 (sequence is synthesized)
cctggaggatacctgctacctggtgaaggactttagtacgatggtcaagacaagaaccgtggagtcagaatgcctgcatgcagatctcatcaccatggagtctcgctctgttgcccaggc

SEQ ID NO: 868455 - DNA, 120 bp, Artificial Sequence
  ENSG00000236790_81 (sequence is synthesized)
ccaggttcaagtgattcttctgcctcatcctcctgagtcgctgggattacaggtgtgaggtatcatgcctggcccaagatttactttatttgatattaatatagccacatctgcttactt

SEQ ID NO: 868456 - DNA, 120 bp, Artificial Sequence
  ENSG00000236790_82 (sequence is synthesized)
gcttacttttaaaattaatgtctgcatggcatattattgctattccttaatttccaatttacctctatcattatagcttacccactgatgtagctttagcagctgctgtcccagttctca

SEQ ID NO: 868457 - DNA, 120 bp, Artificial Sequence
  ENSG00000236790_83 (sequence is synthesized)
aatatccaggctagcttggtggcccctttatccatgggtcatttatttaatccaatctgccaatccctgcctttaattagtgtttttaaaccatttacatttaatgtaattattcatagt

SEQ ID NO: 868458 - DNA, 120 bp, Artificial Sequence
  ENSG00000236790_84 (sequence is synthesized)
ttaatctgatgtctgttattttattttttgtcttctccttattttctgtttcttttttgctcttgtctttcttgtcttgttttttctcttccctttaacattttttagatctccttttga

SEQ ID NO: 868459 - DNA, 120 bp, Artificial Sequence
  ENSG00000236790_85 (sequence is synthesized)
ttaatttatagagtttttgattatatctctttgtatgaactttttagttattgctcaaatatcacattttatatttataacacaggctactgatgttgacattttaacagttcaagtgaa

SEQ ID NO: 868460 - DNA, 120 bp, Artificial Sequence
  ENSG00000236790_86 (sequence is synthesized)
gtgtagaaatcttacccattatccctccctattaataatataattgtcttaaatgtcttttcctacatatatttataacaagtatatgagatagccttacaatttttgctttaactatca

SEQ ID NO: 868461 - DNA, 120 bp, Artificial Sequence
  ENSG00000236790_87 (sequence is synthesized)
atcatgcattaggaaactcaagaagaaagggaaatgtatttaattcatattttcactctttttaaaatgaatttcataaaatctagattggcaaatttagaaataaaatttctaaatgtt

SEQ ID NO: 868462 - DNA, 120 bp, Artificial Sequence
  ENSG00000236790_88 (sequence is synthesized)
ggtctgggcagctgtcactttccttctgcttcccagtacagaggcctatctggtgctcagaaaagcttcctaagtaagaatgcaggtgtctcacattaagaagggaaccttctgtccatc

SEQ ID NO: 868463 - DNA, 120 bp, Artificial Sequence
  ENSG00000236790_89 (sequence is synthesized)
tccagcttaagtatcaacgtatccagcagcctcaagtctatccaaaccttattcatttttccccactttgttttcataatttgaccacagaactgagcgtcaagtatatatgaacccaag

SEQ ID NO: 868464 - DNA, 120 bp, Artificial Sequence
  ENSG00000236790_90 (sequence is synthesized)
caattacagggcaagatgaaaagtggcttcttagtaaacatttgctagcttgatacctgactccactcctgcctattaaaagcatttcgcttgaaagtatgcaatggttagaagcatcta

SEQ ID NO: 868465 - DNA, 120 bp, Artificial Sequence
  ENSG00000236790_91 (sequence is synthesized)
gaaagtcgaggtctgatgatttcacacacatattttggggtgctaaattaaagctctcctttgtaaaacagtgcatgatgtcttggtgctctcaggattgaatggtgaacatactggcag

SEQ ID NO: 868466 - DNA, 120 bp, Artificial Sequence
  ENSG00000236790_92 (sequence is synthesized)
aggcaatttcagatccaagtgaaagacagttttcacctggtggtaagggtagatgtgtactgaaacaacaatctagggccgtcttctttgtaccacaagcttaataatttgtatggctat

SEQ ID NO: 868467 - DNA, 120 bp, Artificial Sequence
  ENSG00000236790_93 (sequence is synthesized)
gctgtcttcttagctgcttgctggtggtgaaaatcagttattttcactggctgattgacagttggccagcactgacccttctgaagacctgtatttatttcttggagggggtacccttgg

SEQ ID NO: 868468 - DNA, 120 bp, Artificial Sequence
  ENSG00000236790_94 (sequence is synthesized)
ttttattttattccttttgcgccctcaccctacttcatgccttgctgggaataggaacagtggtgcagacttaagagaagaggccaaggaagagcaagtgaaatctgctggtcaccgtag

SEQ ID NO: 868469 - DNA, 120 bp, Artificial Sequence
  ENSG00000236790_95 (sequence is synthesized)
atttaagcccttaggagacagggttgtgtttctcctcctggcagagttgcaatgagacaatgtctatcaaatacaagaagagtggctgagttcaaggaggggtagaaatctgtcaatgaa

SEQ ID NO: 868470 - DNA, 120 bp, Artificial Sequence
  ENSG00000236790_96 (sequence is synthesized)
aaattctatatcacattgaagtttggtcatagaaggtagcttctggtgttctgccccctaaccatggcatgccatgatttagtccgtaatggacacagcttagtggagtttgtttcatct

SEQ ID NO: 868471 - DNA, 120 bp, Artificial Sequence
  ENSG00000236790_97 (sequence is synthesized)
ccaaacttcactcattgtttaaagatactggctaggtgtcagcacagcctgggccagggagagacgatggcccattagtcatcatctgtcatgcctatggactgtagggaccagagcatt

SEQ ID NO: 868472 - DNA, 120 bp, Artificial Sequence
  ENSG00000236790_98 (sequence is synthesized)
tacactcagaatcacagagataattagcacattgatgtcattgttcctaaccactgaggccattgatcctgtccccagcctgacttgaaggtctttgggagttcagccagcctcccaacc

SEQ ID NO: 868473 - DNA, 120 bp, Artificial Sequence
  ENSG00000236790_99 (sequence is synthesized)
tgcctaccactttgttctaagaatcctactcaacagtggcttgcattttctgcttctaagtggctttgcgattatgtagaaattcatgacgtgattttgtcctgattgaataaagtgcat

SEQ ID NO: 868474 - DNA, 120 bp, Artificial Sequence
  ENSG00000236790_100 (sequence is synthesized)
gtttgcctaagtgtccacacggcttgtgtctcctcccagcagccggcctgctggtgtgtgtgctgtgtgtggagagtggccttaggcctgtgttgtgagtgatgtctgcagagcatgggg

SEQ ID NO: 868475 - DNA, 120 bp, Artificial Sequence
  ENSG00000236790_101 (sequence is synthesized)
ttgatttggaagaaggtgtgatccgaagttgtgtttgacctgagctcctgtcacccctgaaggcagcagaggatctcctgtcagtgacccaggaggacagctttctgaaggacattctgc

SEQ ID NO: 868476 - DNA, 120 bp, Artificial Sequence
  ENSG00000236790_102 (sequence is synthesized)
attggtttgcccagatgtgactttttcccctacctttgaaggcctagattgggtttcccatttcttggccctttggaaaggccaatggctccctgtctgacaggctgccctgagcagcag

SEQ ID NO: 868477 - DNA, 120 bp, Artificial Sequence
  ENSG00000236790_103 (sequence is synthesized)
gtgctccatttagacccaggctgccccaatcccagctctgatctgactctcagctctgaggctccattgagtccctgggcctcagggaccctgttcaggctttgctgatggtggcatcaa

SEQ ID NO: 868478 - DNA, 120 bp, Artificial Sequence
  ENSG00000236790_104 (sequence is synthesized)
gtgacctccgagccacctccacgttggctcagactgaggaaactggtgatcttgtcttgctgtttgcaatacttgaagacaaaaacagaacttgtgctgcattctcaagaaagaagagac

SEQ ID NO: 868479 - DNA, 120 bp, Artificial Sequence
  ENSG00000236790_105 (sequence is synthesized)
aactgttcctgtacctcactcttgtagatatctgtatgaagaagcagtgatgggtgcatgcaagctagggagcatcaaggctcccactgcgtgggcgccagctgacccctgacctcgttt

SEQ ID NO: 868480 - DNA, 120 bp, Artificial Sequence
  ENSG00000236790_106 (sequence is synthesized)
tcatctgttgctctggtcatggctctgagatctgggcaacctgagccagcttgtgcattccttacccttgtgcttttgcactatccatccctgtcccctagaactccctccagtacagtc

SEQ ID NO: 868481 - DNA, 120 bp, Artificial Sequence
  ENSG00000236790_107 (sequence is synthesized)
gaattagattccaaattggaacaaagcgttcccactggctatttgaccacgactgtagaacaagtgcccttgtgtgacgttctttacggggcagggatgagatagtgaccgtttgggtct

SEQ ID NO: 868482 - DNA, 120 bp, Artificial Sequence
  ENSG00000236790_108 (sequence is synthesized)
tcaggtcaccagggagagtggtttgttggaatcctgagtgagaagcttcagtgctggaaaccaaaaaaattaattcctttcgatgttggcgtggcctggttgccaggctctcagggtatc

SEQ ID NO: 868483 - DNA, 120 bp, Artificial Sequence
  ENSG00000236790_109 (sequence is synthesized)
tttgttagtaaaaaatcttgcattgtcatcatttttgttaccatatttgaactttggtgtattgctgctcttggtgttaatatattataaaagagggagacaagattctaggccagttct

SEQ ID NO: 868484 - DNA, 120 bp, Artificial Sequence
  ENSG00000236790_110 (sequence is synthesized)
catcagccattgtgtagctggggatgagagagaagagccagtttgagcgtgtgcaactgacgctgggaatttccatcatacgtgtatttattctatttatttggatctttgattatcctt

SEQ ID NO: 868485 - DNA, 120 bp, Artificial Sequence
  ENSG00000236790_111 (sequence is synthesized)
actgtcttaatggctcatggttatttcacatatgtcaaccttgtactgctcaagagacaaaaaacttcctgagagcagagctgaaatctttggttctcttgtatttctcaaaatgcctag

SEQ ID NO: 868486 - DNA, 120 bp, Artificial Sequence
  ENSG00000236790_112 (sequence is synthesized)
cactttgtatgggaaagaattgattctcaggatgcacttgttgacttgaatcaaatgtctgtgaaaacaggagagagccattgccatgaataatcaaaaccctagggttattcaaagccc

SEQ ID NO: 868487 - DNA, 120 bp, Artificial Sequence
  ENSG00000236790_113 (sequence is synthesized)
tcatttcagctcttaaatttagctctcttttccctcaagccttttatcataaataccatgagggggaaggaaagaggattatgatttcatctctatttgcctctcctaccctcctgctgg

SEQ ID NO: 868488 - DNA, 120 bp, Artificial Sequence
  ENSG00000236790_114 (sequence is synthesized)
tactgaaatgatcaagagagtagaaaaatgcccaaaaaccaacagaaggaaagagatgcaaacggctcagagaaccatgcatgggaggctttgcctagaatgactgagacagactgtcat

SEQ ID NO: 868489 - DNA, 120 bp, Artificial Sequence
  ENSG00000236790_115 (sequence is synthesized)
cttgtaagctactacctgtttttggtttggtgatgattttgtacccattagtgtgtgcggttttgcatttgtgtactttgcggtttcaggtggaactcgaagtctattctttcaaggaca

SEQ ID NO: 868490 - DNA, 120 bp, Artificial Sequence
  ENSG00000236790_116 (sequence is synthesized)
gaagggaattcctaacagtgcgctgacagtaaagttcatgacaaagaacatctgcatgctattactatcgatttgggtattcttggatatttttatcctttttttcccaaaacaaattat

SEQ ID NO: 868491 - DNA, 120 bp, Artificial Sequence
  ENSG00000236790_117 (sequence is synthesized)
tttcactgaataccaaatgttctgtttctactcaaattataaatcatgatatgaatctattagagaatgatatggcctaaagatgtcctaccgattgtcaggattttctagatttgcata

SEQ ID NO: 868492 - DNA, 120 bp, Artificial Sequence
  ENSG00000236790_118 (sequence is synthesized)
tagttgctggtagcactgtaagcagtgcttagtggactttagctaagacagtggccatgccatagaaatcccagggggaagctgaggttgagccaggtgggtaaagggagagccagaatg

SEQ ID NO: 868493 - DNA, 120 bp, Artificial Sequence
  ENSG00000236790_119 (sequence is synthesized)
tttctgaaactgctcattcattccttcatccaccgtttatgaaatacctcttgcagtccaggcattgtaattggtgctgagaatatagtgatgaggacaatggaatctatgccctcaagg

SEQ ID NO: 868494 - DNA, 120 bp, Artificial Sequence
  ENSG00000236790_120 (sequence is synthesized)
agcgggggcttctcaggaaagagagactctggtaacagagcatgttcagggctatggcaaggataccccagagagcctaggccctgtaccagccaacctagtggagttgatgggggcatg

SEQ ID NO: 868495 - DNA, 120 bp, Artificial Sequence
  ENSG00000236790_121 (sequence is synthesized)
gaggggtattgggacaagtttctgaggaagacatttgacccacttttgatttgttctttaggcaaaaagtagaaaagggtgtttcagtgacacagatagaaaccaggatttgtaaagaca

SEQ ID NO: 868496 - DNA, 120 bp, Artificial Sequence
  ENSG00000236790_122 (sequence is synthesized)
gctgaactgctcaaaagaatgaactctgatattgttttccatactcaataattagcactattgcctggtacagaacagaggctaagttcgtgtttgcgggagaatcagttaactcttaaa

SEQ ID NO: 868497 - DNA, 120 bp, Artificial Sequence
  ENSG00000236790_123 (sequence is synthesized)
tttttatttccttggtccctttttaacactaaacaattagtagtagaagaaaatgtaattgtagtttgtaatttaatggctatcttggatataaggatgatctttttacagtctctagtt

SEQ ID NO: 868498 - DNA, 120 bp, Artificial Sequence
  ENSG00000236790_124 (sequence is synthesized)
aagtttactctgcattgaaaaagcctattttttctttgtatacaaatcagcatgattcttctaaagtgaaaaataattttgctaagtgatccactgcctcgctgacccaatggaagaaag

SEQ ID NO: 868499 - DNA, 120 bp, Artificial Sequence
  ENSG00000236790_125 (sequence is synthesized)
cagtggtttctgtttttgagaattagaattttaaaataggaggagcccacaggctgtgggtaccctttttgccacactcagaagtagggcacgcgtttcttgcttttcagacttcttacc

SEQ ID NO: 868500 - DNA, 120 bp, Artificial Sequence
  ENSG00000236790_126 (sequence is synthesized)
ttcccacacaaagaaaccacaaacggggaattaggacggaaagagtcaagcggcgtgggctcatcttcctcagcagggccatctaagagggcataccactttccaaaagaactgagctga

SEQ ID NO: 868501 - DNA, 120 bp, Artificial Sequence
  ENSG00000236790_127 (sequence is synthesized)
gaccccaaatctgaaaaaccatcctagctgcacgtctataccatttaccacgggctggtaacttgtgcggtgttctgtgagaatgagttcactcaatgtccacacaacggccttttgaga

SEQ ID NO: 868502 - DNA, 120 bp, Artificial Sequence
  ENSG00000236790_128 (sequence is synthesized)
gggaggctatgatcatccttattttacaaatggggactttggttaagaatttgctcagggtcaccagcttgtaggtgccagcactgtggcttgagtcctggtgatctggggggcaggtcc

SEQ ID NO: 868503 - DNA, 120 bp, Artificial Sequence
  ENSG00000236790_129 (sequence is synthesized)
catgcagactcatgttgttttcacccactgcctccctccctccattctgaggagggcaaaatgccacacaatggatgacacagtcacattataatgatgctgagatgctttgtggttaaa

SEQ ID NO: 868504 - DNA, 120 bp, Artificial Sequence
  ENSG00000236790_130 (sequence is synthesized)
agcaacataaaaagatataaggctatgctttcagtttaaaacaactttaaatgttagaatcaggattagaatagttattgtttttctcaacagtttccaagatataaattttgaggccca

SEQ ID NO: 868505 - DNA, 120 bp, Artificial Sequence
  ENSG00000236790_131 (sequence is synthesized)
aactcactgctctggggaggtattagcactttaacaattctatttcttctagagtaattggtctacttagaattcctaaattttttgatgaaagttttggtgatttatcttttctagaaa

SEQ ID NO: 868506 - DNA, 120 bp, Artificial Sequence
  ENSG00000236790_132 (sequence is synthesized)
ataatttcacctactcagattcttagagttacagagaattcagtaaagtgatctcttatgagtcctaaaatttctccctttatcatgtcttacagtgtttatttgtgtattttttatttg

SEQ ID NO: 868507 - DNA, 120 bp, Artificial Sequence
  ENSG00000236790_133 (sequence is synthesized)
tcagaatgcctgcatgcagatctcatcaccatgggtaagtggcaagagctgggcgaaaggctaatctctggggctgtccgtgttctcatgtgtgaaggagaattctctgttgtctgttcc

SEQ ID NO: 868508 - DNA, 120 bp, Artificial Sequence
  ENSG00000236790_134 (sequence is synthesized)
agcttctggtgttgccggccatcctttgcactcccgtcttgcggctgtgttgctccagtctctgcctctgttgttacattgcatctgctgtgcatctatgtccacatttccctcttctta

SEQ ID NO: 868509 - DNA, 120 bp, Artificial Sequence
  ENSG00000236790_135 (sequence is synthesized)
taaggacagagggcccatcctaatgacctcattttaacctgattacatctgcaaagaccctatttccaaatgaggtcatgttcacagacgcccggggttaggacttgaacagatccattt

SEQ ID NO: 868510 - DNA, 120 bp, Artificial Sequence
  ENSG00000236790_136 (sequence is synthesized)
tgagggcacacacaattcaacctataacagagggctagatgtgagacggtgccccctcctacccttcactctgtctcaaaatctttagaaatattttgatggagactaaattcctggtag

SEQ ID NO: 868511 - DNA, 120 bp, Artificial Sequence
  ENSG00000236790_137 (sequence is synthesized)
aaatatcagcaatctctgaaatgacagtttgggtattttttccagaatattataagacaaggtgaccccagatgaacttgggcccactctggttacatacgtgtcatgagtgcttagtga

SEQ ID NO: 868512 - DNA, 120 bp, Artificial Sequence
  ENSG00000236790_138 (sequence is synthesized)
actgtgtgtcaaatgaattacctaacttcatttgtaccatggccaactctgtgtcatcattgcaggattcaagtctggcttgtctggggccaagctgagttctccatgcagagaggtact

SEQ ID NO: 868513 - DNA, 120 bp, Artificial Sequence
  ENSG00000236790_139 (sequence is synthesized)
taataaaggcttccaatgtttgtgcaatgaaatgaaagatctgcggggctgttaggttctcagacaaaaagattgctatgcaaattcagagcctcattatttcaccaaaggttgaaaaac

SEQ ID NO: 868514 - DNA, 120 bp, Artificial Sequence
  ENSG00000236790_140 (sequence is synthesized)
taaaaacagatctggtagcatagtccccttggttggcaggagcagtgctttggacccgggtcacattctgatgtctccttgatcataaacacctggttcccaaagcgtccgcagtttgtt

SEQ ID NO: 868515 - DNA, 120 bp, Artificial Sequence
  ENSG00000236790_141 (sequence is synthesized)
tcatttttaaagaccaggatggcaaatttaaaattcaaattcttttgaacagcggagagaatgtagctataaaagtgtttcagaccacagtgttttaaatgaaggttaattttctgataa

SEQ ID NO: 868516 - DNA, 120 bp, Artificial Sequence
  ENSG00000236790_142 (sequence is synthesized)
aataggaaatgaaggaaaaattatctccctgcacgcaagcatggtttagaatactatagctcaattagatgttctgattgtgcaaacaatcagcctcatgtcttgttaaacttctctttt

SEQ ID NO: 868517 - DNA, 120 bp, Artificial Sequence
  ENSG00000236790_143 (sequence is synthesized)
gcaggaatattaagggtagaacagataaaagatccatctgagccagaagaaaaattataacttaagaagtctcaaaacgaaatgaacttccaaaaatcccatggtgtgtccaacattatt

SEQ ID NO: 868518 - DNA, 120 bp, Artificial Sequence
  ENSG00000236790_144 (sequence is synthesized)
aaaaaattgtccagcatgaaaattaactcctagactcagaggaaagaagttattattctttgctttaagatactgagtacattttactcaatggaattttgctttgcacatacagaaata

SEQ ID NO: 868519 - DNA, 120 bp, Artificial Sequence
  ENSG00000236790_145 (sequence is synthesized)
cgttatacatcatgcatgttaatcagacctatgcaagatattgtttgcaaagtagttttggggatacagggtgtttacttcacaggggctgggttcaggggaaagggaagcaaagaccat

SEQ ID NO: 868520 - DNA, 120 bp, Artificial Sequence
  ENSG00000236790_146 (sequence is synthesized)
tagaacgtcttacgttttgctgcaaagcaattttgataccataagtttttataagtatatgacttctgatttattctcaagcatttatatttaactttcactgggttgtatccagagcaa

SEQ ID NO: 868521 - DNA, 120 bp, Artificial Sequence
  ENSG00000236790_147 (sequence is synthesized)
agagccatacagtcattttgtgctgcgtgcgtcttttctactttcagggcttgtagtaaggttacagaatgtgctggcacttcccagagtttgtctattaagcgaatgagcgatgcatca

SEQ ID NO: 868522 - DNA, 120 bp, Artificial Sequence
  ENSG00000236790_148 (sequence is synthesized)
tcttggtgagatatttggtccatttcgcgcctctctcttctcattcccgccctccacatttgtttccctgtagctgggcctctcctgttctgatggcagccgtgcatcctggccacatct

SEQ ID NO: 868523 - DNA, 120 bp, Artificial Sequence
  ENSG00000236790_149 (sequence is synthesized)
acctaggtggcttctcctggaatttcttctggttatccttccagcctttgtgtcagctctgaggccacatctttcaggaagctctatctgcccaccaggctccccactgctgggtggctc

SEQ ID NO: 868524 - DNA, 120 bp, Artificial Sequence
  ENSG00000236790_150 (sequence is synthesized)
ctccctgcttccctgaacgttctggacctttgcacagttctgaccttgctgcttcctggctgtctccaatctgaactctaagctcgatgggtgtaatgtgtgggttgggcttgctctggt

SEQ ID NO: 868525 - DNA, 120 bp, Artificial Sequence
  ENSG00000236790_151 (sequence is synthesized)
gtctctggcaggtggcaccaggcctgatatgtagtgggtgcttgactgctgtctgttgctcttagaaaaagtaataattgagtatatttgggagttcccagaggagacacacagagactc

SEQ ID NO: 868526 - DNA, 120 bp, Artificial Sequence
  ENSG00000236790_152 (sequence is synthesized)
tcctttgaagatgagatacactcttataaaacctgaaaaatttgaccctaaaatctccctagaactgagagggctatgcagaggttgcctgggatgaaggttcattacactatgattccc

SEQ ID NO: 868527 - DNA, 120 bp, Artificial Sequence
  ENSG00000236790_153 (sequence is synthesized)
aggttaggatgagggttgaggggatgaagacattttaggcagataagtggccaggagtttagcagatttcatcactttatttgggccaatgcagtgaattattgaaaataatagtggatg

SEQ ID NO: 868528 - DNA, 120 bp, Artificial Sequence
  ENSG00000236790_154 (sequence is synthesized)
agactttatgtcatctcagaaaagggagctaagaagcactgtcctgtgtactttacatcaatccatcattttctgaggtggattcaggtattagcattttatttatttacgtattgagtt

SEQ ID NO: 868529 - DNA, 70 bp, Artificial Sequence
  ENSG00000236790_155 (sequence is synthesized)
atttttcattcaggtaatctaccacgttggccttccaaattgctgggattacaggggtgagccactgcat

SEQ ID NO: 868530 - DNA, 120 bp, Artificial Sequence
  ENSG00000236790_156 (sequence is synthesized)
ccttccaaattgctgggattacaggggtgagccactgcatccggccaggtacttgcattttagagtgaaggactttagtataatggtcatgacaagaactttgaagtcagactgcctacg

SEQ ID NO: 868531 - DNA, 70 bp, Artificial Sequence
  ENSG00000236790_157 (sequence is synthesized)
taatggtcatgacaagaactttgaagtcagactgcctacgtacaaatcttttctccatgtatagaaggta

SEQ ID NO: 868532 - DNA, 120 bp, Artificial Sequence
  ENSG00000236790_158 (sequence is synthesized)
acagtctttgagtgtggtggaggccaggcaagacagcaggcatccaggccaggacccagccttaggttacactttgcagggaacgtccagaggaactttaaggggtgctggactccggcg

SEQ ID NO: 868533 - DNA, 120 bp, Artificial Sequence
  ENSG00000236790_159 (sequence is synthesized)
ggccttccctggggaatggccctaagagagccactagagccgctgactttcctggtctccataaagcaggggcccctcttcctgctgcagtggccctgctcacccatgtgaggatgcacc

SEQ ID NO: 868534 - DNA, 120 bp, Artificial Sequence
  ENSG00000236790_160 (sequence is synthesized)
atggtgctagggtgtctcaagactgggcgacaggtgaatggaggaaagagaagagcgaatcttgtgatccactgggtgtgcggtggtggcctacctggttgggtggtccagacttccacg

SEQ ID NO: 868535 - DNA, 120 bp, Artificial Sequence
  ENSG00000236790_161 (sequence is synthesized)
cctgagagcccgagcccttggtcgtcacgtcctcctttggctttggctgctgctcttgtccattcaccatcaaatatggatgaaagagtccaaggcgacaccttgatggatctcctgagt

SEQ ID NO: 868536 - DNA, 120 bp, Artificial Sequence
  ENSG00000236790_162 (sequence is synthesized)
gccgaatggagtcagtagcttcattgtgcagtagcttcatcctcctgagaatccccctgcgattccccagcctgccaggtgtcccacatgaacgcagcctgttctggttctccttcctga

SEQ ID NO: 868537 - DNA, 120 bp, Artificial Sequence
  ENSG00000236790_163 (sequence is synthesized)
taagagtggaaaagaatgcattcacccggtatgggctgcattcctgggccacaggccaccaagctcacctgcaccaggaaagctgctccccaccagttacaaacagcaactgcctgatcg

SEQ ID NO: 868538 - DNA, 120 bp, Artificial Sequence
  ENSG00000236790_164 (sequence is synthesized)
agttgcagatgtccattgtcatcctctagggtctgtcgggattttctagggccagacgtgaattaaataggggtgtgctgggtgcagccctcgcatcctctaggtgtttaatctctggca

SEQ ID NO: 868539 - DNA, 120 bp, Artificial Sequence
  ENSG00000236790_165 (sequence is synthesized)
tttcctctgggatgtgatattatttttgatttcctgcattgatgtgtgtgtctgggagtggggggcctccacttgaacttccccatggtggtagttcctaccaccgactcctaggaacta

SEQ ID NO: 868540 - DNA, 120 bp, Artificial Sequence
  ENSG00000236790_166 (sequence is synthesized)
tgtgagctgggtttggttacctcttccttcaaaaccggcccctgcacacctccactctaacagagggttcaggaccaggcctaggtccctaggtaccagtgtcgcctcagatcctgtgcc

SEQ ID NO: 868541 - DNA, 120 bp, Artificial Sequence
  ENSG00000236790_167 (sequence is synthesized)
cagtggtcctcacatggcatgtgtctctttgtggacgatctgggggagaatgtttgtacagacactgctgtgatgggggagaatgtttgtatagacactgctgtgatgttggagggtcct

SEQ ID NO: 868542 - DNA, 120 bp, Artificial Sequence
  ENSG00000236790_168 (sequence is synthesized)
tcctcccggggctcaccctctccctcagtcagtgggttccaggtctgaaaatgagctcagctccagggctgaaatgtagctttctattggtcattttcctgaagcctcttgactagtttc

SEQ ID NO: 868543 - DNA, 120 bp, Artificial Sequence
  ENSG00000236790_169 (sequence is synthesized)
ccttgagaaaagcttttgctaagggtgtgtggattgagaggtgcccttttctcctgctatatatctaccctttgcagatggggtcaggtgctccagctgccactctgggcttgatgccct

SEQ ID NO: 868544 - DNA, 120 bp, Artificial Sequence
  ENSG00000236790_170 (sequence is synthesized)
gtgtcactgtgcctaccttgctccctgccaaatgacacactagcttctgttgttgtgggattccattggcctcctttgcattcaagagtccaattctgtaacaacagcatagccgccccg

SEQ ID NO: 868545 - DNA, 120 bp, Artificial Sequence
  ENSG00000236790_171 (sequence is synthesized)
cttgtttccgcaggctccctctcagcagtgcgttctttatctagctggtaactggcatgttctctggttgaagggcgtggctggctttccgagctgatgtgctggacctgctctagaggg

SEQ ID NO: 868546 - DNA, 120 bp, Artificial Sequence
  ENSG00000236790_172 (sequence is synthesized)
catactcctctgagcctttctgtcccttccttcatgggcaggagggcggcccaggcatttctgcttaacttagtatggacctttgcttccttcaggctcctaggagccctcctagagcac

SEQ ID NO: 868547 - DNA, 120 bp, Artificial Sequence
  ENSG00000236790_173 (sequence is synthesized)
gttagcactgcttaggggccttgccagagtttacaaccctggatcatggaagggcaggcccacactgataaactctccctattccaagcttaggttctgaccgtcttagtcttgtaccct

SEQ ID NO: 868548 - DNA, 120 bp, Artificial Sequence
  ENSG00000236790_174 (sequence is synthesized)
cagaacccagccccacacattctcctggtttctgcccatgcctctccatgaggtcttgcagcttctctgggggcctttcttcctgtagcaggcacttcctgcacttccccatctatgtac

SEQ ID NO: 868549 - DNA, 120 bp, Artificial Sequence
  ENSG00000236795_0 (sequence is synthesized)
atagggaccgtttccctcatactgttctagtgggagtgaataagtctcacaacgtctgatggtttgataaagggaaacccgtttctcttggctctcattctttctcttgctgccgccatg

SEQ ID NO: 868550 - DNA, 120 bp, Artificial Sequence
  ENSG00000236795_1 (sequence is synthesized)
ttcaaggtcccctccaccttccgccatgatggtgaggcctccctagccatgaggaattatcactggaccagaggacaacttgtaaaaggatttcagaatggcataatgggaagaaacacg

SEQ ID NO: 868551 - DNA, 120 bp, Artificial Sequence
  ENSG00000236795_2 (sequence is synthesized)
ctaataaaacgatgagacatgaagagaatttaaaaatatacaatgatcagctgtgaagaattggccagacaagccttgattttactcattgggtgtccagtgtccatccagtcctcatat

SEQ ID NO: 868552 - DNA, 120 bp, Artificial Sequence
  ENSG00000236795_3 (sequence is synthesized)
aattcaagggaagcgactctcttttctctgcaagggagccagtcctgaactatccaagtcaaccgaggcaatcccatttccttgccgctacttggatgaaacatggggatgtgactcagc

SEQ ID NO: 868553 - DNA, 120 bp, Artificial Sequence
  ENSG00000236795_4 (sequence is synthesized)
tacagcgagagaggatgagaggcgtgctgagaacacctttgggaaggccgccgattcctgagaagaacatggcggcagagcagatggcctcaccctgcctctggaaattgcagtgtgtgt

SEQ ID NO: 868554 - DNA, 120 bp, Artificial Sequence
  ENSG00000236795_5 (sequence is synthesized)
ctgtgagaactgaaagggtgtggccatcttgaccccaagatgggagccaggctcaggacacgcagtgatgccggaatggctcccaaatggctcccaaagcatcaggtcagtgggtcaact

SEQ ID NO: 868555 - DNA, 120 bp, Artificial Sequence
  ENSG00000236795_6 (sequence is synthesized)
aattcctgagatctgttccaccctgacacttccatcatataggaaactgaatttccttgctttttgaatcagtttgagtcagatcagaatttttagtaagaactaaagattaaaccttcc

SEQ ID NO: 868556 - DNA, 120 bp, Artificial Sequence
  ENSG00000236795_7 (sequence is synthesized)
ttaaatgtatattttaaatttcctcttaaaaattatgacaattgtgatctttcaaagcacagaagaggaggaattctctcctccatttgtctaggggcgaggaagtaaatcgcacggcag

SEQ ID NO: 868557 - DNA, 120 bp, Artificial Sequence
  ENSG00000236795_8 (sequence is synthesized)
tcttccagttctataaacattattattcggatccaaaaaactattagctagagcctattgatcctctagctccctccttttcagagcaccagcatacaaatcgtctcatttgatttcctt

SEQ ID NO: 868558 - DNA, 120 bp, Artificial Sequence
  ENSG00000236795_9 (sequence is synthesized)
ctagaagcacaagctgggcgtggaagactgtacagatgtagcaggaaggtatgaatggccaacggcacaagatgaaactgaaagtgacattcctgttttaatacttgctctttgaccaag

SEQ ID NO: 868559 - DNA, 120 bp, Artificial Sequence
  ENSG00000236795_10 (sequence is synthesized)
ctcttagtttttaagtgatgagtggttgggattgccagttttggttttggcgtagactcaagagacaaaaatacaagctggcaggtcctatagtgaaatttggagtgaatcctgtagcag

SEQ ID NO: 868560 - DNA, 120 bp, Artificial Sequence
  ENSG00000236795_11 (sequence is synthesized)
ctgatgaggaactatgagacagtggcctgtgttgctggatagaggcatcccactgtccactcgttggtgtatgttctcataaattcacaatcattctttcaaatgtggctcaacaatccg

SEQ ID NO: 868561 - DNA, 120 bp, Artificial Sequence
  ENSG00000236795_12 (sequence is synthesized)
atactaaggagcactacctgaaatcacaaagacagtttctttgtgaatattgcaccttcttcatagctgttggttcttagcactgttgtgtgttcaatctttcattagattatatactcc

SEQ ID NO: 868562 - DNA, 120 bp, Artificial Sequence
  ENSG00000236795_13 (sequence is synthesized)
ttaagacaggatcaggagttatattttgttgaatatacactatgttgatgtcatatgaaataaaatttaagtgtatatttgtgtaccatatgaggagaaataaacaatattatgtgtgaa

SEQ ID NO: 868563 - DNA, 120 bp, Artificial Sequence
  ENSG00000224943_0 (sequence is synthesized)
tgtggacttcaactctgacaagtctgaatcccagtggaaatgcaagttagcctcaaactgagaacctcatactacattcagaatatgttttcatgtttccaaaatgtcaccaacaatgag

SEQ ID NO: 868564 - DNA, 120 bp, Artificial Sequence
  ENSG00000224943_1 (sequence is synthesized)
atgacaggaacctgaaccaaaaggatgagagtagagatggaaagtaaatgttgttacaaaggctaaatcagaaatttgtcccagatctagtatggatcatgaagaagaagatagaatgaa

SEQ ID NO: 868565 - DNA, 120 bp, Artificial Sequence
  ENSG00000224943_2 (sequence is synthesized)
agaacactcttaccattctgagtgccgaaagcaggaggtggttcctaaaaatatgaagtttgggtatcctatacaatgagagaagaatgtctatcttcattatgttcaagtacccagata

SEQ ID NO: 868566 - DNA, 120 bp, Artificial Sequence
  ENSG00000224943_3 (sequence is synthesized)
ttataagggggagacatgacaagctttacgtgttgaaaatacaaagagcctgaccctacaggaatctttctttctggcctttttcatcgtgagtacatgcttttgattttgatcatggtt

SEQ ID NO: 868567 - DNA, 120 bp, Artificial Sequence
  ENSG00000224943_4 (sequence is synthesized)
aaatagaaaatatttaaattataatttctatccacaaggataaaatttctatccacaatttctaaccaacaagagtccccgtgactcacctggcacagaggttgggaaacttcaagttga

SEQ ID NO: 868568 - DNA, 120 bp, Artificial Sequence
  ENSG00000224943_5 (sequence is synthesized)
ttcccaggcctaagtatggaacagtctttatcactttccaaaatgtagcctgtccacattttcttgtgctgcataagcccatcatcccaatataatacagtagagaaaaagaaactgatg

SEQ ID NO: 868569 - DNA, 120 bp, Artificial Sequence
  ENSG00000224943_6 (sequence is synthesized)
ctgaaattctcatgggctttgatgagcagaaacttggtaatataattttgatttagaaaaataaagaaacatgacatttgttatccctagagatttataaattgattcaaacttatcatt

SEQ ID NO: 868570 - DNA, 120 bp, Artificial Sequence
  ENSG00000224945_0 (sequence is synthesized)
cagctgtcagtgcatgagtggactgaatgctatgaaattgcatacttttctgttggatgtttcatgggagagactttgcttagaagttagctgagtaatcatgtgatcttggtatgagtg

SEQ ID NO: 868571 - DNA, 120 bp, Artificial Sequence
  ENSG00000224945_1 (sequence is synthesized)
ttaagcattcagcatggctttgagtctgaacaaaagagcaaacaagccctggtgagatgaagaagggagcaggagcctggagatgcctgaagatgttggtgagaatcacaacctggagtg

SEQ ID NO: 868572 - DNA, 120 bp, Artificial Sequence
  ENSG00000224945_2 (sequence is synthesized)
ccctctcttctcttctaagagttcacttggaaggcttggcaaaactcagctctcaggtcacttctggcttccaacattctataaatgctctcagaaaacaaaagtccaagaggatttcct

SEQ ID NO: 868573 - DNA, 120 bp, Artificial Sequence
  ENSG00000224945_3 (sequence is synthesized)
atccccaggacctggcccaggctgagagaagctgtgtggagtggaagatggacattgaggaagaagggcaggtgtggtctcacccagaatggttcctgctgcttccgcggtgcccaggct

SEQ ID NO: 868574 - DNA, 120 bp, Artificial Sequence
  ENSG00000224945_4 (sequence is synthesized)
agggacccccttcacccatgcatcctctgcgacccctctacctctctcttcagacatttctgggttgcatggacctttaatcacaagttcatttggggatggaaacaatgcatattgtgc

SEQ ID NO: 868575 - DNA, 120 bp, Artificial Sequence
  ENSG00000224945_5 (sequence is synthesized)
gcatcctgcctgctggaaattctgtgctctctgtttccatccctttgtcgtggtaatgaccgtatacctctcccctgtaccctcctctgcctgctctccgtgcaggcccctctccctctg

SEQ ID NO: 868576 - DNA, 120 bp, Artificial Sequence
  ENSG00000224945_6 (sequence is synthesized)
gttgtcccatcagcatttccccacagctcgttgttcctccttcctcttttctggtgacctttctactgattgcattgtacctctttccctgatattaaagatgtttttaaaaacaacaga

SEQ ID NO: 868577 - DNA, 120 bp, Artificial Sequence
  ENSG00000224944_0 (sequence is synthesized)
gtgttctcggttaatccagtccaaattattaagccttcataatcctccaagacacgtaatcagataagactgcaactgatttgaagaaatccttaattgcagaaatcatcaagccttgct

SEQ ID NO: 868578 - DNA, 120 bp, Artificial Sequence
  ENSG00000224944_1 (sequence is synthesized)
cttctgctgggcgagatgaaagcgttcatcttctccggagaacacacgaagtcctcaccttgcaagcagagaccaggccctccccagacactgagcttggtggcacttggattttggact

SEQ ID NO: 868579 - DNA, 120 bp, Artificial Sequence
  ENSG00000224944_2 (sequence is synthesized)
tccagcctccaaaattgtgagaaaaagtgctgaatatcacagaacacaaagaaaagagaaagagaaactgacagagcctataaatgttgcacgaaggttcagatacatacagttctgctg

SEQ ID NO: 868580 - DNA, 86 bp, Artificial Sequence
  ENSG00000224944_3 (sequence is synthesized)
aaggttcagatacatacagttctgctggctttttaaggagcagtgtttcctatatcctaaggcagatggacatgttgggatgggga

SEQ ID NO: 868581 - DNA, 120 bp, Artificial Sequence
  ENSG00000224944_4 (sequence is synthesized)
tgggagctgaacaatgagaacacatggacccagggaggggaacaacacacactggagcctgttggcggtagtgggggtatgagggaaggaagagcatcagaaaaaaataactaatgtata

SEQ ID NO: 868582 - DNA, 69 bp, Artificial Sequence
  ENSG00000224944_5 (sequence is synthesized)
gagggaaggaagagcatcagaaaaaaataactaatgtatactgggcttaatacctaggtgatgcctgtt

SEQ ID NO: 868583 - DNA, 120 bp, Artificial Sequence
  ENSG00000224944_6 (sequence is synthesized)
atgtatacacaatgatgtttaatttgaatctaattaagcactcagacttaacttctggttaacaagatatataggggataaagaaacaaattaaacagcacgatgagaaagtaatcagat

SEQ ID NO: 868584 - DNA, 120 bp, Artificial Sequence
  ENSG00000224944_7 (sequence is synthesized)
aaaacccaaacatagtacattacacaaaacaaaaagttttaggctgtccaaaggacaatattatgagaaaaataaaaagatggttgtgcaggagaaatttaaagacatttaaggaacaag

SEQ ID NO: 868585 - DNA, 120 bp, Artificial Sequence
  ENSG00000224944_8 (sequence is synthesized)
acaatctaatgcagtgtgtgaacttatccaagtttagggtgacatatgtaggctaaatgggtttggataatagaggacattaaggagtcactgttagtttttctaaatttgataatggca

SEQ ID NO: 868586 - DNA, 120 bp, Artificial Sequence
  ENSG00000224944_9 (sequence is synthesized)
ttttggttttctagaaaaatgtattttttggagatgcatgctggagtattcgaaagtgccatggctagaatgtatgtgtccctcaaaattcatattttgagactcaagttacagtattaa

SEQ ID NO: 868587 - DNA, 120 bp, Artificial Sequence
  ENSG00000224944_10 (sequence is synthesized)
tccagcctccaaaattgtgagaacctattcattgacctgctcaagtaacatatctctccagccaaattttaagtaaccaccttcctttattactgttatggaaataaaatactttaagaa

SEQ ID NO: 868588 - DNA, 75 bp, Artificial Sequence
  ENSG00000224944_11 (sequence is synthesized)
cttcctttattactgttatggaaataaaatactttaagaaacagaagctttgggaggccaaagtgggcagatcaa

SEQ ID NO: 868589 - DNA, 120 bp, Artificial Sequence
  ENSG00000224944_12 (sequence is synthesized)
aaaattagcctggcgtggtgactcagcccctgtaatcccagctactctggaggcctgggcacgcaggagaatcacttgaacctgggaggaaaaggttgcagtaagctgagatcacaccac

SEQ ID NO: 868590 - DNA, 120 bp, Artificial Sequence
  ENSG00000224944_13 (sequence is synthesized)
attgcggaggctgacagctgaacacagctcaggggaactgaatgtgcaggaggagcagaaagaagagggtggattgattctttgagacgcaaggataaaatgcctatgaaaaaaagccat

SEQ ID NO: 868591 - DNA, 120 bp, Artificial Sequence
  ENSG00000224944_14 (sequence is synthesized)
gactctgcttggaggttgactaggctaagggccaggaaatgtgttagtcaaagtagaaaaggaagaataaaccttcagtttaaacatagaagaaaagatcatttacaagaacttgcttgt

SEQ ID NO: 868592 - DNA, 120 bp, Artificial Sequence
  ENSG00000224944_15 (sequence is synthesized)
tttcatggaaacgtgtaatcagggtggagagaatcaggtgtctattctgtcttctgggacacagaactgggggacagatgacggaggttgaggacctgccaaaagcctgactccccttta

SEQ ID NO: 868593 - DNA, 120 bp, Artificial Sequence
  ENSG00000224944_16 (sequence is synthesized)
gggaatacagtaccaggctgaggaagagcctgaaagttgctctttgcatggtctccatgagaacttctagaattgtaaaacattctaccaagaagtgtcctcaggtataatgagagaaaa

SEQ ID NO: 868594 - DNA, 120 bp, Artificial Sequence
  ENSG00000224944_17 (sequence is synthesized)
gtggttactttcaagacagcacgcaattccttttgggagaaaattgaaaatagaagaatgtaatttggtgatatttttggtgagcagatgagctcctctgagtggagcctcttagtctag

SEQ ID NO: 868595 - DNA, 120 bp, Artificial Sequence
  ENSG00000224944_18 (sequence is synthesized)
gttgagaaaaatatcagtgaaactattctgcatatggaaagaacagctacttgggagttggaagatgatggagtagtcttaccaacagaaagtggaagaattgtcagacggtgttgagct

SEQ ID NO: 868596 - DNA, 120 bp, Artificial Sequence
  ENSG00000224944_19 (sequence is synthesized)
accaacagaaagtggaagaattgtcagacggtgttgagctcatgggcagaagggactagccttgcctcagatgagactcgggactttgaacctttgagttaatgctggaatgagttaaga

SEQ ID NO: 868597 - DNA, 120 bp, Artificial Sequence
  ENSG00000224944_20 (sequence is synthesized)
tatgagaaaaagaggccatccatgaccctccccacaatacagtagacctgaacaagatgttgaccctgtacattgaagataacagcaaccagtgtatacacatgttaaacttcatcacaa

SEQ ID NO: 868598 - DNA, 120 bp, Artificial Sequence
  ENSG00000224944_21 (sequence is synthesized)
ccaaaacaatgagtgtattcatcatccagaagtttcctcaagcccctttgtaatccttcacccttgcctctcattgtgtcattctcgatgcccaggtaaaaactgatctgctttctgaca

SEQ ID NO: 868599 - DNA, 120 bp, Artificial Sequence
  ENSG00000224944_22 (sequence is synthesized)
ccattgcttagttttcattttcaagaactacatctatgtcaagtcatacagtatacattatgcttatctttttaaaactagtatgattatgttgttgtattagcagttcattcatttaca

SEQ ID NO: 868600 - DNA, 120 bp, Artificial Sequence
  ENSG00000224944_23 (sequence is synthesized)
tttaaggacatttgattgttttcagtcttgggttaatgcaaatatagccattctgcacatttttgtataagtctttgtatagacatatgcttacattttttttgagtaaatacctaggag

SEQ ID NO: 868601 - DNA, 120 bp, Artificial Sequence
  ENSG00000224944_24 (sequence is synthesized)
tggagtgtctgaatcatatagtaggcgtatgtgtaacatataagtaacattgtaaaactgttttccaaagtgctcctgccattttgcataaaaatcaaaagaataagagtgttctgcttt

SEQ ID NO: 868602 - DNA, 120 bp, Artificial Sequence
  ENSG00000224944_25 (sequence is synthesized)
gtctacattattgctaatatttggtatggtcagtatttctgacccattctattttgtgtgtattggtatctaatttttgtaattgatgacttccctaatgacaagtgatgttgtttttca

SEQ ID NO: 868603 - DNA, 120 bp, Artificial Sequence
  ENSG00000224944_26 (sequence is synthesized)
atttctataaaattttgtatagaattgatattatttctccttaagtttttggtaaaataccccagtgaagccatataggtcgggaggctttctttgttgttatttgtttgttttgttctg

SEQ ID NO: 868604 - DNA, 120 bp, Artificial Sequence
  ENSG00000224944_27 (sequence is synthesized)
ttttcttattgttttttttttaattggaaggtctttaaattcaatgtctttaatagaaaaaggactattcaggttatctctatttcgtgttgaaaaaactttgttagtattgctttaaaa

SEQ ID NO: 868605 - DNA, 120 bp, Artificial Sequence
  ENSG00000224944_28 (sequence is synthesized)
aattttgcccattttatctacattttattagtagtataaaattgtccataacatttctctattgacttttcaatatctatagattttgtcataatcccatcattctcattgtttgataat

SEQ ID NO: 868606 - DNA, 120 bp, Artificial Sequence
  ENSG00000224944_29 (sequence is synthesized)
ctgctttattttttcctgataaatgtagatatatgttattaaataaattaactttctcgaagatccaggttttgattttatttattcttctctgtgctttttttttctgtttctacttta

SEQ ID NO: 868607 - DNA, 120 bp, Artificial Sequence
  ENSG00000224944_30 (sequence is synthesized)
tttacttttattcagatctttattttttccctttgtctattttttcatcctaatttttttaagatggaagtggatgtcatttgggcctttgttatttcctaatacagaatttagtgtcaa

SEQ ID NO: 868608 - DNA, 120 bp, Artificial Sequence
  ENSG00000224944_31 (sequence is synthesized)
aaatttttctctatgtactgctttagtttccaataaattctgatatgttgtaacttcattttcattcacttcggaatcttttggatttcacttttgacttattatttgatccacaggtga

SEQ ID NO: 868609 - DNA, 120 bp, Artificial Sequence
  ENSG00000224944_32 (sequence is synthesized)
tttaaaagtatattgttttctttccatatatgttgggatttgccaaatatctttctgttatcaatttcccatttagctccattttagtgagacaacatactctgtataacttaaatcctt

SEQ ID NO: 868610 - DNA, 120 bp, Artificial Sequence
  ENSG00000224944_33 (sequence is synthesized)
ttaaatttactgaggcttgttttatggtcaatgttagtaaatattccatgtgcacttctacacaacataaatcttgtcattttgggttagagtattctaaaatcattgattatgtcaatt

SEQ ID NO: 868611 - DNA, 120 bp, Artificial Sequence
  ENSG00000266153_0 (sequence is synthesized)
attcaaaaactccaagtcaaatgtattgagcttttggtctgagaaccagaaatgaagacaagaagaaagggagccttcaagcaatatatttcaatacttaattggagttaataggactga

SEQ ID NO: 868612 - DNA, 120 bp, Artificial Sequence
  ENSG00000266153_1 (sequence is synthesized)
attgaaatggcttccaagaagtaagaaaaaatcagaagatacacttccaagcctcatgaagcattaacagaaccttgccattcttcatcaagaaacagagtgtctttaacctccccttga

SEQ ID NO: 868613 - DNA, 120 bp, Artificial Sequence
  ENSG00000266153_2 (sequence is synthesized)
cataaaaaggaatacctggctttttctcccttgggaggcttaccttagaagccagacaacagatgcaaggagacctaggccacatggggatgccacatgcaagtgttccaatcaacagaa

SEQ ID NO: 868614 - DNA, 120 bp, Artificial Sequence
  ENSG00000266153_3 (sequence is synthesized)
cccagctaagatcttggctggttgaacagcatcaaccaccggtcatgggagtgaacaagcctctagatgactccagaccccagcattcaagtcatcccagctgatgccaagtgaagcaga

SEQ ID NO: 868615 - DNA, 120 bp, Artificial Sequence
  ENSG00000234793_0 (sequence is synthesized)
ggtgaggctccgaccccggacagcaaatgccccagaccaggtgtggctccaaccccagacagcgaatgtcccagaccaggaggggctctgacccaggacagcgaatgccccagaccaggt

SEQ ID NO: 868616 - DNA, 120 bp, Artificial Sequence
  ENSG00000234793_1 (sequence is synthesized)
gtggctccaaccctggaatcaatcccagacagtgaatgtcccaggctccacgacagcaccgagcaccctgggactccggcaatcaggcggctgggacacctcacagaagggggacagcca

SEQ ID NO: 868617 - DNA, 120 bp, Artificial Sequence
  ENSG00000234793_2 (sequence is synthesized)
gaaggccctgaggatgagaatgggcctggacgctccctgaaccagggtggggcagggtagggaagggggcgcagagtcacacaggcagtggggacaacagcagggcccaggcagctcaag

SEQ ID NO: 868618 - DNA, 120 bp, Artificial Sequence
  ENSG00000234793_3 (sequence is synthesized)
gggcatgtcgggtgggaggcagggacatggcgggtgggccacaggggagggaaggacatggtgggtgggccacgggggagggaaggacacggtgggcgggccgtggaggaggagggacac

SEQ ID NO: 868619 - DNA, 120 bp, Artificial Sequence
  ENSG00000234793_4 (sequence is synthesized)
ggaaggacacggtgggcgggccgtggaggaggagggacacggcgggcgggccacgggggaggaaggattctgaggaggagcagacggtgctggtggctgaagcaggaggatcacttgagc

SEQ ID NO: 868620 - DNA, 120 bp, Artificial Sequence
  ENSG00000234791_0 (sequence is synthesized)
cagatgccttccagctgctggctggtccccaggaccccactgccactgagagctgacgagtggtcgagtgcacgcaagtatgtgcagcttggagaggtgcagtgacgtgcctgaggtcta

SEQ ID NO: 868621 - DNA, 120 bp, Artificial Sequence
  ENSG00000234791_1 (sequence is synthesized)
ctccctggacacaaggactgccaaccctgtgtgaatgtgagcctcatgaaggagacaggtgagaagcctgagtgctggtggctgtaggctgctaaactgtaaatacagataatgtccaaa

SEQ ID NO: 868622 - DNA, 120 bp, Artificial Sequence
  ENSG00000234796_0 (sequence is synthesized)
aaatgcaggattctattcctcagggcaacgtctaaacagagcatccttattcgggtcggcacaaatggaagatgaactgaaccacacactgacttctggcccaaaatactatgctgctgg

SEQ ID NO: 868623 - DNA, 120 bp, Artificial Sequence
  ENSG00000234796_1 (sequence is synthesized)
tgttacatttctaaagcacaggcctccctcttatgttcctctgccagcctttccattgcgtatgagacacatccctaagttcacatggagataaccaaggcccttcgccaactggacagc

SEQ ID NO: 868624 - DNA, 120 bp, Artificial Sequence
  ENSG00000234796_2 (sequence is synthesized)
catttgcagagctctgccctcgctccacagccgtctcctgtggatggtcccagtttcaccacagcctctcaacatttgcagagctttgccctcgctccacagccatctcctgtggatggt

SEQ ID NO: 868625 - DNA, 120 bp, Artificial Sequence
  ENSG00000234796_3 (sequence is synthesized)
cccagtttcaccagagcctctcaacatttgcagagctctgccctcgctccacagccgtctcctgtggggtgtccgagcttcgccacagcctctgaacattcgcagagctctgcccttgct

SEQ ID NO: 868626 - DNA, 120 bp, Artificial Sequence
  ENSG00000236866_0 (sequence is synthesized)
gacacccacttaacttcggagttagtgggacacctttctttttgcttagtacgcttttctgctattcctgccgcataactctctcttccccaggcttttcccatctccatcctattctct

SEQ ID NO: 868627 - DNA, 120 bp, Artificial Sequence
  ENSG00000236866_1 (sequence is synthesized)
cgcaggcaggtttttcttccgcctctctggggattttcgcgttggttctccctgcccccaggagtgaggcgggtaacgcccacgcctacctccggtgctgggggaaaagattacttccca

SEQ ID NO: 868628 - DNA, 120 bp, Artificial Sequence
  ENSG00000236866_2 (sequence is synthesized)
gatgcagtatttacatctcctccgccctactcttccaaccctgcctgaaataagtgtggttctcctgtctgtcagactatgaagagttctcaaatatgtctttcccagcgagggagagga

SEQ ID NO: 868629 - DNA, 120 bp, Artificial Sequence
  ENSG00000236866_3 (sequence is synthesized)
gtccattctttttcactactgtgtattacttcattatataaatattcaacgatttgtgtactcatcctactgttggtggacatttgagttgcttcatgtttctgcctttgatgaagctgc

SEQ ID NO: 868630 - DNA, 120 bp, Artificial Sequence
  ENSG00000236866_4 (sequence is synthesized)
tgcagacattcttacacatgtcttttggtggacatagcattcatttatgttggatatatatatatacctaggattggattcctggttcatagagtgttcacatattaaactttaaataca

SEQ ID NO: 868631 - DNA, 120 bp, Artificial Sequence
  ENSG00000236866_5 (sequence is synthesized)
ctgccagtttttaaattcgtataacaatttaggttccaaccagtgatatgagatttccggttgtttcacatctttgccagtattggtattttcagtctttttaatttaaaaagggggggg

SEQ ID NO: 868632 - DNA, 120 bp, Artificial Sequence
  ENSG00000236866_6 (sequence is synthesized)
aatggagcctaggagggcagccccacaagcagcgtgatgggcatttaagccgacgcatgtgccaggtcctagaacagagtaacttccccatctcaacacaataaaatggtgatatgagaa

SEQ ID NO: 868633 - DNA, 120 bp, Artificial Sequence
  ENSG00000236866_7 (sequence is synthesized)
tttatagggaaagccagtgatcctattgttagacgcgaaatcaagacatatgatctgattttttgttttactttttgtttttgaggtataacattcagtaaagcgcacaaatcaaaagtg

SEQ ID NO: 868634 - DNA, 120 bp, Artificial Sequence
  ENSG00000236864_0 (sequence is synthesized)
tgagagtactgagatgatttactaccagggttgtcatgaagatgaaacaagcttggatgttctgttctgcagttacctaatatctcgcaatgagaaaggtttgcgtccagcgatggagga

SEQ ID NO: 868635 - DNA, 120 bp, Artificial Sequence
  ENSG00000236869_0 (sequence is synthesized)
ttgggtactgaagctcgcgagaggatcctgggggcaggcgcgtcgcggtggcagtgtttcttgggtgtgcggggccgggcgccccgtagcctctggtctgcatggggattacaggtgttt

SEQ ID NO: 868636 - DNA, 120 bp, Artificial Sequence
  ENSG00000236869_1 (sequence is synthesized)
tcaggacaagttcagcaaccctaaaggcaaactggcctagggcctgggaagtggagaatgcctattcctaggctaacccaagcattagagaagcatcaggccgccattctagactcaact

SEQ ID NO: 868637 - DNA, 120 bp, Artificial Sequence
  ENSG00000236869_2 (sequence is synthesized)
gctcacctcctctgatccactgaggtgtctctggaaatcctccaccacagccacagcctcctcaccactctcagggtgatgcagctgcacccaggtccggagctccccagggaggatgct

SEQ ID NO: 868638 - DNA, 120 bp, Artificial Sequence
  ENSG00000234428_0 (sequence is synthesized)
aggtgactgctgcagggtcacagagcttgttcaggcagaaaaacttctcttggattttcaccaaaacatcatgatgctgaaaagatttggactctcgagctggagagacctcagagagaa

SEQ ID NO: 868639 - DNA, 120 bp, Artificial Sequence
  ENSG00000234428_1 (sequence is synthesized)
tccttgtgccactactttcaggacctttggtactttccacaatctgggatttcctctctggcatcgacctttgtctcaccctgcaccacaggaatttttcccatgcttgacaatcctatc

SEQ ID NO: 868640 - DNA, 120 bp, Artificial Sequence
  ENSG00000234428_2 (sequence is synthesized)
tccatatttggagattccagaaaagtgtttcttcttgcttcttctgttaagaatttatacagtctaacagaacttttgttaggaatttatagtctaagagagaacccagctataatatta

SEQ ID NO: 868641 - DNA, 120 bp, Artificial Sequence
  ENSG00000234428_3 (sequence is synthesized)
tgaagtttgaattgtcaccttgcataacataaatcgttttcctaccagattaattatttaagttcttaacttttttgttttaaaaaactttcaaatttatagaaagagttgcaagaatag

SEQ ID NO: 868642 - DNA, 120 bp, Artificial Sequence
  ENSG00000234428_4 (sequence is synthesized)
aagaatagtacaaagaactcccacatagactttgctcagattgattagattcacaaatcctgccacatttgcatctgtctccacacacacccacacacacacacacacacacactcacac

SEQ ID NO: 868643 - DNA, 120 bp, Artificial Sequence
  ENSG00000234428_5 (sequence is synthesized)
ctttcctgctctatttgaaagttggttctagacatcatgccctttcaactttcaattcttcagcatgtatttgctaaaaacaagtacattagcttagctaagcacagtgcaattacaaaa

SEQ ID NO: 868644 - DNA, 120 bp, Artificial Sequence
  ENSG00000234428_6 (sequence is synthesized)
gtcaagaaatctaactgacataatcaatattcaaatataacctgcaatccatatttctacaatccattttcaaattgtatcacttgtgccaataatatcttctatagataatatttctcc

SEQ ID NO: 868645 - DNA, 120 bp, Artificial Sequence
  ENSG00000234425_0 (sequence is synthesized)
aagatgagtaccgcttcagggttcctggtgtagcagtgcagttccagcaagcatgtcagaagtcttgctagtgtggtactggtgggatcaggctttgatggtggcatctgcagtggccag

SEQ ID NO: 868646 - DNA, 120 bp, Artificial Sequence
  ENSG00000234425_1 (sequence is synthesized)
aaggtcatgacagctggatcttagacagacattctgagtcatgaggaggaagccaagttctgaggatggtggagcaggaagatagaagttggaaccccaatgaccttgtgaactattcta

SEQ ID NO: 868647 - DNA, 120 bp, Artificial Sequence
  ENSG00000234425_2 (sequence is synthesized)
tgagcaagaaataaacctctttcttgtttaagccattcttattttagtgtctctggtacttactgtaacactgaaatccagcgggtttagagatcatccacagaaatggcgtgggtgaag

SEQ ID NO: 868648 - DNA, 120 bp, Artificial Sequence
  ENSG00000234425_3 (sequence is synthesized)
gagaggagggtcattcaggaagagtaagcctgaagtccacgactgagccctgcgagagtgctcacatttatagaagagacaccatcaaaagaaacagaagagaccaagcagtaagagtgc

SEQ ID NO: 868649 - DNA, 120 bp, Artificial Sequence
  ENSG00000234425_4 (sequence is synthesized)
aagagaggcaccaatagtgggccatatcacagagaggagaaagagtctcaaggaggagattgccactgatgtctaatgattcagcgttcaacgggataaagactgaaaatggccctgggt

SEQ ID NO: 868650 - DNA, 120 bp, Artificial Sequence
  ENSG00000234427_0 (sequence is synthesized)
ctctcttcaaccaagtaaaggagactccttgtggaggggagcccctgcccgctcacctggatgaccatgcctcacctctgccgatcacatgcaaatatttgtcctgttctgagacatcct

SEQ ID NO: 868651 - DNA, 120 bp, Artificial Sequence
  ENSG00000234427_1 (sequence is synthesized)
cctgggtcccagcttcttctcttgaagatacagatttccagtgcaccatcagaagccgaagtaactgtgagtgggaggcattggagccggctgggaggtaagcattcgggccagcaggga

SEQ ID NO: 868652 - DNA, 120 bp, Artificial Sequence
  ENSG00000234427_2 (sequence is synthesized)
accacaggatccctctgattcaactgaagagagatgcagagctgcatgccaccaagtaactaattcgttcttctcttcttatatccattgagcagtgtgcagtgttggcacaatgcacag

SEQ ID NO: 868653 - DNA, 120 bp, Artificial Sequence
  ENSG00000234427_3 (sequence is synthesized)
tacttgttaaccactccaggaaaagaaagagccactcattctgattagctgtcagaactaattttaagctatgttattatatggtaaagaggaaaaaggaaatacaaggaaactgtactt

SEQ ID NO: 868654 - DNA, 85 bp, Artificial Sequence
  ENSG00000250855_0 (sequence is synthesized)
gatggtgatattgatgatcctggccctgcgtaggcctaggctagtgtctaccccattctgcatcatctcagaaaataaattttgc

SEQ ID NO: 868655 - DNA, 120 bp, Artificial Sequence
  ENSG00000250855_1 (sequence is synthesized)
tctaccccattctgcatcatctcagaaaataaattttgcttatttttttaaatattagagataactccaacaggtagcatgggtgaaacatattggggggctacaatatcaccataattt

SEQ ID NO: 868656 - DNA, 120 bp, Artificial Sequence
  ENSG00000250855_2 (sequence is synthesized)
cactcagactccatagagtcatgcaaaataaatatatactcaatagtgcactgcagccagctcatagttgctcataagagtggattataatatctcttccctactctccatgcagtaact

SEQ ID NO: 868657 - DNA, 120 bp, Artificial Sequence
  ENSG00000234423_0 (sequence is synthesized)
atgaggaaagagtcaccagccacccacgttgcctccacactgggtgtcattgtgaccttagcagacaacagggtcctcccgaggagagaacacagtaggcacactggatgtggggagagg

SEQ ID NO: 868658 - DNA, 120 bp, Artificial Sequence
  ENSG00000234423_1 (sequence is synthesized)
gtccaaaagccccaagcagggggcaggtctgggcagaggagaaggcgctgtgtctgtggtggcactggatgcctcggaaggatagctgtgattagaacacgtgtgtaaagcgcctgtcat

SEQ ID NO: 868659 - DNA, 120 bp, Artificial Sequence
  ENSG00000234423_2 (sequence is synthesized)
ggcagcgtccttctcctggcggcaagtcttcacttgcaaaacaagtccttttaggaacaggctttgtgacagctgctgctatccagtcatctttagagccctggagtcctcgccaagggc

SEQ ID NO: 868660 - DNA, 120 bp, Artificial Sequence
  ENSG00000234423_3 (sequence is synthesized)
acgggctccctttgtggtcctggaataatggggcctgcctggcactctcagattgcgtggggatccgctggacttagggttctactgatgaattcatttaactttgacctgggaagaaaa

SEQ ID NO: 868661 - DNA, 120 bp, Artificial Sequence
  ENSG00000234423_4 (sequence is synthesized)
gtcataaattcacatccatgaacaggaggagaagaaggggaactgctatagagactgcacagtgatgacccctgcatgcatttttcagtcaacaagagcatctcgtgacttctgatcacg

SEQ ID NO: 868662 - DNA, 120 bp, Artificial Sequence
  ENSG00000234423_5 (sequence is synthesized)
gttccaaggtctgtgggtgccacgttttttgagtttaccgagaccacagattggagacttcgaagtgccctccaggtccaagcagcaggcccacctcgctgcagagacagggtctacagg

SEQ ID NO: 868663 - DNA, 120 bp, Artificial Sequence
  ENSG00000234423_6 (sequence is synthesized)
agggtgtcattttagtcagaacggcagagccatggataacactcagtcctattatggagctggacccggaacccagaaactcagaaaagttaagtgatttgtgagtaacatccacatgga

SEQ ID NO: 868664 - DNA, 120 bp, Artificial Sequence
  ENSG00000234423_7 (sequence is synthesized)
gccgctggaactgaactcaaatacaggtttaaccttggcattagctaagtgactgctgtggtttggataagatatttttgtccccaccaaatctcatgctgaaatgggaccccagtgtgg

SEQ ID NO: 868665 - DNA, 120 bp, Artificial Sequence
  ENSG00000234423_8 (sequence is synthesized)
cagtgttgggagatggtcctggtgggaggtgtttgggtcatgggggcagagccgttgtgaagagcttcatgccattgttctattagcagagagtgagttcttgctctctcaagactggat

SEQ ID NO: 868666 - DNA, 120 bp, Artificial Sequence
  ENSG00000234423_9 (sequence is synthesized)
atttagtccttcttggcaccttcccaccgcccatttgaccttctccaccatgttttgacacagcatgaaagcccgcaccagaagccgagcagatgccagcatcaggcttcttgtacagcc

SEQ ID NO: 868667 - DNA, 120 bp, Artificial Sequence
  ENSG00000234423_10 (sequence is synthesized)
tgcagattcatgggctaaataaacctcctttctttataaattacccaggctcaggtattccttcatagcaacacagagggactaagcagtggcctagagcaagccatatagattcattta

SEQ ID NO: 868668 - DNA, 120 bp, Artificial Sequence
  ENSG00000234423_11 (sequence is synthesized)
gcttcagcctctgcagctgtaatgtgggcctaataagagtgcagaagttaaaggactgtgcaagattcagagagaatacatgtatgccacccaacctacagtggcacggggtggactctc

SEQ ID NO: 868669 - DNA, 120 bp, Artificial Sequence
  ENSG00000234423_12 (sequence is synthesized)
aataaatgggaatcactactgaaacactgtatactactactattctcgttgcctaaggtattttagttacctatacttattagttttgcaatgaacaatataccaatttgttcagatcag

SEQ ID NO: 868670 - DNA, 120 bp, Artificial Sequence
  ENSG00000234423_13 (sequence is synthesized)
aatcatccttgggtgaaagacggttgggaaacaggatattgacatgttcttagtgtatttcccctcaagtcacttattatttacaaggagaaaataacacctttaacttagagatatctg

SEQ ID NO: 868671 - DNA, 120 bp, Artificial Sequence
  ENSG00000234423_14 (sequence is synthesized)
gtggttatcaccttaactgagtgataaaacttacatccccagtaatgggacagtcttctacgtacttcctaaagggatatgtggaaaaagatatgatgttgcttgtatagtgttcttgcc

SEQ ID NO: 868672 - DNA, 120 bp, Artificial Sequence
  ENSG00000234423_15 (sequence is synthesized)
aaaaatagttagcctgaattgaattgtgagaaagcaatcgaagtccaacaatgagagatcctgcaaaacaactggcccaggcttccgaagtgttagaataaaggaaggcaaagaaaggta

SEQ ID NO: 868673 - DNA, 120 bp, Artificial Sequence
  ENSG00000234423_16 (sequence is synthesized)
gtgaaattatcttagattaaaggatgccaaagaggtatgataataaacgcagtacaggggactttggaaaattaggacatggactgaatattaaataatatctccatgtcaatgttatgt

SEQ ID NO: 868674 - DNA, 120 bp, Artificial Sequence
  ENSG00000234423_17 (sequence is synthesized)
tttctgagtataataagggcatttggttatacaggagcgtgtccttgtttgaagaagatacatactgaagtatttaggagtaagagtcatgatacatgaaactccttttcaaatggttca

SEQ ID NO: 868675 - DNA, 120 bp, Artificial Sequence
  ENSG00000234423_18 (sequence is synthesized)
gccaaaaggagtgtgtgtgtgtatacaacatgtagagagagttgtttaaagcagatggggtaagaaaggtaagattacatacggttctgatatgataccaattatatttgtgatataact

SEQ ID NO: 868676 - DNA, 120 bp, Artificial Sequence
  ENSG00000224363_0 (sequence is synthesized)
ctggagcctccatcccagttcccaccacgcacccgctccacaaatcctgcccaagggtctctcatccaatgacctcaactgctggaagaagccacaagagggaatgcctttcatctgtga

SEQ ID NO: 868677 - DNA, 120 bp, Artificial Sequence
  ENSG00000224363_1 (sequence is synthesized)
aagccacaagagggaatgcctttcatctgtgatctcacataccagcctgtcctttccattgagaggaaagctgagctccactgaagcaacagaggcccaaggagaaaccttaactgtgtg

SEQ ID NO: 868678 - DNA, 120 bp, Artificial Sequence
  ENSG00000224363_2 (sequence is synthesized)
cctttgggggaaagcgtggccccaggaagggcttccgtgctggccactgcagtggggttgacagagctggtaagccacaagggggccccacccaaagacaagggggacatttattcctgg

SEQ ID NO: 868679 - DNA, 120 bp, Artificial Sequence
  ENSG00000224363_3 (sequence is synthesized)
gaacaacaaaacctgatgaggccgagtacatgacaatgaagactgtagagcttttccgttctctataaaaaggcaaggggtttctagacagggaagaaaaagaatttacagagcagtctt

SEQ ID NO: 868680 - DNA, 120 bp, Artificial Sequence
  ENSG00000224363_4 (sequence is synthesized)
tgtgtactaacatacagcctgcatctcttttctttaaaatttcttggaagagaatgagtcatctcaacattgcaggaaaccaaatagaagttgggggaaaaaattactttggacaaagtt

SEQ ID NO: 868681 - DNA, 120 bp, Artificial Sequence
  ENSG00000224363_5 (sequence is synthesized)
tttctcttaaatgtttgcatagtaatctttgcctggaaaaaaaaaagatgcctaaatttagaatagagatgtggtacagttaacaatgctggttctatcggatgggaagtgtgatggtgt

SEQ ID NO: 868682 - DNA, 120 bp, Artificial Sequence
  ENSG00000224363_6 (sequence is synthesized)
gctcaggctgggatctcttattttgaaactcaccacaaccatttggccagagtgcttcactggcctccactctgactgctgccgaggggctgatcagaagacaatgagattgcaacagct

SEQ ID NO: 868683 - DNA, 120 bp, Artificial Sequence
  ENSG00000224363_7 (sequence is synthesized)
tctaccagttgtatgctgacaaaatgggtaggaaagcttcctttttccaacagataacagcattggaaacagaactgaaatgcactgtgtcatctcatctccccaagacaagactgtaat

SEQ ID NO: 868684 - DNA, 120 bp, Artificial Sequence
  ENSG00000224363_8 (sequence is synthesized)
cttccttagacctctttaaatcagtacatttcctgagcttggatgggtttgtctattagcgtttcccaaagaacaccaattatgaaagaggtttcagacctgttctcaatagggaggtta

SEQ ID NO: 868685 - DNA, 120 bp, Artificial Sequence
  ENSG00000224363_9 (sequence is synthesized)
cttgttaccgattctctagttatttagatcagcactcatgtgctttccaagttgggggtgggactgttgttaattggttatctacatttcaaagctgtattttttgacaggcacaaaagt

SEQ ID NO: 868686 - DNA, 120 bp, Artificial Sequence
  ENSG00000224363_10 (sequence is synthesized)
accccctatttgtaagaaagaagaataaaaagaggaaggcatgtctctgccatgtggcgagagctcatttcagccccatcccaaggctgagcctgtcagcaggtaggaacagtagggcca

SEQ ID NO: 868687 - DNA, 120 bp, Artificial Sequence
  ENSG00000224363_11 (sequence is synthesized)
tttagttctctgccatttagcctgtgtcagcagttttccaaaaaagaatccagttttcaagggcacatatctccccaacaaccactactatcccctccccaccctaaagattgttcagag

SEQ ID NO: 868688 - DNA, 120 bp, Artificial Sequence
  ENSG00000224363_12 (sequence is synthesized)
accaactgttaaaaaaaaaatccagtttaaaactgaatttatgttacagatttcagaggaaaggaacatgaccctgtattaagctctggcagcagaagcaccaccatacataaggtggtg

SEQ ID NO: 868689 - DNA, 120 bp, Artificial Sequence
  ENSG00000224363_13 (sequence is synthesized)
gtttcaggggcattcactaaccacttcaaagaggccacatttcaggagctggcactttgcctgaaatgcttttggtggggaggagagggctaaaaggaatgactgtttggtagcagggcc

SEQ ID NO: 868690 - DNA, 120 bp, Artificial Sequence
  ENSG00000224363_14 (sequence is synthesized)
agtgctaggtgatggtgggcactgtgtctggtcctctctctcagctaacttgggccaccaaaataggtggtacagtgtgaggctgtatgccgaggctctgggggttcagggggtgatgat

SEQ ID NO: 868691 - DNA, 120 bp, Artificial Sequence
  ENSG00000224363_15 (sequence is synthesized)
ccagcaggtcagagctcagaaatgacttctagatttcccctccaccatactacctgcatatatgcaagcagggctctttctattcagcattcattcatcggtgaggataccatgagacgg

SEQ ID NO: 868692 - DNA, 120 bp, Artificial Sequence
  ENSG00000224363_16 (sequence is synthesized)
ctctgagaaagactgaactccagttaggaccttaaactatgagaagcccaaggatgtataaaacacaaatatacttaattgcaaaacttttatagagaggtaggctaggagataccacaa

SEQ ID NO: 868693 - DNA, 120 bp, Artificial Sequence
  ENSG00000224363_17 (sequence is synthesized)
cagggacaccagaggtgcttttgccttctgaagataggtagactaggatgttcaaaaaatacattttttattgcaatacagcataataggtgtctataataaaagtacttatgtgtccgg

SEQ ID NO: 868694 - DNA, 120 bp, Artificial Sequence
  ENSG00000224361_0 (sequence is synthesized)
tcttcctgagcccctccgagccaaggccggcccagcaggcgcctgtgcttctgtagtctcttctgccctgcctgcccgctctgggtttggtgtaatagaaagagatgtggatgaggagcc

SEQ ID NO: 868695 - DNA, 120 bp, Artificial Sequence
  ENSG00000224361_1 (sequence is synthesized)
gggcacttgggcctgggtggctctgccactccctagcacagcactgagcaagtcatcccccgctccagcatcggcttccttttccgagaaatgggaacacttgcatctccgctacctacg

SEQ ID NO: 868696 - DNA, 120 bp, Artificial Sequence
  ENSG00000224361_2 (sequence is synthesized)
tggtgtttaggcaagctcccgaaagacgcatggaatcttctctttacgaggatctggatgttgatggtgcttacaggtgtgtgggtccctgcaccaggaaggctatgatggcatgcacgg

SEQ ID NO: 868697 - DNA, 120 bp, Artificial Sequence
  ENSG00000224361_3 (sequence is synthesized)
gagtgagcgccaccaacagctgggcacacccgtgcaggtccacccaggcagcgatgttgagcctgaggaaatgcggctgccttcaaactttgattagaaccccagggtcggctgcagtct

SEQ ID NO: 868698 - DNA, 120 bp, Artificial Sequence
  ENSG00000261517_0 (sequence is synthesized)
agaatgttttggctattcagaacctttgtggttcaagaaaagttttaggattttttaaatatctgtgagaaaatgctattgggattttgatagttattgtactggatcttacttcagtct

SEQ ID NO: 868699 - DNA, 120 bp, Artificial Sequence
  ENSG00000261517_1 (sequence is synthesized)
tgacttacataggctggaagtaaaaggatggaaaaaagagtctccacacaaagtttctgtaggtcagacatccagcaaggagtttctgggttctttgctctgggttttaggagagtgaat

SEQ ID NO: 868700 - DNA, 120 bp, Artificial Sequence
  ENSG00000261517_2 (sequence is synthesized)
aggtactgcaatttgaatgctggctccacaactgataagccggatccacacagcgtgacatgtgcttgtgaaaggaactcatctggtcgaagttctcctgcccttatgccatgcagagtt

SEQ ID NO: 868701 - DNA, 120 bp, Artificial Sequence
  ENSG00000261517_3 (sequence is synthesized)
cagctggaatttgaagcttgagtagtgtttcttttcaaaggccattaactgtccatgataacataaagttattatgaactgtaacattccattcatcctggactgttgactgatcacacg

SEQ ID NO: 868702 - DNA, 120 bp, Artificial Sequence
  ENSG00000261517_4 (sequence is synthesized)
tctaatttcatagtaacacaataggtcacaacagttattttatttactaattcagagattagattggtttaagttgaatatcaaattgccaggtcataataaaatgattttttaaaagaa

SEQ ID NO: 868703 - DNA, 120 bp, Artificial Sequence
  ENSG00000261517_5 (sequence is synthesized)
caactgataaggtacatgccctgggacaaaccacaccacctctcagagcctgtcacaaggcagtcaggacattttaggagcaaacgcctatgaagctcgtaaaaagggcttggcttatga

SEQ ID NO: 868704 - DNA, 120 bp, Artificial Sequence
  ENSG00000261517_6 (sequence is synthesized)
caatgaaagacaaagcaacagaagaacagagtaataaagcacagatccaccgaacacaattcacagagcaggaataagctacccagttgtgtaccaccaatcattggagttgagttttgc

SEQ ID NO: 868705 - DNA, 120 bp, Artificial Sequence
  ENSG00000261517_7 (sequence is synthesized)
aacatctgatcttctttcagtacccagtaattatatcaagcattgcataaccctgagactgatgaagtgcacctacacaggactgaggtcttcggccattattcaggcaaggctgtgacc

SEQ ID NO: 868706 - DNA, 120 bp, Artificial Sequence
  ENSG00000261517_8 (sequence is synthesized)
agaattgacccatctttatggataggagtctacacctgaaaagtagcatttgagcttccagaaagtctaaggtggcattcactgactcatatgtcatcctgtgctcctgtgtgccctctc

SEQ ID NO: 868707 - DNA, 120 bp, Artificial Sequence
  ENSG00000261517_9 (sequence is synthesized)
cagaggctccaagagtcctgacacttacaccttctcttactcaaagaaggttgctgatttgattatgctgacattcttctacatcttacagataaataaatcatcttggattttctaaaa

SEQ ID NO: 868708 - DNA, 120 bp, Artificial Sequence
  ENSG00000261517_10 (sequence is synthesized)
ggaaaaaatgatcagaatttgaagaaagaacaaaacgcacaaagtaacaataaaaaaaatcaatgaaagacaaagcaacagaagaacagagtaataaagcacagatccaccgaacacaat

SEQ ID NO: 868709 - DNA, 120 bp, Artificial Sequence
  ENSG00000261517_11 (sequence is synthesized)
tcacagagcaggagtgagttcgagcaagcggctcaaaagcctccttaatcagggtttttattaagctgtaaagaacccggcgacacccttcggttcccgcctgcccccccgcccccccac

SEQ ID NO: 868710 - DNA, 120 bp, Artificial Sequence
  ENSG00000261517_12 (sequence is synthesized)
cccgaggcctccaattggccacacccatgaaggactgacctgtgaccaatcagaggctgaagtggagaccccgcccgcagtcaatcagaggctgaagtggcttgttatcttgggagcgag

SEQ ID NO: 868711 - DNA, 120 bp, Artificial Sequence
  ENSG00000261517_13 (sequence is synthesized)
gacgaggcctatttgctgcacttgctgctctcctgcctatacgacctggctgcacctgctgttcttttgcttatgcgaactggcttcacctgctgttctcttgcttctgcgaactggctg

SEQ ID NO: 868712 - DNA, 120 bp, Artificial Sequence
  ENSG00000261517_14 (sequence is synthesized)
cacctgctgttctcctgctcatgctttaacccctgctcaccccagttccctattctcctacctagtttccccttgagagaattaatttaaatttaaactcggtaaccctaaccaactttc

SEQ ID NO: 868713 - DNA, 120 bp, Artificial Sequence
  ENSG00000261517_15 (sequence is synthesized)
aagtgctcagtagtcacatgtggctatgagtaccatgttgggtaacagagatatagaacattaccatctttacagaaacttctgtcagacatcagaggttaatctctgttcatttgcctg

SEQ ID NO: 868714 - DNA, 120 bp, Artificial Sequence
  ENSG00000261517_16 (sequence is synthesized)
gaaggtttttcatattacaggtcaaagaaaattctttgaatcagatagatagtatgcatatattgtaagtaacagataacataattcaaacaagcttatcaattaaggggatatattcac

SEQ ID NO: 868715 - DNA, 120 bp, Artificial Sequence
  ENSG00000261517_17 (sequence is synthesized)
tcgtgaaactggaaggcttcagagttggtttgattcaactgtataatagaattgctaagaatatattatttgcttgtcttccagttctgatttgtgtaaactttggtctaagggctgtct

SEQ ID NO: 868716 - DNA, 120 bp, Artificial Sequence
  ENSG00000261517_18 (sequence is synthesized)
ttcaacattgtcataaggtggttgcctgtgattccctggaatgcataatcccacaaatctaattgaattacctattttcagaagataaaggaactgttgtttctctagatgtaaacacaa

SEQ ID NO: 868717 - DNA, 120 bp, Artificial Sequence
  ENSG00000261517_19 (sequence is synthesized)
tctcctaacaaatctatggtcaaagagtaaagtcatgtggcttagtttaggcatcaaacaaagaatatgtggatccgtgaatgaaaatcattgtagttaaaaagagaatgtttggtgaga

SEQ ID NO: 868718 - DNA, 120 bp, Artificial Sequence
  ENSG00000261517_20 (sequence is synthesized)
aggcacacgtgatgtcttttagcactctgtggtagtggttctcaatagagagtgatgttttactacaggaaacacttggcaatgtctggaagcagttttaattgtagtcactggaggcat

SEQ ID NO: 868719 - DNA, 120 bp, Artificial Sequence
  ENSG00000261517_21 (sequence is synthesized)
ctacaagcatgtagagggcaaaggctagggattctgctaaacatcctacaatgcacaggacagcacccatccccacaacaaagatttacctgagccaatgtaaatagtgctggcattaag

SEQ ID NO: 868720 - DNA, 120 bp, Artificial Sequence
  ENSG00000261517_22 (sequence is synthesized)
aaatcctcttctatgtgattgtatcttatgaagtctagcttaaatttaaaagtgactttaacgactcacataacagaaaaatacagttaaatctgatttcaggcatgatctagagatttg

SEQ ID NO: 868721 - DNA, 120 bp, Artificial Sequence
  ENSG00000261517_23 (sequence is synthesized)
caaaattcaagagagttgcaacgttttatatattcctcctgcacttctttgcagttgtgttggttactctgtgatctagattctcaagttatctccttcatggtagcaccaacaataact

SEQ ID NO: 868722 - DNA, 120 bp, Artificial Sequence
  ENSG00000261517_24 (sequence is synthesized)
atacttccagattgttacctttctcagaatctgccagcaaacagctgcttcattcaagttagctagaattgtaccatgtatcagttgctaaactaatctatgacaaatatttggttactc

SEQ ID NO: 868723 - DNA, 120 bp, Artificial Sequence
  ENSG00000261517_25 (sequence is synthesized)
ttacctaactgttacacaactgagaatagttggtgggtaattttgcaaaggaaaacctgagcgctctggatgaagttgggggagtttgattctaaacagacaactcatgaatgtcaacta

SEQ ID NO: 868724 - DNA, 120 bp, Artificial Sequence
  ENSG00000261517_26 (sequence is synthesized)
cggggttggtggaatacattagtaattaccatagccagcatctagcagtctataattggtgtgtgactccaacagtacttaaaagtataattgttgaaatgggatgggcaatcaaatagg

SEQ ID NO: 868725 - DNA, 120 bp, Artificial Sequence
  ENSG00000261517_27 (sequence is synthesized)
ttcattaaaaacttgaagcataggcttgatcagaaaacagctttcttttccactggtaccttgtaatctgattgttttgaattatctactggcacatatttgtataatattctatttcat

SEQ ID NO: 868726 - DNA, 120 bp, Artificial Sequence
  ENSG00000261517_28 (sequence is synthesized)
gaaaaacagataacatgcataggacgtttttactttctcatgttaaattttcaagttcgtttgtatctaaacctttcattagttttacaacatttcactggttactctgagtaatatagc

SEQ ID NO: 868727 - DNA, 120 bp, Artificial Sequence
  ENSG00000261517_29 (sequence is synthesized)
ttgctcatatggaaaactgagataacaatagtattcctttctattgttgcttttagaagcagataatttaaaaacagcgagtacaacatttaagtagtaactgcatatttgtagatgttc

SEQ ID NO: 868728 - DNA, 120 bp, Artificial Sequence
  ENSG00000261517_30 (sequence is synthesized)
aatcaatattagctacaattgtttctactcaatggtactgagatatctaaagccataaatattatttgcatttcattgttttcagcctaagaattactgagcaatacttcaattatcctt

SEQ ID NO: 868729 - DNA, 120 bp, Artificial Sequence
  ENSG00000261517_31 (sequence is synthesized)
ctttctaaatcatatctgttgatctcagttatgtcttaatttacactgtatctatatattccactatctcaaaatcttctttcttatttctattgtttaataaaagctgttttcctggaa

SEQ ID NO: 868730 - DNA, 120 bp, Artificial Sequence
  ENSG00000261517_32 (sequence is synthesized)
aatgtatacagcaaccttctgtattcatgggttccacatccaacagtattcacaggatgccaaacttgaatatagtattttgtggtgaagatgaactctagaatcaggtactgcaatttg

SEQ ID NO: 868731 - DNA, 120 bp, Artificial Sequence
  ENSG00000261514_0 (sequence is synthesized)
atcaagaagtacttggggaagctcttcaacagcagcccgaagaaatctaaaaaccacaagaaaactgcgaacgccacggacacctccccatcaaaagccacgaaacccccaccatggacc

SEQ ID NO: 868732 - DNA, 120 bp, Artificial Sequence
  ENSG00000261514_1 (sequence is synthesized)
cctggatgctgggcaccgagccaggggcctcggggctgggggcagcttgggtgctagcgagaggaagttcctgggggcgggcatgcggggagacacagcacccctgtggggggggcttct

SEQ ID NO: 868733 - DNA, 120 bp, Artificial Sequence
  ENSG00000261514_2 (sequence is synthesized)
ttctccaggctgggccttggcctccagacgcctctctgcccaccaacccctttgtattgagaggggcctcgacccctcctcatcccctcagtgaaaacaataaagacaaatttttgttgc

SEQ ID NO: 868734 - DNA, 120 bp, Artificial Sequence
  ENSG00000261513_0 (sequence is synthesized)
ctctccaagctgggcgggtcgtccttgccggctggcacctcgggtagcgagccccgagggcagaggagccggctccacccggcctggccccgaaccctccgcggcgccggccaatcgccg

SEQ ID NO: 868735 - DNA, 120 bp, Artificial Sequence
  ENSG00000261513_1 (sequence is synthesized)
ctgccatcctcccgctggggtgatgtcttcaggtgtccgggaggggagaaagccctgcgtacttccagccccgctcctgtgccaggaaccggcggccctccgagccctccggagccggcc

SEQ ID NO: 868736 - DNA, 120 bp, Artificial Sequence
  ENSG00000261513_2 (sequence is synthesized)
tccgggccccgagcgcggcgagtccgcttgcccgctcgcccgctcgctcgctcgctggtccatccgcctcctcaccttcaggacccggatccctcccggccggcggctcgcgggcgcttc

SEQ ID NO: 868737 - DNA, 80 bp, Artificial Sequence
  ENSG00000261513_3 (sequence is synthesized)
cgacccaggattcacagagacgcccggcccgcgcgacggcgtgcggagcctcggcggcgcgcgcgagcaaccggtggccc

SEQ ID NO: 868738 - DNA, 80 bp, Artificial Sequence
  ENSG00000261513_4 (sequence is synthesized)
gccagctccgcccctcccgcagccccgctggacctaagcagctgccggcgccgagtggcccgggcgccaccgagccgcat

SEQ ID NO: 868739 - DNA, 120 bp, Artificial Sequence
  ENSG00000261513_5 (sequence is synthesized)
gagcgctgggcctccactgcccgccgccctaggcttggaggactagagcgcaaggaggggtatttgctgctttccccgccctctaagaaacccgcgggagaaagaagcaggtggcgccgg

SEQ ID NO: 868740 - DNA, 120 bp, Artificial Sequence
  ENSG00000261512_0 (sequence is synthesized)
atgaagcctgtccttgcagagcccctctgtttttgggggaacagggagcattcacagggtcttgggaacaaaggcctgggcctccccgatgtttcaaaggctccacagctccaccgctcc

SEQ ID NO: 868741 - DNA, 120 bp, Artificial Sequence
  ENSG00000261512_1 (sequence is synthesized)
acctggcttcactccagcaccctgtccctggagcacctctgtcctgtctgggccaacctggtctccctgccccatgccctcccctggctcttagcaacctgcccttttattcatgccatt

SEQ ID NO: 868742 - DNA, 120 bp, Artificial Sequence
  ENSG00000261512_2 (sequence is synthesized)
tggggtcacagatgcctagctggacacagctcccagaactggctccaccctggggccttgcccctagtaccccctggcaggagcaacccaccccatggtcgaggttcccctacccctgga

SEQ ID NO: 868743 - DNA, 120 bp, Artificial Sequence
  ENSG00000261512_3 (sequence is synthesized)
tcctggactgaagccatttcctacagagaagcgttcccaccccctctcaggcacaaaagccggtgtccagggactcaagacctgtacctggggttgcaggggctcctgccctgctgtatc

SEQ ID NO: 868744 - DNA, 120 bp, Artificial Sequence
  ENSG00000261512_4 (sequence is synthesized)
ccggcccttaaaactgggctgggagagaagatggggaagtgtgtgagacaaaacaaagccggcttgtttcctccccttggcaggctaagctctcccggcagcccgggctctggggcggaa

SEQ ID NO: 868745 - DNA, 120 bp, Artificial Sequence
  ENSG00000261512_5 (sequence is synthesized)
ggagaacagtgtcatctcttcctttgttgataaattgccaaagagtgggagcaggtggggtcaggggccagagtgcaggggagggggcaatggtggaggtggcggggggaagcagaggga

SEQ ID NO: 868746 - DNA, 120 bp, Artificial Sequence
  ENSG00000261512_6 (sequence is synthesized)
ggtgggctgaggcctcggtggggccagtgcgacgctggcttaaggagctggaggggttcctaatacacatttaattcagtttctcttccctaagaggctgccggagttggggcctcctcc

SEQ ID NO: 868747 - DNA, 120 bp, Artificial Sequence
  ENSG00000261512_7 (sequence is synthesized)
agcagagaccctcggacccctgcagggcctggacttggggtgaacagggcttcagtcagcgcaagtattccatttgcatttggtaatttttcatgccacctatttatgaatatacaaatc

SEQ ID NO: 868748 - DNA, 120 bp, Artificial Sequence
  ENSG00000261512_8 (sequence is synthesized)
tttataccaaatctattttttaaaacatggaaaagttgcctttatggaaacttggcagagccagagtgtacacattcctaaaccattaaacagatttctataacaaaaaaaaaaaaaaaa

SEQ ID NO: 868749 - DNA, 120 bp, Artificial Sequence
  ENSG00000261512_9 (sequence is synthesized)
gaaatcccatgaagcctgtccttgcagagcccctctgtttttgggggaacagggagcattcacagggtcttgggaacaaaggcctgggcctccccgtttgaatttcagccccagttccag

SEQ ID NO: 868750 - DNA, 120 bp, Artificial Sequence
  ENSG00000261512_10 (sequence is synthesized)
ggcaagtcccagccacccaagcatacttaccagtactgcccaccaccacccactgcccacctctaagaagcccggctctcctactctgcttccaggctggggcctcacaggtggggctgt

SEQ ID NO: 868751 - DNA, 120 bp, Artificial Sequence
  ENSG00000261512_11 (sequence is synthesized)
taccttcctcagggcttagggagggagggaggacatggacagggccttccaccctggctccttcacagggatggtagctgaccggtgatgggttcatttgtcaccttggactgtgagcca

SEQ ID NO: 868752 - DNA, 120 bp, Artificial Sequence
  ENSG00000261512_12 (sequence is synthesized)
cttccacttctcgccccccaggcaggagcaccctcactccaagggcttggcctggaaaggcaggctcacctgggactcaacgttccttcccccgccgccactgtgcccccccgtccctcc

SEQ ID NO: 868753 - DNA, 120 bp, Artificial Sequence
  ENSG00000261512_13 (sequence is synthesized)
accccagaagccctgacctcatttgggcaccttgctgtcctctgggcttctcctctgcccaggtcaccctgtggcaggcctgggccctcaggatgtttcaaaggctccacagctccaccg

SEQ ID NO: 868754 - DNA, 120 bp, Artificial Sequence
  ENSG00000264745_0 (sequence is synthesized)
ccgggcacgtctgtgggagggcgaggctgggagaaaggcactgagctaaagatgagaagaagcgttccctggagcctgcatggcatcaatcatgagaatggatgttgagggttatgcacc

SEQ ID NO: 868755 - DNA, 120 bp, Artificial Sequence
  ENSG00000264745_1 (sequence is synthesized)
ccactgaggcagcactgaatgccagatcccaagttacagagatgatctaccccaaccgaagatacttaaaacgatgtgaacaaatttttgaagacaattgcaggaggtaaattagaaaga

SEQ ID NO: 868756 - DNA, 120 bp, Artificial Sequence
  ENSG00000264745_2 (sequence is synthesized)
tgaaaataataccttaaagaaagcatctgtagtctcctaaggacaccgatgggaggatgtggtggtgatggaggcagagctgtgaagaactgagaggctattagaaaaccgcggtggaac

SEQ ID NO: 868757 - DNA, 120 bp, Artificial Sequence
  ENSG00000264745_3 (sequence is synthesized)
ggaggactaaagtccaaaatcaagctgtgggcagggtgggtttccctgagagctgcaagtgaaggatctgttccaggcctctctccttggctgatttcctggcaaacagaaaaagctctc

SEQ ID NO: 868758 - DNA, 120 bp, Artificial Sequence
  ENSG00000264745_4 (sequence is synthesized)
ttggtctttaaagttcatgacagattccctaagtgtttgtaaaacatctgccaaccacactgatgggctctcacacaaaggttttggaaatacagactgatttcctttggttactaaaac

SEQ ID NO: 868759 - DNA, 120 bp, Artificial Sequence
  ENSG00000264745_5 (sequence is synthesized)
tgatttttttttttttttttggttactacaattgattttatctctataattttcttctctgtcatcttattttaaacaaaaaccgtggcacaaaaataaagtgatggtttttgaggaaaa

SEQ ID NO: 868760 - DNA, 120 bp, Artificial Sequence
  ENSG00000261519_0 (sequence is synthesized)
tagatcttcacagactggatgttaagcaagtggaaaggcagaacagcctccactcgcggtgcacggggaagagtgggcggcggacgtggttttgggcctgggacccaggtgttcctctag

SEQ ID NO: 868761 - DNA, 120 bp, Artificial Sequence
  ENSG00000261519_1 (sequence is synthesized)
gcccagggcgggcatcgctgcccatccgtcccacaggtggttctgaggcgtctctcaacagccatatggcggacaccagaacccgggtgtaacagtgacccgtttctgtgtgggtcccca

SEQ ID NO: 868762 - DNA, 120 bp, Artificial Sequence
  ENSG00000261519_2 (sequence is synthesized)
ctcccagggagggcaggagagcgccgggggcgtaacccccctcccccacgctggcaccagagtgtgagcagaatcggcttaaggcagctcccagtccccatcgcccccaaggtcgaaaga

SEQ ID NO: 868763 - DNA, 120 bp, Artificial Sequence
  ENSG00000261519_3 (sequence is synthesized)
atcgggacaggaaatgggtcgggggaccgagtttgggccggaatgttcagagcgtgtccgtcctgctctttaaaggccctctctccatcccagaaccaaagccgagcgcccccagcgctc

SEQ ID NO: 868764 - DNA, 120 bp, Artificial Sequence
  ENSG00000261519_4 (sequence is synthesized)
gctgcggtctcgcgcccgggtaacggccgatggccgcccccgtcccagccgcagccggggaggaaatcccgcgcctcggaagaggcgcttcgggctcgggcgggttccggaagccgaggg

SEQ ID NO: 868765 - DNA, 120 bp, Artificial Sequence
  ENSG00000261519_5 (sequence is synthesized)
ggagtaggtgggcgcataggggctcctgggaggcgggaccaagacgcgcgttaccgggaggccaggcccggcgctgcaccctccgcggcccggggcctgaggccgggctcccgcgacttc

SEQ ID NO: 868766 - DNA, 120 bp, Artificial Sequence
  ENSG00000261519_6 (sequence is synthesized)
cttcccggcccaaagcagcgcagcgcccgggcggcccagccccgcagcggccacagcagcatagccgggcgagcggatccagaggcccggggttccttcttgtgcgagtcggcgcggacg

SEQ ID NO: 868767 - DNA, 120 bp, Artificial Sequence
  ENSG00000261519_7 (sequence is synthesized)
ccgctggcagccagaagccttaccactgctaggacgctggcagaacgcacccataacttggcaacactcggaggatggatggcaaataataccagcgactgaagggttaattaatgattg

SEQ ID NO: 868768 - DNA, 120 bp, Artificial Sequence
  ENSG00000261519_8 (sequence is synthesized)
cagattaattgaacaccttctgtaatcagacacctggcacacactcatgatgtcacttattcctcccaacaaccctgcaaatagataactgtctctcccattctccgagcttgtcctcag

SEQ ID NO: 868769 - DNA, 120 bp, Artificial Sequence
  ENSG00000261519_9 (sequence is synthesized)
agaattaggtaacttgttcaaaatggtcagaagcaacagatataactccttgctctactctttccccccttctcactactgcacttgactagtctttttaaaacataaattttttggcca

SEQ ID NO: 868770 - DNA, 85 bp, Artificial Sequence
  ENSG00000261519_10 (sequence is synthesized)
ggaggccaaggaaggcagatcacctgaggccagaagttcgagaccagccttggccaacatggcgaaaccccatcgggggcacccg

SEQ ID NO: 868771 - DNA, 120 bp, Artificial Sequence
  ENSG00000261519_11 (sequence is synthesized)
tgcactccagcctgagcaacagagggacacttcgttccccccgccaaaaaaaaaatttttttttaatgatcagaagcggctgggcgcggtggctcgggcctgtaatcccagcactttcgg

SEQ ID NO: 868772 - DNA, 70 bp, Artificial Sequence
  ENSG00000261519_12 (sequence is synthesized)
tcccagctactcaggaggctcaggcacgccactgcaatccagcctgggcgatagagtgagactacgtctc

SEQ ID NO: 868773 - DNA, 120 bp, Artificial Sequence
  ENSG00000250582_0 (sequence is synthesized)
aaagcgcagacactgacagcaagtcttccagtctctccagtataacttaagtgacatgccagcaagagatgcaatttggtccctcaacagtgttaaaaatctgttatttgaaagaataac

SEQ ID NO: 868774 - DNA, 120 bp, Artificial Sequence
  ENSG00000250582_1 (sequence is synthesized)
ttctaaaaatcaaagtttatctaaccactgaaacaaacattgacatcggccagattccactctcatatgacaatcaatgacagactttttcaatctgccaaaaactggactggaattgca

SEQ ID NO: 868775 - DNA, 120 bp, Artificial Sequence
  ENSG00000250582_2 (sequence is synthesized)
aacattcatttggccaccttggaggagaaactgaacaaatagcagcaaccccctcttccagaatgtgagagctccctccacctaagagctaaaagaagcaaatgcaaagtttttcactgg

SEQ ID NO: 868776 - DNA, 120 bp, Artificial Sequence
  ENSG00000250582_3 (sequence is synthesized)
ttttagagaaataatgctttagatataagcaagcatcacctatagaattaggtgagccctgtgcccatgaatctagtcctttctacctctgatcacttgttcagtacagtcttatctgct

SEQ ID NO: 868777 - DNA, 120 bp, Artificial Sequence
  ENSG00000250582_4 (sequence is synthesized)
aagtaatttatttaccaattacaatggaaaaacccaagacaatattctcagaagacttcagaacccaagttctcctcctttacacgctcagctactaagaaggctttcgtttccattaat

SEQ ID NO: 868778 - DNA, 120 bp, Artificial Sequence
  ENSG00000250582_5 (sequence is synthesized)
ccagtatttaactgaacaaatttttaagcccttatcaccaacataaaggtgcagtagaaagaaaatgagtataacacagttcccattaccatcaagcttatggttatgaagtgtgtatgg

SEQ ID NO: 868779 - DNA, 120 bp, Artificial Sequence
  ENSG00000250582_6 (sequence is synthesized)
gagagatgggagaaccatatcatatggtacactatgataagagtcacaggaccgcctgttcaggctcttcatctaaggagaaacatacgtgcagacagagcgacctacagtctgtgctac

SEQ ID NO: 868780 - DNA, 120 bp, Artificial Sequence
  ENSG00000250582_7 (sequence is synthesized)
aacgacatcttccacgcatcctgagctcggtgttacttaccctacagtggaaatccaaatagtccaaatatcaaccagctgtttcagtgggtatgaaaaatgggacagataatccaaagc

SEQ ID NO: 868781 - DNA, 120 bp, Artificial Sequence
  ENSG00000250582_8 (sequence is synthesized)
agccttactagtaattaactattgcttctacaatgtattatgattcatcaaagcttttaatcatttatattttgcttacactattaataaaactacaatatgccctgagaacatagtaaa

SEQ ID NO: 868782 - DNA, 120 bp, Artificial Sequence
  ENSG00000250583_0 (sequence is synthesized)
ctggtgtgttagtttggattaatcatcctcctctaattgagatttctaatcaaactgagaatacacataatcagccagatcaaaatatcggcttcagtagtggtgaagctggcttggaga

SEQ ID NO: 868783 - DNA, 120 bp, Artificial Sequence
  ENSG00000250583_1 (sequence is synthesized)
gcatgtcttgggtgcaaatggaaaaagggttttcctacccttcacatctgcatccccccatggcaagtagctggagatctgcaggcctccctccagtggttctctgaactccaggcttca

SEQ ID NO: 868784 - DNA, 120 bp, Artificial Sequence
  ENSG00000250583_2 (sequence is synthesized)
agctcaagagagatgggaatgcagtagaaagaaacagagagaaatggaccactcaacctattaacctcagttaataggagtctcatggccatcaaactttcaccaacagaagcaccctct

SEQ ID NO: 868785 - DNA, 120 bp, Artificial Sequence
  ENSG00000250583_3 (sequence is synthesized)
tggaggattcatgcccctatgggaaagagttcccaggtgatattgatgcagctattctgaagaattacacttggagaaccacggctctaacctagcctcttcaattgaagaagcagacac

SEQ ID NO: 868786 - DNA, 120 bp, Artificial Sequence
  ENSG00000250583_4 (sequence is synthesized)
ctctggtgcccatgtcacattcccgaaggcccatttaagttctgtatgtgctcaaagtccccttgcctcaagcacatgccatgcatctatctgccctctgttccagagcaccctcaccta

SEQ ID NO: 868787 - DNA, 120 bp, Artificial Sequence
  ENSG00000250583_5 (sequence is synthesized)
tgcacagctctgaagtgcaaaggagttaagaccactgggcctcccatgcttcagatgcaccaatctgggaggattctgcatgctttgtatgaggtcccagcattgttgagccccagttgc

SEQ ID NO: 868788 - DNA, 120 bp, Artificial Sequence
  ENSG00000250583_6 (sequence is synthesized)
ccacagcagcaagctctataacacactgccagatttgcctttcttcttcccgtctcacccttcctattctcttgcttttatttcctaagatcacctcctaaataaactacttgcatccaa

SEQ ID NO: 868789 - DNA, 120 bp, Artificial Sequence
  ENSG00000250584_0 (sequence is synthesized)
acagtgaacagcatggagcacttgctgcgtgtctggccatctcagggacagatgtcacatttgttgctgtagctggactttatcttctattccgttggtctgcctatctagaaagcaaaa

SEQ ID NO: 868790 - DNA, 120 bp, Artificial Sequence
  ENSG00000250584_1 (sequence is synthesized)
tttcaaatactgagaccgatagatgaagatgctttcgcttcttccctgtttcatccagttggggactaagtgtccttcggtttggactgtgcagctcgggtcaccttctctgtggaacag

SEQ ID NO: 868791 - DNA, 120 bp, Artificial Sequence
  ENSG00000250584_2 (sequence is synthesized)
aaagtgggaacccattattccccaagcccagccagcaaacctcaccgatgaaacagataagcacttcctgcaggtggggccgacactggccaggacacagccctctctctcacagcagtg

SEQ ID NO: 868792 - DNA, 120 bp, Artificial Sequence
  ENSG00000250584_3 (sequence is synthesized)
ttccaggttgtttgtgcacaaaatttcacaaaggtcagagctcgtctctccaaaccgatgagctttgcggttaacctgaattcactgaactgggatttattattattattctattttacc

SEQ ID NO: 868793 - DNA, 120 bp, Artificial Sequence
  ENSG00000250584_4 (sequence is synthesized)
tctaacagaagtttaaggttcgtgtaagtttcgttcctctctgattgtaggggagacgcccagagcgccatttggaggagagaacctggcatcctttccttaccttgatttcaggtaccc

SEQ ID NO: 868794 - DNA, 120 bp, Artificial Sequence
  ENSG00000250584_5 (sequence is synthesized)
tcagataagggaataaaagcaggctgcgggagccagcggtggcaacctgttagggtctgcttttgtcctctgggagctttccttgtttggttttcgtagtaaatcttactgctgctcagt

SEQ ID NO: 868795 - DNA, 120 bp, Artificial Sequence
  ENSG00000250584_6 (sequence is synthesized)
gtttgtgtctgtgctgcgtttgtgagctgcaacgctcacggtaaaggtctacagcttcactcccgaagccagcgagactgtaaatccactgggaggggcaaagaactctggacgtgctgc

SEQ ID NO: 868796 - DNA, 120 bp, Artificial Sequence
  ENSG00000250584_7 (sequence is synthesized)
atttttaggagctgtgacactcaccgcggaggtttgcagtttcactcctgaaatcagtgtagaccacgaacgcaccagaaggaacaaactccagacacaccgtttttaggtaaccgtaac

SEQ ID NO: 868797 - DNA, 120 bp, Artificial Sequence
  ENSG00000250584_8 (sequence is synthesized)
cgagggtctgcggcttcattcttgaagacgagactaagaacccaccaacttctggacacaaaaccaccccaaaaagtgagtttctaaaggagaagctaaaaataaagaccacgaaagtgt

SEQ ID NO: 868798 - DNA, 120 bp, Artificial Sequence
  ENSG00000250584_9 (sequence is synthesized)
cttcctcccagggttctttggggtaaagaatttggtgagaaggagctgaatgttatggctgcgtttctcagccacttgctcggagccaagcatcctctcaccctttctttcaactggtag

SEQ ID NO: 868799 - DNA, 120 bp, Artificial Sequence
  ENSG00000250584_10 (sequence is synthesized)
ccagaaaatacgggttgagcatcagggattctcaaccgtgtcaagctccagccctgcctgttgtgacagacgtttcctgatgcctgttgctctctggaatgaaggtcatgggcagtatta

SEQ ID NO: 868800 - DNA, 120 bp, Artificial Sequence
  ENSG00000250584_11 (sequence is synthesized)
cccacacagccattcaaaatcagtcggcttcgtgacctgttgtgaaaggatggcgattgccgtgccagcacgtgacatggactcggatgcctgcgcacacaggtgcaccttccagaaggt

SEQ ID NO: 868801 - DNA, 120 bp, Artificial Sequence
  ENSG00000250584_12 (sequence is synthesized)
gaggtcagcccgagcgcccaccgccatgtgagtgcgctgctgcagtgaccagttgctggaatgttctgaacagagcccagtgccacccactttgatgtgcgctattgttagatctccgga

SEQ ID NO: 868802 - DNA, 120 bp, Artificial Sequence
  ENSG00000250584_13 (sequence is synthesized)
gctgcagggaaacacacaacctcatgctttgctgctgggatgcaaacagcacagcccctgcgggaagaagctcagagatgcccggaaagacctgtgtgcattcacaactgcatccttcaa

SEQ ID NO: 868803 - DNA, 120 bp, Artificial Sequence
  ENSG00000250584_14 (sequence is synthesized)
ttccacttctaagcagctaccttaaagtcacaaaatatcagaaaatggatgttcaaggtcattcaacgtaaccctgcttttaatacctacagactttttttttaaccaaaggatatatcc

SEQ ID NO: 868804 - DNA, 120 bp, Artificial Sequence
  ENSG00000250584_15 (sequence is synthesized)
tggcaaaatatattatgtatatatataactaaatggaacctctgagatgaaaaatacctttgaaatgaaaaattcataatatgagcttagcagcagtttgaaaactgcagaaaaatacca

SEQ ID NO: 868805 - DNA, 120 bp, Artificial Sequence
  ENSG00000250584_16 (sequence is synthesized)
gtgaacttgaatacaagcattagaaagtattcaaacctaagcacggagacgggagaaaagtttcaacataaacagaacctcactgacattgaaacagcatcaagcagctcatatacatat

SEQ ID NO: 868806 - DNA, 120 bp, Artificial Sequence
  ENSG00000250584_17 (sequence is synthesized)
tatttgaagaaaccttcactgcaacattttcagacttgaatctcacagattgataagctcagtaagccccaagcaggacagacaaggcaaaagcgccagacaaatacacacaaaacacaa

SEQ ID NO: 868807 - DNA, 120 bp, Artificial Sequence
  ENSG00000250584_18 (sequence is synthesized)
agaaacacagaagaacagctgccaatctgtcatcagaagcaatgcaagtcagaagacagtggactgaacgatgtgatttaacatgacagaagaaaaagtgcccatcaacctagagaatta

SEQ ID NO: 868808 - DNA, 120 bp, Artificial Sequence
  ENSG00000250584_19 (sequence is synthesized)
gtgaaaatatctttcaaaaaacgagggcaaattaaggatatttccatacaaatgacaattggtagaatccattttcagtagatctgcataacacaaaatgctaaaggaagttattgaggc

SEQ ID NO: 868809 - DNA, 120 bp, Artificial Sequence
  ENSG00000250584_20 (sequence is synthesized)
taaagggtatatatcagctgtatttcacgtgacagtgaaatgtatgacaataaagaaaggaatagaacagaaatggaacgttactgtttaaagtcattaaaatccacatgaagggttata

SEQ ID NO: 868810 - DNA, 120 bp, Artificial Sequence
  ENSG00000250584_21 (sequence is synthesized)
atatctggaagtagactagcttaagtttaagctgcaaattgacaattgtagaaaaaaacactgaacaagtaaagcaaaaagatctagctgaaaagccaataagaagacatatttgaatcc

SEQ ID NO: 868811 - DNA, 120 bp, Artificial Sequence
  ENSG00000250584_22 (sequence is synthesized)
aaaaaagataaatttataattctaaaagcaggaagaaaaaagaggaaaaagaacaaagaatgaataggacaaataagaaaacattgataattaaatttaaatgatgtaacactctaatta

SEQ ID NO: 868812 - DNA, 120 bp, Artificial Sequence
  ENSG00000250584_23 (sequence is synthesized)
attaaatggcagagattgttgattgaaatacagaactaactctaagccgcctacaagaaacccgttttaaatataaatacacagataggttaaggccaagcatggtggctcatgcctgta

SEQ ID NO: 868813 - DNA, 84 bp, Artificial Sequence
  ENSG00000250584_24 (sequence is synthesized)
gggtggaactccatctctataagaaatacaaatattgcctgggtgtggtggtgaacccctgtggtcccagctacttgggaggct

SEQ ID NO: 868814 - DNA, 62 bp, Artificial Sequence
  ENSG00000250584_25 (sequence is synthesized)
atctctataagaaatacaaatattgcctgggtgtggtggtgaacgtgacgctgcagtgagcc

SEQ ID NO: 868815 - DNA, 120 bp, Artificial Sequence
  ENSG00000250585_0 (sequence is synthesized)
atttagatgagcaccttcttgcccttggatcacccactctgggggaagctgtgtcatgagtagttctatgatcaggcccatgtagccagaaacaaaaacctcctgccaagaactgcatga

SEQ ID NO: 868816 - DNA, 120 bp, Artificial Sequence
  ENSG00000250585_1 (sequence is synthesized)
gtcatcttggaagtgaccctccccagtcatgacttcagatgacactgcaaccctgctggcagtctttactgaaacttcttgagaaatcttgagccagtaccacgtagctgaactgctgcc

SEQ ID NO: 868817 - DNA, 120 bp, Artificial Sequence
  ENSG00000250585_2 (sequence is synthesized)
agcctccctagtagctgggactacagtatgctgacttccagggccagttcttcagaatctgctttttctcctgaaatcaggccatgcgaaaagaagatgttgcctcctggcacagatcat

SEQ ID NO: 868818 - DNA, 120 bp, Artificial Sequence
  ENSG00000250585_3 (sequence is synthesized)
aaaagaagatgttgcctcctggcacagatcattcatcctgcctggtcctcagtcaagtctccagcagcttgggatgtctgaagaatgaaaagcctaagagacaaggcccggggatgccca

SEQ ID NO: 868819 - DNA, 120 bp, Artificial Sequence
  ENSG00000250585_4 (sequence is synthesized)
acatacattctataagtggggaaagtggataaaatgttttctgtgtggaaaggacaaataacagttaatttctactggaaaagtaaacaaaaaccgtaattaaaattgctcaaaagtaaa

SEQ ID NO: 868820 - DNA, 120 bp, Artificial Sequence
  ENSG00000250585_5 (sequence is synthesized)
gagaatacttgaaattatttctggaagatatgggaacttttgcgtgaaaaagggctacagaattttgcctgtaaagttatgctaatctctgtacagaaatgtctgacaattcagaagctg

SEQ ID NO: 868821 - DNA, 120 bp, Artificial Sequence
  ENSG00000250585_6 (sequence is synthesized)
aaactcagcaaaatctctactttaagtgtcagataaagcctaacgtcaaaggaaagggcaagagtctcaggaaagagtatgctgacttccagggccagttcttcagaatctgctttttct

SEQ ID NO: 868822 - DNA, 120 bp, Artificial Sequence
  ENSG00000267202_0 (sequence is synthesized)
gggcggcgcgtgagacccacctgctccagagcctccgcccgcagctgtcggtgcctctggcctgcgcccaccccgcccgctcctcggggcgctttggaggaggcggcatcggcgctcgcc

SEQ ID NO: 868823 - DNA, 120 bp, Artificial Sequence
  ENSG00000267202_1 (sequence is synthesized)
cagcccccacacacctgggatgagtatcaggtgctttgttgatcccatgctgtgtgctcagggagacaaagcatgcacgcatggggctgtatccacctgcagcagctggtgaatgactgc

SEQ ID NO: 868824 - DNA, 120 bp, Artificial Sequence
  ENSG00000267202_2 (sequence is synthesized)
agaaggcagccccagcccacatactgctacttcagtgtgactgccactcctctcactgagagtccgggggcgtattccttccccttgactgctctaacaaataaagaatggcagaagtga

SEQ ID NO: 868825 - DNA, 120 bp, Artificial Sequence
  ENSG00000267202_3 (sequence is synthesized)
tgcattttcagacccagaaccgtggcctgcctcagtgccacccacatgggagctgtggttaccagtctgcaggcagctccgggagaggctgacagagtgggcccccatgtggaagaaaga

SEQ ID NO: 868826 - DNA, 120 bp, Artificial Sequence
  ENSG00000267202_4 (sequence is synthesized)
gaatgtcaaaggacaatgactactttgtgggtttccgtatagctctcctttcccacccattccctgggatgctcactggggaaagagaccaggcctctctgctgaagcagcagtgcctgg

SEQ ID NO: 868827 - DNA, 120 bp, Artificial Sequence
  ENSG00000267202_5 (sequence is synthesized)
agcacaggaggccctccatttagtgatgagatgcctcagcagcccccacacacctgggatgagtatcagcccatgcagaagagtccccatggaaaggaactgaggccccagctgacagcc

SEQ ID NO: 868828 - DNA, 120 bp, Artificial Sequence
  ENSG00000267205_0 (sequence is synthesized)
cagccgccgccgcgccatcagcaccagcacgcagccgatgtcggctgtgtaggagatggtatgcagctcttcctgtggttctagaatctccttcagtagttcacacctttggctacacca

SEQ ID NO: 868829 - DNA, 120 bp, Artificial Sequence
  ENSG00000267205_1 (sequence is synthesized)
gggattctaagaattacctgaccagtcaaggaacaaacaattctgttccaggagaattctagacagttccagaatactcccaacccagcccagaactacataaagctttactcctggctg

SEQ ID NO: 868830 - DNA, 120 bp, Artificial Sequence
  ENSG00000267204_0 (sequence is synthesized)
agtctactctttccccactgaactgtgtgtcttcatggggagtttgactttgcttctctctctggtgccttctggagcctggaggctctcaacttccatttcaactgcctgacctgggcc

SEQ ID NO: 868831 - DNA, 120 bp, Artificial Sequence
  ENSG00000267204_1 (sequence is synthesized)
agccatatctccatgacccatctcccacctggacccattgctagggtgggcggatcccagaggccaggctgttggatttctgcatgactggcctttttctctttgcagtttaattgtcgg

SEQ ID NO: 868832 - DNA, 120 bp, Artificial Sequence
  ENSG00000267204_2 (sequence is synthesized)
gacatcagactaacagtgacaataacacatctctgcaaaatataggccacagagcgctggtggaggtagaggtgggggcaggtgtatgtgtcttgttggagggtttcaaaaatggaagac

SEQ ID NO: 868833 - DNA, 120 bp, Artificial Sequence
  ENSG00000267204_3 (sequence is synthesized)
atttccctaaagtttgatcgtcaatgaccttgtcttctagtgatcttcctttaagtttcttgtgtgcatatctgatttctccaactaaactaattaatttatttgataacgcatactact

SEQ ID NO: 868834 - DNA, 120 bp, Artificial Sequence
  ENSG00000267204_4 (sequence is synthesized)
tggttagcattgtgataaatttttaaaggtatttactttttatgtttaattctagcaacaaatccctgatttgttggtagaatcggtacagttaacatccccattttaagatgagtaaac

SEQ ID NO: 868835 - DNA, 120 bp, Artificial Sequence
  ENSG00000267204_5 (sequence is synthesized)
tgaggcctgtgggtgggaaaggccgacttcaaaatgaggcagaacgcttcaccactatattgcttcttgcattaaaccttttcctgctctgagtgagcggggtggaaccgatcctctatt

SEQ ID NO: 868836 - DNA, 120 bp, Artificial Sequence
  ENSG00000267204_6 (sequence is synthesized)
cctccccaggtcattcactacttaaaaaaaaaatccatggattcttttaatacatgcttgttgtgtgtgtccaggctctgaggatggtggtggactagtcagaccagctgcctcttcttg

SEQ ID NO: 868837 - DNA, 120 bp, Artificial Sequence
  ENSG00000267204_7 (sequence is synthesized)
tcgggacaggactcatgcccgagctctgtttctgatcagtttgcaaggagaatgtatatacccacattgccacttaccacgaggaagctcggcttttcagcgttgcctaagtgcttgagt

SEQ ID NO: 868838 - DNA, 120 bp, Artificial Sequence
  ENSG00000267204_8 (sequence is synthesized)
tgcaaaggttcagcaacccagcttgtgttgggtggactggaaaaaggagacagggtccactttttggttacgcagtgggctgccttcaaccccccactcccctcttttctggcagaaagg

SEQ ID NO: 868839 - DNA, 120 bp, Artificial Sequence
  ENSG00000267204_9 (sequence is synthesized)
ggctggagtgaaggtgcggggtgggtgttggggagtggcagaaagcggtttccctaggggcggggcccggggtaaggccgaccacagttattccaggattatgactcaaagcacactaac

SEQ ID NO: 868840 - DNA, 120 bp, Artificial Sequence
  ENSG00000267204_10 (sequence is synthesized)
aagaagcatttattacctccgaagtagtgctggctctgtagtgctgaatggagaggtgaggtattgcagctgttatcttttgaactaactgctattgcgtgtcccatgaccagccgtggc

SEQ ID NO: 868841 - DNA, 120 bp, Artificial Sequence
  ENSG00000267204_11 (sequence is synthesized)
agggtttttgttcccatgaatgaatgggctataaatctgtcggagctgacagtagcagcagtactagagggtgtaaagagaaaatgtgcagaagaatcttgtggtctttgcttgcctaga

SEQ ID NO: 868842 - DNA, 120 bp, Artificial Sequence
  ENSG00000267204_12 (sequence is synthesized)
agtgcttatttatagggcaaacggatacatccagcattggccgtcagagcctaacttagtgttttctcatttacagtcactctgttgtaaagcacatctgtgcaccgagggcactcgtgg

SEQ ID NO: 868843 - DNA, 120 bp, Artificial Sequence
  ENSG00000267204_13 (sequence is synthesized)
agcttccagcaattgcagtggtggagacacgtgcagataaaggggtgttttcctctctgtttctaagcttcaggagccttcagaggtagctgtctggagagctgtagttttgagggttct

SEQ ID NO: 868844 - DNA, 120 bp, Artificial Sequence
  ENSG00000267204_14 (sequence is synthesized)
aacaggcaggaaaacccgaggccgagaacagctccttatttatatttcagttttgagggtgaatggcaggaaatggaataaaattaatcgccattttttcaggcccctgaaacaataaat

SEQ ID NO: 868845 - DNA, 120 bp, Artificial Sequence
  ENSG00000267204_15 (sequence is synthesized)
ttcagcagccataaatttggagctgggttaagtactgaaaacaatttattgctattttttcccttaattgcattcccaagaagaagggtttggtgcttactggtggcattattatataaa

SEQ ID NO: 868846 - DNA, 120 bp, Artificial Sequence
  ENSG00000267204_16 (sequence is synthesized)
aattattcgttagaaagcacaatgaacagtaaatcagaagcttacctgaaatagggtcagggttcctcacaattcatcttcgcccccacccagcctgtctccagcgaagtcttcaggaaa

SEQ ID NO: 868847 - DNA, 120 bp, Artificial Sequence
  ENSG00000267204_17 (sequence is synthesized)
gaaaaggatcagagaaaatgctcccgctgtcccctcgcccctcctccgtgacactgtgtgcagattaggtgttgattcaataagatgcttcaccttctaaaagtgatagtgtgagtcacg

SEQ ID NO: 868848 - DNA, 120 bp, Artificial Sequence
  ENSG00000267204_18 (sequence is synthesized)
tgtggaagcagaggggacataatggaacgatcactgcacggcatccctgcctcgtttaatttgttttgaggctgctagccgtgtcaggctaactgcagtcgaggccaatcaacagcctga

SEQ ID NO: 868849 - DNA, 120 bp, Artificial Sequence
  ENSG00000267204_19 (sequence is synthesized)
ccctgttggtggagaaagttgaaagatagtggcattgtgtcagaagctgctgggatgaagtcaacatccgttcctgtctccccttgggagagccatgttccagggcaaagagagtgatgg

SEQ ID NO: 868850 - DNA, 120 bp, Artificial Sequence
  ENSG00000267204_20 (sequence is synthesized)
atttgccattccaaaccagccataagtggagcctgtgcccatcggagagctgctggtggctgaaactgcaattctgatagccatttggggaagagccaatgggtgccaagtgtttatgat

SEQ ID NO: 868851 - DNA, 73 bp, Artificial Sequence
  ENSG00000267204_21 (sequence is synthesized)
ccatttggggaagagccaatgggtgccaagtgtttatgatgtgacaagtacatctgcatcactgatggtgtct

SEQ ID NO: 868852 - DNA, 120 bp, Artificial Sequence
  ENSG00000267204_22 (sequence is synthesized)
aggccacccaaggcagaggctcacagatggaactgcaggccacagtatcaccccatccctcactcttatgacaactaattatcaagaaatttctgtaaaatgaaatcattatacaaaaaa

SEQ ID NO: 868853 - DNA, 85 bp, Artificial Sequence
  ENSG00000239774_0 (sequence is synthesized)
attacgtcgaaatagctcgagctgtaacctagggtaaataataattccttttcgtattcatcaaggtgcttctaagtgccagtgc

SEQ ID NO: 868854 - DNA, 66 bp, Artificial Sequence
  ENSG00000239774_1 (sequence is synthesized)
ccaccacacctggctaacttctgaatatcaagctgaaattactatcagatatcttgccaccacata

SEQ ID NO: 868855 - DNA, 120 bp, Artificial Sequence
  ENSG00000239774_2 (sequence is synthesized)
gatggaaagatactgaatcccagtgacgtcctttgagatgtcggatcaagctgagctgggcatgaagatagagctactcctatacttttaagataccaataacaagcaagattcagaagt

SEQ ID NO: 868856 - DNA, 120 bp, Artificial Sequence
  ENSG00000239774_3 (sequence is synthesized)
ccaacaagtaagacattgatttcattaagagagaactagtaagcaagctatttgggaagtacactctcataagaatattgtttcatgaagtcttgagcaacaaaggaaatagtaagtaag

SEQ ID NO: 868857 - DNA, 120 bp, Artificial Sequence
  ENSG00000267209_0 (sequence is synthesized)
gcgtccctgaccttgcttcatatacacaacatcctttcttatcttctgaagatatgaatgaaagtgaaagttgacttcaccacaggcccaggtcttgtattgaggacaaggaaatactgc

SEQ ID NO: 868858 - DNA, 120 bp, Artificial Sequence
  ENSG00000267209_1 (sequence is synthesized)
ctgttgagaatatttaagagcagtcaggaaaccctttgtagcttggctttattgcagcaagtgtcaaagaggaggacctgaacttccaaggccaacttgactggaaaccctctagtcttt

SEQ ID NO: 868859 - DNA, 120 bp, Artificial Sequence
  ENSG00000267209_2 (sequence is synthesized)
aatccatagaaacctgacttctgtgccccccatgcctagaaaactacttttaaaaagaacattagtggtcaccacgttggtaaagtattaataaataaacatgttttagttctaatcata

SEQ ID NO: 868860 - DNA, 120 bp, Artificial Sequence
  ENSG00000267209_3 (sequence is synthesized)
ggagtctcattctgtcgcctaggctggagtgcaatgcgtccctgaccttgcttcatatacacaacatcctttcttatcttctgaagatatgaatgaaagtgaaagcaaagaggaggacct

SEQ ID NO: 868861 - DNA, 120 bp, Artificial Sequence
  ENSG00000263916_0 (sequence is synthesized)
gttaccagttacctctgtgagaactttggacaggttacaacttttggatttttttttttttttaatcttgagacagggtctgcctctgtggcccaggctggagtccagtgggccatcata

SEQ ID NO: 868862 - DNA, 120 bp, Artificial Sequence
  ENSG00000263916_1 (sequence is synthesized)
ccaggctggagtccagtgggccatcatagctcacggcagtttcggctttcctgggcgcaagcggttctctccttcctcagctccccaaatacctgggactacaggtgtgagccaccacac

SEQ ID NO: 868863 - DNA, 120 bp, Artificial Sequence
  ENSG00000263916_2 (sequence is synthesized)
agtagcaagggtacccaacctcactgattgaggattaaatgagttgttatatgtaaactgtctagcacctaccaaatgttgttgtttttcctttataatcaaattcatgattaaggagca

SEQ ID NO: 868864 - DNA, 120 bp, Artificial Sequence
  ENSG00000263916_3 (sequence is synthesized)
tcctttataatcaaattcatgattaaggagcagtgactggaagtttggaagcaggcacctcattattattcatgcctaccacctattatttctttattttgagatggagtcttgctctgt

SEQ ID NO: 868865 - DNA, 120 bp, Artificial Sequence
  ENSG00000275936_0 (sequence is synthesized)
agagaatgggcgggaggggccccacgtcacagggaggggccctggctatgccaggccctcacttgatttctaagagcttaggctttcccagcccccgactggaaggggcactcaggatgg

SEQ ID NO: 868866 - DNA, 120 bp, Artificial Sequence
  ENSG00000275936_1 (sequence is synthesized)
tccctgccctcctaaccaggtggaagcagaagcccaggctccaggttcctcctgaggctctaggcttatggggtaaggtgtgcggggaggtgggggctggagtgaggctggtgcagcggt

SEQ ID NO: 868867 - DNA, 120 bp, Artificial Sequence
  ENSG00000275936_2 (sequence is synthesized)
agaggctccaggcccccactgttctgcttttaacagcggcaagggagccaaatcagccctctagtgtaagcttccattaccctggcacctggcagccaacaggggggcactaggtctccc

SEQ ID NO: 868868 - DNA, 120 bp, Artificial Sequence
  ENSG00000275936_3 (sequence is synthesized)
cagtctccagaaaagaagggtatagaagggcaggagtaggacctgctgacccccacttcctccatcccctcctgggaccctcaacagccccacggctcagacagcctggccctggatgcc

SEQ ID NO: 868869 - DNA, 120 bp, Artificial Sequence
  ENSG00000275936_4 (sequence is synthesized)
acaccctcattcctgccccgttcacaacttgcttgctctcagctccccggtaacctgctgggtccagggagctgacagcttgatccctagccctcaggataataaacatctaaaaagcaa

SEQ ID NO: 868870 - DNA, 120 bp, Artificial Sequence
  ENSG00000262352_0 (sequence is synthesized)
ggcgcaggcgcggaggggcgcgcccgaacccgaaccctaatgccgtcataagagccctagggagaccttagggaacaagcattaaactgacactcgattctgtagccggctctgccaaga

SEQ ID NO: 868871 - DNA, 120 bp, Artificial Sequence
  ENSG00000262352_1 (sequence is synthesized)
gacatggcgttgcggtgatatgagggcaggggtcatggaagaaagccttctggttttagacccacaggaagatctgtgacgcgctcttgggtagagcacacgttgctgggcgtgcgcttg

SEQ ID NO: 868872 - DNA, 120 bp, Artificial Sequence
  ENSG00000262352_2 (sequence is synthesized)
aaaagagcctaagaagagggggcgtctggaaggaaccgcaacgccaagggagggtgtccagccttcccgcttcaacacctggacacattctggaaagtttcctaagaaagccagaaaaat

SEQ ID NO: 868873 - DNA, 120 bp, Artificial Sequence
  ENSG00000262352_3 (sequence is synthesized)
aatttaaaaaaaaatccagaggccagacgggctaatggggctttactgcgactatctggcttaatcctccaaacaaccttgccataccagcccatcagtcctctgagacaggcaagccca

SEQ ID NO: 868874 - DNA, 120 bp, Artificial Sequence
  ENSG00000262352_4 (sequence is synthesized)
agaaagtcaggggcctatgtgagccaaagaggagagaaggtgatgcctcagcccagtgtttctgccccacctcgcttgtggccttcggaacttgatttgcaccgcaggaaaatgggcaat

SEQ ID NO: 868875 - DNA, 120 bp, Artificial Sequence
  ENSG00000262352_5 (sequence is synthesized)
tcacccaggttggggtggagtggcacagtcacagctcactataacctcaagctcctgggctcaagtgatcctgccacctcagcctcctaagtagctggaactacagatgtgcactgccat

SEQ ID NO: 868876 - DNA, 120 bp, Artificial Sequence
  ENSG00000262352_6 (sequence is synthesized)
gccaggcttgtctaacatttttatgtgttgcttcatccagtttgctagagtttttggagatttctgtcttcattcatgagggataatagtctgcacttttattttcttgtgatacttttg

SEQ ID NO: 868877 - DNA, 120 bp, Artificial Sequence
  ENSG00000262352_7 (sequence is synthesized)
tctgatttgttatctgggtaatactggccttgaaaatgaattgatgttttcctgcttctctgctttgcaagtgtttgtgaaggattggttattcattaagtgtttaatagaattcactag

SEQ ID NO: 868878 - DNA, 120 bp, Artificial Sequence
  ENSG00000262352_8 (sequence is synthesized)
tgaagctatgtgagccagggctagactgatgaagagttttcattagtctaatctgtttacttgctgtataagtacgcatatattctctttcttcttgatttaattttacactttgtgtat

SEQ ID NO: 868879 - DNA, 120 bp, Artificial Sequence
  ENSG00000262352_9 (sequence is synthesized)
agcagggaatctgtgtctaatttgtagtatttcatgcttctaggttttcatggcagttgagatgtaagaataacaataatgttgggagaaggaagttgtggacaatccatgaatatccca

SEQ ID NO: 868880 - DNA, 120 bp, Artificial Sequence
  ENSG00000262352_10 (sequence is synthesized)
acatctgttgtaggaaggttaagattactttttttttttttgctgtactgaactgaatactcttatttataatgtcagacaaatgtaatgttgtatataaatagaactaggaaaatgtgc

SEQ ID NO: 868881 - DNA, 120 bp, Artificial Sequence
  ENSG00000225706_0 (sequence is synthesized)
cctcgatgctccgccgctcgcggctggggggtccggggccgcgtctcctctcctccctccgcctctcctctttcctccttcctgctgcctcttcttttaaagcggattctttggccacaa

SEQ ID NO: 868882 - DNA, 120 bp, Artificial Sequence
  ENSG00000225706_1 (sequence is synthesized)
atagcaactcggctgcccccctcggtgcctccctccccttctcttcttccccccaaaagtgaagcgcacgcgaggtaaagaaacgaagaccctgagaatttaaaatcatccaactatttg

SEQ ID NO: 868883 - DNA, 120 bp, Artificial Sequence
  ENSG00000225706_2 (sequence is synthesized)
gtgccagaagcaggacaagaactcagacatcatgatccagtgccctccatcccaccagctattcatcatcacctccacattctggatcaaagaagccagttttccaacttatcaatgagc

SEQ ID NO: 868884 - DNA, 120 bp, Artificial Sequence
  ENSG00000225706_3 (sequence is synthesized)
aatacatatagaatatttttaaaactccaaatacttttatgaaggaaaaatgaagcaataggacaagacattttcttcgtttccttccagctctaacattctgtgataaatagcacacag

SEQ ID NO: 868885 - DNA, 120 bp, Artificial Sequence
  ENSG00000225706_4 (sequence is synthesized)
gagctttgctatagcactaccccctctagtgcataattcagcatacgatgagtatgagtctgttttggaccccatccaaaggagttagttcctagaagtacttggaagatttattctcat

SEQ ID NO: 868886 - DNA, 120 bp, Artificial Sequence
  ENSG00000225706_5 (sequence is synthesized)
ttatcatgaggcatcctaacaggagactaaaaataatcacgatgacaataatagtaatcagttgttacacttgtattatgtactaagcatcgtgctaagcatgttaaagttcacctgttt

SEQ ID NO: 868887 - DNA, 120 bp, Artificial Sequence
  ENSG00000225706_6 (sequence is synthesized)
ttattttttatttttttattttttttgcaaaacttcctttttgatcatgtggctagtgattaaaagtttggaagcactgcctcgtttccaatcttaactgccttgctagttaagtattat

SEQ ID NO: 868888 - DNA, 120 bp, Artificial Sequence
  ENSG00000225706_7 (sequence is synthesized)
agtattattagccccattatataagtgaggaaacaggacgagagaggataagtaatttggccaagctgacacagtgagtggccaagctagaattttgaacctagatctgtttgacttcaa

SEQ ID NO: 868889 - DNA, 120 bp, Artificial Sequence
  ENSG00000225706_8 (sequence is synthesized)
atccaatattttcacttctatagtgatgataaattattgaccaaggtatggaataaattgttgctaatcatgttttctttgtgaggactactggggtttttattaaatccagctaaatgg

SEQ ID NO: 868890 - DNA, 120 bp, Artificial Sequence
  ENSG00000225706_9 (sequence is synthesized)
agaaacacagcatagattcaagtgacatgttcggaagagagtgaggaatttcataaaacactaaatctaatatctaagaccttttcctgtaggtgttagcttatgtctaatacactttat

SEQ ID NO: 868891 - DNA, 120 bp, Artificial Sequence
  ENSG00000225706_10 (sequence is synthesized)
tgacttactgctaaatacataaatgaaacaataatagtttcagtcctcaaataacaatattcacttctacgtgtgtttctatttttatttcagagagtatttttcaaatttaagttatac

SEQ ID NO: 868892 - DNA, 120 bp, Artificial Sequence
  ENSG00000225706_11 (sequence is synthesized)
ttatttcagagagtatttttcaaatttaagttatacagcatttctcagtagcttgctttggccaaacacagaactagcacataagaaagctaaaaggccaggcactgtggctcacacctg

SEQ ID NO: 868893 - DNA, 120 bp, Artificial Sequence
  ENSG00000225706_12 (sequence is synthesized)
agccgagatcacgccattgcactccagactgggcaacagagccagactctgtctcaagaataaattaaaaagcagccagacaaccctatcattcaaattcaattgtaaagaagaaaagaa

SEQ ID NO: 868894 - DNA, 120 bp, Artificial Sequence
  ENSG00000225706_13 (sequence is synthesized)
cctatcattcaaattcaattgtaaagaagaaaagaagatattaattaaggtgccatgctaaattttttgacccatgtagttctatggattctaccagtaacattgcatgcttaggtgtca

SEQ ID NO: 868895 - DNA, 120 bp, Artificial Sequence
  ENSG00000225706_14 (sequence is synthesized)
ttactcccattctgcagatttgaaagctcaaactcagaactagctgatgattgaaatcacctgttctgattccactacccaaagattctttacaaacaagtgggcttccagtagaaaagg

SEQ ID NO: 868896 - DNA, 80 bp, Artificial Sequence
  ENSG00000225706_15 (sequence is synthesized)
cactttccttttcttcaaggcagcatctcttcttgctgttaggcagcactgtcctctttaagaaaagaaatccacatctt

SEQ ID NO: 868897 - DNA, 120 bp, Artificial Sequence
  ENSG00000225706_16 (sequence is synthesized)
tttcataaagaaaggcctagaaaagccatacctcctccactgactgctctgttcagctgctgcacttcaccctcacctgcagtgtgtagaggacgttatggtacaatgctatttgctact

SEQ ID NO: 868898 - DNA, 120 bp, Artificial Sequence
  ENSG00000225706_17 (sequence is synthesized)
ggctctgctactggagattacagcatgcgactgtgacaatactggctctgctactggagatcacagcatgcgactgtgacaaatggatattcccattaaattctttagtagactggggca

SEQ ID NO: 868899 - DNA, 120 bp, Artificial Sequence
  ENSG00000225706_18 (sequence is synthesized)
ttccattaaccattggcactatcccaacccaagtgaaacactgggtcatttttttcttgtgagcaagaagtgaagggagaaaacaaaggatatactctaattacctttcctatttctttt

SEQ ID NO: 868900 - DNA, 120 bp, Artificial Sequence
  ENSG00000225706_19 (sequence is synthesized)
ttgttgcatgcattatgataactgtatattacacttatttataattaatatatgacaagctgtcagctaaaatttaacaggtgatttgtcaagaaggcccattaatgcatacattaagca

SEQ ID NO: 868901 - DNA, 120 bp, Artificial Sequence
  ENSG00000225706_20 (sequence is synthesized)
gtggatttcagtgtttcctaacaaaattgtgtattggttttgttttttcattctatttagtataaacattttgaggccacctatctttacattttgcagcatttttaaaaaataaaacta

SEQ ID NO: 868902 - DNA, 120 bp, Artificial Sequence
  ENSG00000225706_21 (sequence is synthesized)
ttgctaacataaatgggtgcattgttagttatatgaggtataaacacatttctgtcaccttaacctctaaatttgtttcactgaggaaacaaattgcctagtgtttattttaaagtttta

SEQ ID NO: 868903 - DNA, 120 bp, Artificial Sequence
  ENSG00000225706_22 (sequence is synthesized)
actttcatgggttttgatacattttttaaattatatcttcagtaggaaaggcagagctgattagggaggaaagcaactgcagttacttatgttccatttagtgtttgtatcttaggtaag

SEQ ID NO: 868904 - DNA, 120 bp, Artificial Sequence
  ENSG00000225706_23 (sequence is synthesized)
aaaattctgaaatgaaggaatattttaaaatacagaaaaagattaagaagtcaccagaaagctagtagttaatcattgaataaaggaacactctacagagaccaaaaactgatgaaacag

SEQ ID NO: 868905 - DNA, 120 bp, Artificial Sequence
  ENSG00000225706_24 (sequence is synthesized)
gctccatcttgctgaatggcgcaagaatgggaaacacaatggaaatgaatcacagatagttgtgaggaggattctttgaaagaaggaaaactctgtttctctatctgtaggatgtcaaat

SEQ ID NO: 868906 - DNA, 120 bp, Artificial Sequence
  ENSG00000225706_25 (sequence is synthesized)
catgggacataacctgaaaaggaagttaaattttgaacttcaatattattatttccatggtcaaccaaaatttgtactgtttaagagaaagatacaaaagtactgcagcatttgtttaaa

SEQ ID NO: 868907 - DNA, 120 bp, Artificial Sequence
  ENSG00000225706_26 (sequence is synthesized)
atttcatttgcacaagcctgactcttatctctcaagactcggacatgcttcaggcagttaatgactcacaatccactactctagagggtgctgaatctccttaatgaaagaatgtgcttt

SEQ ID NO: 868908 - DNA, 120 bp, Artificial Sequence
  ENSG00000225706_27 (sequence is synthesized)
aagattcaatggttaggaagagagaaataaacgagagtaaaacacgaagcacagcagtttttcaaagctagtaagacttctgcgtccaccaaccaactttagctcttacatttttagaaa

SEQ ID NO: 868909 - DNA, 120 bp, Artificial Sequence
  ENSG00000225706_28 (sequence is synthesized)
gaaagcactaacacagaaccatgaaattatttttaaaggttctttctaacagggtttcagaggatggtttccaaaaaactcactcagaagtgaaataccacacgttgattttcacgttgc

SEQ ID NO: 868910 - DNA, 120 bp, Artificial Sequence
  ENSG00000225706_29 (sequence is synthesized)
agggagcgcattcctatgcagttcagggattataaatgaccagtggcaagttggtcattgtatcctgggccaggatctcactgtctccagatcttgctttgttttccatatgcagcagag

SEQ ID NO: 868911 - DNA, 120 bp, Artificial Sequence
  ENSG00000225706_30 (sequence is synthesized)
ggatggatccagaaatctcagcctccccataggtgattccacccaagatgtaaactcctacttggctttgtcattgccacatgtgcccccataaactggcaatcccactttcctcatcca

SEQ ID NO: 868912 - DNA, 120 bp, Artificial Sequence
  ENSG00000225706_31 (sequence is synthesized)
aagttgcatgttagagaaacagaaagttttaaaacccctaatattcctttgctgttacttttgtgggaaatgtatcactctgcctgcagatctgacctcatttaagaagaacccagctgg

SEQ ID NO: 868913 - DNA, 120 bp, Artificial Sequence
  ENSG00000225706_32 (sequence is synthesized)
taaatctgactgctatctgggaacatagttgaggatatatcatcttacaccactggtagtgatttaaactagcaagtagaaaagggacccagaaatcaggggatacagaggacagtacaa

SEQ ID NO: 868914 - DNA, 120 bp, Artificial Sequence
  ENSG00000225706_33 (sequence is synthesized)
gtaaatggcataagcccaacttttctgacactgtgaagtcctagatgttcttgtctctactacaaccaaacatcaaacatcttagagaaagaagtagggatgggtcaaggtgactggaga

SEQ ID NO: 868915 - DNA, 120 bp, Artificial Sequence
  ENSG00000225706_34 (sequence is synthesized)
gtctgagttattattataccaatgagactgagaattattcagggtgatgctgctgaaaaacgggagatacagcaaatagagaagccaaagtttctctgcacatctgagtagtaatggaag

SEQ ID NO: 868916 - DNA, 120 bp, Artificial Sequence
  ENSG00000225706_35 (sequence is synthesized)
tgagactgcagcctgctacactcatgttaatatattcagagcagattggcaacaaaagagtgtcctaatgctgcagcatctagtaaacttctggactggtttaccatttggaaattttaa

SEQ ID NO: 868917 - DNA, 120 bp, Artificial Sequence
  ENSG00000225703_0 (sequence is synthesized)
gcaccggctgttggagtgccggtccagggtccaacatttagtaaccaacatcaaatgtacttgtctctcctaagctgcacagactgccaagtctctcgtcaggtcttcgccgcaaatctc

SEQ ID NO: 868918 - DNA, 120 bp, Artificial Sequence
  ENSG00000225703_1 (sequence is synthesized)
gtctttctagtctccaggcatttagaaaagctttagaacaagatctgcactggcacaagaatttgagtggaaatcaccctgcccagctgtgagccccggggcgggtgagccacacacttg

SEQ ID NO: 868919 - DNA, 120 bp, Artificial Sequence
  ENSG00000225703_2 (sequence is synthesized)
gatctcactgcagttgtggcctctgggaagaaggctttgaatgcagattttaaacaggtactcaactcatactgagccacggctactttcaacttaacaatatgtgagaaacccatctga

SEQ ID NO: 868920 - DNA, 120 bp, Artificial Sequence
  ENSG00000229679_0 (sequence is synthesized)
agacagatatgggataactctatggatgcttcaaaagcacttaaaggataaaccctcaactatagagacacttatgcttccagaatagattataacctaaaggatgctagagtcaggatt

SEQ ID NO: 868921 - DNA, 120 bp, Artificial Sequence
  ENSG00000229679_1 (sequence is synthesized)
cagacaatgaatgctatatgatggatccattcattcactgtatggataaaatatctaaggttatgcagtatgcacgaggcactcctgggtgctagggacacactgatgagcaaaagcagc

SEQ ID NO: 868922 - DNA, 120 bp, Artificial Sequence
  ENSG00000229679_2 (sequence is synthesized)
ctctgcccctagacatctgagtctaatggaggaaccagtcacgggacccagtttttctctcagagtataatcaccatttgcaggatttggaagaaaactaaagatcatgaaagttgttaa

SEQ ID NO: 868923 - DNA, 120 bp, Artificial Sequence
  ENSG00000229672_0 (sequence is synthesized)
gtccaggagcaaagtggtggcaggactggacccatgccaggtcccagccagtccgttcctctccgcatggcccagccgctgggctctggaagctgcaggcagggtcccttgcaagccggt

SEQ ID NO: 868924 - DNA, 120 bp, Artificial Sequence
  ENSG00000229672_1 (sequence is synthesized)
ggcctcagccccatctctttacttctctgcaacttgttttctctatgtgcaagctgtgactaatcacacctcccttcaggggattttcacaggtttcataagtgaagtaagtgcctattt

SEQ ID NO: 868925 - DNA, 120 bp, Artificial Sequence
  ENSG00000229672_2 (sequence is synthesized)
tctttctttccctgtgtgtaccttgtataccacagatggacacgtgtctaaaatacctattttgtcagtcttttcctccaactcagaaacaccgagagccctccccaatcccagcatttc

SEQ ID NO: 868926 - DNA, 120 bp, Artificial Sequence
  ENSG00000229672_3 (sequence is synthesized)
tatcaggaaaaggctaacatgccaccggcagcaaagagctcagtgtcaccagacatcattttgcagataaagaaaggaaatccccgggtggctgaaaatctccccaagtatgggcccagg

SEQ ID NO: 868927 - DNA, 120 bp, Artificial Sequence
  ENSG00000229672_4 (sequence is synthesized)
gaccttgatgggtcaggtctcactgcatcctgtcccactctgtcccagcaaactttcttctccagtcaaaactggtctcactctctgaggaacacctgtgccgacactcaggcacagcct

SEQ ID NO: 868928 - DNA, 120 bp, Artificial Sequence
  ENSG00000229672_5 (sequence is synthesized)
atggggaacactgctccctgccctctcccacccaaatcaacacaccttcaaaggaacagaacacttctgcgcctggcaaggctccctttcctctgcctcctccttcacagagactttggg

SEQ ID NO: 868929 - DNA, 120 bp, Artificial Sequence
  ENSG00000229672_6 (sequence is synthesized)
atgacagagtgccctgcctcctgatggagtgacgctgggattagaggtgggatggaggatgcctgctcacacctcccagatcattcaccagggggcagggccaggccatcatcccactgc

SEQ ID NO: 868930 - DNA, 120 bp, Artificial Sequence
  ENSG00000229672_7 (sequence is synthesized)
gccatcatcccactgcgttcatcttggccaggtgcgatggctcacacctgtcatcccggcactttgggaggccaaggcaggccaatcacttgaggtcaggagtttgagaccactctggcc

SEQ ID NO: 868931 - DNA, 65 bp, Artificial Sequence
  ENSG00000229672_8 (sequence is synthesized)
accactctggccaacatggtgaaaccccctctctgctaaaaatacaaaaatttgctgaatgtggc

SEQ ID NO: 868932 - DNA, 120 bp, Artificial Sequence
  ENSG00000229672_9 (sequence is synthesized)
gccactgcactccagcctgggctacagcgtgagactctgtgtctcaaacaaacaaacaaacaaagtttgaaaccactgtgttcatctcacaccttgcagagagatatatgcccaggatgg

SEQ ID NO: 868933 - DNA, 120 bp, Artificial Sequence
  ENSG00000229672_10 (sequence is synthesized)
caggatggggctgaataaaaagctaataataatagccaccacctgtggagagcttctcttggaccacgcattctgctaagtccttctcttgtatgaggaccagttgtgcccagagaacct

SEQ ID NO: 868934 - DNA, 120 bp, Artificial Sequence
  ENSG00000229672_11 (sequence is synthesized)
tctctgtctcctctaaccatgggataaaaggagatttccacaagagcggctcagggacgcagcccatctcttaagaaggaggctctgagagggacaagaccatggatgcagcacatggcc

SEQ ID NO: 868935 - DNA, 120 bp, Artificial Sequence
  ENSG00000229672_12 (sequence is synthesized)
acaaggcagtttcaagatgcccatgtcaggcagaggatggctcagtggtctctaacccacctaacatttcatgaactttactcctggtcccgctcccaaattagacactggagataatgg

SEQ ID NO: 868936 - DNA, 120 bp, Artificial Sequence
  ENSG00000229672_13 (sequence is synthesized)
gctggagccacgcaaattcagacacctcttccgccccaggtcactctactcgcccacgctgcctgccacacccatccggttgtgcgggacactccccgcgtttcttcagcgattcttatc

SEQ ID NO: 868937 - DNA, 120 bp, Artificial Sequence
  ENSG00000229672_14 (sequence is synthesized)
ttgagtcccggtgaaacgtgtcaggttgccatttcccaggctggaaagattttcccaggacgggtatgaatagacgatgaaagtgcacactcttacccggctgcccgacccaggtgccag

SEQ ID NO: 868938 - DNA, 120 bp, Artificial Sequence
  ENSG00000229672_15 (sequence is synthesized)
gcttctgactcaggaccatctgtgggtgcgagtgcagggaggtgagtcactgcagccttgctcagtccccctgcagaggtcagatcctgggccccaaaagctgctccaggatgaaagcct

SEQ ID NO: 868939 - DNA, 120 bp, Artificial Sequence
  ENSG00000229672_16 (sequence is synthesized)
gctctcagtgagactaaaatcctggtcatttgtgttctgcagtcatgagcatgtaaccctaatgtagaacaacaacttagccaatgactattttttctgttcatgccacagtacctgaag

SEQ ID NO: 868940 - DNA, 120 bp, Artificial Sequence
  ENSG00000229672_17 (sequence is synthesized)
gagaattgctgcttctcttaatggtgcctgccacccaacccaatagttagcatgtgaacgtcttgcttgagatcagcttctgggtgtaaaaataaatttaaatatagaaaattcaaataa

SEQ ID NO: 868941 - DNA, 120 bp, Artificial Sequence
  ENSG00000229672_18 (sequence is synthesized)
cggctgcaggacacagcccagcaggagaagcttttccctccattctttcaaggaatctcgctctgttacccaggctggagtgaagtggcccaatctcggcttaccacaacctctgcctcc

SEQ ID NO: 868942 - DNA, 120 bp, Artificial Sequence
  ENSG00000229673_0 (sequence is synthesized)
gaagttcatggtacagttcagggccttgaaacagggcagggcttgagccccaactgtgcacaaagcactgggctggatcttctgagacagaggagccttctctccccttcctgcctccag

SEQ ID NO: 868943 - DNA, 120 bp, Artificial Sequence
  ENSG00000229671_0 (sequence is synthesized)
ggaagcaaagcacagaaaccgccagaggggctgcagctccatgcttgccttatctgaacacggttggaatggccggcacccttgatgagcggaaacctgggtgttgctctgtcacccagg

SEQ ID NO: 868944 - DNA, 80 bp, Artificial Sequence
  ENSG00000229671_1 (sequence is synthesized)
acaggattggatcctgtgcaagaaagaattcaggtgacttagaatgcctgaccatgtgggaatgcagcccagtaggactc

SEQ ID NO: 868945 - DNA, 120 bp, Artificial Sequence
  ENSG00000229671_2 (sequence is synthesized)
agaatgcctgaccatgtgggaatgcagcccagtaggactcagtctcattttacccagcccctgttcaagatggagtcgctctggttcacacgcctcagacacagcctctgcctcccgcct

SEQ ID NO: 868946 - DNA, 120 bp, Artificial Sequence
  ENSG00000229671_3 (sequence is synthesized)
cagcctcctaagcagctgggactacagtgcatacctgattttctcgacctcttttatgaaatatccccgccagactccctcgaccgtgccacccccaggttcccgtgcatacacaacatt

SEQ ID NO: 868947 - DNA, 120 bp, Artificial Sequence
  ENSG00000229671_4 (sequence is synthesized)
gcgggataggtattgtggaatgaggatccgtgttacgacctacagaagatgtggctgtgaagtcaggagtcacggtctcagagttgactgcactgcctcgtagctgtgtgaccttcagga

SEQ ID NO: 868948 - DNA, 120 bp, Artificial Sequence
  ENSG00000229671_5 (sequence is synthesized)
ccctctgagcttcagtttgctctctgggaagactccaaggataagagcatctacctcctcagcctgctgtgagagttaacagggccagggccaaagacgctttgtctgactgctggtctg

SEQ ID NO: 868949 - DNA, 120 bp, Artificial Sequence
  ENSG00000229671_6 (sequence is synthesized)
cggggagctctaaatatgaatctgctacatcaccttcacttttgaattcggctctgatgttccaaatgttcttggccgttccttcgtgtttctcctgtacgaatttcagcttctttttgc

SEQ ID NO: 868950 - DNA, 120 bp, Artificial Sequence
  ENSG00000229671_7 (sequence is synthesized)
caagtatctccccacccccgcccacccccacccccaaataaactcactagaatgttggctgaaaatctgataaggctacacattgatttggaaagaaatgattttttgtgagagtcaaac

SEQ ID NO: 868951 - DNA, 120 bp, Artificial Sequence
  ENSG00000229671_8 (sequence is synthesized)
tccctacccattttttttcttttgttttttcaaaagtttttttcttacatttgtcattcaagtttgtcattttcttgctacagattccaaacacttttcaagaggaccgtcgctaagtac

SEQ ID NO: 868952 - DNA, 120 bp, Artificial Sequence
  ENSG00000229671_9 (sequence is synthesized)
tttatactcttgtttgggtttttttagagtaaaaaatgttcaaattctactttatcttctagctggtggttgttggaagataattttaaaaactgatttaaaatatgtattttgcatctg

SEQ ID NO: 868953 - DNA, 120 bp, Artificial Sequence
  ENSG00000229671_10 (sequence is synthesized)
tggacagaaaagggaaaggaggcacagaaaacggaagcaaagcacagaaaccgccagaggggctgcagctccatgcttgccttatctgaacacggttggaatggccggcacccttgatga

SEQ ID NO: 868954 - DNA, 120 bp, Artificial Sequence
  ENSG00000286518_0 (sequence is synthesized)
ggctctggtcaacaccagcagccaggacagggtctgttccctgctctgtcttcttcctgtggatgctttctggcaggacgtcccaggctcggccatgtgtccccgtggggatggcaggga

SEQ ID NO: 868955 - DNA, 120 bp, Artificial Sequence
  ENSG00000286518_1 (sequence is synthesized)
gggcagcacgcgttggctgggctccttcctggctgcaatccctgctgtttttctcacggaggtgcaggctggagtgggtttgccacacggggccaggctgctagaactgatgccccagcc

SEQ ID NO: 868956 - DNA, 120 bp, Artificial Sequence
  ENSG00000286518_2 (sequence is synthesized)
ccgcttgcccagcacccccaggagagaagctccaggtcccgcgtctgtcctgcctgcagggagggaccccaggggtggatcaagtctgtcacgccaggttgaccaggcctggttctgtgg

SEQ ID NO: 868957 - DNA, 120 bp, Artificial Sequence
  ENSG00000286518_3 (sequence is synthesized)
ccttgcaggggtgtttttcataagcacagagacggatttccatggctgcgtagatgactaggtcaaagcaaggatgtgggggcgctgagcctgaacctgctgagaaacgtctgcaacgac

SEQ ID NO: 868958 - DNA, 120 bp, Artificial Sequence
  ENSG00000286518_4 (sequence is synthesized)
ggcctgggacttccccccgaaccccctggctccccgaggaggtgtctggagtctccacagtgtctacttgcccagatgtgggtcaccgcaaaggcacgctggggcggggctctcactgtc

SEQ ID NO: 868959 - DNA, 120 bp, Artificial Sequence
  ENSG00000286518_5 (sequence is synthesized)
tctccagggcatggcgatttccgacctcaaggaatctaggggctctaaggagactctgggtgtgaatgctctggcattgttgccgtttcccgccggcactgcagcagggggactgagact

SEQ ID NO: 868960 - DNA, 120 bp, Artificial Sequence
  ENSG00000286518_6 (sequence is synthesized)
gtcccgtggagctcgcatgcagaagccggctcccctaacccccgtgctcccaagaaaccccagctctgaggagactcttgtgtgtgcctgagctcagccccgccccactgggtgtcctgc

SEQ ID NO: 868961 - DNA, 120 bp, Artificial Sequence
  ENSG00000286518_7 (sequence is synthesized)
tccttacgaggtggaagcatccatgtctggtcctgcggcggtgagagtttgatgcccaagctgctgatataacaacatctgggcaatttggactggtgaaggccattggtgcaaaatccc

SEQ ID NO: 868962 - DNA, 120 bp, Artificial Sequence
  ENSG00000286518_8 (sequence is synthesized)
ccaaaccccgctagctgagcctggagctcagccacagtccggctggttgtgtggagaagggccccagggcccgtgaactggaacgaatcagcccatcctttctcctcatacccagctgcc

SEQ ID NO: 868963 - DNA, 120 bp, Artificial Sequence
  ENSG00000286518_9 (sequence is synthesized)
cagcggatgtggaagaacggagatgctggaaactgcaatgccggatatctggatgacacaggctccttcctggatgatctgcttctcaggtggtagcatcccagccagagaccacccaga

SEQ ID NO: 868964 - DNA, 120 bp, Artificial Sequence
  ENSG00000286518_10 (sequence is synthesized)
tgctcggtgatgggctttgagctgtgtgctaagcccacccttggacgtgaactctgcttaagacatctcccttggaagccaaagctggcttccttcccaaaccgtgggcacgatgggcca

SEQ ID NO: 868965 - DNA, 120 bp, Artificial Sequence
  ENSG00000286518_11 (sequence is synthesized)
acagacagaggtgctgcagagtcagttttgaatgacaaatggaaccaattaagttcaatagcgcgctcgctccccccgagttccagcctgtacctacagctagtcacctttgacaaaata

SEQ ID NO: 868966 - DNA, 120 bp, Artificial Sequence
  ENSG00000286518_12 (sequence is synthesized)
tatcaaaggaattaagagtgtgtcccccacaatgatattacctggatccctttcaggtcctcaccagccacgttcagacatctatttaagcccaggaaatagaatcaaaatggtttatta

SEQ ID NO: 868967 - DNA, 120 bp, Artificial Sequence
  ENSG00000286518_13 (sequence is synthesized)
aaaatctaatcacaagcacttatatgacacaaatgattctgaactgcatccgccaaccccacggcctctccgaggggaggcagcatgcggccgattacccggaatttgaatgggggtgta

SEQ ID NO: 868968 - DNA, 120 bp, Artificial Sequence
  ENSG00000286518_14 (sequence is synthesized)
tagaagctgcagaacattttaatcctgatctttctttgtggattttgctattgctatttttttttctgttgaaaaagacaaagatgggaggacacattgtctttcctccctggagggagc

SEQ ID NO: 868969 - DNA, 120 bp, Artificial Sequence
  ENSG00000286518_15 (sequence is synthesized)
tgcagagatgacttattctggcagatctgcctctattgatgttaccaggatgtgaataaaaactcatgggaaaagaagaaaaaatcctgctgaatttaaagcagcacaacacggtttacg

SEQ ID NO: 868970 - DNA, 120 bp, Artificial Sequence
  ENSG00000286518_16 (sequence is synthesized)
ggtgggtccctgtctgctatcctgagccaggacacctccctggtgactgcattggagctttctcaagaggagggccttgtgcaaagatggcccctttcccctcagggtgggagcggctgg

SEQ ID NO: 868971 - DNA, 120 bp, Artificial Sequence
  ENSG00000286518_17 (sequence is synthesized)
gcttgggggagacactgtctttggggtgaggcatggttcgtggcctttgcttggcttttgactttctggagctctggatccttcacagatgctcagaacagccatggatacagaagagtc

SEQ ID NO: 868972 - DNA, 120 bp, Artificial Sequence
  ENSG00000286518_18 (sequence is synthesized)
tcctacggtgtcttcctgcccggggcccagccagagccagggctccaccacccagggctcaatcatagcactcttttctggtggccaagacccccgcaaacttctctccagacagaggtg

SEQ ID NO: 868973 - DNA, 120 bp, Artificial Sequence
  ENSG00000286518_19 (sequence is synthesized)
tcggagcctggcccgtgttgcggctcctgagctgggaagtccgccacgaggaagcatctgtcgggactgcctcctaatgaatgtcaggtgcctgcgtcagccacgggcgggtggctctgg

SEQ ID NO: 868974 - DNA, 120 bp, Artificial Sequence
  ENSG00000286518_20 (sequence is synthesized)
aaggaccagcaggttctcagcgatgcatgatttcggtaggttgccctcacctcctcccctctgttgggaatggatagactgttttctagaaggttccctgactctttgaggggattgggc

SEQ ID NO: 868975 - DNA, 120 bp, Artificial Sequence
  ENSG00000286518_21 (sequence is synthesized)
cctctggcatgtcaggtacagaatgttccccaaacccttcatctctgtcccctcctccagctctctgcagatgatgactttacttttacgttaagttgcttttgtttagtcttcctctct

SEQ ID NO: 868976 - DNA, 120 bp, Artificial Sequence
  ENSG00000286518_22 (sequence is synthesized)
aaacaacaactacttttaaatgattttttaaagtacaaagagttagtttgattcttcctcaaatgccttcttttgaagacaagcttgccttttcgatttcatatcccatttaattaaaac

SEQ ID NO: 868977 - DNA, 120 bp, Artificial Sequence
  ENSG00000286519_0 (sequence is synthesized)
agatttcctagtggtgtccaagaaactgacacccatcactgcaggctggaaatggctcaacatcattcatttgtattacacatctaagagctataaaacaaacccagtgtgaaggcaaag

SEQ ID NO: 868978 - DNA, 120 bp, Artificial Sequence
  ENSG00000286519_1 (sequence is synthesized)
tttccccatttgtctccagaataagacagactattgcaaaaacagagctaataaaactctgtcaacttcaacaacttggttagaggtcctgataacaagtgacagccttagctttttaca

SEQ ID NO: 868979 - DNA, 120 bp, Artificial Sequence
  ENSG00000286519_2 (sequence is synthesized)
gacaacttatagtgccttggaagcatgtcatgtgcagaatccgctacagtgtctttgaaaatagcacagtcaaacattcaaaatttaagtgacgttaatggggaagagaggaggaggtgg

SEQ ID NO: 868980 - DNA, 120 bp, Artificial Sequence
  ENSG00000286519_3 (sequence is synthesized)
tggttatagccatgtctacactactctttacagaagacatagatgtcagtggtccttcactcgtctcagaaaacaactcacgactacagcagcttgcatgatgaaatggaagatcatcat

SEQ ID NO: 868981 - DNA, 120 bp, Artificial Sequence
  ENSG00000286519_4 (sequence is synthesized)
ttgagctattccactgaagtcaagcatgaaatctatttagctggatagctacccatttcctgtgacctgcaaaagagatgccctattctttcaggatccttggaatgccacatgcccagg

SEQ ID NO: 868982 - DNA, 120 bp, Artificial Sequence
  ENSG00000286519_5 (sequence is synthesized)
cctacaaccctgtgtcaaggaaacacaaagatagagtggatttcagcaccacccaatgcagacgcatggctgctagtttatcagcataggtcaatgaatggttttaagttgctatgggtt

SEQ ID NO: 868983 - DNA, 120 bp, Artificial Sequence
  ENSG00000286519_6 (sequence is synthesized)
taagaggatctcttagttgatgggaatttttgaatcttttttttgcgtgggaccctttggcagttttgtaaaatgtacagactatttctcagaatgtttctaaacgtgtaagttatattg

SEQ ID NO: 868984 - DNA, 120 bp, Artificial Sequence
  ENSG00000286510_0 (sequence is synthesized)
ctggccaggcaaacagtgcgcctgcaggagaccccctgggtctttcccttcctttgtaccgctgtctcgctctcccttcctcaccctctttcttctacaaatatttatcagagtccttcg

SEQ ID NO: 868985 - DNA, 120 bp, Artificial Sequence
  ENSG00000286510_1 (sequence is synthesized)
ggggctaaggcatgctggcccacacactgtcaggatcacaaaaaagctaaatataaatatgcctcccagagcttcggatatcagaacccaagttagctgggacccaaagtctctggaagg

SEQ ID NO: 868986 - DNA, 120 bp, Artificial Sequence
  ENSG00000286510_2 (sequence is synthesized)
ctagaaagttaatacgggacgacgtctcttgggacaaggcaggttttatctgttaaagaagaaacttctggcttgtgtgagtcactcaggctgcctggactcctgggtctccccctggag

SEQ ID NO: 868987 - DNA, 120 bp, Artificial Sequence
  ENSG00000286510_3 (sequence is synthesized)
ggttgcatggtgggacttcatgcatgaaaaacagatttcacgatttcactaaaattggttcgaggcatcctgtgtgtccggccctggtctggtgatggtttccagggcgcaggagaaggt

SEQ ID NO: 868988 - DNA, 120 bp, Artificial Sequence
  ENSG00000286510_4 (sequence is synthesized)
gtgtgggtcagcagggttctctgggaaagaagacgggaagatggccttcagatttggcagccatgggccacctgactcttcacattgagccttggagctggccagctagagggcagttgg

SEQ ID NO: 868989 - DNA, 120 bp, Artificial Sequence
  ENSG00000286510_5 (sequence is synthesized)
cgtcctacagccaggcaggggaacttggaaatctgatgttccagaagagtgtcgtgaaggagcaaagaaaacccaccagcagatattgctggggccctggtttacaggcttagggtggga

SEQ ID NO: 868990 - DNA, 120 bp, Artificial Sequence
  ENSG00000286510_6 (sequence is synthesized)
cagcggcctgaccccaaggtgtagcagctggaacaagaacgggcggagcagcttcgttcaagatcagagaccggccaggtgcccaccgacgggagaatggatgaacacgccgtggcgttt

SEQ ID NO: 868991 - DNA, 120 bp, Artificial Sequence
  ENSG00000286510_7 (sequence is synthesized)
tgtgcagtggaatgtcactctgtagcagaaagggacaaatgacagcgtgggtgaggctcagcaaggctgtgctgagtggaagaagccctgcccagacgggcacccccggtgcaattccgt

SEQ ID NO: 868992 - DNA, 120 bp, Artificial Sequence
  ENSG00000286510_8 (sequence is synthesized)
gtctgtcacgtcccagcaccggcagatccacccagtggtggcaagagcccagacgaacggtggtcgctgttgtgcatgggcaggactgagcaggaaatggcaggaagcaggaagggcttc

SEQ ID NO: 868993 - DNA, 120 bp, Artificial Sequence
  ENSG00000286510_9 (sequence is synthesized)
ggggatgtggtaacatgtactttgatacgggtttgggttacacaggtctatgcgtttgcccaaactcagcaaatatttaagcaactgtaaacaaatgttggccatgagctagcaatatgc

SEQ ID NO: 868994 - DNA, 120 bp, Artificial Sequence
  ENSG00000286512_0 (sequence is synthesized)
aaggcagcaaacccagaagaaagggaagaacataaaaagcactggaaaagccctgttgctatgacgaacataggtctttcaactacctggcaagcaggagtttccagggatgtgggcacg

SEQ ID NO: 868995 - DNA, 120 bp, Artificial Sequence
  ENSG00000286512_1 (sequence is synthesized)
gacatctttggaggctgctattctacaatgcatgaaggatggaggaagtacgagttgtcaagctgcggaacctgggatctcctacctctggctttctcactacgtgaaatgaatttccaa

SEQ ID NO: 868996 - DNA, 120 bp, Artificial Sequence
  ENSG00000286512_2 (sequence is synthesized)
actgttcaagctaaaaaaaaaaatgcatatatcttagtttgctttgtggctttctgactgatattatgaacaaattcatgctatataattgtatccccttgataacttttcatactaaat

SEQ ID NO: 868997 - DNA, 120 bp, Artificial Sequence
  ENSG00000286512_3 (sequence is synthesized)
ttacactcatgaacaccaaagtacgaaatgaaaaattcaggcaagttacagcaaagagcccagataaacaagggaaaaaatgcttgtctatgagcaatctaccaaatcaggatcgctact

SEQ ID NO: 868998 - DNA, 120 bp, Artificial Sequence
  ENSG00000286512_4 (sequence is synthesized)
tggaagcattcaaaattagtctttattattaaagtacatttttttcacaggaagaaagacttcctgtatatgtctaaacggttgatgtaaaagtgcagctggccatacataggctaatcc

SEQ ID NO: 868999 - DNA, 120 bp, Artificial Sequence
  ENSG00000286512_5 (sequence is synthesized)
acattaatttaatattaaaatacagtatgccagctctttctaaatttgctccagagcaatagatgtcttgggagtccatattaatgaaacattatgttgctctaagcaaaaaggagccct

SEQ ID NO: 869000 - DNA, 120 bp, Artificial Sequence
  ENSG00000286512_6 (sequence is synthesized)
gcggaacagccctgaaaagaagaaaaagaccaggaaacttcacaggctgctctgctcaaaaagaagattaaaaatacccactagaagaattaggaaacaaatacaagagcacctttttct

SEQ ID NO: 869001 - DNA, 120 bp, Artificial Sequence
  ENSG00000286512_7 (sequence is synthesized)
ttaatttctccactttcctctttccacatatgatttaacacaagttttgccataataggctgtccttaataaagacaacacagaatgaattaataagtgaatgaatgaataaaaaacaaa

SEQ ID NO: 869002 - DNA, 120 bp, Artificial Sequence
  ENSG00000286512_8 (sequence is synthesized)
tgattggatagaatggttcatcatttgggatcaatatgtctatgaaggatagtaatgaaagtataagtagttgtcaacagtttccctcttctttctcactcagcagcagccacatgttct

SEQ ID NO: 869003 - DNA, 120 bp, Artificial Sequence
  ENSG00000286512_9 (sequence is synthesized)
cactgtccttaagcagatctagtagttgcgtggagtgctaaagtctaactgtgaactcatcttttaatgaagacgctaatttttaaatcacatggatgctattgatttgtttggcatatc

SEQ ID NO: 869004 - DNA, 120 bp, Artificial Sequence
  ENSG00000286512_10 (sequence is synthesized)
tcatgcatcaatacatataacatgcatcatcacatactataaattttttaaatgtatagacccaaaagattgttttaagacatagtagacccaaagtggaacaatgaatgtgtgaacaac

SEQ ID NO: 869005 - DNA, 120 bp, Artificial Sequence
  ENSG00000286512_11 (sequence is synthesized)
agtcaagaaaaaagtttagttagtgcttcatgagaatactcattcaattaggaagtacacccactgcttactctaacgtacgtcctcgtcctaactcagaaacacattttgatactgaga

SEQ ID NO: 869006 - DNA, 120 bp, Artificial Sequence
  ENSG00000286512_12 (sequence is synthesized)
tgacttccttggctacacagggcctccatttccccccaaaaagagggttggatcaggtggtggttatggcgtctcccagttcaaaaagccaacagcatcatttcagcgaggagtagttta

SEQ ID NO: 869007 - DNA, 120 bp, Artificial Sequence
  ENSG00000286512_13 (sequence is synthesized)
aactaatgtttaaagtattacaagtgccaagcactccaaatagactttaaccactaagtaagaaaccctgggctattctccaagagtcttaaaacttgcttagagtccaagaagacggaa

SEQ ID NO: 869008 - DNA, 120 bp, Artificial Sequence
  ENSG00000286512_14 (sequence is synthesized)
tttgatttgtgtgttaatacagacacactttttgttctctgtcccagcttttaatattacaagtcattttaaagtctaaaactacgatcaatgggtttttaatgtcatatttctcttaga

SEQ ID NO: 869009 - DNA, 120 bp, Artificial Sequence
  ENSG00000286512_15 (sequence is synthesized)
ttgttgctgttgttgttgttgctcggggtttttaatttcatttttcactagaaatcttagaaatctgtcaaagaataaagtatgtctttgggcatatatactatacttcaagttacatgc

SEQ ID NO: 869010 - DNA, 120 bp, Artificial Sequence
  ENSG00000286512_16 (sequence is synthesized)
attggaaattttacatatggtattatcattgctttcagatttagatatttcagctaacacacacgtagacttccctaaatcaatcctacccctccactaccacctccaccactgcttttc

SEQ ID NO: 869011 - DNA, 120 bp, Artificial Sequence
  ENSG00000286512_17 (sequence is synthesized)
aaaggatttagcccattacacaaatgttgcttatatgtatttcttccaggcagctcccattgtctgcaagtactctcttcaaaaacaaattcaaaagtaaagttaaatgcagtcatatta

SEQ ID NO: 869012 - DNA, 120 bp, Artificial Sequence
  ENSG00000286512_18 (sequence is synthesized)
cagagatagcagcaacaatatttggttaacataacttcccaaaatgtaatgtgtggttcgaataaatttgttgggaagtgaatgtttgcagtagaagagtataagcagatataaacatca

SEQ ID NO: 869013 - DNA, 120 bp, Artificial Sequence
  ENSG00000286512_19 (sequence is synthesized)
gaacctttacgattaaatcaacagaacgccattgaaatgttctatatcaatgaagaatggctttaaagtacaatgctttagtaaacacagaccctcactttaatcagtaattttaaactt

SEQ ID NO: 869014 - DNA, 120 bp, Artificial Sequence
  ENSG00000286512_20 (sequence is synthesized)
ccctttcaccaaacatttcacgaatgcctgccagcatgagatataatcggttaatgtaaggttcaccctcttctcctttgtctccactatacacatattttgaaaatggaaagacaaaaa

SEQ ID NO: 869015 - DNA, 120 bp, Artificial Sequence
  ENSG00000286512_21 (sequence is synthesized)
aatggaaaccagggtatttacaaacgtaattattagcaccacaaagatccataattcccattattttatacgtatattggaaatggtttgtagctgcatatgataccaatacgtattcac

SEQ ID NO: 869016 - DNA, 120 bp, Artificial Sequence
  ENSG00000286512_22 (sequence is synthesized)
tcctatcaaaagataacagtcacacctaaaggcacatttctgtgaaagccatttcacaaaacaggaaaaaaactgaattttgaaatgatagagctttgcgtccttctgccaggtgtttta

SEQ ID NO: 869017 - DNA, 120 bp, Artificial Sequence
  ENSG00000286512_23 (sequence is synthesized)
tttttatcacatagtttctgtaagagaaatttaggcacaaatagtctttctcaattaggccagctggtggcggtgttgactgcataccagaacagcctaaacctggcaagagcttctcat

SEQ ID NO: 869018 - DNA, 120 bp, Artificial Sequence
  ENSG00000286512_24 (sequence is synthesized)
tgtttcagaagagtatttcccaagaaatacaaatgagttcatcttatctgtgttttgaaactttcaaagatattattccctcatatcagcgactactgtgaactccctttgtaaagcctg

SEQ ID NO: 869019 - DNA, 120 bp, Artificial Sequence
  ENSG00000286512_25 (sequence is synthesized)
atgatccgtctatttctcttggctctgtgtacagcattcaagagacaggacgtgtttcatttccaaggcttagttaatcgatggatatacattttatctgttcacagctagcaccactgt

SEQ ID NO: 869020 - DNA, 120 bp, Artificial Sequence
  ENSG00000286512_26 (sequence is synthesized)
ttaccttgcccatgacagggctttgaaactacatgggaattttcctataagcagaagaaagggcaacatctgcatgagagaaacacaagtttatattcggagttagaaacattaaaatcg

SEQ ID NO: 869021 - DNA, 120 bp, Artificial Sequence
  ENSG00000286512_27 (sequence is synthesized)
tccaggccgctgtcagattaatgtgtatacagacccactctgggtatgcaaatcaggatcttcccacgaacttctctttaattgtgcttttacttgatatgtccttatctgtgtgtgtgt

SEQ ID NO: 869022 - DNA, 120 bp, Artificial Sequence
  ENSG00000286512_28 (sequence is synthesized)
gtgtaatctgcctacttaatggaacaatctctgacaccagggctttgaatcatgccaacaagataaactgaaaccgatcatattgtcaaagaggcatttataaatgtaaatacttctgta

SEQ ID NO: 869023 - DNA, 120 bp, Artificial Sequence
  ENSG00000286513_0 (sequence is synthesized)
gagtccggcatgcagtgagggcccaatgaatgtggaccctaaatatgcttttgggcaaggtaaataattgagactccttgaaggagtgattattaaactattctggatgaaaattttttg

SEQ ID NO: 869024 - DNA, 120 bp, Artificial Sequence
  ENSG00000286513_1 (sequence is synthesized)
aacatttggtgaaaagttgtggattcactccccagataagttcacacctctgcatatacgtaaagtgctggatacaatttcaggccattcagagatccttctgaaagtccaccattggat

SEQ ID NO: 869025 - DNA, 120 bp, Artificial Sequence
  ENSG00000286513_2 (sequence is synthesized)
gccaggatatgacaggctttactagaccaagaagttttaaccaattatttaagtataaacatatacactcaaagtcctgttgttgcttcatcttctgagtgtctcaaaagtcctgttctg

SEQ ID NO: 869026 - DNA, 120 bp, Artificial Sequence
  ENSG00000286513_3 (sequence is synthesized)
aataactcctctgctaggaagcttcaggcccttgagaggctagccatcatttctgtacattttctgaaatttcattgtgtgcattatatatagtcttaagcaatcccataattgttcagc

SEQ ID NO: 869027 - DNA, 120 bp, Artificial Sequence
  ENSG00000286513_4 (sequence is synthesized)
acaagcatctcatctttcctagccctgtgcatgcatacatgtgtgaggaggtgtattttcatgccagcatgcacagagcacaatcttcctgaggatcaatttccttatctgtaatatgga

SEQ ID NO: 869028 - DNA, 120 bp, Artificial Sequence
  ENSG00000286513_5 (sequence is synthesized)
gacaccttatcagctcagagttgctaagaaattgaaatgagaatatgaatgtgaacattttttaattacttataaaggaccataaaaattggtgacatgtcattattagtgtcatcatat

SEQ ID NO: 869029 - DNA, 120 bp, Artificial Sequence
  ENSG00000286513_6 (sequence is synthesized)
tgttattatgtataaaacctcaatgcaatttgcagccttccttatcttttcaggaagttacttacaaatgtttgtccacttctaaaataatgatgttataactttccaatagcattactc

SEQ ID NO: 869030 - DNA, 120 bp, Artificial Sequence
  ENSG00000286513_7 (sequence is synthesized)
acattggcaacatcctctgctccagaagaagaaattgttcatagcctgggtccatcttatgagtttaatgagtaattctgagtcccacagggctgaaattgggtgagttcacagtggcat

SEQ ID NO: 869031 - DNA, 120 bp, Artificial Sequence
  ENSG00000286514_0 (sequence is synthesized)
ggctcctgctttgccatgttaagacgtgcttgcttccctttcgccttctgctgtaattgtaagtttcctgacgcctcccggtcatgcttcctgttaaactgtggaactgtcttgtttcag

SEQ ID NO: 869032 - DNA, 120 bp, Artificial Sequence
  ENSG00000286514_1 (sequence is synthesized)
tgagaatgtaaagtacgtgagctatgtgctttgtgatgaagtcgttgatttatttcactttggaacaagcacaccacaacaaagtgagaatgagaaggtaattcagagggagaagaagga

SEQ ID NO: 869033 - DNA, 120 bp, Artificial Sequence
  ENSG00000286514_2 (sequence is synthesized)
aacggaactgtacgtagaaatatatcctcatatgaacttagattctgaaataaatctaggttgtaaaaacaccaaaaggctgtttccatgagtgagtcaaccaagaggccctctcaggac

SEQ ID NO: 869034 - DNA, 120 bp, Artificial Sequence
  ENSG00000286514_3 (sequence is synthesized)
catatatgaaatccaaattagtcaggataggtaagattgtgctgcggtaacaaagaaaacctttattttcaatggcttcatgctgaagcagcctcgctgtcgggggtgaatactggaggt

SEQ ID NO: 869035 - DNA, 120 bp, Artificial Sequence
  ENSG00000286514_4 (sequence is synthesized)
tcgccatctcatgctaggggatgaggatgtgggcacacaagaagtgagtttaaaagtggaggcttaatagtgagagagatttaatagagagaaagagaaaagctctctctcctgcagaga

SEQ ID NO: 869036 - DNA, 120 bp, Artificial Sequence
  ENSG00000286514_5 (sequence is synthesized)
agctctctctcctgcagagagagaggggctcccgactgggtcttccggtcccatggggaagcgcacagggttttatagactggcttgaagaggcggtgtctgatttacatagggcccaaa

SEQ ID NO: 869037 - DNA, 120 bp, Artificial Sequence
  ENSG00000286515_0 (sequence is synthesized)
aagaagtgagaatgctggacatatgggtcttccattcaaaagtttcctgaaagtgacacatggattttctttgacgatacctggcctggaagtggagaggtgacttcagcaagaaaaatt

SEQ ID NO: 869038 - DNA, 120 bp, Artificial Sequence
  ENSG00000286515_1 (sequence is synthesized)
ctagcaacccacctatgttctgtgtgtctgcattacacaatggactttcagagataatttcaaagttatctcaaaagttctgagactactgaatatttggaaaatgcactggactaaatg

SEQ ID NO: 869039 - DNA, 120 bp, Artificial Sequence
  ENSG00000286515_2 (sequence is synthesized)
ggcttacacaatgagggtggctggttatgcatgtctaaaatttgtatgacaggccttcaggaagaacaggctggaatgacggctgggtatgagctgaagctgctgttcacagatagaatg

SEQ ID NO: 869040 - DNA, 120 bp, Artificial Sequence
  ENSG00000286515_3 (sequence is synthesized)
tcttcattaagcctcagttctgctcctgaagcctgtcaactgattggatcaggtccaactagattatttaggataatcttccttactgaaagtcaactgattatggatttcaatcacttc

SEQ ID NO: 869041 - DNA, 120 bp, Artificial Sequence
  ENSG00000286515_4 (sequence is synthesized)
tacaaaataccttcctggcaaaacctatattagagtttgattaaataactagagcctagtcaagttaacacataaatggccatcacaccagcttgtctcactttatatatatttagtaca

SEQ ID NO: 869042 - DNA, 120 bp, Artificial Sequence
  ENSG00000286516_0 (sequence is synthesized)
ggaagaatctgcacagaaggatcctacgtatggctgctcatcccaggatccaaagagcattaatagctggaggaaaggccatgtgaggacaaactggttgtctgcaagccaagaagaaag

SEQ ID NO: 869043 - DNA, 120 bp, Artificial Sequence
  ENSG00000286516_1 (sequence is synthesized)
cctccaccagaaaccaaaccttgtcagaccttgatcttggacttccccgcatctagaactgtaagaaataaatttcagttaagtctatggtattttgttacgacagcccacattgactaa

SEQ ID NO: 869044 - DNA, 120 bp, Artificial Sequence
  ENSG00000286516_2 (sequence is synthesized)
tacaccaaaccaagacaaagcaaaagagttgtttgctatatacaactagaattacttctcatatccaaaatcagtttctgccctttcttaatactccaaattatatcttgttgtccttca

SEQ ID NO: 869045 - DNA, 120 bp, Artificial Sequence
  ENSG00000286516_3 (sequence is synthesized)
cattcatcattttactccacctacgatctctccttttagatacagtaaattttaaaaaatacaaattttacatcatcagttgttttagtaaattcatttatgtattaacatctgtctacc

SEQ ID NO: 869046 - DNA, 120 bp, Artificial Sequence
  ENSG00000286516_4 (sequence is synthesized)
tgatcaaatcaaagaagttaatttccacctacttttcctttagcccacacttacttaaaatcacttatttttaattttatgcaaataatatggcagaaaattgagcatgagaaagtaaaa

SEQ ID NO: 869047 - DNA, 120 bp, Artificial Sequence
  ENSG00000286516_5 (sequence is synthesized)
ttccagatatatttgttttctctaccatcagctgaaacattttattcacgttgtctttaagtaaatgctacagtaatatttttacaaaaaagtaaaattattttaatatctctacatact

SEQ ID NO: 869048 - DNA, 120 bp, Artificial Sequence
  ENSG00000246627_0 (sequence is synthesized)
actacaggctgctgacgtagaccctgctgtcctggagctcctcctcactcggtcgaccccgcgcgcgcacacagcccgcgtcctcttcgcccccggctcggtcctgccccgcgtccctgc

SEQ ID NO: 869049 - DNA, 120 bp, Artificial Sequence
  ENSG00000246627_1 (sequence is synthesized)
agttcacaaagggtaagagggcgccattggggctctgtggggcgcccccgctgaggatgttgtcggccgcgctctccatctcctctatggtcatgtcgcaggcgtcggccagctcctggg

SEQ ID NO: 869050 - DNA, 120 bp, Artificial Sequence
  ENSG00000246627_2 (sequence is synthesized)
tggtgacctcgatgaacttgggatcttgagcaaactgccccagtccttctgaaatcaagacctgaaggagcggggtgggagccatgaagaaccaaaggaacattactcctggagcccagc

SEQ ID NO: 869051 - DNA, 120 bp, Artificial Sequence
  ENSG00000246627_3 (sequence is synthesized)
agggggtatctgagaaaccattctccctggtgaaactgctgagacaggcccactgcccattgcctgctgctgcctttccaggggtgaggtatctgtgcaaacacggcgcatgcccctgcc

SEQ ID NO: 869052 - DNA, 120 bp, Artificial Sequence
  ENSG00000246627_4 (sequence is synthesized)
ttgcttctgctgggaagggccagcaggtgacccttaagcttctctgtcctccctaccggctgcttagtgcctggctatgggaaaatcggctcctgagccagcgggtcgggggaagctgag

SEQ ID NO: 869053 - DNA, 120 bp, Artificial Sequence
  ENSG00000246627_5 (sequence is synthesized)
tgcagcctggcactcgctcctttcaggcatctgtttgtcttgctccttgcccacgccactcattctctccttgccctgcttagtttttctttggcactcctgaccttcctgatgtgttat

SEQ ID NO: 869054 - DNA, 120 bp, Artificial Sequence
  ENSG00000246627_6 (sequence is synthesized)
ctccttcatggccttgtccagctcctcctcagcggtgagatctccagagatggcccgtcggatctcaggcccgatgtcatgcagtgtgcgcaagccagcctggaatccaaggggaggatg

SEQ ID NO: 869055 - DNA, 120 bp, Artificial Sequence
  ENSG00000246627_7 (sequence is synthesized)
gtgaggaccacgctccctttcctccaagctccccagccagccacagcctcgggccaagacctgtccctccagggccctggcatcctccacccagccagtcgaccctccggaaggtttgtg

SEQ ID NO: 869056 - DNA, 120 bp, Artificial Sequence
  ENSG00000246627_8 (sequence is synthesized)
tgtgtgtgaactgggggctgggctgccctctgatggaacaatccactcgcccatccaggagggatgaaggctcattaggacggggcaccaggggtcaggggctgtcacgggagcctcagt

SEQ ID NO: 869057 - DNA, 120 bp, Artificial Sequence
  ENSG00000246627_9 (sequence is synthesized)
gaagtatttgagagatctgggggctatgacagcaggcagaaccatggagggcagtcggtgggtggcaggtagggaagggcacatcacccccttctcacagccatctttggaaaggtctgg

SEQ ID NO: 869058 - DNA, 120 bp, Artificial Sequence
  ENSG00000246627_10 (sequence is synthesized)
agctctctgaaaggttccctctgcagggacctggcctccagcctgctggggagggaccgggaccctgactggaggtcagaggcaatgaccaggaccttcctggagtgtgggcccgccccc

SEQ ID NO: 869059 - DNA, 120 bp, Artificial Sequence
  ENSG00000246627_11 (sequence is synthesized)
aggccctcacctgcagagacagcgcgttcctctgggagggcttgcccacaaggccctgctctttgcgcttcttgaacttccggaagtactcctggatcaggaacgtggcgtagaacttgc

SEQ ID NO: 869060 - DNA, 120 bp, Artificial Sequence
  ENSG00000246627_12 (sequence is synthesized)
agaggggagagggggtaagaggggagcaggggaattcagttgaacttcattcattttttttttcagcatccaaaactttttaaaactttaatatttttggagaggtaatacattcacatg

SEQ ID NO: 869061 - DNA, 120 bp, Artificial Sequence
  ENSG00000246627_13 (sequence is synthesized)
gcttaaaaagagagaaaaaaaaccataaaaaggcttatggtcaaaagtctctcccaccacagcccttatctgcctagtcaccacctcctgtagatcatctagtttcttgagtattttctc

SEQ ID NO: 869062 - DNA, 120 bp, Artificial Sequence
  ENSG00000246627_14 (sequence is synthesized)
agagattcttagtgcaaattagttatgtaaatcatcaaacatattatctcctgttttttttatgcaaaaggtagcctaccatcaaaattatttcccgcttttttttttttaactgaactg

SEQ ID NO: 869063 - DNA, 120 bp, Artificial Sequence
  ENSG00000246627_15 (sequence is synthesized)
atacatttgattccagagcttcaaatgtccctcatcaactggccactcttccaagtgcaagtgcaaaacggttcagcttagctcggagggaggggctggtggaaggagggctttcttccc

SEQ ID NO: 869064 - DNA, 120 bp, Artificial Sequence
  ENSG00000246627_16 (sequence is synthesized)
atggaagtttggatttttctttcaaacccgattgagtttttgtgccaggtggcttggctgcatccctgctgggctggatacccaagattatatgtgacatcatcagtccctttcctggga

SEQ ID NO: 869065 - DNA, 120 bp, Artificial Sequence
  ENSG00000246627_17 (sequence is synthesized)
gtaaacctgatggtggagaagccataagttcttagaggaaacatttcatgcctggggaggagccccttggatctacctcctggttctttgtgaagagatgccacgggcccaagagacagc

SEQ ID NO: 869066 - DNA, 120 bp, Artificial Sequence
  ENSG00000246627_18 (sequence is synthesized)
tggggattaaatctaggggctggtgagggttctcctcctcctacctgtccctccaaaatagccacatccatagcagtgatgacccctcccttctctggcaagcaccccctttccacgtgg

SEQ ID NO: 869067 - DNA, 120 bp, Artificial Sequence
  ENSG00000246627_19 (sequence is synthesized)
gagggaaaaacccagggtcccctgtccagcatagtcaggaaggaagaactgcatggtgggacaagcctggagtcctacctggagtcctaggttccctggggcctgggtttgaatcctgaa

SEQ ID NO: 869068 - DNA, 120 bp, Artificial Sequence
  ENSG00000246627_20 (sequence is synthesized)
tctgctgtggactctccaggtaaccttgggccagcaacttagcttctaagaactttagttccctgagcaaacttcacagaaatgttgtcaggattcaataaaacgatgtatgtaaacatc

SEQ ID NO: 869069 - DNA, 120 bp, Artificial Sequence
  ENSG00000251061_0 (sequence is synthesized)
ctgctcaagatcggctgaaggaagcaaagctacatttcttgttttctggttcctatgaacagaagcagaattttttcacaacagaaagtgaagcaacgaagttttgagggttgctcctca

SEQ ID NO: 869070 - DNA, 120 bp, Artificial Sequence
  ENSG00000251061_1 (sequence is synthesized)
acactatgacctggaactcctggcctcaagtgaccctcctgcctcagcctctcaagcagctgggactacaggctcctgacaccatatccagctgaacctgattttatattccagtggctg

SEQ ID NO: 869071 - DNA, 120 bp, Artificial Sequence
  ENSG00000251061_2 (sequence is synthesized)
acaaactatttaactcctctgaactacagattctacccacctaatttttgccagtttgtatgcaaaagaacaacttatcactttttattttcaagccacttccctccagccatgtacatt

SEQ ID NO: 869072 - DNA, 120 bp, Artificial Sequence
  ENSG00000260536_0 (sequence is synthesized)
cctagataaccaaattaatgaagctactggatacaacctcaatagagtacagagaaagcttctgcactccaaggactaagctactagaccatgtaaatcaggtagctcacacttctgact

SEQ ID NO: 869073 - DNA, 120 bp, Artificial Sequence
  ENSG00000260536_1 (sequence is synthesized)
ccaaggatacgaataccacaaggtagtgtgtgcagatacactgtttttcccacagcctgacaagcccacgtggctccattttccatatttacaaagggctgcaaatgcaaaaactttcag

SEQ ID NO: 869074 - DNA, 120 bp, Artificial Sequence
  ENSG00000260536_2 (sequence is synthesized)
gaggggccagataatgtaaatgagccaagagaggtggtaacaggtaagggaaggactttgacaacctggagacaaatcctttatatttaataaataaataaataaataaataaaactctg

SEQ ID NO: 869075 - DNA, 120 bp, Artificial Sequence
  ENSG00000259277_0 (sequence is synthesized)
aaggctgggggatgactattcattcacttaggaaaatcttgggggtggggttctgctaagggctgaatgtgctcctcccaaattcagaggttgaagcctaatccttaatgtgatgctatt

SEQ ID NO: 869076 - DNA, 120 bp, Artificial Sequence
  ENSG00000259277_1 (sequence is synthesized)
ataatgtggggcctttgggaagaaattaggccctcatgaatgggaatgagaagaaaagtcacgagagagatgctctctctctccccgatgtgagagcacaggaagaaggcagccatctgc

SEQ ID NO: 869077 - DNA, 120 bp, Artificial Sequence
  ENSG00000259277_2 (sequence is synthesized)
aaaccaagcagagggccctcaccaggaatcaccagccccttgacgttagacttcccagccttcagaactgtgaggaatgaatgtgtgttctctaaactaatctatgatatttttgttata

SEQ ID NO: 869078 - DNA, 120 bp, Artificial Sequence
  ENSG00000259277_3 (sequence is synthesized)
gaactaaggctcacatactcacaagaaagaagaaaaatggtagtgttgaaggaagccaactgatgagaaagacagggtctcactatgtggccccaggctggtctcagactcctgacctca

SEQ ID NO: 869079 - DNA, 120 bp, Artificial Sequence
  ENSG00000259277_4 (sequence is synthesized)
caaagggctgagatgacaagcatgaaccacggtgcctggccagtcatttttattataataattataatatattataaattattatatagtacatatcatacattacatcatacatcacta

SEQ ID NO: 869080 - DNA, 120 bp, Artificial Sequence
  ENSG00000259276_0 (sequence is synthesized)
aacacaaaaagcccaacagtatccagaaatgtaaactgagcaaggaagaacaacaggagatacagctacaatgaatctaggctttgttctctaacaagggtggaccctgtcaatcatata

SEQ ID NO: 869081 - DNA, 120 bp, Artificial Sequence
  ENSG00000259276_1 (sequence is synthesized)
agaaaggagatcctgcctgagctacaaggctgaacaaaaggaagcaaaaacccaccatccggacatagaagccaacacttgagtcaaagtcttttcagggaattggacagtatctgagtg

SEQ ID NO: 869082 - DNA, 120 bp, Artificial Sequence
  ENSG00000259276_2 (sequence is synthesized)
gtatcatggacataaagatcctaaaaatgagattctcctaaatacattatatgaggacaaaaattttaaaacatcaccgtgatctcacagagaaaatcacatttctgagaaaccaaaatg

SEQ ID NO: 869083 - DNA, 120 bp, Artificial Sequence
  ENSG00000259276_3 (sequence is synthesized)
aataatatcttggaacaatttcaaaacaccaagttaccaactgctggcagccgaggcccagcaagtcaaccacctgacagtgattatggagagacaatgacaacactctaccacaaatca

SEQ ID NO: 869084 - DNA, 120 bp, Artificial Sequence
  ENSG00000259278_0 (sequence is synthesized)
gaccaccagtagtgatagggcttgctttactcaaggaggaagtccttaacaactcgatctacccaggcaaacacaacaatcattcagctttttgtttcattttttccttaacctatcacc

SEQ ID NO: 869085 - DNA, 120 bp, Artificial Sequence
  ENSG00000259278_1 (sequence is synthesized)
atgaaacaaaatacacacatatagaaatgagcaaagagctttaaatactagctgcccaagagatgcttagcctcctgttccagccactggagttgaggggtggaggcacgtgatgtcacg

SEQ ID NO: 869086 - DNA, 120 bp, Artificial Sequence
  ENSG00000259278_2 (sequence is synthesized)
gaaagggaatgctcgctagtcttcaagcagtcccctaagggatctttgatctcaggctgaatggaggaagaagagcttttctagttgacgcctgtcacagagatctgatgaagtcaatgt

SEQ ID NO: 869087 - DNA, 120 bp, Artificial Sequence
  ENSG00000259278_3 (sequence is synthesized)
aaatgagtccgcagaagcttgatagcctatagaagtccttgaaaatcccgaatggcacgagaaggttgaaaactagtcaagatgctgatatcttcaagaagttaaatataacctaaaaaa

SEQ ID NO: 869088 - DNA, 120 bp, Artificial Sequence
  ENSG00000259278_4 (sequence is synthesized)
attatttgtcacagaataaggttggtttaaaaaattgtaaaggggaggagagtggagattcaagcctagagaggaaggctgaataagaagaaagtaattgtgaagtcaactgtaaaatat

SEQ ID NO: 869089 - DNA, 120 bp, Artificial Sequence
  ENSG00000259278_5 (sequence is synthesized)
ttcctgggtctcacctggtaaatccacacgggcttcctgaaagaggaaggctagagttacttttgagttgcctttcaaatgataagcagggtccttgagtaaacaggaaatgaaagactc

SEQ ID NO: 869090 - DNA, 120 bp, Artificial Sequence
  ENSG00000259278_6 (sequence is synthesized)
gagagagtagctgaggaaggatgcagaagtgaaaaggagaggggagccatcagcaccccagatttaatttgatggagaattttctctatttgtttatgtgtgtgcccgtctttattagac

SEQ ID NO: 869091 - DNA, 120 bp, Artificial Sequence
  ENSG00000259278_7 (sequence is synthesized)
tgtctgtttgcctttcaagggctgggactgtgcctcattcaccttcatattctagtataatgcaagcttaggaaattattgtctaaatacatacactcagacataaatggatgagagtaa

SEQ ID NO: 869092 - DNA, 120 bp, Artificial Sequence
  ENSG00000259278_8 (sequence is synthesized)
attttgccaccagaaaatgaggcttgcttttggtcttttgaaggaagactgcagtgaacagttaaattgactttaaatttagcagcattgggcaagaatagaaatgttctaatcctgtct

SEQ ID NO: 869093 - DNA, 120 bp, Artificial Sequence
  ENSG00000259278_9 (sequence is synthesized)
cctcctacggaatgtgaattgtggtcaaagtaatatgtttttgccttctgtgatttcgatcaaatttcataggccagacagggcgtagggagccaggctgcacagccactctccctggta

SEQ ID NO: 869094 - DNA, 120 bp, Artificial Sequence
  ENSG00000259278_10 (sequence is synthesized)
aacagtgtcacacctcccttggacagcccagggtaccatgtgtgccctggcgttacagacacctcaccagggcttgtctgttctccctgccttgtttctcagcccagtgttcatgtggag

SEQ ID NO: 869095 - DNA, 120 bp, Artificial Sequence
  ENSG00000259278_11 (sequence is synthesized)
tttggcttcctcttcttagaactgggaaaggcaacgctgtgcaggtgtgagaggtacatacacatgcgcccagaagatgctgccccagaaaaacatacccagggcctgtatttgactcag

SEQ ID NO: 869096 - DNA, 120 bp, Artificial Sequence
  ENSG00000259278_12 (sequence is synthesized)
agtttaaggtcttacttttcattagaaaataagatcactagctctaaaatttccactggggaagactgggttggcttagcagggcagtgctatctgatgggcagctgtattctataaagt

SEQ ID NO: 869097 - DNA, 120 bp, Artificial Sequence
  ENSG00000259278_13 (sequence is synthesized)
agatgagggaagatgacagaatggcatgtctgtgggcagaaagcagaagggaaattggcttcccttcataggccactaaggaaagggttatccagtggcctgctggatttgacactatct

SEQ ID NO: 869098 - DNA, 120 bp, Artificial Sequence
  ENSG00000259278_14 (sequence is synthesized)
gcctgccacatctgagctcagcatttttgctttgacacgcatgggtcattctacccattgagcttcagcaattccctattacagatgcttattggcaacagaatcttaagtccaataaag

SEQ ID NO: 869099 - DNA, 120 bp, Artificial Sequence
  ENSG00000259278_15 (sequence is synthesized)
gagcaaagagattttactttggaaggaaatactatggattcttcagtcattcagaggcctcacctcctcccttaatgagtgctcccaatgtaaaggtataatgactggctaactaaatgc

SEQ ID NO: 869100 - DNA, 120 bp, Artificial Sequence
  ENSG00000259278_16 (sequence is synthesized)
tttgggggtataggaatgaggacacacatctagaaaagtggattttagaagaagaaaagacagtataatgaaaacaagtttaagaaagagcaaaaataaaatttgacttatgtatatcaa

SEQ ID NO: 869101 - DNA, 120 bp, Artificial Sequence
  ENSG00000259278_17 (sequence is synthesized)
agtccttaacaactcgatctacccaggcaaacacaacaatcattcagctttttgtttcattttttccttaacctatcaccatgaaacaaaatttcttcaatctctcatccctcttccatg

SEQ ID NO: 869102 - DNA, 120 bp, Artificial Sequence
  ENSG00000258580_0 (sequence is synthesized)
cagacactgatttggatactcgaggtcctctgactgagtttcctaaacaagaaatgatacttcacatgcctgaaaatgaataatctagaatatttcattaacattcagctgaccagtttt

SEQ ID NO: 869103 - DNA, 120 bp, Artificial Sequence
  ENSG00000258580_1 (sequence is synthesized)
aaataagagcagttgggattgcattcaattaaactggagtctataaggaacaacagttaaaaatgggaacagaggtatcccaagagaactcttactgctatagtatttgtgaggtcatga

SEQ ID NO: 869104 - DNA, 120 bp, Artificial Sequence
  ENSG00000258580_2 (sequence is synthesized)
tcaagaagaaaagaaaatgaatagcctagttcagtaattcccctcatttggaaaggaatcaagaacccctttgtgattctgttgacagctatggtccctctcccaagaaaatgtctactt

SEQ ID NO: 869105 - DNA, 120 bp, Artificial Sequence
  ENSG00000258580_3 (sequence is synthesized)
tgcattcaatttcaataaatttccagaagccttgatgtgcatccacaggttctatgtgagaaaaccctcttcttggatgatttctaagtctacagtgttgtatacttcacaggaataaaa

SEQ ID NO: 869106 - DNA, 120 bp, Artificial Sequence
  ENSG00000258580_4 (sequence is synthesized)
gttgggattgcattcaattaaactggagtctataagagtgtcatgaggcaagatggagtttcttattgaaggtgaaggccaagcaagaccagcgacagcatcatgacagagcatctcatg

SEQ ID NO: 869107 - DNA, 89 bp, Artificial Sequence
  ENSG00000258580_5 (sequence is synthesized)
gcttgtgcagaaaatatggagcattttaaattgaccaatcttaagtaagtgaagaagacaaagttggaacgaccctccctaaactgcac

SEQ ID NO: 869108 - DNA, 69 bp, Artificial Sequence
  ENSG00000258580_6 (sequence is synthesized)
tggacccccacccaggaaatgattcagcacaagaagacagctctaactccctatgatttcatctctgac

SEQ ID NO: 869109 - DNA, 120 bp, Artificial Sequence
  ENSG00000258583_0 (sequence is synthesized)
aggtctcggggctggtagtagcgctgcctgcaaaccagcaccaaggctgcaaacgaagccagaaagatggtggccagcacacctatggcaactatcaccacggtctccatgcttccgggg

SEQ ID NO: 869110 - DNA, 120 bp, Artificial Sequence
  ENSG00000258583_1 (sequence is synthesized)
agctcctgactcagtcccgttcacatcgtcctcatgggctaaggctgctggaagtggcaaactgggggaagaggatggcaggagctaggttcctccacgacacctccagagacctgaggg

SEQ ID NO: 869111 - DNA, 120 bp, Artificial Sequence
  ENSG00000258583_2 (sequence is synthesized)
cctcaagctgcagctccggggcacatcccgctgcgctcccacgacggccccgcggatggcaaagtcagcggcatcgcctatgcaggcaatcaaaggatgttgatggataagtgtttcagg

SEQ ID NO: 869112 - DNA, 120 bp, Artificial Sequence
  ENSG00000258583_3 (sequence is synthesized)
atgacaaaagggactttgctgatgtgattaaggttaagaactttgagaagggaagattatcctggattatacaggtcgacgtttatttctttctgaactttcctggaggatcatcggcca

SEQ ID NO: 869113 - DNA, 120 bp, Artificial Sequence
  ENSG00000258583_4 (sequence is synthesized)
tactccagcagaagggtggatttgaaaaaataacgtttccacggcaacagtggcagcaattcaaaggaagacgttggagaattcacatgctattttagctggctctgtgattgcaatcac

SEQ ID NO: 869114 - DNA, 120 bp, Artificial Sequence
  ENSG00000258583_5 (sequence is synthesized)
acaaatcattacattccagcgagatcccatcaacagaaggtttttccatttcagtctgtcaagtgttcaaattctatcttcagcatagtgagcccaaacaaaaccaattcctttcatgcc

SEQ ID NO: 869115 - DNA, 120 bp, Artificial Sequence
  ENSG00000258583_6 (sequence is synthesized)
ctctactggatatttgaagttaaacgtcaataacactgcaaagtaaccaaaataatgatacacataatatccagaatgttcttttatagcctctttaaataaaaattcgtttacattggt

SEQ ID NO: 869116 - DNA, 120 bp, Artificial Sequence
  ENSG00000258583_7 (sequence is synthesized)
tttcttattgactcaaagtgattgcatctaaaatatgataacaagacaggattctcactgccgtatctcccgatgccaatctccaaggagatactcccaaagtcccatccagttatatca

SEQ ID NO: 869117 - DNA, 120 bp, Artificial Sequence
  ENSG00000258583_8 (sequence is synthesized)
tcaggttgaaattccaggatctcttggtgatgggtagttatctccaagtgtggctcctggggtcagatcacctacagtctaagagaaggttctttttctccgccaatggtgatagatttg

SEQ ID NO: 869118 - DNA, 120 bp, Artificial Sequence
  ENSG00000258583_9 (sequence is synthesized)
gcaccaaaaaaagaagagaagaaacatgacagtcattgtttccacagtgatgagtaaacagaaacatctgataacttccacctagtgcatggagagctagaatttgaagtagggctgacc

SEQ ID NO: 869119 - DNA, 120 bp, Artificial Sequence
  ENSG00000258583_10 (sequence is synthesized)
aataccaaagcctgatgtctagtgaaattcacacaatgctgcaaatctgaagactctgcagcagattttgtaggtactttcagcagaggagtttcagaaatgctttgcacaaacacaggt

SEQ ID NO: 869120 - DNA, 120 bp, Artificial Sequence
  ENSG00000258583_11 (sequence is synthesized)
tcaccaagtgagtgatcacacgggaagaccacgtgggaagattttaggttgttttattaaagttcattgctgagaacacaaaggctgatgccacagaggggaaaacgccagatccaccac

SEQ ID NO: 869121 - DNA, 120 bp, Artificial Sequence
  ENSG00000258583_12 (sequence is synthesized)
cgaacagctaaagccatatgcgcctgctccatgaatgcccatttttcatctttagtgggcttcaaagttaaatagcacagacaacacaaaggaaaatatgaccgcagcaaaagacagaaa

SEQ ID NO: 869122 - DNA, 120 bp, Artificial Sequence
  ENSG00000258583_13 (sequence is synthesized)
gtggatttgaaaaaataacaatttgacttggggaagaagaagaaaagaaggtggatttcagcatgaaagaatctaaacagtcattagtgaacaaatgtgtagcagtgctgtccaacagaa

SEQ ID NO: 869123 - DNA, 120 bp, Artificial Sequence
  ENSG00000258583_14 (sequence is synthesized)
ctttctgaagaagtaatgggaatactctgtatctgtgatgtcctgtatggtagccactggcctcacacagctcttgagcacttgaaatgtggctactgtgactgagtaattgagttttaa

SEQ ID NO: 869124 - DNA, 120 bp, Artificial Sequence
  ENSG00000258583_15 (sequence is synthesized)
aatttcatcaattttaattaattgaaatttaaatagccacatgaggccagtgactacagaattgaacagcacaggtctcacagatggactaagagtaagccagttacgaagaagcttata

SEQ ID NO: 869125 - DNA, 120 bp, Artificial Sequence
  ENSG00000258583_16 (sequence is synthesized)
caggaagaccggctaaaatatgtcaaaggagagtttctctttctgaactccgaggagctgttcaaataagactggtctggagagagttttgggtggctggaggtattttcacccctccac

SEQ ID NO: 869126 - DNA, 120 bp, Artificial Sequence
  ENSG00000258583_17 (sequence is synthesized)
ttactgtgcctaaccttagtattgttgccattctcacgtttctgtatgactccatctcccttgttctgttccgatgccgctttttcagtttttctgagctctcaattaaacacagtgaaa

SEQ ID NO: 869127 - DNA, 120 bp, Artificial Sequence
  ENSG00000258583_18 (sequence is synthesized)
gcacacaggaatgatgtcacacagggtggagcatgtgacccaattctggtcaacaaaaacaaaggcgttactaggggcttcccaagagaaaaaccttctccttcctctgagacatcaaca

SEQ ID NO: 869128 - DNA, 120 bp, Artificial Sequence
  ENSG00000258583_19 (sequence is synthesized)
atcagactctcctttctcagggtggaaaagagaatattagccttggaaattgtagacagccgccatctcgcaactaggtaaaagaatcagccttaggaggaagctaataccacataaggc

SEQ ID NO: 869129 - DNA, 120 bp, Artificial Sequence
  ENSG00000258583_20 (sequence is synthesized)
agagcccagaaatgggaagaaattggaaaatttatggcatcattaaactgctgaatcgaatcaaccctgaagcccatgttgccactgggcttcttcattacataaccttttactcttcaa

SEQ ID NO: 869130 - DNA, 120 bp, Artificial Sequence
  ENSG00000258583_21 (sequence is synthesized)
tggaaattgtctcttgatgtttaggtggtgtttttcatcattggttatttatgatgctttgatcctggaaacatgagctaaatgagaaagccagagaaagggattcacttaacaacggat

SEQ ID NO: 869131 - DNA, 120 bp, Artificial Sequence
  ENSG00000258583_22 (sequence is synthesized)
aaccttgttgtatcataaattacaagaagaaagccaatcatctttcaagctgcatcatcataaacaaacttaaaagaagaagctaccaggattcatggcaacttttttgcttcccaacct

SEQ ID NO: 869132 - DNA, 120 bp, Artificial Sequence
  ENSG00000258583_23 (sequence is synthesized)
ggaattccccagtatgtgctgtctgactggtttctgttctctagtagggatagatcctttgccatgttgattagcttaattgtgccattttattatttgggatgtgaacatagaaaaaaa

SEQ ID NO: 869133 - DNA, 120 bp, Artificial Sequence
  ENSG00000258583_24 (sequence is synthesized)
agatcccatcaacagaaggtttttccatttcagtctgtcaagtttttcaggcatgaatactgtaagcaagaagagaaaagttacaataaattgacatttatagttgaagttgacctctaa

SEQ ID NO: 869134 - DNA, 120 bp, Artificial Sequence
  ENSG00000258583_25 (sequence is synthesized)
atgctcatgagcagtttaaatcattggcagatctggatagtatctgctaaaaacatgttggcacctagattccactgttactaactaaacatgaagctaaaaataaatgagagatgctag

SEQ ID NO: 869135 - DNA, 120 bp, Artificial Sequence
  ENSG00000258583_26 (sequence is synthesized)
gacggccccgcggatggcaaagtcagcggacaactaccccagttctcacttatgaagaaaattaaactgaaacataggcctagagtttatgtgttcttgaacattgcaccagaattgacc

SEQ ID NO: 869136 - DNA, 120 bp, Artificial Sequence
  ENSG00000258583_27 (sequence is synthesized)
acaagagaagactccctttcaaactcttcattctctggttcagaggtttgatgtaatggttgtctcatcgtacatggtcagccacaggatatacttcatccatttcagagctgtactcct

SEQ ID NO: 869137 - DNA, 120 bp, Artificial Sequence
  ENSG00000258583_28 (sequence is synthesized)
tggagctgccaaccagacaaaccctagaaatatgtagccacttacaggcagaacacaactacatgtgttcccaatgtggaaggcattccggaagtgtatgcatccacatttctacatgag

SEQ ID NO: 869138 - DNA, 120 bp, Artificial Sequence
  ENSG00000258583_29 (sequence is synthesized)
tgtagtggtgaaaagatggacaaaatttctactctcagcttacattttggtgatgggagatggacaatcaacccaggtcaatgacagatgctggagcagaacacatagacatacaggtcg

SEQ ID NO: 869139 - DNA, 120 bp, Artificial Sequence
  ENSG00000258583_30 (sequence is synthesized)
acgtttatttctttctgaactttcctggaggatcatcggccatactccagcagaagggtggatttgaaaaaataaccctggtaatatcccagaaagggatttctccatcagcctagatcc

SEQ ID NO: 869140 - DNA, 120 bp, Artificial Sequence
  ENSG00000258583_31 (sequence is synthesized)
agatctttttcactaatagatcgcctcctgaatgtgaagaccaattataagctttgtgttttggatgcaatacgtattcaatgacagccttcacgttagactgcacgattaaggaagatc

SEQ ID NO: 869141 - DNA, 120 bp, Artificial Sequence
  ENSG00000258583_32 (sequence is synthesized)
gtcaacaatggactgcacatatgacagtggcttcataaaattataatggagttgaaaaattcctgtcacttagtgacgtcgtataccttccatgggacaagatgtgcagcctggtaatat

SEQ ID NO: 869142 - DNA, 120 bp, Artificial Sequence
  ENSG00000258583_33 (sequence is synthesized)
caatcttagggaagtggtgcagcccagttctaaggcaaggatatgagaagttgtatttaatggaggaaatggaaccaaaacccaggggtgctggctggcctggtgctgatgtaactgaat

SEQ ID NO: 869143 - DNA, 120 bp, Artificial Sequence
  ENSG00000258583_34 (sequence is synthesized)
caaggaaagatgaggctggtctgtgggtgctgaacaagctgcaaactgagatcaactgtctctcctggaaagaagtgctgctgccagggtgaagaagcaaagcttggtgatgtggataag

SEQ ID NO: 869144 - DNA, 120 bp, Artificial Sequence
  ENSG00000258583_35 (sequence is synthesized)
gcagcatccttccttctcaggtcttctagtctccctccagaactcccagcaaagcagaaatgtggtgggcagcatcccacctccaacatcacaaagcggagtatgaaagggagaaagtga

SEQ ID NO: 869145 - DNA, 120 bp, Artificial Sequence
  ENSG00000258583_36 (sequence is synthesized)
aagaggtaagggctaacttactagttccatcatgctgtggcaaaggctgctggttgcttaaattaacatctgttcttctcttcattcttaataatagaatcctaaaactcagccaaagaa

SEQ ID NO: 869146 - DNA, 120 bp, Artificial Sequence
  ENSG00000258583_37 (sequence is synthesized)
cctctactatctggacaactggaactctctctctttaatctcttgaatgagaaggggtgccgtcttccaggctctggggttatgcccatccttccactgcatgattgagaaaggtgcaag

SEQ ID NO: 869147 - DNA, 120 bp, Artificial Sequence
  ENSG00000258583_38 (sequence is synthesized)
gagagccttttgtttgagtcctttaaaagctagaatgtccacaaggaaagagctactggacctggagaccacacaaatgaagtaacctgagatttaaaaaaaatatatttatgttctgaa

SEQ ID NO: 869148 - DNA, 120 bp, Artificial Sequence
  ENSG00000258583_39 (sequence is synthesized)
aagcacaagcgaactgactaccggcggtggaagtcctcggccgagatttcctacgaagaggccctgaggagggcccggcgcggtcgccgggagaatgtggggctgtaccccgcgcctgtg

SEQ ID NO: 869149 - DNA, 120 bp, Artificial Sequence
  ENSG00000258583_40 (sequence is synthesized)
cctctgccctacgccagcccctacgcctacgtggctagcgactccgagtactcggccgagtgcgagtccctgttccactccaccgtggtggacaccagtgaggacgagcagagcaattac

SEQ ID NO: 869150 - DNA, 120 bp, Artificial Sequence
  ENSG00000258583_41 (sequence is synthesized)
accaccaactgcttcggggacagcgagtcgagtgtgagcgagggcgagttcgtgggggagagcacaaccaccagcgactctgaagaaagcgggggcttaatttggtcccagtttgtccag

SEQ ID NO: 869151 - DNA, 120 bp, Artificial Sequence
  ENSG00000258583_42 (sequence is synthesized)
actctgcccattcaaacgaaacagcagcaggctgtcccactatttgagtgataccttgattaagttggtgaacatagatttcttcatgataagttggtgaacatagatttcttcatgata

SEQ ID NO: 869152 - DNA, 120 bp, Artificial Sequence
  ENSG00000258583_43 (sequence is synthesized)
aaaggctctcgcctattcttcagaagccgttaaggtgccttccctgtgatttagagataagactgaggcttagagagatccagtcatttcatagctgatacatggaagaatcaagatgca

SEQ ID NO: 869153 - DNA, 120 bp, Artificial Sequence
  ENSG00000258583_44 (sequence is synthesized)
aacccaggtttcaactttcttgctaagtttggcctcatctgggccttcctttagaagcccagtgtgctatccattgcacgacacagcctgggccttcctttctaatcctggtgatctgag

SEQ ID NO: 869154 - DNA, 120 bp, Artificial Sequence
  ENSG00000258583_45 (sequence is synthesized)
ctctgaaatgaaacttttgcaagcccaccgcttggattgtatatggtgagaacagccctttccaagactcagccagcaccaaactggctttcgacagatcatgagctgtaccaggccttg

SEQ ID NO: 869155 - DNA, 120 bp, Artificial Sequence
  ENSG00000258583_46 (sequence is synthesized)
aacagtggcagcaattcaaaaccagcagaaataggccaggagcagtggaggctattgggcgatttgttccaggaaattctgacaactcactgggaagctgaaactgctggggacttggct

SEQ ID NO: 869156 - DNA, 120 bp, Artificial Sequence
  ENSG00000258583_47 (sequence is synthesized)
gttcagctcctgctctttttctatttggacacctggacatggatgtccgcttccctgggagtaccagttacaccctttccaagttgtctgaaggaagacgttggagaattcacatgctat

SEQ ID NO: 869157 - DNA, 120 bp, Artificial Sequence
  ENSG00000258583_48 (sequence is synthesized)
aaaaagaagagaagaaacatgacagtcattgtttccacagtgcaaagcccagagtcttccctggagaagagtgctgatgacgaggattcatgtctcacaacccagcacacaggaatgatg

SEQ ID NO: 869158 - DNA, 120 bp, Artificial Sequence
  ENSG00000258583_49 (sequence is synthesized)
gttatcagttacttttgatcaacagaagtaccgctaaagacacatcccaaaaaaagattatcaggagaaacttgatttccttaatctttaaggagcacttctacactaaaaaaaaaaaaa

SEQ ID NO: 869159 - DNA, 120 bp, Artificial Sequence
  ENSG00000258583_50 (sequence is synthesized)
gctccggggcacatcccgctgcgctcccacgacggccccgcggatggcaaagcatcgcctatgcaggcaatcaaaggatgttgatggataagtgtttcaggcagaataatggccctcaaa

SEQ ID NO: 869160 - DNA, 120 bp, Artificial Sequence
  ENSG00000258583_51 (sequence is synthesized)
tatcaagaaattatggaatgtaagctatacttacaatagcattttctaagtctaccttgatggtcagaggtaagaaaaagagagaggaagagagcttttttgctctcagttacattaaaa

SEQ ID NO: 869161 - DNA, 120 bp, Artificial Sequence
  ENSG00000258584_0 (sequence is synthesized)
tgtgtgtgtgtgtgtgtgtgtgtttaaaatgtccaggattgagaaggggctgggcctagtggagacaggcttgcaaacctcccccaaagactccaggcctacagctgccatgctccagtg

SEQ ID NO: 869162 - DNA, 120 bp, Artificial Sequence
  ENSG00000258584_1 (sequence is synthesized)
catgctccagtgcggacagacaatcggacggggccttctgtgatttgtgggggctgcatcattcctctctccagaagatcttctctcttctaagggcatcaagacattttagagccactc

SEQ ID NO: 869163 - DNA, 120 bp, Artificial Sequence
  ENSG00000258584_2 (sequence is synthesized)
agctcagctcccagcttccttgagatcccacggcacctgcagccctgctggcccattctgcactgcccgctcatgaagctgtctctcctttcttagccagtagtaagcctccccaccagg

SEQ ID NO: 869164 - DNA, 120 bp, Artificial Sequence
  ENSG00000258584_3 (sequence is synthesized)
cccgtggactccgtgggaggtgagctccagaagggaagggagttctttcacagctttctgtctctgtatctcctgtgacttgaatggactcagcacacagcaggcctgagtgaaggatgc

SEQ ID NO: 869165 - DNA, 120 bp, Artificial Sequence
  ENSG00000258584_4 (sequence is synthesized)
ttgtggttgctatggcttacatgacaacgaattgtctgtaatcctacaggactatggcacatgaaagctggaagcgcttctttccgactgcatcgcccagcaccagagcccgagttctgt

SEQ ID NO: 869166 - DNA, 120 bp, Artificial Sequence
  ENSG00000258584_5 (sequence is synthesized)
aaagctctgttaaaggcacatgagctgtgctggcttcaactgccctgaacttggataagctgggccgctgatggacccttcccaaccggttgttgctgccttggtttcccgacagtccac

SEQ ID NO: 869167 - DNA, 120 bp, Artificial Sequence
  ENSG00000258584_6 (sequence is synthesized)
tgtgctgaccctgcagcagggactcccagctttgcatcaactccattcaacacctactgtgtgcagggaccagagggtgtggaggtggcattccctgctttatcttgataagtaaacgtt

SEQ ID NO: 869168 - DNA, 120 bp, Artificial Sequence
  ENSG00000258584_7 (sequence is synthesized)
gattcagccagcacatgtgtagactggagctgcaagtgagaagaggcatctggcagggcatgcacaggccaagccttagggacccaaggagctcatctggggcagtgggttttcaaattg

SEQ ID NO: 869169 - DNA, 77 bp, Artificial Sequence
  ENSG00000258584_8 (sequence is synthesized)
gacccaaggagctcatctggggcagtgggttttcaaattgctttgaagcagagatgcccatttaaaaatatgtggag

SEQ ID NO: 869170 - DNA, 64 bp, Artificial Sequence
  ENSG00000258584_9 (sequence is synthesized)
tgtggagattcaacatgtaaaaccatgacaactatgggctatgagtacaaatttattttccatg

SEQ ID NO: 869171 - DNA, 120 bp, Artificial Sequence
  ENSG00000258584_10 (sequence is synthesized)
atgacaactatgggctatgagtacaaatttattttccatgctcaaatgcataccttctacttatttgcaaacaatgcattagaacaaggagtctgttctgatgatataaaactttgaaat

SEQ ID NO: 869172 - DNA, 120 bp, Artificial Sequence
  ENSG00000258584_11 (sequence is synthesized)
caggagatatggattatggtctcacatcagccatcagccatactttgttttggttgcagaacatttacaaaatcttggtttagagagagaagcagttgagatgtcaactttctaaaaaag

SEQ ID NO: 869173 - DNA, 84 bp, Artificial Sequence
  ENSG00000258584_12 (sequence is synthesized)
tagagagagaagcagttgagatgtcaactttctaaaaaagtttatcttttaattaatttactagtgcaatggtgcgatctcggc

SEQ ID NO: 869174 - DNA, 120 bp, Artificial Sequence
  ENSG00000258584_13 (sequence is synthesized)
ccctggagaaactattacctggtccccacaggagttaacctgactgcccaagttcaccagtcagcagcctagcgtgtcaccttaaaattcagtcccaaaagatgggctgacttctcattt

SEQ ID NO: 869175 - DNA, 120 bp, Artificial Sequence
  ENSG00000258584_14 (sequence is synthesized)
tagagatgaagacagagaggcccagagaggggaagagattcatccaaggcaaagccaggcagagccaggggtgagaggcagcagtgatggctacagccataccttgagtcaaggcactga

SEQ ID NO: 869176 - DNA, 120 bp, Artificial Sequence
  ENSG00000258584_15 (sequence is synthesized)
gacggagagtgttaggcattttggagagcggagacagtgagaagctcagtgcagcggcgaagagagttcgctgcagggagtgaggaaaggggcatttgcatcatcagcaaaagggccatt

SEQ ID NO: 869177 - DNA, 120 bp, Artificial Sequence
  ENSG00000258584_16 (sequence is synthesized)
ttcacctgcctcagcattccattcccgtgctccctgacttggtcctggtggggcgtgctgggactatgaagagttactgctgtgagcgctgcggccccccatacctccaccctagcacca

SEQ ID NO: 869178 - DNA, 120 bp, Artificial Sequence
  ENSG00000258584_17 (sequence is synthesized)
gccctgaacagaatggatggtgtccacctgcattgggaagggctatctgtcttacaacccatgagtagatactattagcagcccatcttaagatgaggaagctaagggtccttcctgagg

SEQ ID NO: 869179 - DNA, 120 bp, Artificial Sequence
  ENSG00000258584_18 (sequence is synthesized)
caaatcctcagccgctgttgcacgggctctaggggaagccagctgccatgttgtggggatgctcaaggagccctgaggagaggcccatgtgatgaggagctgagaggacttgggccaaaa

SEQ ID NO: 869180 - DNA, 120 bp, Artificial Sequence
  ENSG00000258584_19 (sequence is synthesized)
gccagtggagaattgaggtctcctgtcagtagccatataagcaagtattctggaagcacatcctccattcccagtcaatatcttaacttcaacctcatgaaagaccttgagcctagctca

SEQ ID NO: 869181 - DNA, 120 bp, Artificial Sequence
  ENSG00000258584_20 (sequence is synthesized)
gccactcccagactcctgacccacagatactgtgtgagacaccttgaatcacagatagttggagatgaaaaggaccttagaaaccatgagaaacaccatgggcgaggagactggggagct

SEQ ID NO: 869182 - DNA, 120 bp, Artificial Sequence
  ENSG00000258584_21 (sequence is synthesized)
ctggagccataaacctggcttcaggtcccagttctgccactcaccaactgagtggccaaggacggcatttttcagagaacaggagggagctgcttccttaagtatcgcctgggatcacat

SEQ ID NO: 869183 - DNA, 120 bp, Artificial Sequence
  ENSG00000258584_22 (sequence is synthesized)
tcagactggagatgttgccagaagcaaatccacctcggtggggattctggttgacccaggagaccctctgctcctgagggaactgctgaggggcttgggctatgactccaggaccaagag

SEQ ID NO: 869184 - DNA, 120 bp, Artificial Sequence
  ENSG00000258584_23 (sequence is synthesized)
ttttgggagagactttccttccctggacaaggaaaaggaagtggagctaccagctgctgctctgggaggctagaggctcatctctctaccatgcaccctttccgaagctctgttctctga

SEQ ID NO: 869185 - DNA, 120 bp, Artificial Sequence
  ENSG00000258584_24 (sequence is synthesized)
gggcttctggaaatacccgctttaatcagagttaagccggatttgaaggttgcgatgattagatgtgtcaaaaaaattttacatctaataacacccaacgctgtcaagaatgtggaaaaa

SEQ ID NO: 869186 - DNA, 120 bp, Artificial Sequence
  ENSG00000258584_25 (sequence is synthesized)
aacagacatgtatgcattgttgatgcgagtgtcaattggtacccattttttggagggagtttgctagtatcattagaatgtgaaatagatatgctttcagactcaacatttccacttcta

SEQ ID NO: 869187 - DNA, 120 bp, Artificial Sequence
  ENSG00000258584_26 (sequence is synthesized)
agagtcaattctagagaaatatgtgcacatggacacaaagagtcgggcatgaagatgtttgcagaaatgttgtttgcaactgcaaaaaacagtaaaataaaaagccaccaaatcaaaaaa

SEQ ID NO: 869188 - DNA, 120 bp, Artificial Sequence
  ENSG00000258586_0 (sequence is synthesized)
atagtattgggcatccttcttatttgtgttatttgatgctgagtgtgagcactttctctgtgtcagggtaagccaatgatctgagtagggcttgataatgccattggagagtctgacaag

SEQ ID NO: 869189 - DNA, 120 bp, Artificial Sequence
  ENSG00000258586_1 (sequence is synthesized)
atcaaagtgtaaatgggagagaagaggaaaagaaggaaagaaatgagagccacatatctactggcaaaaggaaaagtgcaaaatttccaagggcaggctgctgaaggcctgccagagcgg

SEQ ID NO: 869190 - DNA, 120 bp, Artificial Sequence
  ENSG00000258586_2 (sequence is synthesized)
gatggaaggcaaaggttgttgaagttatgaatgtctgtttcacagaactaaatatgaacagctttattaaggagatggctcatcccaggataaagacagcaacagatgatatagagaaga

SEQ ID NO: 869191 - DNA, 120 bp, Artificial Sequence
  ENSG00000258586_3 (sequence is synthesized)
ttacaccaaacaaatctgctgtaaactgcatttacccttaggagatgataaactaaagatgaagggaagggataatgaatgaatgttaagagctaaaaactataaaactcttagaagaaa

SEQ ID NO: 869192 - DNA, 120 bp, Artificial Sequence
  ENSG00000258586_4 (sequence is synthesized)
tggacttcatcaaagtaaaacttttgcgttccaaagaataccatcaagaaagtaaaaagacaacccacagaatggaagaaaatatttgcaaatcatatatcttaagagaattgtagccag

SEQ ID NO: 869193 - DNA, 120 bp, Artificial Sequence
  ENSG00000258586_5 (sequence is synthesized)
aatataaaaactctcacaactcaacaataaaaaaacaaataactcaattttgaaagtggacaaagggatagacctacaaatgttcaataaacacatgaaaagatactcagtatcattagc

SEQ ID NO: 869194 - DNA, 120 bp, Artificial Sequence
  ENSG00000258586_6 (sequence is synthesized)
catcagggaaatgccagtcaaaaccacaatagataccattttatgcccactagaatggctataagatagataatactaaattttgtcaaagatttggagaaatcaaacccttacacattg

SEQ ID NO: 869195 - DNA, 120 bp, Artificial Sequence
  ENSG00000258586_7 (sequence is synthesized)
ttgatgagaatgtaaaatggtacacaatttttggaaaacaatctggcagttcttcagagttaaaacaaaaagttaccttgtgacctagcaatcccattcgaagagagttaaaaacatatt

SEQ ID NO: 869196 - DNA, 120 bp, Artificial Sequence
  ENSG00000258586_8 (sequence is synthesized)
ttccaacaaaagcttgtacatgaatgtttatagcaacattattcattatggccaaaaagtggaaacagcccaaataaatgttcctcagctgatgagtgggtaaataaacgtggtatgaac

SEQ ID NO: 869197 - DNA, 120 bp, Artificial Sequence
  ENSG00000263004_0 (sequence is synthesized)
cgagagagccgtcatctctccggtgcccgggagaggggccgggcgggacggtacagcaaccggaggaaccttgattccctgccccgcaagcccagcaccggttttgccgccttgtctcga

SEQ ID NO: 869198 - DNA, 120 bp, Artificial Sequence
  ENSG00000263004_1 (sequence is synthesized)
agggtcaaccaggccatctcctgcctcgggacggagagcgccctggaaaaggcggaggggccgaccttagtcacacaagagcgatggcaagattttcacccaagccatctgacttggaac

SEQ ID NO: 869199 - DNA, 68 bp, Artificial Sequence
  ENSG00000263004_2 (sequence is synthesized)
tgtgaacccaggaggcggaggttgcagtcagccgagatcgcgccactggaagacaaccatgtgaaggc

SEQ ID NO: 869200 - DNA, 120 bp, Artificial Sequence
  ENSG00000263004_3 (sequence is synthesized)
aacagaagacaaccatgtgaaggcagggagacacagagacagcaccatgtgacgacagaaaattggattaatatatctataagccaaagaatgccagatcgccagcaaaccaccagaagt

SEQ ID NO: 869201 - DNA, 120 bp, Artificial Sequence
  ENSG00000263004_4 (sequence is synthesized)
aaggaagaggcaaagaaggattcccctacaggtttcagagagggagcatggccctgctgacaccttgatttggacttcttcccactagaactgtgatacaataaatttctgctgtcttaa

SEQ ID NO: 869202 - DNA, 120 bp, Artificial Sequence
  ENSG00000263004_5 (sequence is synthesized)
gaggcaaatccagagaccaagggagcagtttatacagaaacagatgccggcattaacccacagggagttattgttacagactgaagaatagaaaaagaaaaagccaaatagagccttatt

SEQ ID NO: 869203 - DNA, 120 bp, Artificial Sequence
  ENSG00000263004_6 (sequence is synthesized)
ccacccagcttagcttccatagaacattgtgaatgagagagtagattcttgagaaaatcctggggttacccagttttcatgactcgtttcgttagaccatcatttcccaaagtgtgttct

SEQ ID NO: 869204 - DNA, 120 bp, Artificial Sequence
  ENSG00000263004_7 (sequence is synthesized)
agtagttcttcagaaggctggaaagtattgtttggaagggggttccgtgatgaagtcagtttggaatgcaggctttacccagttttgagaagattctttgcaggacttctcagggccttt

SEQ ID NO: 869205 - DNA, 120 bp, Artificial Sequence
  ENSG00000263004_8 (sequence is synthesized)
gtgaatctccaaagaaagaatgtagtgtgaagtatgaaaactttctcctggctgatggaacacactttgcaaagcacttccacagaccaatatgatttccagtaagagctaaataaattt

SEQ ID NO: 869206 - DNA, 120 bp, Artificial Sequence
  ENSG00000263004_9 (sequence is synthesized)
tgttagttgttaaggcataaaacattaatataggatattacagtcctaggcttacattacttaatttggattttttgcaaaaattaactttaatgtgaaaaattaggagacaatatagag

SEQ ID NO: 869207 - DNA, 120 bp, Artificial Sequence
  ENSG00000263004_10 (sequence is synthesized)
aaaattcaagagcctctccagataaattcttagaactaatgagaaagttcactaaagtttctggatataaaatgcccagggcaccggagggggaaatactttcttgtatattaatagcaa

SEQ ID NO: 869208 - DNA, 120 bp, Artificial Sequence
  ENSG00000263004_11 (sequence is synthesized)
ggtcccttcaaaagaacgttgaaaccctaacccccagtacctcagaacgtgaccttatgtgggaacagggttattgcaaatgtaattagttaagctgaggtcatcctgggatagattaga

SEQ ID NO: 869209 - DNA, 120 bp, Artificial Sequence
  ENSG00000260262_0 (sequence is synthesized)
aggtggctgggccttcctggtcccctccttggctgcggtggaggccgaggacagccaggacccaggggaagacacagttctgtggtggccaggcctgtgggcaccaggagcagagggaag

SEQ ID NO: 869210 - DNA, 120 bp, Artificial Sequence
  ENSG00000260262_1 (sequence is synthesized)
ggaggatggctggggccaggggtctgggagcagagggacgctcagccacctgctgcggtgggcggctgatgggctgtgcgagagacactggtgtgggcagaggactcgggaaactgcagc

SEQ ID NO: 869211 - DNA, 120 bp, Artificial Sequence
  ENSG00000260262_2 (sequence is synthesized)
ggcctgtccttcccgagtgcagcaccacttctgggacacacacgtggttctcagtgctaggggccggagcagcccccgccggcctggccaggactgagtgcaggaaggggctgccccagg

SEQ ID NO: 869212 - DNA, 120 bp, Artificial Sequence
  ENSG00000260262_3 (sequence is synthesized)
cagtgtgctgggagggacctggggccctcacggctcgcagctgccaccagagctgcccccatttttttttcttttaatgcttaaagaatgcagctttattcatgtccattggggcagctc

SEQ ID NO: 869213 - DNA, 120 bp, Artificial Sequence
  ENSG00000260262_4 (sequence is synthesized)
aaaacgtagttgataaatctattcaaatttattttcctagtagaagccctgaaggggttgtttgctgtttgttgaaatgaaatccacgtaacataaagcggactgtttcgaagtgtacga

SEQ ID NO: 869214 - DNA, 120 bp, Artificial Sequence
  ENSG00000260267_0 (sequence is synthesized)
agtagggggcggagcccgccgcgtgcccggaagcgctcgattccccccgctgccttgatgtggcgcgtgcggagggctaggagcgcgcggctcaggggtgtctcgttggtcgctgggtcc

SEQ ID NO: 869215 - DNA, 120 bp, Artificial Sequence
  ENSG00000260267_1 (sequence is synthesized)
ttttccccacccagagcctccccggccgccgccgcgagctgcgcgaggcagaacgagagcgagtccgtgagggttggcttcgcagccgccatcttggctcgggcctcagactccgccccg

SEQ ID NO: 869216 - DNA, 120 bp, Artificial Sequence
  ENSG00000260267_2 (sequence is synthesized)
cttctcgccgctgatcccagggagcggaactggaagacagggaaatcgtcgggcaccgcctcgctgacgctgtttagcgccaccgcagtgatgcaagtcggaagttgtagttctcgaccc

SEQ ID NO: 869217 - DNA, 120 bp, Artificial Sequence
  ENSG00000260267_3 (sequence is synthesized)
cggaagtctgtccttgcacacgaggcgcggcagtaccttaatcgcagcgcatcctgggacgtgcgggcggtgcatgagggagatgtggtccgcgtcgagcttctcacgcctacctcggga

SEQ ID NO: 869218 - DNA, 120 bp, Artificial Sequence
  ENSG00000260267_4 (sequence is synthesized)
agcgctggaaactcttccagggccctccaggtgggccagggcctccgaacagcccagaagtccgaccacggagccttcgtgccgtgccccgcccccggcgtgcactcggcggggaccgcc

SEQ ID NO: 869219 - DNA, 120 bp, Artificial Sequence
  ENSG00000260267_5 (sequence is synthesized)
ttttctcctctaggctcgcttcgctgccccccagcggtggtgcggcccggccttgggacggactccgagaaccccgagccgggccgaaagtgcggggtcctgaccgcgccgcagacgggg

SEQ ID NO: 869220 - DNA, 120 bp, Artificial Sequence
  ENSG00000260267_6 (sequence is synthesized)
agccctcgctcggtcagaggaagaagagggttaaacctaccgagaacgttcgctgccgcttcctagagtgacgggcttgtggaattttccgtttccggagctggaccccggtgtcccgag

SEQ ID NO: 869221 - DNA, 120 bp, Artificial Sequence
  ENSG00000260267_7 (sequence is synthesized)
tgtcctccgctctggacgtgctcgtgagctcaggagctggcatctaggaaacggggagttcttcactcgcagcgcagtcggccgcgccagaagaggcgagggagaatccggacggggcgg

SEQ ID NO: 869222 - DNA, 120 bp, Artificial Sequence
  ENSG00000260267_8 (sequence is synthesized)
ggcggcgggggagcgggacattcgcgtcccggggagcccccaggtcacccctggattgcgaggtggctccgcctgagcagcccttcctggtgtggtcggggcagctgcccgcccggaaaa

SEQ ID NO: 869223 - DNA, 120 bp, Artificial Sequence
  ENSG00000260267_9 (sequence is synthesized)
tggtcaggctctagccctggggaggaagaagcctttgccaagagcaaccgtctacaagccccaaaacctgcgagtgccggaaatgtggactgaccacagcctgcctccccggcttcattc

SEQ ID NO: 869224 - DNA, 120 bp, Artificial Sequence
  ENSG00000260267_10 (sequence is synthesized)
accaccaaggcagcccctctggtgacaagccttaccgttgtccgggttatggcagaagcttccgatgtggctctgatctggttaagcaccactgggtacacaccggtgaaaagccgtact

SEQ ID NO: 869225 - DNA, 120 bp, Artificial Sequence
  ENSG00000260267_11 (sequence is synthesized)
cctgccccgagtgtgaccatcgcttcggccctatgcctgtgcctagtgtggtaagactttcagcgtcagctccaacctgatccagcaccagcgcgctcacaccgctaaaagccttaccgc

SEQ ID NO: 869226 - DNA, 120 bp, Artificial Sequence
  ENSG00000260267_12 (sequence is synthesized)
ccttggctccaccctgttgcagcacctgcgctccacatgggtgagaaggcctctaagtgccttgtttgtagtaagagttttgtgcacagttggaatctgctgcggcaccagcacagtcac

SEQ ID NO: 869227 - DNA, 120 bp, Artificial Sequence
  ENSG00000260267_13 (sequence is synthesized)
aaagtccggaaacctgatgcttggtggtgagtgtggccagaccttcggccacagctcccacctgcccatccactaggcggcccacagcagcacccctgcgtctgcctgcagtgtggcagg

SEQ ID NO: 869228 - DNA, 120 bp, Artificial Sequence
  ENSG00000260267_14 (sequence is synthesized)
gccctagcgcaaagctccaacctgggccagcaccagcggacgcactagggcggcagcctctgcaaatagccctggcttcaattttagctgaaacttcagctctgactttggttcggactt

SEQ ID NO: 869229 - DNA, 120 bp, Artificial Sequence
  ENSG00000260267_15 (sequence is synthesized)
caaggaaatggaaggaaccaggatctctaagcagacccccttctgctcccttagggctgttgattttagagctaatgatgggattcggttggggcgagggggtctccacatctttttgcc

SEQ ID NO: 869230 - DNA, 69 bp, Artificial Sequence
  ENSG00000260267_16 (sequence is synthesized)
ggattcggttggggcgagggggtctccacatctttttgcccaaccctttgctaagtcaaggaaccccag

SEQ ID NO: 869231 - DNA, 66 bp, Artificial Sequence
  ENSG00000260267_17 (sequence is synthesized)
gtgtctctactaaaaaaaaaatgctaggcgtgttggctctcgcctgtaatcccagctactcgggag

SEQ ID NO: 869232 - DNA, 120 bp, Artificial Sequence
  ENSG00000260267_18 (sequence is synthesized)
ctgcactccagcctgggcgacagagagtgtctcaaaaaaataacaaatttaaaaattgtttttaacaaaggagccccagtctggaagaatcagaacactagatctgtgatcactgccttc

SEQ ID NO: 869233 - DNA, 120 bp, Artificial Sequence
  ENSG00000260267_19 (sequence is synthesized)
atcagaacactagatctgtgatcactgccttcaaagagcccagtcagctgagagggcttaggtttgttctttgaagttacaaagacagaacgtcgaccagctgaagggagagttttggaa

SEQ ID NO: 869234 - DNA, 120 bp, Artificial Sequence
  ENSG00000260267_20 (sequence is synthesized)
tggcgggagctatccagcgtggacccagctgcctgcagatctggcagtagctgacacagtcccttcacaggcctagggagtgatggggttaatcacacctagaacaacagctacctcttc

SEQ ID NO: 869235 - DNA, 120 bp, Artificial Sequence
  ENSG00000260267_21 (sequence is synthesized)
ccagaggaatgggaccagaaatcaggcaagcccctgtgaggagttccatggcagcgcgcaggcggggcattcctaacctccagagggaaccatgagggatcctgtgttctggcagatggg

SEQ ID NO: 869236 - DNA, 120 bp, Artificial Sequence
  ENSG00000260267_22 (sequence is synthesized)
ccagagaatttgaacttgggaccattgtgtgagccctgggtgtgtgagcccttcaaaagtcctctcagcacgtgagaactatcattatggatgatgctagggtggtgggggccccagaac

SEQ ID NO: 869237 - DNA, 120 bp, Artificial Sequence
  ENSG00000260267_23 (sequence is synthesized)
agacctgtatgttgagttcaggggttgctttgttgcatttctgggcaggggcaagaggcccagggtttgtcatctgccccttcccctgccttatccccttcccttccaagttccccaggc

SEQ ID NO: 869238 - DNA, 120 bp, Artificial Sequence
  ENSG00000260267_24 (sequence is synthesized)
tccttttctgccagtctgtcaagagagggaagagtggcgaagagtcctttgtgcctggacattggggactgaacatggcccttttgcctgggcattgcccaaacatatatttctactggc

SEQ ID NO: 869239 - DNA, 120 bp, Artificial Sequence
  ENSG00000260264_0 (sequence is synthesized)
gagagtggaagtcaagtcccacaggtgacccagctagagagagtgtccccagtcacaattggagtcttatgtaagaagaaataaggaaagcctactgggttgaatctaaaagtagaaaac

SEQ ID NO: 869240 - DNA, 120 bp, Artificial Sequence
  ENSG00000260264_1 (sequence is synthesized)
tgacttacacacatgtgggtgcctttacctctgaagactttttctcttctaactgatgatgctccattctcttctgacaaaagctccctgccaaggcctgattgaacctctgccctgtgg

SEQ ID NO: 869241 - DNA, 120 bp, Artificial Sequence
  ENSG00000260264_2 (sequence is synthesized)
ttccttgaaacatcgtcatattcttgtactaaattccccattttcttaagctagctctggtaagtttttgccatttacagtcaaagtgaactcactaataaaatattcccaactgcataa

SEQ ID NO: 869242 - DNA, 120 bp, Artificial Sequence
  ENSG00000260264_3 (sequence is synthesized)
taagaagaagacagatgaggcttttgcacttgtactccagcatagcaaacaggtatcctaaacatgtgcttgttaccttatgcaacaacatggctgatctgactccaccattaagtccta

SEQ ID NO: 869243 - DNA, 120 bp, Artificial Sequence
  ENSG00000260264_4 (sequence is synthesized)
gttccgggtaggaagaaagccaagagcaaaaggtgtcacctacgtgctagcaaagtctgtccaaaaacctgctgggaggagattttacagaaaacccacagaacaagtttggttttccct

SEQ ID NO: 869244 - DNA, 120 bp, Artificial Sequence
  ENSG00000260264_5 (sequence is synthesized)
aatatttgccattgtaaatgtttgtaagcatacaattcagtggcattaatcacattcacaaggttatgcaatcatcacctctatttctaaaattgtttcatatatctaacaaaaattctg

SEQ ID NO: 869245 - DNA, 120 bp, Artificial Sequence
  ENSG00000260264_6 (sequence is synthesized)
taactattaagcaataactcctcattcctgtctcctctcagcccctgataaactctaatctactgtctgtctctgtgcacttgcctgtttacgtacctcatataaatggaatcatgccat

SEQ ID NO: 869246 - DNA, 120 bp, Artificial Sequence
  ENSG00000260265_0 (sequence is synthesized)
atatcctctggttactgggaaacttcagcaaactaagaagacaatgccctcctcttaattatttgggatgacatatttacttcctagtggaaaatgaagcacagagaagttcagtgatgg

SEQ ID NO: 869247 - DNA, 120 bp, Artificial Sequence
  ENSG00000260265_1 (sequence is synthesized)
gtctgcactcctacccactatgctacactgcctctaactatgaggaagcaagggcatttttttttttctggtgactaaaaagataagagttcaagtatgtggctcctgataatctaactt

SEQ ID NO: 869248 - DNA, 120 bp, Artificial Sequence
  ENSG00000260265_2 (sequence is synthesized)
atacagcctggaaaaattgatagttactatatccagactgtctcattcaattaacagtttctcaagtaatcttctagttactgtcgtattttatctgtatcaacttagcaaaccaagtcc

SEQ ID NO: 869249 - DNA, 120 bp, Artificial Sequence
  ENSG00000260265_3 (sequence is synthesized)
ctggctcataataataaaagcttctacttacatagcattactttgttccaggcaattttctaagtgtgttatatatattaactcactccatcttcacaaccactctgaatagaagctgtt

SEQ ID NO: 869250 - DNA, 120 bp, Artificial Sequence
  ENSG00000260265_4 (sequence is synthesized)
atatattttttcagttgagacaggatctcactatgttgccttgcatggactggaactccttggctcaagaaatcttcttgcctcagcctcccaaatagctaggactatatgcacatgcta

SEQ ID NO: 869251 - DNA, 120 bp, Artificial Sequence
  ENSG00000260265_5 (sequence is synthesized)
tgtttgtttctcacaaattatgactggcatctgtatatctgggaaggttctactgcattgctgtattatcactatataattataagagatcacagagtgcattgatgaaggccatgttga

SEQ ID NO: 869252 - DNA, 120 bp, Artificial Sequence
  ENSG00000260265_6 (sequence is synthesized)
gacatgatgaaacagggtccattgtgactgggtgaaactgtcttcaatttcctggtctataaagcagaggtgagaacaactgactcatagcattgcggtgaatattagattaaataagat

SEQ ID NO: 869253 - DNA, 120 bp, Artificial Sequence
  ENSG00000259188_0 (sequence is synthesized)
agtaatgctgataaccacagtgagcaccaaagccaaatgccaaaaaccaaaaaggatggcaagaatcaaccacaggggacatcagaggaccacaggtggaggagaagaggcgaaagtgga

SEQ ID NO: 869254 - DNA, 120 bp, Artificial Sequence
  ENSG00000259188_1 (sequence is synthesized)
agcaacacaggattactctggatgctatgctgagaagaaactgaagacaatggtggaagtgggaaagcttatgactcagaataactatttctaataacaaattttaagttctcttcatgc

SEQ ID NO: 869255 - DNA, 120 bp, Artificial Sequence
  ENSG00000259188_2 (sequence is synthesized)
agagcagctgacacaaatcttcaactcattgatgatggcatctgactgttccaggtattaagaagagagaaagaatctgagaaattatggcgtactcaactgtggacagctgaaagtctg

SEQ ID NO: 869256 - DNA, 120 bp, Artificial Sequence
  ENSG00000259188_3 (sequence is synthesized)
gcatagcgtgccctcatcatcacaaatgggctcgcattacaagctacacttatttgacaactatcagcatttgtcaaccggcactcagatttgaagactcatttcacagctggagcaaga

SEQ ID NO: 869257 - DNA, 120 bp, Artificial Sequence
  ENSG00000259188_4 (sequence is synthesized)
gaagacaggaaggaaaaatcagagtaaggtttcaatgagtttctgcaaattctcagaagttttgctgccactcagtgtcacaataacaaaaagaaataaaaatagctgatatttactaaa

SEQ ID NO: 869258 - DNA, 120 bp, Artificial Sequence
  ENSG00000259188_5 (sequence is synthesized)
ctcttatcagctctggtgccttaatgggatactagatctctctaaacggcagtttctttatctctaaagtgatgtatacccttcctgcagtgtggcagtgaggacaaaataatacatgca

SEQ ID NO: 869259 - DNA, 120 bp, Artificial Sequence
  ENSG00000259188_6 (sequence is synthesized)
gcagtacccctaacatagtgcgggacacgtatgagcccctgaccttgtggtgggttgccattttattctccaggttttcagtggcttataatgagtccaattatctgatccaagtggtaa

SEQ ID NO: 869260 - DNA, 120 bp, Artificial Sequence
  ENSG00000259188_7 (sequence is synthesized)
acaaaggattcactaaaatcttcagagataaatatagtaataagcctgttatttctatcctgtgttaaaatggagaggtttttgcgggggagtggtttaaagcaagatgggcataaatag

SEQ ID NO: 869261 - DNA, 120 bp, Artificial Sequence
  ENSG00000259188_8 (sequence is synthesized)
caaaacaacaaaaatatcccctcacacctttgtagactaattacacaagaattccctgcatgggcctcactaaaagtcaatgaggcatgtgaagcaggcatatatccccattttgcctat

SEQ ID NO: 869262 - DNA, 120 bp, Artificial Sequence
  ENSG00000259188_9 (sequence is synthesized)
gagtacacacagttgtggaaacagaacctttcggttacagagcttattatgggcaaaagcaaaaattaaaatcaacttaattagttagaaggtagtaagtgctagagaggaaaggggata

SEQ ID NO: 869263 - DNA, 120 bp, Artificial Sequence
  ENSG00000259188_10 (sequence is synthesized)
aatggatctaacatgcagctttctgaaacagctggaaatgctgggacgtgcagcattctatactgcaagtaggccccatgaaacaaccctaaggcaagaaagcatccactatgctcagag

SEQ ID NO: 869264 - DNA, 120 bp, Artificial Sequence
  ENSG00000259181_0 (sequence is synthesized)
agccagtttattgatctgggtggtgctagccgatccatgaagtgtagggtctacaaaatacgtcaagcactgatcttaggttctacaatagttatgttattcccaggaacaatttgagga

SEQ ID NO: 869265 - DNA, 89 bp, Artificial Sequence
  ENSG00000259181_1 (sequence is synthesized)
tcctgtagctaatttgttagtcctttaaaaaaaaagcagtctagccccccaggcaggaagggtgtttattttgggaaagagctgttatt

SEQ ID NO: 869266 - DNA, 120 bp, Artificial Sequence
  ENSG00000259181_2 (sequence is synthesized)
caagcacaacttgaaggtttgaaaattaaagaacaaggagatggctggctatttaagaaggaaaggcagaggctgcagaaattgagcctaacggcttatcagatgggatggataattctt

SEQ ID NO: 869267 - DNA, 120 bp, Artificial Sequence
  ENSG00000259180_0 (sequence is synthesized)
cagccaaacctgtgtttttgtatataaaataaacattttataaatttcattagaatgaacaaaatttaaggaaaagactttttttttttttcctgagaagacttaccaaggcggctccaa

SEQ ID NO: 869268 - DNA, 120 bp, Artificial Sequence
  ENSG00000259180_1 (sequence is synthesized)
tgattggtttgggatttcctgtggccatgcattccaaaactacagtctgatgaagagatgttgttatgttctgtggacctgctataattgttgccttaaaggatatgttagaaaccagta

SEQ ID NO: 869269 - DNA, 120 bp, Artificial Sequence
  ENSG00000259180_2 (sequence is synthesized)
tctcttgtgaagaataaacatttatgtgaagttcaacaatgtcttcagtccaggttttcttctactacatttaaacaaacttaacctttgaaataaaaactatcatctattgcattttaa

SEQ ID NO: 869270 - DNA, 120 bp, Artificial Sequence; identical to SEQ ID NO: 805281
  ENSG00000259187_0 (sequence is synthesized)

SEQ ID NO: 869271 - DNA, 120 bp, Artificial Sequence
  ENSG00000259187_1 (sequence is synthesized)
tggaaccaggaaacccaagggccagatttccttcctcaatgaaggcacaccaattcctctgcgtaaggacttctgttcacaatgaattgtattagttattcttaacattcaaaagagaaa

SEQ ID NO: 869272 - DNA, 120 bp, Artificial Sequence
  ENSG00000259187_2 (sequence is synthesized)
gttctgcatcagagcccacccatgtccagccattgtgccctgagatcccgagactggggatgagggcagagcccattaacatcagggattctggtcactggggtcacacttgagcatgat

SEQ ID NO: 869273 - DNA, 120 bp, Artificial Sequence
  ENSG00000259185_0 (sequence is synthesized)
accctaaataactaagagttggctgtacgccttttttggggggtggggagggagacctgctttagctcctacacagatgactagattttgagttaactgttttaacattctggcattttg

SEQ ID NO: 869274 - DNA, 120 bp, Artificial Sequence
  ENSG00000259185_1 (sequence is synthesized)
ttctcttgataaagaaaaatcacacccttgccaagttcatgtattttaaaaaatggaaaactctccaggtcacggagtgaagaaaacacttaagtgttttatgtctaaatgaagcaataa

SEQ ID NO: 869275 - DNA, 120 bp, Artificial Sequence
  ENSG00000259185_2 (sequence is synthesized)
tttaaaaaagattggtcctcacaatgttcaaattattctacacaaatgacctgtgaaattttttacagttgtatttttttgcccaagattcatcataaatcattcaattaaactaaatta

SEQ ID NO: 869276 - DNA, 120 bp, Artificial Sequence
  ENSG00000259185_3 (sequence is synthesized)
aaattgattttagcagaaagtagaaatgtttcagaatataaaatatcacattactgattttacaatttgataacaactaaaaaaaaaatgcatgtcactaaaaaaatttttccagtcttt

SEQ ID NO: 869277 - DNA, 120 bp, Artificial Sequence
  ENSG00000227708_0 (sequence is synthesized)
cgatgggagacctggtccagccctgtccattgtgacccacacctcctcaggactgagcagaaagagctgctgcaataaacagtttgactatcattcctgaagtgccagagtttgagcaaa

SEQ ID NO: 869278 - DNA, 120 bp, Artificial Sequence
  ENSG00000227708_1 (sequence is synthesized)
tacctcagcaagtaatttgagtaaaaactgaatactgaaggtgtttatttcaacttgattattctttattacattgcattactgttttatactgattaaaatgctgactttctatgttaa

SEQ ID NO: 869279 - DNA, 120 bp, Artificial Sequence
  ENSG00000227702_0 (sequence is synthesized)
tgcagcttctgctggtgggaaggccgatggcagagcccagggaagttatgtaacgggcccagctaatgagtggcagaggccagagggcttggcctgcagaactgtctaaggccagaggcc

SEQ ID NO: 869280 - DNA, 120 bp, Artificial Sequence
  ENSG00000227702_1 (sequence is synthesized)
gtccatacactccgtctcctgaaggggaagcgggctcttctcagatgcacagggacaatgtgaaaatcctgtcctcagattgagaggctgtttcgtgggcaccgaattcggggtcaggaa

SEQ ID NO: 869281 - DNA, 120 bp, Artificial Sequence
  ENSG00000227702_2 (sequence is synthesized)
ggtgaaggatctgaagtgtatggccacaccagtcccagaagagcctgggagaagggaagatggtgaacacagtggagttctgctgcaaagccgaagatggttctggcacgtggcatgacc

SEQ ID NO: 869282 - DNA, 120 bp, Artificial Sequence
  ENSG00000227702_3 (sequence is synthesized)
cacatgactcaacatcaggagatctgacttcataaaagtgaactatcacaatgctgctttgcaagctgtgtgtgagtgtaaaagcgttgaaacttcctcaataaatgaaaagatatcttt

SEQ ID NO: 869283 - DNA, 120 bp, Artificial Sequence
  ENSG00000227705_0 (sequence is synthesized)
ctcattttctcgactgtaaaatgaggagaacagcaattccaacctacaggattgttggcgaccttaaatgagaaagtccaagtgcactgctttgacacacagaccgcctcacacctgagg

SEQ ID NO: 869284 - DNA, 120 bp, Artificial Sequence
  ENSG00000227705_1 (sequence is synthesized)
gtatacagtgttcaaaaaagcaaggggatgaaagacccagatgcaaagccttgaagagaaaatgaaggcaagttcttgtacttcacacacaaaaatcccgtaatgacctgaatgatggct

SEQ ID NO: 869285 - DNA, 120 bp, Artificial Sequence
  ENSG00000227705_2 (sequence is synthesized)
ttaactgggctccagagacactggatgggcttcccaggatgccagaaccctgaaattacagagtccttcctataattccgggttccttcaagtaagaggtcgggcagcagattcttgatg

SEQ ID NO: 869286 - DNA, 120 bp, Artificial Sequence
  ENSG00000227705_3 (sequence is synthesized)
cctccgggatgttgtctcttggcctgaacaagatttgcagaaatgtacaattattctagggacagacaatattgagaagggagaattcctcttgctcattgagagggaaagggactctca

SEQ ID NO: 869287 - DNA, 120 bp, Artificial Sequence
  ENSG00000227706_0 (sequence is synthesized)
aactttccggtgcttacctctaactgataaaactagctccaacccaccaccctccactgacttccttcgcactcagcccactcgcacccgggtgaataaacagcctttgttgctcacact

SEQ ID NO: 869288 - DNA, 120 bp, Artificial Sequence
  ENSG00000227706_1 (sequence is synthesized)
tagcctgttcaagttgtctcttcaattagatgctcgcataacatttggtgccgaaagcccgggataggggaactcctccggcagacctctcctctatcctcccggtacccacgttctccc

SEQ ID NO: 869289 - DNA, 120 bp, Artificial Sequence
  ENSG00000227706_2 (sequence is synthesized)
atgcaagagacttccctcgccctcaggacctcagaccagctccgcgagcactccggcctctgtctatggatatggtgttcaataatagggaagagactgcccggcgacagcgcatttcag

SEQ ID NO: 869290 - DNA, 120 bp, Artificial Sequence
  ENSG00000227706_3 (sequence is synthesized)
aactacagatgcttgcctccgccataagacaaaccccagctgcactgcctacctgcaagaacttcaaggcatctaaacgcaacatccaacagcccctctgggactttgcttcaagcgatg

SEQ ID NO: 869291 - DNA, 120 bp, Artificial Sequence
  ENSG00000227706_4 (sequence is synthesized)
ctgcagcctgggattcctcctaagccatgccccgcctgtgcgggccctcactggaagtctgactgcccgactctcatcgccacttccggagctcctggagctcaaacccaaagctcccca

SEQ ID NO: 869292 - DNA, 120 bp, Artificial Sequence
  ENSG00000227706_5 (sequence is synthesized)
tcctggagctcaaacccaaagctccccaccgactccttcccagatctcctcggcttggcggctgaagactgacgctgcccgaacgtctcggaggccccttagacaatcgcggatgccgag

SEQ ID NO: 869293 - DNA, 120 bp, Artificial Sequence
  ENSG00000227706_6 (sequence is synthesized)
cttcgggtaactcttagggtggaggcataaaaagacaggaatgtaaggtcctctgagcaggcggcgccatggtcaagccatcgtgacccctgtgactcacacgtacacatccagaaggtc

SEQ ID NO: 869294 - DNA, 120 bp, Artificial Sequence
  ENSG00000227706_7 (sequence is synthesized)
agttcctgtcttagctgatcagccaaccttgtgacattctatcattgtaacaggctgtaccctaactgatcaatcaacctcatgacactgtgctctgtaaccttatgataatgtacctta

SEQ ID NO: 869295 - DNA, 120 bp, Artificial Sequence
  ENSG00000227706_8 (sequence is synthesized)
tgacattcttcccctgccctcaataaacagctccgaactataactttccactgcttacccctaaagtataaaactagctccaaccccaccacttccttttcggactcagcccacccgcac

SEQ ID NO: 869296 - DNA, 120 bp, Artificial Sequence
  ENSG00000227706_9 (sequence is synthesized)
ccagtgaataaacaaccttgttgctcacacttagcctgttcagggtgtctcttcaattagacgcacacataacagacagattaacaagaaaaacacatacagattaatttaatataaatt

SEQ ID NO: 869297 - DNA, 120 bp, Artificial Sequence
  ENSG00000227706_10 (sequence is synthesized)
gcctctgtctatggatatggctagacataaaatctgccaagctgccaatttcctgttacctactccagagacccagtgatatgaagacaccctagctggactgtcagttctcgttaagaa

SEQ ID NO: 869298 - DNA, 120 bp, Artificial Sequence
  ENSG00000227706_11 (sequence is synthesized)
cctaacccctcaaactctacaacctctgtggacaggatcctacctggtcatctatagtaccccaacagtggtcagtctacagaatcctccccactggattcatcgctccaggataaaact

SEQ ID NO: 869299 - DNA, 120 bp, Artificial Sequence
  ENSG00000227706_12 (sequence is synthesized)
tggatcagctgatacgacccagaccagtaatctggcccaaccagttctgccatcacacccaggaacagaagacattaagaaaacctaacttcaaccccctataattccatttccaacctg

SEQ ID NO: 869300 - DNA, 120 bp, Artificial Sequence
  ENSG00000227706_13 (sequence is synthesized)
actaatcagtactccccacttcccaagcccctacccgccaaattatctttaaaaactctgatccctgaatgctcgtggaggcctatttgagtaataataaaactctggtttaccgcacaa

SEQ ID NO: 869301 - DNA, 120 bp, Artificial Sequence
  ENSG00000227706_14 (sequence is synthesized)
actcttcttggggagacagccttccttcagtgttcggtcaatgcccgggacgcccgccttggccatttgccagccacacaacccaggacctccaatggggacgcccactgaggatcctag

SEQ ID NO: 869302 - DNA, 120 bp, Artificial Sequence
  ENSG00000227706_15 (sequence is synthesized)
tggttgctcttttccttgtctctttctttccccccagtctttccttgttctatcatgggcaatttcccgccttccatccctctttcttctgtctggcttgtgtcctcagaaacctcaaac

SEQ ID NO: 869303 - DNA, 120 bp, Artificial Sequence
  ENSG00000227706_16 (sequence is synthesized)
ctcttcaccttgcacccaatctaaaggctaaacgtctaatttttttctgtaacacgtcctggccccagtataaattagaaaatggcgctcagtggccagaaaacagcacttccaatttct

SEQ ID NO: 869304 - DNA, 120 bp, Artificial Sequence
  ENSG00000227706_17 (sequence is synthesized)
ctattttgtgggacttagacaacttctatggaaaaatgggcaaatgggtctgaggtaccctacttccaggcattttttacatacgatctctccctagcctatgcttccaatgtaatccat

SEQ ID NO: 869305 - DNA, 120 bp, Artificial Sequence
  ENSG00000227706_18 (sequence is synthesized)
ccccaattttccttatttcccttctgtctacccctccttcttccactggcgatgctgactcctctttgtctgttgacccctccgatctttctcccccaccacctatccgaacctgcttct

SEQ ID NO: 869306 - DNA, 120 bp, Artificial Sequence
  ENSG00000227706_19 (sequence is synthesized)
aattctcccccagaacctatttctacccacaatccaccctcttatgcccctcccattaccacccttcctcacatcctctatggcttacagtttgggcctgcgaccaacccccaggcccct

SEQ ID NO: 869307 - DNA, 120 bp, Artificial Sequence
  ENSG00000227706_20 (sequence is synthesized)
gcctagcaatttcccctcggagaggtggcaggaaccaaaggaatagttcgggttcaggtccctttctccctgttcgacctttcccaaattagtgaacatctaggctctttcccatctgac

SEQ ID NO: 869308 - DNA, 120 bp, Artificial Sequence
  ENSG00000227706_21 (sequence is synthesized)
tgaggagtgagagtgggtttggatcctagctcaatcttaggctgataaccgccggtgccgtaagcctggcctccagtaaggtgctagggcagtaccctgtgaagaccccggatggactta

SEQ ID NO: 869309 - DNA, 120 bp, Artificial Sequence
  ENSG00000227706_22 (sequence is synthesized)
ccaggccctgggacccaggcatagccaggcgggactacatgatctcttgcctagttaaagggcttcagaaggctgcatataaagccgtcaattatgacaaactaaaaaacaaaaacaaaa

SEQ ID NO: 869310 - DNA, 120 bp, Artificial Sequence
  ENSG00000227706_23 (sequence is synthesized)
acaaaaaaaaccactcagaacaaagataaaaatccagctcagtttatggcctgtctacctgccaccctcaggcgatatacagcactagaccctgaagggatagaaggccgccttattctt

SEQ ID NO: 869311 - DNA, 120 bp, Artificial Sequence
  ENSG00000227706_24 (sequence is synthesized)
aacatgcattttattacccagtcagtttctgacagtagaaagaaacttcaaaaattagagtctggctctcagatcccacaacaggaattaatcaacctcgccttcaaggtgttcaataat

SEQ ID NO: 869312 - DNA, 120 bp, Artificial Sequence
  ENSG00000227706_25 (sequence is synthesized)
gcctagctcctccacctcctcctggaagtcacaagtactctctcctacttcccttaaacttacccgcattcctgaaaaagaacaataaacctgtataccttttatttacagtagaccttt

SEQ ID NO: 869313 - DNA, 120 bp, Artificial Sequence
  ENSG00000227706_26 (sequence is synthesized)
acacagtcaccccactatttaaactctgtctacttatgcccctaatcaccattctcacctacttctaaatgccctgcttttgtctatactgccagttcacgcttttcctccagaccattg

SEQ ID NO: 869314 - DNA, 120 bp, Artificial Sequence
  ENSG00000227706_27 (sequence is synthesized)
tagctgatacctcatggagtcaccctccagctgctacccttaactctctcttagagtggatagatgaccttctgtggcaaagtactctccaattcttccatcctgatgaagttcttttct

SEQ ID NO: 869315 - DNA, 120 bp, Artificial Sequence
  ENSG00000227706_28 (sequence is synthesized)
gtcttactcccgttctcctgccaccctctatccctccctaattatctccagaataccatcaacctcacccactccctcttcaccatctccaatccttcctatgcatttccctctcttcct

SEQ ID NO: 869316 - DNA, 120 bp, Artificial Sequence
  ENSG00000227706_29 (sequence is synthesized)
cctactatacaggtgtccctgccctgccagcccactgggcaacttcccccatctccctatacctccaaacctctttcagtgacccccaactttaccctcctgaacaacttctttacttcc

SEQ ID NO: 869317 - DNA, 120 bp, Artificial Sequence
  ENSG00000227706_30 (sequence is synthesized)
tagaaaaattcagcaaaaactcccctgatacctcataccaacaagctgctgctctcctccatacctacctacgaaatctatctccctacgtcacttccacacctcctgttcttggacccc

SEQ ID NO: 869318 - DNA, 120 bp, Artificial Sequence
  ENSG00000227706_31 (sequence is synthesized)
tcactatacaaacaactatccccattgctgcccccttatgcatctccctacaattacctgctggaattcccttgggttacctcccatcttccttatgttcctttactctttacctccaag

SEQ ID NO: 869319 - DNA, 120 bp, Artificial Sequence
  ENSG00000227706_32 (sequence is synthesized)
gccctgccacccacattaaccaaaatattggagcattccagcttcgtattacagaaaagccctccctcatcactaacactcttaaaaacatcagtagcaacttttgcctaggaagacatt

SEQ ID NO: 869320 - DNA, 120 bp, Artificial Sequence
  ENSG00000227706_33 (sequence is synthesized)
taccctggctctcactccatccttggctatccttcccctgttcaatggattcccctccaaggccttctgcctgcctgtttatacctagtcttataaataacagtgaatggctacttacag

SEQ ID NO: 869321 - DNA, 120 bp, Artificial Sequence
  ENSG00000227706_34 (sequence is synthesized)
ataccaaattctttttttcacaccattaaaacagaacctctccctctacacagttatcctaccaaaccccactacaacctctaatagccgctgcccttgctggatccctagggctctggg

SEQ ID NO: 869322 - DNA, 120 bp, Artificial Sequence
  ENSG00000227706_35 (sequence is synthesized)
tgcaggactctgcttccagaacacactctcattttttttactctccacttccagttatgcctgcctcatggactctttttgtttctgttggtttttccgcatacatgtgcctccctgcca

SEQ ID NO: 869323 - DNA, 120 bp, Artificial Sequence
  ENSG00000227706_36 (sequence is synthesized)
gccaattggacaggcaccttcactttaatcttccttactcccaagatcgagtttacaaatggaaacaaacaactccccattcccctcataactccaacatgacaaaaaaaaaaaaaaaaa

SEQ ID NO: 869324 - DNA, 120 bp, Artificial Sequence
  ENSG00000227706_37 (sequence is synthesized)
gcctctgtctatggatatggtaagctgcctcggtctctcctcatctctccctctctttttctcttttcaaaattgagacaaagaaccttcctcttatccgtgtttcagaaatccaacacc

SEQ ID NO: 869325 - DNA, 120 bp, Artificial Sequence
  ENSG00000266980_0 (sequence is synthesized)
aggtggccctggggctgctgcaggaaatgcgaggagaggctgacgggaggggacggggatgctgagtggaaggaggcagagctgcccaaggagccggggatgttcacgggtgcagagctc

SEQ ID NO: 869326 - DNA, 120 bp, Artificial Sequence
  ENSG00000266980_1 (sequence is synthesized)
tgcagcaagctgccgcctgcaagagaggcccggggaggacgggctgggtgagggcagcggaagccaggcgggccacacagagcaaggggcctgagccaggcaggaacccgaggagtcctc

SEQ ID NO: 869327 - DNA, 120 bp, Artificial Sequence
  ENSG00000266980_2 (sequence is synthesized)
caggctgccctgcccacccacacccagtaccgatggtgatgcttcctgggtggggcactgtgctgttatcgaaagtcttctccagggcggccacgccaaactcattcaggtccaggtcat

SEQ ID NO: 869328 - DNA, 120 bp, Artificial Sequence
  ENSG00000266980_3 (sequence is synthesized)
actatctgaccctgaccacctcgtctactgcccacgctgcatcttcacgcccatgctacgctggtgcctgccacaggacctggcacaaagcgggcacctagaaatgagtactgaaagaaa

SEQ ID NO: 869329 - DNA, 120 bp, Artificial Sequence
  ENSG00000266980_4 (sequence is synthesized)
ggagcaccaacttctagcaccagggattctgagaacgtcgtgctggccattcactacacaaggacaccagtgagatgagtggggactgaacaacacgtcttggggtgagactgtactcac

SEQ ID NO: 869330 - DNA, 120 bp, Artificial Sequence
  ENSG00000266980_5 (sequence is synthesized)
caaggggaaaaggcacctctttctaatttgcacaaaggagctctaagggtcagtcctggccctacaccttggggtcatttcccctttagctcaaaggactcagagtgcccatcccctgat

SEQ ID NO: 869331 - DNA, 120 bp, Artificial Sequence
  ENSG00000266980_6 (sequence is synthesized)
tttccgaagacagatgtctaaggggtctggtgtgctgatttgagactcgcttcagagactggggggtctctgaccccagacccagtcctgggctttcaaacagaaatggcctagttacct

SEQ ID NO: 869332 - DNA, 120 bp, Artificial Sequence
  ENSG00000266985_0 (sequence is synthesized)
agaagacctcccctccccaccccagtgtcactgagccacttcctccagcacagccccacggagggaggcccttttgtgtcttgcccatcacctggctggccagatctgctcagctcttcc

SEQ ID NO: 869333 - DNA, 120 bp, Artificial Sequence
  ENSG00000266985_1 (sequence is synthesized)
ttgcccatcacctggctggccagatctgctcagctcttccctgactcaagaaaaacaagagagcttcattagtccgttttcatgctgctattaaaaactgcctgagactgggtaatttat

SEQ ID NO: 869334 - DNA, 120 bp, Artificial Sequence
  ENSG00000266985_2 (sequence is synthesized)
catggcagaaggcaaaggggaagcaagacacctccttcacaaggcagcaggaagaagtgcagagcccaagaggaagagcgccttataaaaccatcaggtctcgtgagaactcactcacta

SEQ ID NO: 869335 - DNA, 89 bp, Artificial Sequence
  ENSG00000266985_3 (sequence is synthesized)
gggaagctgcccttgtgacacatggggatataaggattataattcaagatgagacttgggtggggacacaaatcctaaccatatcaagt

SEQ ID NO: 869336 - DNA, 120 bp, Artificial Sequence
  ENSG00000266985_4 (sequence is synthesized)
tgagacttgggtggggacacaaatcctaaccatatcaagtgctctgtggtcccagataagccaagaaaccttcgtggaggaggccacccccacccttggcctccagacccagtgggatgc

SEQ ID NO: 869337 - DNA, 120 bp, Artificial Sequence
  ENSG00000266985_5 (sequence is synthesized)
tccggaacccagacatgtggactgcgccaggctctagccaatgactcctccaaaccactgcacctccccagccctccagagttctcatctgaaaaacggggcatcaggtctgaaggtctt

SEQ ID NO: 869338 - DNA, 120 bp, Artificial Sequence
  ENSG00000266985_6 (sequence is synthesized)
caatgccccttctggctgggatatcagagttttgggacctctctctccaggtcctcatgagtccagcaggagctctggcaggtccagggtcccctccttccctctgctgccactgctcag

SEQ ID NO: 869339 - DNA, 120 bp, Artificial Sequence
  ENSG00000266985_7 (sequence is synthesized)
cacccaaccctttttaaaattagctctgtgagttacagaagtaatccctgctttcttgttaacatgtttcaaacagcacagaagggttcaaggtggaagctgaaggtactccccagtctc

SEQ ID NO: 869340 - DNA, 120 bp, Artificial Sequence
  ENSG00000266985_8 (sequence is synthesized)
ccccacaacccccagcccacctctgctaggtcccacatggcctttgggaaacatatgcattgttccctcttcccatagaagccagaagggaagtctggaatcagtgagccaggtacagct

SEQ ID NO: 869341 - DNA, 120 bp, Artificial Sequence
  ENSG00000266985_9 (sequence is synthesized)
ctgggcccaggcccagagatcccacactcatgccagcccctacccacgccagccccctccctgtgccagccaccgcccctccatctatgcaggccccctaccaccaagcccatcgatagg

SEQ ID NO: 869342 - DNA, 120 bp, Artificial Sequence
  ENSG00000266985_10 (sequence is synthesized)
ggctcattattccgtcctgtctccctaggatggggcagagtgacagctgttccgtgtttaattaccgatgggctgaggctatgccaacccatgaataaaattacagttgttctgcaatgc

SEQ ID NO: 869343 - DNA, 120 bp, Artificial Sequence
  ENSG00000266987_0 (sequence is synthesized)
gaaatgaggagcatgactaacaattctccgaacatgtttcaaaaaagaagtgtattgtatgcataggcataacagttctttcctttgtaaaagagatgtcgtacttccagaaagacagat

SEQ ID NO: 869344 - DNA, 120 bp, Artificial Sequence
  ENSG00000266987_1 (sequence is synthesized)
atatctatatagacatagggatgtgtgtgtctatacatatacatacacatacagttgcaaatacacatataaatgtcatgaaggatgcagttcgaaaataatcttatgttgccgggcaca

SEQ ID NO: 869345 - DNA, 89 bp, Artificial Sequence
  ENSG00000266987_2 (sequence is synthesized)
gtggcgtaattttagattgctcataaggaaaacggtatagttccctgacactcgcatatagtctaaaatactgattaaagggaaaaaaa

SEQ ID NO: 869346 - DNA, 120 bp, Artificial Sequence
  ENSG00000269535_0 (sequence is synthesized)
aactttacataagggacttgaagatcacctgattttggtatcctcaggggtcgtggaagtaatccctccaatactgagggatgactgtactgcctagatataccagaaaaggagatgatt

SEQ ID NO: 869347 - DNA, 79 bp, Artificial Sequence
  ENSG00000269535_1 (sequence is synthesized)
atactggctgttataaccttcacactgagcccaccatcctgggagcagaaaagagtctggttcaaggagtatgtgtaca

SEQ ID NO: 869348 - DNA, 120 bp, Artificial Sequence
  ENSG00000269535_2 (sequence is synthesized)
tgggagcagaaaagagtctggttcaaggagtatgtgtacatgggtcaactgcatgttgcaggagtttggtgtacagttaattttgtccccagctggtgcaggagactccccaaaggaaaa

SEQ ID NO: 869349 - DNA, 120 bp, Artificial Sequence
  ENSG00000269535_3 (sequence is synthesized)
tcggtctctgtgagaggcacatgctgagaatgatgagagaacgtcctccctgaaccaagcgccactaggttagggtccccacgaccgagctggtctgagcaagtggcgcctaacatgggg

SEQ ID NO: 869350 - DNA, 120 bp, Artificial Sequence
  ENSG00000269535_4 (sequence is synthesized)
ctcaaacccttgtcgaagggtcaccagagtgacggctggagaacgtggaactacactggagaacacccaagtactcttaagcaatccctgcggccaaaaccagcagccgatttggatacc

SEQ ID NO: 869351 - DNA, 120 bp, Artificial Sequence
  ENSG00000269535_5 (sequence is synthesized)
tgagccagatgctgaggaagagattttgggaggaacccgaggaccccccagttgcagccatgtcgagactgacaataaggcctccttttctgtttggatggtaagagcctgagaaggagt

SEQ ID NO: 869352 - DNA, 120 bp, Artificial Sequence
  ENSG00000269535_6 (sequence is synthesized)
gatggtaagagcctgagaaggagtatggatacctgtaaagctttcctgtccttgggaagcctctccttctgtgcatacattactgaaattcttcaaaagagtttgaggtactctcggtgt

SEQ ID NO: 869353 - DNA, 120 bp, Artificial Sequence
  ENSG00000269535_7 (sequence is synthesized)
gtaaataattggcagaaaaattctactttgcagtggaattcccaaactaacacagactgaaaactagctaatcaaatcaatgatctccgataaactgtaatgcggctaggagatcaagta

SEQ ID NO: 869354 - DNA, 120 bp, Artificial Sequence
  ENSG00000269535_8 (sequence is synthesized)
gttagtctagaatatagaatgcagatacaatgtgattggaatacttctgatttttgcattactcctcatctgtataatgaaacagagcatgagtaggaaagagttaagagacatttaaag

SEQ ID NO: 869355 - DNA, 120 bp, Artificial Sequence
  ENSG00000269535_9 (sequence is synthesized)
ggtcatactggaaatttatctttagatattacaaaactgaaggaacaagtattccaagcctctcaggcacatctgatgctaatgccaggaactaaagagcttgaaggagctgcagacaga

SEQ ID NO: 869356 - DNA, 71 bp, Artificial Sequence
  ENSG00000269535_10 (sequence is synthesized)
aggagctgcagacagattagcagctattaacccgttaaaatggatcaagacaattggaggctcctagcatg

SEQ ID NO: 869357 - DNA, 120 bp, Artificial Sequence
  ENSG00000269535_11 (sequence is synthesized)
atcccgaatcctgtgagaagtagcccaccgtgacaaagcagcctttgcctttgtcactttgcaaaaacagaaaggggaacatgctggcaacaggctttaaagaaattggccataagcagg

SEQ ID NO: 869358 - DNA, 120 bp, Artificial Sequence
  ENSG00000269535_12 (sequence is synthesized)
atttttgcagcaatgaaacgtgcttgtgatggctatgacacacactgctagaagctgttggcttactggagcaggacaaggaacacctggcctgcccggagtggaaaactgctcaaacca

SEQ ID NO: 869359 - DNA, 120 bp, Artificial Sequence
  ENSG00000269535_13 (sequence is synthesized)
caaacaatagcatgagtggcctgtgccttaacacgtttttgctgcagataattagccaaagactgtttctctactccttgctaagaatgttttgtttcccataaggaatgcttttagtta

SEQ ID NO: 869360 - DNA, 120 bp, Artificial Sequence
  ENSG00000281880_0 (sequence is synthesized)
cccactgcgaagcaggcgacctgctcgccgcccagctccagggagaggaacccgcggaggagaggatcccggcccagaataaggataataagagtatcaacctcagaggatcactgcaag

SEQ ID NO: 869361 - DNA, 120 bp, Artificial Sequence
  ENSG00000281880_1 (sequence is synthesized)
aattgagtgggatacatatgacgtgcttagcacagtttgtggcccatgttcctgggggtctggtgagaagaagacaggcctggagttgaaggagagaaaaaaggctgggctggcctgttg

SEQ ID NO: 869362 - DNA, 120 bp, Artificial Sequence
  ENSG00000281880_2 (sequence is synthesized)
gaaggagacttccacctctgcaagcatccccatcttgtttggattgcaaactcagttgccagccaagcaagatgaggggaacggctttggactcgggctgacttggaccacatcccatct

SEQ ID NO: 869363 - DNA, 120 bp, Artificial Sequence
  ENSG00000281880_3 (sequence is synthesized)
ctgccgccatctgagctctgtgaccgtgaagtgctcctaccacccttctgagcttttgttttcttcacctgtaaaagtgcaggaagaatacttacctgtcaccagaatattccaagaatt

SEQ ID NO: 869364 - DNA, 120 bp, Artificial Sequence
  ENSG00000281880_4 (sequence is synthesized)
agaattaatgtttggaaagttgttgacacctagcaggtactcaaaaaatggtggctattactactacattctacagtctctgcgctactttgaaaggacttgcttctaggggagcttatt

SEQ ID NO: 869365 - DNA, 120 bp, Artificial Sequence
  ENSG00000281880_5 (sequence is synthesized)
tctaatggggagatattttggttttgaagtaaaatctataccgtgttagatgggaggtgtgctttagagaaaaaataaagcagggatgggagactgagatggctggggagcctgaggaaa

SEQ ID NO: 869366 - DNA, 120 bp, Artificial Sequence
  ENSG00000281880_6 (sequence is synthesized)
tctaagaatgagagagagtttctttcttaaattccctctccctactttatcaaagagattttacttccaaataagtgtaaacgggaaaagggaacagagcctgaaagacactcaaaacag

SEQ ID NO: 869367 - DNA, 120 bp, Artificial Sequence
  ENSG00000281880_7 (sequence is synthesized)
acactcaaaaatgctgtcctagggagtcagctggggtgtcatcactgacgtgggacttagggtgttgagctggagtcctggtttgtcatttgaaaagagaaatcctgatcaagttgttgt

SEQ ID NO: 869368 - DNA, 120 bp, Artificial Sequence
  ENSG00000281880_8 (sequence is synthesized)
actgctctttgactctatttccttaactgtaaattagaggtaagaatccctgtctcacgtgcacgagcaggagaggctttctggtctgttgggattctcagattcacaaggatcaggacg

SEQ ID NO: 869369 - DNA, 120 bp, Artificial Sequence
  ENSG00000281880_9 (sequence is synthesized)
tggccattgaaagctgccatcccaagaggcaaaactatggaagataggaaggaaatccgtacttacctcactctgctccctcctcctttccgtgcctgcgtgcacacacacacgcatgca

SEQ ID NO: 869370 - DNA, 120 bp, Artificial Sequence
  ENSG00000281880_10 (sequence is synthesized)
cacaccctgaggttgtcaggggactagaggtgttgtccttgaaagtgaaagtcattccaaggcaaaggaaatgtactggtgttgagaaggttcggtagggccccttccaacgggaatggc

SEQ ID NO: 869371 - DNA, 120 bp, Artificial Sequence
  ENSG00000281880_11 (sequence is synthesized)
tgactcgccatgtcctctaaagatgctgccttgattcgtggatttcagcattgtccaagctctgtggcaccatggactggttgtatgtcactgacaagcaaatgcttagtcctgtgctgt

SEQ ID NO: 869372 - DNA, 120 bp, Artificial Sequence
  ENSG00000281880_12 (sequence is synthesized)
actgcgaagcaggcgacctgctcgccgcccagctccagggagaggaacccgcggaggagaggatcccggcccaggcttacaaacaaaatgagactggaggcaacatcagtacacatctcc

SEQ ID NO: 869373 - DNA, 120 bp, Artificial Sequence
  ENSG00000281880_13 (sequence is synthesized)
gactccatatgaggttacttgaagctttggggttcactctggaaacagaagacatgcatcaaggtggggaatccagctgctgcctttctcaaaagaccctcaaattatttctgctggagg

SEQ ID NO: 869374 - DNA, 120 bp, Artificial Sequence
  ENSG00000281880_14 (sequence is synthesized)
agtgtcttccaggaaggactaatggtttgtggaatacactttgggaaatgcttatcttgaggcagcatgagtgttttttcgggactcagctgtctccccaactttggcctgtccttgcct

SEQ ID NO: 869375 - DNA, 120 bp, Artificial Sequence
  ENSG00000281880_15 (sequence is synthesized)
gtcatgcggggcatgcaggaatggaattctgcacatggcaaagggctgaatcctgcttttcttcacacaggtgcagctccccacagcaccagctctccagctgcccccacacagcctgtt

SEQ ID NO: 869376 - DNA, 120 bp, Artificial Sequence
  ENSG00000281880_16 (sequence is synthesized)
ttgtgctagggctatcgcgatttgcaaattccttctctagctcaagtgcatggacccagaaaatgcccctgcttgagggccaatgttgaccaaggccctcagcagtaatgtgacctctgt

SEQ ID NO: 869377 - DNA, 120 bp, Artificial Sequence
  ENSG00000281880_17 (sequence is synthesized)
gggagcagcacctcgcagagggcagagtttggctctatgcttgtaccattggtggtaaattctgctgagctctatggatccatctggatgaaaaggtctgtataaatgcaagatcattat

SEQ ID NO: 869378 - DNA, 120 bp, Artificial Sequence
  ENSG00000281880_18 (sequence is synthesized)
cagtcaatggggcctttccaacaattccattgtacatggcttggaaaaggtgtaattacacgaagctgaatatcttctggagagacagacacgttcatgtctgtcccaggagtgttggag

SEQ ID NO: 869379 - DNA, 120 bp, Artificial Sequence
  ENSG00000281880_19 (sequence is synthesized)
aggaatctctcaggcctctcattaggcacatggagagaggtgccctccaggcctggcccaggtcagggacaagtcagaagctacatctggagcagatccaggatcttatcctggtgcaca

SEQ ID NO: 869380 - DNA, 120 bp, Artificial Sequence
  ENSG00000281880_20 (sequence is synthesized)
cgaggggccagcatcgtgcttgcacatttatagctcaggtgctctctggtgttaccaggaagctgctgggaagagacggaggccggagagtgtcccaggacaatgcttccttcactcatg

SEQ ID NO: 869381 - DNA, 120 bp, Artificial Sequence
  ENSG00000281880_21 (sequence is synthesized)
ttcatttttaactttaaaaaatggcctccatgatccccaaaatggtcttttggtgtgagggaagtggttgctgtaaggaaagtctctgctcgacacacacaaaaattctcctccatgact

SEQ ID NO: 869382 - DNA, 120 bp, Artificial Sequence
  ENSG00000281880_22 (sequence is synthesized)
ttggaccatgtctctgataaaaagactggctgggtgaggagtccagcctgcagacctcccatttgtcctgagtcctctgttgcagtggtcctcaatccccaggttagggatcagtaccag

SEQ ID NO: 869383 - DNA, 120 bp, Artificial Sequence
  ENSG00000281880_23 (sequence is synthesized)
ttcctcttaggaactgggccgcacagcaggaggtgagcagcaggccagccagcaagcattgctgccagagctccgcctcctgtcagatcagtgatggcattagtttctcgtaggagcgta

SEQ ID NO: 869384 - DNA, 69 bp, Artificial Sequence
  ENSG00000281880_24 (sequence is synthesized)
tgtcagatcagtgatggcattagtttctcgtaggagcgtaaaccccattgtgaactggccatgtgaggt

SEQ ID NO: 869385 - DNA, 120 bp, Artificial Sequence
  ENSG00000281880_25 (sequence is synthesized)
ggccagagggaggacctctcaggccggcgggtgcgttcccgcgggggccgccggggtcgtcccacccggtagcggggctgtctgcgtggagggagtcccgctgggggaccgtggctcgcc

SEQ ID NO: 869386 - DNA, 120 bp, Artificial Sequence
  ENSG00000281880_26 (sequence is synthesized)
agagcctgcccagagcttctagccagtattgatgcgtcaacatgagccgaataaacacgatctccaataaacatctctaatgagggaggaggcccgaggatggctgggtttgatttatga

SEQ ID NO: 869387 - DNA, 120 bp, Artificial Sequence
  ENSG00000281880_27 (sequence is synthesized)
agtctgcctcactttgagccagtggctgcactttatggagaaaatatatgtgcccatcactcacccatctatttgcagcgtccatggagcgcctcggggaacacgcatggacaattaaac

SEQ ID NO: 869388 - DNA, 120 bp, Artificial Sequence
  ENSG00000281880_28 (sequence is synthesized)
acacccacttacggcgggatgatgaggctttctgttaaccacatgtgttcagaaatggatacagccctaattttgacacggaatgcagctaatgcaccttgctatagatgtacgtccgtt

SEQ ID NO: 869389 - DNA, 120 bp, Artificial Sequence
  ENSG00000281880_29 (sequence is synthesized)
ggaaaagtgtgtgatgggcacctgatctacaccaagagaacagggctgtctgcagaagacccagcggcctgacaccttttcttgttgccggggaaggaaagtttttcttttgatttgtcc

SEQ ID NO: 869390 - DNA, 120 bp, Artificial Sequence
  ENSG00000281880_30 (sequence is synthesized)
tctcacgatttttcccttttcctttgcattacagtttcagagaggaatgtaaatattttgactagacctctgcaggggccttttaaacaccaggcacaatcatctgtggaatactgtagt

SEQ ID NO: 869391 - DNA, 120 bp, Artificial Sequence
  ENSG00000281880_31 (sequence is synthesized)
tcatactttcaaaacttgggtgttaaagagtctgtcttgctgaggaaacccatagaactagtggcgacctttcaactccctatttgtgtgatgaaatgaagtatgccctagtgattgtcg

SEQ ID NO: 869392 - DNA, 120 bp, Artificial Sequence
  ENSG00000281880_32 (sequence is synthesized)
aattttaaggacttgttctgtcactgctactttccgatcgtttgcagggaagaaaaatcaatcaaacagacctttgatggggttgtggcaaggtcacatttcactgtgctccaggcttac

SEQ ID NO: 869393 - DNA, 120 bp, Artificial Sequence
  ENSG00000281880_33 (sequence is synthesized)
aaaattaacaccttgtttatctcttctgtgtatttgatataggggtttctttcttttcctgttttggtgtttaatacaaggctgatatattggaacagaatgcagacttcaaagaaacta

SEQ ID NO: 869394 - DNA, 120 bp, Artificial Sequence
  ENSG00000281880_34 (sequence is synthesized)
aaattaggaggcaaatagcgtcaaggtttcctcggtttctgtatgtagtacaaatagtatagcgtcttttcatccaaaaagaagcaaaaattgccaggaggcataaagcatctctgaata

SEQ ID NO: 869395 - DNA, 120 bp, Artificial Sequence
  ENSG00000281880_35 (sequence is synthesized)
tccgttttttttaaagaaacaaacatttcccaaatattgatgtacgcatggttttatagtctgaaaatatttctaggcacaaatatggcatacaaacattcgtttcaactctgtcgttgt

SEQ ID NO: 869396 - DNA, 120 bp, Artificial Sequence
  ENSG00000281880_36 (sequence is synthesized)
tgttaaaatgacagtaaattatagtttattttaagatacctccctgttaatgtcagttgaggttattttagggcctggatgctctaggaagaccacctaaaatgtgtttatttctctgcc

SEQ ID NO: 869397 - DNA, 61 bp, Artificial Sequence
  ENSG00000281880_37 (sequence is synthesized)
gctctaggaagaccacctaaaatgtgtttatttctctgcccaattcacctatagtgtaagg

SEQ ID NO: 869398 - DNA, 120 bp, Artificial Sequence
  ENSG00000281880_38 (sequence is synthesized)
tttaaataaaatattttgggcatccttaagtccttttttaaaaatccaacattctacaattgtgacaaataggctgaaaaattttgttttgtttataccaaattcattttaataaagcat

SEQ ID NO: 869399 - DNA, 120 bp, Artificial Sequence
  ENSG00000281880_39 (sequence is synthesized)
ttgctgagattttaatacaacaaatgccaacaaaatgcatcagagtagaaaaaagaaaatattttcagaattgcctataatattgcttgtgatcctaaattttttgatgcaaggaacttg

SEQ ID NO: 869400 - DNA, 120 bp, Artificial Sequence
  ENSG00000281880_40 (sequence is synthesized)
aatttttcagctaatattattctgttttcttattctgtgtttctattagaacactcacctatgctctgcttcccttgctgtcttcccatagcttatgtgtgcactatgaatttcaataaa

SEQ ID NO: 869401 - DNA, 120 bp, Artificial Sequence
  ENSG00000281880_41 (sequence is synthesized)
ggggaaatctgaatagtaattccagtcatccaaattctatgagagggtctgaggaaaaaaagacaagcctatcacgggcgccctccgatcacgaagggcacgggcatgagaaggcgacag

SEQ ID NO: 869402 - DNA, 120 bp, Artificial Sequence
  ENSG00000281880_42 (sequence is synthesized)
aggaggtcctcggctcgccctgggcgcggagcgaggactctggtcagaggtaattatgtcaccgcgttttctcgccgtgacagccgaataaacacgatctccaataaacatctctaatga

SEQ ID NO: 869403 - DNA, 120 bp, Artificial Sequence
  ENSG00000281880_43 (sequence is synthesized)
gctgagctctatggatccatctggatgaaaagggaacttatatttgtcagctttgcaagtggggctcagtttcggggaaggggtgagagagaagaaaggaagaaactgatgaagagaatg

SEQ ID NO: 869404 - DNA, 120 bp, Artificial Sequence
  ENSG00000281880_44 (sequence is synthesized)
aaagaggaaaagacctgcctgacacctggatcttagaaacaaacctttcctaacaacagacctccaagcataaagagagtattttcaaacaactcaaaaaatcagtctaaatcaacgata

SEQ ID NO: 869405 - DNA, 120 bp, Artificial Sequence
  ENSG00000281880_45 (sequence is synthesized)
ttcaaaaggacaaagaaaaaaataataggggattatgttcttttctcatctgtcttatgttctgaagttattcatttgacaccttctgctcttgtacgatggcaggcctgtattcccaaa

SEQ ID NO: 869406 - DNA, 120 bp, Artificial Sequence
  ENSG00000281880_46 (sequence is synthesized)
gatgcccattccagccatctattgctgtgtaacaaatgacgacaatgtatgatggtttaaaatcacaactattttatttcatctctcaatattgtgggtcagagttcaggcttggtgaag

SEQ ID NO: 869407 - DNA, 120 bp, Artificial Sequence
  ENSG00000281880_47 (sequence is synthesized)
gggtctaagtgaagtttagaggcttcactcacatgtctgcaccttggcagggatggcttcaaagatggggtccactgggactggcgactggagcccacacctggcctctccactcagact

SEQ ID NO: 869408 - DNA, 120 bp, Artificial Sequence
  ENSG00000281880_48 (sequence is synthesized)
tctgacagtaagcaaggcagaatcacatgactttttatgacctagcttcagaagtcacaaagcatcattttggtcataccccattggtcaaaacagtcacaagcctgcctagactgaaga

SEQ ID NO: 869409 - DNA, 120 bp, Artificial Sequence
  ENSG00000281880_49 (sequence is synthesized)
ggcaggggatggacgctagcttttaatggagggagtgtcaaagaagtcatacttccatggctccgaagttgggctccaatgtggaatgtgtttacctttttccttctgaatgggccccat

SEQ ID NO: 869410 - DNA, 120 bp, Artificial Sequence
  ENSG00000281880_50 (sequence is synthesized)
gagcagccataactgtgaagacagatacaatggcagggaccatggcgccttcatttcctaaggtccatggtaattttctgcaaaccaatacttctcctcaataaacacattatagaataa

SEQ ID NO: 869411 - DNA, 120 bp, Artificial Sequence
  ENSG00000281880_51 (sequence is synthesized)
gcttttaattaaagatggttcaaggcaccggaccacatgaagggcagtaattacaaattacattacaaacccgacagacgtagcaggatctgctgggaaaaagcctcgaactctcttcct

SEQ ID NO: 869412 - DNA, 120 bp, Artificial Sequence
  ENSG00000281880_52 (sequence is synthesized)
gtgtgtgtcccactggcgatgtcggtatgtcagcgtgtgtcgtgtgtgccaccggtcatctgtgtgtggtgcgtgtgtctccgcaccacgactccctctcctgggtctgctcagtccacg

SEQ ID NO: 869413 - DNA, 120 bp, Artificial Sequence
  ENSG00000281880_53 (sequence is synthesized)
ctcgccccaaccctcagagactttaaagggccaaatttgttttgacctacagccagaccactttttgtccaacaataacccagaagcgggtcagattccatcccctgtgcccagcagcag

SEQ ID NO: 869414 - DNA, 120 bp, Artificial Sequence
  ENSG00000281880_54 (sequence is synthesized)
gtgaggacgttgcacttggtggcagcaggacaaacagtactgaagttatgcctgggcctcaggccaagtagctcggacacctccagggaagatcgaccatcgggctttatgcttttagca

SEQ ID NO: 869415 - DNA, 120 bp, Artificial Sequence
  ENSG00000281880_55 (sequence is synthesized)
agtgcgcaggcgccgttcgggcccgccgccccctcccaaggcgtggggtcccggggacagaccccgagcccctctctgcgcaactaccgcctctaaaaaaaagaccatctgcgtccatgg

SEQ ID NO: 869416 - DNA, 120 bp, Artificial Sequence
  ENSG00000281880_56 (sequence is synthesized)
agcatgcctcaatttagggttgtgcaaactagtgtagcctcttgcctataaatgaagactaagggctccatccaaccagctcgcttgtctgggtccagtctccagaactcttccagcttc

SEQ ID NO: 869417 - DNA, 120 bp, Artificial Sequence
  ENSG00000281880_57 (sequence is synthesized)
cctgtagtaaaagaacacaccttggtgggcattgttcatttatcagtgcacagggccacgttgacaaagtcttaatatttaatggcttacgagtctaataataaaaaaattaaaactcta

SEQ ID NO: 869418 - DNA, 120 bp, Artificial Sequence
  ENSG00000281880_58 (sequence is synthesized)
ctccagggagaggaacccgcggaggagaggatcccggcccagtctttttgaggttatacttctctgattgatgccttcagtaccaagttgaatagctatgatggcaggagttggagcagc

SEQ ID NO: 869419 - DNA, 120 bp, Artificial Sequence
  ENSG00000281880_59 (sequence is synthesized)
cattttgggccatgagatgaaagccttatattgagccatgttttgagcagaagaacagaaaagaaagaacctgggcccctgacattactgagccaccataaagacctaggctctctactt

SEQ ID NO: 869420 - DNA, 120 bp, Artificial Sequence
  ENSG00000281880_60 (sequence is synthesized)
gaacttcagaataaggataataagagtatcaacctcagaggatcactgcaagaattgagtgggatacatatgacgtgcttagcacagtttgtggcccatgtggttccacctcctacctat

SEQ ID NO: 869421 - DNA, 120 bp, Artificial Sequence
  ENSG00000281880_61 (sequence is synthesized)
aatggagatggggacttgtggggtgacattgtgccgcttccaggcttttagcaggcaacttctcctggctcggatgatctagagcagtgattttccagcagttcctgggggtctggtgag

SEQ ID NO: 869422 - DNA, 120 bp, Artificial Sequence
  ENSG00000281880_62 (sequence is synthesized)
gccgccccctcccaaggcgtggggtcccggggacagaccccgagcccctctctgcgcaactaccgcctctaaaaaaaagaccatctggtaattgtctttctttagatcttcccttaatta

SEQ ID NO: 869423 - DNA, 120 bp, Artificial Sequence
  ENSG00000281880_63 (sequence is synthesized)
tgcttttaattaaagatggttcaaggcaccggaccacatgaagggcagtaattacaaattacattacaaacccgacagacgtagcaggatctgctgggaaaaaggtaccggaataaaaat

SEQ ID NO: 869424 - DNA, 120 bp, Artificial Sequence
  ENSG00000281880_64 (sequence is synthesized)
ttgactaaagtttgggataaattaatcggtggcttgaagaacagtagcacatttctgattatgtaggctccagccaggatttaagttttgtgtcatgattgttttcatatttctttgaca

SEQ ID NO: 869425 - DNA, 120 bp, Artificial Sequence
  ENSG00000281880_65 (sequence is synthesized)
tctattgatttggaggcagctgcaagcctttgtcacaggagagaagagcagtcacaatatattagcttgatggcataactcgaaccggagaagcgaggggagcctgagtgactggggcgc

SEQ ID NO: 869426 - DNA, 120 bp, Artificial Sequence
  ENSG00000281880_66 (sequence is synthesized)
acatgacccccctcctggggcctttgggctcaacccttacttttaacttgttctaacaggaataatggagtagtactactaatgcatggtcagaaggggcttttctgtctagaacgcagg

SEQ ID NO: 869427 - DNA, 120 bp, Artificial Sequence
  ENSG00000281880_67 (sequence is synthesized)
cggcgggagttgcaccgccacagcccgggagaccaaagagtctccactccccgctcccggcgcctcctcgccgaccggagccccgagcccagtgagcccagccggtcccacgtcgagagg

SEQ ID NO: 869428 - DNA, 120 bp, Artificial Sequence
  ENSG00000281880_68 (sequence is synthesized)
cgctgggttgggagaagttctgctggtcgtgggctcggcccccaggcgccaggccgagtgcccacctcggcttctttagggggcctacagcgggcagccgagcggctggcggacccggag

SEQ ID NO: 869429 - DNA, 120 bp, Artificial Sequence
  ENSG00000281880_69 (sequence is synthesized)
cttgggaggcgaccgccaggctggtgcccggcctgacccggcgttcgcggccgcccgctcgcccgccgcgggccgggagcgtacaggagtgtgacgcagattgtgaaaacagaagggagg

SEQ ID NO: 869430 - DNA, 120 bp, Artificial Sequence
  ENSG00000283031_0 (sequence is synthesized)
agtcccggctcagcgtctgccccggagaggctgcaaggcaagaggagcagcggcgttaatctgctgagggctgagagaaacgtgagcgttaccctgggctggccccttggctgctctccc

SEQ ID NO: 869431 - DNA, 120 bp, Artificial Sequence
  ENSG00000283031_1 (sequence is synthesized)
ttactacggagctggaaggtggcccctgacttctttgcaaaggccgtaggcaagcacccaaagcatatcatcaggtgcccacaaggcacaggacaccgggccgacacctggagctggggt

SEQ ID NO: 869432 - DNA, 120 bp, Artificial Sequence
  ENSG00000283031_2 (sequence is synthesized)
gaggtgagagctgcagaggcgggggcaagaggcctccttcatgccaggcctggaccatgaagaggaaaccactttctgtccccaaggagctcaagtctgatggggaaggagccactggag

SEQ ID NO: 869433 - DNA, 120 bp, Artificial Sequence
  ENSG00000283031_3 (sequence is synthesized)
tggacggagtcagggcctgggatgccaaccacaggacccagctctgtcagcgaagcagaaaggttgtgcctggtctccctgcgtcccaggccaatccctcctcctgggtgtgtgatcttt

SEQ ID NO: 869434 - DNA, 120 bp, Artificial Sequence
  ENSG00000283031_4 (sequence is synthesized)
gcatgtacagttatctactctgtggggcaggactgtgtggaagggaaacggaggctgcgtgggagcctggaagaggagggtggcacctaggctattccctctgccagggaattccttcgc

SEQ ID NO: 869435 - DNA, 120 bp, Artificial Sequence
  ENSG00000283031_5 (sequence is synthesized)
cctcgttcagaaaacatctacccattcggtaagatcagctgccactctgtggtcccatcacacttggctcagcactctgctgagtctgtttacttctctctggaccaggggtggctcatg

SEQ ID NO: 869436 - DNA, 120 bp, Artificial Sequence
  ENSG00000283031_6 (sequence is synthesized)
gacagggactcccagcactgagcacccagcaggggcagagaggtgtctgctggctgagtgaatgaccctgaccaaatgggaagagagacgccttcctggcctgggggcactgagatgctg

SEQ ID NO: 869437 - DNA, 120 bp, Artificial Sequence
  ENSG00000283031_7 (sequence is synthesized)
aagcctggccgcgtgggggtcgtcatcagctgagtctgcggtcccctgtggtcacacaggaccaggtcctcctagactccacagcccccggcccagggatgaggaaggtgctgctcggcc

SEQ ID NO: 869438 - DNA, 120 bp, Artificial Sequence
  ENSG00000283031_8 (sequence is synthesized)
caccatgggccacagccttcctgctcagctcagcctcggtgatgaataacgctgcccctgctgtgccacttccgggctctctgggctcccacactctgctgtggaggcccaggctggctc

SEQ ID NO: 869439 - DNA, 120 bp, Artificial Sequence
  ENSG00000283031_9 (sequence is synthesized)
tggccctgcggggccttgatggagcagcagtggggaccatgcacctctgagggtctgggtgagtgggggctgcagccaggcctggctggcctgggggatcaggagggtctgcaaaccaag

SEQ ID NO: 869440 - DNA, 120 bp, Artificial Sequence
  ENSG00000283031_10 (sequence is synthesized)
ctctggggctccctgaggttccaggaagaaccccgcctgtcccggcaaaggtggatccaggagaggagtgggcttggccacctcggctgccaccagaagctgccccctcagctcctatct

SEQ ID NO: 869441 - DNA, 120 bp, Artificial Sequence
  ENSG00000283031_11 (sequence is synthesized)
atgactgttctgtctcccgttagcaaggtctgcaacattgctctgagcagcatcctccaatgtggtgcacctgttcgacaggggtgcaaaggtaggtgctggggtgggggcagtcatgga

SEQ ID NO: 869442 - DNA, 120 bp, Artificial Sequence
  ENSG00000283031_12 (sequence is synthesized)
cttgctccccactccgaaaagctctcactcctcaggaaagctctcaaaagcagagcctgcatctgactagtctctgcaccccagtgcctggcatagcttctggcctcaggtaggtttcag

SEQ ID NO: 869443 - DNA, 120 bp, Artificial Sequence
  ENSG00000283031_13 (sequence is synthesized)
gtaaggtctgaatgagtgattgagggaaacaggtgctggcttggagaagatgctgtgggatagacggcactgagctgggtcttgaatggacagggtttgagccaccagccatgcaggaag

SEQ ID NO: 869444 - DNA, 120 bp, Artificial Sequence
  ENSG00000283031_14 (sequence is synthesized)
ggctatccacaagcagagactcaaggtagggaagcacagagtgaccagggatgctacagttgggccagctgggtgcgggacgatggagggaagacgtcaaacagggaggaggagaaaaaa

SEQ ID NO: 869445 - DNA, 120 bp, Artificial Sequence
  ENSG00000283031_15 (sequence is synthesized)
ataacgcagagaggggcaggaccgtggcaacaactgaactgaagtgctttaggcatttccagaaatccagtgttcttcttccctcggcagcgcctaccagggaaagcaaaagcctgcaag

SEQ ID NO: 869446 - DNA, 120 bp, Artificial Sequence
  ENSG00000283031_16 (sequence is synthesized)
cctcagtgcctggcccgctcctggcctggaaagaggaacagagggaggacggcggggctgggtggtctcccgatcacaagcatacatttcccaggcatctgggcagtgatggaactgtca

SEQ ID NO: 869447 - DNA, 120 bp, Artificial Sequence
  ENSG00000283031_17 (sequence is synthesized)
acctggaagtcacctcgaaggagaaatgaccgtgtgcctcagatagaacagaccccgggccccagggtggagcacgcactatccatgaactcagggtcctaggggtggagtccagggccc

SEQ ID NO: 869448 - DNA, 120 bp, Artificial Sequence
  ENSG00000283031_18 (sequence is synthesized)
tgggtggcagggccaggaggagcagccgggtctacacaggatggcaccgtgcagtggtggtgacgctgagcagggcctggtgagcacttgctgggtgatcaccacgtgctggcgctggca

SEQ ID NO: 869449 - DNA, 120 bp, Artificial Sequence
  ENSG00000283031_19 (sequence is synthesized)
ctggcacttcacagtcctcattgcttttgagttttgggagaggtgcagtgaggtgacctgcccagaggagggaggctgatctgatctgacatctgccataggcctgtcctgtctcacatt

SEQ ID NO: 869450 - DNA, 120 bp, Artificial Sequence
  ENSG00000283031_20 (sequence is synthesized)
ggttcctggcctgtgtactgggctcacctggaggctttaaaaacatactgaggctcaggcttcaccccacaagtttctgattcaagagtatgtttttgcctttttgttctcactcccaaa

SEQ ID NO: 869451 - DNA, 120 bp, Artificial Sequence
  ENSG00000283031_21 (sequence is synthesized)
gtgtccggatctgtgctcagagcgcaaagaaatttactgaaaaaaataaaattaaggaacgacagctcaaagagccagcaatttatgcaaatgaatgcaaataaatacacacttccatac

SEQ ID NO: 869452 - DNA, 120 bp, Artificial Sequence
  ENSG00000283033_0 (sequence is synthesized)
aggtgttggaatcggtgggtggattgccggtacatttgcactgtgtcctagagagcctctatgcatttcaactctgattctccttcaccatctatgtgcagcccacaaccgcaggacccc

SEQ ID NO: 869453 - DNA, 120 bp, Artificial Sequence
  ENSG00000283033_1 (sequence is synthesized)
gcccctggccctgaatctcccatgtcctggcgccaagcaggtgagtcagcctaggaggaggaagggctcccggaagccaagcccatgctggggtggtgagaaacaactttcctatgcaag

SEQ ID NO: 869454 - DNA, 120 bp, Artificial Sequence
  ENSG00000283033_2 (sequence is synthesized)
gaggtgcctgagcaccccctgatggtcaagcctgagccccctcacctccccgaagtgtgatggaggaaaggccggaaagaggcagcagtcttcacccactgaggctgagtttctcactca

SEQ ID NO: 869455 - DNA, 120 bp, Artificial Sequence
  ENSG00000283033_3 (sequence is synthesized)
tgccaagttttacataagctggggaccatgtgcttcaaggctagaggtcttggcgggcccagggccttggaggggcctggatgaccaaggggtccgtggcttaggccctgcctctgcatg

SEQ ID NO: 869456 - DNA, 120 bp, Artificial Sequence
  ENSG00000283033_4 (sequence is synthesized)
gggaatcttgggaaggttggaagcccacagcccctaccgagaaaggagccatgggccagatcttttgcacaaatcccacctgtgctccttgaccgcccctccccaccggggccacggtga

SEQ ID NO: 869457 - DNA, 120 bp, Artificial Sequence
  ENSG00000283033_5 (sequence is synthesized)
ccaggaggcagaagcctccatccgttcacaggaccagcatcctgggaggaccctggcctgagcgagctgctgaaggggaccctcatgctggatggttggctacttggcacccttttctct

SEQ ID NO: 869458 - DNA, 120 bp, Artificial Sequence
  ENSG00000283033_6 (sequence is synthesized)
gtggagcagggatgacatttgagagccaccaaagatgggcaggaaaaacaaaggccaccacaaaggaagctgaaggcagaaagagatgcagagaaagtgggagaaactcggctgtgcttt

SEQ ID NO: 869459 - DNA, 120 bp, Artificial Sequence
  ENSG00000283033_7 (sequence is synthesized)
gtgggggccctgcagggacatcggctcctgaagggatgagagaaagggtcccctgaactttgacactctgttcttctcaaggcctggccagccctgtggctccttagaggaatctgggtg

SEQ ID NO: 869460 - DNA, 120 bp, Artificial Sequence
  ENSG00000283033_8 (sequence is synthesized)
ccttctgtccctagtacctgacaagccccaggtgagaagacctgagttcacctgcgctgccacgtgtaacctgatggccctggcaccctcgcagggtttgaatagctgccctttccacct

SEQ ID NO: 869461 - DNA, 120 bp, Artificial Sequence
  ENSG00000283033_9 (sequence is synthesized)
gtttcccggattttccacaccacccagaggctcatattcaaccccacagcctacaagtcagccaggggcctttggccacatgtactgatgatgagaatcactggattgtaagctgtaaaa

SEQ ID NO: 869462 - DNA, 120 bp, Artificial Sequence
  ENSG00000283033_10 (sequence is synthesized)
gcacaaggatggtgttttgttccccgctaccccctgcacctgaggcccagggaggattgctgctcggatgaaggagagcgagtgttcatggagctctttgcagaagccacgggaagccct

SEQ ID NO: 869463 - DNA, 120 bp, Artificial Sequence
  ENSG00000283033_11 (sequence is synthesized)
tcctgtgccttctcaggtttagttctcagacagccccactttccagatgaggaaacagaggctaagaaaggagaataaacttgtccagaatcagtggtgaggctgggatttgaatcccat

SEQ ID NO: 869464 - DNA, 120 bp, Artificial Sequence
  ENSG00000283033_12 (sequence is synthesized)
gagcagagttgggccagacgcgtcacctcccaagctctgcggcacccaagggttcccagggtcctcttcctccatttggctcttttcttctctggactctcccaccttcgaggattggac

SEQ ID NO: 869465 - DNA, 120 bp, Artificial Sequence
  ENSG00000283033_13 (sequence is synthesized)
tccttgcagggagcgcaaagcagagaacagaggaggcccaactgaggagagtgtgctggagcagatggagcacagagagagcccccaaaccttagcctcacctggagagtggctccctgc

SEQ ID NO: 869466 - DNA, 120 bp, Artificial Sequence
  ENSG00000283033_14 (sequence is synthesized)
aagctgagcccctgtgtgcccagaagtgacataggcattcaggaaagggactgagggaggaaagaaggagccattcctcttcccaggggcgcctgccctgggttcctgagggaggctcca

SEQ ID NO: 869467 - DNA, 120 bp, Artificial Sequence
  ENSG00000283033_15 (sequence is synthesized)
tgtttacatctccaaaggccagtcccaaacacgccagagtgcaatgccctccctcagacccagggccatcctcggagcagccgggaggcagcctgtccactcttaccacaggcaggtcgc

SEQ ID NO: 869468 - DNA, 120 bp, Artificial Sequence
  ENSG00000283033_16 (sequence is synthesized)
gaggcagcctgtccactcttaccacaggcaggtcgcccaggcagcctcctcttagagctcctgaattctggagcatgaaatagaaatgtgaaaaacaggctgggcgtggtggctcacacc

SEQ ID NO: 869469 - DNA, 120 bp, Artificial Sequence
  ENSG00000283033_17 (sequence is synthesized)
gtcatttgacatcaggagtttgagaccaacctggccaacacagtgagaccctgtctctactaaaatacaagtaaataagccaggcatggtggtccacacctgcagtcccagttacctggg

SEQ ID NO: 869470 - DNA, 80 bp, Artificial Sequence
  ENSG00000283033_18 (sequence is synthesized)
gttgcgagaatgacactctgtcaaaaaaaaaaaaaagaatgagagagaaaataaatacgacaaaatgttaacaatgggtg

SEQ ID NO: 869471 - DNA, 120 bp, Artificial Sequence
  ENSG00000283033_19 (sequence is synthesized)
gagagagaaaataaatacgacaaaatgttaacaatgggtgaatgtaggtgaagagtatgtggcagggtgttttttattctcgcaaattttgtgtaggtttgaagttaccacagaatagca

SEQ ID NO: 869472 - DNA, 120 bp, Artificial Sequence
  ENSG00000283033_20 (sequence is synthesized)
aatataagaatgattcctgcagacacacgagtgatttcaactgttcacagggctcaggcaggaagcagatctcttgccctccctctgatccaggtcacttagtccagtccctgaaagcag

SEQ ID NO: 869473 - DNA, 120 bp, Artificial Sequence
  ENSG00000283033_21 (sequence is synthesized)
tggatggacaaccatgccaccctctttcttcaaatacaccttattttgtatcctgccctttttgtgtagcattagatcatgagcattttcctctgctataaatgtcccctcaaatatgtt

SEQ ID NO: 869474 - DNA, 120 bp, Artificial Sequence
  ENSG00000283033_22 (sequence is synthesized)
gtttcttgtgactccctagtgttctacccacgatttcctcggctgctccaccttggtggaattcagtgattcttctgccttttcaccattgtaagtgatgctttgatgaaaagctttgta

SEQ ID NO: 869475 - DNA, 120 bp, Artificial Sequence
  ENSG00000283033_23 (sequence is synthesized)
ggttcatctgtgctgcacctctgaccagtcttttctggaagactctaaggaaggagacaggggcatggaccactggcttttgaaggcattcggtgggtcctgccatgccgccttcccaca

SEQ ID NO: 869476 - DNA, 120 bp, Artificial Sequence
  ENSG00000283033_24 (sequence is synthesized)
ttccagaagggtggtcccagtgaacaacccaccagcacggggccccgctccatggtgccccagcaaggccagcgtccctatacaggaaaattaaaccatttgccaattcaaggcactcca

SEQ ID NO: 869477 - DNA, 120 bp, Artificial Sequence
  ENSG00000245498_0 (sequence is synthesized)
gtgggggcatgagggcgctggagtgaggaacagattggagccttcccacttcctctccaatctcagcccccgggaggaggggtgaggccctcgagggggcccggagttaaggaggaatag

SEQ ID NO: 869478 - DNA, 120 bp, Artificial Sequence
  ENSG00000245498_1 (sequence is synthesized)
accgtttctctctctcctgtctcccccgcctctgcccgtcttccctctaagccggcctctaggtgcagaggctgacgtccaggatggggaccggggaagcctctggagggtatatccggg

SEQ ID NO: 869479 - DNA, 120 bp, Artificial Sequence
  ENSG00000245498_2 (sequence is synthesized)
aaggcaccaaggctgaaaaagatgcagtctagcacctcagttaagaatatggactctaaagtcagactgccaggcttcaaattccagttctgcgacctcagcaaagttacttaaccaagc

SEQ ID NO: 869480 - DNA, 120 bp, Artificial Sequence
  ENSG00000245498_3 (sequence is synthesized)
tctcagtgccttgttttcttcatctgtaaaatgaggatgacgtcacagcattgttgagagaattaatacaggctccagacttgtgaatggagaagtgttgaggtgaccccagctccagcc

SEQ ID NO: 869481 - DNA, 120 bp, Artificial Sequence
  ENSG00000245498_4 (sequence is synthesized)
accagctgacgacaaccataccggagatcctgagagctgcctagctgaccccaggcaccccccagacttcatgtaagctgtttgaagccgaggactttgtctgttttgttcactcccaat

SEQ ID NO: 869482 - DNA, 120 bp, Artificial Sequence
  ENSG00000245498_5 (sequence is synthesized)
acatacccttctatcttcaataattggaaacccagacaaagtttatgaaacgctggttttcaagacataggacatcagacaatcaaggacagtaaacactgagatgggaaacaaacaagc

SEQ ID NO: 869483 - DNA, 120 bp, Artificial Sequence
  ENSG00000245498_6 (sequence is synthesized)
caaaaactggaaacagcccaaatgtccagcaacaaaagaatggataaacaaattgtggtatatttactacctagcagttgaaagaaataaacctctgacacacacaagctggattaaaaa

SEQ ID NO: 869484 - DNA, 120 bp, Artificial Sequence
  ENSG00000245498_7 (sequence is synthesized)
agaagaggaaatgaattattgatacatataataaagattactctcaaaataattatggtaagtcaaagaagtcagaccatgctccctaagagtatatacttcatgattcaatttctgtac

SEQ ID NO: 869485 - DNA, 120 bp, Artificial Sequence
  ENSG00000245498_8 (sequence is synthesized)
aattctataaaatgcaaattaatatatgataacaaaaagtgattgcctggaaatggtgagaggacagaggggccagaatcagccaggattacaaagatgcacaaggaaacttttgagggt

SEQ ID NO: 869486 - DNA, 120 bp, Artificial Sequence
  ENSG00000245498_9 (sequence is synthesized)
ggtggatatcttgagtgtggtgatagttttacagttgtatgcctatgttagaagctatcaaattgtacactttaagtatgtacactttgttgtatattaattatgccttaataaagttat

SEQ ID NO: 869487 - DNA, 120 bp, Artificial Sequence
  ENSG00000245498_10 (sequence is synthesized)
tataaaaagtagttccaggcaatactagacactcaataaacatttgtaaactagtcgttgactttcttggactgtgacttgttagcagttagggattgattattctgtacatgtttatgt

SEQ ID NO: 869488 - DNA, 120 bp, Artificial Sequence
  ENSG00000245498_11 (sequence is synthesized)
ccctgcattaaaagacaagcctttggagtttttctaaagaaaaaacatgaacacagagaacagaagtaattattgaaggccactacttcattaagtgtgtctgtactgagagcatcgttc

SEQ ID NO: 869489 - DNA, 120 bp, Artificial Sequence
  ENSG00000245498_12 (sequence is synthesized)
ctagtggctaaccacgttattaggctaagaagccctttagtattggtgaagagttgatcctgcctgctgctaaggacatttgtcatgaacttttaggagaggctgctgttcaaaaggtgg

SEQ ID NO: 869490 - DNA, 120 bp, Artificial Sequence
  ENSG00000245498_13 (sequence is synthesized)
cacatgttcctctttcagctaacaccataactagaagaatggatgaaatagcagagaatattgaggcacaattgttagagaggattaatgagtcaccgtgctacacaatccacaaaaggg

SEQ ID NO: 869491 - DNA, 120 bp, Artificial Sequence
  ENSG00000245498_14 (sequence is synthesized)
ttttgtcccagaaatagactcatacatatatgatcagtgattttcaacagtggtacaaatgcaagtcagcgcagaaaaaataatctcttcaacaaatggtgcaggaacaattggatatcc

SEQ ID NO: 869492 - DNA, 120 bp, Artificial Sequence
  ENSG00000245498_15 (sequence is synthesized)
ataaaatgaactcggatccacgctttgcaccatatgcaaaaattgactcaaaataggtataggtcctagacctaaatgtaacaacctgaaactctaaaatttctcaggaaaaaaatggga

SEQ ID NO: 869493 - DNA, 120 bp, Artificial Sequence
  ENSG00000245498_16 (sequence is synthesized)
taaaatctttgtggtcttggattaggcaaagatattttcttgtgtttgtgggtaaagaaacctttaatgagggttcaaggtgtaagaggaggaccttgtagagagccagcgcttagcccc

SEQ ID NO: 869494 - DNA, 120 bp, Artificial Sequence
  ENSG00000245498_17 (sequence is synthesized)
agcctcctcatatgcacatggctctgtagaggttctccagacagtgctgctgctgctgtttcgagccttatctcctctgtgctcctcacaagtgtcgttaacagcgggcagctcctggca

SEQ ID NO: 869495 - DNA, 120 bp, Artificial Sequence
  ENSG00000245498_18 (sequence is synthesized)
caaaatgcagttagaatggaaaagctaatggcaaggcatcccaacaacagcctcctcctcctcaagcacatggggcacttgtgtgtgcctctcagcctgagagctcctgatgactgtcct

SEQ ID NO: 869496 - DNA, 120 bp, Artificial Sequence
  ENSG00000245498_19 (sequence is synthesized)
ggggaggttcccaaccacactgtcttggcagctggtggaggcaggtggtgattccaatttactgccatccccgagtcttcaaaatccatcctattgaaaagtgatctggtgagctccagc

SEQ ID NO: 869497 - DNA, 120 bp, Artificial Sequence
  ENSG00000245498_20 (sequence is synthesized)
agcatgtgggttagggtctcctgcttggggttcaagagcttgcagtcctgttcattgaaataggctgtcatggctgctcagctctctgacatatctctcagactggcaaagatattaggt

SEQ ID NO: 869498 - DNA, 120 bp, Artificial Sequence
  ENSG00000245498_21 (sequence is synthesized)
ctgataccaaaagtacaatccatagaagaaaaaggatggatacattggacttcattaaaattaagaatgttttctccttgaaaaataatgttaagagaataagaagataagccacaaact

SEQ ID NO: 869499 - DNA, 120 bp, Artificial Sequence
  ENSG00000245498_22 (sequence is synthesized)
tggaaaaaaagtaattgtaaattacatatctgataaagtacttgtacccaaaatatgcacaagaatctcaaaactcaataataagaaaacaatccaatttaagaaattattttaacatac

SEQ ID NO: 869500 - DNA, 120 bp, Artificial Sequence
  ENSG00000245498_23 (sequence is synthesized)
attttacaaaagaggatatatagatagcaaataagcccacaaaaagatattgaatattattgaccattgggaaaatgcaaattaaaacaaaatgagataccattacacacctattagaat

SEQ ID NO: 869501 - DNA, 120 bp, Artificial Sequence
  ENSG00000245498_24 (sequence is synthesized)
gtctaatattgagaagactaatcatactaactgatgaggatttggagcaactggaactctcaaaccctgctgatagataaatgcacaaccactttggaacagtttggtagttttttaaaa

SEQ ID NO: 869502 - DNA, 120 bp, Artificial Sequence
  ENSG00000245498_25 (sequence is synthesized)
agttaaacatacatctgccttatgccccagccatacaatttttagacatttctcaaggaaaatgaaagcatatgttcattcagagatacacatgcatattcattgcagctttatttgtaa

SEQ ID NO: 869503 - DNA, 120 bp, Artificial Sequence
  ENSG00000245498_26 (sequence is synthesized)
gccctcgggcctggctcgcccgcgggcggatggctccgggtctctgctgctgaggatgtggctgccgggcggaggtcgtccactcccctgggcctttctccgcgagccctcccacgccgc

SEQ ID NO: 869504 - DNA, 120 bp, Artificial Sequence
  ENSG00000245498_27 (sequence is synthesized)
attgtgtgaggactgtaaaagaatctgaaacatctatcaaaacaaaattaactctcattcagcccagtgataaatgttttaatgtcataaggtatttggtgtgtatgaaagggagagttg

SEQ ID NO: 869505 - DNA, 71 bp, Artificial Sequence
  ENSG00000245498_28 (sequence is synthesized)
aatgtcataaggtatttggtgtgtatgaaagggagagttgtgcctaaatcatatactaaatcagagattcc

SEQ ID NO: 869506 - DNA, 64 bp, Artificial Sequence
  ENSG00000245498_29 (sequence is synthesized)
gcaacctctggatgtgccaccactcccggctaatttatgtattttttgtagagatggggtttca

SEQ ID NO: 869507 - DNA, 61 bp, Artificial Sequence
  ENSG00000245498_30 (sequence is synthesized)
actcctgggctcaagtgatcccaaagagtttttaaattaccactttaaccttctgtcattg

SEQ ID NO: 869508 - DNA, 120 bp, Artificial Sequence
  ENSG00000245498_31 (sequence is synthesized)
caaagagtttttaaattaccactttaaccttctgtcattgtcccacaagtctgaaaaacaacaacaacaaaaacccctcctcctattatcatgggatcctcgggatgtggctttgccagc

SEQ ID NO: 869509 - DNA, 120 bp, Artificial Sequence
  ENSG00000245498_32 (sequence is synthesized)
cagaaatctctgtggctggtggtgcctttgcccaagttttgcttgggcccactaggttccttctgcccactcagcctggcaggctgcactcagctcatgctaccagcccagatcccacac

SEQ ID NO: 869510 - DNA, 120 bp, Artificial Sequence
  ENSG00000245498_33 (sequence is synthesized)
ctgccaagggtaagccaggcacagagcagcaaggggtgcatgagcgagcaagtgtggggtctggccactgcccacagccaggcacatcagctatggcaggttgggcagctccaggagcca

SEQ ID NO: 869511 - DNA, 120 bp, Artificial Sequence
  ENSG00000245498_34 (sequence is synthesized)
gcatgggcactggctccctgtgaggttgcggctggaccaggcataccacgagcagcttctgctgatggtaccagggaatgtggtggctcccagaagcttggcgacaccaggaactgcaga

SEQ ID NO: 869512 - DNA, 120 bp, Artificial Sequence
  ENSG00000245498_35 (sequence is synthesized)
gaagcttggcgacaccaggaactgcagagtcccaaagagggtgtaagagccctggttcggggagctcctaggtctggactccccaaagggccacaggcaggagaatcgcttgaatctggg

SEQ ID NO: 869513 - DNA, 120 bp, Artificial Sequence
  ENSG00000245498_36 (sequence is synthesized)
ggcaacaagagcgaaactccgtctccaaacaaacaaacaaaacaaaaacaagtgtccctatatgcatgggtgtgtttctgggctcttctattacattcatctgtttgtctatccattttt

SEQ ID NO: 869514 - DNA, 120 bp, Artificial Sequence
  ENSG00000245498_37 (sequence is synthesized)
ctgtttgtctatccatttttctatttgtgttgcttgtaataatatcacactgctttaattactgtgagtttatagtaagtcttatgtcgaatacagcaagtgcctcctcaccctcttgct

SEQ ID NO: 869515 - DNA, 120 bp, Artificial Sequence
  ENSG00000245498_38 (sequence is synthesized)
tttcctcctcctcttccaagagtagcttgctattcttaatcttttgcattctcctatacattttagaattcatttgtcaaattctacagaaaaaaactgcggttattttgaatggtattg

SEQ ID NO: 869516 - DNA, 120 bp, Artificial Sequence
  ENSG00000245498_39 (sequence is synthesized)
cattgaatctgtggaccaatttgagaactgacatttgtacagtaatcacccgtagagtccttggaaatggtataaacctttagtctctcaataaaattacgttatttacttcataaaggt

SEQ ID NO: 869517 - DNA, 120 bp, Artificial Sequence
  ENSG00000245498_40 (sequence is synthesized)
cttacacatttttgttcagtttgttcctaggtagttgattttttaaaatgtttttgtaagtggtatcatttttaaattttattttctattttttttcttttgagacagggtcttgccctg

SEQ ID NO: 869518 - DNA, 120 bp, Artificial Sequence
  ENSG00000245498_41 (sequence is synthesized)
tcacccaggctggagtgcagtggtgtaaacatggctcactgcagcctcaacctccggggctcaagcaaacctcctgctgcaacctcccaagtagctgggtctacaggcatgcaccaacac

SEQ ID NO: 869519 - DNA, 120 bp, Artificial Sequence
  ENSG00000245498_42 (sequence is synthesized)
atctggctaatttctaatttttttgctggtatataaaaatactaattgattatcttattttgtatctagtaatcctgatggagcagttgattaaaattgtatatcattgcacgtcattct

SEQ ID NO: 869520 - DNA, 120 bp, Artificial Sequence
  ENSG00000245498_43 (sequence is synthesized)
agttgattaaaattgtatatcattgcacgtcattctctttttaaaaatccaagcctagtgagaccctgtctctacaaaaagtttttttttttttaattagctgggcatggtggtgcacat

SEQ ID NO: 869521 - DNA, 120 bp, Artificial Sequence
  ENSG00000245498_44 (sequence is synthesized)
acaaacaaaaaaatccaccaatgactttcccttggaatgatataatccaaactctttgccatgcctatggtggttttaaaacatgtctgcacattgtttgacattctcccaggaagaaat

SEQ ID NO: 869522 - DNA, 120 bp, Artificial Sequence
  ENSG00000245498_45 (sequence is synthesized)
taatcgagtctatatctcctccccttgaatgtgggtgggtcttggtgactaccttgataaaccgaatgcgatacaagtgacactgtgactttcaaggctagatttgaaaataccctgcag

SEQ ID NO: 869523 - DNA, 120 bp, Artificial Sequence
  ENSG00000245498_46 (sequence is synthesized)
cttctggcagtttctcttgagatacttgctcagaagcatttcatccaccatgtaagaagttaggctatcctaagtgtacacggagagaccacaaagagaacgagaaagatagccagtgaa

SEQ ID NO: 869524 - DNA, 120 bp, Artificial Sequence
  ENSG00000245498_47 (sequence is synthesized)
cctgagagctgcctagctgaccccaggcaccccccagacttgtgagcaaaatgaattattgttgtatgttctaacccactgaattctggggtatttgtacgtagcaatgggtatttggaa

SEQ ID NO: 869525 - DNA, 120 bp, Artificial Sequence
  ENSG00000245498_48 (sequence is synthesized)
caacaatctgtaaggccctttttactctgagcttaacctactgtgcaaacttcatctaccacctcaaatacgccccagccaccctgacctcatctgccccatcaagcgagccaaacttat

SEQ ID NO: 869526 - DNA, 120 bp, Artificial Sequence
  ENSG00000245498_49 (sequence is synthesized)
ttctgttttggagcatttggagttgtcatatctccttatcttagaacactcttatcttagctcttccagtgacaatccccttcttgtaattcatctcctcaaatgtcacctccccagaga

SEQ ID NO: 869527 - DNA, 120 bp, Artificial Sequence
  ENSG00000245498_50 (sequence is synthesized)
ggcctgttacctttttgtcaacagcacttattttcagaaaacacttgtttatgcatattaatttttttcatgtatttattgtctgcattttctttctagcatgtaagctgtttgaagccg

SEQ ID NO: 869528 - DNA, 120 bp, Artificial Sequence
  ENSG00000245498_51 (sequence is synthesized)
ttactagctggaaagagtttcccgaccatggcagagggaggaggatcctttgaggttctgtggtgtccctgagttgaggagacaaagttgaaattccagagtggtcaaggcagctggagt

SEQ ID NO: 869529 - DNA, 120 bp, Artificial Sequence
  ENSG00000245498_52 (sequence is synthesized)
ttgtagagcagagtaccagaaagaaaatagatgcacagagagaacctcagagatctgcaaaagatctcagctcttcagctgtgcacctatcagtacatgcatgtgacaaagcaccccaag

SEQ ID NO: 869530 - DNA, 120 bp, Artificial Sequence
  ENSG00000245498_53 (sequence is synthesized)
gccaggggaagaatcacctgaaagtatgaagagaagaatacttggagcatatacaaaccaggaataatttcagttctcaccagccaaattggaagaccccatagataacaggcattaggt

SEQ ID NO: 869531 - DNA, 84 bp, Artificial Sequence
  ENSG00000245498_54 (sequence is synthesized)
cagccaaattggaagaccccatagataacaggcattaggtagagcaggggtccccaacctccaggggcactgaccagtactgtt

SEQ ID NO: 869532 - DNA, 120 bp, Artificial Sequence
  ENSG00000245498_55 (sequence is synthesized)
aaaccttcatctgtatttatagctcccatcacttgcattactccccatcactccccatcacttgcattaccacctgagctccacctcctctcagatcagcagcagcattagattctcata

SEQ ID NO: 869533 - DNA, 120 bp, Artificial Sequence
  ENSG00000245498_56 (sequence is synthesized)
agaatctaatgcctgatgatctgaggtgcagctgaggcagcatagctaggaggtaggtattttgttgctggggactcatatcaaaaccctatcagtgagtggcaagtgacaattaagctg

SEQ ID NO: 869534 - DNA, 120 bp, Artificial Sequence
  ENSG00000245498_57 (sequence is synthesized)
tcaaaaccctatcagtgagtggcaagtgacaattaagctgcatctggtggcagactttatagaggcaagtgagtcaatgtatttcaattgcacagctctatctggtggcaagttttaagt

SEQ ID NO: 869535 - DNA, 120 bp, Artificial Sequence
  ENSG00000245498_58 (sequence is synthesized)
cagaatctgacacttaatttagtctgtgcatggcctgcccattattttatttaccacttctgtctgtgcctctttgctgcactgaacacttgtctcagtcacagttttggtaagcccaca

SEQ ID NO: 869536 - DNA, 120 bp, Artificial Sequence
  ENSG00000245498_59 (sequence is synthesized)
agctaaccctagctaaaatgagtaaaaagcaaacgacactggagagcttctttgaaaagtcagagagacccaatgatgagacagcagaagactcttaagactgccaacaaaaagaaagct

SEQ ID NO: 869537 - DNA, 120 bp, Artificial Sequence
  ENSG00000245498_60 (sequence is synthesized)
gggaaggctttaaaaagcagatatggaccagggtagagttcgtacgctgtagcttttcaagaacaccgatctcattaattaaagaacagcaactatttaattccagttataaactattgt

SEQ ID NO: 869538 - DNA, 120 bp, Artificial Sequence
  ENSG00000245498_61 (sequence is synthesized)
tttccagttagtctgggtaggtgtggccgtttgtagaatagttagattacattagtctattgcgttggtacagttgtctatagcttgagcatataaaaactcctgagcccagcagaaaag

SEQ ID NO: 869539 - DNA, 120 bp, Artificial Sequence
  ENSG00000245498_62 (sequence is synthesized)
ttactttccaataccagtctccatcctccgtgctttggaagttgcatcgttttccggtttttcgtactcaaagaacactgtcaattatgacagctctgtgacctctggtaatgaattagt

SEQ ID NO: 869540 - DNA, 120 bp, Artificial Sequence
  ENSG00000245498_63 (sequence is synthesized)
gtattagtcactcctgaaacgttccttaaagtgctggaacttaacagtagcacagcacatccagtacacagctgtaccgtatttccatatttttcaaagctgaaaatcttaattggatat

SEQ ID NO: 869541 - DNA, 120 bp, Artificial Sequence
  ENSG00000245498_64 (sequence is synthesized)
cttggatcattaacttaaaacctcagcggatttttctttcaaagcagacataactgaggatgctgaccaatgaatgcaaataaactatgcaatattttttaaaataacaaatgtatgtta

SEQ ID NO: 869542 - DNA, 120 bp, Artificial Sequence
  ENSG00000245498_65 (sequence is synthesized)
gttttttttaagctgaggtcaactatgttttggggggtatgtgcttttttaaattattgttttatttcaatcgatttttgggggtaacaggtggcgtttggttacatgaataaggttttt

SEQ ID NO: 869543 - DNA, 120 bp, Artificial Sequence
  ENSG00000245498_66 (sequence is synthesized)
agtggtgatttctgagattttggtgcgtccgagcaatgtacactgtatccaatgtgtagtcttttgtccctcattagccttccccttacccctgagctcccgagtccccaaagtccaatg

SEQ ID NO: 869544 - DNA, 120 bp, Artificial Sequence
  ENSG00000245498_67 (sequence is synthesized)
tatcattcttattgaagacagctaaatttttaactctgagactcactggagagaatgactggttgtctttgggtgttactgaaaagccaaaggattaagcaatagggataaagtagagga

SEQ ID NO: 869545 - DNA, 120 bp, Artificial Sequence
  ENSG00000245498_68 (sequence is synthesized)
ggagataattgttctcgtatgtcatatgaaaatgctaaccatagtttgtaagctaacagaagaagcctgaggaagttcccgaatttatgatatcctcttcccttttttccaaagaaagat

SEQ ID NO: 869546 - DNA, 120 bp, Artificial Sequence
  ENSG00000245498_69 (sequence is synthesized)
agagatgcacagggaaggggtgcggagctcccatgccctctccagggcaccaccctccaggcacctccatgtgttcagctatctggaagctccccagactctgtccttttgggttttcat

SEQ ID NO: 869547 - DNA, 120 bp, Artificial Sequence
  ENSG00000245498_70 (sequence is synthesized)
ttcattatgtaggcatgaataattatatcattgaccactggtgaccaacccaaacttcagatcctttcccttccccagaggttggagggtggggctgaaagtcccagccctctaatcatg

SEQ ID NO: 869548 - DNA, 120 bp, Artificial Sequence
  ENSG00000245498_71 (sequence is synthesized)
gctgggccaccatttacctcattagcatacaaaagactcctgttgctttagagattccaagggtttgggaagctatatgtcaggagacaggagaagaccaaatatatatttcacagtatc

SEQ ID NO: 869549 - DNA, 120 bp, Artificial Sequence
  ENSG00000245498_72 (sequence is synthesized)
acacacacatactctcttgatcacaggtgaagttttgcccaaagcaacagaagtgaagcaagcttctattctcacagaggtttgggtccggtagatactaataacttctattctctgatg

SEQ ID NO: 869550 - DNA, 86 bp, Artificial Sequence
  ENSG00000245498_73 (sequence is synthesized)
aatctcccaggctggagtgcagtggcactaacacagctcactgtagcctcaatctgcagggcttaagcgatcctcccacctcagcc

SEQ ID NO: 869551 - DNA, 120 bp, Artificial Sequence
  ENSG00000245498_74 (sequence is synthesized)
gaatagctgggattacaggcatgcactaccatgaccagcatatttgtattttttgtagagacgggttgttactatgttgctcaggctagtcttgaactcctgacctcagcctcccaagta

SEQ ID NO: 869552 - DNA, 120 bp, Artificial Sequence
  ENSG00000245498_75 (sequence is synthesized)
tcaggctagtcttgaactcctgacctcagcctcccaagtagctaggaatacaggcacatgccaccacagccagcatatttttgtattttttgtagagacagcttactgccatgttgctta

SEQ ID NO: 869553 - DNA, 120 bp, Artificial Sequence
  ENSG00000245498_76 (sequence is synthesized)
ggctgatcttgaactcctgagctcaagggctccacaggccttggcttcccaaagtgcaaggactaaggtgcaactgccacacccagcctttcatatgtattatcttatttaagcttcact

SEQ ID NO: 869554 - DNA, 120 bp, Artificial Sequence
  ENSG00000245498_77 (sequence is synthesized)
ttacaagtgagaagggcagccttggctcagagaagttaggtgacttgcagcaaatcacataattgctaagtgatggatctgagctttagccccaggactatctgaccttgggtctaaact

SEQ ID NO: 869555 - DNA, 120 bp, Artificial Sequence
  ENSG00000245498_78 (sequence is synthesized)
tatactactgtatttttcgttaagtcagtcagagttctatcctttgacagaaagtataaccttcttttaaggcagaataagaccctctgcccaaccctgctctttctttctcctccgcac

SEQ ID NO: 869556 - DNA, 120 bp, Artificial Sequence
  ENSG00000245498_79 (sequence is synthesized)
taagaagacagcgaatacagtagagggttttggactgggatagtggttgcagagaagatctggaactaaaaatatggaccaggggtagaaatggtggtgattccaccaaacttggaaaca

SEQ ID NO: 869557 - DNA, 120 bp, Artificial Sequence
  ENSG00000245498_80 (sequence is synthesized)
cttaacaagaccccataacatgcaagatatgcaagaaatggggtacattttctataccagtgccttaagtaaaaaaattccttgttaaacaaatgatttagagaagacagaaccaaatat

SEQ ID NO: 869558 - DNA, 120 bp, Artificial Sequence
  ENSG00000245498_81 (sequence is synthesized)
atatatatagctgtgtgtgtattctaataaaggttgttaaagtcttaaagttagtggtgggagaaaacaataaaaaaatatgaaatctccctatgttaataaactaatttcaaataccaa

SEQ ID NO: 869559 - DNA, 120 bp, Artificial Sequence
  ENSG00000283036_0 (sequence is synthesized)
actcacccctgcaccatcctcgctgtcacagtgcctgatgccccaaaactggaagtgtgcctgccattgcctttccctgcctggtttccagcagtcccatcacatggctccaaaaaacag

SEQ ID NO: 869560 - DNA, 120 bp, Artificial Sequence
  ENSG00000283036_1 (sequence is synthesized)
catcggggtttttttctagaacccaaatttataaacaaggggcaatgtcctctgacaagactgggcatccagttccaatccaaaggctgcccctttgaccaggcccatcttctccacctc

SEQ ID NO: 869561 - DNA, 120 bp, Artificial Sequence
  ENSG00000283036_2 (sequence is synthesized)
acatcagacagccaatcggctgcccagacctcgaaacctcagtaacctagaaggaaatggaccttggcaaacgtgtgtcaggagaggatgacttggaggtgtccaccgtgtttcttactg

SEQ ID NO: 869562 - DNA, 120 bp, Artificial Sequence
  ENSG00000283036_3 (sequence is synthesized)
acctaccctgcatccaggcacggagtccagggacaccccctgctgctgcctaagagaaagtggcccaagaagcactggcccggtgcctgctgatgccaggagccctctgctactgcctga

SEQ ID NO: 869563 - DNA, 120 bp, Artificial Sequence
  ENSG00000283036_4 (sequence is synthesized)
cacaagcatcctgcgcttccccctcccaggccctccccgaaagcgtgggccacaggtaccactccctatgccactgagccccacatttcccatcccccaagccactcccaccagccccag

SEQ ID NO: 869564 - DNA, 120 bp, Artificial Sequence
  ENSG00000283036_5 (sequence is synthesized)
agctttcctacatttatgatttgtccaaaaatgtgatgcccttcagcccccagaaggtcatcctccaggctgtgatcgtcacacagggggtcccacatggggtcctcacaggccttcaac

SEQ ID NO: 869565 - DNA, 120 bp, Artificial Sequence
  ENSG00000283036_6 (sequence is synthesized)
ccagcacaaatcgtggcctggtttgacctttgaaatatctcaacatctaaaattcagagcttttttggaatatttattttccatagatataattctttcaaataaattccttagaaaaca

SEQ ID NO: 869566 - DNA, 120 bp, Artificial Sequence
  ENSG00000283036_7 (sequence is synthesized)
gaatgaagcagagggctgtggggtgaagggactgccagtcttctgccactccttttcgtggtccttcccttcactgccttccttctcccagacagactgggcatccagttccaatccaaa

SEQ ID NO: 869567 - DNA, 120 bp, Artificial Sequence
  ENSG00000257058_0 (sequence is synthesized)
gggaggcgcattgcaaacttccaggttccgcggcccgagaggaaggttttctggagcggggaacgcggagaggagccggggtcaccagtgcctcgcgcaccgcggtgctgcgcaggccgc

SEQ ID NO: 869568 - DNA, 120 bp, Artificial Sequence
  ENSG00000257058_1 (sequence is synthesized)
gacagcggacccgacgcccaccttcctctccagactcccgcccccaggagccagagccccagcgcttcctctgcctcccattccttctctgagcgccgcccccgcctccccacttgcggg

SEQ ID NO: 869569 - DNA, 120 bp, Artificial Sequence
  ENSG00000257058_2 (sequence is synthesized)
acgctgagtctcctaatttacagcgatttcccacagccacttctaactacatcgagattttattaaacgtttaatgatggggtgcgggggccttctggctacacactcccctccacactc

SEQ ID NO: 869570 - DNA, 120 bp, Artificial Sequence
  ENSG00000257052_0 (sequence is synthesized)
cactgtgccacgggaccctggtctttgaaaccttggcgtgcgcgagaatttcccagtgagtttgttaaaatgcagattcctcgggtctgcgtagacagactgtgccccacgcttttctaa

SEQ ID NO: 869571 - DNA, 120 bp, Artificial Sequence
  ENSG00000257052_1 (sequence is synthesized)
gtcagttgtttctcgggctaccctttaagagacactgctggatggcctggtgaagaaaatacagaaacagatgggtacaagaactaagaaaacggctaagaaagtgttttggtcctgact

SEQ ID NO: 869572 - DNA, 120 bp, Artificial Sequence
  ENSG00000257052_2 (sequence is synthesized)
actaccatttcgctctgtgatttggggcaattcacattgccctttcttctttgtcaaaagacaaaatcacaacaaacttagttcaaagattttttttttcttaagagacggactctggca

SEQ ID NO: 869573 - DNA, 120 bp, Artificial Sequence
  ENSG00000257052_3 (sequence is synthesized)
tgcctcagcctccggagtagctgggacttaaggtatgacagagccaaaactccaagtcatgtcagtagggcatgcccaatagaaaatgctttgacatctaacaacacccagaaccaatga

SEQ ID NO: 869574 - DNA, 120 bp, Artificial Sequence
  ENSG00000257052_4 (sequence is synthesized)
cagaaccaatgattcctccctgtggtaccaagaagacctagacatgatcggaacctaaatgctggaactctttcaggagcaaagggtctgttgaccagaaagatccaggggtaaaatcca

SEQ ID NO: 869575 - DNA, 120 bp, Artificial Sequence
  ENSG00000257052_5 (sequence is synthesized)
cctcaacatacccgtgtagtcaaatttgacaccctccaatcagaccctgccaagccaaaattcctaatacgtttccttgccatctgtattagtctgttttcacgctgctgacaaagacat

SEQ ID NO: 869576 - DNA, 120 bp, Artificial Sequence
  ENSG00000250007_0 (sequence is synthesized)
agcggggcgatttcgaaaggaaggactgcagcgcccctcggggcttctcggggagcccaggaggaaagagctcaatgcggaatcacataggcaaaggctctgattattttccttgcaatc

SEQ ID NO: 869577 - DNA, 120 bp, Artificial Sequence
  ENSG00000250007_1 (sequence is synthesized)
gaagacaaaagccgccatgtttattaaaatgaaagtcgtatttttactcttccctggaaagaagtatgtgcaaccagaccatcccaccaaagtccttctagcccccaggaagaaaattga

SEQ ID NO: 869578 - DNA, 120 bp, Artificial Sequence
  ENSG00000250007_2 (sequence is synthesized)
agagttcaaagaattgaaaagttaagccaattcatttaaaataatctttgactttctcattatcaatatatgtgtattttctgcaaggttacaaaaacaactggaacatatgttaaaata

SEQ ID NO: 869579 - DNA, 120 bp, Artificial Sequence
  ENSG00000250007_3 (sequence is synthesized)
atcttcagtgtcatctgcagcaactaattctagagaactatcttattcaatttcatttcttacttatatggaactaaaccttaatctgcttttcaggtatgaaatatattcatgattctg

SEQ ID NO: 869580 - DNA, 120 bp, Artificial Sequence
  ENSG00000250007_4 (sequence is synthesized)
tctcaaaatatgaaatcaaaagttagcattataactcccagctaactgtcatattaattcatctggatgaaccttgtggtactgaactttgacaatgctcagggtgtcaaagcaaacacc

SEQ ID NO: 869581 - DNA, 120 bp, Artificial Sequence
  ENSG00000250007_5 (sequence is synthesized)
aatattagaagcacaaacaaattgcacgtgtgtaaacaaactgtacaatgattgatgaaagatgagggaaggtggtttggaagactccaagaagcataataccgtcatcctgactggaag

SEQ ID NO: 869582 - DNA, 120 bp, Artificial Sequence
  ENSG00000250007_6 (sequence is synthesized)
gtagatggagagagaaggcatcttagaagcatttgcggtggacaatggatgggcctgcctcatcgtactcttgcttgctaatccacatttgctggaaggtggacagagaggccaggatgg

SEQ ID NO: 869583 - DNA, 120 bp, Artificial Sequence
  ENSG00000250007_7 (sequence is synthesized)
agcccccaatccagacagagtatttacgctcagggggagcaataatctgcagaaagaaaacaaaaacttccagtgaactctgaagttccaagcaagggagcaaataacacattgggagga

SEQ ID NO: 869584 - DNA, 120 bp, Artificial Sequence
  ENSG00000250007_8 (sequence is synthesized)
ttcacagaaaaaaaccattagatattaattcgctataatgtgggatatgtcataccacgaaataatgtggccaatcaagttatatgaactcacctctatttcatcatttatattattaaa

SEQ ID NO: 869585 - DNA, 120 bp, Artificial Sequence
  ENSG00000250007_9 (sequence is synthesized)
gatatattctattattaaaatggaatttctccacttacctagagtgtaatttggcaacaagctaaatgtgtagtggagcctagcccaaaagttgggagctttaaaaatgtattcaaagat

SEQ ID NO: 869586 - DNA, 120 bp, Artificial Sequence
  ENSG00000250007_10 (sequence is synthesized)
tgaggagattccaatgtatgcaagcatgtttgatgaatcaggggctgatgactatcggaaaactgtggcgtaatggaagatccccagaaggagaatttacagctacttcaagtggaatct

SEQ ID NO: 869587 - DNA, 120 bp, Artificial Sequence
  ENSG00000250007_11 (sequence is synthesized)
ggcacaatgaacagactggccacaggagctgaagactggaggagagtgacacttctaactaatagcatctaaaacatcccagatgagctacttcaagagtgtttgtgaacatcttgaaac

SEQ ID NO: 869588 - DNA, 120 bp, Artificial Sequence
  ENSG00000250007_12 (sequence is synthesized)
aaaggcctatcttgtaaacaaacagagctgtcccactaaactctcctggcctagggcctcttctgggagcattcagagaaagcaggacttagaggatagggagttaaacttcctgccctg

SEQ ID NO: 869589 - DNA, 120 bp, Artificial Sequence
  ENSG00000250007_13 (sequence is synthesized)
gttcagatctgcaactgagcagtgaatgactcagcaccaggagaaggcatctgtgggcctgaatgctggcagccaggaataagtgcaaaggctgtgccagtgatggccagagtggacggg

SEQ ID NO: 869590 - DNA, 120 bp, Artificial Sequence
  ENSG00000250007_14 (sequence is synthesized)
acatggcagtggaggctggagtcatagtccacaatttaccctcagcatctgagagatacccctagggaatcccggagctgtggaacaaggaggaaattatgtgagagatggggaggggac

SEQ ID NO: 869591 - DNA, 120 bp, Artificial Sequence
  ENSG00000250007_15 (sequence is synthesized)
caatgccactcagtttcacagagaggggttatcaggcaaaagaatatagggtagttcttctgaatctcgcacacattggaatcacttgggaactgattcctggatcttagctctaacaat

SEQ ID NO: 869592 - DNA, 120 bp, Artificial Sequence
  ENSG00000250007_16 (sequence is synthesized)
tctgatttaattggtctgggtgcatttgagcattttgggaagtttttagtttcccaggaaattctaatgttcagtcaacgttgagaaccattgatctaagcctagggctctccaacttaa

SEQ ID NO: 869593 - DNA, 120 bp, Artificial Sequence
  ENSG00000250007_17 (sequence is synthesized)
acttacatcggagtcacttggagggcttggtaagcagtaaattactgattccatccctagagtttctgattctgtaggtctggagtgaggcatgagaatctgtatttctgtgaagctccc

SEQ ID NO: 869594 - DNA, 120 bp, Artificial Sequence
  ENSG00000250007_18 (sequence is synthesized)
agatgatgctgatgctgaaggtctgtggaacacattctgaatggtactgacttgggttaagtatttattgagatgacatttgtacccaccatgtggggtgggtgctggggacatttggat

SEQ ID NO: 869595 - DNA, 120 bp, Artificial Sequence
  ENSG00000250007_19 (sequence is synthesized)
acttgaataatttactcaaactttctagacctaatttccccatgagtaaaacaagaacattatggcagctactcacaagttggtcgcaatattttttttgttttgttttgaggctggagt

SEQ ID NO: 869596 - DNA, 80 bp, Artificial Sequence
  ENSG00000250007_20 (sequence is synthesized)
tggtcgcaatattttttttgttttgttttgaggctggagtgcagtgatgcaatctccgtgcctcagactcctgagtagat

SEQ ID NO: 869597 - DNA, 120 bp, Artificial Sequence
  ENSG00000250007_21 (sequence is synthesized)
cctagcaaatacttaatattttaaaagtgcttttatcactgataaacacactacatacattataataatttaatccccagctaaccctgtgaagtattatttctcctgtttcacagatga

SEQ ID NO: 869598 - DNA, 120 bp, Artificial Sequence
  ENSG00000250007_22 (sequence is synthesized)
ggaagctgggaagttgggttaagtaacttgccttagtcacacaggtagttaggattggcttagaatctgaacccaggcaatctgaatccaaagcccatatacttcactattatactatac

SEQ ID NO: 869599 - DNA, 120 bp, Artificial Sequence
  ENSG00000250007_23 (sequence is synthesized)
tagtgcaacaaatatgagctactatggatagtgattatattaagaattaaatgtaatgaaattcttaaaactccagttcattgttttcatgaaacacaaatagaacacagtagatatgag

SEQ ID NO: 869600 - DNA, 120 bp, Artificial Sequence
  ENSG00000250007_24 (sequence is synthesized)
gaattgctataattaaatctaaactcagttctctaaaccagtgtttctccaagtgtgtcttgagattacctacaaagaaatcatttggaaactccctacctcaaatctttggaaccacaa

SEQ ID NO: 869601 - DNA, 120 bp, Artificial Sequence
  ENSG00000250007_25 (sequence is synthesized)
tctcttgggggcagagctacagaatctgagattttaaataagttcccaaggagagctggtttcccagctgtagtctgagtcacatgcctataaattaaacatatttagtaatcattcttt

SEQ ID NO: 869602 - DNA, 120 bp, Artificial Sequence
  ENSG00000250007_26 (sequence is synthesized)
tcgtatttctcagactgatctagtgtttttctcaatgttattttttatgaatttagaatacactattttgagtagctcaagtagaattgtctacagtttgagaaaataaaacctatcctt

SEQ ID NO: 869603 - DNA, 120 bp, Artificial Sequence
  ENSG00000250007_27 (sequence is synthesized)
tttgagaaaataaaacctatcctttaagctttcgtaagtaggcaaataaaataataatctggcttaaaatcaaaatcattatgatatgtggtggtgagggaagagagagaccctctcata

SEQ ID NO: 869604 - DNA, 60 bp, Artificial Sequence
  ENSG00000250007_28 (sequence is synthesized)
tattgttttatactcagaaaaggaaagaaaagcaaaactaaaggcaggtagcctggtgcc

SEQ ID NO: 869605 - DNA, 120 bp, Artificial Sequence
  ENSG00000250007_29 (sequence is synthesized)
aactgatgttatctatagattccagacattgtatggaaggacactgtgaaacctcctgttctgttctgtttcactcggaccactggtgcttgcagcccctgtcacataccccctggcttg

SEQ ID NO: 869606 - DNA, 73 bp, Artificial Sequence
  ENSG00000250007_30 (sequence is synthesized)
cactggtgcttgcagcccctgtcacataccccctggcttgctcaatcgatcacgactagttcagcatctgacg

SEQ ID NO: 869607 - DNA, 120 bp, Artificial Sequence
  ENSG00000250007_31 (sequence is synthesized)
ttttgctcaaattcagactctggtcttcaggccagaaaaggatcccctgctgccaaagtgaataaaggaacaaatgccaaaagtagcttgcccacttgatggtggggagatgagcatctt

SEQ ID NO: 869608 - DNA, 120 bp, Artificial Sequence
  ENSG00000250007_32 (sequence is synthesized)
taaactgggggcagaggccctcactccaggtggagacaagactgcaaaggcaaatactttgatggagaacatagcaacaacttaaactataggactacaccaatccttgctactcaaagt

SEQ ID NO: 869609 - DNA, 120 bp, Artificial Sequence
  ENSG00000250007_33 (sequence is synthesized)
gcagcccatggacaagcagtattgtcataacctggaaatgagctagaaatgcaatctcaagagccatcccaatccgcttttcagcaagatcctcatttgcttgagaaagcacattggctg

SEQ ID NO: 869610 - DNA, 120 bp, Artificial Sequence
  ENSG00000250007_34 (sequence is synthesized)
ggagaggggcaagagtcctggaggcccggcggggagcggggcgatttcgaaaggaaggactgcagcgcccctcggggcttctcggggagcccagagaaagcacattggctggtccagtaa

SEQ ID NO: 869611 - DNA, 120 bp, Artificial Sequence
  ENSG00000250007_35 (sequence is synthesized)
gcaaacaatttcattttagagataaaattaaattatagctgtatctctgaccttcctgttgtacttcctcagtttaaacagctgagtaattaagactttttaaatgtagaatttactgac

SEQ ID NO: 869612 - DNA, 120 bp, Artificial Sequence
  ENSG00000250001_0 (sequence is synthesized)
aattattacagttctcttgtgtacgtttcatttgttgatttcattttcctcttgactggatgagttaattcccattttacataaataaggaaaagatttcttcagctgatattaggtttt

SEQ ID NO: 869613 - DNA, 120 bp, Artificial Sequence
  ENSG00000250001_1 (sequence is synthesized)
aaacactcttattagctgtgtacatgaaaccacctttattacttactacttgctttatcttgttaaaaaaagagaccacagaaactcaaaatatgtatgtgcgtcatcatttagagaagt

SEQ ID NO: 869614 - DNA, 120 bp, Artificial Sequence
  ENSG00000250001_2 (sequence is synthesized)
ctatctcagtgcataaaaggctgtgtgcattcaatttcagttgaagaccagttctctcatgaactgaaatgttccatgtcaacaggagatgcagaatcatacttgtcattggagaccaaa

SEQ ID NO: 869615 - DNA, 120 bp, Artificial Sequence
  ENSG00000250001_3 (sequence is synthesized)
tttggtctaaacttttggttattgtatgtgttgtgacaatgtttcagaagcacattgtctaggagtattaaaatggttttcaatcagagaaatatgtcagagttcattgaaaacatacca

SEQ ID NO: 869616 - DNA, 120 bp, Artificial Sequence
  ENSG00000257056_0 (sequence is synthesized)
cccgtgcgcgggagaatgtcgctgggcagggcgtgactctaaactcaagccgcacgaggcttctcagaggttcctctcaccacaaagccccatcacagtacagaaggctttttgcaaaac

SEQ ID NO: 869617 - DNA, 120 bp, Artificial Sequence
  ENSG00000257056_1 (sequence is synthesized)
agtgatttctcagcttttccgaagaggttcctaaatgtggctgtaaccctgacgtgagagtcgctcccgcccctacctacatcccacacatttcaggagtcccctacgtattctacaaaa

SEQ ID NO: 869618 - DNA, 120 bp, Artificial Sequence
  ENSG00000257056_2 (sequence is synthesized)
cacagaacgaccatatgagccacttcagtccttctcagcattaggtgactgatttacatcagaataaaacaagagtttcttgctggttttaatgtaattaaaatgcaccatccctgtatg

SEQ ID NO: 869619 - DNA, 120 bp, Artificial Sequence
  ENSG00000257056_3 (sequence is synthesized)
ttcccaaaggagtgggaggaaaagtgtttggacaggggactgatcgtcagtaggttttcacagcgtggtttataaaatcacttttaagctctcttccacctagctgtcactgagaattcg

SEQ ID NO: 869620 - DNA, 120 bp, Artificial Sequence
  ENSG00000257056_4 (sequence is synthesized)
gtttgagaggaaatgactttctagacgatttttcatctagatgatttttcatcatattcaaccaagagtctttctcatcctctagctctctgaatgtccagaaatgtaatagaaactctg

SEQ ID NO: 869621 - DNA, 120 bp, Artificial Sequence
  ENSG00000257056_5 (sequence is synthesized)
cattgatttccaaaggtctaatttccggaggagccctaactgtcctgtcctgcctacattgcctgccctctaacatcctgggaatgggaagtaacactgggatcggtggcggcagaactg

SEQ ID NO: 869622 - DNA, 120 bp, Artificial Sequence
  ENSG00000257056_6 (sequence is synthesized)
atttcctgtgcagaacaaaaaagtcccaccatcagcaaaagaagtctcttcctctaaaatagcagccaaagagagaaaattagaatatgcataaagtctttcattttcattcgcacagag

SEQ ID NO: 869623 - DNA, 120 bp, Artificial Sequence
  ENSG00000257056_7 (sequence is synthesized)
cacgatttccaatttccggcagatttgtatttaaactgctcgattaatcccaatttctgaacagcattttacttagcattttcccaaaactcacctaaagagttattattcccctcccat

SEQ ID NO: 869624 - DNA, 120 bp, Artificial Sequence
  ENSG00000257056_8 (sequence is synthesized)
caccctgttttggagcctcccttttccctattctccaactgagaataagaatttcattgataagactgcaactttatttttcctgtccattgttttcctcttaaaactagactgatgcat

SEQ ID NO: 869625 - DNA, 120 bp, Artificial Sequence
  ENSG00000257056_9 (sequence is synthesized)
tggaccacagttgaatgcaagctggttgttgtctgtgaagccgcgactgcaaacgagagcctgttggaaaggatatgtttttgaaatgtgtacctaaaagagaataaacatgatagggcc

SEQ ID NO: 869626 - DNA, 120 bp, Artificial Sequence
  ENSG00000257056_10 (sequence is synthesized)
aatagactcttgcagatcctctcatgtcatcaaaacctttcccattctacccaggtcatatcttttcaccactagcaatagctgagatgcttggacataatccaccctccaaacctttcc

SEQ ID NO: 869627 - DNA, 120 bp, Artificial Sequence
  ENSG00000257056_11 (sequence is synthesized)
ttccctcaccccttttaaggagcttgatagacgatcatgcaattctcttcaaaggaatattactcttaaatattcagagtgtcagtccattaaatccccctacagcccattactaaaata

SEQ ID NO: 869628 - DNA, 120 bp, Artificial Sequence
  ENSG00000257056_12 (sequence is synthesized)
ttttgctttgccacttgtgcaacagatctggctgtatctgccttgaaattttctttgttggaaaaaatgttattgagcttcatttgaatatcttttctgaaatatcatctcttgacttgg

SEQ ID NO: 869629 - DNA, 120 bp, Artificial Sequence
  ENSG00000257056_13 (sequence is synthesized)
tatatcttaattctatcaacccctaaattcctcactcttgcacaccccaagacagaaagaaccctttatttgattcataatgtaatctaagcaaaatgtagtggttctggctttccttca

SEQ ID NO: 869630 - DNA, 120 bp, Artificial Sequence
  ENSG00000257056_14 (sequence is synthesized)
gtgtttatagatcgcatgtaaatcccaattatgagtaatcaaaaacttagaaatactactatttgttcagctttcagtttctgtaaagaacatacatatttgaaccatatgcagcatggt

SEQ ID NO: 869631 - DNA, 120 bp, Artificial Sequence
  ENSG00000257056_15 (sequence is synthesized)
atatgtaatataggtgcataagcatttaaatatatggtttaagtatctggttagctaaacagtcattaagatactgggatatagaagcatattaattttgttaaatgggtccataaactc

SEQ ID NO: 869632 - DNA, 120 bp, Artificial Sequence
  ENSG00000257056_16 (sequence is synthesized)
tgcatgtgtaatagtgtctgcatgacttactactttgaaataactgcttttattgtttctttttctgtcatgacaaaagtattacactattttagttatgcatttttctgttgagttgga

SEQ ID NO: 869633 - DNA, 89 bp, Artificial Sequence
  ENSG00000267586_0 (sequence is synthesized)
ctttccccagccatgcgtaactgagtgaggacctagaattttaatgtctaatatgcggtgtgaattaaagaagcggccttgctatgctg

SEQ ID NO: 869634 - DNA, 120 bp, Artificial Sequence
  ENSG00000267586_1 (sequence is synthesized)
aatatgcggtgtgaattaaagaagcggccttgctatgctgaccttttcaatattctaatctttgctttgctgacctctcaggcctcttcctggcaacagttaggcttttgagaggagaga

SEQ ID NO: 869635 - DNA, 120 bp, Artificial Sequence
  ENSG00000267586_2 (sequence is synthesized)
gagctgagactgttggctccttcccatttatgagagagccacatgacatcagcccatagactgtggagagtattccagatctatcacattctgcgattctgcgattcccagaaggctggt

SEQ ID NO: 869636 - DNA, 120 bp, Artificial Sequence
  ENSG00000267586_3 (sequence is synthesized)
catgaaaaaattccctcttcagtttacatatatggcagtgatgcacattgttcttttggttgtgaaaaattcgaagaagtagatgtggtcctggttgatggatgaacattgaggccctca

SEQ ID NO: 869637 - DNA, 120 bp, Artificial Sequence
  ENSG00000267586_4 (sequence is synthesized)
gagagagaatgcttctgagaagcaattatgggcttaaagcagaagcctagagaataaatagcatttcagtcaacagagggcagagaagtgcagcttcacacaggaggggcactgcgtgtc

SEQ ID NO: 869638 - DNA, 120 bp, Artificial Sequence
  ENSG00000267586_5 (sequence is synthesized)
atcgggggcagtaatgtgatgtgtgtttgggatatcagtttagtgatgtttagggagagatgtaaatttgaatcaatctggaatttgtattgtaaagagtaggtatgtgatattcaattt

SEQ ID NO: 869639 - DNA, 120 bp, Artificial Sequence
  ENSG00000267586_6 (sequence is synthesized)
ttctatacataagcatatcaggagagatattttctttgtttttgaaattgtacttgagctcattccttaatccaggagagatgagtaaaaatcttcctctggttttcatttattcatcaa

SEQ ID NO: 869640 - DNA, 120 bp, Artificial Sequence
  ENSG00000267586_7 (sequence is synthesized)
gaactattgattgagtgcccatgtttatcaaatactgttcctggctctgtttacttaagattgtgcatcagacttaagtatgaataatatgtgagattatggattaaatctgcaaacctg

SEQ ID NO: 869641 - DNA, 120 bp, Artificial Sequence
  ENSG00000267586_8 (sequence is synthesized)
cagttgctaagaagttgttaccaagtttggtgaataattaaactcttggacatgacaggggaggagaattattgattcaaaggaccttagagctcaaaaggtcctgagagaccatcataa

SEQ ID NO: 869642 - DNA, 120 bp, Artificial Sequence
  ENSG00000267586_9 (sequence is synthesized)
ccaccctctttattttacagatacagcttctgaggatcacggggatgaaaggcatgaactgggctcacacagctaatgcattaggacaccagaaaaggaagaaaagacagtggcagctga

SEQ ID NO: 869643 - DNA, 120 bp, Artificial Sequence
  ENSG00000267586_10 (sequence is synthesized)
agacatttcaggaatgcttcactgagaacctaagtcttgttctgggccataaagaaaaggggagggtgtggtttctataccagagataagaaaggagaaaattggacgtggaggaaagat

SEQ ID NO: 869644 - DNA, 120 bp, Artificial Sequence
  ENSG00000267586_11 (sequence is synthesized)
ttgaagataaaggggtttaccatggaagagaagatccaggtgccttcatggaaatgcttgtggttgaaaagagatgaagatgagggtccctggaaagaggaagaaccagccaggaaaatt

SEQ ID NO: 869645 - DNA, 120 bp, Artificial Sequence
  ENSG00000267586_12 (sequence is synthesized)
ataccattagcaagactggcatcagcaagtagttcgcagtgttggttgttcttggtttcgcaggattttataggagttctgaacactgggaagtccaagagcaaggcaacaacagattca

SEQ ID NO: 869646 - DNA, 120 bp, Artificial Sequence
  ENSG00000267586_13 (sequence is synthesized)
acatctgaggctctgatctttttcattaaagaaaaatcactctcacagggttctgctgagggtgtgtgattacagatgttgccaaggagcactccgggaacctctaatggggaggacaca

SEQ ID NO: 869647 - DNA, 120 bp, Artificial Sequence
  ENSG00000267586_14 (sequence is synthesized)
agacaaagcaaatggacagtcatttttccaagagatgggccccctgccatgaggaagttcttcaggctgcgtctcctttttgtgtttttatttgatctttaataaagaatattaagactg

SEQ ID NO: 869648 - DNA, 73 bp, Artificial Sequence
  ENSG00000267586_15 (sequence is synthesized)
tctcagcttcctgagtagctgggaggacaggcatgcgccaccacgccctgataattttttgtattttagtaga

SEQ ID NO: 869649 - DNA, 120 bp, Artificial Sequence
  ENSG00000267586_16 (sequence is synthesized)
aggtgtgagccaccgcgcctggccctcaagaccttttataaaagtactaatcccattgctgaaggcagagacctcatgacccaatagcctcttaaaggcctcacctcttaataccttcac

SEQ ID NO: 869650 - DNA, 120 bp, Artificial Sequence
  ENSG00000267586_17 (sequence is synthesized)
accttcacaatggggattaagtttcagcatgaattctggagggaaacaaacattcagaccatagcaattaccaatctttaaggggctactgccctcaaattgcactcaatttacatcgta

SEQ ID NO: 869651 - DNA, 120 bp, Artificial Sequence
  ENSG00000267586_18 (sequence is synthesized)
tcaattgctataccacttaatggacattgttttcatcatataattttttttctacttttctctgctttcttcttgccattattttttagcattgctattgaatatatgcattaaaacatc

SEQ ID NO: 869652 - DNA, 120 bp, Artificial Sequence
  ENSG00000267586_19 (sequence is synthesized)
gatcatggtgaaatacagtctgaagcaggtccagagtgagaagagaaaagaatcacagaaatggggctggagtttcaactgtattaagccagaagactacctgcctccaaactttcaaga

SEQ ID NO: 869653 - DNA, 120 bp, Artificial Sequence
  ENSG00000267586_20 (sequence is synthesized)
tgatagttagggactttatttactattcacctttacttattattattttacttttattttaaactaattttaggccaacagaaaagttgacaaaaatagtagagttcgtataaactcttc

SEQ ID NO: 869654 - DNA, 120 bp, Artificial Sequence
  ENSG00000267586_21 (sequence is synthesized)
actaatattaccatcttacataaccacagtacactgatcaaaactatgaaattaactatagtacaatagtattaactaaactatgaactttatttgaattccactagtttgtccacaaat

SEQ ID NO: 869655 - DNA, 120 bp, Artificial Sequence
  ENSG00000267586_22 (sequence is synthesized)
gtccacttttgtgttccaggatcctatcaaagatcccacattgcatttcattataatgtctcctcagtttcttccaatctataacaattccttagtcctatctctttcaatatcttgaca

SEQ ID NO: 869656 - DNA, 120 bp, Artificial Sequence
  ENSG00000267586_23 (sequence is synthesized)
cttttggaatgtactgatcaattatctttcatgattattggttgcaggtctactcagctctggttttggaaactaaaaagtcttatgatttttgatgcattcatgaatataaattactca

SEQ ID NO: 869657 - DNA, 120 bp, Artificial Sequence
  ENSG00000267586_24 (sequence is synthesized)
ttttttttttttttttttttttaagagaaggaagaattcaccgtggtcctcgtaattatttttcactgtgtttcccatgttggtctcaaaccatctcggctgcccaaagtgctgggatca

SEQ ID NO: 869658 - DNA, 120 bp, Artificial Sequence
  ENSG00000267586_25 (sequence is synthesized)
cagccgtgcattactgtgcctggcctgacctttcttctttagacctcactcttatgtgttaaatggttgggctgtcctcacattcttcactcttgtctactccccagtatagtatcctta

SEQ ID NO: 869659 - DNA, 120 bp, Artificial Sequence
  ENSG00000267586_26 (sequence is synthesized)
tggtgtctttttgccctccattaaaatctatcaggaaaagatttaaaagccatccatactgaactacaaataactgatgagatctccactgcagaagagatggaagttttaagctaaaag

SEQ ID NO: 869660 - DNA, 120 bp, Artificial Sequence
  ENSG00000267586_27 (sequence is synthesized)
acagtcaccaacacaaccttatttggaagaattagagttcaagaccatccataccctctaagcaggagggagaagcataggttatcctgtttctgccacaggtggaatgacttccttacc

SEQ ID NO: 869661 - DNA, 120 bp, Artificial Sequence
  ENSG00000267586_28 (sequence is synthesized)
cacaggtggaatgacttccttaccaaagggtaggaaggagagaacagcatgactaatgtactccaggtggctagtagtgatagaaatattacttttttttttttttttttgagacgtagt

SEQ ID NO: 869662 - DNA, 120 bp, Artificial Sequence
  ENSG00000267586_29 (sequence is synthesized)
ctcccaaagtgctgagattacaggcatgggccaccatgtctgcccaaaaaattgctacttaatctaagcagaactaatttaggtagaaaagttagaaacctaattttgattgcaaaagat

SEQ ID NO: 869663 - DNA, 120 bp, Artificial Sequence
  ENSG00000267586_30 (sequence is synthesized)
aagttagaaacctaattttgattgcaaaagattttgttcttattcattcactgctatatgaaatatttttagcagaattcaaagcatgccagggttatgtttaaaaggagacttaaacaa

SEQ ID NO: 869664 - DNA, 120 bp, Artificial Sequence
  ENSG00000267586_31 (sequence is synthesized)
tccttttacagagataactgtgagctaaattcacagaaagctgtaattgagtggtatgagcatctccactaagagcattgtttgagaagtatggaggtaggaagaaggatacaggggaga

SEQ ID NO: 869665 - DNA, 120 bp, Artificial Sequence
  ENSG00000267586_32 (sequence is synthesized)
aagaaagaaatagctcagtaggaagagaacatggaataagcaaatcagggttgaaaaaggactgtgcttaactttataattttgcttctaaaagtcactttctttcaaaaacaaaaacaa

SEQ ID NO: 869666 - DNA, 120 bp, Artificial Sequence
  ENSG00000267586_33 (sequence is synthesized)
aaaacaaagaaaataactataagcagtggttctcttctcctctgcaaagttcttcagtctagcttaagaaaattcccttgatcaggaaataagttagataaaaatcccatggggtaaaac

SEQ ID NO: 869667 - DNA, 120 bp, Artificial Sequence
  ENSG00000267586_34 (sequence is synthesized)
tattgtgaagtgattatgagctttctctcctaaaaggaccagccaccaaaacgtacaatagcacaatcaactcagcctctgtgagccacatcaggcatgtctcagtggatccagtgtaag

SEQ ID NO: 869668 - DNA, 120 bp, Artificial Sequence
  ENSG00000267586_35 (sequence is synthesized)
tgtttttactagcagggggtaaaaacggtattccttagaagatgagggttccacagcctatttaacatagacatgagaagcactacaagacagaagaagtctatggcttgaccctattag

SEQ ID NO: 869669 - DNA, 120 bp, Artificial Sequence
  ENSG00000267586_36 (sequence is synthesized)
atgatcttctgaggtgtttattaataagtgataggttgtgttttttttcaatgacaaagcaaggatttttttcttttacaagacatcaaaggagtttgactctaattttctctgtggaga

SEQ ID NO: 869670 - DNA, 120 bp, Artificial Sequence
  ENSG00000267586_37 (sequence is synthesized)
tttggctgagagtctctagattatggtgataacaacacctaagagatttatttaagaagtgccccttggcccttccttcagagaatccacaaatctttattcaattctgtcagtctctgg

SEQ ID NO: 869671 - DNA, 120 bp, Artificial Sequence
  ENSG00000267586_38 (sequence is synthesized)
caagggaaatgccatttagtccagtgaacaattaataaatggtgctcagtaagtgctagttgatgataatgataataatgatgagatgatgatgatggtaatagacttatcttgattcaa

SEQ ID NO: 869672 - DNA, 120 bp, Artificial Sequence
  ENSG00000267586_39 (sequence is synthesized)
tcaaaaataaatgtgtaatgtatatgtatatatatgtttatgtatatatgtgtaaatatatatgtttcaaattctcttcagccttgaaaatgaagattgcacatttttctttaccatatg

SEQ ID NO: 869673 - DNA, 120 bp, Artificial Sequence
  ENSG00000267586_40 (sequence is synthesized)
catttcttttcacaaatatttaatgaatctctccccttcattgcctgcaggataaagatccattacttggcttttaaaactctacaggacatagtcccatgtgaaacaccatctttttat

SEQ ID NO: 869674 - DNA, 120 bp, Artificial Sequence
  ENSG00000267586_41 (sequence is synthesized)
gggttctagtaacaaaattggtacaagcctagcaagaatgctgacctgagaacctactcaaagtaacttaatcttttatcccatggagaaaataataattctatatctcagtttttaagc

SEQ ID NO: 869675 - DNA, 120 bp, Artificial Sequence
  ENSG00000267586_42 (sequence is synthesized)
taatgacattttggtcaattatggcccacatatacgaaggtggtcccataatgttataatggagttgacaaattcctattgtctaatgacatcgtcattgtcatgtcatattacaagaca

SEQ ID NO: 869676 - DNA, 120 bp, Artificial Sequence
  ENSG00000267586_43 (sequence is synthesized)
tcactaacatgtttgtggtgatgctggtgtgaataaacctactgtgatgccagttgcataaaagtctaacatatacaattaggttcagcacctaataattggtaatgtacataaacaact

SEQ ID NO: 869677 - DNA, 120 bp, Artificial Sequence
  ENSG00000267586_44 (sequence is synthesized)
atgttactggcttatactttttattgtaattttagagtgtacttcttctatttacaaaaaaaaaaacaacaacgttaaatgtaaagctgccttcagcaattcctttaggaggtattccaa

SEQ ID NO: 869678 - DNA, 120 bp, Artificial Sequence
  ENSG00000267586_45 (sequence is synthesized)
aagaagtaacactccatgcgtgttactacctctgaaaatctttcagtgggaaaagatgtggaggtgaaagatagtgatattgatgatcttgaccttatatagacctgggctaatgtgtgt

SEQ ID NO: 869679 - DNA, 120 bp, Artificial Sequence
  ENSG00000267586_46 (sequence is synthesized)
gtttttgccttagtttttaataaaaatgtttaaaaagtaaaaatatgctttataaataggaaaaaccttatagaataagaatataaaggaagaaagtatttttggagagctttgcaatgt

SEQ ID NO: 869680 - DNA, 120 bp, Artificial Sequence
  ENSG00000267586_47 (sequence is synthesized)
gtttgtgttttaagctaagtattataacaaaagagtcagagttaaaaaattaaaatgtttgcaaagtgaaaaagttatagtaagctaaagttaatttagtactgaagaaagaaattttaa

SEQ ID NO: 869681 - DNA, 89 bp, Artificial Sequence
  ENSG00000267586_48 (sequence is synthesized)
tcactcacactctgactcacacagagcaatttccaatcctgccatctccatttatggtaagtgccctacacaggtgcaccttttttttt

SEQ ID NO: 869682 - DNA, 120 bp, Artificial Sequence
  ENSG00000267586_49 (sequence is synthesized)
atttatggtaagtgccctacacaggtgcaccttttttttttaattgtcttttatagtgtatttttactgcatttttttctgtgtttaggtatgtctagatatacaaataccagtgtatta

SEQ ID NO: 869683 - DNA, 120 bp, Artificial Sequence
  ENSG00000267586_50 (sequence is synthesized)
caattgcctgtagtattcagtataataacatactgtacaggtcagtagcctaggagcaataggctgtaccatatagcctaggtatgtagcaggctataccatctaggtgtgtgtagcaat

SEQ ID NO: 869684 - DNA, 120 bp, Artificial Sequence
  ENSG00000267586_51 (sequence is synthesized)
aggctgtaccatatagcctaggtatgtagcaggctataccatctaggtgtgtgtagcaataggctgtaccatatagcctaggtatgtagcaggctataccatcttggtttgtgtaagtac

SEQ ID NO: 869685 - DNA, 120 bp, Artificial Sequence
  ENSG00000267586_52 (sequence is synthesized)
acactatgatgtttgcacaatgatgaaataatctagcgactcatttttttggaaggtatccctactgttaagcaaagcatgactatagttagaacttctattgttccctctttgctctgg

SEQ ID NO: 869686 - DNA, 120 bp, Artificial Sequence
  ENSG00000267586_53 (sequence is synthesized)
ggccttacgcctgctaatctctctgcctgaaagcttttgccctaagcctccatgttagctctcttgttttagctgcctcatacccatattttatgtatcaaacaacttcccctttctctg

SEQ ID NO: 869687 - DNA, 120 bp, Artificial Sequence
  ENSG00000267586_54 (sequence is synthesized)
agaatcttttctggatatctcatcttggactaggtgcccataccatgtgttgccatgccatcctgtgctgcctttattatacatagatattgtcacactttattgtaatcagttccatgc

SEQ ID NO: 869688 - DNA, 120 bp, Artificial Sequence
  ENSG00000267586_55 (sequence is synthesized)
cttcccatagactgtaaaaagtttggatcaccttcattttattcatcatttcattccagtatctctccccatcccatcgtttctagcttatagcatatgaataaatgcagtttccaagtt

SEQ ID NO: 869689 - DNA, 120 bp, Artificial Sequence
  ENSG00000267586_56 (sequence is synthesized)
ttgccagaagaagaaagaagaggagaagaaagaggtgtcataaactttctaagacagtgccttgcctgaagactatgagtttctgtgcatcctaggacctttatggaaattagataattt

SEQ ID NO: 869690 - DNA, 120 bp, Artificial Sequence
  ENSG00000267586_57 (sequence is synthesized)
ttgatgaagttaaacaattatattataagaaactcctcaaatcaagaataaataaaaacaagagtagcattaaaatttactgcagagtacattaatacagttcaaatctaaatgtctgct

SEQ ID NO: 869691 - DNA, 120 bp, Artificial Sequence
  ENSG00000267586_58 (sequence is synthesized)
cttgcatttctgtgacttttcatgccatgctgaaaatctggaatggaaactctcatccatcttggtgatttcctagtgccctgaggatgacttcatttaaaagcatttgaagatttaagt

SEQ ID NO: 869692 - DNA, 120 bp, Artificial Sequence
  ENSG00000267586_59 (sequence is synthesized)
ggcagtgctccagtgccatgacagttttaatcttctggttccatctgcatagatttcagtctctaattgaggaaaatcatctgtttttctcaggagccccttgattcaagtttacacaaa

SEQ ID NO: 869693 - DNA, 120 bp, Artificial Sequence
  ENSG00000267586_60 (sequence is synthesized)
atgtgcctttggagactatcctgttaatttaaacagttcagatcccacttgtatgtgagacagatgcttctctggccatcagccaggtaccactaaaggaggtacaggcacttctagata

SEQ ID NO: 869694 - DNA, 120 bp, Artificial Sequence
  ENSG00000267586_61 (sequence is synthesized)
aaagtcttatcttctaagtctcctaagtcttggacttttcaaggccaaagatttaaaggccaagtggaccatacgggagatctagtttcccatccagacagccaagctcatgcatccctg

SEQ ID NO: 869695 - DNA, 120 bp, Artificial Sequence
  ENSG00000267586_62 (sequence is synthesized)
gatttggatggatggtttcccatggggccttggacagattggacccagcactggcacagggttgacttggaggaataagctcctggaaacctcaattagcgtttggggtatgaacattaa

SEQ ID NO: 869696 - DNA, 120 bp, Artificial Sequence
  ENSG00000267586_63 (sequence is synthesized)
acaatactgaatctggaaacaatacatcacacagcgggtccaaggaaataagcagaaggctggcagcaggccagggccaggggccaaatcgctcctcaaagacaattcttcatggagaaa

SEQ ID NO: 869697 - DNA, 84 bp, Artificial Sequence
  ENSG00000267586_64 (sequence is synthesized)
gggccaaatcgctcctcaaagacaattcttcatggagaaatgacagcaggtttgaggacagcagaatttcgctcttgttgccca

SEQ ID NO: 869698 - DNA, 120 bp, Artificial Sequence
  ENSG00000267586_65 (sequence is synthesized)
cctcctgagtagctgggattacaggaagtacaaaaacatccttgccgtttgctggaatgatgtactgctgaaggcaatggacactggggttgtttgtccctaatcacaagaacctcagta

SEQ ID NO: 869699 - DNA, 120 bp, Artificial Sequence
  ENSG00000267586_66 (sequence is synthesized)
aacatcaggcactcagtgctctccagactgcagtggtggtggagctgagaggactgtgtttggaggagtaaatgtccactctcatgctattttatttctcaggccctttgtcatggcctt

SEQ ID NO: 869700 - DNA, 120 bp, Artificial Sequence
  ENSG00000267586_67 (sequence is synthesized)
cttagtggtaagatctggaagggtacaatatggtgatagatgtaacttttgcttttgagaggtaaggtgaagtgaggcctgagtaaagattcaccagtttaggaagacattgcagtttgt

SEQ ID NO: 869701 - DNA, 120 bp, Artificial Sequence
  ENSG00000267586_68 (sequence is synthesized)
ttctatttgttcaattcagtttactaggttagagaagaagatagagacttcaagcaaggcctggcacataaatcttcccttggctaaatagtcaatcattaaaatctctcttgaggatgt

SEQ ID NO: 869702 - DNA, 80 bp, Artificial Sequence
  ENSG00000267586_69 (sequence is synthesized)
tggagctgatataaattgtaatccccataatccccacgtgtcgagggagggacccggtgggaagtgattggatcatgggg

SEQ ID NO: 869703 - DNA, 120 bp, Artificial Sequence
  ENSG00000267586_70 (sequence is synthesized)
ctcatcttaaattgtaatccccataatccccacgtgtcgagggagggacccggtgggaagtgattggatcatgggggcagttttccccatggaattctcgtgatagtgagtgagttctca

SEQ ID NO: 869704 - DNA, 120 bp, Artificial Sequence
  ENSG00000267586_71 (sequence is synthesized)
gaggggctgccttgaagatgtctgaaatgccctggagacatcatccccatcatcttggtgattaacattcagctcctctttacttatggaaatgtattcagccaccttgagttgctcccc

SEQ ID NO: 869705 - DNA, 120 bp, Artificial Sequence
  ENSG00000267586_72 (sequence is synthesized)
tctggttttctgtgtaaaaattctaggagattttatcatcaatgcttgcacttagttttgatgagcagtcatttctgagctgaacataaaatgcttcagtaaaataaatagaaaaagtta

SEQ ID NO: 869706 - DNA, 120 bp, Artificial Sequence
  ENSG00000267586_73 (sequence is synthesized)
ttagtctgtagttcttggtgcaaaaatgatttttcccaaaattgtatggattagaaaagtatggtaaaatagtagatttttaactcctatccaagccataaatctcttctcaatctttag

SEQ ID NO: 869707 - DNA, 120 bp, Artificial Sequence
  ENSG00000267586_74 (sequence is synthesized)
gattctgtaaactttaacatgtactgagtttactctggaatactcacaatcacttactctcctccaagctctctcagccacgaataagatagacagatttgatgtgtggttgggaaattt

SEQ ID NO: 869708 - DNA, 120 bp, Artificial Sequence
  ENSG00000267586_75 (sequence is synthesized)
cctcttataggatggagttgtgcaggcaagaaataactcttaagacagtctggggaatgagtctaaaacatgggccgacagagggtaatgtgagattgtatagggggatgtttgagggca

SEQ ID NO: 869709 - DNA, 120 bp, Artificial Sequence
  ENSG00000267586_76 (sequence is synthesized)
taataaataaagcaagagtgatgcacagacatatttttgtcctaggaaaacaatgtaaatttagtaaaaatatgttcaatatttattccaatatatcttacaataaaccaagagaaatac

SEQ ID NO: 869710 - DNA, 120 bp, Artificial Sequence
  ENSG00000267586_77 (sequence is synthesized)
ggggaccgcataactcaacatccaaactgggacactgttattatttaagcaggacaacaggaataagatgagactgcttattcaaactgggatttacagtcactttacttagggccaggt

SEQ ID NO: 869711 - DNA, 120 bp, Artificial Sequence
  ENSG00000267586_78 (sequence is synthesized)
ccacatcctgccttgcttgcttgttaaggaatcttgtcacaaattatttagtttctctgaaccacagtttcctcagttgtaaattgggcacaataatgccaacttgtaagaattagagag

SEQ ID NO: 869712 - DNA, 120 bp, Artificial Sequence
  ENSG00000267586_79 (sequence is synthesized)
ttataggagagtttctgtcaggcctttgagcccaagctaagccatcatacccctgtgacctacacgttatacatccagatggcctgaagcaattgaagatccacaaaataagtgaaaata

SEQ ID NO: 869713 - DNA, 120 bp, Artificial Sequence
  ENSG00000267586_80 (sequence is synthesized)
gccttaacggatgacattccaccattgtgatttgtttccaccccaccctaactgatacatatattctcccccacccttaagaaggtacttcggaatgttctctcccgctcttaagaatgt

SEQ ID NO: 869714 - DNA, 64 bp, Artificial Sequence
  ENSG00000267586_81 (sequence is synthesized)
gctttgtatttttttggactcagcccatctgcactcaggtgaaataaacagccttgttactcac

SEQ ID NO: 869715 - DNA, 120 bp, Artificial Sequence
  ENSG00000231782_0 (sequence is synthesized)
acaagaaaaggagattagggtacagatacacacacagggaagaatgcatgaagtccctgggataaggcagccatttacaagccaagggaaaggcctcagaagaaaccagtcttgccgaca

SEQ ID NO: 869716 - DNA, 120 bp, Artificial Sequence
  ENSG00000231782_1 (sequence is synthesized)
gcatgatctctcatcctcagaactgggaggaaatacatctgtgttgtttcagccactcagttggtgatctctattacagcagtccttagcaaaccgatttagacaggatattacagaact

SEQ ID NO: 869717 - DNA, 120 bp, Artificial Sequence
  ENSG00000231782_2 (sequence is synthesized)
gcatgtcatcagatcgcactgtttctctctttggatgatgatattcagggctttggatgccaaccagaagaagctgtaggaattggcacagatccagagcatggacaaggacttacactt

SEQ ID NO: 869718 - DNA, 120 bp, Artificial Sequence
  ENSG00000231782_3 (sequence is synthesized)
actattacagtccacgtgtcagtcgcgtttctcatcgtgattaacaccccagccattgatttgctcttcagtgtctagtgagcaaggctactgtgaatctttcctcaggaggactgatgg

SEQ ID NO: 869719 - DNA, 120 bp, Artificial Sequence
  ENSG00000231782_4 (sequence is synthesized)
agtcacatttctgagcctacagagctgagggcaagacctgagaatggtgatgtcaaaatgccaaccagcgagacctcttggtggccaggtgcttgcttgtgctcctcctgtgcttggaca

SEQ ID NO: 869720 - DNA, 120 bp, Artificial Sequence
  ENSG00000231782_5 (sequence is synthesized)
tcagactccaggttcttcaacctttggactctgggacttgcaccagcggcttcccaagggttctcaggccttaagccacagactgacgactgtactgtcagcttccctggttttgaggct

SEQ ID NO: 869721 - DNA, 120 bp, Artificial Sequence
  ENSG00000231782_6 (sequence is synthesized)
tttggacttggactgagccactactggcatctctctttcccagcttgcagacagtctatcatgggactttgccttgtaattgtgctagccaattcttcctaataaacttccttttatata

SEQ ID NO: 869722 - DNA, 120 bp, Artificial Sequence
  ENSG00000231782_7 (sequence is synthesized)
tgaaacaggcaatggcaatgttatgggctggattttgtcccctcaaattcttatgctgaagtcctaaccctctagtacctcagaatgtgactagagataaggtcttcaaagaggtaatta

SEQ ID NO: 869723 - DNA, 120 bp, Artificial Sequence
  ENSG00000231782_8 (sequence is synthesized)
tgaaaagggctggggatggaggagtgaacacaatgggataaacaaaccgaaaaaaacaccccattatgtcggaataaaagaaacctgtgaggtgttcaaacagcattactaagccaattc

SEQ ID NO: 869724 - DNA, 120 bp, Artificial Sequence
  ENSG00000231782_9 (sequence is synthesized)
tggtcatccaaataagagaaatcagaaatgcaattactccaaccctgaagagtaaatacataaaataagaagccgaagcaaaagcaatcagaataaagactgaaattcatcaaagcccct

SEQ ID NO: 869725 - DNA, 120 bp, Artificial Sequence
  ENSG00000267582_0 (sequence is synthesized)
tgaatcagagcctgcccatccacacttggcccaaacccatccgtccaggccgacttcctaactccagagaggccgggcaggaaagaacgccccctgaagctggacagaggatagagcccg

SEQ ID NO: 869726 - DNA, 120 bp, Artificial Sequence
  ENSG00000267582_1 (sequence is synthesized)
tgtgtgcttcctgttcaagtctgggccatgtctccagttccttgggggcccacactgaagctgaaaaaggggacttaaagggccccagctctgggacatcctgtcagtgccaccagaagc

SEQ ID NO: 869727 - DNA, 120 bp, Artificial Sequence
  ENSG00000267582_2 (sequence is synthesized)
cacagaagagagcttctaggtgcacctgtccagggaccaccacccaggctccgcccctgctgttttcctatgggaagagataggataggtcagggggatgaggtggggaggaggagggac

SEQ ID NO: 869728 - DNA, 120 bp, Artificial Sequence
  ENSG00000267583_0 (sequence is synthesized)
actgctcagaccctccaggggcagggcccaggattgaagagggaagccctgctccacacgtgttcatcaggaaggacccacagactgctgctcctggaggcctctcggtttatggatgtg

SEQ ID NO: 869729 - DNA, 120 bp, Artificial Sequence
  ENSG00000267583_1 (sequence is synthesized)
tgtttgttccataaaccctcagagggtcacctggagacccgctaaaatgcaggttcttgggccacatcctagaccttctgaccgacccagggagtggggcccaggaagctgcatttgaca

SEQ ID NO: 869730 - DNA, 120 bp, Artificial Sequence
  ENSG00000267583_2 (sequence is synthesized)
cctcctttcccattcccctgccaggctctccctgctgacattgtttttgcgggagagctgtgaattctgaagattaggttgcttctcaccccaagctccagaagtccaggctgagccaaa

SEQ ID NO: 869731 - DNA, 120 bp, Artificial Sequence
  ENSG00000267583_3 (sequence is synthesized)
ccaagcttcaagttaacaagtcaaatgacaaaaacaaaacaccaggctgaaatcataggcttctacaagcaggtgcctggacttggagaaccaggaggtgaggggactgactacttgaag

SEQ ID NO: 869732 - DNA, 120 bp, Artificial Sequence
  ENSG00000267583_4 (sequence is synthesized)
aagttgtgcctggacttggagaaccaggaggtgaggggactgactacttgaagatcacatggaggaggagtctgatccaggcccaggcaccaaggaaaggccatgcaaggacacagggag

SEQ ID NO: 869733 - DNA, 120 bp, Artificial Sequence
  ENSG00000267583_5 (sequence is synthesized)
aagggcagctgtctgtaagccagaaagagccttcactagaaaccaaatcagccagaaccttcatcttggactttccagccttcagagatgtgaaaaaataaatttctgttgattaaccta

SEQ ID NO: 869734 - DNA, 62 bp, Artificial Sequence
  ENSG00000267583_6 (sequence is synthesized)
gctggaaatgcatcagcctcccaagaagctgggactgactacaggcatgcaccaccacaccc

SEQ ID NO: 869735 - DNA, 120 bp, Artificial Sequence
  ENSG00000258633_0 (sequence is synthesized)
agccggaagtgggcagagtttgcacggaggcggagctttattggcaaacctgattggctttttgaggcagaggaagctcacctatggctactgccactacaggtccacagggagtaatgc

SEQ ID NO: 869736 - DNA, 120 bp, Artificial Sequence
  ENSG00000258633_1 (sequence is synthesized)
ccggctaccactgatgttcattaagacccaagggttcttcagtcggcttgtggtagatgctgcctggcctgggactcacccttcaggacagtgggctcccttctggcccaaggcaggtcc

SEQ ID NO: 869737 - DNA, 120 bp, Artificial Sequence
  ENSG00000258633_2 (sequence is synthesized)
gcaaaagtcccctttacttttccctctacttttctccagcataaggagtctctccccatagccaccatggctggaaatgtgctgagtctcatttgaagccagctagtctcagagtctcac

SEQ ID NO: 869738 - DNA, 120 bp, Artificial Sequence
  ENSG00000258633_3 (sequence is synthesized)
agaaggcccactgcatacctaggtatcgctggtatcgctggctatttggagcttaagagctcttcaatcctctgacatcttgattgcagcctttgagagaccctgggccagaggatccag

SEQ ID NO: 869739 - DNA, 120 bp, Artificial Sequence
  ENSG00000258633_4 (sequence is synthesized)
ctattgccatgcttaaatttccaacccaaatgtaactgtgagataaatgttgttttaagccactaatttttttaattactgtattaattttaacagataatacaataagagttttaaaat

SEQ ID NO: 869740 - DNA, 120 bp, Artificial Sequence
  ENSG00000258630_0 (sequence is synthesized)
gagggtgggagggtagccaggtgggagggcaggaggagccaagatatggaggctgaaagcagcgcagtgggcttgggggatgcacagggcacccgctgcccagagaggttccagttagtc

SEQ ID NO: 869741 - DNA, 120 bp, Artificial Sequence
  ENSG00000258630_1 (sequence is synthesized)
ctccgcctaagaagtgcccccattgttccaggactccttccctccttttctcctgccctcattcctcccttcctgcctctttttccctccgccctccctttcttctttttctttttttcc

SEQ ID NO: 869742 - DNA, 120 bp, Artificial Sequence
  ENSG00000258630_2 (sequence is synthesized)
ttctcttcttcctgcttccttcactagtagttactggcacccactatgtaccagccactgtgctgggcacggatggacacacatcagcccctgcccgcatggtggaacagggatatggga

SEQ ID NO: 869743 - DNA, 120 bp, Artificial Sequence
  ENSG00000258630_3 (sequence is synthesized)
gagaaagacaacaaacaactcggtgtacaaatagtcaactacagtggaaaagcaaagattaaatcctcatacctctctggaaaagtggaggggaccacattccagcatctggtgccttgt

SEQ ID NO: 869744 - DNA, 120 bp, Artificial Sequence
  ENSG00000258630_4 (sequence is synthesized)
ttgccccaaacatgacttcaagtgaatcgacataatactcttccagagggaaagcagaaccatctgcagggctgagggaccaagaaacacagtgaggaattccacaggaggcccacgcgg

SEQ ID NO: 869745 - DNA, 120 bp, Artificial Sequence
  ENSG00000258630_5 (sequence is synthesized)
agggatgtgacaccccaggtggactctaggggacgctcacttggaacttgcatcacccggaactgtgtctgccactgtgacttcagagcagcacagacctgaggtggatccagcaatgcc

SEQ ID NO: 869746 - DNA, 120 bp, Artificial Sequence
  ENSG00000258630_6 (sequence is synthesized)
cacaactgtccaacaatttcacttttccgaggctcagtttccatgtggaaaatggactggctctgagtattaaatgaggatgaatgtccatatgcctcacccctttcttcatgaaaggaa

SEQ ID NO: 869747 - DNA, 120 bp, Artificial Sequence
  ENSG00000258630_7 (sequence is synthesized)
gacacctctgggactcagacaaatggccaataacatctagtctttattcagtcctaactgcatgacaatacaactagcgtaacagtcatcaacataaggaatgctctcaatattgctcga

SEQ ID NO: 869748 - DNA, 120 bp, Artificial Sequence
  ENSG00000258630_8 (sequence is synthesized)
acagatgagaaaacagcctccagaagaggaaagtgtagatgagttaatttttccctgcccaacgttgattcccattccttctgatcatggtgccctgacttctttgggagaactccctct

SEQ ID NO: 869749 - DNA, 120 bp, Artificial Sequence
  ENSG00000258630_9 (sequence is synthesized)
tctctgtgacgggctgactggtgggattatcagtcaaggtgcccacctcctctagctctccccatctctctcagtctctggagtttctgtttcaagcataaggacagaagattagaaatg

SEQ ID NO: 869750 - DNA, 120 bp, Artificial Sequence
  ENSG00000258630_10 (sequence is synthesized)
gctgaagctgatttgccccaggaggagggtggggtcgtgtcctgaggagacgctcttgtgggaccctgcttcttggactccttggatcccagccccaccccacccccagacagccttatt

SEQ ID NO: 869751 - DNA, 120 bp, Artificial Sequence
  ENSG00000258630_11 (sequence is synthesized)
ctgccttcagagtctggtcctttgctttcctttaaattctgagaccctcttgggtctgccctttcccatgtaggttacagccagattggtttctgttgcttgcatccctcaaactctgcc

SEQ ID NO: 869752 - DNA, 120 bp, Artificial Sequence
  ENSG00000258630_12 (sequence is synthesized)
tgacacaggaagtgactcctccaggtcatccagcccatgagtggcatagtcagaggaagccctccgtcaccaggctctcaagccagtgctctctccatcatgccacatggctggccttgg

SEQ ID NO: 869753 - DNA, 120 bp, Artificial Sequence
  ENSG00000258630_13 (sequence is synthesized)
ggtggtcctgccatagggagagctttctgagatgggtcagggggcagattatcatcaaagacctggtgatggaaagacacatggcatggcctcatggtcatggagcctgcatggaggcca

SEQ ID NO: 869754 - DNA, 120 bp, Artificial Sequence
  ENSG00000258630_14 (sequence is synthesized)
acatgctggaggagagctttgaaggcatccacggaagcagatgacaggagcctgaaagccatgtgtggccacacacctgcttctgacataattaatgagacatctatattgttcctgtca

SEQ ID NO: 869755 - DNA, 120 bp, Artificial Sequence
  ENSG00000258630_15 (sequence is synthesized)
gtgagcttctttgctacccaagcccttagttcatcatgtattttttaaagcaaaaatggaggccttcctgaaacagcctccctcattttgcttaataatgctgcagtattgacgttctat

SEQ ID NO: 869756 - DNA, 120 bp, Artificial Sequence
  ENSG00000258630_16 (sequence is synthesized)
gagggtgaggtgacaccatctcaggatgatgcactagacccccagtgattgatggctatacttttttttactgacactttgaaaagaaagggcccctctcagattactgagcaagtggtt

SEQ ID NO: 869757 - DNA, 120 bp, Artificial Sequence
  ENSG00000258630_17 (sequence is synthesized)
actctggagaggcagcccccacttggagggaccaggacccgagccctgcccatccccgaatcctgggagccctgcgtggggagtgtcgagggcctgggtcggggggcaaactagtgtgga

SEQ ID NO: 869758 - DNA, 120 bp, Artificial Sequence
  ENSG00000258630_18 (sequence is synthesized)
gccaactttaatggaggacctagcaagtgccaggcagcattctgagccctggaatccggtgatgaacatgacagacaagattcctgcccccaaggagctgcaccttaataagtcccgcaa

SEQ ID NO: 869759 - DNA, 120 bp, Artificial Sequence
  ENSG00000258630_19 (sequence is synthesized)
tgaaggagacagaacataaacagaggaaaatacacaagatgccagcttgtgagaagtgctagcaaaaaaagacacaagtatgtccagagagtctgaggtgtatacagaaaagcaaagatt

SEQ ID NO: 869760 - DNA, 120 bp, Artificial Sequence
  ENSG00000258630_20 (sequence is synthesized)
agcctccggtgccgatttagcaaagccatgattgaccagatccgaggctcgctgccctgtggagctgcttcctaattatgttacttcaagcacccatccccagggtgcaggttaaagtta

SEQ ID NO: 869761 - DNA, 120 bp, Artificial Sequence
  ENSG00000258630_21 (sequence is synthesized)
accagcacactaatgtacatcaagcagtgtaggcggaggcgcagttctgaagacagtcaccaatacgcggcaaatacctattgtgagatccatcacctgctggatgggcctgctccctct

SEQ ID NO: 869762 - DNA, 120 bp, Artificial Sequence
  ENSG00000258631_0 (sequence is synthesized)
agttaggacaaagcaagcaaagaagagggtttgagtaagaagtgtcttgaagaaatagtagctgttgctcatgattatgttttacctgtgaaattcagataatagttttgagtgtggtct

SEQ ID NO: 869763 - DNA, 120 bp, Artificial Sequence
  ENSG00000258631_1 (sequence is synthesized)
gtgcacatgaaggattgagtattgctccaaataaccagaccaacaagggaggatgcctttggtggaagccaaagttactgcctaaaagaccagtttactacaaatagtgctcccaggtga

SEQ ID NO: 869764 - DNA, 120 bp, Artificial Sequence
  ENSG00000258631_2 (sequence is synthesized)
atgctgctatcaaccccattttacaacgtggaaactgaagaattgagatagtaactgcaccaagatctcacaactggggtaaaaatccatgcagcatggccctagatgaacataatctga

SEQ ID NO: 869765 - DNA, 120 bp, Artificial Sequence
  ENSG00000258631_3 (sequence is synthesized)
agtgcacatgaaggattgagtattgctccaaataaccagaccaacaagttggagttttgtgacaagttctgacaatggcctgagtaaaaatgatatctgtaccttctgagacaaaatatt

SEQ ID NO: 869766 - DNA, 120 bp, Artificial Sequence
  ENSG00000258636_0 (sequence is synthesized)
gttacctcagggatcaaagtataaaatgttgaatgagaaacccgaagaccttgcatcgctgggctgaataacttgttttcttttttatggtgtccagactgagcaaagaaacatatattg

SEQ ID NO: 869767 - DNA, 120 bp, Artificial Sequence
  ENSG00000258636_1 (sequence is synthesized)
gggaaaggatactgtattcagtaaattgtgctggaaaaagtggtaagccacatgtagaagaatgaaactggatccccagctctcacctaatacaaaaatcgactcaagatgcatcaaaga

SEQ ID NO: 869768 - DNA, 120 bp, Artificial Sequence
  ENSG00000258636_2 (sequence is synthesized)
ctgaaaccttgaaaattctagaagataacaccagaaaaactcttctaaatgttggcttacgcaaagaattcatgactaagacaccaaaagaaaatgcaacaaaaacaaaaataaataaat

SEQ ID NO: 869769 - DNA, 120 bp, Artificial Sequence
  ENSG00000258636_3 (sequence is synthesized)
ataaataatcagaagaataaacagaaaacccacagaatggaagaaaatattcaccaactatgcatctgacaaaggactagtatccagaatttacaaggaactcaaacaaataaatgaatt

SEQ ID NO: 869770 - DNA, 120 bp, Artificial Sequence
  ENSG00000258636_4 (sequence is synthesized)
agatcccagcgagcacttccaagtactttaggacgtgggggtgactcttttttcttcaggattgtcccacttgccaccctttccagctgagctgataggaaccaatgaaagtctaggcga

SEQ ID NO: 869771 - DNA, 120 bp, Artificial Sequence
  ENSG00000258636_5 (sequence is synthesized)
tgaggattttccgttacctcagggatcaaagtataaaatgttgaatgagaaacccgaagaccttgcatcgctgggctgaataacttgttttcttttttatggtgtccagactgagttttc

SEQ ID NO: 869772 - DNA, 120 bp, Artificial Sequence
  ENSG00000258636_6 (sequence is synthesized)
aaatgcaaattaaaaccacagtgagattccaccttactcccgcaagaatgtccacaattaaaaagtcagaaaacaatagatgttggcatggatttggtgaaaatcacatcagtgaataca

SEQ ID NO: 869773 - DNA, 120 bp, Artificial Sequence
  ENSG00000258636_7 (sequence is synthesized)
gatttgggaagaaatgtgcataactggtttcagctagccaacacgctggtcccagtataccactggctacggcattctaaaagtgtcctcatatgtatctattaaatattcaagaacttt

SEQ ID NO: 869774 - DNA, 120 bp, Artificial Sequence
  ENSG00000258636_8 (sequence is synthesized)
gaccaatatattctctgccaaatgctctcaagaaatcttggtggagatggtgtcggggtaaggtgggggtttttccgaaatggaatcatgttaatgtggacttaatgttaaaatatgaat

SEQ ID NO: 869775 - DNA, 120 bp, Artificial Sequence
  ENSG00000258636_9 (sequence is synthesized)
tttcaaaaaaatttgctttactttcagtaggctaaatacctacatagtaaaatttaaaaaaatctgtaattctctcttaatttattcattatactattatatgtggtaggcatttttttc

SEQ ID NO: 869776 - DNA, 120 bp, Artificial Sequence
  ENSG00000258636_10 (sequence is synthesized)
ctggctctcatatcatttgtgtttgttttatactaatgaaatacagaaaaactctgtagtatatagagcccaatggaacttttaagagtgagaattttaatttgtatattatggaaaagt

SEQ ID NO: 869777 - DNA, 120 bp, Artificial Sequence
  ENSG00000258636_11 (sequence is synthesized)
catctcagaaatattagtttataaatatgcagatacaatttctagaatgtcaaaaaataatcctttcacctgagttgtcttaagtaaataacttttaggatttttaattggattatttat

SEQ ID NO: 869778 - DNA, 120 bp, Artificial Sequence
  ENSG00000258636_12 (sequence is synthesized)
gtaatcattataaaggagatctgaggtaaattgcttaagcattttctttagctttttgcaagactaaaaatggagaataaatatttgctcaaatatcgagtcaaactaattttgaagaga

SEQ ID NO: 869779 - DNA, 120 bp, Artificial Sequence
  ENSG00000258636_13 (sequence is synthesized)
aatctctaaatactttattaaatgaccaaaatataagaaaatgtttaaaaagactgcaaatagaaacacatcagtttaaagcacacaaagagataagtggaaaaagtattttctcagaac

SEQ ID NO: 869780 - DNA, 120 bp, Artificial Sequence
  ENSG00000258636_14 (sequence is synthesized)
atgctaaaaaaaacttagaatatccaggatactgcatttattcatccttacaacatgaattttaaatatcttagcgactgtgctatcattttcagtgttctgtatgaattcttaccttct

SEQ ID NO: 869781 - DNA, 120 bp, Artificial Sequence
  ENSG00000258636_15 (sequence is synthesized)
cagaagattatgtagatataacagatacttctggaatatatatccatgataagatttgtctttttacaggagaaaagaaaatatatcaagtccaacagaacttaagaaaatacaatttaa

SEQ ID NO: 869782 - DNA, 120 bp, Artificial Sequence
  ENSG00000258636_16 (sequence is synthesized)
ttaactttatatgatataggccttgttaatattatatatcaaaaaagaattctagtttatattcttttgtctgtaagatgggggagctgttgcattataaaaaatactggtcagttccat

SEQ ID NO: 869783 - DNA, 120 bp, Artificial Sequence
  ENSG00000258636_17 (sequence is synthesized)
tcctctaagcattttcttttgattaaaatcatttgtagtaaaaatgatgacccaaacctttgtaaatgatattttagctgggttataatctaatgaaattgtgattttaaaagtgcttca

SEQ ID NO: 869784 - DNA, 120 bp, Artificial Sequence
  ENSG00000258636_18 (sequence is synthesized)
attactacaactataaaatcttggtttactaggaatatgtataaggtgaagtatccattatttctttaacatcagtatatattgtttaacattctgcttttgggctaagacttcctaggc

SEQ ID NO: 869785 - DNA, 120 bp, Artificial Sequence
  ENSG00000258636_19 (sequence is synthesized)
tgtgtgtgtgtgtgtgtgtatgtgtataaaaatatatgttctgttgttatttagttatgtcttccctgaaaacactgatagatccaacaagtctcttgattcctcttaaagataagcaag

SEQ ID NO: 869786 - DNA, 120 bp, Artificial Sequence
  ENSG00000258636_20 (sequence is synthesized)
gatccaacaagtctcttgattcctcttaaagataagcaagaagaagaataaagtatgtcacacttaaacttgagtaaatccaagttggaaaaacagaagcagatttttttttaatcctac

SEQ ID NO: 869787 - DNA, 120 bp, Artificial Sequence
  ENSG00000258636_21 (sequence is synthesized)
aggatgaatgttgagagagacaaaaatattaacaccacataaattataacctagagaaattctaaaccaggttgaaaacctacgcataagcagtcaataattatcttacacttatgcaat

SEQ ID NO: 869788 - DNA, 120 bp, Artificial Sequence
  ENSG00000258636_22 (sequence is synthesized)
acaattttttattacagaaagaactttagtaattacctcatgctgtatatatgggaaaggagataaggaagaaaaactctttatagtatgcaattagttatctcctgccttatcttggta

SEQ ID NO: 869789 - DNA, 120 bp, Artificial Sequence
  ENSG00000258636_23 (sequence is synthesized)
tttgtagaaacacttggaagtaggaaaagtgaacatttgtatccctgttctatagtttaaaaaattgacacacataagttatttttaatttatccagttaatcaccagtaatcatgatgc

SEQ ID NO: 869790 - DNA, 120 bp, Artificial Sequence
  ENSG00000258636_24 (sequence is synthesized)
tttatgaatgacaattcttttatatttattcaaaaatatggggaaaataaatgacatctgcctatataacttaaaattcttgaagaaaatgtgtataggaataacttggtatgaaatgtt

SEQ ID NO: 869791 - DNA, 120 bp, Artificial Sequence
  ENSG00000258636_25 (sequence is synthesized)
atagaaatgttagttctttgtctcttatagttacagtaagtggctaatcatcatgtctacgtttatgtataatttatttacattttaaaatgttctaaccttgaatacatagggaacaaa

SEQ ID NO: 869792 - DNA, 120 bp, Artificial Sequence
  ENSG00000258636_26 (sequence is synthesized)
tatctgatgataggtgtttgcaaggcagcatcagtgatttttcttgatattttatctgaaatatctgagtatctactaggaatctaacatggaaaggtaattacatatgatgttggaagc

SEQ ID NO: 869793 - DNA, 120 bp, Artificial Sequence
  ENSG00000258636_27 (sequence is synthesized)
aaatttgtatacaccctatttatggccaagcaaaacagtgtaatgtgtctgagcatgtatgtgttcctttcaccagttttcttgtggtagaatttataaaactgcatatattcacaatgt

SEQ ID NO: 869794 - DNA, 120 bp, Artificial Sequence
  ENSG00000258636_28 (sequence is synthesized)
acaatgtgatggtttgacgtatatatacattgtgaaataattaccacaatcaagtcaatgaacacattcatcacctcagcgttttctaaaattacatttatcaaactgtatttgaaagta

SEQ ID NO: 869795 - DNA, 120 bp, Artificial Sequence
  ENSG00000258636_29 (sequence is synthesized)
aatgtgttttctcattgttaaccacgactttaaaactttattacagattaatgttaagaaagctactgaaattaattttagtaataaaacatctgaatatacaccatgaaatgtataaat

SEQ ID NO: 869796 - DNA, 120 bp, Artificial Sequence
  ENSG00000258636_30 (sequence is synthesized)
gtatgtgctgattttaggagtacaactaaataagtaatgcaaacttacttgcaggatcatcactttaactctgtctctctctctctctctctctttatatatatgtctctctcatatata

SEQ ID NO: 869797 - DNA, 120 bp, Artificial Sequence
  ENSG00000258636_31 (sequence is synthesized)
tgatatatcttatacatctaactatatatatgtagaggaagaaagagacactatagagtaatacaacctttccattaactgcatataaagtcagccttataataatgcccctggattatc

SEQ ID NO: 869798 - DNA, 120 bp, Artificial Sequence
  ENSG00000258636_32 (sequence is synthesized)
tgaccctttaataaaatgttatacatatttagagacttggattgtgcctgtttttactaacagttgttatttaaaatattattagtaagttaattcatataaaccatgcagagaagctgt

SEQ ID NO: 869799 - DNA, 120 bp, Artificial Sequence
  ENSG00000258636_33 (sequence is synthesized)
ataactgtgcatataaatagtgaagagaaactgatctggcattcagggatgttgagattattccaactccgctgccaattggctgtgtgtctttggagaggtcacataatatctccgagc

SEQ ID NO: 869800 - DNA, 120 bp, Artificial Sequence
  ENSG00000258636_34 (sequence is synthesized)
tatagtttccttatcagtaacatagactagatgatttttaaaatttcactcagcacataatttgatctctaacttaaaagagctggaataaaaatcaccactaaaaattattagcgttac

SEQ ID NO: 869801 - DNA, 120 bp, Artificial Sequence
  ENSG00000258636_35 (sequence is synthesized)
tatggttgtactttgtttttatacattacaggcattaaaaactacctagagttaattagtattcgacaaaattatttcttacaaatcttacgctattctgtaacgcatgggtctaatatg

SEQ ID NO: 869802 - DNA, 120 bp, Artificial Sequence
  ENSG00000258636_36 (sequence is synthesized)
tatttaatgtagctttcgtacaactgcaaaaacttcaaagcatatctgaacttgtgggttttgtaagacttgaacgctataaatgaaagtaatggaaattttattatattctattatcga

SEQ ID NO: 869803 - DNA, 120 bp, Artificial Sequence
  ENSG00000258636_37 (sequence is synthesized)
ttgtgtgattagagttgttgagtggtaactcagtgtctcatgtgtgtgaaagagagagaaatgatgacagttgtaaaagcctaagatacacaagacagaatagtggttaggatcataagc

SEQ ID NO: 869804 - DNA, 120 bp, Artificial Sequence
  ENSG00000258636_38 (sequence is synthesized)
ttggaaattagaaccgatattttacttccagtgtctgccacatctcagtggtatgactttgggaaagtagtttaatttctctgagttacttcatctgtagtatgcagattacaatagcca

SEQ ID NO: 869805 - DNA, 120 bp, Artificial Sequence
  ENSG00000258636_39 (sequence is synthesized)
ccgcacagtgggtataaagatgagtaaggttatatttttgaacacgtagaagagtatctgacatacaataagtgtgtaccgttaaagtatacttaaacaaaatttaatattaataaaagc

SEQ ID NO: 869806 - DNA, 120 bp, Artificial Sequence
  ENSG00000258637_0 (sequence is synthesized)
agaggatgcaagggcgccacgggattggtctcctcctttggcactcattagtcaccaggtgcactttgtcagcatcgcgataacccagaagagaacacgtgtagatggcctctatgaagc

SEQ ID NO: 869807 - DNA, 120 bp, Artificial Sequence
  ENSG00000258637_1 (sequence is synthesized)
gaaatggaaggaagtgaactcaaccaacaaaagagaactgagcaattcatcccgggactctgctctctctgtttttccccctgttgaactgaaagcaacgctagtcctgaacggatgaat

SEQ ID NO: 869808 - DNA, 120 bp, Artificial Sequence
  ENSG00000258637_2 (sequence is synthesized)
gagcagaagtaaaaggaagagaaggaggaaaaccagaaggaggaaaagaaaaagaagaatgtgagaaaagtccagaatccatataaatcaagatatagaaaagagtttttctaaatctca

SEQ ID NO: 869809 - DNA, 120 bp, Artificial Sequence
  ENSG00000258634_0 (sequence is synthesized)
tatatgtgaagtgggcggttgtaaagttagctttctcttcatttagctgtcactggacagaaaaatatgagctgtgggcagatgcccctggatgagagccagtagccagtctctggcctc

SEQ ID NO: 869810 - DNA, 120 bp, Artificial Sequence
  ENSG00000258634_1 (sequence is synthesized)
tctgtgccctcccctaggagcccccgaccccgccatgggtcccctcctggcctctgccagcctctcccactcttgcttcattgacctctggctcacctttattttttctcctgtctcttc

SEQ ID NO: 869811 - DNA, 120 bp, Artificial Sequence
  ENSG00000258634_2 (sequence is synthesized)
ccacttctggtttctttgtttgggtttatcacagatcctttcctcttccctcctttcatatttctaagccctctcaagagagaagaatcatatttttcctcaaccatcgctctatctctg

SEQ ID NO: 869812 - DNA, 120 bp, Artificial Sequence
  ENSG00000258634_3 (sequence is synthesized)
gcacccagcacattgccaggctgagttggcactcaaaaatgtttgtagaacaaactactctctctatacatctttctgacttggtggggaagaaggtccaaaactttgctgatgactcct

SEQ ID NO: 869813 - DNA, 120 bp, Artificial Sequence
  ENSG00000258634_4 (sequence is synthesized)
tggatgaagaaacttctcatacagtggtgtgagccctggagtcagaatggttggcttgagccccaatttcattactgcctggccaggtgaaggagattctgttcatcagtggcagccagg

SEQ ID NO: 869814 - DNA, 120 bp, Artificial Sequence
  ENSG00000258634_5 (sequence is synthesized)
gatgtctctccttcctaccctgactctcctctttctgctgggtcccctcccggatacagggctcacacctgtggacctcagagccagcgtcaagaccaagaggaaagaaatcaccaaaag

SEQ ID NO: 869815 - DNA, 120 bp, Artificial Sequence
  ENSG00000258634_6 (sequence is synthesized)
ccagacccttgtatagagggaaggggaaggaagggagggaagacagactcctctggggatacatgcgactgtcttggctgggaaatctgatctggtgggggactcaccccctcctctcga

SEQ ID NO: 869816 - DNA, 120 bp, Artificial Sequence
  ENSG00000258634_7 (sequence is synthesized)
atcagctcagccctgatgtgtctttgtgggcttgggtttctctgtgcctgaaagatgaggcgtggggtgggggtggccgggctgctggttgaggctgaattcttctgagcaatgtggttg

SEQ ID NO: 869817 - DNA, 120 bp, Artificial Sequence
  ENSG00000258634_8 (sequence is synthesized)
tgtttactgggagggtgggagggccagacctttttcctgccttccaggcttcggagataaggcagaaagtgaggatgaaggatagaatgggtaatactctgaaaccacaagaaagagttc

SEQ ID NO: 869818 - DNA, 120 bp, Artificial Sequence
  ENSG00000258634_9 (sequence is synthesized)
tggcttttgtctctgccccacagctcagacatttcctggggcatctggaaggaagctgacccactcccaccaccctggggtcccagcccatggggagcacagaacctcagtgggcacccc

SEQ ID NO: 869819 - DNA, 120 bp, Artificial Sequence
  ENSG00000258634_10 (sequence is synthesized)
tttcttccattctacctcctttccattgtcagtttagccacaaaattattttagcttttttactgccagtcccaccctcagttttccctgccacatgagcccagccctagagctgagctt

SEQ ID NO: 869820 - DNA, 120 bp, Artificial Sequence
  ENSG00000258634_11 (sequence is synthesized)
ttctccctgcctcccagcacagccaaagccacagagaccctaggcaggtgacagagcccagcctggcatgcatcggccttgagggctctgctgcaggaccaccttccccttccttgctgg

SEQ ID NO: 869821 - DNA, 120 bp, Artificial Sequence
  ENSG00000258634_12 (sequence is synthesized)
cctctcaggggtcgtggccagcctgcatcctggacacagaccagccccaaagcaaccagtgccaagccctggggatagacagtcacctggtataaaaaacaccaccacctttattagaat

SEQ ID NO: 869822 - DNA, 120 bp, Artificial Sequence
  ENSG00000258634_13 (sequence is synthesized)
gctgggcagccttttttttctctctctctccttttttttttttttaaacaaaaaaaacacaaaagtgtctgtacaaaaatggggatcaggatctcagtctgtagaaatctgttttattct

SEQ ID NO: 869823 - DNA, 120 bp, Artificial Sequence
  ENSG00000258634_14 (sequence is synthesized)
taccaacatccaatatcatttccatggcatagctctgggctggtcccgtggaagagattccaaatatgtggtgatttctggtggaatttctgcccccttggaggggaagatgactgcatg

SEQ ID NO: 869824 - DNA, 120 bp, Artificial Sequence
  ENSG00000258634_15 (sequence is synthesized)
gcatgctgggagtgcaggcacatggcaggagtgagggtggctggagctgaggagccagtgtgcctcagtctatgctgaccttggcctttacaccctccttagtgtcagacaccagtgcgc

SEQ ID NO: 869825 - DNA, 120 bp, Artificial Sequence
  ENSG00000258634_16 (sequence is synthesized)
cccctgctggtggggaggggaagcagggctgactccaccccatcatgggagactcccttttggtttccatctcatcatgaagagcttcagtccacgcggcgttctcctcccattttcctg

SEQ ID NO: 869826 - DNA, 120 bp, Artificial Sequence
  ENSG00000258634_17 (sequence is synthesized)
agccaagtaagctgtcttagctggagagatgacaatggacttggacaaagtctggaggaagcagggcagtgtctccctgcctccagcccagagttcaggtgaggggactcagtttgtggt

SEQ ID NO: 869827 - DNA, 120 bp, Artificial Sequence
  ENSG00000258634_18 (sequence is synthesized)
aggaagagtcctggctgcttcgaagccccttctcctaggcagccccaccttgttctaagagaaaagaccctgtaacgtgttccctgctgggggctgacagtgccagctgctctcgcagcc

SEQ ID NO: 869828 - DNA, 120 bp, Artificial Sequence
  ENSG00000258634_19 (sequence is synthesized)
tccagaaccatctggggcttggaggcagaggtgggctgggagcgactgggaatggaaaaagaggtgggcagctcattctgcaggtccatgcaaccgatcacgtggtccagttcagaaggc

SEQ ID NO: 869829 - DNA, 120 bp, Artificial Sequence
  ENSG00000258634_20 (sequence is synthesized)
cgggtggctccttgggctttaccctgagcgagacgaggcttggagacttatagtcaccatctgaggaaggctcaaagctgtggccccccagggtggggggaaagccatggatggagtaga

SEQ ID NO: 869830 - DNA, 120 bp, Artificial Sequence
  ENSG00000258634_21 (sequence is synthesized)
tgccagggtgagccgcagaaggggctggcacccccatgaagccagccacactcccatgggggtgggaatatggagacatgcatggggaggggatgccctctggagacacaaggcaggggc

SEQ ID NO: 869831 - DNA, 120 bp, Artificial Sequence
  ENSG00000258634_22 (sequence is synthesized)
ctccagggctcccagatcctggactggcccacagggagttctgcagctgaaaagagagggaaagaaggcccatgagcctgtagcctcaggagctgacttccctacccaggggctttctct

SEQ ID NO: 869832 - DNA, 120 bp, Artificial Sequence
  ENSG00000258634_23 (sequence is synthesized)
ttgtccttggggccccagaaactttccaggaaacctccacttggctcagatctaccccctctcacccccaacactggcagtggcatctcaggaggcccctgccactgttctcaaaacgaa

SEQ ID NO: 869833 - DNA, 120 bp, Artificial Sequence
  ENSG00000258634_24 (sequence is synthesized)
attttcttctgtgattcctttgtgttccgcatgcgtcattcatgagacaggcaagagccccggtttgcagagaaagaagtgaagtggtgtacccactgtcatacagaacgctgacgctct

SEQ ID NO: 869834 - DNA, 120 bp, Artificial Sequence
  ENSG00000258634_25 (sequence is synthesized)
ccaggtttcttcaggccagacctcatattctttttggtgaccctgccaggtcctggttcaggtagggctggggtcttacctgagggtggctgtcagtacggggcagcacagagatgtcat

SEQ ID NO: 869835 - DNA, 120 bp, Artificial Sequence
  ENSG00000258634_26 (sequence is synthesized)
aggcagccgtgaaggggttccgcccctcctggatcttcccataacgctcgcgcttccgccacttggctctgcggttctggaaccagacctgggggcaggttgtgggggtttgagggggtg

SEQ ID NO: 869836 - DNA, 120 bp, Artificial Sequence
  ENSG00000258634_27 (sequence is synthesized)
atagggcagccctgaggaaaggagcctgctagggagagctgatggttgtgtcctcttgtgggatggggagcaggctccaggatggaggatctcaactgttaatccacactgttctccagg

SEQ ID NO: 869837 - DNA, 120 bp, Artificial Sequence
  ENSG00000258634_28 (sequence is synthesized)
ccagggaagcctgggaggaagcctgggagaggcccaagcccacagtgggtaattggccccatgggcctccagctgtcactccccaggttgaatcactgtggtcctccagcctggctgtgt

SEQ ID NO: 869838 - DNA, 120 bp, Artificial Sequence
  ENSG00000258634_29 (sequence is synthesized)
ctagtaagggtgttgtgggggcatctgtgggcctcaggggccctaggtacttcctgggtatactgtgtacatgtgttgggtttctagtctccctgcctcatctccttttccaggctaccc

SEQ ID NO: 869839 - DNA, 120 bp, Artificial Sequence
  ENSG00000258634_30 (sequence is synthesized)
acctcatagcatccgaggaatcttagacatttctgttcaggtcatggtcctgtttaaaccctcagtgactccctggagaccttggtccagagcatagcttcttaacaaggcccctgcctc

SEQ ID NO: 869840 - DNA, 120 bp, Artificial Sequence
  ENSG00000258634_31 (sequence is synthesized)
tctgcacagcctcatatcctgccaggcaaacacatttattcttctggttgcctcccaagctcccgcccagctcttctgaaacactgctatcttgctccttccatcttttgcttaggtttt

SEQ ID NO: 869841 - DNA, 120 bp, Artificial Sequence
  ENSG00000258634_32 (sequence is synthesized)
ctcttcctgggctactcatcccctcaacacatacatccacactgggcatcctccacaggacttccaaaataccctggacctctctttgtactcaccccattccattaccatgatctgttt

SEQ ID NO: 869842 - DNA, 120 bp, Artificial Sequence
  ENSG00000258634_33 (sequence is synthesized)
tggaatctgtttctcccatttatttgtgagcccttggcagataggggtggcacatctgtgtgttgtgcacatctgtgtacatatctgtgatgaattcgttgtttggtatatgtgctgtga

SEQ ID NO: 869843 - DNA, 120 bp, Artificial Sequence
  ENSG00000258634_34 (sequence is synthesized)
ctgttacatttaactgtattggtatatatgttttgtatttctatcatttaatcaacatttatgtgtcagcctctaagctaaatttaacaatgtcaaaataaaaccaaccaaacaaaacaa

SEQ ID NO: 869844 - DNA, 120 bp, Artificial Sequence
  ENSG00000255745_0 (sequence is synthesized)
atagccatctagttctgtggcctaccagttctcatcctttgaattcttaggttagacgagaagatacatgagatctctaaatcttcaggtttaaacgtagatgtctttcactacaccaga

SEQ ID NO: 869845 - DNA, 120 bp, Artificial Sequence
  ENSG00000255745_1 (sequence is synthesized)
gtaaatagcttattcaatattcattttatgatcgttattggacttcggcttcctactgcctttcaaataggccatcgcaagattttgtccagtagtaacggacacagacttcttgttggt

SEQ ID NO: 869846 - DNA, 120 bp, Artificial Sequence
  ENSG00000255745_2 (sequence is synthesized)
tggaaaagaaaagaaatcacactgaaaaatacagcactgaagctcaaaaataaaaacatgttatccagacgccaaagagagaagagacacagcatgggtgaatatatgaaagcaaaagat

SEQ ID NO: 869847 - DNA, 120 bp, Artificial Sequence
  ENSG00000255745_3 (sequence is synthesized)
gaccctatcatattagtatgctaatgaaccagcattcatcctttaatgttcgtgcccgtctccttagtgcttgatagaaaggatgcacttcttatgttagcaatgcttgtggagcctttg

SEQ ID NO: 869848 - DNA, 120 bp, Artificial Sequence
  ENSG00000255745_4 (sequence is synthesized)
tggtcattctcagacatgcacagagtggggaaaaacattgagtcacctggaatccacgttcagctgaggttgaaccagcaatcctggaatcagggcactacgggtaaccacattctcact

SEQ ID NO: 869849 - DNA, 120 bp, Artificial Sequence
  ENSG00000255745_5 (sequence is synthesized)
ctctacattccatggactatgacaagtatatcagtcgtcgaagtgggtggtttaatggcatgattagctccattttctcttcctgcagcatagcaaagtgcataaagcttgagctctgtg

SEQ ID NO: 869850 - DNA, 120 bp, Artificial Sequence
  ENSG00000255745_6 (sequence is synthesized)
tccagcagatctttattagaattccagtccccccacagttacatatgctctctccctgacagttttcacagatgaatcatccagactccatttcctattagagctggaccctccacttgg

SEQ ID NO: 869851 - DNA, 120 bp, Artificial Sequence
  ENSG00000255745_7 (sequence is synthesized)
acttttgacacttagacccctctagcccacacagggacatcagtgcaataattctcccctttctacagcatcattaaattttgcctctctcctggatcatcccattcacatattcatatg

SEQ ID NO: 869852 - DNA, 86 bp, Artificial Sequence
  ENSG00000255745_8 (sequence is synthesized)
ttgcctctctcctggatcatcccattcacatattcatatgctgttatttctcccatctaaaactgaccaggcactgtggctcatgt

SEQ ID NO: 869853 - DNA, 120 bp, Artificial Sequence
  ENSG00000255745_9 (sequence is synthesized)
tcacacaccccatggaagatccgggaagtcttctgatgcccctgctttccaagacaatatgatgcttctctacattccatggactatgacaacccctatctaatctggcagaaaatcctg

SEQ ID NO: 869854 - DNA, 120 bp, Artificial Sequence
  ENSG00000255745_10 (sequence is synthesized)
catcatctctcatctggataactcaattaccaactaacaggcctgtctgctggtacagtctgtgctcaaaacagcagccggaaggattcttttccaaagtaagccaggttgcagccctca

SEQ ID NO: 869855 - DNA, 120 bp, Artificial Sequence
  ENSG00000255745_11 (sequence is synthesized)
tcttgctgagagtttaatcaaagtccttagcagtgtcctgtgaagcccacatatcctgacccctcagactcctttgacctattttctacttccctccccctcgctcactcggctctagct

SEQ ID NO: 869856 - DNA, 120 bp, Artificial Sequence
  ENSG00000255745_12 (sequence is synthesized)
acatggcttttatcctgtgacccctttgctggaatgcaagcttcacaaggcagggatctttgtctgtctggttcactcatgtatcccaagtacagttagtcctccgtatccatggttcca

SEQ ID NO: 869857 - DNA, 120 bp, Artificial Sequence
  ENSG00000255745_13 (sequence is synthesized)
catccgtggagatggaacggtggactgaaaatatttggaaaaaaaaaatgcatctgagaaggagggcaagggttgaataactacctattgggtaccatgtttactatttgagcaatgggc

SEQ ID NO: 869858 - DNA, 120 bp, Artificial Sequence
  ENSG00000255745_14 (sequence is synthesized)
tcattagaagcccaaatctcagcatcacagaatatacccatataacaaacctgcacatgtaccatctgaatttaaattaaaaataaaatttaaaaataaaaaatttatattgcatctgta

SEQ ID NO: 869859 - DNA, 120 bp, Artificial Sequence
  ENSG00000255745_15 (sequence is synthesized)
ttcgtgcccgtctccttagtgcttgatagaaaggatgcacttcttatgttagtgttcatgggcaagaaaatgaccagagaaagagaagaaaaggaaaaacccacagccttaaatcatctg

SEQ ID NO: 869860 - DNA, 120 bp, Artificial Sequence
  ENSG00000255745_16 (sequence is synthesized)
ttgtccagtagtaacgagatcatccagtgaccatggatataaagtgactggaagagtcattgagactgatctgccacatctcaactgtgcactctggaccaggttttaaagacaagttgt

SEQ ID NO: 869861 - DNA, 120 bp, Artificial Sequence
  ENSG00000255746_0 (sequence is synthesized)
tgggttagtgaaatggctcctttgccaagcgtcaacatgtggtagatctaatttgaaatgagttccagagctgaggcaaggctatgatagaacacaaggcaaacagctgaaaactgtagt

SEQ ID NO: 869862 - DNA, 120 bp, Artificial Sequence
  ENSG00000255746_1 (sequence is synthesized)
caaaaggcagggaagctgagaaagtgattcaaagaagcccatctgaaatcggaagcaacagggacgcttttagggaggtcctgggtgcttcagaacacgggccttcagctgagacctctc

SEQ ID NO: 869863 - DNA, 120 bp, Artificial Sequence
  ENSG00000255746_2 (sequence is synthesized)
ggcagaccaagttgctcaacacccagaattaacttgggactggagtccccatgtgaggccacgacaggaggcacacagcaggacctctcagaagggcctggaggggaaagatccctcagc

SEQ ID NO: 869864 - DNA, 120 bp, Artificial Sequence
  ENSG00000255746_3 (sequence is synthesized)
tccagcctgtaaagaaggtgcactgggatgcccacacaaagaggattcccttggcagcaaggaaaaccattagccctgtgctgtttatagatagcagagaataaagagaaataagaagca

SEQ ID NO: 869865 - DNA, 120 bp, Artificial Sequence
  ENSG00000255741_0 (sequence is synthesized)
agacccacactgggggacctgcgacttccaccagcagctgaccggtgggcccttgggacctgggcactcttgcctctgtctctgcacagctggcgcggcagcaactgttcccgtcctgct

SEQ ID NO: 869866 - DNA, 120 bp, Artificial Sequence
  ENSG00000255741_1 (sequence is synthesized)
tcatagatgacaaacaggctcagagaggagaggtgacttgctgaggccacacctcagtggacggtggtgctggctggcgttcagactcaggtccctccgattccagaagcttccaccccc

SEQ ID NO: 869867 - DNA, 120 bp, Artificial Sequence
  ENSG00000255741_2 (sequence is synthesized)
aggtacagggcttggattccaatcgtgccttctctaatgagtggggcgacactaattccatactgcctccatgctgggaggggtatgcccaataagataaacagatgtgggcatgactgg

SEQ ID NO: 869868 - DNA, 120 bp, Artificial Sequence
  ENSG00000255741_3 (sequence is synthesized)
gtcagcaaagattctttggcagcaagtgacaaaaacccaaggcagacttcttcagctaaaaaaggggatttactagctcaggacaccaggaagaatggggtggaggtcaggcatggctac

SEQ ID NO: 869869 - DNA, 120 bp, Artificial Sequence
  ENSG00000228086_0 (sequence is synthesized)
caaagaaaagtcaacaaaggctctaacatcaacatgaccttggataaggtgtacatttcatcaggacagatgactcgaatggccaccaccaccgaggccttgcacacacctttgcagtga

SEQ ID NO: 869870 - DNA, 120 bp, Artificial Sequence
  ENSG00000228086_1 (sequence is synthesized)
acggcgatggccccttcggtgttctcacagatgttcaggaaccttcgcacgatgttgtcactgggtgtgctgccatctatgaagaagaggtcatagtgctcgaagccagcgtctgtgaag

SEQ ID NO: 869871 - DNA, 120 bp, Artificial Sequence
  ENSG00000228086_2 (sequence is synthesized)
aggagcagtaagcaaaaggcatgcatttcatcttccacaacccagaaatacaaaactctcaacaatgaagtgtataaatctcaacaaagcttgggaggaaagtgtgttgtgtgagagaag

SEQ ID NO: 869872 - DNA, 120 bp, Artificial Sequence
  ENSG00000228086_3 (sequence is synthesized)
aggtcacagcaagctcctacaagcatcaatctgcataactgtaagcaccacaggaggttaaaaagaaaacttctgtaagtactgaaaatacatcattaaagttcaaaatctcaacctcta

SEQ ID NO: 869873 - DNA, 62 bp, Artificial Sequence
  ENSG00000243433_0 (sequence is synthesized)
caggcagatcacccgaggtcaggagttgaagaccagtctgcccacatctgtaatcccagcta

SEQ ID NO: 869874 - DNA, 120 bp, Artificial Sequence
  ENSG00000243433_1 (sequence is synthesized)
ctgctgaacatctctagttcttcttcgactcactttgaatcctggaagcaccactacattaaatgtctcttcatactaataagaattttcgtccaaatcgcgcaatcacctccagggcca

SEQ ID NO: 869875 - DNA, 120 bp, Artificial Sequence
  ENSG00000243433_2 (sequence is synthesized)
ggaaaggggacccccggtcgggagtgcggactgggcgtggtcactgaccccgagcgtcccctccttctggctgacacgcggctgcagacgcaggagcctcctgctggcgactggagtgtc

SEQ ID NO: 869876 - DNA, 120 bp, Artificial Sequence
  ENSG00000254835_0 (sequence is synthesized)
cttggcttctgaggatggtggtcttttgcatgcagttgggctgacctgacaaagcccccagtttcctgtggcaggttctgggagaggatgcattcaagcttctgcagcctaggggacagg

SEQ ID NO: 869877 - DNA, 120 bp, Artificial Sequence
  ENSG00000254835_1 (sequence is synthesized)
atgttctctggcagagagaggcagatgaacatagttttagggagaaagctgatgggaaacctgtgagttaagccacatgtctcaccaggaataatttatgccaggaaaccaggaagtcat

SEQ ID NO: 869878 - DNA, 120 bp, Artificial Sequence
  ENSG00000254836_0 (sequence is synthesized)
tccctcgtttcttttctttttcttccatgtcattacggagaagggcactggaggcttactgaagagctttgagaaatagcatagaaggcccagagcattacttgtttccagatgatcaag

SEQ ID NO: 869879 - DNA, 120 bp, Artificial Sequence
  ENSG00000254836_1 (sequence is synthesized)
taaggctgtaccctggctatgaatagcccagcctcctgtggtgtccaagcctggagagattctgtctcattcactcctggtagactggttaacccggccacaggctccttttgccttcag

SEQ ID NO: 869880 - DNA, 120 bp, Artificial Sequence
  ENSG00000254837_0 (sequence is synthesized)
atgaccaccatatatgacctgaagaaacagaaggataaactgttgaagttttatgctgaaagtgatgagcagatattaatgaaaaatagaaaaacacttcataaagctaaaaatgaagat

SEQ ID NO: 869881 - DNA, 120 bp, Artificial Sequence
  ENSG00000254837_1 (sequence is synthesized)
cttgatcgtgtattgaaagagtggatccgtcagcgtcgcagtgaacacatgccacttaatggtatgctgatcatgaaacaagcaaagatatatcacaatgaactaaaaattgaggggaac

SEQ ID NO: 869882 - DNA, 120 bp, Artificial Sequence
  ENSG00000254837_2 (sequence is synthesized)
tgtgaatattcaacaggctggttgcagaaatttaagaaaagacatggcattaaatttttaaagacttgtggcaataaagcatctgctggtcatgaagcaacagagaagtttactggcaag

SEQ ID NO: 869883 - DNA, 120 bp, Artificial Sequence
  ENSG00000254837_3 (sequence is synthesized)
aaaaaaataatgtctgacctccttacatatacaaaaaatatacatccagagactgtcagtaagctggaagaagaggatatcaaagatgtttttaacagtaataatgaggctccagttgtt

SEQ ID NO: 869884 - DNA, 120 bp, Artificial Sequence
  ENSG00000254837_4 (sequence is synthesized)
cattcattgtccaatggtgaagtaacaaaaatggttctgaatcaagatgatcatgatgataatgataatgaagatgatgttaacactgcagaaaaagtgcctatagacgacatggtaaaa

SEQ ID NO: 869885 - DNA, 120 bp, Artificial Sequence
  ENSG00000254837_5 (sequence is synthesized)
atgtgtgatgggcttattaaaggactagagcagcatgcattcataacagagcaagaaatcatgtcagtttataaaatcaaagagagacttctaagacaaaaagcatcattaatgaggcag

SEQ ID NO: 869886 - DNA, 120 bp, Artificial Sequence
  ENSG00000254837_6 (sequence is synthesized)
atgactctgaaagaaacatttaaaaaagccatccagaggaatgcttcttcctctctacaggacccacttcttggtccctcaactgcttctgatgcttcttctcacctaaaaataaaataa

SEQ ID NO: 869887 - DNA, 120 bp, Artificial Sequence
  ENSG00000254837_7 (sequence is synthesized)
cgcaagcgcaggccgagacgccgcaggtcgagtaccgggtggcaaagcagctggcccgggccgtggaaggtggccaggccaccgcggcctgtgacgcgcacctcggcgcccaaggcccgt

SEQ ID NO: 869888 - DNA, 120 bp, Artificial Sequence
  ENSG00000254837_8 (sequence is synthesized)
agccgcgcagtttcctcgggcgtcaggccgccgcgcagcccggccgtatacacgggccccgcgggctcgcagagcaggagcgcgcccgcctcagtccccgacggggcctcaatgcctggc

SEQ ID NO: 869889 - DNA, 120 bp, Artificial Sequence
  ENSG00000254837_9 (sequence is synthesized)
tcggcctgcagccgccgcagccagcggtcctgcagccccagtagctcggcgtacggcacccgacccaggcgcaccaaccgaacggcgggttgccgcatcgtgcccaccgttgcgtccgcg

SEQ ID NO: 869890 - DNA, 120 bp, Artificial Sequence
  ENSG00000254837_10 (sequence is synthesized)
gggccccgccctctccgtgggcctgggggcgtggcctgaggggcggggactcgggggcacaccccgagccgcagctcccaggtgcgtgttaaaagctggaggggggatatgtgatcccag

SEQ ID NO: 869891 - DNA, 120 bp, Artificial Sequence
  ENSG00000254837_11 (sequence is synthesized)
gaccaaaagcgcggggccagactcatcggttcattcaacaaccagtatttagtgcctgctgtgttctgcaggccctgccataggcgcttgatacagcggtgcatagcgtatgagaaagat

SEQ ID NO: 869892 - DNA, 120 bp, Artificial Sequence
  ENSG00000254837_12 (sequence is synthesized)
ctgtcctggctgagcatccgtaatataaaaatctgaaatctgaaatgctccaaaatcctaaactttttgagtgctgacattatgccacaaatggaaaatttcatacctgaccttatgtga

SEQ ID NO: 869893 - DNA, 120 bp, Artificial Sequence
  ENSG00000254837_13 (sequence is synthesized)
gttgcagtcaaaacacaggtgcacaacacccagttcatgcaacatccccagtgggaaaaaagacccccccagctctcttctgctgcagtttttctgctcacacctggatttccccatgca

SEQ ID NO: 869894 - DNA, 120 bp, Artificial Sequence
  ENSG00000254837_14 (sequence is synthesized)
ttcccacaaaaagtaattaaatggcatgcgtgcaggctggacacgccaacaacaggtttcccacaatgccccacatggggccaagacctgtgtgcattactcactgcatttttttgctta

SEQ ID NO: 869895 - DNA, 120 bp, Artificial Sequence
  ENSG00000254837_15 (sequence is synthesized)
ttctctgctgtgtggtataaatatattgttgaaaatgtcaaaaagacctaaagatacccctgtgaatatcagtgataagaaaaagaggaagcatttatgtttatctatagcacagaaagt

SEQ ID NO: 869896 - DNA, 120 bp, Artificial Sequence
  ENSG00000254837_16 (sequence is synthesized)
gatacaggtattctggtgacactactgtgctggcttacttaacctgaatacactatttttttcgttgtattactggtatgtcattttttttactgttaagtacttatgtgtgaataagtg

SEQ ID NO: 869897 - DNA, 120 bp, Artificial Sequence
  ENSG00000254837_17 (sequence is synthesized)
taaaaaaatgattgcttatcggtaacatataaattcagaatcaggaatgatggtgatgccaaacaatcacagatcgtccacatgggtggcggagatgttaacacctttgctttctgatgg

SEQ ID NO: 869898 - DNA, 120 bp, Artificial Sequence
  ENSG00000254837_18 (sequence is synthesized)
ttcagtgtatccacactttgtttcatgccaaaattatttaaaatattgtatgaaattaccttcaggctatgtgtataaagtatatatgaaacataaatgaactttatgtttaaactggga

SEQ ID NO: 869899 - DNA, 120 bp, Artificial Sequence
  ENSG00000254830_0 (sequence is synthesized)
ggcatataagtaaatataattcatcattttcctagcaactcacaccttaggattgattactttgctttgcaataactatgaagaagaaatacaggcttgttatggtttgaatgcatcctc

SEQ ID NO: 869900 - DNA, 120 bp, Artificial Sequence
  ENSG00000254830_1 (sequence is synthesized)
cacattgcagtattaagagatgattagaccataaggggttttcccttgttaatgggatcaagactcttataattgaagctttagacaacattcatttagcttgcccttctgccacttgtc

SEQ ID NO: 869901 - DNA, 120 bp, Artificial Sequence
  ENSG00000254830_2 (sequence is synthesized)
aagtgatgatgccacaagaaggccctcacaagaccagaagctggtgccttgatcttgaatttaacagcctctagaattgttaaataaattgagaaataaatttttggtttttattagtga

SEQ ID NO: 869902 - DNA, 120 bp, Artificial Sequence
  ENSG00000254833_0 (sequence is synthesized)
actaccgtttactgcaagggagccagcgcagcatcctctcagctttgcttggcctcagcagtgagttgaagctcggcttggccagcctgggagagcagggacggcagggcctgtggatgg

SEQ ID NO: 869903 - DNA, 120 bp, Artificial Sequence
  ENSG00000254833_1 (sequence is synthesized)
gacgcatcacaggaaatgaagacattgccaggacctcccagccgagaaaatatgaacaagatgcctcgtgccgctgatgaactccccgctcttagggcctcgagggaaggcaggaagatg

SEQ ID NO: 869904 - DNA, 120 bp, Artificial Sequence
  ENSG00000254833_2 (sequence is synthesized)
gccataacatgccctggctcccgtggtcagaaattgcccattcaataggcagagaggcatgggagcgatatggaaagggctctgggttccagcccagctgcgcagtcaaccatgagacct

SEQ ID NO: 869905 - DNA, 120 bp, Artificial Sequence
  ENSG00000254833_3 (sequence is synthesized)
ggggtgtctgttcacctttctgggccttggttttgttgcctatgcaatgagattgttgggcttctggactccccacgtgtcttccatctaattctaatttctgaggaaggaaatggaaaa

SEQ ID NO: 869906 - DNA, 120 bp, Artificial Sequence
  ENSG00000254839_0 (sequence is synthesized)
caagatgaagcagtgtcgcacagccctgtcgcctcactcatcctgccctcaggtcttgtttctgcctcttcacagcaccacccccatgaagcttccacatgcacctctgcagacccatct

SEQ ID NO: 869907 - DNA, 120 bp, Artificial Sequence
  ENSG00000254839_1 (sequence is synthesized)
cgcacgatgcagtgggagcgagcccttgtggtgaggtgacaacggcccacatatccctcagtgctgggggatgggagtgtgggttccggggaccactgtgtgcagacacccgtagctcag

SEQ ID NO: 869908 - DNA, 120 bp, Artificial Sequence
  ENSG00000254839_2 (sequence is synthesized)
gattcaagaacccaggctcctccatcctccatctccaggggctctggagtccttcacttctagccaatgcatgaagaaagagaatagagaattacctgtgggggaatttcagtacgacgt

SEQ ID NO: 869909 - DNA, 120 bp, Artificial Sequence
  ENSG00000254839_3 (sequence is synthesized)
ctggaagggacacccacttccactcacctcccattggctagaactcaggcgcacggccacgctgattgccgaggaggctgggaggtggggctggctctgtgcccagggaaaagagagaac

SEQ ID NO: 869910 - DNA, 120 bp, Artificial Sequence
  ENSG00000254839_4 (sequence is synthesized)
aatttctgtaagtacgtagctgtttatgtcacagtatttaaaaaaagagtttgttccataaaatagatgaaactctaactaaaaaccagatcacattaaagagtaattatgtttactatt

SEQ ID NO: 869911 - DNA, 120 bp, Artificial Sequence
  ENSG00000256092_0 (sequence is synthesized)
caggaaagaaacaatcagaagggtttaggaacatccaaatctcctcagcggttaaaccgaccccaaaccacttctgggaaaccaccggtatccactgctttggggaactctggatgctcg

SEQ ID NO: 869912 - DNA, 120 bp, Artificial Sequence
  ENSG00000256092_1 (sequence is synthesized)
ttatgccaaacgctctcaaagtaagcaaatccccaactgccgttcccctccatgggtaattcttagggtctgggaggtgagctcgcccgccgaggcagaactaagcgagtcgcctggaga

SEQ ID NO: 869913 - DNA, 120 bp, Artificial Sequence
  ENSG00000256092_2 (sequence is synthesized)
ggcgtgaagggagcctgcacgtgtcccccgcggcttccccaccgccccaagagcggggcatgtacgagaccgcgctgtggggttcagatttaggaaggacgaccgcgtcgcctgcctccc

SEQ ID NO: 869914 - DNA, 120 bp, Artificial Sequence
  ENSG00000256092_3 (sequence is synthesized)
tccctcgcccagagccgggagcaatgctggggcacgaaagaggacttgggaaggatccggtccttactttccccgcgggtcccggacccgcagcccccgggttgtgaggcggaagccaaa

SEQ ID NO: 869915 - DNA, 120 bp, Artificial Sequence
  ENSG00000256092_4 (sequence is synthesized)
caaaggggcgaacccagcggagccggcgtgcacagaccctgccccgcggtccaagaggggtgcctccggcccgggacagcggggctcccggagcccgaaagccccacgagcggcgacagc

SEQ ID NO: 869916 - DNA, 120 bp, Artificial Sequence
  ENSG00000256092_5 (sequence is synthesized)
cccggcgctgacgaacagaggaagcgagtacaacggagccgccgtcgggaacatgcccccgagggccccggagcgcgcggccgcgaggagcggcaagcggcgagggaggccccaagccgg

SEQ ID NO: 869917 - DNA, 120 bp, Artificial Sequence
  ENSG00000256092_6 (sequence is synthesized)
ggcgaggtggctgtccccccagcctggccccgcacggccccccgagggtgggagtgggaggctgtccgggagggggagtgtggaaggagaaaagggccaagggaaggacttactttcccc

SEQ ID NO: 869918 - DNA, 120 bp, Artificial Sequence
  ENSG00000256092_7 (sequence is synthesized)
gcgggacccggcgccagcacagctcctcccgggaggtgtgagtttgaaggaccagaggcgactggagcggaggcggcggtggcggcggcagcagcggcgtcctgctctgcctacctcccc

SEQ ID NO: 869919 - DNA, 120 bp, Artificial Sequence
  ENSG00000256092_8 (sequence is synthesized)
ccgggaggggcgggggaggggcaacggatgaggcgccgcgcgcacgcagcgccctcacgtgacttcctccctcctcccccacccgcctctctgcgcccctctccgccccgcctccctcct

SEQ ID NO: 869920 - DNA, 120 bp, Artificial Sequence
  ENSG00000256092_9 (sequence is synthesized)
acccgcctctctgcgcccctctccgccccgcctccctcctaggtgaaggaagatgatttcccccccatcttgaccaccccccagtcttcgccgccaaaaacggactccgccggctatcct

SEQ ID NO: 869921 - DNA, 120 bp, Artificial Sequence
  ENSG00000256092_10 (sequence is synthesized)
cggcccggtaccagttgttggatccaagagaattccggaacccaaacggtccattaccgcggctctggggtgggcgaggggtgagggggccgggtttccgcgaagggggagggggaaggc

SEQ ID NO: 869922 - DNA, 120 bp, Artificial Sequence
  ENSG00000256092_11 (sequence is synthesized)
gaaggccacctaggagagtcacgtgactactgtttccgccggcgctcacggagagctcgcggtaattccgtttccccgcccttttttccccgcggcctgtcgggaagaaggtccgcgtgc

SEQ ID NO: 869923 - DNA, 120 bp, Artificial Sequence
  ENSG00000256092_12 (sequence is synthesized)
cagggctatcgggaggtcggccggagggccgcgcgcatgcgccccgcgcctgctttcaaactccggttaggaagggcctggagctattttcagaacctgttagggtggggagctacggcc

SEQ ID NO: 869924 - DNA, 120 bp, Artificial Sequence
  ENSG00000256092_13 (sequence is synthesized)
caggaagttacctagcagcgtttctgtcacttggaagatctcttcattacctagttagtcctagaaacaaaatgtttacatattcattgcttgttaggctcgctcaaagcactttattgg

SEQ ID NO: 869925 - DNA, 120 bp, Artificial Sequence
  ENSG00000256092_14 (sequence is synthesized)
cagtgaaaccgcaagtaacccggagccctcggcgcgaccacggctagaatcagagcctaaggcgtgtgagctcagccatcccacgtctgtcttcacgctcatacgcaagcccgacacacc

SEQ ID NO: 869926 - DNA, 120 bp, Artificial Sequence
  ENSG00000256092_15 (sequence is synthesized)
ggggctcccacttaatgaatactgaagagtagggctgtccctaccgcttctcacttccttgttttcatcttttcgttattattaagcgacctaacacaataaacatattaccttgttggt

SEQ ID NO: 869927 - DNA, 120 bp, Artificial Sequence
  ENSG00000256092_16 (sequence is synthesized)
ggctgcgcatcctacaagcctagtgctgaaagcaaaccaagtagctggaacagttggaggttacagtgtgaactcttccagagacaaagtattcggggaaagaaaggaaaaagtaggcac

SEQ ID NO: 869928 - DNA, 120 bp, Artificial Sequence
  ENSG00000256092_17 (sequence is synthesized)
gcacagaaagaataggaaacttcagtgtttgtacacatagatatgtattatatatctatgtatacatttataaatatttttaaagtgctaactaatcgctttactaattacattatttca

SEQ ID NO: 869929 - DNA, 120 bp, Artificial Sequence
  ENSG00000288049_0 (sequence is synthesized)
aagttacgcctgcgtattgcagggaaggaccgtaaaaggctgtggtgctgatcaacgaaggatttctcggagaaaattcctcctttgcggaaatgtccgtagaaacgcaccttttttttt

SEQ ID NO: 869930 - DNA, 120 bp, Artificial Sequence
  ENSG00000288049_1 (sequence is synthesized)
tcctgccaggacaaaccgccggcgatatccgttcatgtgaaagtgtttactaacattctctgaagactcactgggttctcagctcgagaacgttcctgtcacaagacgtttaggaggcag

SEQ ID NO: 869931 - DNA, 120 bp, Artificial Sequence
  ENSG00000288049_2 (sequence is synthesized)
gatgccggtacaatgtatttatgttcttgtaaactgttgcattaacagtgcacttcaagtgggcacatttgtcgttggattttttaccaactcgagcttggactttaggacggggaaaag

SEQ ID NO: 869932 - DNA, 120 bp, Artificial Sequence
  ENSG00000288049_3 (sequence is synthesized)
aagtgctaaatgtttttgaataaaacctttactgcacatgataaacatcccttaaaaattacctaggagcaccctaaattttaaaatgatcacaaagacctggacagattacagtaaacc

SEQ ID NO: 869933 - DNA, 120 bp, Artificial Sequence
  ENSG00000288049_4 (sequence is synthesized)
ttcaacatcgctaaacacacgtaccataaatcaaaagaaacacactgctaatgatccgttttttgatgtggaaatatcatgctgtttttaagggaaattatactttattgcgatgtttta

SEQ ID NO: 869934 - DNA, 120 bp, Artificial Sequence
  ENSG00000288049_5 (sequence is synthesized)
tttcaaaacaagatgttacactttatttcctataattttatttacaatattttacacccgttaagcaaaaatccccctacattgctattctgtttttttttaatcagttcactactgtag

SEQ ID NO: 869935 - DNA, 120 bp, Artificial Sequence
  ENSG00000288049_6 (sequence is synthesized)
tatctttttgttctccatatatttttgaaaaatacgcaaaaggaagtctgtcccaggaagttttcaaacctctcttggccagagaacatcagtgggagtgattggaggccctggatggga

SEQ ID NO: 869936 - DNA, 120 bp, Artificial Sequence
  ENSG00000288049_7 (sequence is synthesized)
agtcccgccaagctggaacagctgagccatccaaacagcaaggatgacaaccttccctttctcctaagaactctgccccattcaagcttggcccaacactgttgccaggggctggctgga

SEQ ID NO: 869937 - DNA, 120 bp, Artificial Sequence
  ENSG00000288049_8 (sequence is synthesized)
attccaagctggtgagtcttatcctatgaggtgccatgaaagtggggcccacagaaggatgctgctcagcttcctggattcagctctcttcctaaggttatgtacaaaaatcttatctct

SEQ ID NO: 869938 - DNA, 120 bp, Artificial Sequence
  ENSG00000288049_9 (sequence is synthesized)
cactttgcctgagttgcagctacctttgctggtgatcctggacccaaagtgtgccagcctctcctgatactctgtgtgtacctgagcagctattctgccaagacttcacacagctctgtg

SEQ ID NO: 869939 - DNA, 120 bp, Artificial Sequence
  ENSG00000288049_10 (sequence is synthesized)
catgaaacccaaggccttagtgaagtgggatcatgaggggatctcctaactggagtgttaaaagatccttaggagaaacattgagtattatttcccagggtgtacattcgctcaccactt

SEQ ID NO: 869940 - DNA, 120 bp, Artificial Sequence
  ENSG00000288049_11 (sequence is synthesized)
ccctgtgttaggggaggttcacttggccacttgttactcatgttgttgttattgtttaagtatttatttagatgatccattagatgatccattaaatgcccaaagtggggttttgaagtc

SEQ ID NO: 869941 - DNA, 120 bp, Artificial Sequence
  ENSG00000288049_12 (sequence is synthesized)
gacaattattattgtgttggggtctatctctctcgttagcttaataatcttttctttgtaaatcttgattctccagcattgggtgcatgtaaatttaaaattgttatatctttttgctga

SEQ ID NO: 869942 - DNA, 120 bp, Artificial Sequence
  ENSG00000288049_13 (sequence is synthesized)
attgatccccttatcatcatttaatggcctcacttttgtctcgaaatctattttacctgatataagtatagctactgctcctctattttggtttccgttggcacatatttgtgtccttat

SEQ ID NO: 869943 - DNA, 120 bp, Artificial Sequence
  ENSG00000288049_14 (sequence is synthesized)
aaggtgaggtaaattctcttgtagacagcatgtagttgtcttcccttttcatttattcacctactctacatcttttggttaaaaaatttagtttatttacattcattattatagatgagc

SEQ ID NO: 869944 - DNA, 120 bp, Artificial Sequence
  ENSG00000288049_15 (sequence is synthesized)
agggacttactactgacgtttatttgtatttttttattagtcatttttttcttcatgtcgttttatacaagtgacttttttttctgcttctagggtttaatttctttatttttatatatt

SEQ ID NO: 869945 - DNA, 120 bp, Artificial Sequence
  ENSG00000288049_16 (sequence is synthesized)
tgcttctagggtttaatttctttatttttatatattgtgtatcaattataggttttgtatatgtgcttactagtttgcttacatataacatgttataaccaattattttaaataaaaaca

SEQ ID NO: 869946 - DNA, 120 bp, Artificial Sequence
  ENSG00000288049_17 (sequence is synthesized)
atctctacactttatattctcctctgttttatgtcttttggttgtcttgtctttgtatattatctgtctcttaaatgatgtaattatcagttttaacatattgcttctttagtctttcta

SEQ ID NO: 869947 - DNA, 120 bp, Artificial Sequence
  ENSG00000288049_18 (sequence is synthesized)
ctaaagatatgagtggtttggacaacacgattgtaacattacagtattttctacttgtgtatttactagtaacattgagttttataacttcagatgacttgttgctcatttctgtttttt

SEQ ID NO: 869948 - DNA, 120 bp, Artificial Sequence
  ENSG00000288049_19 (sequence is synthesized)
acttttcagatttcaaacatttaggttcaagggatgcagatgcaggtttgttacatggataaactgcaagttgtgtagatttggtgcacagattatcttgttacccaaataatgagcaca

SEQ ID NO: 869949 - DNA, 120 bp, Artificial Sequence
  ENSG00000288049_20 (sequence is synthesized)
gtatgctgtaagcagttttctttgctcagcctcttctggccctccaccctgaagtagatcctgtgtccattattgtcttatttccatgtgtactcagttttaagcttatacatgtaagtg

SEQ ID NO: 869950 - DNA, 120 bp, Artificial Sequence
  ENSG00000288049_21 (sequence is synthesized)
tttccatgtgtactcagttttaagcttatacatgtaagtgagaacatgctatttggttctctcttcctgtgttaatttgcttaggataatgccttccagctgcatccatgttgctgcaaa

SEQ ID NO: 869951 - DNA, 120 bp, Artificial Sequence
  ENSG00000288049_22 (sequence is synthesized)
attgtgcatatatttatttttatgtatgtactttttaaattcagcttactgttaatggacacctgggttaatttcatgtctttgctagtacaaatagtgcagtaatgaacatatgtgtat

SEQ ID NO: 869952 - DNA, 120 bp, Artificial Sequence
  ENSG00000288049_23 (sequence is synthesized)
aacaaatttccacaatgcctaaagtaatttacataatcagtagcggtgtataaatgttcctttttctccacaaccttgccagtatctgttatttcttggtattttagtaatagccattct

SEQ ID NO: 869953 - DNA, 120 bp, Artificial Sequence
  ENSG00000288049_24 (sequence is synthesized)
gacttgtgtgagattacctctcgttgtgttttgatttgtaattctctaataactaatgatgttgaacatttttatatgctggttggctgcatgtatgtattatttatagaagtgtctgta

SEQ ID NO: 869954 - DNA, 80 bp, Artificial Sequence
  ENSG00000288049_25 (sequence is synthesized)
ggttggctgcatgtatgtattatttatagaagtgtctgtatatgtcctttgcccatttttaatgggattgttttctgtga

SEQ ID NO: 869955 - DNA, 68 bp, Artificial Sequence
  ENSG00000288049_26 (sequence is synthesized)
tgcctggctattttttttttatacttttagtagagacgggatttctccgtgttggtcaggctggtctc

SEQ ID NO: 869956 - DNA, 90 bp, Artificial Sequence
  ENSG00000288049_27 (sequence is synthesized)
catataccaccatgcctggctattttttttttatacttttagtagagacgggaattctgacctccggtgatccgctcgccttggcctccc

SEQ ID NO: 869957 - DNA, 120 bp, Artificial Sequence
  ENSG00000288049_28 (sequence is synthesized)
atttaatttctttatagatgctggatattaaacctttgtcagatgcattgtttgcaaatatgctgtcaccttgggtgggttgtctgtttactctgtttacagtttcttttgctatacaga

SEQ ID NO: 869958 - DNA, 120 bp, Artificial Sequence
  ENSG00000288049_29 (sequence is synthesized)
agcttttcagttaaattaggtctgacttatcaatttttgtgtttgttgcaatttttttttggaatctttgtcataaagtattttccagggcctatgtacagaatgatactctctaggttt

SEQ ID NO: 869959 - DNA, 120 bp, Artificial Sequence
  ENSG00000288049_30 (sequence is synthesized)
tctactagggtttttaaatttttaggcttatagtgaaatcttcaatatatgtttagattatttttgtatatgataaaagcaaggggttcaattcaattttctgcatataagtagccagtt

SEQ ID NO: 869960 - DNA, 120 bp, Artificial Sequence
  ENSG00000288049_31 (sequence is synthesized)
atataagtagccagttatcctagcactatttattgagtatagaggtttttccttattgcttgttcttgttgactttgtcaaggatcacatctgagctggagccatggcagaggaacataa

SEQ ID NO: 869961 - DNA, 120 bp, Artificial Sequence
  ENSG00000288049_32 (sequence is synthesized)
tcatggccatttatcatttccgaaataatacttttataatttattatgcctctctttaatctcttaatcctgttacctttgtgagctgaggctgtacgtcacctcaggaccactgtgata

SEQ ID NO: 869962 - DNA, 120 bp, Artificial Sequence
  ENSG00000288049_33 (sequence is synthesized)
aactgtacaaattgattgtaaaacgtgtttgaacaatatgaaatcagtgacccttaaaaagaacagaataacaatttttagggaacaagggaagacaaccttaagatctgactgcttgtg

SEQ ID NO: 869963 - DNA, 82 bp, Artificial Sequence
  ENSG00000288049_34 (sequence is synthesized)
tgggcaaaaagagtacaagtaggagagatatcactaaatccttttccttgcagagaatattaatattaataccctgggaaag

SEQ ID NO: 869964 - DNA, 120 bp, Artificial Sequence
  ENSG00000288049_35 (sequence is synthesized)
aaaggaatgcattcctggggggaggcctataaacgactgctctgggaatgtctgtcctatgcggttgagataaggatggagataccccctggtatcctgcagtacccccgggcttactag

SEQ ID NO: 869965 - DNA, 120 bp, Artificial Sequence
  ENSG00000288049_36 (sequence is synthesized)
agtacccccgggcttactagggtgggggaaaaaactctgccctggtaaatttgtagtcagacagtttctctgctctggaaccctgttttccgttgtttaagatgtttatcaagacaatat

SEQ ID NO: 869966 - DNA, 120 bp, Artificial Sequence
  ENSG00000288049_37 (sequence is synthesized)
caccctctccccttttgaaagccttaataaaaatttgctggttttgaggctaaggcaggcatcacgggcctatgtgtgtgcatagagttttttgtaatattctttgatggttgttagtat

SEQ ID NO: 869967 - DNA, 120 bp, Artificial Sequence
  ENSG00000288049_38 (sequence is synthesized)
ttctgtggtgttagtggtaacatgcattttgttgtttttgtctttatttggatcttctcttttttctttattagtcaactggtagtttatcttattaatttctcaaaagaaaacaactcc

SEQ ID NO: 869968 - DNA, 120 bp, Artificial Sequence
  ENSG00000288049_39 (sequence is synthesized)
tgaattcatcgattactgattttggttattttttgtcttctttacgtttagtgttggtttcctcttgtttctgtagtttcattagttgtgatgttaggttgtgaaatagagatcattcta

SEQ ID NO: 869969 - DNA, 120 bp, Artificial Sequence
  ENSG00000288049_40 (sequence is synthesized)
actttttgatgtggatttagtgctatgaatttcccccttaacactgccctgccatatctcataattggtattatgttgtatatgttcttaaaataactttttaatttctgccttaatata

SEQ ID NO: 869970 - DNA, 120 bp, Artificial Sequence
  ENSG00000288049_41 (sequence is synthesized)
attacctacctgtcattcagaaacttgttgtttaattttcatgtaattgcatgattttgaatgagtttttttgtattcttctattaattgaactgtggccttggtgtatgttggatatga

SEQ ID NO: 869971 - DNA, 120 bp, Artificial Sequence
  ENSG00000288049_42 (sequence is synthesized)
ttttggttcttttgtatttgctgattgttttatatccaaatatgtggttgactctagagtagatggtgatgagaaaaatgtgtattctgttgcttcagattgaagagtttttggggaagt

SEQ ID NO: 869972 - DNA, 120 bp, Artificial Sequence
  ENSG00000288049_43 (sequence is synthesized)
caatcagatccttgtggctccatgttgcgttcaggtcctgaataactttgttaattttttatcttgatgatctctctaattttgtcaggggaatgttgatgtctcctactgttgttgtgt

SEQ ID NO: 869973 - DNA, 120 bp, Artificial Sequence
  ENSG00000288049_44 (sequence is synthesized)
gggagtctacatctctatagtgatttctaataacttgctttaagaatttaggtgctcctggctcagagcagtggctgatgcctgtaatccctacactttgggaggccaaggtgggtggat

SEQ ID NO: 869974 - DNA, 120 bp, Artificial Sequence
  ENSG00000288049_45 (sequence is synthesized)
gatttttccggcgctatttccaaacctgtgagaccttccgcacctgagataaacgctgaggacgcaagagcgattttaccagaggaaaacagtcacagagccgtcgctggactcatatta

SEQ ID NO: 869975 - DNA, 120 bp, Artificial Sequence
  ENSG00000288049_46 (sequence is synthesized)
ttctgcagaacttatcaggttggactctgtgaagcctgcaggccagaattgctaaggtgacaaaaaagcaaaaaaaaagtcaacttctcctctctctaggaagtctgtcccaggaagttt

SEQ ID NO: 869976 - DNA, 120 bp, Artificial Sequence
  ENSG00000237224_0 (sequence is synthesized)
ccctggagggtcacccaaggaaagagttcgttccaaagacaggtgctcctctgagttcctctggaatctggcaaggtgccgagcttggacgcaaggcttccatgaggctgtgaaggaggt

SEQ ID NO: 869977 - DNA, 120 bp, Artificial Sequence
  ENSG00000237224_1 (sequence is synthesized)
tgcacggaaactggtggggatctgaaaagcttttagtggcctcgccacacacagcacttcagatgctcaggtgatgagcaacattttccaaacccagctagtgagcaccccacctcctct

SEQ ID NO: 869978 - DNA, 120 bp, Artificial Sequence
  ENSG00000237224_2 (sequence is synthesized)
ggcttccagaacctggtgtggagggccaggagaggcttcgggactgaagggcagagcagcagactccggggctcatgtaggaaggaacatgccttcagccaaagattatccacgctgcat

SEQ ID NO: 869979 - DNA, 120 bp, Artificial Sequence
  ENSG00000237224_3 (sequence is synthesized)
gagtgtcttgtgtttgatggatttgtcctgcatttaattataacttcctgctaaagctcagatgttttctttcagggacaaatgcagtggcttaatttcattcaatcatttactgaggat

SEQ ID NO: 869980 - DNA, 120 bp, Artificial Sequence
  ENSG00000237224_4 (sequence is synthesized)
ctgaaatgcatgcggttagtggtgagaatactgactcagggctgtcccttcctctggagttgacagccgactgcgcaggaagggaaggtgagggtcaaacacacaggtcaacatcagaaa

SEQ ID NO: 869981 - DNA, 120 bp, Artificial Sequence
  ENSG00000237224_5 (sequence is synthesized)
cagcacttccgccttccattggccccgatgtttcatggaggccccgaggaggctgcgaaggaacatggcagtgactgctccgtggctctgcgtggtggccagcaactgtttgggcactat

SEQ ID NO: 869982 - DNA, 120 bp, Artificial Sequence
  ENSG00000237224_6 (sequence is synthesized)
gaccatgtacgtttgacaaagcgcatgcaattatttgaatattctatagttcttttaggaaactgagtagaaacggaaaattaaaagtgctgatgttagtaataggaaacatggatctca

SEQ ID NO: 869983 - DNA, 120 bp, Artificial Sequence
  ENSG00000237224_7 (sequence is synthesized)
gattccactggcagtagagaatcactaaatgtccatttctgaatgaattctactccccagagacattaacacacgatgtacttggcttgaatcctgtttgatttaagaaaatcggccaag

SEQ ID NO: 869984 - DNA, 120 bp, Artificial Sequence
  ENSG00000237224_8 (sequence is synthesized)
agtccttcataagttactcacatctgaggcaccatcgggctgaccgtgggacactccagatggggagtgctgtgtaccctctgcctctcctgtgacccgaacacctcctctctctctcca

SEQ ID NO: 869985 - DNA, 120 bp, Artificial Sequence
  ENSG00000237224_9 (sequence is synthesized)
tgccgtctgtgggaagctgccctaacccattcgccttccccggcttggaaaaacaatgtcccagtgatgaactgccttgcagatttattttgatttaaatcgccttcccttcaacccaaa

SEQ ID NO: 869986 - DNA, 120 bp, Artificial Sequence
  ENSG00000237224_10 (sequence is synthesized)
ccagggcacagaaaggtggttagaatgttccagcacaaactcatatgagcacagcagctattccagggaaaagcgtcctccctacctgcaagaagcttcctttcaagacactgatattat

SEQ ID NO: 869987 - DNA, 120 bp, Artificial Sequence
  ENSG00000237224_11 (sequence is synthesized)
caagaacgtgaaggaagagtggcagcggcccacctgaggcacagcagagctgggggtgatgagagaaatttaagggaaatggcccctgttggacacgggcttcctttgactgtgtgggaa

SEQ ID NO: 869988 - DNA, 120 bp, Artificial Sequence
  ENSG00000237224_12 (sequence is synthesized)
tcccacctggccacagacaaagggtagaggaagcaagtgccccaggagtcttgatctcagcccagctcagcatgaggaaagcagcaagcaggaagagtgagtgttcctggtaccacggct

SEQ ID NO: 869989 - DNA, 120 bp, Artificial Sequence
  ENSG00000237224_13 (sequence is synthesized)
ccaggagccctatgccttgatttcaccccccaaacccttcaactggtacctcagaagagcagaggtgaaagacagggagcctcccgctgagaagagcttctgggaactcaaaggcgccat

SEQ ID NO: 869990 - DNA, 120 bp, Artificial Sequence
  ENSG00000237224_14 (sequence is synthesized)
ctcccgctgagaagagcttctgggaactcaaaggcgccattcaactaagatggaatctcactctgtcgcccacgctgcagtgcagcggcatgatgtcggctcactgcaacctccacctct

SEQ ID NO: 869991 - DNA, 120 bp, Artificial Sequence
  ENSG00000237224_15 (sequence is synthesized)
ggagactcttgctaaatatcactggggtaagactgaagaaaagaaataaactatgctacctgctcttaataaagatcattttattttaaacaggaggctgaataaaaccttttgactctg

SEQ ID NO: 869992 - DNA, 120 bp, Artificial Sequence
  ENSG00000237222_0 (sequence is synthesized)
aagtgagtcctgttcagcgtgggaggaaataacacaagaggcaaagatcactcgggaccaccttgtatattggctaccacagaacccaacacaagcagattgccttggaaagaaatcaaa

SEQ ID NO: 869993 - DNA, 120 bp, Artificial Sequence
  ENSG00000237222_1 (sequence is synthesized)
ctcagaaacagacaagccaagcccaccgtattcttggagacaccttcaggttgtgagtgaggaatggatgccattgttagtggcttccgttgtgctcagtggaaacacgcatctacaggt

SEQ ID NO: 869994 - DNA, 120 bp, Artificial Sequence
  ENSG00000237222_2 (sequence is synthesized)
agaatgtagaggaacagcccaattcagctgtcttgtggatttcaggctgtggtctctctgcctctctctggaacacaggaggaactttgctactgccttgaccaacagaatatgggggaa

SEQ ID NO: 869995 - DNA, 120 bp, Artificial Sequence
  ENSG00000237222_3 (sequence is synthesized)
ctgcctcagcctcctgaatagctggggctacagcagggtgactaacagaccatcagagtggcaggaaattggagaatcgctacgacagtcacccagcctggctggcagcattgaaagaac

SEQ ID NO: 869996 - DNA, 120 bp, Artificial Sequence
  ENSG00000237222_4 (sequence is synthesized)
gaaagaacaaacaagtacatcttccataaagaccgcgccctgagctcaccattcctctttctgagagagctgaggcagttcttccttcaggggagcaaccattgttctaggctcaaagca

SEQ ID NO: 869997 - DNA, 120 bp, Artificial Sequence
  ENSG00000237222_5 (sequence is synthesized)
agtctgagagagacgcacacgtgtgggattctaggaccttgaccctccaccgcaaacagaggcactcacctctgcattctgggaaacggcagtctgtgtgtcagccagataaacacttaa

SEQ ID NO: 869998 - DNA, 120 bp, Artificial Sequence
  ENSG00000237222_6 (sequence is synthesized)
gttcaggggcatctgacaaacagctgtccccaccgaccttgttttgttggtcccattttcacaactgttgatgtggcttcctgagttcctgaccacttgaataaacaaccaagagcagca

SEQ ID NO: 869999 - DNA, 120 bp, Artificial Sequence
  ENSG00000237222_7 (sequence is synthesized)
aagtgagtcctgttcagcgtgggaggaaataacacaagaggcaaagatcactcgggaccaccttgtatattggctaccacagaacccaacacaagcaccgttctttcccaagttacctct

SEQ ID NO: 870000 - DNA, 120 bp, Artificial Sequence
  ENSG00000237222_8 (sequence is synthesized)
ctcagattcctgcagaaaagcctgagtgccagcctccagctctggataagattctccaagagtggttctcaatcttgcagaaactcagaatctcctaggagctcaaaacaacaccaccaa

SEQ ID NO: 870001 - DNA, 120 bp, Artificial Sequence
  ENSG00000237222_9 (sequence is synthesized)
tcttctccaagccgcagactcaggaaatgtgattcattcaatctgcctggggtggtctaggcatagtactttctttaccttctatcgcattaggtgcagagtcaatgtgacttgagggcg

SEQ ID NO: 870002 - DNA, 120 bp, Artificial Sequence
  ENSG00000237222_10 (sequence is synthesized)
agaatgagttcacatctcctggctgctcctctagctcccctaatggtacacagccaatggtcacaggcctcatttcacagaaggaagcacagatgggctgtgacattccaaggaaacagc

SEQ ID NO: 870003 - DNA, 120 bp, Artificial Sequence
  ENSG00000237222_11 (sequence is synthesized)
ttaaatgacgggaagaaatggaaatgggaatagttaatttcccaacccagacctctaggtcagcccagggaccccagggactggggaagttttaaaaaatgcctcttcttgttcctcaaa

SEQ ID NO: 870004 - DNA, 120 bp, Artificial Sequence
  ENSG00000237222_12 (sequence is synthesized)
aggggaagcgcggccgccccgggttagacacgcgtctgtttgcttgcagatgtgcacacactgtctccggcttcttctgtggcttggtagaagccccagctttttaacttattaagcaca

SEQ ID NO: 870005 - DNA, 120 bp, Artificial Sequence
  ENSG00000237222_13 (sequence is synthesized)
gctcttccctctgtaggactgcaggcaggacagtcctcttcccgggctcaccgcaacattcagtagctgctttgaaggaacagaataaggttgccacatgccagtctgtcctccgatcac

SEQ ID NO: 870006 - DNA, 120 bp, Artificial Sequence
  ENSG00000237222_14 (sequence is synthesized)
ttcagggttccactcaccgtgggttcaaggcttctttgattctttgtttcctttagttttcattctctcctcttcagaacaagagtagatggttcggtgtatgcaaatatcacagttcca

SEQ ID NO: 870007 - DNA, 120 bp, Artificial Sequence
  ENSG00000237222_15 (sequence is synthesized)
gccctacactgtctcccagatgcagtctgacctgagccatgaagaagtgcagagtccccaagaggccagagagctcacgtctggttagagtcggggtgtttgatgggaagatgaaaggag

SEQ ID NO: 870008 - DNA, 120 bp, Artificial Sequence
  ENSG00000237222_16 (sequence is synthesized)
gagctggcatctgaggaaatcaacattcaaggggagacccaatgaagaagatagtgccagaacttaatggaggcagcccaagaggaacgtgtacctggggaagtcaagagctatttcttg

SEQ ID NO: 870009 - DNA, 120 bp, Artificial Sequence
  ENSG00000237222_17 (sequence is synthesized)
gacatttgtgcctctattccaaactcttctctcagagtagatgacaactcaggaaggagccagagatcttcctcagttgacttgttcagaaatatgatttgggattcagtctggcccgaa

SEQ ID NO: 870010 - DNA, 120 bp, Artificial Sequence
  ENSG00000237222_18 (sequence is synthesized)
ggaaataacacaagaggcaaagatcactcgggaccaccttgtatattggctaccacagaacccaacacaagcagtaagttaaaatcatgaagctcctgacgtcagaggacatggctctgc

SEQ ID NO: 870011 - DNA, 120 bp, Artificial Sequence
  ENSG00000237222_19 (sequence is synthesized)
catttgttaggtagggatcctgttaaaggctcagcttcctcatctggaaatggaaatataggccttgcctggtttgctgtaatgggtcgtgatgaggaccaaactacaaagagtggtaca

SEQ ID NO: 870012 - DNA, 120 bp, Artificial Sequence
  ENSG00000237222_20 (sequence is synthesized)
gatgttaattacaatgatttttcctatgccacccatggaaacaaaaatagcaagatagagaaggctaaatcccagttttttttgactgctattcagcaaagcctaggagactttcatgac

SEQ ID NO: 870013 - DNA, 120 bp, Artificial Sequence
  ENSG00000237222_21 (sequence is synthesized)
acctggagaggcggccgtagtgtatgtgtaagagtaccggttccagagtggggctccccgagctcagccccaccacttaccaacagcggaccttgggccagatgctgaagccctttgtgc

SEQ ID NO: 870014 - DNA, 120 bp, Artificial Sequence
  ENSG00000237222_22 (sequence is synthesized)
cttggtttcctgacctattactgtggaaatgatgacagtaccctcctcatggcatcgtgagaattaaattagctaattcaggtgaagcatttagaagaggacctcctgacacttaataac

SEQ ID NO: 870015 - DNA, 120 bp, Artificial Sequence
  ENSG00000237222_23 (sequence is synthesized)
accttctatcgcattagcactgcaatgaatgctgctgcacacgctgttgagctcgtggacactttcctgctgggtgaggacccgaacgtgaaattgctgggtcatggattcaagtgctac

SEQ ID NO: 870016 - DNA, 120 bp, Artificial Sequence
  ENSG00000237222_24 (sequence is synthesized)
acatatttttgaccacattactgtgactcaggaagcccaggaacagaattctaggcaccagaaccatacatgttacagcctctgagctttatggcctctgagccatttgtccagccacat

SEQ ID NO: 870017 - DNA, 120 bp, Artificial Sequence
  ENSG00000237222_25 (sequence is synthesized)
catttgcagatgagatcctgagactcaggctggaaaagtgaccggggaaaagtcacacaagtcagaggcagagctggagtttcctcatttccaggcccgtatagatcaagacggacgttg

SEQ ID NO: 870018 - DNA, 120 bp, Artificial Sequence
  ENSG00000237222_26 (sequence is synthesized)
gtcaaacacctcctagtactcacatgaagaagctctcctttctgctgtaggaatgatcacacaccattccaatctggataccaaatgtcattgtttattaaatgtgtgcagtgtgccagg

SEQ ID NO: 870019 - DNA, 120 bp, Artificial Sequence
  ENSG00000237222_27 (sequence is synthesized)
atagcttctgctacagagtggccatgaagtctggacatgtagatattatattatcatgcatcataagaaactcagaatctcctaggagctcaaaacaacaccaccaacaacaacaacacc

SEQ ID NO: 870020 - DNA, 120 bp, Artificial Sequence
  ENSG00000237222_28 (sequence is synthesized)
aagtgagtcctgttcagcgtgggaggaaataacacaagaggcaaagatcactcgggaccaccttgtatattggctaccacagaacccaacacaagcagttgtgagtgaggaatggatgcc

SEQ ID NO: 870021 - DNA, 120 bp, Artificial Sequence
  ENSG00000237222_29 (sequence is synthesized)
cctgtgcacacagagagcaggcagcagaccagcgccctggacggctggtaccgacgccctccatctgtccgtctgtccccagggctgggtggacagggaaatctctttacagtgcagaca

SEQ ID NO: 870022 - DNA, 120 bp, Artificial Sequence
  ENSG00000237222_30 (sequence is synthesized)
gcggagcctggtgttgagaccaactgacctgatcttgaaaggactgcattctcctgccactgtctggcagattccagcttggggcctgttttctggagctagctgtcacatgaaccccag

SEQ ID NO: 870023 - DNA, 120 bp, Artificial Sequence
  ENSG00000237222_31 (sequence is synthesized)
ggtgggaggatggattacaaaatccaacaggcaactatcaggtagtacagctcccagaagtctggtaatccctcgtcgacatgtcctataatggaagtaaagaatgcgagaaaccaaaaa

SEQ ID NO: 870024 - DNA, 120 bp, Artificial Sequence
  ENSG00000237222_32 (sequence is synthesized)
aatgtcacagtggttatacaagtgagtcctgttcagcgtgggaggaaataacacaagaggcaaagatcactcgggaccaccttgtatattggctaccacagaacccaacacaagcacact

SEQ ID NO: 870025 - DNA, 120 bp, Artificial Sequence
  ENSG00000237222_33 (sequence is synthesized)
ttgacaactctgcttctgaatagtacattatttattcagtgccagccacgagcccggcaggtgatgagctaaactaaacttgctggcacacacacgcagaactcaggaacagcagagtga

SEQ ID NO: 870026 - DNA, 120 bp, Artificial Sequence
  ENSG00000237222_34 (sequence is synthesized)
gcagcttcttgattctcagaatgcttgctctggaagaagccagctgccgtgtaagaaatcagatgtctctgagaccaccatgctgtgagaggccacgactgccacatgcagaggctacat

SEQ ID NO: 870027 - DNA, 120 bp, Artificial Sequence
  ENSG00000237222_35 (sequence is synthesized)
ggagagagagagagagaggagagggacagagagagagatgctcagccatccccgagccaaggcataaacacatgagtgaggaagccaggttggatgttcccaccccctccggtcctcaga

SEQ ID NO: 870028 - DNA, 120 bp, Artificial Sequence
  ENSG00000237222_36 (sequence is synthesized)
tgacaccagcctcagctgccatctgactgcaaccagaagaggcacccagaaagacctgcccagctgagcccagtcaatccttagaacaatgagaagtaataataaatttgtgttttaagt

SEQ ID NO: 870029 - DNA, 120 bp, Artificial Sequence
  ENSG00000237222_37 (sequence is synthesized)
catcataaggtagttgatctggtgtgagattccaacctcgtgtgagagaggagaagaccttcattacactaattcatgctggcccagcctccaggccaccccagatgtgaggtgctgtta

SEQ ID NO: 870030 - DNA, 83 bp, Artificial Sequence
  ENSG00000237222_38 (sequence is synthesized)
gagtagctgggaccacagatggaaagtcagtgtatcaccaagtgatccatctctgtgggaataaaaagtatctgttaattcca

SEQ ID NO: 870031 - DNA, 120 bp, Artificial Sequence
  ENSG00000237222_39 (sequence is synthesized)
agtgagtcctgttcagcgtgggaggaaataacacaagaggcaaagatcactcgggaccaccttgtatattggctaccacagaacccaacacaagcaatgcagtctgacctgagccatgaa

SEQ ID NO: 870032 - DNA, 120 bp, Artificial Sequence
  ENSG00000237222_40 (sequence is synthesized)
gaagtgcagagtccccaagaggccagagagctcacgtctggttagagtcggggtgtttgatgggaagatgaaaggaggagctggcatctgagctcttgtaaatgaagaaattaaaactgc

SEQ ID NO: 870033 - DNA, 120 bp, Artificial Sequence
  ENSG00000237222_41 (sequence is synthesized)
aagttgaaactgagtcactgatggcgccagatgtttctggagcaaaactgggaaagagggtgagcattggaaagacacctcctcctgttatcttcgagaagccatttactgggaaaacaa

SEQ ID NO: 870034 - DNA, 120 bp, Artificial Sequence
  ENSG00000237222_42 (sequence is synthesized)
aaactgagctccatgatgcataaattccaaaatgcagaggccaatttctttccctttgaccacatgtcggaaaggctcggggttcagtaactggaggaggcagtgtttaatcccaatttt

SEQ ID NO: 870035 - DNA, 120 bp, Artificial Sequence
  ENSG00000237222_43 (sequence is synthesized)
gtggctgagatggttgaccaatggcctctggggagaaggctatgggcacagacactggtccctggcttgttgggagggaacaaggatgtccatctgtcctccctcaacactgcctcctgg

SEQ ID NO: 870036 - DNA, 120 bp, Artificial Sequence
  ENSG00000237222_44 (sequence is synthesized)
gggacaaggaagatgcccagagtgagtgggcagggtgggcgatggactcataccctgccttggtgtctctgtggctcctggaagatccttgcaagcagcggtgagcactgtgacttgagc

SEQ ID NO: 870037 - DNA, 120 bp, Artificial Sequence
  ENSG00000237222_45 (sequence is synthesized)
cctgcggtggtggcttgccatgtggccagtcaaggtggacgatggactcatatgctgcctgggtgtctctgtgactcttgggagatccttgctggcagcggtgagcactgtgacttcagc

SEQ ID NO: 870038 - DNA, 120 bp, Artificial Sequence
  ENSG00000237222_46 (sequence is synthesized)
cctgcagtggtagctggtcacatggccagtcaaggctcagtcttcttagtaatcaaaggactgaaagtgtccagtagctttggatgatggttgaggactcgttaataaagaccactgccc

SEQ ID NO: 870039 - DNA, 120 bp, Artificial Sequence
  ENSG00000237222_47 (sequence is synthesized)
gcactggtccacggtgaccccaaggaggacatgatcccccttgtctgggagaacaagagtagatggttcggtgtatgcaaatatcacagttccaggtaacttgaaggagcagtttggatt

SEQ ID NO: 870040 - DNA, 120 bp, Artificial Sequence
  ENSG00000237222_48 (sequence is synthesized)
tctcccataacctttctctctatcctggcctggtctctcttccacaccagaactttcctctagatcaatggtccaggaccatcagaaccagtgaaccacactcctgaccattctccaaat

SEQ ID NO: 870041 - DNA, 120 bp, Artificial Sequence
  ENSG00000237222_49 (sequence is synthesized)
agtcatttggccaaatacgaggatcttggccagagcttcatttggaagccccagagacctggaccagacttgcaggtagacattcaccaatgcgtgatttgagggctgctcaaagggacc

SEQ ID NO: 870042 - DNA, 120 bp, Artificial Sequence
  ENSG00000237222_50 (sequence is synthesized)
cccagacaactcattctgtcttcaaaagccaccactgtctggcaccaacccacttttccaaactccacctcctgcgacttcagccacatggaacaagcatggactgatgttctctatacc

SEQ ID NO: 870043 - DNA, 120 bp, Artificial Sequence
  ENSG00000237222_51 (sequence is synthesized)
tttccaactccagctcttggcttctgctcttttctctgccaatgaggctgtgctgtctattactgagtaacaatattaccatatacttagcacctttaaacaatacacacttattatctc

SEQ ID NO: 870044 - DNA, 120 bp, Artificial Sequence
  ENSG00000237222_52 (sequence is synthesized)
ttccagcctcatctccactgtgcactttccatggcgttctgtcttggtccacttggcttgtgtagctgcctggcctgggttgtcctccccacccttgtctgcttggtggcacttggccct

SEQ ID NO: 870045 - DNA, 120 bp, Artificial Sequence
  ENSG00000237222_53 (sequence is synthesized)
gttctaattgcttctgctcgggcagcttctctcctccctcctctgtgctctgagcacactggacagattcctgttagagctgtcactgtcttcctgctgtctgcccactgaccttggagc

SEQ ID NO: 870046 - DNA, 120 bp, Artificial Sequence
  ENSG00000237222_54 (sequence is synthesized)
tccaggaggacaggagccttatcttaccccatgacatggcctatgcccagcctggtgccaacgtggtctggaggtatctgtaggctgaatgaaattcttccctctgggatgccctttaaa

SEQ ID NO: 870047 - DNA, 120 bp, Artificial Sequence
  ENSG00000237222_55 (sequence is synthesized)
tgatccatccgcttcggcctcccaaagtggtgggatcacaggtgcaagccaccgtgcccaggctgctatcttattttcaagaatttgactcacgtctttctgaagaacatctatcactta

SEQ ID NO: 870048 - DNA, 120 bp, Artificial Sequence
  ENSG00000237222_56 (sequence is synthesized)
caactcctgggggtccctagcctgccctccctgaccctccatcctcacccagatcctccgctgctccccgggagccctcggcttgcacagctttcacctgggctgggaaagtctctcttc

SEQ ID NO: 870049 - DNA, 120 bp, Artificial Sequence
  ENSG00000237222_57 (sequence is synthesized)
tgcacactcgctgccatgtttgccaagcaccagacctttaagtaccatgtaccatttttttttcatatctgcataccacatgtactgttatttgcttgttagttttctttagagtgactc

SEQ ID NO: 870050 - DNA, 120 bp, Artificial Sequence
  ENSG00000237222_58 (sequence is synthesized)
tctttatattaattgattttacaagtgaaacgaaatgatgaaaaccagaatcacttgctataaatagacgatgcctgagtaacggaatacaataaaaacaaaatactatcattttagctc

SEQ ID NO: 870051 - DNA, 120 bp, Artificial Sequence
  ENSG00000237222_59 (sequence is synthesized)
agggcctgggtctgaagagtaacacaagcaatagctctgcctaaaacctatcttggattttgtacaagaaagttgtgaagaagtaagagtgactggtgttaaatgatcatctcataggaa

SEQ ID NO: 870052 - DNA, 120 bp, Artificial Sequence
  ENSG00000237222_60 (sequence is synthesized)
ttactacagaatttgaccatcagcctgggctcctttttgtgcttcctgggaccatctaaattagtagttacaacgttaagttacaatgctaaattggaaaaataaaaggagttttcagtt

SEQ ID NO: 870053 - DNA, 120 bp, Artificial Sequence
  ENSG00000237222_61 (sequence is synthesized)
aactcatctgtcaatgggctccatggatagggaccagcaggggagttaatggccctggagacagaaggggcaggaggtcaggagtcagggcttcgggagcagccaaggggcattgggagg

SEQ ID NO: 870054 - DNA, 120 bp, Artificial Sequence
  ENSG00000237222_62 (sequence is synthesized)
tgactggaatggttggaatgtggccttggtttgccattgggtgttttgttcctccgagcattggctggactctctggtgatttctggtcttgaaggacttcctgttttaaatgtctgtgg

SEQ ID NO: 870055 - DNA, 120 bp, Artificial Sequence
  ENSG00000237222_63 (sequence is synthesized)
ggtacgtggcagctctttcttttctggaccccacttcacctctgagcagcttccttctcccaggagctgaagctcccccacgatgtctcaatgccaggcagatgcgcttgaccttctgcc

SEQ ID NO: 870056 - DNA, 120 bp, Artificial Sequence
  ENSG00000237222_64 (sequence is synthesized)
tcttggggccctcaccaagctaagggattttaaatcattcaactaatgtattacagtgggaaagacaccccactaaggggctccactaaatatcctttccagttgataagatcatttttt

SEQ ID NO: 870057 - DNA, 120 bp, Artificial Sequence
  ENSG00000237222_65 (sequence is synthesized)
tttaatccagctacaaactcttgagttttaaaccccatgagttatttaccatacgcttgtatcccctacagtgatttttaaagtgccatggctgtttctccactggctgtggagtgagct

SEQ ID NO: 870058 - DNA, 120 bp, Artificial Sequence
  ENSG00000237222_66 (sequence is synthesized)
gatgttactgcaggttgaggttgagccactttgcttcaccgacagttccaggagtccttttgggcactgactgtgggtccagtcctgagctgagtgcacagaggacgggggaggttgagg

SEQ ID NO: 870059 - DNA, 120 bp, Artificial Sequence
  ENSG00000237222_67 (sequence is synthesized)
gagtcaacacaactccgaggtgtccttgttctccaggggctctaggttctgacctgcacccagccacaagctgacttgagtcaaaaagtcacaaagtgtgacttggggtttcctatccca

SEQ ID NO: 870060 - DNA, 120 bp, Artificial Sequence
  ENSG00000237222_68 (sequence is synthesized)
gccaggactgtggtctcaatccaagcttcagctagagaaggatctgcttcccaacttcgcatatgttggtaagattcaggctcttgcaagtgatcggaccaaggcccccagtttgttgtt

SEQ ID NO: 870061 - DNA, 120 bp, Artificial Sequence
  ENSG00000237222_69 (sequence is synthesized)
ggctgttggctggaggctgccctcagtttctagctggttgtgggcagttgccttgagttccttgccacatgagcctcctcaacatgaatgcttgcttcttcaaagctggtgagagagagg

SEQ ID NO: 870062 - DNA, 120 bp, Artificial Sequence
  ENSG00000237222_70 (sequence is synthesized)
ctcttctaataagatggactgtacaagctcacattatgtaatcacagaagcaacagctgtcacctttgttatactttattgcttagcatcaagtcacaattcctgctgatactcaaaagg

SEQ ID NO: 870063 - DNA, 120 bp, Artificial Sequence
  ENSG00000237222_71 (sequence is synthesized)
tagggattacatcagggcgtgggcaccaagaggtggggatcatggggccactttagcctctgtctccacccatctccttctcccaacctccctgtccactctagaaacagcaacctagta

SEQ ID NO: 870064 - DNA, 120 bp, Artificial Sequence
  ENSG00000237222_72 (sequence is synthesized)
aaattcatgaaagcttcccttagtcacctcaaccacagggctttgcttacatcgttctttagtacttcattcatttattcaacaaaatacatattgagcatctgccgtatgcctggagct

SEQ ID NO: 870065 - DNA, 120 bp, Artificial Sequence
  ENSG00000237222_73 (sequence is synthesized)
agaggtagtatagtataatggttaaggcttcaagttctggaatcagagtctcttgttccaaatcctgggtctccacttcatgctgggtctcaataaactcatctctaaataacactagga

SEQ ID NO: 870066 - DNA, 120 bp, Artificial Sequence
  ENSG00000237222_74 (sequence is synthesized)
ggggtctctcatgaatttgcagtcaagatgtcagcttgggctgcagtcatctgcatggggctggaggatctgtttccaaggggccccactcacaaggctgacaaattagcactggttgca

SEQ ID NO: 870067 - DNA, 120 bp, Artificial Sequence
  ENSG00000237222_75 (sequence is synthesized)
ttggttgtgggcagaaggctttagttcttcacgggctgttggcaggtggctttggatcctcaccaggagggactctgtatggggctgcttgtgcatcctcacaacatggcagccaacttc

SEQ ID NO: 870068 - DNA, 120 bp, Artificial Sequence
  ENSG00000237222_76 (sequence is synthesized)
ctcctgagtgaatgatccaggagagatcaaggtagaaactgcaatgccttttatgacctcacctcagaagtcacacatcatcatttccacaatgtcacagtggttatacaagtgagtcct

SEQ ID NO: 870069 - DNA, 120 bp, Artificial Sequence
  ENSG00000237220_0 (sequence is synthesized)
tcctgagttaccagcctgcatcctcctccatcagattttggactcatcaagcctccacaatcatataaaggtgaccctagaagcatggccataaactacctcaagaatggacatcttcaa

SEQ ID NO: 870070 - DNA, 120 bp, Artificial Sequence
  ENSG00000237220_1 (sequence is synthesized)
ccaagtcaattagcagcaactgtccaaatatctggttcatatgctgtctgtagcctccttgacccaaactaccaactctgaaacatgaaagagtagaggaagaagaagaggaagactggg

SEQ ID NO: 870071 - DNA, 120 bp, Artificial Sequence
  ENSG00000237220_2 (sequence is synthesized)
ttggaacaatttggttagtttccttccacccaaatgtctagacacccgaaggggtgtgcagcccgacctctcgctattcctgttaaaggcttctcttcatggaaaatgtcattggttata

SEQ ID NO: 870072 - DNA, 120 bp, Artificial Sequence
  ENSG00000237220_3 (sequence is synthesized)
tggtttgtttgtattatctttgaacttaatgtatactattctacctttgtcaacattcattcccattttctgtaagctttaaactatcccagatgctgagtaaatgtgcatttgctggaa

SEQ ID NO: 870073 - DNA, 120 bp, Artificial Sequence
  ENSG00000257879_0 (sequence is synthesized)
atactaaatagagtgttttaatacatacttgacaggattaagtttatatattttgacactaaaaccacagtaatttttttataaccatggaaacattttttaatggctcatttgagagat

SEQ ID NO: 870074 - DNA, 120 bp, Artificial Sequence
  ENSG00000257879_1 (sequence is synthesized)
tggaaagaaaaccttaccaattcaccctaacttcatcagtggttacatttcaggttatgagtcactctaatctctttatgtacaccccaaaattttacagttaatattacttctacttac

SEQ ID NO: 870075 - DNA, 120 bp, Artificial Sequence
  ENSG00000257879_2 (sequence is synthesized)
agataaattaagctcagacatttaaaaattgaacaaaaatgcaaaaagaagagtaaggcagatggaaactatacagactgtaacgtttggtgattaggaaatcacttatgagttactgag

SEQ ID NO: 870076 - DNA, 120 bp, Artificial Sequence
  ENSG00000257879_3 (sequence is synthesized)
agagaatgttgagaaaggtgccagatcacatggtactataaaatagagaaaaagaagcagaaactcacagctcttcctgcaaaatatttggtgactgaagaaaggtgatagaggaaagta

SEQ ID NO: 870077 - DNA, 120 bp, Artificial Sequence
  ENSG00000257879_4 (sequence is synthesized)
acatgaatttactattatagacaaaggaaaagggtcagtacagaaggataactagcctgtggatgaagagaggatagttgctcaaagtctaagagaatgtagacaatgacaaatcatggt

SEQ ID NO: 870078 - DNA, 120 bp, Artificial Sequence
  ENSG00000257879_5 (sequence is synthesized)
ttcagacgtggattgtaacgttaaccagagagagatgcttcttcaaaacaaaaggaaataaagagtgtgcttatacatatatggaaaaaaatgtggacatgaagaaggaaaaaaaatgag

SEQ ID NO: 870079 - DNA, 120 bp, Artificial Sequence
  ENSG00000257879_6 (sequence is synthesized)
cagtgatctgatccatcaggacattcaaattttctgagtcagtgacttcgagtggcagaaaatttaagagatgcagtatcttcggagagtaatgacatataatccacacattcatggaag

SEQ ID NO: 870080 - DNA, 120 bp, Artificial Sequence
  ENSG00000257879_7 (sequence is synthesized)
aatggagacctgaagtctttgaaagggagtaagcagagaggaaaatagatgtgaacagatgatctaccttattttggaattaagaaacacttgaagattattctcagaaatgccataagg

SEQ ID NO: 870081 - DNA, 120 bp, Artificial Sequence
  ENSG00000257878_0 (sequence is synthesized)
tcacaactaaaggtcgtcatctgggcaaatgaaccactctgacttggagattaggggctcagacagccgtggatgagagtccagctctactacttattagccttgattagactgtgagag

SEQ ID NO: 870082 - DNA, 120 bp, Artificial Sequence
  ENSG00000257878_1 (sequence is synthesized)
ggatgggaaagactggtgcttggggtggccatctgacccctgatggacaggagaccaggacaagcccactggatgagccggaggggtccaggaggagggagttgagagctcctgctaggg

SEQ ID NO: 870083 - DNA, 120 bp, Artificial Sequence
  ENSG00000257878_2 (sequence is synthesized)
ttgacacattctggtaaggagttcatctgctgtccaccaggggagacaataaaaaggtcaacacagctcccacctcgaagcagctgccagtttattacatgaagtgtcaggctgtggact

SEQ ID NO: 870084 - DNA, 120 bp, Artificial Sequence
  ENSG00000257878_3 (sequence is synthesized)
aagaacagaattcccgggcacacgaatgattccagggttcctccagcactttggtattacttgaaagcaatcttaagggatctagaatgaaccaacgcccaaaaaggatcccttagcagc

SEQ ID NO: 870085 - DNA, 120 bp, Artificial Sequence
  ENSG00000257878_4 (sequence is synthesized)
ggtgatatcaaagaaacacttttgaagaactaattttccacccagatttccccaattttaaaagcaatgggcaaagccttctccactcctaaacttcctggaactgtcttttggctatat

SEQ ID NO: 870086 - DNA, 120 bp, Artificial Sequence
  ENSG00000257878_5 (sequence is synthesized)
caggcccctgaagttagagtctttgaaagactccaaactccaaattctatgcttttattctcaggctcctcataattctacagcacaccagactgctgaccactctccgtaccactttta

SEQ ID NO: 870087 - DNA, 120 bp, Artificial Sequence
  ENSG00000257878_6 (sequence is synthesized)
aattatttcttcccacagctttcttaacaatgaacctttgaaatctttttagttttccatttattttgctacctttcctctgtcctagctctaaaatgaagatcctctaaggttctacag

SEQ ID NO: 870088 - DNA, 120 bp, Artificial Sequence
  ENSG00000257870_0 (sequence is synthesized)
acaaataaataactatacatgagtgtggacaggcgaagactccaccagcacccttaataatagggagcaacatctccccgcaaattaccacaggaggttcctagaggatagtgcagtggt

SEQ ID NO: 870089 - DNA, 120 bp, Artificial Sequence
  ENSG00000257870_1 (sequence is synthesized)
ttaagcctggccacagctggtacccacaggaaatattcagagcctcaatttagctattaaagacattaaatctcttttagcctgggggaaaacaactctcacccttaaagctggatttgg

SEQ ID NO: 870090 - DNA, 85 bp, Artificial Sequence
  ENSG00000257870_2 (sequence is synthesized)
gttaactaggatgaaccagggagcgttatggtcctaaagtcaaggaatgggctttcagatggaaaggacttgccttgtcttcaaa

SEQ ID NO: 870091 - DNA, 76 bp, Artificial Sequence
  ENSG00000257870_3 (sequence is synthesized)
ggaaaggcatgattggttttgaaatgtgaagacatgaaattttggaggggccggggtagaacccacgtgttgtggg

SEQ ID NO: 870092 - DNA, 120 bp, Artificial Sequence
  ENSG00000248571_0 (sequence is synthesized)
ctgagttaaataataactgagtggactttattttaatttgccattgttcgtgaagacagtcattagttttaaatgtgattagacaaccctccacagaagcctttgggaacaaaattaaat

SEQ ID NO: 870093 - DNA, 90 bp, Artificial Sequence
  ENSG00000248571_1 (sequence is synthesized)
agacaaccctccacagaagcctttgggaacaaaattaaattttgtagagacagggagtctcactttgttacccaggctggtctcaaatta

SEQ ID NO: 870094 - DNA, 120 bp, Artificial Sequence
  ENSG00000248571_2 (sequence is synthesized)
taccagaatttgcattttggagtatgcaccattaaacagtttaactcttcagttgatctctttttaaaaatcaattgttcagcatctgtggaatctgattgtgatgtggtcagggacaga

SEQ ID NO: 870095 - DNA, 120 bp, Artificial Sequence
  ENSG00000248571_3 (sequence is synthesized)
atgggactaaaatgagaataaccatgccagactcttcaggacacaacctggctatgggaggctgattgtgtttgcatggagacactaactccaagtggatggatgacaccactgggacac

SEQ ID NO: 870096 - DNA, 120 bp, Artificial Sequence
  ENSG00000248571_4 (sequence is synthesized)
tgttgctcatggaccacagacagtggcgctgggacaccaatgctcagactatagatggtggtgatgggacaccattgctcatggactgcagacagtgctacgaggacaccgatgctcatg

SEQ ID NO: 870097 - DNA, 120 bp, Artificial Sequence
  ENSG00000248571_5 (sequence is synthesized)
gactacagatgctgctctgaagtgctctgcactttacttttctctagttcatttccaaacgggccaatttcaaaattataattgaaaagagtaacttgaaaacagatactcccagccatg

SEQ ID NO: 870098 - DNA, 120 bp, Artificial Sequence
  ENSG00000248571_6 (sequence is synthesized)
cccttgcctcaagacatctgccgtctccctggcctctgaggcagggtgggaagacaccgccaccccattccataggtgaagagctctttcatggggtacatgcgcatcccactccttgct

SEQ ID NO: 870099 - DNA, 120 bp, Artificial Sequence
  ENSG00000248571_7 (sequence is synthesized)
cggctcagcacaagctcagcattgccagagagaaaaactggaagacagagacaaacaaaacaacaactggtaggtgggtgcttgtgataagttaaagataggaaaccagggaacgctgtg

SEQ ID NO: 870100 - DNA, 120 bp, Artificial Sequence
  ENSG00000248571_8 (sequence is synthesized)
ggctgccaccccaggggcttggtcgccaccaagagtgaaggaggaacaacagggagaggatatgcaccagagtccccatcgccagcctaagcaggagcacaggagcaacagcgtttgatg

SEQ ID NO: 870101 - DNA, 120 bp, Artificial Sequence
  ENSG00000248571_9 (sequence is synthesized)
gatccctaaagcaactgggcttctggtcctatttcaccttcaaagagaatcaatcctacccttccatcctgaacagtcttctaggctcaagcactctgaattttcctatcgtggctggag

SEQ ID NO: 870102 - DNA, 120 bp, Artificial Sequence
  ENSG00000248571_10 (sequence is synthesized)
ctatcgatttggtgctagtctcactctctttgtcaacctctcttgtgcatttattaatacaaacttattattttttcctaacttagtttttaacgtgattacattcacagattttttaaa

SEQ ID NO: 870103 - DNA, 120 bp, Artificial Sequence
  ENSG00000248571_11 (sequence is synthesized)
agttgatctgctcttgaattcctggttttattctatgtaattatcagtattttttttcagaaatggtctctttttatttgaatggttgatctaggactcagcctaaatattattctaata

SEQ ID NO: 870104 - DNA, 120 bp, Artificial Sequence
  ENSG00000248571_12 (sequence is synthesized)
cgtagctgtacataaccaacatgtctatgatgttagtgatgaaccagaaccaacacagagatggtctttgcctgataaaagataatcacaatccgaaataaaattactaggtaaaataca

SEQ ID NO: 870105 - DNA, 120 bp, Artificial Sequence
  ENSG00000248571_13 (sequence is synthesized)
ggatgcctagttaaatttgagtatcagataaacaatgaaacatttttagttacatgtcccatgtaatatttgtactaaatacttatactaaattgtaaaggacatacttatactaaattg

SEQ ID NO: 870106 - DNA, 120 bp, Artificial Sequence
  ENSG00000248571_14 (sequence is synthesized)
taaaggacatccttatactaaaggaaagcattgcttatctgaaattcacatttaactggttgtcctatatttttatttgttaaatgtggcaatcttaatcataaacaaataagcaaacaa

SEQ ID NO: 870107 - DNA, 120 bp, Artificial Sequence
  ENSG00000248571_15 (sequence is synthesized)
gtataagtcttagaaaagaataaatcaatttttaaatgaatgcatttagtgttgtcagggaataattacaatatgtcagcaaaccttggcaaccattggaatcccgtttctgaaaattac

SEQ ID NO: 870108 - DNA, 120 bp, Artificial Sequence
  ENSG00000248571_16 (sequence is synthesized)
agtgtagtgtgaagtagaaaataacaacgatggttttaactcatatgaaacatagaaaaaattcagaaacaaactagatttattggttttaaggaaaagaagccagaacaactaccagaa

SEQ ID NO: 870109 - DNA, 120 bp, Artificial Sequence
  ENSG00000248571_17 (sequence is synthesized)
tactgttctgttaggtaactcttcttttaaccaccttctttaattactcaggaaatatttctgtgttttcctcaacaactggagtagattttcccatgagttttatgttacacaaagttt

SEQ ID NO: 870110 - DNA, 120 bp, Artificial Sequence
  ENSG00000248571_18 (sequence is synthesized)
agttatttttaaagttatcaaatcagctcttactggcttgaagttaagtatccatggaacttgtatttcctttgttttcctttcaaatgtctccccaaaatgcttgtaactgtgtatcct

SEQ ID NO: 870111 - DNA, 120 bp, Artificial Sequence
  ENSG00000236769_0 (sequence is synthesized)
ggagaatgacaaggaggggcaatgatgatccaaggaggtggcagatcctcaggaaacacaggtccacctgcaggtactggaaactgctaccattgcccagactagcagaatagatttcac

SEQ ID NO: 870112 - DNA, 120 bp, Artificial Sequence
  ENSG00000236769_1 (sequence is synthesized)
cttcgaaagcgaccctggcctggatcctgctgcttctgccacatctatttccagcttcctcttcctactggcctccttctgaagtcccaacatgatgtcctgccaagtcacacaggtgaa

SEQ ID NO: 870113 - DNA, 120 bp, Artificial Sequence
  ENSG00000236769_2 (sequence is synthesized)
aaagccacatcactctctgagatgaaacaccagccagacagggtgaagacaggagcgagctccaggtttacaagtgataggatccctgtggatttctagttcagactgaaaatccatgaa

SEQ ID NO: 870114 - DNA, 120 bp, Artificial Sequence
  ENSG00000236769_3 (sequence is synthesized)
atttagaataatatggggatagtttacagacatgtgaacttttactgtgtatgttttacttacaatgcaatacctaatacttccactgcgacatcagcaaacatccttagccctgtttgc

SEQ ID NO: 870115 - DNA, 120 bp, Artificial Sequence
  ENSG00000236769_4 (sequence is synthesized)
cactgcaccacagagcttttcatgcaaactaacattacagtatgatacaaagaaaactgtttcttcttaagatatttacaatgtgatcaggtttatttaaataaagtccattttatacta

SEQ ID NO: 870116 - DNA, 120 bp, Artificial Sequence
  ENSG00000236769_5 (sequence is synthesized)
gatgatccaaggaggtggcagatcctcaggaaacacaggggatctgctgtctataaactgccggatgtcaggtacctggttcatcatcttcattttcatgcacgtcaacagccacatcac

SEQ ID NO: 870117 - DNA, 120 bp, Artificial Sequence
  ENSG00000236769_6 (sequence is synthesized)
tgaccttccaacaaatcttccagccttaccgaccctcagtcctcgcctctaatggccctatattccatccggaatcggaccctcaagtgaagtgaaatgcagcctgtaactcagagagtg

SEQ ID NO: 870118 - DNA, 120 bp, Artificial Sequence
  ENSG00000236769_7 (sequence is synthesized)
gcaggttgtctcctctgaaccggtgtcaggtgctactttctccgcaaccctaggctgtaggcactcagcagccccagaatctgcaggcttagccctgccatccagagagcagtccctgct

SEQ ID NO: 870119 - DNA, 120 bp, Artificial Sequence
  ENSG00000236769_8 (sequence is synthesized)
gctgctcaggggggccatgcagcccaagacgagcctagattccctcacagtctctgcactgtcagggtcccctaagctctgccaggtctccctagtcggaatgcaacatgtctgtctcca

SEQ ID NO: 870120 - DNA, 120 bp, Artificial Sequence
  ENSG00000236769_9 (sequence is synthesized)
tgttccgaattgcatccagtccacccgcagggcctgtagccctgcccagaggtccaggtggaaggcatgatgccctgtgcagtcctgcccagaccccttctcaggaggtgagactctgcc

SEQ ID NO: 870121 - DNA, 120 bp, Artificial Sequence
  ENSG00000236769_10 (sequence is synthesized)
aagtctgcaaattgattttggggaaaataggtagatataccacactaaagttgcagacacctaaacgtccatgaagacttactttttttactcaggccaggcctaatgtcagctgcacaa

SEQ ID NO: 870122 - DNA, 120 bp, Artificial Sequence
  ENSG00000236769_11 (sequence is synthesized)
aaccatgaggctcagccctggaaagaagaatgtttccacttttgccctcagtccttcttcactattcagcttctgcatgaatgtccctgtgtgctttcataatctcacattatcctagta

SEQ ID NO: 870123 - DNA, 120 bp, Artificial Sequence
  ENSG00000236769_12 (sequence is synthesized)
ttgtgcttctatatttttctaatttctaatttctaaattttcttttcaataaaacttaaggactgctgagtttttatccaggaccaggaaaaaataaaaatcagcactctgacaataaaa

SEQ ID NO: 870124 - DNA, 120 bp, Artificial Sequence
  ENSG00000236769_13 (sequence is synthesized)
tccaaggaggtggcagatcctcaggaaacacagggtgaagatataggtttggaaaggggatataactttccatggtcaaaagcaaataaactgaacatctcagccagcccatctgcttgg

SEQ ID NO: 870125 - DNA, 120 bp, Artificial Sequence
  ENSG00000271725_0 (sequence is synthesized)
tgtgaggaggcccaggccacaaggagaggccacctataagcattcaggccagcagccccagatctgctcctcctgccaagctgaacccaagaccagcaccttcctccttgtgtaagatgg

SEQ ID NO: 870126 - DNA, 120 bp, Artificial Sequence
  ENSG00000271725_1 (sequence is synthesized)
ccccagcttggccagcctccaagttacatcacctcctcaaacctcagtttcctcatctgtaaagaatggaccttcaggagtcatgggaagcttagaagaaaaaaaaaatgtatgtaaagc

SEQ ID NO: 870127 - DNA, 120 bp, Artificial Sequence
  ENSG00000271725_2 (sequence is synthesized)
agcaagcataattattttcctctctcattcaccctgtccacagccgggcagggggagtgccatgaagtcagccagaaatcagcatattggacagtgtgagatgaagtcaggttgtaggac

SEQ ID NO: 870128 - DNA, 62 bp, Artificial Sequence
  ENSG00000271724_0 (sequence is synthesized)
tacttgagatatctgaggcaacactggggattctcctgtaccctgctccagttgattagtct

SEQ ID NO: 870129 - DNA, 120 bp, Artificial Sequence
  ENSG00000271724_1 (sequence is synthesized)
actggggattctcctgtaccctgctccagttgattagtctacacacccagagatgtcaagcatcatttcactgtgataccaaccaggtacccaaaggtggagtaccaccttctacggtgg

SEQ ID NO: 870130 - DNA, 120 bp, Artificial Sequence
  ENSG00000271724_2 (sequence is synthesized)
acttcctaagtaactagttgagtgtcccatgggtctttaatcccctcattcagaacagaaattgcaatgtgagatggaataaaatttctgttggaaacagaaacctaaacacatattatg

SEQ ID NO: 870131 - DNA, 120 bp, Artificial Sequence
  ENSG00000271724_3 (sequence is synthesized)
ttcaggtttaactcaaacccacatgtatttggttgcttaaaattttcatctgttaagccatgttttccaatcctttccctttgcatttgtttggaactatatataaatttttaatctgca

SEQ ID NO: 870132 - DNA, 120 bp, Artificial Sequence
  ENSG00000271727_0 (sequence is synthesized)
ggagaccggcgcgggtgctggaggtcagcaggggccgtgggcggtggacgctggaatgccttgggttccgagggacccagctgcctgaatggacacgaggcatccacattaatctggata

SEQ ID NO: 870133 - DNA, 120 bp, Artificial Sequence
  ENSG00000271727_1 (sequence is synthesized)
aaggctgcttcttcagccacagctaaggtgcatgtaataggaatgagagccacctgtgtttcagaaagcgtctgggattttagagctgcttgtaactgcagcctaacacagcctcagccg

SEQ ID NO: 870134 - DNA, 120 bp, Artificial Sequence
  ENSG00000271727_2 (sequence is synthesized)
actgatacatccagtgtcgtcaaaacagagcagtgaaccaagcagccggctcattgtttgagaaacagttgtttcatgggtgaattgacctcatcttcggcagccaccggtttgctaagc

SEQ ID NO: 870135 - DNA, 120 bp, Artificial Sequence
  ENSG00000271727_3 (sequence is synthesized)
tacagttttccatagaccacatgagttctgataatcctgaaaacgatttgctctcttctccaatgctgaatgaagactacctcatcccttccttcttgcttctaacagcagatcagatct

SEQ ID NO: 870136 - DNA, 120 bp, Artificial Sequence
  ENSG00000271727_4 (sequence is synthesized)
ccaggttcgaagttcctagatgtgctttctgatcctggttattctttgtcagccttcaaagccaaagccttactgacgtgcagatccaaggaaaagtttctttcctcattgtgtgttgcc

SEQ ID NO: 870137 - DNA, 120 bp, Artificial Sequence
  ENSG00000271727_5 (sequence is synthesized)
tatgtttataaccacatacacacataaacatgtaaactctgcatttcagaaagcaatgatttgttatccatatcttatctatacatttctgctttgacattttattaaaaacataaaaat

SEQ ID NO: 870138 - DNA, 120 bp, Artificial Sequence
  ENSG00000271727_6 (sequence is synthesized)
ttttaaaatctccataaaatagcacaaggtgctctgtgtaaacttacccagaacatacaaataattgtaaaataactgaagggctaataaaataaactcatgtatctgctgtaaatgtta

SEQ ID NO: 870139 - DNA, 120 bp, Artificial Sequence
  ENSG00000276110_0 (sequence is synthesized)
gagaactcatctggagcaatctcttctgtgcctgccaccacccccttcccacgctgtgctgatttggagtaggtgtcaaggggacccttatatgtaagttaaaaaaaaaaaaactgacac

SEQ ID NO: 870140 - DNA, 120 bp, Artificial Sequence
  ENSG00000276110_1 (sequence is synthesized)
agctccctctccccactcagtcttagtttccactcaaactctggcacctttgttttagttctgacctctctctcaagccctttccttgcttgcattggctaaaaccgttaaaaccaaaac

SEQ ID NO: 870141 - DNA, 61 bp, Artificial Sequence
  ENSG00000276110_2 (sequence is synthesized)
cagcactttgggaggccgaggcaggtgggccaggagttccagaccagcctggccaaagcat

SEQ ID NO: 870142 - DNA, 62 bp, Artificial Sequence
  ENSG00000276110_3 (sequence is synthesized)
gaggcaggagaattgcttgaactcgggagtgggaggttgcagtgagcaaaaaagaaaaaaca

SEQ ID NO: 870143 - DNA, 120 bp, Artificial Sequence
  ENSG00000276110_4 (sequence is synthesized)
aacaaacaaacaaaaaagaattaagtaattttggaaaaaatgaccctttggatcattttcttagttttccagttcacattacacaacaaatgtagtatgagaatcttgtaaattgaggac

SEQ ID NO: 870144 - DNA, 120 bp, Artificial Sequence; identical to SEQ ID NO: 861535
  ENSG00000282143_0 (sequence is synthesized)

SEQ ID NO: 870145 - DNA, 67 bp, Artificial Sequence; identical to SEQ ID NO: 861536
  ENSG00000282143_1 (sequence is synthesized)

SEQ ID NO: 870146 - DNA, 120 bp, Artificial Sequence; identical to SEQ ID NO: 861537
  ENSG00000282143_2 (sequence is synthesized)

SEQ ID NO: 870147 - DNA, 120 bp, Artificial Sequence
  ENSG00000282143_3 (sequence is synthesized)
catagaagtcgccctgtccgtgatgtcaccgacagtgccttgcccagtccccgtctgcctttctgccactcaaccgaccaatctgctgccagagccgccaaggggaagtgacgtctgcct

SEQ ID NO: 870148 - DNA, 120 bp, Artificial Sequence
  ENSG00000282143_4 (sequence is synthesized)
ctccctttttccctcccgcccctgcgtctgttctctcccaaagaagctggtccttagcctgtgttaaggagcaacctttcggtggccagatggagccggggcatccttcttcaaataatg

SEQ ID NO: 870149 - DNA, 120 bp, Artificial Sequence
  ENSG00000282143_5 (sequence is synthesized)
gcttttaattcgcagactagaatgtttcggattacaaaagaaaccggttctcttcacatccttatccttgtgatgcagcattccgcttgcaattggaagccgtttaatatcagagagaaa

SEQ ID NO: 870150 - DNA, 120 bp, Artificial Sequence
  ENSG00000282142_0 (sequence is synthesized)
gtgtcaacttgattggactgaaggatgaagtactgttccttggtgtgtctgtgaggagcatgttgatttggcaaagaacagtttggctttgaagagggagcaccattttgcctgtttctc

SEQ ID NO: 870151 - DNA, 120 bp, Artificial Sequence
  ENSG00000282142_1 (sequence is synthesized)
gagcaagcctcctgggattcattgattttgtaattccttgcctctatttgtgttataatacattgaaaccaaagctagcatttcaaaaatcaggaccaagtattttagttactcgggacc

SEQ ID NO: 870152 - DNA, 120 bp, Artificial Sequence
  ENSG00000282142_2 (sequence is synthesized)
aagaacataaagttcctgtgaatgaaattaacataaggacagagccgttcgaccaagaaaaagaaaagtccaggagattaaagatacaattcagatgaactgttacaaggtaactccatg

SEQ ID NO: 870153 - DNA, 120 bp, Artificial Sequence
  ENSG00000282142_3 (sequence is synthesized)
gtccttgtggtagtgaagaagtctcatgagagctgatggtttcataacggggagttcccctgcacacactcccttgcctgctgccatgtaagatgggacgctgctcctcattcaccttct

SEQ ID NO: 870154 - DNA, 120 bp, Artificial Sequence
  ENSG00000282142_4 (sequence is synthesized)
gccatgactgtgaggcctcccacgccatgtggaactacatgtcactggttttctgctgccccttttggctccattccacgtgcgtccatacaaaccggctgctgcacctggaggctgagc

SEQ ID NO: 870155 - DNA, 120 bp, Artificial Sequence
  ENSG00000282142_5 (sequence is synthesized)
agcccacagcttcattgagtcagagccccgtctacaccatcacgacggcagtgtggcgtctgcacagagatacgtttctcttggctttctgctgtactccgggctggctgttatcagccc

SEQ ID NO: 870156 - DNA, 120 bp, Artificial Sequence
  ENSG00000282142_6 (sequence is synthesized)
gtgtcaacttgattggactgaaggatgaagtactgttccttggtgtgtctgtgaggagcatgttgatttggcaaagaacagtttggtaaattctaagaaacgggtcattccaggtcctct

SEQ ID NO: 870157 - DNA, 120 bp, Artificial Sequence
  ENSG00000282142_7 (sequence is synthesized)
gaaacgggtcattccaggtcctctaagataacctgggtacttctcttgaccattatccaaggcttcttatccaaggcttctcctggcctttgtctaaatggaaaacaggtgttttcaagg

SEQ ID NO: 870158 - DNA, 120 bp, Artificial Sequence
  ENSG00000282142_8 (sequence is synthesized)
ccatgtgatcacatcaccgtcatattttaaatcagacctgcctatttccacctctcagtttgcctgtctgaacatttctgttgtctttttttctaaatgtctttcttaacacattggttt

SEQ ID NO: 870159 - DNA, 120 bp, Artificial Sequence
  ENSG00000282142_9 (sequence is synthesized)
aatacaaacaattacatctcctgggcacccatgatgcataagacaatgtgagatatatatatatatattaaatgcatactttattacttatgttttattatacatattaaattgtatgta

SEQ ID NO: 870160 - DNA, 80 bp, Artificial Sequence
  ENSG00000282142_10 (sequence is synthesized)
tgtacagcaggccttcaataaccagaagactgtatatatttattttcatttgttatgtagtctactatatattatacatt

SEQ ID NO: 870161 - DNA, 120 bp, Artificial Sequence
  ENSG00000286659_0 (sequence is synthesized)
ggctcccgccctgcgtgctagcgaggcaggcattggcagaacggactcggggctgtccttcgtggcccggaccccgcgaggcctgtccttccacctctgtggggaccaagagggcaagga

SEQ ID NO: 870162 - DNA, 120 bp, Artificial Sequence
  ENSG00000286659_1 (sequence is synthesized)
tcgtgccaggctcaccgtgggcgctcagtaagcggccgtgcagaggacggttgagggctttgtgcagaggaaatgagagactgctctgaagcaaggcccgcctagtgagctgctaggaaa

SEQ ID NO: 870163 - DNA, 120 bp, Artificial Sequence
  ENSG00000286659_2 (sequence is synthesized)
ggtcacagctcccgcaaaggcagccggctctccttccccgcctgacgctcagggactactcgcacagactgggctacttccttcttcattcattcatcaagtatttattgagaaactgct

SEQ ID NO: 870164 - DNA, 120 bp, Artificial Sequence
  ENSG00000286659_3 (sequence is synthesized)
aagtgccaaatgctttgttctgggcattgtaggggcagaaaggtgtgatattttcccttactcatcccaaaggtcacagcggacactcctacaaataaaatataggttagcaagagaaaa

SEQ ID NO: 870165 - DNA, 120 bp, Artificial Sequence
  ENSG00000286658_0 (sequence is synthesized)
gtccactcctgctgctccaacatctctgcggcaggacagtcagctggtgacactggcgagagaaggcactgggactgctggtggtgacagccttctcttgggctgatgctcagtggcctg

SEQ ID NO: 870166 - DNA, 120 bp, Artificial Sequence
  ENSG00000286658_1 (sequence is synthesized)
aggatttaccgtgagcgagcccagagtgtgtctgcagactggcgccgaggaggcaagggcgtgggaaggctcaacctggccagcggcagagtaccaggaagtctgcacgaactcactgct

SEQ ID NO: 870167 - DNA, 120 bp, Artificial Sequence
  ENSG00000286658_2 (sequence is synthesized)
gctcacctgaggaacacggggtggggagaagaatgcctactcaagaatgtagaatgatagacaaactggacaacatcatcaggacagcaccagtcaatggacatctgcagagagcagagg

SEQ ID NO: 870168 - DNA, 120 bp, Artificial Sequence
  ENSG00000286658_3 (sequence is synthesized)
atcgacacagtctcaaatcatcttccttcaaattacttcttaattacaaaaggaaaatacatttgacccttggacaacacaggtttgaaccattcgggtccagtaataagcatagttttt

SEQ ID NO: 870169 - DNA, 120 bp, Artificial Sequence
  ENSG00000286658_4 (sequence is synthesized)
tcaaccagatgcaggtggaaaatagagtcttggtggtatttgaaacctgtgtatatgaaaggccaactttttgtaaatttgggttccaagggctgactgcaggactgagtatgagcggat

SEQ ID NO: 870170 - DNA, 120 bp, Artificial Sequence
  ENSG00000286658_5 (sequence is synthesized)
tgagaaacgtaacagacaacaccctaatcaagtcataaatatcaacatcagcataaactggaccagccaacatcatcatgcctgtgggccacagcctcctgtctgtggaccagatgggac

SEQ ID NO: 870171 - DNA, 120 bp, Artificial Sequence
  ENSG00000286658_6 (sequence is synthesized)
tccaaggaaacaccacacaaaccaaaatggcccttcaagaaatcccatccgtcacgacaggtgtgaaaaggctgaggaacactctgtattaaaggaaactagagatcttaaagtgaatgc

SEQ ID NO: 870172 - DNA, 120 bp, Artificial Sequence
  ENSG00000286658_7 (sequence is synthesized)
aaatggttcctgaacaggaataaaagaataacataaaggatgtttatatgaacaatcggggaaacctgaacgaggtctgtagatttcaaccctgcatcttattaagggtaaatatcctga

SEQ ID NO: 870173 - DNA, 120 bp, Artificial Sequence
  ENSG00000286658_8 (sequence is synthesized)
ctttggtaactttattatgatatgtaagtgagtaaccctgtttttagtcaatagactctgaggtatttaggagtaaagggacttgatatctacaaatgagtctcaaatggtccaaagaat

SEQ ID NO: 870174 - DNA, 120 bp, Artificial Sequence
  ENSG00000286658_9 (sequence is synthesized)
catggtgtgtgtacatataaatgtatatatgtgcatatatgtatctctatatatgtacaggacaatggaaatgacttaaaatgtggcagagatattaacaattggggaatcagggtaaag

SEQ ID NO: 870175 - DNA, 120 bp, Artificial Sequence
  ENSG00000286657_0 (sequence is synthesized)
cttcccctccttggccccagtctccccaattctaaaatcggatactggataaaatgccacggaagaacctagggatgcaccaggaaccacgcgcctgaatgccacaggtttgatttgatg

SEQ ID NO: 870176 - DNA, 120 bp, Artificial Sequence
  ENSG00000286657_1 (sequence is synthesized)
caactgcagctctgtaagcaaatctgagacgtgttcacatgtggcagctgtgcatgggtgagggggccttcaggaaggtccctctgcctgaacaaaacagacatgtccagtggcaggact

SEQ ID NO: 870177 - DNA, 120 bp, Artificial Sequence
  ENSG00000286657_2 (sequence is synthesized)
catctgacaacacagacccacacccctccccaccccagaggctcagaacagtgtccactagagttggaagtggctctaaatctgctacacacctccagcctccaataacaagtggccacc

SEQ ID NO: 870178 - DNA, 120 bp, Artificial Sequence
  ENSG00000286657_3 (sequence is synthesized)
agcaaaggcagggaggcatcagcggtgagtacccaggtttcccccagagcatccgagtgggagggaatttggcttggcaaaatcttccaacaactcccagagcctgaacaaccttttccc

SEQ ID NO: 870179 - DNA, 120 bp, Artificial Sequence
  ENSG00000286657_4 (sequence is synthesized)
agccccaggtgggtggaagaacacagcctgctgcctcatcaccatggagacaggcagtagagagggtggttaaaagcatgggcccagacctcctggggttcaaatctcagctcctccacc

SEQ ID NO: 870180 - DNA, 120 bp, Artificial Sequence
  ENSG00000286657_5 (sequence is synthesized)
cacaggctgtgagactttgacaattcacttaaattccttatgccttagtttcctcatctgtaaaacagagataagaaaagtatgaacttcacaggattgtttataggattaaatactcca

SEQ ID NO: 870181 - DNA, 120 bp, Artificial Sequence
  ENSG00000286657_6 (sequence is synthesized)
tatggcgcatttagcacagtgctgggcagctgaactgggaggcataagccctgggttccagccctagctttgccaccaacttactgtgtgagtttggacaagtcacttgccatctctggc

SEQ ID NO: 870182 - DNA, 120 bp, Artificial Sequence
  ENSG00000286657_7 (sequence is synthesized)
cagctgagactttggggagggcagcttagcatggggctgtcttggtgagctgggggccctagtgttggctgaggcctgatcatgagctctacactaccctttcctccccagatctatttt

SEQ ID NO: 870183 - DNA, 120 bp, Artificial Sequence
  ENSG00000286657_8 (sequence is synthesized)
cccaaattggcagcagctgatggcatctctctgtaccctctatccctctagcctgcccacagggccctgtgttgccctgctcagctggtactcaggccttggagaaatggcactggtacc

SEQ ID NO: 870184 - DNA, 120 bp, Artificial Sequence
  ENSG00000286657_9 (sequence is synthesized)
cactgaccccaaacaaaggtatctgcagtgcccaaagcagaagatatagtggctcatacttaaacctgcctgtgagccctctagagaggcaggtacaattgcggaaggatggatgtaatt

SEQ ID NO: 870185 - DNA, 120 bp, Artificial Sequence
  ENSG00000286657_10 (sequence is synthesized)
gtttgaagatgctcataatccttcggcggtaatggcaggaagctttaaaatgaagccctaatccgctaataacctggcagccccacagccttcttccctcctgatctccaggaagggaga

SEQ ID NO: 870186 - DNA, 120 bp, Artificial Sequence
  ENSG00000286657_11 (sequence is synthesized)
aggaactctagccactccctttcccaagggagcagaaaggcaagtgtgggctctgacccaagaccaccggattttgactctcctgcaagacccagcttccttcctgcctccatctccaag

SEQ ID NO: 870187 - DNA, 120 bp, Artificial Sequence
  ENSG00000286657_12 (sequence is synthesized)
aagtcttccctgcccatttcatccttctgaagtcttttctgccccctctgtccctagaaatattctaggacagaactggatgacagactggctggacagtaaagaaaggaatgaggcctg

SEQ ID NO: 870188 - DNA, 60 bp, Artificial Sequence
  ENSG00000286657_13 (sequence is synthesized)
tggacagtaaagaaaggaatgagggcctgaggttaggagttcgaggccagcctggccaac

SEQ ID NO: 870189 - DNA, 120 bp, Artificial Sequence
  ENSG00000286656_0 (sequence is synthesized)
gcagagacctagcggacagttttccggtggcagcaatgctcatttcccggacacagatggtttttggcccctgaagaactctttaatccctgcgttttgtagcgctcgttctctttacag

SEQ ID NO: 870190 - DNA, 120 bp, Artificial Sequence
  ENSG00000286656_1 (sequence is synthesized)
ggctttcactcctgggtcgaaaaaggtcaccaactcctactaaatcttaaacattaacagcaactgaagcctcatcttcagacctaagagaagatgaaaatcagaagaagctgcattcac

SEQ ID NO: 870191 - DNA, 120 bp, Artificial Sequence
  ENSG00000286656_2 (sequence is synthesized)
aagacctgtgtccagaaaattaaactattcaaccccctagtcccagggactattgcagaagaagtgggtgtttggacttgtaaggacctactttaagagagaaagttagttcagtatttc

SEQ ID NO: 870192 - DNA, 85 bp, Artificial Sequence
  ENSG00000286656_3 (sequence is synthesized)
ttttgttttgttttgttttgttttgacaggaactagctctgtcacctgggttggaatctcccagacacaagcgatcctgccacct

SEQ ID NO: 870193 - DNA, 68 bp, Artificial Sequence
  ENSG00000286656_4 (sequence is synthesized)
tgggacttgtttcatcacattgccaaggctagtctcaaactcctgagatcaaggaatccacccaccta

SEQ ID NO: 870194 - DNA, 120 bp, Artificial Sequence
  ENSG00000286656_5 (sequence is synthesized)
atgtgagccacaatggccagcctataaagattaatataaaaggaacactgatgcaagaccagcctgtgggcccctgtgtcagattagcaatgttttcttgaggtattaacccattctttt

SEQ ID NO: 870195 - DNA, 120 bp, Artificial Sequence
  ENSG00000286656_6 (sequence is synthesized)
tttaaacattataaaacgttatgaaaggtttataaaattattgcttctggtcaagatgattaaaatttaatacacttgtctataagatttgagaaatagatttaattggcttcattctat

SEQ ID NO: 870196 - DNA, 120 bp, Artificial Sequence
  ENSG00000286656_7 (sequence is synthesized)
cttcattaggtcttattttttgggaaagtaagtctcaaagagtaaaaggttttgcctttttgtttttgaaatatttgagttaccactttgactaaatgactgacttattttacaatgacc

SEQ ID NO: 870197 - DNA, 120 bp, Artificial Sequence
  ENSG00000286656_8 (sequence is synthesized)
tgtgattctattttgtgatatcaagtgttttaaacattgaccttgttttaagtatttgacaaactttctaaaatccaattctaaattcggtcttttttacctcattaatttttttgacat

SEQ ID NO: 870198 - DNA, 120 bp, Artificial Sequence
  ENSG00000286656_9 (sequence is synthesized)
taagtcccctgaaatccaaagagatatatttggcttatttggcataataagatcacataagatgcattatcaaatatgaaatgatatttaactttctttagattgtatttatatgaatgt

SEQ ID NO: 870199 - DNA, 120 bp, Artificial Sequence
  ENSG00000286656_10 (sequence is synthesized)
cttattagtatgtattacaaaatcgtatgagattcctgtgattctgaaatgttagtgtatgttatcagaactaattatgatcattatattaaattgttgtacgccatagctataaccaaa

SEQ ID NO: 870200 - DNA, 120 bp, Artificial Sequence
  ENSG00000279558_0 (sequence is synthesized)
gtagactgcccaggattcctggagtagctccttatagaacagggtttctctcctggatgtataatttaggagatgggaatttttacagcctccgaaattacgcgtcggctccaacagatg

SEQ ID NO: 870201 - DNA, 120 bp, Artificial Sequence
  ENSG00000279558_1 (sequence is synthesized)
acatatttataagagtccagtgagcaaatgaagatattccagtgcttgaatataatctgtgtgtaaaaaatacctgcgaagaattaatcagttcaatgaatttatggccaaatgactggc

SEQ ID NO: 870202 - DNA, 120 bp, Artificial Sequence
  ENSG00000279558_2 (sequence is synthesized)
ttgattgaaatgaaagaaatccaattcggttcctctcaaaggaaatctcacagctgatattatgataataaacaaccattgtttttgttcacattaagtaaactaaatattggagaagta

SEQ ID NO: 870203 - DNA, 120 bp, Artificial Sequence
  ENSG00000286654_0 (sequence is synthesized)
aggtccctggtgacggagcagcttggctggagtgcctggtgccccaagaggtgtctcctcagctcctggccctttaggtccttcagacatcccacctgagagggagccgcgtcctctcca

SEQ ID NO: 870204 - DNA, 120 bp, Artificial Sequence
  ENSG00000286654_1 (sequence is synthesized)
gccatgtccccctcctggcgatcatggcctgaccgccgcccaccttcacgctgctgtctgcctcccagctccagcccaggctccggatgcgaccttcatcttgcctcttgttccttcctc

SEQ ID NO: 870205 - DNA, 120 bp, Artificial Sequence
  ENSG00000286654_2 (sequence is synthesized)
caggtttggtgcccttctgaaatctccaggttgactgggccttgactgcctccttccagaccttctggcctcacccgcccacagtgagagctctctgtgacactctgagctccgaagaat

SEQ ID NO: 870206 - DNA, 120 bp, Artificial Sequence
  ENSG00000286654_3 (sequence is synthesized)
ccaacctgcccgagggtgggcaggattcagccatgagtgaaagagaactgggggaggaagcttggagctgcggcaggagctcgagggagatgtgggtggagacagaacggctgttttaag

SEQ ID NO: 870207 - DNA, 120 bp, Artificial Sequence
  ENSG00000286654_4 (sequence is synthesized)
gtaccatataatactccgtagcacgggcagaactgaatcgatggtggggcactgaggcaatttccagttcttcactatcatgacattgctatgccaaacatccttgtcaatgaatctttg

SEQ ID NO: 870208 - DNA, 120 bp, Artificial Sequence
  ENSG00000286654_5 (sequence is synthesized)
ccatctagttccccagaaaacgatctagctttttgaagggtgtgcacattttaaagtcatttgcttgattttgccaaactggcctccagagggactactgaccgcatctcatgagcaggg

SEQ ID NO: 870209 - DNA, 120 bp, Artificial Sequence
  ENSG00000286654_6 (sequence is synthesized)
aagcatatgcctgtttcctcacatcctgccaacactgggcagcactgtcctttcggattgattctggtctgccaggcaaggaactctacgtcattgtcagggctggtttcgtgagccgtt

SEQ ID NO: 870210 - DNA, 120 bp, Artificial Sequence
  ENSG00000286654_7 (sequence is synthesized)
ccttctgctttgaagcagcgcacacaggatgtttaatgaatagccgcaggcagtgaaggaagaggatccccagagcctgggacatcagctttcagtagagtgcaagcagttgcaggagcc

SEQ ID NO: 870211 - DNA, 120 bp, Artificial Sequence
  ENSG00000286654_8 (sequence is synthesized)
ctgaacagaagtggggatggcatgctgctcttcccaaagctgcctgagctgccccaatggcgccacctcccaaggtggatgttcctccaagaacctcctcttccccttggctctgtttca

SEQ ID NO: 870212 - DNA, 120 bp, Artificial Sequence
  ENSG00000286654_9 (sequence is synthesized)
ggtggtctgccttagtattcactttcatttttcatggttaggcccagctcttccttacatttgcagtgcatcccatgaagtcttgaacgctgaggcaggggctgcgggtgtactgcatga

SEQ ID NO: 870213 - DNA, 120 bp, Artificial Sequence
  ENSG00000286654_10 (sequence is synthesized)
gtgtcagcaggagttctcgctttgtgcttaaccagtcagtcgagcagacaaagagtgtgacagcccttcgtacaccaatctgcccttcttcctggggtcagtctgggcacagagcccagt

SEQ ID NO: 870214 - DNA, 120 bp, Artificial Sequence
  ENSG00000286654_11 (sequence is synthesized)
ggggcagccaccagtgaaggcagccagtaagctctgtggccgccgcgggaagcacagtggagcagcagctcactgaagacccacagtgagtacaacgcggcaggaaaaaagaattaggag

SEQ ID NO: 870215 - DNA, 120 bp, Artificial Sequence
  ENSG00000286654_12 (sequence is synthesized)
ccctttacaacccaatcagggatgacggccagaacacaccctgaagagcaaagaaggtgcggaaacggcgggtacgtgcacacgcagacagaggctggcggccagccaggtggctctggc

SEQ ID NO: 870216 - DNA, 120 bp, Artificial Sequence
  ENSG00000286654_13 (sequence is synthesized)
tcaggggaagaagcgcattttcaacatcaaatttgaaaggagtactttcaaaaaggtactccttggtaccttacgaattttgttttatttgaatgcttttatctatttagaaaaataaaa

SEQ ID NO: 870217 - DNA, 120 bp, Artificial Sequence
  ENSG00000286654_14 (sequence is synthesized)
acctgacgagcgtgaggctgctctctccctagcctgtctgcacttccgctccatcagtcagttcctccttggtggccacacagaacctgcttggctggctgctccagacataagaacact

SEQ ID NO: 870218 - DNA, 120 bp, Artificial Sequence
  ENSG00000286654_15 (sequence is synthesized)
gagaggatcctggggtgctccagaattcacaggaagatggagaacctggccaaggggtgtggagcagcagggtccctggccagaaaagcctgtgaggactgccgtccctgagtcctttcc

SEQ ID NO: 870219 - DNA, 120 bp, Artificial Sequence
  ENSG00000286654_16 (sequence is synthesized)
ctcctcaacacaggaaggaagcccacaccccccgcaaacctcaatgtatttccatcacaggaagagatcagaagagagccaaacattgttggcttttacttatttgccaaatatttactc

SEQ ID NO: 870220 - DNA, 120 bp, Artificial Sequence
  ENSG00000286654_17 (sequence is synthesized)
agcacccgtgatattctagtccacgctctgttctgggtgctgaggatgcagacatgggggagatggacggggccctcccgcccagggagctcatactcatggggagggctggtcatagtt

SEQ ID NO: 870221 - DNA, 120 bp, Artificial Sequence
  ENSG00000286654_18 (sequence is synthesized)
cacttctggtcctggtagtccgtggagaaaaatgaaggaaagggaggttgtgcagagccctgaggtggcagctcatttggaaaaaaggatcaggtgaaacctctctgaggcagtgacatg

SEQ ID NO: 870222 - DNA, 120 bp, Artificial Sequence
  ENSG00000286654_19 (sequence is synthesized)
tgagcagagaccaccatgatgagaaggggggagtctcctaccaacgtgcgggcatgagggagggtgggcatcaagacacaagtgcccagtgcaccgcagggacagggagaagaagagcag

SEQ ID NO: 870223 - DNA, 120 bp, Artificial Sequence
  ENSG00000286654_20 (sequence is synthesized)
agggcagggccacaccgcaaaggggccttagcggccaccttaaagactccaggcttccttccaagatgatgcaaagtcttggaagattctggagcagggaagtgactcaattgcttatga

SEQ ID NO: 870224 - DNA, 120 bp, Artificial Sequence
  ENSG00000286654_21 (sequence is synthesized)
cagttcttttatggttcagtgttttaggtgtcatcataatgttgtaattatgttttaaaatacccaccaagggctgggcactgtggctcatgcctgtgatctcagcactttgggaagcca

SEQ ID NO: 870225 - DNA, 120 bp, Artificial Sequence
  ENSG00000286654_22 (sequence is synthesized)
aggtgggaggatcacttgagcccaggggtctaagaccaggctggggaacacagggagatcctgtctctacaaaaacttaaagaagttagctaggtgggatggtgcatgcctgtagtccca

SEQ ID NO: 870226 - DNA, 120 bp, Artificial Sequence
  ENSG00000286652_0 (sequence is synthesized)
agaacactccgcgaaggtgttcctgaacttcatttcccagaggctttagctaacgtgtactttcgccctgcgatgggccgcacattttcgccgccagtcttttgctcctgtttcaggcaa

SEQ ID NO: 870227 - DNA, 120 bp, Artificial Sequence
  ENSG00000286652_1 (sequence is synthesized)
aacttggaagcagccagatgtccttcagtacatgaatgaatacataaactatggtacattcagacaatggaacattcagtaaggaaaagaaatgagctatcaagctaccaaaaaggaaga

SEQ ID NO: 870228 - DNA, 120 bp, Artificial Sequence
  ENSG00000286652_2 (sequence is synthesized)
acagaagaatattaagtgcgtattgcattgtcatggactcgaggttttctgcagaggaacacaacataaggagcatcagtttgctcattcacatctgggaggcatgctgtgctctgcaaa

SEQ ID NO: 870229 - DNA, 120 bp, Artificial Sequence
  ENSG00000286652_3 (sequence is synthesized)
atgtgattctcaaagtatggttcccagaccagcagcaacagaatttggcaacttgtttagaaatgtaaattgctttctgactgctctgtgttttctttgagcctgtatttgtctatttgg

SEQ ID NO: 870230 - DNA, 120 bp, Artificial Sequence
  ENSG00000286652_4 (sequence is synthesized)
catccattgatccatttggcatcgttgatcagaggggccaaactatagccaaagttatttacttctcctgctatccagagcccatactttgaatgacctcctttatctaactcacacact

SEQ ID NO: 870231 - DNA, 120 bp, Artificial Sequence
  ENSG00000286652_5 (sequence is synthesized)
aagccaatatttcccctggggtaagtcaactaagggccaaatatcagacaaccagggacagcctctatatccaaagcctgccagaattattcaaactagccaattctaaactgtttaccc

SEQ ID NO: 870232 - DNA, 120 bp, Artificial Sequence
  ENSG00000286652_6 (sequence is synthesized)
tgatctgccctgcctttcccatggaaaccccaacaaagactttaatttatgccttccttttcactcctttctgcctcctgggtgacactggtacttcccagtgtggccctgcatggtgtg

SEQ ID NO: 870233 - DNA, 120 bp, Artificial Sequence
  ENSG00000286652_7 (sequence is synthesized)
ctgcacttctcgtttctagggaaactgtgaataacattataattttctttcaatggcattgacctctctgtcttcactccatcatctttataaattaagacctgggcacaaatcactgac

SEQ ID NO: 870234 - DNA, 120 bp, Artificial Sequence
  ENSG00000286652_8 (sequence is synthesized)
agacttacctgaaatgaacaattctagtgaaagcatcttgagttcctactttcttgattgtgggaacaacaacagcctcgatggagactatttcttcgaggttattttgggaacaattcc

SEQ ID NO: 870235 - DNA, 120 bp, Artificial Sequence
  ENSG00000286652_9 (sequence is synthesized)
ctcttctaaaaattttgtaagcctctatattctttattaatcccgttttatttaaaatagtttgagaggttttgattcttaggtacagtttttttattatttagtttggccgggcacagt

SEQ ID NO: 870236 - DNA, 70 bp, Artificial Sequence
  ENSG00000286652_10 (sequence is synthesized)
gcgtggtggcgtgtgcctgtaatcccagttactcatagggctgaggcagaagaatcctttgaacctagga

SEQ ID NO: 870237 - DNA, 120 bp, Artificial Sequence
  ENSG00000286652_11 (sequence is synthesized)
gagaccccatctcaaaaataaaataaataaatcaattaatttaattaattaattttttttttttggtagagataagggtcttgcttcgttgcccaggctgttgcccaggttggtcttgga

SEQ ID NO: 870238 - DNA, 120 bp, Artificial Sequence
  ENSG00000286652_12 (sequence is synthesized)
tcccacctcggcctcccaaagtgctgcatttacatatgtgagccaccacaccttgcctaagtacatttttaattgacatataacacaatattgatacagaaaggtatctgtatcataatt

SEQ ID NO: 870239 - DNA, 120 bp, Artificial Sequence
  ENSG00000286652_13 (sequence is synthesized)
aaggtatctgtatcataattatacagctcaagaaatttcacaaagtgaacacacctatgaacccagaactcagactgagaaatagaaccatccccacgatctccaacaagtctcttcatg

SEQ ID NO: 870240 - DNA, 120 bp, Artificial Sequence
  ENSG00000286652_14 (sequence is synthesized)
gcctttctcagtgtaattaccttcaacaatcaccttcctgatttctaacaccacagatttgtttagtttgttttgagctacagtacatataaacaaaagcatgtatgcctttgtgtatgg

SEQ ID NO: 870241 - DNA, 120 bp, Artificial Sequence
  ENSG00000286652_15 (sequence is synthesized)
catcacttcaatattatgtttgtgagattcttccaatttgtgtgtaattgaaaattctttgttcttattgctctactgttcctttgtatgaaaaacaactatcttttctattgttgatgg

SEQ ID NO: 870242 - DNA, 120 bp, Artificial Sequence
  ENSG00000286652_16 (sequence is synthesized)
actttggactgttttcagtttgggactaaaatgtctagaatagttttgtttcctacaagtgaaccctgattcatttgttttacctgaatctattctgccatgctttggtccacacatatg

SEQ ID NO: 870243 - DNA, 120 bp, Artificial Sequence
  ENSG00000286650_0 (sequence is synthesized)
ggctctaggtagccggttttcgcgagtttgtggcacagtgttggactgaacgagttaaggaacctgttcaaggagggactcgtggggccgctttgattggcggttgtgcctggtgctgcc

SEQ ID NO: 870244 - DNA, 120 bp, Artificial Sequence
  ENSG00000286650_1 (sequence is synthesized)
gctgtgttggtgacgagaactgataacagcatctcacaacagcgtagccccggcatcgcactttgttttttggttttaggacaccagttacttgataccgaagccttcctgattcttttg

SEQ ID NO: 870245 - DNA, 120 bp, Artificial Sequence
  ENSG00000286650_2 (sequence is synthesized)
cagtgatccagatccagtttttccatgagtccgaggcgcggaacctggcttcccagatccggcgtgtacttccatcttttaccagttgccggctctttcccacccaacccgtttcctgga

SEQ ID NO: 870246 - DNA, 120 bp, Artificial Sequence
  ENSG00000286650_3 (sequence is synthesized)
ttctgtgcttgggagcaggatgttagcaaaaagcgttcgtgcttctcggactttctgggaagagaagtctgctaagcagaactttcagttatgggagtagggtgaggggctgagtgtaaa

SEQ ID NO: 870247 - DNA, 120 bp, Artificial Sequence
  ENSG00000286650_4 (sequence is synthesized)
taagtgttttgactctgccagatataagctaaattggaaataatgttttggctgcatgcagaacatacaatgtgcctgtttcaaagattcagcttacatattcatttaacaagtatttat

SEQ ID NO: 870248 - DNA, 120 bp, Artificial Sequence
  ENSG00000286650_5 (sequence is synthesized)
tgagcacttacctcttggattgtactataaaaggggctctgttgggtatgaaaagtacggatggtccccgacttacccctcacaatggttcgacttacaatttttcgactttatgatggg

SEQ ID NO: 870249 - DNA, 120 bp, Artificial Sequence
  ENSG00000286650_6 (sequence is synthesized)
tttaatgagacctaaccccatgtcagtcgaggagcatctggacttaagcatggttcaacttacggttttttgactttatgatgggtttatcagggtattaaatgcagtttcgacttaacg

SEQ ID NO: 870250 - DNA, 120 bp, Artificial Sequence
  ENSG00000278601_0 (sequence is synthesized)
aaaaaaaagaaaagaaaagaaagaaaaatggtgaaagaggagacaggaaatgagatgaagcatgatggtttatccacaggtccattttctcagggaatgcattatcagcagacactacat

SEQ ID NO: 870251 - DNA, 120 bp, Artificial Sequence
  ENSG00000278601_1 (sequence is synthesized)
tccattttctcagggaatgcattatcagcagacactacatataaaagtttaggatctgaaaagtgattgttcttaacctcgcttgcttgtatacccctccgattgtcttcaggcatcttg

SEQ ID NO: 870252 - DNA, 120 bp, Artificial Sequence
  ENSG00000278601_2 (sequence is synthesized)
aaatttgagaagccctgggaaggaaaaaagttaaattttctttttaatagcaggactgtttagaaactttaatatgctaaagtatgtgatacatttcaaacaggggagttgagtatatat

SEQ ID NO: 870253 - DNA, 120 bp, Artificial Sequence
  ENSG00000278601_3 (sequence is synthesized)
tgtttcctaaagttatgtgattctggaattctttaaaagtgcaatcatgggaccagtattgcctagaacacactttgtattcctagggcaatgtcactttcaatatggcatatgtagtaa

SEQ ID NO: 870254 - DNA, 120 bp, Artificial Sequence
  ENSG00000278601_4 (sequence is synthesized)
gatgctatatcttaagcatatttaaggaaaataccagtatttacaaataactaattttgaaattagtaaaagctgtatttcttctgaatgtaacacttattaaaattaagtgaagaatga

SEQ ID NO: 870255 - DNA, 120 bp, Artificial Sequence
  ENSG00000278600_0 (sequence is synthesized)
catgtcctcctatgggcagaaaagagtcctattttaatacctaaaccaaagctgtattgtcataagccacttcttgatgaaattgtgacacacaccttaatatcactttcataaatagga

SEQ ID NO: 870256 - DNA, 120 bp, Artificial Sequence
  ENSG00000278600_1 (sequence is synthesized)
aatgggaggcttttctcctcattttattataaagatgtctgtgggaaattctcttaattcatcctctttaaaattttaccttttagctaaaatgtctctgttgaaattcaaatttctaac

SEQ ID NO: 870257 - DNA, 120 bp, Artificial Sequence
  ENSG00000278600_2 (sequence is synthesized)
ttagtgaaatcgaaatcattcatagactgtagtattgcagggctcgaactgtgcagtgttctgaggtagttaagagctttgctggattcaggccctgggtttgcccaggcctgtatgacc

SEQ ID NO: 870258 - DNA, 120 bp, Artificial Sequence
  ENSG00000278600_3 (sequence is synthesized)
ttgagcaagttattctgagcttcactttcttcctctatgatggagaaaataatgatagcacttacctctatagagttatgaaaatttagtaagataatccatgtatgcatttagcactgt

SEQ ID NO: 870259 - DNA, 69 bp, Artificial Sequence
  ENSG00000278600_4 (sequence is synthesized)
tggccaccactccctgctaattttttgttttcgtatttttagaagagacgggtttcaccgtgttagcca

SEQ ID NO: 870260 - DNA, 79 bp, Artificial Sequence
  ENSG00000278600_5 (sequence is synthesized)
tttttgttttcgtatttttagagacctcgtgatcctcccgcctcggccttccaaagagctgggattacaggcatgagcc

SEQ ID NO: 870261 - DNA, 120 bp, Artificial Sequence
  ENSG00000278600_6 (sequence is synthesized)
ctattactcttaagcctagttatttaaatcaaacatttagtgagctcttacatgatgttataggagactctgaagattctcaactgttgattcctgttcataaggcagttatagtcttgt

SEQ ID NO: 870262 - DNA, 120 bp, Artificial Sequence
  ENSG00000278600_7 (sequence is synthesized)
tgagaactaagttttatgcagataaataaactagaaagtgtatggtgaattgccgaaagagagaacaaaagtactgtcagtgcgcagtaactgggaagaaaacagtagtccaaagtagag

SEQ ID NO: 870263 - DNA, 120 bp, Artificial Sequence
  ENSG00000278600_8 (sequence is synthesized)
gggccaaactttgaggaggaggctttggagtctggaagtgaggaaagagtgggaagggcattttatgctctgacagctacaagagcagagtcagagatatttgtaactcccagttaggag

SEQ ID NO: 870264 - DNA, 120 bp, Artificial Sequence
  ENSG00000278600_9 (sequence is synthesized)
agccgacaaacctttattaccaggtgatatcaaatattattagagctgactgtggtagtgacagtttttcatataaatgaaattgcatcctcccaaaggaatcctgagtatgtatgcact

SEQ ID NO: 870265 - DNA, 120 bp, Artificial Sequence
  ENSG00000278600_10 (sequence is synthesized)
ttaaaagaacccagaatcatctaaatattgtcacatggctcttgcaagtgatgataatagtgatgcttataataatgaggattagctgcactcatcagcctgtagaaagtaaaaagtttc

SEQ ID NO: 870266 - DNA, 74 bp, Artificial Sequence
  ENSG00000278600_11 (sequence is synthesized)
tcctctgctctgtgctaatgactcttcattaagccctatcctatgtagctgttagatataagggaataagtata

SEQ ID NO: 870267 - DNA, 120 bp, Artificial Sequence
  ENSG00000278600_12 (sequence is synthesized)
cctatcctatgtagctgttagatataagggaataagtatattctatgtccttgtactttaaccaagatatttgtgctggacatgctcacaggcacgttccagcttgcagcctatgcccct

SEQ ID NO: 870268 - DNA, 120 bp, Artificial Sequence
  ENSG00000278600_13 (sequence is synthesized)
tccttatttggaaatattattacttttctaagtctttttgcaagcaacttcttcttttcctttgttctctattgcctttccctatataggaaagttttaagttattagccagtcgggttt

SEQ ID NO: 870269 - DNA, 120 bp, Artificial Sequence
  ENSG00000278600_14 (sequence is synthesized)
aatttaaattgtgaggtccagctccagccaatggagacaggacacaagctgcataagggataaaaactgcttccctcctttgttcgggtgtgctgtcaccattgtttcatctgtgaggag

SEQ ID NO: 870270 - DNA, 120 bp, Artificial Sequence
  ENSG00000278600_15 (sequence is synthesized)
caccctttctgcagaaagtaaaattgccttgctgaaaaaactttttgtctaaatgctggtttttccttgcagtacctaggagcaagcattctgtttctaaataaacattttacttgtaac

SEQ ID NO: 870271 - DNA, 120 bp, Artificial Sequence
  ENSG00000278607_0 (sequence is synthesized)
aagaaatgtttttgaaaaaggtggaagtaggtagagggacgtgctctgaaccagcgtgaccaaaagacagtgtgttcacggtgcattcatctgattcaattcctgccaaaggcttttgtt

SEQ ID NO: 870272 - DNA, 120 bp, Artificial Sequence
  ENSG00000278607_1 (sequence is synthesized)
atttgagaacattatgactaaaccaacagagaggaaggacattctgaatacgggtgagagactgcgcgttggacaatcactgtgagtcccgacccttaccagaaaagtcactcgcagcgt

SEQ ID NO: 870273 - DNA, 120 bp, Artificial Sequence
  ENSG00000278607_2 (sequence is synthesized)
ctatctccttcaactgcggcaggagcacagctctgcagatttgctggggctctgtggcgcagtggaggcgaggacagaggtggccctgctctgggagatcccttcctaactggggctccc

SEQ ID NO: 870274 - DNA, 120 bp, Artificial Sequence
  ENSG00000278607_3 (sequence is synthesized)
tgacggcttcctgcacaggaggggcccgacgccggcgggacaagcagggagcccagatcagccttggaaagctcaggctcaaaccagagctcaatgtggaaattaaaaaacaaaccttga

SEQ ID NO: 870275 - DNA, 120 bp, Artificial Sequence
  ENSG00000268583_0 (sequence is synthesized)
acccgctgagcattgtggggcccgcttggatctccttgtccaaagggtctgggcgccggggctgcagtctctgggtgaggaggcggacgcgggaaacctgcttcggtctccatggttacg

SEQ ID NO: 870276 - DNA, 120 bp, Artificial Sequence
  ENSG00000268583_1 (sequence is synthesized)
agccgctcagcgcgcaggagggggattcaaaggaaatacggaagctaaaaggaaactgctgaacagaaaacaatgtcaactaaaaatactacaagcaaaaaacatcactgagaatgaagg

SEQ ID NO: 870277 - DNA, 120 bp, Artificial Sequence
  ENSG00000268583_2 (sequence is synthesized)
tgagaaaaagatgtcctcagaggaagcaaaaaataagagaatctgtacctatcagaaccactctaaaagaactaaaaaacgtctatcagaggaagtggaaatttgcagaacgaaatttgg

SEQ ID NO: 870278 - DNA, 120 bp, Artificial Sequence
  ENSG00000268583_3 (sequence is synthesized)
aaaataatgaaggaagagcaacagaaatgtggtctgttttgagacatgagttcggaaacttacactgtgtggagcctgacaatgaagccaacaatatggaaggcgggacgaagacatgga

SEQ ID NO: 870279 - DNA, 120 bp, Artificial Sequence
  ENSG00000268583_4 (sequence is synthesized)
gaaacattcctcccttgtgatgttgtttgagcccatgaatcagcctccctggagtcagtcccacatctcttccttgaactcgcctgagccatgacactcttgataatttcactccattta

SEQ ID NO: 870280 - DNA, 120 bp, Artificial Sequence
  ENSG00000268583_5 (sequence is synthesized)
agttggactttctgtcatttgccacacaagactttacacagatccagaggacattgcagattgctgccttgggtgatttttaaaattaacgtggacatgaagtcatcaggagacaaggag

SEQ ID NO: 870281 - DNA, 120 bp, Artificial Sequence
  ENSG00000268583_6 (sequence is synthesized)
atcaggagacaaggagttccaaacctggatttattgcttactagatgatggaaacttggtcctctcagtgttaactctattttatttatttacttatttatttatttattttgagacaaa

SEQ ID NO: 870282 - DNA, 120 bp, Artificial Sequence
  ENSG00000268583_7 (sequence is synthesized)
ccaactctttatattaaataatgtaaataattttttctctgctatatactaattccagtgtccttaacagatccttggctgatatctgctcttcacttttacaacagccccaccgttccc

SEQ ID NO: 870283 - DNA, 120 bp, Artificial Sequence
  ENSG00000268583_8 (sequence is synthesized)
cacttcctattcattcccaacccacactcaatcatccacgctgttttgaagagccaacacattgttatccatcctttaatagttactcttgcctttccgtctaaagtccaaaatatttca

SEQ ID NO: 870284 - DNA, 120 bp, Artificial Sequence
  ENSG00000268583_9 (sequence is synthesized)
acttttattcttggactttcaactgccagctcttgactatccttctcatgtcacctttactctgtccctctaacagtttaattcacagccatatcaaactactttaacttagagttcccc

SEQ ID NO: 870285 - DNA, 120 bp, Artificial Sequence
  ENSG00000268583_10 (sequence is synthesized)
agacgcaagatattaaatatttacccccaataatttgctgttgtatgctcttttgtgtctacatgatgtcctcacgcccttctgggactaaatcatactcattgtctgtatttatgacat

SEQ ID NO: 870286 - DNA, 120 bp, Artificial Sequence
  ENSG00000268583_11 (sequence is synthesized)
cagtcattcttggcagatgacaaggatggaaggaatggagccttgctgagagatgctgttacagcaggcagctcgtcagatatgagcagggcaggagaggactcctcaccccaccagaaa

SEQ ID NO: 870287 - DNA, 120 bp, Artificial Sequence
  ENSG00000268583_12 (sequence is synthesized)
tgtcaggcaaccatcaggtgatggtcaggcagttgttacaccgtctctctaaaataataattggttgcagccggcaccagggaaaggccgtctcctgacagagagaaaacacctgaaact

SEQ ID NO: 870288 - DNA, 120 bp, Artificial Sequence
  ENSG00000268583_13 (sequence is synthesized)
ggtgatcagcagcttcccaataagatctcgggaactgggccagtgggctcaagaatgtgcattaagagcagagtttaactggcctataacctcttacggaggttgagctggtaagggaag

SEQ ID NO: 870289 - DNA, 120 bp, Artificial Sequence
  ENSG00000268583_14 (sequence is synthesized)
aatgcctcaagtgagcatgcgtatgactccaagaaacacactgcgcatgctccccttccaagcccctgcgggccactatgcaggcgaccagcccaccccaggggaagaatcagggaagaa

SEQ ID NO: 870290 - DNA, 120 bp, Artificial Sequence
  ENSG00000268583_15 (sequence is synthesized)
gggatgcaagaccccggaagtgtgccaacatattaaaccccaagtcaaaaggtcaaaccgtgcacttgtctttcaagtcaccccctcggccgtcttccaagtgtactttcctccttcctt

SEQ ID NO: 870291 - DNA, 120 bp, Artificial Sequence
  ENSG00000268580_0 (sequence is synthesized)
gcctgtggctttcaacaaatatggtggtgggatggtcaaaatcatgatccttctcaaattccaatttgaaatattctttcaacagatgtgtcctatagtgtttgctacagactgagttct

SEQ ID NO: 870292 - DNA, 120 bp, Artificial Sequence
  ENSG00000268580_1 (sequence is synthesized)
atagccccaaaatcatatattgaagccttaacaccccgtacctgaaaatgtgaccatttggagataagacctttatagaaatagttacattacaatgggattattaaggtgggccctaat

SEQ ID NO: 870293 - DNA, 120 bp, Artificial Sequence
  ENSG00000268580_2 (sequence is synthesized)
ctaatatgactagtgttcttacaagaatagaaaatgagaatatagacaacataaagaggcaccatgtgaaaacactgaaagaaaacagctatttacaggtcaaggagacaggcctcagaa

SEQ ID NO: 870294 - DNA, 120 bp, Artificial Sequence
  ENSG00000268580_3 (sequence is synthesized)
ttgagtctttcaggatgcagaggctgtcggagaatcacagtaactcgccatacatttggatgcctctgacaccgggtagaccatatgataacctagtgctcaggaagtattcaggtttct

SEQ ID NO: 870295 - DNA, 120 bp, Artificial Sequence
  ENSG00000268580_4 (sequence is synthesized)
tcctaaataattatactcttgaaaactttaaaattatgtcccgtgaacagaataggtagcttcatttggggtcactgtgtatcagtaactaaatgtctttttaatctttgtttctaattt

SEQ ID NO: 870296 - DNA, 120 bp, Artificial Sequence
  ENSG00000268580_5 (sequence is synthesized)
tggaatgaagtctttagaaactgaaaaccacagggtagtgaaatgtaacctttttcttactcatttcttatttgaaatatgcttgaagttttggaaaatcaacaaaaaactaattgaaaa

SEQ ID NO: 870297 - DNA, 120 bp, Artificial Sequence
  ENSG00000268584_0 (sequence is synthesized)
accagctctcgcgacactttccttggccatggcgagagcacacgagaagagactctcgcaagaaagtaaatgagtcaggctggaaacagcgaagtatatctcgcgatagcactgtttaaa

SEQ ID NO: 870298 - DNA, 120 bp, Artificial Sequence
  ENSG00000268584_1 (sequence is synthesized)
atggcggcttcaaggcgtttcacgggtgtcccggacaggcgtggaggtggggcgcaggcgaggatgaagcttgagttggccaggagtcggaaaacgattgcaggcgggaccgcgtccgtc

SEQ ID NO: 870299 - DNA, 120 bp, Artificial Sequence
  ENSG00000268584_2 (sequence is synthesized)
ggggctgaggaaacttagcgtggcagaccctaaactgggataactttagggatatggccttcttttcccagttgcctcaaacttagagcagcgtcgtctttagccgaagattcattttcc

SEQ ID NO: 870300 - DNA, 120 bp, Artificial Sequence
  ENSG00000268584_3 (sequence is synthesized)
cccttccatcaagaacttttcatcgttctttccccaccctggtttgtaaatggtatttggcttcataaaaacgtttgtccacaggtgccctgctccatcagttcgctccagcaatatagg

SEQ ID NO: 870301 - DNA, 120 bp, Artificial Sequence
  ENSG00000268584_4 (sequence is synthesized)
aagttaccaaaaaaaaaatttttttttattgaccttggatgcagaaaggaaccgcgttggtgtgtgatttgaattttggacttcttgtttcctgccttgtggccacgtcccccttacttg

SEQ ID NO: 870302 - DNA, 120 bp, Artificial Sequence
  ENSG00000268584_5 (sequence is synthesized)
gtgactctcagcacttagttgtggggctttttctctctgctctcagacaactataaaagcagactaattgaacagcatctagaacagaaggtggatgtaaagaacattggtcggccgggc

SEQ ID NO: 870303 - DNA, 120 bp, Artificial Sequence
  ENSG00000287018_0 (sequence is synthesized)
gctagtttctcctcattgcacaacagtatgactgctacagagacagcaaacagaggaaggggagaatgggttacaatcaggtacttggctaggatcaagactggatactttcggcttgga

SEQ ID NO: 870304 - DNA, 120 bp, Artificial Sequence
  ENSG00000287018_1 (sequence is synthesized)
tgaaaaacagaagaagctgtgactactcagagccagggggacagccagaccaaaaattgttggggaaaaaaggaagctcaaaggccaaaagatagaagccaagtgtcaaatccaagaaca

SEQ ID NO: 870305 - DNA, 120 bp, Artificial Sequence
  ENSG00000287018_2 (sequence is synthesized)
aaaggcaagaatcaatgcaaggatcaaaaagccccgtgaccttgatgtcaaaattcgagctgatcagagccaacccagcaggaaatgggtttctagaagaactgtctcagatatgtctgg

SEQ ID NO: 870306 - DNA, 120 bp, Artificial Sequence
  ENSG00000287018_3 (sequence is synthesized)
gccttcatgatcccctgtaaggaccagcaggtatatgatacctgggaagatgacaatggcttccaagactgaggttgggcagaccaccaaagatcccaaaataaaagcaaaggtttaaat

SEQ ID NO: 870307 - DNA, 120 bp, Artificial Sequence
  ENSG00000287018_4 (sequence is synthesized)
ttaaataactagcatggcaagaagcaaagtactcattgcattatgaaaatctgaaagtagaatttctcttggtgcagcaaaggatctctagtaagaaataacatgagaaaacataggtgt

SEQ ID NO: 870308 - DNA, 120 bp, Artificial Sequence
  ENSG00000287018_5 (sequence is synthesized)
tatgatcgttataaaggttgatgattcttaagtacattcgaggatgctaaagttctaacaatgttcaggtgcagggatcaagtgtcttttacataatccttccaccagaagacatcaagt

SEQ ID NO: 870309 - DNA, 120 bp, Artificial Sequence
  ENSG00000287018_6 (sequence is synthesized)
ttaactgaaattcaaatctgaacaataggacaaccatctggaaaataacgctgcaaaactactacacagcaagtaagtcaatctgcaaagctgcaatgaagtaaaaccgactgaagagta

SEQ ID NO: 870310 - DNA, 120 bp, Artificial Sequence
  ENSG00000287018_7 (sequence is synthesized)
tgttatgtactgtaggctataccaatctgtgcatgtgaataactgtcaatatcccaacctaaaataattttaatgatgggaataaacattaaatatttaccagctggtgcaccactagat

SEQ ID NO: 870311 - DNA, 120 bp, Artificial Sequence
  ENSG00000287018_8 (sequence is synthesized)
caatgggctcatctccctcccctgagtacacacaataataaatgaatagacttgggcttccaacagcaagaaaaagattgcctcaaaattggaaatcaatgataccactatggttacatc

SEQ ID NO: 870312 - DNA, 120 bp, Artificial Sequence
  ENSG00000287018_9 (sequence is synthesized)
taacagagaaaaaaaagctaaagggaagtttttcttatgtttgctttatttactttctaattttcaaaatgaattttgacagaagtccttggccatttgtactttttaaaagaacatgtt

SEQ ID NO: 870313 - DNA, 120 bp, Artificial Sequence
  ENSG00000287018_10 (sequence is synthesized)
gttccaaactaacaatgtctcctaatatgaaatccagtttctgtcaatctgtccataaaaatattttaggtttagatttttcagtttatgtctggtgctaagaaaatgtatgacaattaa

SEQ ID NO: 870314 - DNA, 120 bp, Artificial Sequence
  ENSG00000287018_11 (sequence is synthesized)
accgattgagagggaacaggagatggggttacaggacatagtgtcataggaacaagtaaaataaaaacacgttttaaaatgttaaaatttaatctctattttattctattaaattttgtg

SEQ ID NO: 870315 - DNA, 120 bp, Artificial Sequence
  ENSG00000287018_12 (sequence is synthesized)
ccttataagatatgctgaaccaagtgttcccaagttatgacttaccatggaaaattctgatgtgaatgttttctcttagaaataaagctattgagctgtaagagttgatataactattgt

SEQ ID NO: 870316 - DNA, 120 bp, Artificial Sequence
  ENSG00000287018_13 (sequence is synthesized)
cttttaagtttatttgagcaaatggttgatagtaagagctccactaaaataccgagttggttcatttacacatcccttcaacctactcagtgagggactgtcagccttccagcagcatga

SEQ ID NO: 870317 - DNA, 120 bp, Artificial Sequence
  ENSG00000287018_14 (sequence is synthesized)
tgataacacctccatggctgttatcctcttcatcctagtcaagtggcactgtgacaaaacctaagaaatacctgataggatatgctggcacttcagccagaaatttttcccctgactact

SEQ ID NO: 870318 - DNA, 120 bp, Artificial Sequence
  ENSG00000287018_15 (sequence is synthesized)
gcattcttactatctgaatcaaaaaattggaacaagtcaactctaaggatgagacaacaataacagatggcatcaaggggacacttgggttgaatcagaaaatatgtctcccttttgaga

SEQ ID NO: 870319 - DNA, 120 bp, Artificial Sequence
  ENSG00000287018_16 (sequence is synthesized)
aaagaattggcactaatcaaagggaaatataaattacaatttggtacaagcaaggagtcctaggaagtagaagccatttcagagccctaaaaatactttatttcttcagttgctattttg

SEQ ID NO: 870320 - DNA, 120 bp, Artificial Sequence
  ENSG00000287018_17 (sequence is synthesized)
aaaattgcttttccctgtataatattcagtaggattcagataatttgaaaggagcaaaaagccttgttagctcttttctatatcataaaatccattctttgtcattttacatattcatcg

SEQ ID NO: 870321 - DNA, 120 bp, Artificial Sequence
  ENSG00000287018_18 (sequence is synthesized)
ctgtattttcttgggtgtaatatttttttaaatggtgtctgaaaagtgaaattatttttcacaaaaagaatgtatctgttatgattttcctggtaatgatttttgcacattatctatcat

SEQ ID NO: 870322 - DNA, 120 bp, Artificial Sequence
  ENSG00000287019_0 (sequence is synthesized)
ggacactgcccacaaggggcattgtgccatacagttgggcatagccccgaagttatgttacttttctgccaggaacttgcctacaaggagaacatcagaacatttctgcctcagcatata

SEQ ID NO: 870323 - DNA, 120 bp, Artificial Sequence
  ENSG00000287019_1 (sequence is synthesized)
ggttatatggctgtcatgcctttcattaccacagagtaagttttgacatttacctaggcacagctcacaggcatgataatgactctcatatgtggaccccacaagtaggagtaattttga

SEQ ID NO: 870324 - DNA, 120 bp, Artificial Sequence
  ENSG00000287019_2 (sequence is synthesized)
ctcttgtaacttgctttagaaacataagtgatgtcttagatctctttctggcgaaaaggtcacagaagattataacagcctcagataatttgcagcccttggcttgtacagagagtgtca

SEQ ID NO: 870325 - DNA, 120 bp, Artificial Sequence
  ENSG00000287019_3 (sequence is synthesized)
gaacagaacccagcagaaaggagaaattgtgagtctcatatgtacacccagctgactgtaaggactgtcaccatcttacatacatgaagccaactgtcacacatgaaaagaggacatgtg

SEQ ID NO: 870326 - DNA, 120 bp, Artificial Sequence
  ENSG00000287019_4 (sequence is synthesized)
tggtattgtaaatctcatctcgaatattctctcagtgtgactgtgatataaatctttgccaagcatctgtgtgatttgactctccaaactggttccagcccatatatacgggattgtgat

SEQ ID NO: 870327 - DNA, 120 bp, Artificial Sequence
  ENSG00000287019_5 (sequence is synthesized)
gtgacatatcactggatctaacacccaagtgatgttacattcttgcctggaccatgcacagagacatcattgtgacatatcactgtgtccaccacttaggtgatgtaactctcctctctg

SEQ ID NO: 870328 - DNA, 120 bp, Artificial Sequence
  ENSG00000287019_6 (sequence is synthesized)
gaatggaccctgaatacggagtggtagtgacatcttcctaggccagacacacaggtgttggtactctttttccagggctatgtttcaaggagggcattgtgacatatctctggacctatc

SEQ ID NO: 870329 - DNA, 120 bp, Artificial Sequence
  ENSG00000287019_7 (sequence is synthesized)
accgaggtgatatgattcaacgcttgggcctcaccgacgtagaacattgtgacataaaagttaaacctgcaccaaaggtgttgtaactctttcaccttggtcctgtcctaagggagccct

SEQ ID NO: 870330 - DNA, 120 bp, Artificial Sequence
  ENSG00000287019_8 (sequence is synthesized)
gcaacatatctcaggacccagcactcaggaacattgtgacatcgttggacatagcatctaggaaatgtgactcttctctcctgcctaggtcctgcccactaaaggaattgtgacatacca

SEQ ID NO: 870331 - DNA, 120 bp, Artificial Sequence
  ENSG00000287019_9 (sequence is synthesized)
ctgagtgcaaaacctaggtaatgcaactctcctctttattctggagtctgccaaaagaggggattgttacatattgctgagcccagcagctaggtgatgtgactctcctcttcttcttca

SEQ ID NO: 870332 - DNA, 120 bp, Artificial Sequence
  ENSG00000287019_10 (sequence is synthesized)
gccctgtctacagtggacatggtaccacatgacttgaggctgtatccaggtgatgtgactcttctgacttggccctgcctgcaaaggaaattataatatatcctgagctcagaatccagg

SEQ ID NO: 870333 - DNA, 120 bp, Artificial Sequence
  ENSG00000268055_0 (sequence is synthesized)
gtgggagtggggatcactccacaccgggactgcgaatctgggtctggaagtccgacaatatccagctggaaagagatctttaccatgttctctagcttctgcttcacacatggggaaagt

SEQ ID NO: 870334 - DNA, 120 bp, Artificial Sequence
  ENSG00000268055_1 (sequence is synthesized)
gaagcttagggaagggcctggcagctccccaccatggtagcctggagagccacagtaaaccatctatgcgctgaaatcaagaggaagcagaaatgaagagttggcagaagctaggacata

SEQ ID NO: 870335 - DNA, 120 bp, Artificial Sequence
  ENSG00000268055_2 (sequence is synthesized)
gcagagggtaggaaaaatcagccggcagcaagaggtgaataaaggcagacaacagtagaggcagattaattgggatcatcagagagctcctaaatctcccactgccaagttccccttaaa

SEQ ID NO: 870336 - DNA, 120 bp, Artificial Sequence
  ENSG00000268055_3 (sequence is synthesized)
ttctcaagtttttggttccactgtctggaattcataatgcaactcattcttcaagtctatgacattttgcctcccttattgttctacattaattcttataataaattccctgttatttga

SEQ ID NO: 870337 - DNA, 120 bp, Artificial Sequence
  ENSG00000287017_0 (sequence is synthesized)
agcactgaatatccttgaccacgaggaaaacggatcagagactgaaacatgagtttcttgtcttaaaaagttgcagctgcctgttaaactgattgtggctgtgcacaggatcttgtgtgt

SEQ ID NO: 870338 - DNA, 120 bp, Artificial Sequence
  ENSG00000287017_1 (sequence is synthesized)
tttcaccacttactttgtggttccagagtagagcactgaatatccttgaccacgaggaaaacggatcagagactgaaacatgagtttcttgtcttaaaaagttgcagctgcctgttaaac

SEQ ID NO: 870339 - DNA, 120 bp, Artificial Sequence
  ENSG00000287017_2 (sequence is synthesized)
gagcactgaatatccttgaccacaaggaaaacggatcagagactggaacatgagtttcttgtcttaaaatgttgcagctgcctgttaaactgattgtgactgtgcacaggatcttgtgtg

SEQ ID NO: 870340 - DNA, 120 bp, Artificial Sequence
  ENSG00000287017_3 (sequence is synthesized)
ttttcaccacttactttgtggttccagagtagaggtaagtaacttaggtaaagggcctcagatcttttaagactggagttaagcattttctgcttaactgttggatctgaggactgcata

SEQ ID NO: 870341 - DNA, 120 bp, Artificial Sequence
  ENSG00000287017_4 (sequence is synthesized)
ctgctgattcattgcgataaaagcatgcaagaatatttctttcatgagcaagagaacctagacaaaaagttctgaaaactgccatgtaaaacccatgacacatgaggggatagcactcga

SEQ ID NO: 870342 - DNA, 120 bp, Artificial Sequence
  ENSG00000287014_0 (sequence is synthesized)
gaaggtctcccacacgttgcagcagcgggctgaagggctcctgaagcgcggccagagtggacgccgaggccaaggaggagccgagagctagcaagggctgctagcacattgtcacctctc

SEQ ID NO: 870343 - DNA, 120 bp, Artificial Sequence
  ENSG00000287014_1 (sequence is synthesized)
agtatggggagttcagaattgggattcttactgttgtaaaattcttcctgccactccatgtactgtaagaaatacatcatcttgataccaaaacctgtcagagacacaacaagaaaagaa

SEQ ID NO: 870344 - DNA, 75 bp, Artificial Sequence
  ENSG00000287014_2 (sequence is synthesized)
cttgataccaaaacctgtcagagacacaacaagaaaagaaaatttctggccaatatccctgatgaacatcgatgg

SEQ ID NO: 870345 - DNA, 73 bp, Artificial Sequence
  ENSG00000287014_3 (sequence is synthesized)
gcaaaagacaaagatgccacaatcaggcaagagaaagaaagaaaatgtattcagataggaagagaggaagtca

SEQ ID NO: 870346 - DNA, 120 bp, Artificial Sequence
  ENSG00000287014_4 (sequence is synthesized)
agggatgtgaaggacctcttcaagaagaatagaggcctcagaaataacaccacagatgtacaaccatctgatctttgacaaactggacaaaaacaagcaatggggaatggattctctatt

SEQ ID NO: 870347 - DNA, 120 bp, Artificial Sequence
  ENSG00000287014_5 (sequence is synthesized)
aaatggtgttgggaaaactggctagccatgtgcaaaaaactgaaactggactccttccttataccctatacaaaaattaactcaaggtagattaaatacttaaacataagacctaagacc

SEQ ID NO: 870348 - DNA, 120 bp, Artificial Sequence
  ENSG00000268056_0 (sequence is synthesized)
ccagcaggtagaagaggcccgtgggtttcttgctgatgagatggatgcagccgacattgtctgtgtagccgatgttgtgccacgtgatcccctcgccctgatattcctcctgcaggggtg

SEQ ID NO: 870349 - DNA, 120 bp, Artificial Sequence
  ENSG00000268056_1 (sequence is synthesized)
cctcctgcctcggtctcccgagtagctgagattacagtagagatgaggttttgccatgttagccaatctgatctcgaactcctgacctcaggtcatccgcccaccttggcctcccaaagt

SEQ ID NO: 870350 - DNA, 120 bp, Artificial Sequence
  ENSG00000268056_2 (sequence is synthesized)
cagagattcctgggaaaacattctcctacctctcatccttctcctgagacaccaggcgagacttttcaagcagatatttctcgacgacagctctgtcattaagagaaaaacagaaagaat

SEQ ID NO: 870351 - DNA, 120 bp, Artificial Sequence
  ENSG00000287012_0 (sequence is synthesized)
cccctctacggtgtccttgcaaagtgtggcagtcactacaggtttgaggaaggctctgtcgctgctctggccgtaggcacagcggactctggaggacactggagatgaacaaaccgtgtg

SEQ ID NO: 870352 - DNA, 120 bp, Artificial Sequence
  ENSG00000287012_1 (sequence is synthesized)
gatgccctcaagatgtgtacaactatagaacaggagatgggtacgaccatagaacaggagatgggagggtccaaccatggaccgggttccgccagtatgagccatgagccagttgaatct

SEQ ID NO: 870353 - DNA, 120 bp, Artificial Sequence
  ENSG00000287012_2 (sequence is synthesized)
gaatgcaaagaacaaggaccgactggagtcacaatgcttaacggaccaatgctttctgactcagctcctctctaccctgaataaagagaccctaatagttaggcaggagtatcatcaccc

SEQ ID NO: 870354 - DNA, 73 bp, Artificial Sequence
  ENSG00000287012_3 (sequence is synthesized)
ataaagagaccctaatagttaggcaggagtatcatcacccctgttcagcatgaagaagttacagaagatggac

SEQ ID NO: 870355 - DNA, 120 bp, Artificial Sequence
  ENSG00000287012_4 (sequence is synthesized)
tccagtttgaaaaagggctaagaaaaatgaagctggatcaccaactggcaattaaggagtgcacagcctacaattgccttgctcagttaaaaaaggccaccttttatgctagtaataatg

SEQ ID NO: 870356 - DNA, 120 bp, Artificial Sequence
  ENSG00000287012_5 (sequence is synthesized)
aatgatagcaatagtgataccttctcttttacaaagaagagaagggggacatgttgggaaaaagctgagtattgggaagaaagctgaggcagtgcttgcatgtctgacataatgtcctct

SEQ ID NO: 870357 - DNA, 120 bp, Artificial Sequence
  ENSG00000287012_6 (sequence is synthesized)
cctaggctcctaaatagattgtattcccatcatctcaagtaccagaacatgttccttataaatgctaaaccatcacagctatagatcaggcacctgcccttttgaccgccacattctcac

SEQ ID NO: 870358 - DNA, 120 bp, Artificial Sequence
  ENSG00000287012_7 (sequence is synthesized)
tctttgttggattaccaataaatagtgtgggctcccagagcttggggcctttgcagcctccccaatcgcgatggcccctggttccactttacttctcaaactgtctttttctcaaccctt

SEQ ID NO: 870359 - DNA, 120 bp, Artificial Sequence
  ENSG00000287012_8 (sequence is synthesized)
tggtgttgggtctgatcaccccaacgacctatattttgtgctaccctcttatctcattctgtgactaagaatgcctaacctcctgggaaggcagcccagtaggtctgagccttatttttc

SEQ ID NO: 870360 - DNA, 120 bp, Artificial Sequence
  ENSG00000287012_9 (sequence is synthesized)
tcctgggaaggcagcccagtaggtctgagccttatttttctcagtccttattcaagatggagttgctctggttcgaatgcctctgacacttagagctttgttgttgaaaactgaattata

SEQ ID NO: 870361 - DNA, 120 bp, Artificial Sequence
  ENSG00000287012_10 (sequence is synthesized)
tactgtactttttcttttctcttattgaaaaatcatcctactttgttgattattttctgtaacgtcttgaggtaatttaaaattccacctgtctccatcagagagacagggactcttgtc

SEQ ID NO: 870362 - DNA, 120 bp, Artificial Sequence
  ENSG00000268050_0 (sequence is synthesized)
ggttctcacaggctcgaacaatgctggtttcatgaaatgcaaccgaaggctgaaccaaggcagtgcaacttagaagcacacacacaaacaccacagctgaccaggaacttagtgcaaagt

SEQ ID NO: 870363 - DNA, 120 bp, Artificial Sequence
  ENSG00000268050_1 (sequence is synthesized)
ctccaacgcagtcggcggtcccggcccctccctcccccggggccgccggggatccagagggactcgggagagcggaacgtcgggcttcccgggtctgacaactgattggaatcggcttcc

SEQ ID NO: 870364 - DNA, 120 bp, Artificial Sequence
  ENSG00000268050_2 (sequence is synthesized)
agccctccctcacgtggtaggctcctcgctaaacaccactgcaatcactacaataaaaagaaaaaaaggagtaggagaaacacaaagcatacttaaataggcgctttttctctctgcaaa

SEQ ID NO: 870365 - DNA, 120 bp, Artificial Sequence
  ENSG00000268050_3 (sequence is synthesized)
aataaagtccaagattttagatttcttttttttttattttacaatttataaaacatcagccgcctgcccccgctcgcccccagctcagccccgagtggcggccggggcgcgagggtcccg

SEQ ID NO: 870366 - DNA, 80 bp, Artificial Sequence
  ENSG00000268050_4 (sequence is synthesized)
cagcggcagcggcgcaggacccggctgcagaggctccaagggctgcccgcggtggggcgcgccgtgcggcggctggagcg

SEQ ID NO: 870367 - DNA, 120 bp, Artificial Sequence
  ENSG00000287010_0 (sequence is synthesized)
tattaccttccatattcataagtttttctatctggaataaaccaggaagtagtggaaaatgtgcaagaaatctctccagatgtgtttctagagcaaagaggttggaaccaagagatcttg

SEQ ID NO: 870368 - DNA, 120 bp, Artificial Sequence
  ENSG00000287010_1 (sequence is synthesized)
aaccactgactaacctcggataacttctgaggttaacccacccatccagtgaagatgcaggccttcggactgcaggccttctctcctaggggtcttttcccacccccacactcaggagcg

SEQ ID NO: 870369 - DNA, 120 bp, Artificial Sequence
  ENSG00000287010_2 (sequence is synthesized)
tgtacagatgttccctcttcctccaagaaagtgtacctgaaatatgccatacgtgtgcccaggagccacagccacaagcagggacatctcaacctcaggacctctgcatggcatcatcaa

SEQ ID NO: 870370 - DNA, 120 bp, Artificial Sequence
  ENSG00000287010_3 (sequence is synthesized)
taaacaggaagcatagaaccccaggtgctgtcaggagctacctgacaaccacatgggaaatcattccgaaggtgaaactgccacagagagcgagagacacagccccggtgactttatcaa

SEQ ID NO: 870371 - DNA, 120 bp, Artificial Sequence
  ENSG00000287010_4 (sequence is synthesized)
cctctggaacaaactagcctgaagcccttcctatctcttgactttacaggtcacatagcaccagagctcagcatcttcagcttctcaataaataagagagtgcatgaaaagcagcaatat

SEQ ID NO: 870372 - DNA, 120 bp, Artificial Sequence
  ENSG00000287010_5 (sequence is synthesized)
acaggtaatccttaaaaaggaaagcttctcccttcttccctttcctgttgcagtcaaagcaatttcacctacaccatcaaaagatggatttctagattgctcatggagaaatatacttgt

SEQ ID NO: 870373 - DNA, 120 bp, Artificial Sequence
  ENSG00000287011_0 (sequence is synthesized)
gcgctggcaggaggagcggcttgcgaaagggcttggcgggagaggaagagagaagctgagtgtcgcggaggctgagagggaggagggggagattgctgcgccactgatacagatttaaag

SEQ ID NO: 870374 - DNA, 120 bp, Artificial Sequence
  ENSG00000287011_1 (sequence is synthesized)
tgacagccacaacgaaatgtagtacggtggaaaaaacaatggagaaggaggcagaaaatgtgagttctaggactggagctaccggtaactagaaggtgactttgaacaagtcaattgcct

SEQ ID NO: 870375 - DNA, 120 bp, Artificial Sequence
  ENSG00000287011_2 (sequence is synthesized)
gatttcagtgatttctgactatgatttcactaaaagcaactgcaagaagaactatatcatcaactagctatatcttctttaattgattttggaaggcacaaagaataagtttccagaaaa

SEQ ID NO: 870376 - DNA, 120 bp, Artificial Sequence
  ENSG00000287011_3 (sequence is synthesized)
aacaagaacatgatcatggatctttttaatactatcccattgttgttttccagtggcctccttgccttgatatttagcccatcaaatctctgggcacaagggactgctctttattcaatc

SEQ ID NO: 870377 - DNA, 120 bp, Artificial Sequence
  ENSG00000287011_4 (sequence is synthesized)
ctgtcataactctgcaaaaccttccccttctgatctcctctcggttgtgaatgatccctggaaatacttcggggagtactgggaactgacaccggcagagctgaccaatggggctatgag

SEQ ID NO: 870378 - DNA, 120 bp, Artificial Sequence
  ENSG00000287011_5 (sequence is synthesized)
aaaccttgtcccattctggctgagggtgctgaagtaggaaggcgtgttggaactactgagagcagagaactcaacacacacaaagaatccaaaatttgcttttactcggagtcctgagaa

SEQ ID NO: 870379 - DNA, 120 bp, Artificial Sequence
  ENSG00000287011_6 (sequence is synthesized)
gttctaattacacactgttctaacaagaacaagcagcaaagatggcacataacttacccaacgtaccagcagtctacccaactgttctctgtcttcaggaactccttttctctgttcatt

SEQ ID NO: 870380 - DNA, 120 bp, Artificial Sequence
  ENSG00000287011_7 (sequence is synthesized)
atgtattctttattcattgaactttacgtgaaaataaacatcccaagattcccacaattggttcaacataaatgaataagaggactgacttcagccaggagttctcaaagactggtctaa

SEQ ID NO: 870381 - DNA, 120 bp, Artificial Sequence
  ENSG00000287011_8 (sequence is synthesized)
gggagcactccatgtcactctgatgcacgtggagctgcagaaccactagactaaatgatttatatagtcccttctgtttctgtcacttgacactattctgagtaaatatttaccaagggc

SEQ ID NO: 870382 - DNA, 120 bp, Artificial Sequence
  ENSG00000287011_9 (sequence is synthesized)
tgtgccccaaggggctcgcagtctatctgaggagttagcatgtaataagaattgcatggtaccttgaattcattctctttatcttttgtgcctttgtgaaatggtcggtcatagcggaat

SEQ ID NO: 870383 - DNA, 120 bp, Artificial Sequence
  ENSG00000287011_10 (sequence is synthesized)
ttccagatgtgattcactttatagaagcttttgatgttgtccggaacaccctctctctgcaggacctcctggctctctggaatgggagtcacagcatatatctgcaaatctaggattcaa

SEQ ID NO: 870384 - DNA, 120 bp, Artificial Sequence
  ENSG00000287011_11 (sequence is synthesized)
gagtcaaggagagaacctgacttggcaaactccatggaagtctggcttgggctgagctatggcagagagaagaggatgggtaacaatcttctgtttccatttcagttgaagtcattaaaa

SEQ ID NO: 870385 - DNA, 120 bp, Artificial Sequence
  ENSG00000287011_12 (sequence is synthesized)
aaattaccaagaagacgccaggaactcagttctagcaaatcacttctcaaactacaggtcttgaactagttctaggtaggtgaagtatcagcttgaaatttccatgacttgaaaattttc

SEQ ID NO: 870386 - DNA, 120 bp, Artificial Sequence
  ENSG00000287011_13 (sequence is synthesized)
atgacctatgaatttagatatcactaacttgtgtgtgtgtatgtgtgtgtaggtagatgggaatggtttgggccttagatactcagaattaggataatcctaatccttgttcatgagaca

SEQ ID NO: 870387 - DNA, 120 bp, Artificial Sequence
  ENSG00000287011_14 (sequence is synthesized)
tctattagtctgtgcatgacacatttaaatttattgtttgcttataataacatgtaaatacctatgcaaccatgaccaaagacagaaactagaacactgacgatgacttacatttatctg

SEQ ID NO: 870388 - DNA, 120 bp, Artificial Sequence
  ENSG00000287011_15 (sequence is synthesized)
tgtgattatctgtgtccctagccttcccacatctgtgataactgctgtcccaaatcttgtattcatatgcagggtgtttagttatagtttatatttttaaaaattacattaaaggagtat

SEQ ID NO: 870389 - DNA, 120 bp, Artificial Sequence
  ENSG00000287011_16 (sequence is synthesized)
actcagttctagcaaatcacttctcaaactacaggtcttgaactagttctaggtgcggatacactgagcttctgcctggaagatggtctcatcgggctggttggcgtgctgcatggcgat

SEQ ID NO: 870390 - DNA, 120 bp, Artificial Sequence
  ENSG00000287011_17 (sequence is synthesized)
ggcatgggggaactcgttcagcattctctgttggaaggcttccagcctctcgtagtcatgccctcgacacacaaactccttattctggagatgaaagcaaaaaagaaattagggctatat

SEQ ID NO: 870391 - DNA, 120 bp, Artificial Sequence
  ENSG00000287011_18 (sequence is synthesized)
aactgagtggattacagacagagccaaaaaacatgacactggcagtaactgaccacatgccccataccaagacactataacaaaaattacgctggaacaatctgaaaagtttgcccaatt

SEQ ID NO: 870392 - DNA, 120 bp, Artificial Sequence
  ENSG00000287011_19 (sequence is synthesized)
gttaaaaatgcagataaagatcatgagttcactctctactgcatttaataaggcccaatagaatgcctcactcttcccggttcacttgcatgaggtgcaaagaggtggattctcagagca

SEQ ID NO: 870393 - DNA, 120 bp, Artificial Sequence
  ENSG00000287011_20 (sequence is synthesized)
ccaaagtatgaaaacaaaacaattgtatccctctaaatgttaataagcacatgtgtaaagattatttttataaagtacatatcaaattcatgtgggtaatttcacaatttggaggaaaag

SEQ ID NO: 870394 - DNA, 89 bp, Artificial Sequence
  ENSG00000287011_21 (sequence is synthesized)
ccgttcatgatgctctccttcagttaagaatggtgaaggttatttctgaggtaggttaagacagctggaaagatgggaaggtttccaaa

SEQ ID NO: 870395 - DNA, 120 bp, Artificial Sequence
  ENSG00000287011_22 (sequence is synthesized)
attagatatgacggatctctgacattttaatgataatgaagttgtaattgagcacagtcattgatgaagcacactgcatgtcttatttaactcatataagcttgagaggtagtcagtgcc

SEQ ID NO: 870396 - DNA, 85 bp, Artificial Sequence
  ENSG00000287011_23 (sequence is synthesized)
tcttatttaactcatataagcttgagaggtagtcagtgccccctacaacaccccattttataattggggaaccagggcttaaagt

SEQ ID NO: 870397 - DNA, 120 bp, Artificial Sequence
  ENSG00000287011_24 (sequence is synthesized)
ggctggcatgcagtggtatgatctcagcttactgcaacctccgtctcccacttcaagcaattcttctgcttcagcctcccaagtagctagaatgacaggtgtgcactaccatgcccagct

SEQ ID NO: 870398 - DNA, 65 bp, Artificial Sequence
  ENSG00000287011_25 (sequence is synthesized)
tgatctgcctggcttaatgtcttgaaatactttgtccacgtgtactagattgaaattctggtctg

SEQ ID NO: 870399 - DNA, 120 bp, Artificial Sequence
  ENSG00000287011_26 (sequence is synthesized)
aatactttgtccacgtgtactagattgaaattctggtctgagtccaaaccctgggctctttctactctgaacatggcctagtgtatgcaggaaaaacacctaggagctaccaagaccagg

SEQ ID NO: 870400 - DNA, 120 bp, Artificial Sequence
  ENSG00000287011_27 (sequence is synthesized)
aaaacttgtgggatctcaggccctggagatcttcaagttaaggggagatcagtttggggcctagaggagctgaggtccaaggttttctctgtttttccgctctatgaggttcttatgtaa

SEQ ID NO: 870401 - DNA, 120 bp, Artificial Sequence
  ENSG00000287011_28 (sequence is synthesized)
aacgccgtaaagagggactccaggccacagagagggagtgagaaacaagtcatgggcagaggctcagttcttccgcagggaaagggcagctgcaggcaggtagaggaaatacagcaggaa

SEQ ID NO: 870402 - DNA, 120 bp, Artificial Sequence
  ENSG00000287011_29 (sequence is synthesized)
ctgggctggataacctacctcggttccccacaaacccctaaatatatcatgatcttttgaaaaacacaaggttagggcaggctctacctataattgtggaccccatacaattctagattt

SEQ ID NO: 870403 - DNA, 120 bp, Artificial Sequence
  ENSG00000287011_30 (sequence is synthesized)
aaaactttatagataaaagttacaatttctgatgctgtattttaaaaattctactcaaaagataattaatttgcttggtaaaataaaacacaatacatccctctctgcctattacaggag

SEQ ID NO: 870404 - DNA, 120 bp, Artificial Sequence
  ENSG00000287011_31 (sequence is synthesized)
cccccaaataaatatttgaatatcctagtaaatgaaatatattttaaaacaaacaatgcttatatatgacagtttgtaaaaatcggggcatttgctctaagaatacaggcattcaatggt

SEQ ID NO: 870405 - DNA, 120 bp, Artificial Sequence
  ENSG00000287011_32 (sequence is synthesized)
attaagaagccattttaaaataaaatgaaattttgggtctgatatttgggtctctaagaaataaagcatcttccttatcagtactctttttttttctaaaaaaacacatagatttattga

SEQ ID NO: 870406 - DNA, 120 bp, Artificial Sequence
  ENSG00000270457_0 (sequence is synthesized)
catagagatatagacacagacgcaaatacagtcacatagagatatagacacacacttatacacacatatatgtaaatatacagtctcattcactttataccacacatgtataaacataca

SEQ ID NO: 870407 - DNA, 120 bp, Artificial Sequence
  ENSG00000270457_1 (sequence is synthesized)
acacatgcatctttaaccagaacaactttacttttgtcagttttatatgacagagtctttaaaaaaagatttcatctggcttgtgttctactattaaaagagaaaatgaatttgcttgtt

SEQ ID NO: 870408 - DNA, 120 bp, Artificial Sequence
  ENSG00000254066_0 (sequence is synthesized)
attcaacaggaagttgagactgccacctgaacactttgggctcctcatgcctctgaatcaacgggcaaagaagagagttatagatcctaaccacccaggagaaattcggtggccactaca

SEQ ID NO: 870409 - DNA, 120 bp, Artificial Sequence
  ENSG00000254066_1 (sequence is synthesized)
caaacagagtaagaggagcatttctatgatgcgggagatcctctagaatgtttgttggtattcccaggtcctgtgattaaagtatgtggaaaactatagcagcccaattcaggatgtttc

SEQ ID NO: 870410 - DNA, 120 bp, Artificial Sequence
  ENSG00000254066_2 (sequence is synthesized)
cagatacttcagtaagtgagaactgtgtcactacgccacattgaccagttgagaggctagctcagtgcaaagaaaatatgaaatgagtaggggaagaaggtagctataaacatcagttat

SEQ ID NO: 870411 - DNA, 120 bp, Artificial Sequence
  ENSG00000254066_3 (sequence is synthesized)
ggccacatgaccaattatagaaacaagactagaatagtcttttctgactctgcggccaggtgtttgtatttaactccacggtgaggagactcatcttctgacggacctaacctataccat

SEQ ID NO: 870412 - DNA, 120 bp, Artificial Sequence
  ENSG00000254066_4 (sequence is synthesized)
caagctccagcaccacaagcaaagacaaaaaccttgcggaaactatttaactaactcccacaattgcataagaagagtcatgatcctaagaacagaagggagatccctgttgctttgact

SEQ ID NO: 870413 - DNA, 120 bp, Artificial Sequence
  ENSG00000254066_5 (sequence is synthesized)
acaggtaaactaaagcctgggctttttcaccagaggatgtggaaaagaggcttcaggaaattgagaagtattatggagattgcaaaaatgagggagctgaagaaagagttagaatgacag

SEQ ID NO: 870414 - DNA, 120 bp, Artificial Sequence
  ENSG00000254066_6 (sequence is synthesized)
tgaatgtgagaagagagagagatgaataccacgaagttgcgtatgtactgctggactataccctgaactgagcatgtaaacatctgaccacagatggtataataaggctttgaaaactaa

SEQ ID NO: 870415 - DNA, 120 bp, Artificial Sequence
  ENSG00000254066_7 (sequence is synthesized)
gctacaataaagaccatcacccaggccaaaaattgctacttggaaatgcacacacagactgatccaaatagcattgaaaacacttaaagaaatggtgcagacattggagtcacaatccaa

SEQ ID NO: 870416 - DNA, 120 bp, Artificial Sequence
  ENSG00000254066_8 (sequence is synthesized)
agaaggcagatcagagtttgttccataagcctgaataggttgattgcttaatataagaagaaaatcaacctttttcttatgatttaagacataatcagagtctcataacatattctcaaa

SEQ ID NO: 870417 - DNA, 120 bp, Artificial Sequence
  ENSG00000254066_9 (sequence is synthesized)
atgcccaggatataatttaaaattatttggcatatgagaaaccagtgtgatcgtctcttaactcttaaagaaaaagacaattaaaaatatcacaatcaaaatgacaggaatgttgtattt

SEQ ID NO: 870418 - DNA, 120 bp, Artificial Sequence
  ENSG00000254066_10 (sequence is synthesized)
atcagataaagacattaaagagatattataaccatgctctaacaggcaaatgaaaagactcataatgaatagaaaaatagaaggtctcagcaaagagaaagaatatatgaagatgaaaaa

SEQ ID NO: 870419 - DNA, 120 bp, Artificial Sequence
  ENSG00000254066_11 (sequence is synthesized)
acctgaacactttgggctcctcatgcctctgaatcaacgggcaaagaagagagttatagatcctaaccacccaggagaaattcggtggccactacacaaacagaatgtattaatagtaat

SEQ ID NO: 870420 - DNA, 120 bp, Artificial Sequence
  ENSG00000254066_12 (sequence is synthesized)
taaatttatatcatagtcttgaaattacaagatatccaacttgaagcatgcattgggagaagaataaatatcatccaaagacaaaaaaacaacaacacgacgttgtgttctactaaaagg

SEQ ID NO: 870421 - DNA, 120 bp, Artificial Sequence
  ENSG00000254066_13 (sequence is synthesized)
ggaaactatttaactaactcccacaattgcataaggatctaaatgaaaatatttctgcagtgaaccagttctattgttttaaatatcacccttattaaagagagctttgacacttttcta

SEQ ID NO: 870422 - DNA, 120 bp, Artificial Sequence
  ENSG00000254066_14 (sequence is synthesized)
ctattttcagatgtacttagaagagatacaccatgttaggtggaagtttgactttgtcatgatcttttgtgtagtctaagtatgatttaagatgtttatgagtgccaaattggtaaggag

SEQ ID NO: 870423 - DNA, 120 bp, Artificial Sequence
  ENSG00000254066_15 (sequence is synthesized)
tggattgtgctggctctgcaaactatgtcagcttggctgtactgggctacatttcccagagtacccttccctgtatatctccacttagggtgggccaagagagattcttgcaggcgattt

SEQ ID NO: 870424 - DNA, 120 bp, Artificial Sequence
  ENSG00000254066_16 (sequence is synthesized)
agtgggtggaagtaaagcaacaactattttatatcttgcacatatttttgtcagtctggttaaattattgatgtgaggcatgaggtggacctacaactagtgcaccttccctttgatatt

SEQ ID NO: 870425 - DNA, 120 bp, Artificial Sequence
  ENSG00000254066_17 (sequence is synthesized)
tgacggacctaacctataccatcaaggtcagaggcaacaagaaatggcatgcatttcagtttattgttctgtggctccagcttgtatattttaactctagatttttttttactttcccca

SEQ ID NO: 870426 - DNA, 120 bp, Artificial Sequence
  ENSG00000254066_18 (sequence is synthesized)
aagatgttgctacaaatccagatatcatggccatgttcacagcaagaatgagaaaaagggggcagctatatctgtactaatttacgaggaaagtcaccccacttcctccaatagactttc

SEQ ID NO: 870427 - DNA, 120 bp, Artificial Sequence
  ENSG00000254066_19 (sequence is synthesized)
ttctgagcctcactaacctcaactgcgtcccaagatcaccactagttgcaaaggcgaatgtcaaagcaggaaaaataattctcatgttgggttatgttaatcattatctatcttcctcca

SEQ ID NO: 870428 - DNA, 120 bp, Artificial Sequence
  ENSG00000254066_20 (sequence is synthesized)
taaaccaaagcagggtactctaagcaaggcagaaggagcaaatagatcctgagtgggcaaatagtgggatctgctacacagcatatgttaataaaggtggctgaatagtttattatctga

SEQ ID NO: 870429 - DNA, 120 bp, Artificial Sequence
  ENSG00000254066_21 (sequence is synthesized)
actggatggactaaataggataatggagataacagaggaaaagaggcagatgacttgaataccgatcatgagaaattaactatttcaaagaagagagtaaaaagagacttaaaaataaaa

SEQ ID NO: 870430 - DNA, 120 bp, Artificial Sequence
  ENSG00000254066_22 (sequence is synthesized)
gaaaaaatatctaaagaaaaatagccagaaacttccttaatttggcgaaagataaaatcttaaagatgcctgaggaggctcaggaaactctaaggagaagaagctacaaaaaatctacac

SEQ ID NO: 870431 - DNA, 120 bp, Artificial Sequence
  ENSG00000254066_23 (sequence is synthesized)
tctaaaacttctgaaattaaaaaacaaagaaaaaatttttgaatgcacccagaaactcaatacaaatggagaattctgatttgaatactgtatattttatataaggaaacatggtagtta

SEQ ID NO: 870432 - DNA, 120 bp, Artificial Sequence
  ENSG00000254066_24 (sequence is synthesized)
aggggaagtggaacaacattttttaagtgatgcaaaaaatgattctatattcagaaatctttatccagtaaaaatattcttgataaatgaaaatcaaataaagatattcctgatgaaact

SEQ ID NO: 870433 - DNA, 120 bp, Artificial Sequence
  ENSG00000272969_0 (sequence is synthesized)
gccgggaacggcgccggttactagaaagccggggaggcggggcctggtcgggtggagggcgcggccggccggcagagcgctagccttaggtcctggaggctctttggctttccccccgta

SEQ ID NO: 870434 - DNA, 120 bp, Artificial Sequence
  ENSG00000272969_1 (sequence is synthesized)
tgccgggggctaggaggaggaagaagagcttcctgccggatgagggatccagaggccagaaaaggaacccgctctcccttccaaagcaaaacactgccgacgccagcttagatttttcgg

SEQ ID NO: 870435 - DNA, 120 bp, Artificial Sequence
  ENSG00000272969_2 (sequence is synthesized)
gtgttggcaggagactttttcccccagtggcatcattcgtgtttcctctcctggtgctgggagagaagagttgcaaaggcgcctggaccgccagtaacatcttctcccatctcctgaggg

SEQ ID NO: 870436 - DNA, 120 bp, Artificial Sequence
  ENSG00000272969_3 (sequence is synthesized)
ctcggccagaggagggaagcgaaaggaggtcgggatttatttgctcatttggagatttttcccttgcccttttattaaaaatcaagtgacagtgtaatggaagatggagaatgaagcatc

SEQ ID NO: 870437 - DNA, 120 bp, Artificial Sequence
  ENSG00000272969_4 (sequence is synthesized)
agaaataaaccaggaccctaatttgcatggatttcctcgttggaacaacgtgtgactactacttatcttcgggaaattacttatcttgatgcgttaaggcacatttggtccacatgagaa

SEQ ID NO: 870438 - DNA, 120 bp, Artificial Sequence
  ENSG00000272969_5 (sequence is synthesized)
agcacatttcagtgcttctactggaaaagagatctttacagtcttaattcctagtaattcctatgttttaatgaatatcttttggatttgaaataaaagccatctttttctttcaaaaaa

SEQ ID NO: 870439 - DNA, 120 bp, Artificial Sequence
  ENSG00000272966_0 (sequence is synthesized)
agagtcttctctgcccactagaccccgacacaaccaacgccaatcacaccccgagcatagctgccccactatatacatttaatggatatttaactccctttctactgtttttttgtgtga

SEQ ID NO: 870440 - DNA, 120 bp, Artificial Sequence
  ENSG00000272966_1 (sequence is synthesized)
gtctttactgaaataattcagcatgatttttaaatttacttatagtgcctaccttatagcctgcattgtggtaaaaaccaaagcagctgaagaatgatccctgcttatgatgtaaaaatg

SEQ ID NO: 870441 - DNA, 120 bp, Artificial Sequence
  ENSG00000272966_2 (sequence is synthesized)
gaggcagaagacctaaatctaaggcaatatacaatttaatgtgacaaaattatgatatagagggtatgtaattgctgaaggaattccaaagaaaaaataaataaattctgacttagctaa

SEQ ID NO: 870442 - DNA, 120 bp, Artificial Sequence
  ENSG00000272967_0 (sequence is synthesized)
tcttggagcctccaaggcggcttcctggcaccgccgcgcccttctgcacccaagcgagagtggacgggacctccgtcgcccgccccaaatgctctgaagagcccggagcctggtgcccgg

SEQ ID NO: 870443 - DNA, 120 bp, Artificial Sequence
  ENSG00000272967_1 (sequence is synthesized)
cgtgctcacgtccgactttgtaggactgtagtggaccgggtgtgcccagatgcttgaagagcgtactgagtgtgccgcccttgccagggttctgggccctcacgcataaagtgggataat

SEQ ID NO: 870444 - DNA, 120 bp, Artificial Sequence
  ENSG00000272967_2 (sequence is synthesized)
aatatctgcctcttagaatggttgttaaggattcagttagttaattttaactagtcatttatttggcagcagcgtagaattcttgtatcctgatcgtaaataaaagcaaagaaaaacgaa

SEQ ID NO: 870445 - DNA, 88 bp, Artificial Sequence
  ENSG00000270187_0 (sequence is synthesized)
ccctgtctgcatctgtaggagacagagccaccgtctcttgccaggctagtcaaagcatttacaactgcacctaagttcctgacctata

SEQ ID NO: 870446 - DNA, 120 bp, Artificial Sequence
  ENSG00000270187_1 (sequence is synthesized)
taagttcctgacctatagggcatccagtttgcagagggcgatgccatctcagttcagtggcagcggatatggaagagatttcactctcaccgtcagcagcctgcagcctgaagattttgc

SEQ ID NO: 870447 - DNA, 120 bp, Artificial Sequence
  ENSG00000270184_0 (sequence is synthesized)
ccttgtgattaggctaaaaaaaattaataatgtttttaaaaaacaaattattttatatgattattgtattttcgttttcaaaattgacaaagtgatgtactgattataaatctgcagtat

SEQ ID NO: 870448 - DNA, 120 bp, Artificial Sequence
  ENSG00000270184_1 (sequence is synthesized)
taagaaaaatatgacttaaaaatgtgactgtgttaagaaaaatatgacttaagagggaaggggaggttttcaggtagaagccaatcgtactgaagaaagcagtgcgatggtggctcctag

SEQ ID NO: 870449 - DNA, 120 bp, Artificial Sequence
  ENSG00000270184_2 (sequence is synthesized)
gtacagagccctcaggaggcctgcccatgtacccacctctgcctgctcctgcatttgctgaggaacttggaaagcaaaaggcagggccgcttgccatgaagagcttgcaaagcccttacc

SEQ ID NO: 870450 - DNA, 120 bp, Artificial Sequence
  ENSG00000270184_3 (sequence is synthesized)
ctcctacttaacactgatcatgctggttgttgatttttattggggagagggtaaggaaacactcattaaaaagaaaaactaccattgcagatgctcaagaactcttaacatctgtctttc

SEQ ID NO: 870451 - DNA, 70 bp, Artificial Sequence
  ENSG00000270184_4 (sequence is synthesized)
tattcactgagatcatggctcactgcagccccaactgcccaggctcaagcgatatcaaacagaggacatc

SEQ ID NO: 870452 - DNA, 120 bp, Artificial Sequence
  ENSG00000270182_0 (sequence is synthesized)
tctccgatggagaatagagggagtaagacaaaaagaaaagacctaaataatcccagtcgcatcgccttctggaaggaaataaaaacccaagaaagttaaaggaagatgaagcaaacaaga

SEQ ID NO: 870453 - DNA, 120 bp, Artificial Sequence
  ENSG00000270182_1 (sequence is synthesized)
aggctaggagatcaaagaggcagaattagaccgttttagaccaataaatttttcctggggtgacacacagcaagacgcaaagagaaaagaccaaggcccccgccgccgccgtctgtctag

SEQ ID NO: 870454 - DNA, 120 bp, Artificial Sequence
  ENSG00000270182_2 (sequence is synthesized)
gtttaaagtagaacctgcccagtccaacagcccgagcagggagcgatttcggggatcgcgggaaggaacgcacttcgccaagggagggccgggtgccctcgccaccggctcattcctgct

SEQ ID NO: 870455 - DNA, 120 bp, Artificial Sequence
  ENSG00000270182_3 (sequence is synthesized)
ccggttttgcccgatgcgcgtccaggaggttctggcaggacgcactgcccctctgccccggccaaggaggatgcggatactgcccgcaaggcttcggcctttatggacccaagtcagcca

SEQ ID NO: 870456 - DNA, 120 bp, Artificial Sequence
  ENSG00000270182_4 (sequence is synthesized)
actgggccgagtcctgcggacaccgaaacctccctttcgtttccaggcttccttctcccctcttgccctctgtggtctgatttaaaacgaaaaggtcggataaaatcaggctttcaataa

SEQ ID NO: 870457 - DNA, 120 bp, Artificial Sequence
  ENSG00000232309_0 (sequence is synthesized)
atgacgcacagaaaaatgccaaccctggttccactggcacaagcttcaccttcattcactggagcctcagcccatagccacccagggaggcaggcagggtggtgttaaccttcccatctc

SEQ ID NO: 870458 - DNA, 120 bp, Artificial Sequence
  ENSG00000232309_1 (sequence is synthesized)
acaaatgagaaaactgaattggcatataaatgatttgtacatggttaagagttaagacttgaacccaggacttctgaccaactccagtacttttttttgcaagaatttatgttctgaaaa

SEQ ID NO: 870459 - DNA, 120 bp, Artificial Sequence
  ENSG00000232309_2 (sequence is synthesized)
cagcagccttttccacttgcctcctccgacctgcagtctgaattccattaccaggacagggcttgccccagggaggggacctccttctagagcattcaatgaagctgcaagattgagagg

SEQ ID NO: 870460 - DNA, 120 bp, Artificial Sequence
  ENSG00000232309_3 (sequence is synthesized)
agtattctgcatctttttaaatggcaaaataaactgttcaggtatccactgttaaggtagaggggaatgtggtgttgcaagaagaaaattgccctgctagcacagatatgagaagacaac

SEQ ID NO: 870461 - DNA, 120 bp, Artificial Sequence
  ENSG00000232309_4 (sequence is synthesized)
aactcccagagcatgcagtcagcaccattactttcccttaactccccaaggtgccctccttgcatttatctttctctcctacattgatcttcactggagaataaaaattagagacagtga

SEQ ID NO: 870462 - DNA, 120 bp, Artificial Sequence
  ENSG00000232309_5 (sequence is synthesized)
caaagaaccaccagttaccaggctttctgcctggacagcagccttttccacttgcctcctccgacctgcagtctgaattccattaccaggacagggcttgccccagggaggggacctcct

SEQ ID NO: 870463 - DNA, 120 bp, Artificial Sequence
  ENSG00000232309_6 (sequence is synthesized)
tgaccatttattacatacctgggatcctcttagatctgtcaaataggaatggtactgtggagctgcaccagctggcgtgtagcctcaacagcctagggtgctgcctagggaatagagggg

SEQ ID NO: 870464 - DNA, 120 bp, Artificial Sequence
  ENSG00000232309_7 (sequence is synthesized)
cttagaaaaagaggtgattcctctacagtgacacaccagaggcaaaaccgaggctcatttctacttgtattaatctctttttttttttcctgtaatctgtatgattgaaggattgagagg

SEQ ID NO: 870465 - DNA, 120 bp, Artificial Sequence
  ENSG00000232306_0 (sequence is synthesized)
catttttgcggctggcttccaacatgaactgacttatagcaaaaggagtttataagaagccttaataaccttgagaaatatcttacaatggacactttattgagatttgagagccaactg

SEQ ID NO: 870466 - DNA, 120 bp, Artificial Sequence
  ENSG00000232306_1 (sequence is synthesized)
ttacacattaactagcacaccactggagtcagcccaacaaatgattggaatcagttcctggtgtccttgccaaagcatcgagttttaaatcacagatgactgcccctgtgccaacgaatt

SEQ ID NO: 870467 - DNA, 120 bp, Artificial Sequence
  ENSG00000232306_2 (sequence is synthesized)
cttctccagccacccatctagcgttatgctccttcgccaccacactgcgaagaaccagcgtcacctgtgttccttcagctcctgctggcacacattagctttgcaattcctttggagaac

SEQ ID NO: 870468 - DNA, 120 bp, Artificial Sequence
  ENSG00000232306_3 (sequence is synthesized)
aggacagttctgaccagagctgagcatatgcctctctgctctagctacggtgaagcctgcccctggatgttggcatcaaggagcagtggtgagggcaggtcttgagaacaaacaccttgc

SEQ ID NO: 870469 - DNA, 120 bp, Artificial Sequence
  ENSG00000232306_4 (sequence is synthesized)
ccacccaatgccttgctctctggctgcacccatcataactgaccacaggtgaaaactccagtaatcataacgccactgtgtgatgaacggtcaccagcggtcagcaaactttttctgtaa

SEQ ID NO: 870470 - DNA, 120 bp, Artificial Sequence
  ENSG00000232306_5 (sequence is synthesized)
aaggacagatagactccatctgttgaggaggagcgagaagatgagtacacgggcagtcttcgctcccagctgctcttcacaatggaaccaccacagttcaggccccacaatcactgccgt

SEQ ID NO: 870471 - DNA, 120 bp, Artificial Sequence
  ENSG00000232306_6 (sequence is synthesized)
cgcaggtctaagtcactcgggctcctgcctctgccctcagccaggaaagcggtcactcaccgctcgaggggatgcctccaccctgaggtaacccaatcagacccctttgcctgtctcatg

SEQ ID NO: 870472 - DNA, 120 bp, Artificial Sequence
  ENSG00000232306_7 (sequence is synthesized)
cctgtaatcccagagctttgggacgctgaggcagggggacgatttgaggccagggacttgaggcttcactgagctatgattgcaccaatgcactccagcaagacctcatctctaaaagaa

SEQ ID NO: 870473 - DNA, 120 bp, Artificial Sequence
  ENSG00000232300_0 (sequence is synthesized)
tttctgtagagccggcgttttgccctgttgcccaggagtttttcctttaatgttctcctgctacttactaattcactttgtcaccctgtgagctcataagagcagagagatagcaacagg

SEQ ID NO: 870474 - DNA, 120 bp, Artificial Sequence
  ENSG00000232300_1 (sequence is synthesized)
agctaaaaaaactctaagctgtgaaaaaatattaaatatgaaatcatgatagctattagcttaatttgttttaggcaaattgcaaagtaattttttgggaatcagtgtcccactgcagtg

SEQ ID NO: 870475 - DNA, 120 bp, Artificial Sequence
  ENSG00000232300_2 (sequence is synthesized)
ctgcagtgattccatatggggattcctaattcccagtatgtttttaaaataatttgtaaacacctagtacaaacgcatgatatgaaattcaagaggtgggaggatcacctgagcccagga

SEQ ID NO: 870476 - DNA, 76 bp, Artificial Sequence
  ENSG00000232300_3 (sequence is synthesized)
ggtccttaagtccatgtggacccctgactaggtttgtgccctagacagccttcctctgagggcagttcaggtggtg

SEQ ID NO: 870477 - DNA, 120 bp, Artificial Sequence
  ENSG00000232300_4 (sequence is synthesized)
tgccctagacagccttcctctgagggcagttcaggtggtgagactccagctttaaatggcctctagagaaatttcactaacctgccttggtgtttgaccctgtataacccctttcttctg

SEQ ID NO: 870478 - DNA, 120 bp, Artificial Sequence
  ENSG00000232300_5 (sequence is synthesized)
gaggtccctttgggtggcagtagatacgggatttggtgtctgacagctctggggacagatcccagctccaaatggcagagtctctacagattacaagccaaatacttagcactatgtgct

SEQ ID NO: 870479 - DNA, 120 bp, Artificial Sequence
  ENSG00000232300_6 (sequence is synthesized)
gatcttcaggaagtcagtctatatttcataacaagtcacatggggataatgaaggaatggcctaaaatgctctcagtaatattcctgagtcatccctcagggctaggcttggtgttaggc

SEQ ID NO: 870480 - DNA, 120 bp, Artificial Sequence
  ENSG00000232300_7 (sequence is synthesized)
atggcggggaagggagcagagctgtgtgcagaggaagatgcagttcttgccttgtcagggtccctgacctgatggcgacccatggtggagtcttcatagtgacagacaccactgtaaaag

SEQ ID NO: 870481 - DNA, 120 bp, Artificial Sequence
  ENSG00000232300_8 (sequence is synthesized)
cagatccaggttgtgcaaccctcaaagcaggtctcctcactcaccgggatagatagactattggccgtacctgcatccaccgcttgccatggtttcgttgtgggtggaggatactttcct

SEQ ID NO: 870482 - DNA, 120 bp, Artificial Sequence
  ENSG00000232300_9 (sequence is synthesized)
acgtggcttgctctggccttggaatgaagcagaaacgaaaggctgccagttccgagcccacgtctgaagtcgccttaggtggttccgcgggccccgtgcgctcccaccttcacccagagg

SEQ ID NO: 870483 - DNA, 120 bp, Artificial Sequence
  ENSG00000232300_10 (sequence is synthesized)
gccttctctggtgcagccgctgcttcttcagcctccgcccaaaaggaacggagccccctggccgatccgcaggcctacagggagccacagagcgcagcggctggaccagcgttcaagccc

SEQ ID NO: 870484 - DNA, 120 bp, Artificial Sequence
  ENSG00000232300_11 (sequence is synthesized)
aagcacaggcctgcgagaaccttgttccagccgccgtttaggatggttgattaggacgcgttgcagtggcggtagctcaccaatccagtgcgtgcacccgctcctttattaggctataga

SEQ ID NO: 870485 - DNA, 120 bp, Artificial Sequence
  ENSG00000232300_12 (sequence is synthesized)
gccagtggctcccacagggacctgatacaacagtgcgttaaataaggagcatattgagctctcatgtcgtaagccagtggagaagtccagggctagtgtgggggctccggcgggggctgt

SEQ ID NO: 870486 - DNA, 120 bp, Artificial Sequence
  ENSG00000232300_13 (sequence is synthesized)
ggcccccatccgcatggagcctccccatggttcacaggtctcagtcttcggagccttcggccctgcgagcccgaacggtccacagggcggcgccagaccctctttcgaacgccatcctct

SEQ ID NO: 870487 - DNA, 120 bp, Artificial Sequence
  ENSG00000232300_14 (sequence is synthesized)
aaagcctcggctccaaccggttccacttcttcaggctcaggattttcactcttctcgaatgggggtggccctcccccaatcttctgagtcgcaacagcatctccctccctccaggacctc

SEQ ID NO: 870488 - DNA, 120 bp, Artificial Sequence
  ENSG00000232300_15 (sequence is synthesized)
agagccagagctgggcgagaggccctgacctccggggtagggtggaagcgtccctgtgaaggtgcagtcctgcctcccatccccaggcgccgggcctctcccaccctcagcgccctgctc

SEQ ID NO: 870489 - DNA, 120 bp, Artificial Sequence
  ENSG00000232300_16 (sequence is synthesized)
acctccagctgaagatgccagggcacctctgcttcctccctgccctctctgcagtaccgccgagtgtgcataaaagggtttaatataggctttgccgggcgcggggactcccacctgtaa

SEQ ID NO: 870490 - DNA, 67 bp, Artificial Sequence
  ENSG00000232300_17 (sequence is synthesized)
taatataggctttgccgggcgcggggactcccacctgtaatcccagtacgttgagagaaagtgaggc

SEQ ID NO: 870491 - DNA, 120 bp, Artificial Sequence
  ENSG00000232301_0 (sequence is synthesized)
ggaccctccagggaacgcccttgagtaactcccgcacttgggaccccgtttccacccaggaccacaggctcaagatggcctggtagatgcagccggcacgcgcctctcctccgacgggaa

SEQ ID NO: 870492 - DNA, 120 bp, Artificial Sequence
  ENSG00000232301_1 (sequence is synthesized)
cagaaggagccggtaggttttcacacttgcagcagatccgctaagagaacgagggattcagccgagaagccactgggagcccgaggagtggagcagaggcacccaggcagcctgcgcgga

SEQ ID NO: 870493 - DNA, 120 bp, Artificial Sequence
  ENSG00000232301_2 (sequence is synthesized)
gaaatcggatcggctgggacggcctgcagcccccgcgcgcggggaaagggaagaagtcctcccctacaaagcgaattcacaaacggaagaagtgactgttccacaggatgcgcagatctc

SEQ ID NO: 870494 - DNA, 120 bp, Artificial Sequence
  ENSG00000232301_3 (sequence is synthesized)
agcaaggaaatgtgacgccttcagaagaaaccagtaattctccagcaacagatccccatccaaaagaaattcaggaaagctcaaacagagaattgagcagagaattgaccggactgattg

SEQ ID NO: 870495 - DNA, 120 bp, Artificial Sequence
  ENSG00000232301_4 (sequence is synthesized)
taaagaaggtcatcaacatggaagagtcttttgaacaacaacataaagaaatgaggaaaagaggtggggagatatatgagatgattacctgccagaaagaggttttaaaattcaacagaa

SEQ ID NO: 870496 - DNA, 120 bp, Artificial Sequence
  ENSG00000232301_5 (sequence is synthesized)
gagtatttctggaactgaagaaatcattggatgaaatacaaagtacactcaaaagcttcaatgatagactagaacaaatagaagaaaaactctcagggcataaaatctgaagcatttttc

SEQ ID NO: 870497 - DNA, 120 bp, Artificial Sequence
  ENSG00000232301_6 (sequence is synthesized)
tcactttaaagattcatgggttgtactctggccattaatgtgaacaaaacctgctgggttagttcttattctggggtcttgggtaatcgttagagcgaaataaaaataatttcccttaga

SEQ ID NO: 870498 - DNA, 120 bp, Artificial Sequence
  ENSG00000234229_0 (sequence is synthesized)
ttgcagcatcacagaaaatgatgctctctcctgccaagtcccattttttgggaggaggaaatggattaggtcctggaggttgtcataaatgcatcaagtgactttctcagcatcatctga

SEQ ID NO: 870499 - DNA, 120 bp, Artificial Sequence
  ENSG00000234229_1 (sequence is synthesized)
aacatgcagccatccagcccagaacacaacaagaatagagttgatgagccctcttctcctcaacaaacacctgtgaaaaatgggccaattcacagctgcaatggttgggagaatttcctg

SEQ ID NO: 870500 - DNA, 120 bp, Artificial Sequence
  ENSG00000234229_2 (sequence is synthesized)
caaccgcaacaacaacaacaacaacaaaacatgccacgtgtgcactggcatatacaaacacgcccacagaaccaaaccaagcggacaaggcttcaaggagagcttctgggcggctcattc

SEQ ID NO: 870501 - DNA, 120 bp, Artificial Sequence
  ENSG00000234229_3 (sequence is synthesized)
ccgcggcgaggcatatcccttggcatggtgccactgcagcccagctcccagcccccccgccatctgtcatcagcgctctgcctactgtggcatttccctctttgctcggcacctctccct

SEQ ID NO: 870502 - DNA, 71 bp, Artificial Sequence
  ENSG00000234229_4 (sequence is synthesized)
cctactgtggcatttccctctttgctcggcacctctccctattgccgccatatgaaaaaggagagccatgc

SEQ ID NO: 870503 - DNA, 120 bp, Artificial Sequence
  ENSG00000234223_0 (sequence is synthesized)
gtatttattccccatcagccattcattatgcttgctggcagagggcataaccttgagtgaggcacactatgaaatgtcagaagcctatttccgcaacagcttggagatggatgtgaaatg

SEQ ID NO: 870504 - DNA, 120 bp, Artificial Sequence
  ENSG00000234223_1 (sequence is synthesized)
aactgcagattctgagcgcagttttacaagcacaacttgagtctgagttctagctactgcccagttgtgtgaccttggccaatgtcgtcttgttgaactcacattaaaaactctgtaaaa

SEQ ID NO: 870505 - DNA, 120 bp, Artificial Sequence
  ENSG00000234223_2 (sequence is synthesized)
cgggtcaacatgcgatcacattaagggttaaatccaagcaatgaacaaaggagaagccagggcctgatggggaaggaacctagaaaactgcagttcaattcaggatcacttacaacttcc

SEQ ID NO: 870506 - DNA, 120 bp, Artificial Sequence
  ENSG00000234223_3 (sequence is synthesized)
ctaggggatcataaccatttgctcagtgagaggaaaacttctggatgggcagagctcccagtaatggacttggtcagccattttgtatggaacgagaaacagcctgaggtaagtggcaca

SEQ ID NO: 870507 - DNA, 120 bp, Artificial Sequence
  ENSG00000234222_0 (sequence is synthesized)
atccacccaagacccggttcctcgattcccatccttacgaccgaggaaaaaagagtaaattttcctattatagccttctctcgcaccttccccgcttcccaccagccgtctccactgtcc

SEQ ID NO: 870508 - DNA, 120 bp, Artificial Sequence
  ENSG00000234222_1 (sequence is synthesized)
tcaccgtccccatcctcatccatggcgaaatcttcgcccccagcctcgtgaagatctagcacgtccgccatctcgccttcgatcgagatctcgtctgtgccgctcagacactaggtacct

SEQ ID NO: 870509 - DNA, 120 bp, Artificial Sequence
  ENSG00000234222_2 (sequence is synthesized)
cgggaaactgtcgcagaggggaaaggtcgccagtcaagctgaccaatcaaaggctaactctaaatccctccctctgcacggtaaaaacacgcaaattggggcgggcctagtgcggaaaga

SEQ ID NO: 870510 - DNA, 120 bp, Artificial Sequence
  ENSG00000234222_3 (sequence is synthesized)
gctgctgataaatactgtactattaacagtgaggcccggcgtaatttccttattagagggcttctttacgtctcttcatcccaaactgggaaatgcttgctggcctgctctatagtgctg

SEQ ID NO: 870511 - DNA, 120 bp, Artificial Sequence
  ENSG00000234222_4 (sequence is synthesized)
ttgcttaaaaagtcatctgtgaagaaaaccagagggagaaatttcacctgccaaagtggataaagagtggctcagaaatcaaagatggggaaatagaggccagaagtagaagaaaataga

SEQ ID NO: 870512 - DNA, 120 bp, Artificial Sequence
  ENSG00000234222_5 (sequence is synthesized)
agaaacacacttggtgaaatgaaaattagaccctgaataaaaactgtgagtagtcaagaaataggaagtttcaaaaggagacagttaatctactgggatatatctgctgatgatggaggg

SEQ ID NO: 870513 - DNA, 64 bp, Artificial Sequence
  ENSG00000234222_6 (sequence is synthesized)
actgcaacctccacctcctgggttcaggagagaagtgggggagaatggtgttaaaaacacaaat

SEQ ID NO: 870514 - DNA, 120 bp, Artificial Sequence
  ENSG00000234222_7 (sequence is synthesized)
aatcgagaccatcctgtcaaacacgatgctgttgactggggcaaagaataatgggagaaaaacagctgggtcctaaataacagagggaaaccaactttcaataaagtattcaacaactaa

SEQ ID NO: 870515 - DNA, 120 bp, Artificial Sequence
  ENSG00000234222_8 (sequence is synthesized)
gacacggatacctcacaggttccattattactcacagcgttgtggtccgggttcatcgccatcctgctccacgctgtcataatcctcacgcatccgcgctcgggacccctcttctataag

SEQ ID NO: 870516 - DNA, 120 bp, Artificial Sequence
  ENSG00000234222_9 (sequence is synthesized)
ggacatacacgagatcaccgaaaactcctcctttctcccattgttcctatgagtttgtgaatgctctctggaaccccagaagataaaagaataagtaactatgacagtcatttgtaacaa

SEQ ID NO: 870517 - DNA, 63 bp, Artificial Sequence
  ENSG00000234222_10 (sequence is synthesized)
tcaacaactaatccacaaagcagataactgaacaaactccgtctcccgggttcaagccattct

SEQ ID NO: 870518 - DNA, 120 bp, Artificial Sequence
  ENSG00000234222_11 (sequence is synthesized)
tgggatagacaattgcaagagatttatcagggaggaagtaggagacaacagggagagccttctgagcacagcaaagatctcatgcctgtggaagagagggaaagaaggaggtctagatat

SEQ ID NO: 870519 - DNA, 120 bp, Artificial Sequence
  ENSG00000234222_12 (sequence is synthesized)
ggatgaggtactaccttcactcagataaagaacttgcttgcttcagcttgttgtaaaatggcaagttccccaagctgtgggttctataagtgttcctctgttgtgaagcaacccatggcc

SEQ ID NO: 870520 - DNA, 120 bp, Artificial Sequence
  ENSG00000234222_13 (sequence is synthesized)
tatgcaagtatccacctgagtcctctgcattggacttgggaggaggcaaggagaactaatataaacatgatgctcatgctacttgctgtgctatgaataataaattcctttgtctctaaa

SEQ ID NO: 870521 - DNA, 120 bp, Artificial Sequence
  ENSG00000234222_14 (sequence is synthesized)
tctcttcatcccaaactgggaaatgatgctgttgactggggcaaagaataatgggagaaaaacagctgggtcctaaataacagagggaaaccaactttcaataaagtattcaacaactaa

SEQ ID NO: 870522 - DNA, 120 bp, Artificial Sequence
  ENSG00000234222_15 (sequence is synthesized)
taaaaagtcatctgtgaagaaaaccagagggagaaatttcacctgccaaagtggataaagagattgcaggtgaggatattgtggctcagagaagtaattcgacttgtccaacatcatatg

SEQ ID NO: 870523 - DNA, 120 bp, Artificial Sequence
  ENSG00000234222_16 (sequence is synthesized)
caattggtggtggagctaagtggctcagaaatcaaagatggggaaatagaggccagaagtagaagaaaatagaagaaacacacttggtgaaatgaaaattagaccctgaataaaaactgt

SEQ ID NO: 870524 - DNA, 120 bp, Artificial Sequence
  ENSG00000234222_17 (sequence is synthesized)
tagaggccagctctctagacagtgcccccggcacactctgctcccggctcacccagtccaaggccatttggtggcgaatatcatcatccagggcccggtgcgaataatgagccaacacct

SEQ ID NO: 870525 - DNA, 120 bp, Artificial Sequence
  ENSG00000234222_18 (sequence is synthesized)
cctagtaggggaggggaatgtgaacatcattgagaagatgctgttgactggggcaaagaataatgggagaaaaacagctgggtcctaaataacagagggaaaccaactttcaataaagta

SEQ ID NO: 870526 - DNA, 120 bp, Artificial Sequence
  ENSG00000234222_19 (sequence is synthesized)
tgcaacctccacctcctgggttcagatgctgttgactggggcaaagaataatgggagaaaaacagctgggtcctaaataacagagggaaaccaactttcaataaagtattcaacaactaa

SEQ ID NO: 870527 - DNA, 120 bp, Artificial Sequence
  ENSG00000234222_20 (sequence is synthesized)
ttgactggggcaaagaataatgggagaaaaacagctgggtcctaaataacagagggaaaccaactttcaataaagtattcaacaactaatccacaaagcagataactgaacttgctggcc

SEQ ID NO: 870528 - DNA, 120 bp, Artificial Sequence
  ENSG00000234222_21 (sequence is synthesized)
gtcatctgtgaagaaaaccagagggagaaatttcacctgccaaagtggataaagagatgggaaaagtgaggcccagagatttgccccattgatattcagaagaatgtaaatttggatctc

SEQ ID NO: 870529 - DNA, 120 bp, Artificial Sequence
  ENSG00000234222_22 (sequence is synthesized)
ctaactcttagatgagtactgtttccagcatacatagtccctccgatttgacctcttagagaactccaacattgctttctttagtaattgcctacgaaaaagtactggaggcaaggaata

SEQ ID NO: 870530 - DNA, 120 bp, Artificial Sequence
  ENSG00000234222_23 (sequence is synthesized)
ttgttctatatcctcaataagagatggaagaaagttggaatgcaataactgaagccagattggaacatgggttggatgctggactgtgcttgcagcaagaaatattgagggatgaggtac

SEQ ID NO: 870531 - DNA, 120 bp, Artificial Sequence
  ENSG00000234222_24 (sequence is synthesized)
agttacaaagagaatccagccttcaacagctgttgggggacggggggaagttgtatgagtacatgagagacactttaagcaggctcacaggaatagatttgtgaatgctctctggaaccc

SEQ ID NO: 870532 - DNA, 82 bp, Artificial Sequence
  ENSG00000234222_25 (sequence is synthesized)
taccggaagtgtttctgtggccatcttgaacagatcgcaagctaaatcatccatcttaggagagatggagtttcgccatgct

SEQ ID NO: 870533 - DNA, 120 bp, Artificial Sequence
  ENSG00000234222_26 (sequence is synthesized)
agccaccacacctggcctagaaccataatttcaataacaatgaatttagttatttattttttgagacagaattttgctcttgtcacccaagctggaatgcaatagcacaatctcggctca

SEQ ID NO: 870534 - DNA, 120 bp, Artificial Sequence
  ENSG00000234222_27 (sequence is synthesized)
ctgcaacctccgcctcctggttcaaatgctgttgactggggcaaagaataatgggagaaaaacagctgggtcctaaataacagagggaaaccaactttcaataaagtattcaacaactaa

SEQ ID NO: 870535 - DNA, 120 bp, Artificial Sequence
  ENSG00000234222_28 (sequence is synthesized)
ctagtgcggaaagataccggaagtgtttctgtggccatcttgaacagatcgcaagctaaatcatccatcttaggagaaacggggctttgccatgtctcaaactcctggcctcaagtgatc

SEQ ID NO: 870536 - DNA, 120 bp, Artificial Sequence
  ENSG00000234225_0 (sequence is synthesized)
ctggtactgcacatgaagatgtcccgctctcccctgctcaaggagagagtgcctgacctgagctgggcccatcagatccagtacttacctggaataggaaaaagatggggagagtgacca

SEQ ID NO: 870537 - DNA, 120 bp, Artificial Sequence
  ENSG00000234225_1 (sequence is synthesized)
aagactacaaaaatctctgaagcttatctacttgagagagagtccctgaagatactggcctctcattcctgctatgtatatccaatgtgactgaactctgaataaaatatacaagttata

SEQ ID NO: 870538 - DNA, 120 bp, Artificial Sequence
  ENSG00000234225_2 (sequence is synthesized)
gcaattgacccagcaaacgaggacacaaacgtgttgaagggatttgagtttgatgtcttgcatacaatgtgatcccactgtatgactacacaaatgttggcaaaagtaagttcagaggaa

SEQ ID NO: 870539 - DNA, 120 bp, Artificial Sequence
  ENSG00000234225_3 (sequence is synthesized)
atggtaggcaagtacttcccagttttgaccagaagatggagaaaaaagaattctcaaaaaatattaaaagtgtctacggagaaatagacaagcgatgcacgacagatacatgtgtcagtc

SEQ ID NO: 870540 - DNA, 120 bp, Artificial Sequence
  ENSG00000234225_4 (sequence is synthesized)
gtgtcagtctggtccctgcagttgtatttgtaataatacacattggagcaatttcatggccatcggttagagaatgtttgaggaatgatcctttcatatcaagaaggacatttcaaagat

SEQ ID NO: 870541 - DNA, 120 bp, Artificial Sequence
  ENSG00000234225_5 (sequence is synthesized)
caaaacctgatggaaatgctggagaccatggcgctgataggagctcatgcgtgttgtccaattactacgtgacaggcattggctccatgcttttcctgcactgctcatttaaacactgga

SEQ ID NO: 870542 - DNA, 120 bp, Artificial Sequence
  ENSG00000234225_6 (sequence is synthesized)
caacctaagtgttctgatttagcccattggacagatagaaatggaggcacagaagattaatgtgtttaacttcaaaccctggcagattaggtttttcatccagagcctgtggcttcacca

SEQ ID NO: 870543 - DNA, 65 bp, Artificial Sequence
  ENSG00000237407_0 (sequence is synthesized)
aggagacacgggttgaatgctgaaaacacgcacagccaagcccacatgccagtcttgttagctgc

SEQ ID NO: 870544 - DNA, 74 bp, Artificial Sequence
  ENSG00000237407_1 (sequence is synthesized)
attatgctgtacctccaagcataatggtacgtccacacacaccagggcacctcgctcatgcaaggtgaaaccca

SEQ ID NO: 870545 - DNA, 80 bp, Artificial Sequence
  ENSG00000237407_2 (sequence is synthesized)
tttcacgctctaaacccagataacttttcaaacccaagttctgttgattcccctactttgagtgctccatagatgctcat

SEQ ID NO: 870546 - DNA, 120 bp, Artificial Sequence
  ENSG00000231447_0 (sequence is synthesized)
cgtcatctcaagatgaagctgccatgtttgctgttgaaagcggagagaaagcatggaaatggcacactggctctcaaatgcctggatgtgacaaacaatgcttctgctcctgtattggtg

SEQ ID NO: 870547 - DNA, 120 bp, Artificial Sequence
  ENSG00000231447_1 (sequence is synthesized)
taaaggaaaagtcacatgatcctaactgcaaggactttactgttcccatgtgtccaggaaggagacagagacaaaatgtgggaggagtttctgagaaggccaaatttaccttgaagttct

SEQ ID NO: 870548 - DNA, 120 bp, Artificial Sequence
  ENSG00000231447_2 (sequence is synthesized)
ccagcgttttccagtgtcaaatatgtgactgatgttttcaaacatacgatcacaactaactgttcaagaatcttgaaagtctcagcaggaaggctttcctttgtaatatcctttaaatcc

SEQ ID NO: 870549 - DNA, 120 bp, Artificial Sequence
  ENSG00000231447_3 (sequence is synthesized)
ctgagaattgttcctccatttgattcccggtcaaaatgttaacctgtgaatttctgctaccctccacacgcctgtacacctgtcgaggtaggcacgctgaaggccagtattttcctgtgg

SEQ ID NO: 870550 - DNA, 120 bp, Artificial Sequence
  ENSG00000231447_4 (sequence is synthesized)
agcaggtaaacagacaagaaacagaaggctgcttaattattcctctttcattagagttgacatgttttcaaggtatagtttttaaactcctggaggactccagaaatttaggaattcagc

SEQ ID NO: 870551 - DNA, 120 bp, Artificial Sequence
  ENSG00000231447_5 (sequence is synthesized)
ctcagtaagtagatgtttgttccactggggtttcccaaggtttttctcatctaatactcatgagagacggtttgctctttgatcatttatctgtgcatgtattcagaggcgaattccaaa

SEQ ID NO: 870552 - DNA, 120 bp, Artificial Sequence
  ENSG00000231447_6 (sequence is synthesized)
aggacgccctgtgaaagtccgatttcaagtatcaaggtggttccaaatccctctaacttcagggtgacatcacacaagaacccttagataatatggcgaatcagactcctcagcccattc

SEQ ID NO: 870553 - DNA, 120 bp, Artificial Sequence
  ENSG00000276931_0 (sequence is synthesized)
ttgcttttccctccacagtattaaacagtcattttaaatgttggtgctgtcacttagcaaacgatgaagtagagataaagtgaagctgtgaggctctaataggccttccacaggggagcc

SEQ ID NO: 870554 - DNA, 120 bp, Artificial Sequence
  ENSG00000276931_1 (sequence is synthesized)
cgagatacagcaggaagtcccagcggccttgcctccggagcacagcttcataaaaccagctcagactctttcaaacgagctgaggctcctttgatctccgcagggattctctgttcaatt

SEQ ID NO: 870555 - DNA, 120 bp, Artificial Sequence
  ENSG00000276931_2 (sequence is synthesized)
attttaagcctggtgcccagcattgaacatttctccttgacatatgcacgttcttctgtcttgtgagtacatttggggtagaatcagtgtttttctgctgtatcaaggaaccagtttccc

SEQ ID NO: 870556 - DNA, 120 bp, Artificial Sequence
  ENSG00000276931_3 (sequence is synthesized)
atctttcagggacatggttttctggctgagctggcccagggcaagcaggcagtcatcctgcatttatctccttctagaaagttctggattttactgggactgtgcgctactccctgttcc

SEQ ID NO: 870557 - DNA, 120 bp, Artificial Sequence
  ENSG00000276931_4 (sequence is synthesized)
tcagaatcccagggtttttccaagttgccataggggctctccaaatatttcacttgatactgaattttacaatgtttatagctattgaaacacttgtaattaaacacataaccaaatgta

SEQ ID NO: 870558 - DNA, 120 bp, Artificial Sequence
  ENSG00000276934_0 (sequence is synthesized)
ctgccacttgcttgtgacactttgtgatgatcatggggtattttcctattggaatataggcactggtagaggagctacatggccacaggagttttgcacagcctgagtaggccatagtct

SEQ ID NO: 870559 - DNA, 120 bp, Artificial Sequence
  ENSG00000276934_1 (sequence is synthesized)
aaagtaaaaggtggagaccactgacctgatgtgaaaactggaaaagacctaagattgatttgcctccatttagatgcaggggtgggctgggatgcctgtcccattctccattcctatggg

SEQ ID NO: 870560 - DNA, 120 bp, Artificial Sequence
  ENSG00000276934_2 (sequence is synthesized)
gtggaatattggtagtgcttctgggacaaagctcagaaggcgtacctgctatcactaactttttagaatggctaaatgtgaatttaggtataaagatttttttatatatatcttggttta

SEQ ID NO: 870561 - DNA, 120 bp, Artificial Sequence
  ENSG00000276934_3 (sequence is synthesized)
tggcattttccatgcataattgtaatcaatgtacagaatttcaaaaatacctcttctgatttaagattatagtttattttaaccatcatttcagaaaataataaactaagttgcatcccg

SEQ ID NO: 870562 - DNA, 89 bp, Artificial Sequence
  ENSG00000273374_0 (sequence is synthesized)
tgatactgaagagtaaaatcagctttggaactgggtaacaggcagaggtttgaacaatttggtgggctcagaagaagacaggaagatga

SEQ ID NO: 870563 - DNA, 120 bp, Artificial Sequence
  ENSG00000273374_1 (sequence is synthesized)
gggaaaatttggaaattctcagagacttgttaaactgttatgaccaaaatgctgttaatgatatggacaatgaggtccagggtaatgagatctcagatgaaagtgaggaacttattggga

SEQ ID NO: 870564 - DNA, 120 bp, Artificial Sequence
  ENSG00000273374_2 (sequence is synthesized)
actggagcaaaggttacttttgttatgtgttagcaaagaacctggtggcattgtacccctgccctaggaatctatggaactttgaacttgagagtgatgatttggggtatctggcagaag

SEQ ID NO: 870565 - DNA, 120 bp, Artificial Sequence
  ENSG00000273374_3 (sequence is synthesized)
aaatttctaagcaccaatgtgttgaagatgtggcctggctgcttctaacaacctatgctaataatgtatgagcaaagaaaggacataaaactagaacttacgtttaaaggggaagcaaaa

SEQ ID NO: 870566 - DNA, 120 bp, Artificial Sequence
  ENSG00000273374_4 (sequence is synthesized)
cataaacgtttgaaaaatttgcaaactagtcatgtggtagagaagaaaagcccattttccggggagcagttcagactggctgcagaaatttgtatagctaaaaggaaggcacatgctgat

SEQ ID NO: 870567 - DNA, 90 bp, Artificial Sequence
  ENSG00000273374_5 (sequence is synthesized)
tgcagaaatttgtatagctaaaaggaaggcacatgctgatagccatgacaatgggggaaatgcctccaaggcatttcagagatctttgtg

SEQ ID NO: 870568 - DNA, 120 bp, Artificial Sequence
  ENSG00000273374_6 (sequence is synthesized)
gactaccctgtgcaggcttgggacactgctccctgcatcccagccattctcgctccagctgtggctcaaaggggcccaggtacagcttgggccactgcttcagaaggtgcaaaccataag

SEQ ID NO: 870569 - DNA, 120 bp, Artificial Sequence
  ENSG00000273374_7 (sequence is synthesized)
ccttggtggtttccacatgctgttaagcctgtgggtatgcagagtgcaagagttgaggcttgggaacctccacctggatttcagaggatgtgtggaaaagcctggatgtccagacagtag

SEQ ID NO: 870570 - DNA, 120 bp, Artificial Sequence
  ENSG00000273374_8 (sequence is synthesized)
cctgctgaaggggcagagccctcatggagaacccctaccagggcattgcagaggggaaacgtgggactgtagctcccacacagagtctccactggagtgttgcctagtgaagctgtgaga

SEQ ID NO: 870571 - DNA, 120 bp, Artificial Sequence
  ENSG00000273374_9 (sequence is synthesized)
agagggccaccttcctcaagactctggaatggtagatacactaacagcttgcacctgttgcctggaagagctacaagcactcaacatcagcctttgagagcagctctgggagctgaaccc

SEQ ID NO: 870572 - DNA, 120 bp, Artificial Sequence
  ENSG00000273374_10 (sequence is synthesized)
tcaacatcagcctttgagagcagctctgggagctgaaccctgcaaagctgtaggggtggaactgcccaagatcttgggagcccatccgttgaatcagtgtgccctggatgtgagacatgg

SEQ ID NO: 870573 - DNA, 85 bp, Artificial Sequence
  ENSG00000273374_11 (sequence is synthesized)
agtcaaaggagattgttttggatctttaagatttcaggactgccctactgagtttcagacttgcatggggcctctagcccaatat

SEQ ID NO: 870574 - DNA, 120 bp, Artificial Sequence
  ENSG00000273374_12 (sequence is synthesized)
taacttgttttttattttataggctcatagatggaaggggctagctttgtctcagatgagactttggactttagactttcgagttaacgttggaatgagttaagactttggggggctgtt

SEQ ID NO: 870575 - DNA, 120 bp, Artificial Sequence
  ENSG00000273374_13 (sequence is synthesized)
gagaaggacatgagatttgggaggggccaagagtggaatgataggattcggatctgtgtccccacccaaatcttatgtcaaaatgtagcactaatgtgggaggtggggcatgggaggtga

SEQ ID NO: 870576 - DNA, 120 bp, Artificial Sequence
  ENSG00000273374_14 (sequence is synthesized)
aaatgtagcactaatgtgggaggtggggcatgggaggtgattggatcatggaggcagtttttcataaatgatttagcactgtccccatgcagtggttctcatgatagtgagtgagttctc

SEQ ID NO: 870577 - DNA, 120 bp, Artificial Sequence
  ENSG00000273374_15 (sequence is synthesized)
tgttttaaagtgtgtagcacctcccccctttctctcttcctcctgctccagccatgagaagatgcctgctctgactttgccttccactgtgaataaaagcttcctgaggcctcctcagaa

SEQ ID NO: 870578 - DNA, 63 bp, Artificial Sequence
  ENSG00000273374_16 (sequence is synthesized)
tgaggcctcctcttttctttataaattatccagtctctagccaggtgtggtggtgtgtgcctg

SEQ ID NO: 870579 - DNA, 74 bp, Artificial Sequence
  ENSG00000273374_17 (sequence is synthesized)
ggattgcttgagctcaggagttcgaggctgcagtgagttataattgcaccactgtacttcagcctaaattaccc

SEQ ID NO: 870580 - DNA, 120 bp, Artificial Sequence
  ENSG00000273374_18 (sequence is synthesized)
aaataataaattacccaatcacaggtatttctttgtagcagtgagagaatggactaatacaccctccataccacaccctactacttcacctccctttccaactactgtagaagatactca

SEQ ID NO: 870581 - DNA, 120 bp, Artificial Sequence
  ENSG00000273374_19 (sequence is synthesized)
ctgttatcatttactatcttataagtgcaaaaactaaagtttaaagaggttaagtaattggctcaaggtatcacagctggtaaacagaggcactgagatttgttctcttttggtttgacc

SEQ ID NO: 870582 - DNA, 120 bp, Artificial Sequence
  ENSG00000273374_20 (sequence is synthesized)
ctagaaccctctcctaacattttttttttattttgactcttgtttggcagaataagtagcaaggacaccatcatctttgctgaggaaagatgactattattagtagtaggcaagtggaga

SEQ ID NO: 870583 - DNA, 120 bp, Artificial Sequence
  ENSG00000273374_21 (sequence is synthesized)
gtcgtcagtgttccatcagcttttcccctgtgtctctcatcccatgaatgaagagcagatgtgaaaattgctgccagccactcacttgtcagatgagaactgacttggctgtgctcatta

SEQ ID NO: 870584 - DNA, 120 bp, Artificial Sequence
  ENSG00000273374_22 (sequence is synthesized)
attaatttttaggcttattacaaaattaataaggcatgtgaaatatagatgtcctcaagatttataaactttaatttagaagtgtctttgattctaatacaaatctatttttacttacag

SEQ ID NO: 870585 - DNA, 120 bp, Artificial Sequence
  ENSG00000273374_23 (sequence is synthesized)
acagtaagatagcaaagaaaaaagtctctggaaagattctggatatgtctaaggaaaatttgattagatgggccagtgtttcagtaacacacacaagaagcttctgaataacttgtaaaa

SEQ ID NO: 870586 - DNA, 120 bp, Artificial Sequence
  ENSG00000273374_24 (sequence is synthesized)
gtgagatgatgtgccccactttgatttaaattccattacatgtatcctcaggaattagcaaaaaaatttttttttcataataaaactcattagatgattttgacttataaagaataactt

SEQ ID NO: 870587 - DNA, 120 bp, Artificial Sequence
  ENSG00000273374_25 (sequence is synthesized)
gtttgagaataaaatttgtctggacacaagtattggttctgtaaaatgaaaggaaatatctaaacttctgtgcaactctccgttaaagataatcctaaggctacttcagatatatttttg

SEQ ID NO: 870588 - DNA, 120 bp, Artificial Sequence
  ENSG00000273374_26 (sequence is synthesized)
ttattcaggatatggaatgagcatgaacgtttgcattttaatggtcaaaagaaccattaaggagagaagctcccaaaatataataagacatgactagtttcaactctatgttgcctctgt

SEQ ID NO: 870589 - DNA, 120 bp, Artificial Sequence
  ENSG00000273374_27 (sequence is synthesized)
atgtttggaattccttgtaattccatatgtatttggatgatgtttacctttgctgtatctttgatgaaatgatgtgttaaactaacttcctgcagtaaataaaggaggaaattgtaaagc

SEQ ID NO: 870590 - DNA, 120 bp, Artificial Sequence
  ENSG00000273370_0 (sequence is synthesized)
gaaatgaaagaactattggcagagtcatggaaaattaaatatgagctcatattatatgagtagctagaaaattttggtgctctcaaaactacattttggcaagtatcaatttccttggac

SEQ ID NO: 870591 - DNA, 120 bp, Artificial Sequence
  ENSG00000273370_1 (sequence is synthesized)
aatataagtgtagtggaagcagtaaaagtcttagttttcagtattagttatacagcggtcagaaagataatagactatacttctactgtatggagaaaggatcagaggttatattattat

SEQ ID NO: 870592 - DNA, 120 bp, Artificial Sequence; identical to SEQ ID NO: 699774
  ENSG00000273370_2 (sequence is synthesized)

SEQ ID NO: 870593 - DNA, 120 bp, Artificial Sequence; identical to SEQ ID NO: 699775
  ENSG00000273370_3 (sequence is synthesized)

SEQ ID NO: 870594 - DNA, 120 bp, Artificial Sequence
  ENSG00000273372_0 (sequence is synthesized)
ttagggtgtacctgtgcaggttgttacatgggtatattgtatgatgctgaggtttacggtactattatacccacttcccaggtagtgagcatggtacccagtagtttttcaacactttcc

SEQ ID NO: 870595 - DNA, 120 bp, Artificial Sequence
  ENSG00000273372_1 (sequence is synthesized)
ccctccccagtgtctattgctgccatctttatgtccatgagtatccaatgtttactcctatttaccagtgagaacatgcagtatttggttttcttttgctacattaattctcttaggata

SEQ ID NO: 870596 - DNA, 120 bp, Artificial Sequence
  ENSG00000273372_2 (sequence is synthesized)
atggcctccagttctatccatgttgctgcaaaggacatgattttattcttttttatagctgtgtggtattccatgatgtatgtataccacagtttcattatccggtccactgttgatagg

SEQ ID NO: 870597 - DNA, 120 bp, Artificial Sequence
  ENSG00000273372_3 (sequence is synthesized)
ctttgctattgtgaatagtgttgcaatgaatatatgaatgcatgtgtcttttcagtggaattatttattttctttttgatatatacccagtaatgagactgtgtcaaaagtagttctggg

SEQ ID NO: 870598 - DNA, 120 bp, Artificial Sequence
  ENSG00000273372_4 (sequence is synthesized)
tttttgatatatacccagtaatgagactgtgtcaaaagtagttctgggtcaaaaagtagttctaagttctttgaaaaacatccagactgcttttcacaatggctgaactaatttacattc

SEQ ID NO: 870599 - DNA, 120 bp, Artificial Sequence
  ENSG00000273372_5 (sequence is synthesized)
tctctgcagccttcccgacatcatatttttttttctttttcatgatagtcgttctgactggtgtaagatggtatctcatggttcttatttgcatttatctgatgattagtgatattgagc

SEQ ID NO: 870600 - DNA, 88 bp, Artificial Sequence
  ENSG00000273372_6 (sequence is synthesized)
gttcttatttgcatttatctgatgattagtgatattgagcattttttcatatgtttttttggccacacttattttgaaaagtgtttgc

SEQ ID NO: 870601 - DNA, 70 bp, Artificial Sequence
  ENSG00000273372_7 (sequence is synthesized)
ctttgggaggctggagtggaatgcagtctccaataaaaaataaaaaataagggccaggcatggtggctca

SEQ ID NO: 870602 - DNA, 64 bp, Artificial Sequence
  ENSG00000273372_8 (sequence is synthesized)
gttcgagaccggcctgaccaacatagtggaatgcagtctccaataaaaaataaaaaatatgtgg

SEQ ID NO: 870603 - DNA, 120 bp, Artificial Sequence
  ENSG00000273372_9 (sequence is synthesized)
gcagtgagctgagattgcatcactgcaccccagcctaggggaaagagcaaaactccgtctcaaaagaaaaaaaaaatctggatattagacctttatcagatgcgtagttcgtgaatattt

SEQ ID NO: 870604 - DNA, 120 bp, Artificial Sequence
  ENSG00000273372_10 (sequence is synthesized)
tcattttctccacatcctcaacaacacttattatcctttgtctttttttatagtagccattttaaaaggagtgaagttgtatctgatagtagttttaatttccattttctcaatgattac

SEQ ID NO: 870605 - DNA, 120 bp, Artificial Sequence
  ENSG00000273372_11 (sequence is synthesized)
tgatatagaattttttttatatacctcttggcctctgtatgtcttcttttgagaaatgtctgttcagatcatttcacattttaaatcagcctattgttttctggttatggagtatttgag

SEQ ID NO: 870606 - DNA, 120 bp, Artificial Sequence
  ENSG00000273372_12 (sequence is synthesized)
tgcaaatattttctcccattctgtaggttcttttaactctgatgtttgttctttgttatacagaaggcttttaatttgaagtaatcatatttgtctatttttgctttgattgcccttgct

SEQ ID NO: 870607 - DNA, 120 bp, Artificial Sequence
  ENSG00000273372_13 (sequence is synthesized)
tcatatttgtctatttttgctttgattgcccttgcttttggggtcacatccaaaaaataattgcccagaccaatgtcatggactgttccccgtgttttcttctagtagttttttcaggtc

SEQ ID NO: 870608 - DNA, 120 bp, Artificial Sequence
  ENSG00000273372_14 (sequence is synthesized)
ctatatttactctttaactcattttcagttgattttagtgtatggtatgaaataagtttctaatttcaatcttctgcatgtggacctccagttttcccaacatcatttgttgaagagact

SEQ ID NO: 870609 - DNA, 120 bp, Artificial Sequence
  ENSG00000273372_15 (sequence is synthesized)
gttgtctccccattgagtgttcttggcatctttttcaaaaatcagttggctgagaatgcatgaatttatttttgggttctctgttctgttctgtttatgtctctggttttatgccagtac

SEQ ID NO: 870610 - DNA, 120 bp, Artificial Sequence
  ENSG00000273372_16 (sequence is synthesized)
catgctgttttggttactacagctttgtagtatgttttgaagtcaggtagtatcatgcttccagctgcattcttttagctccagatttcattggttatttgaagtctcctttggttccat

SEQ ID NO: 870611 - DNA, 120 bp, Artificial Sequence
  ENSG00000273372_17 (sequence is synthesized)
atgaattttaggattattttttctacttctgtgaagaatagctcatattttaataggaactttattgaatctgtagatcatttttggtagtatggtcattttaacggtattaattttttc

SEQ ID NO: 870612 - DNA, 120 bp, Artificial Sequence
  ENSG00000273372_18 (sequence is synthesized)
aaactgtgaacatgggatatcttttcatttttgtgatctcttcaatttctttcattaatgttttacagtttgccttgtagagatcttttatctcctcatttaaatttattactatgtatt

SEQ ID NO: 870613 - DNA, 120 bp, Artificial Sequence
  ENSG00000273372_19 (sequence is synthesized)
gctgatttttgtctgctaattttgcatcctacaactttactgaatttatcagttctaagagtttttttgtaaattctttaggtttttctatttataagatcatgtcatctgcaaacacat

SEQ ID NO: 870614 - DNA, 120 bp, Artificial Sequence
  ENSG00000273372_20 (sequence is synthesized)
aaaatttgatttccttctttccaatttggatgtcttttaattatttctcttacctaattgttctgcctagaacatcatccaatactgggttgaattaaagtggtgagagtgggcatcctt

SEQ ID NO: 870615 - DNA, 120 bp, Artificial Sequence
  ENSG00000273372_21 (sequence is synthesized)
gtcttgttctagtttctagaggaaaatacttcagcttttccctattcagcataatgctacctgtgggtttgttatatgtagtctttattgcattcatgtatgcttctttcatatctagtt

SEQ ID NO: 870616 - DNA, 120 bp, Artificial Sequence
  ENSG00000273372_22 (sequence is synthesized)
tgttgaagatttttatcatgaaaggatattaaattttatcaaatgctttttctgtgtctattgagactgtcattttctttttgtccatcattttgtaagtgttatgtatcatgttgattg

SEQ ID NO: 870617 - DNA, 120 bp, Artificial Sequence
  ENSG00000273372_23 (sequence is synthesized)
gtttgcatatgtcaaaccatccctgcaataaatcccaattgattatggtgaatgatatttttaatgtattgttgaattctgtttgctagtatttattttgaggaattttgcatctctgtt

SEQ ID NO: 870618 - DNA, 120 bp, Artificial Sequence
  ENSG00000273372_24 (sequence is synthesized)
catcagaaatactggcctatggttttctttttttgttgtgcccttttcatgttttggtatgagggtaacgtcatcatagaatgagtataaaagaatttcttccacttcaattttctggaa

SEQ ID NO: 870619 - DNA, 120 bp, Artificial Sequence
  ENSG00000273372_25 (sequence is synthesized)
aagtttgagaagaattggtattagttctttcttaaatatctggcataattcagcaataaagccatcaggtccttggcttttctttgatgggacactttttattagtgattcaatcttgta

SEQ ID NO: 870620 - DNA, 120 bp, Artificial Sequence
  ENSG00000273372_26 (sequence is synthesized)
gctcgtaattggtctgtccagattttctactacttcttggttcaatcttggtggttgtatgtgtccagaaatttttccatttccattaggctttccaatttattggcatatagttgctca

SEQ ID NO: 870621 - DNA, 120 bp, Artificial Sequence
  ENSG00000273372_27 (sequence is synthesized)
taatagtctttaatgacctcttctatttctatggtatcaattgtaatgtccctgttcatttgcgggaatgctcttatatgtgactttatgcttttctcttgctgtttttagattccctct

SEQ ID NO: 870622 - DNA, 120 bp, Artificial Sequence
  ENSG00000273372_28 (sequence is synthesized)
ttgtctttgaatttgatagtttgaatataatgagccttggaattgaccgttttgggttgaatctatttggaaatgtttgaccttcatgtacctggatgtctatatctcttgcaagactta

SEQ ID NO: 870623 - DNA, 120 bp, Artificial Sequence
  ENSG00000273372_29 (sequence is synthesized)
agaagtttttagctattattttgtttaataggttttctatgcctttgttcatcttttttccttctggaatccataggaagatgaccctccacctcccaaactccctttcaatgaggatta

SEQ ID NO: 870624 - DNA, 120 bp, Artificial Sequence
  ENSG00000273372_30 (sequence is synthesized)
atttcagaccctgtttgacatgctgcaaagctcaccagggcatcatctttaggagaaaggtatcagtcttattacaccaattcaggcctcctctcttggatgcaaagttagtataatgca

SEQ ID NO: 870625 - DNA, 120 bp, Artificial Sequence
  ENSG00000273372_31 (sequence is synthesized)
ataatgcaaaggatgggggaacaagaaacacaataaattggagagcaaaactaaggcaagaagaagccacaggcactttaaaacacaaagagggctgggcactgtggctcacacctgtaa

SEQ ID NO: 870626 - DNA, 120 bp, Artificial Sequence
  ENSG00000273372_32 (sequence is synthesized)
acagacacacacacacacacacacacacggagcattttgactcagtcctgtggatagcacctaacttccatcctcacttcatgacctagataattgtttctaagctccatattgccccta

SEQ ID NO: 870627 - DNA, 120 bp, Artificial Sequence
  ENSG00000273372_33 (sequence is synthesized)
ctccatattgcccctagagaaagcatgggaaccaggctgtgaatgatttccctgaatcctgaataacaaaaacattttcatggcaaatatgatctcctctccatgaccatcacttccttg

SEQ ID NO: 870628 - DNA, 120 bp, Artificial Sequence
  ENSG00000273372_34 (sequence is synthesized)
gaagtctgtaccacgtacaaactggaaccaaaccaaggtaatgagaaaaggtgaaaaggggacttgtccagacttttctcccttttggcaagttcaaaagtcaaacctgaaggcgggcaa

SEQ ID NO: 870629 - DNA, 120 bp, Artificial Sequence
  ENSG00000273372_35 (sequence is synthesized)
atgggcagaacatgggaggatgctagattttctcatcctgtgaattcatgacaaggagtttttatcctagctctgagagttccaaatgggaactggaagttacttcactctccatctctc

SEQ ID NO: 870630 - DNA, 120 bp, Artificial Sequence
  ENSG00000273372_36 (sequence is synthesized)
aaggattgactcaatgagcttatatccatccataatactgagctgttatcatgtgtgagtttccctttaaacattgaaacagaaagaaaatgacagtaaaagttacaatagcccctccat

SEQ ID NO: 870631 - DNA, 120 bp, Artificial Sequence
  ENSG00000273372_37 (sequence is synthesized)
gaaatcattaaacaaagtctatgaacattaatattcccactttgttagcatttttgttagtattaacatgcatatcatgaagcttccctttttattataaataaattgtacatcaagttc

SEQ ID NO: 870632 - DNA, 120 bp, Artificial Sequence
  ENSG00000273373_0 (sequence is synthesized)
aggaaaactgaatcaaagtaaaaatctgtaaggctttgtagtttatggggaaaataatcactagatacataaaatatttacttttttttagcctttttttccccccacagaacatataga

SEQ ID NO: 870633 - DNA, 120 bp, Artificial Sequence
  ENSG00000273373_1 (sequence is synthesized)
ggacagggctttgctctgccttctcactttctccccactcacccccaacctccagagtgtgttttccaagtaaaattttaggccatagagaaattcgcaattgataggccaaggtgactg

SEQ ID NO: 870634 - DNA, 120 bp, Artificial Sequence
  ENSG00000273373_2 (sequence is synthesized)
ataaaactctagaggtcaggattggtaatagtggagcgaggaccagatggaatttttgtttaatactgtatctgaaattgaggatgggatagataggaaatgacctatcatttcatgagg

SEQ ID NO: 870635 - DNA, 120 bp, Artificial Sequence
  ENSG00000273373_3 (sequence is synthesized)
agatgacttttctgtgataatgggacagagatgagcttagatgaatgaatatatattttagcacttacctttttccataaaacacaaatagacttggtgcaaaattaccagtctcactcc

SEQ ID NO: 870636 - DNA, 120 bp, Artificial Sequence
  ENSG00000273373_4 (sequence is synthesized)
atggtatttctgatgagatcggtaaataatagagagagacatacttctttaggagctagctgactttaacatatgctggagtacaattgacttacaactatttggcgttagaaatgattt

SEQ ID NO: 870637 - DNA, 120 bp, Artificial Sequence
  ENSG00000273373_5 (sequence is synthesized)
ttctagggcttggtgggggaaaaatactcgtgaaatacctgccttgacttaaacttcaacatattttaaagtcattttattatcccacaactcagaatgtcttcaattaaaggtaagaaa

SEQ ID NO: 870638 - DNA, 120 bp, Artificial Sequence
  ENSG00000273373_6 (sequence is synthesized)
ataaggtgatgggctacagtggcttaatcaggtgttcagttaatgaagtagaagaaggatacagattctaataattcacagttgtagaggttctagactgttcttagtatgaagtcctgg

SEQ ID NO: 870639 - DNA, 120 bp, Artificial Sequence
  ENSG00000273373_7 (sequence is synthesized)
cagtgtatgtggcagagtgaataatgtttcacgacctggtgagtcatgtgaggactgtgagtaacttttatcttctgtgtgtcccacatagcatataacagtactatgctagtgatttgc

SEQ ID NO: 870640 - DNA, 120 bp, Artificial Sequence
  ENSG00000273373_8 (sequence is synthesized)
ttgacagttattgaatgaatgctaagtttcaaatatttatttgatagtcacttgattaccaagtaatcaaataattacttatagtgttttagggagttttcagaagatatttgtgattaa

SEQ ID NO: 870641 - DNA, 120 bp, Artificial Sequence
  ENSG00000273373_9 (sequence is synthesized)
ataaatgattatatatgtatattagcatactgtatgcatttgtcagttgggaaagaggggaatatggagaagtggggaactgcattcagtttttattttataggcaactaatatggtcct

SEQ ID NO: 870642 - DNA, 120 bp, Artificial Sequence
  ENSG00000273373_10 (sequence is synthesized)
ttggttttattttaaaatgaaactgagccttgagcattttgagctttcatgtcaaatgccttgaatggaagagtaggaatttcatgtaagtagcttacatctgccctgtatgttggagaa

SEQ ID NO: 870643 - DNA, 120 bp, Artificial Sequence
  ENSG00000273373_11 (sequence is synthesized)
tgagaaataaggcttaaaatatcaatacttctcatttttccacagccttccaaggcttccatctttgtgccagtgtgtggctctgggtgccatctaaccgcaaaagcagcagttgggttt

SEQ ID NO: 870644 - DNA, 120 bp, Artificial Sequence
  ENSG00000273373_12 (sequence is synthesized)
ggatgagctgtgtgacatttggcctacacgtaggtctactcaccaccctggtcagggaacctggaacaatcctaaaactcacctactctaatgcaggccatattttttaattaaaattga

SEQ ID NO: 870645 - DNA, 120 bp, Artificial Sequence
  ENSG00000273373_13 (sequence is synthesized)
aattgtcactgagtattggaataagaagggactttggggtggagtgggtgagcagggcattgtcttacagaggaggtgtggggaccggtaagttttaactttcatcctttcaatctctca

SEQ ID NO: 870646 - DNA, 120 bp, Artificial Sequence
  ENSG00000273373_14 (sequence is synthesized)
gtttcagcaaagatcttataaagaattttgttgctttcttaaattcatgaaagaaatgtaagcaattgaggtgtgtaattttcttgcccgtattctctatattaaaaaaaaataagaata

SEQ ID NO: 870647 - DNA, 120 bp, Artificial Sequence
  ENSG00000273373_15 (sequence is synthesized)
tggttctatgaatttcttgtgctatttttgctttccttgaattattaaaatatgttgcatagaactaatattgttttcttttttatttttatacaggaaggagagaaatattgttcatgt

SEQ ID NO: 870648 - DNA, 120 bp, Artificial Sequence
  ENSG00000273373_16 (sequence is synthesized)
aatgtgttacctttttttgtctgtgtgatctacaagagcatggctgaaatgttaccatttttaactagtgttttgactgaagattattatgaaaagttttacttttgttagattcctaat

SEQ ID NO: 870649 - DNA, 120 bp, Artificial Sequence
  ENSG00000273373_17 (sequence is synthesized)
taaaaatgcctatactcttttataggagtttcaacttttgcaatttggtaataacagatttaggtaagtaaaaaatgagaatctcatacagttctgaagatctaagtttggttgagaatt

SEQ ID NO: 870650 - DNA, 120 bp, Artificial Sequence
  ENSG00000273373_18 (sequence is synthesized)
taatgtttcatcaccagtaaattcaattaaagacttttgattcaattaaagactcagttctgcctacacctgcaagaactgagttgatctgtacatcaacatttctgatgtttctttggt

SEQ ID NO: 870651 - DNA, 120 bp, Artificial Sequence
  ENSG00000273373_19 (sequence is synthesized)
agttgctgctggagtcagaagttaggaacaaatctaatggcctttgtaatgtcctctgtcatttcacggaggaatgacttagaggaacaaagctttcctgtgatttctttcttcaacaga

SEQ ID NO: 870652 - DNA, 120 bp, Artificial Sequence
  ENSG00000273373_20 (sequence is synthesized)
tggctaatggcacagcattgcagttagaatcttgtttaagatactaggagcacgtcctggactaaaaatttctacataagctttagcaacaaccttatagcttcctttgacttttttgta

SEQ ID NO: 870653 - DNA, 120 bp, Artificial Sequence
  ENSG00000273373_21 (sequence is synthesized)
gagcttacagaatgtatggctgcctaagtaatagtctctgaattaatgggtaaaaaatatattatgagttttttatcctcacgtatggtgctaggctatactggatttgggctaacaaaa

SEQ ID NO: 870654 - DNA, 120 bp, Artificial Sequence
  ENSG00000273373_22 (sequence is synthesized)
gcttgttaacttttttttgtctcattgacagaagtattttatatctcatattttacattacataggtgtgtgtgtgtgtatgaaataaaagtttgaaaataaagtgatatactctttttt

SEQ ID NO: 870655 - DNA, 120 bp, Artificial Sequence
  ENSG00000230215_0 (sequence is synthesized)
agtatgtatcatcccctctactctattgaagccgttctgcggtcggtaccctctctgacaagagctcagttctggcttcccttaaggaagggtggaggaggaaatgggactagagaggca

SEQ ID NO: 870656 - DNA, 120 bp, Artificial Sequence
  ENSG00000230215_1 (sequence is synthesized)
gatccatggccaccaagctgttaagcggcaaaactggggattcgaatcctggtgtctcagagatgaagcacttcccaactaagccaggggcccatgactgtagtcacctaactacctggg

SEQ ID NO: 870657 - DNA, 120 bp, Artificial Sequence
  ENSG00000285325_0 (sequence is synthesized)
atgagcaccacaagttgatttgagcaaatccaggcacctctctctgcaagtacaagacgggcctgcgtgtctgcatggaaaatgaagttgtttcaccttccatggcattgttccactcaa

SEQ ID NO: 870658 - DNA, 120 bp, Artificial Sequence
  ENSG00000285325_1 (sequence is synthesized)
agaaacaagctttatttatctcaaaacttggcttctgttgacttgccagatgaaaaatgatgtgaagttactgaaatcatctgctaagggaaatgaatccaagcacggtgaaagatgttt

SEQ ID NO: 870659 - DNA, 120 bp, Artificial Sequence
  ENSG00000285325_2 (sequence is synthesized)
tgctgctttttcaaagcacatcagtcagcttgtcttacaagcacaatataattttctaccagctaaagtagcagtaaacagagtgaattcagctgtgggatgataggggcctttccccgc

SEQ ID NO: 870660 - DNA, 120 bp, Artificial Sequence
  ENSG00000285325_3 (sequence is synthesized)
aagtggactgagtctcaattcatcattcactgcctgatgaagaggcagtatagcagacatgagatgccaacagtactcagcctatgctcagtccagcaccatccttggtgcacagtgacc

SEQ ID NO: 870661 - DNA, 120 bp, Artificial Sequence
  ENSG00000285325_4 (sequence is synthesized)
gaaattccaaggatctagagtatttttattcagcatcttctgagaccattcctttgatttcactcatgtgcgtttctggaacgggaagaaggaaaagagaaggggagagagtgcaagagc

SEQ ID NO: 870662 - DNA, 120 bp, Artificial Sequence
  ENSG00000285325_5 (sequence is synthesized)
cagggcttccttattctgggaagactttgaccaaactaggctaatacggcagaaagaaactgacacagctgatggtctttttgcacgtttagcacatctgaagtttctgttttgattagc

SEQ ID NO: 870663 - DNA, 120 bp, Artificial Sequence
  ENSG00000285325_6 (sequence is synthesized)
gcctctccatgttatctgaaaagtctatcactaagcaaaaactgacagtacttcaaggagtaattgacaaatttgtgatcagagtgggagctttaacatgtctttcttagtaactgatag

SEQ ID NO: 870664 - DNA, 120 bp, Artificial Sequence
  ENSG00000285325_7 (sequence is synthesized)
atcaaacagccaaaaaattcagtaaagttataaagatttgaacaagacgattaacaagtttgatataaaagacttatatagagcactgcattcaaccactggggaatatacattcttttt

SEQ ID NO: 870665 - DNA, 120 bp, Artificial Sequence
  ENSG00000285325_8 (sequence is synthesized)
aaaatcacatattacctttgtaaaaactaattgtgaattagggcagaaagcaaatatcaaatctcaacaaattcaaagaataagtatcaaaagaccacaacacaattaagttagaaaaaa

SEQ ID NO: 870666 - DNA, 120 bp, Artificial Sequence
  ENSG00000147753_0 (sequence is synthesized)
gtggaagcagaagaaaatggtacacatagagctggctcggtatccagaaataggctgcctgcaataatgcactgcgggaccctacaatgctcgaagttagggcgacttcaagccgtctcc

SEQ ID NO: 870667 - DNA, 120 bp, Artificial Sequence
  ENSG00000147753_1 (sequence is synthesized)
ctggtcagctcctgcaggagtaggaggcattcagagactgaggtggtcgctgaaatctgttcttctgattcccttttggaaagaggctgtgtgcaagaatccagtcccatggggattgga

SEQ ID NO: 870668 - DNA, 120 bp, Artificial Sequence
  ENSG00000147753_2 (sequence is synthesized)
gatcgtgggactatcctgtggatcccacagagaagagagaggacagtccaccactgatgcacctccacagaggtctccttctccgccaaacctcacggaattgtgacattcatggcgaat

SEQ ID NO: 870669 - DNA, 120 bp, Artificial Sequence
  ENSG00000147753_3 (sequence is synthesized)
gtgcgggaccccatccatccctcaccagcttgtatcctcagctttatctgaagttaaaagtatctttcccataatgaaatccaaagatgatggaagagtgccccctcacggtgtggaggt

SEQ ID NO: 870670 - DNA, 120 bp, Artificial Sequence
  ENSG00000147753_4 (sequence is synthesized)
cctgcttggctagcaactgaatatgaagtaaattcaagggaccctgcggaccggactgctagtgtttctaaatggggtgtacactggacaataaaacactgaaagatttctgttcctgaa

SEQ ID NO: 870671 - DNA, 120 bp, Artificial Sequence
  ENSG00000147753_5 (sequence is synthesized)
gagcagtgtcctcacgcattggactggcctccaatgggtgtagttacagggccccaaccacctttcaccagattgtatactcacctgtatctgaccttattgctactcacactctaggtc

SEQ ID NO: 870672 - DNA, 120 bp, Artificial Sequence
  ENSG00000147753_6 (sequence is synthesized)
ccaggataaaatcccaacatgatggaggagtgccccctcattatgtgaagcacctgctgggcttggaaccaaattcagtgatgaaatcccaagatgatggaggagtgaaccctgacgaca

SEQ ID NO: 870673 - DNA, 120 bp, Artificial Sequence
  ENSG00000147753_7 (sequence is synthesized)
ggaagtacctgctcacctatgaacaaaatttgaggaatatggatgtatcctgtggatccctcagagaagacaggcaagagtccaccaccaaggcacctctatggaggtctccttcttggc

SEQ ID NO: 870674 - DNA, 120 bp, Artificial Sequence
  ENSG00000147753_8 (sequence is synthesized)
cacgcagccaggactgatctctatgtaatggtgacattcattgtgatgctagccagagctcatagtcaggcctggtgccctgaggcgtgcatgtgcatttgagggcatgcttgctggcct

SEQ ID NO: 870675 - DNA, 120 bp, Artificial Sequence
  ENSG00000147753_9 (sequence is synthesized)
aagctggataagaagagtttccttcttggctactgttacagaaatttatggttttaaaacaatcaaagttgcccagtcattaaaacccaatagtatttagaagaaaacactcatgaaatg

SEQ ID NO: 870676 - DNA, 120 bp, Artificial Sequence
  ENSG00000147753_10 (sequence is synthesized)
gattcccttgagggtcgtcttccattaagtggtaaacatttaatgtggaatatgtacagccagacccaagaaaccttaggctgatgaggtacatggatgtcaggaaaataagaggcgaat

SEQ ID NO: 870677 - DNA, 120 bp, Artificial Sequence
  ENSG00000259042_0 (sequence is synthesized)
acacccccactgtcttccagcgagcagaacaaatcaaagaggatttccagagacagcaataactttacattccacccactgctctccctggggcagcaaatcttcactgtgaaatctgca

SEQ ID NO: 870678 - DNA, 120 bp, Artificial Sequence
  ENSG00000259042_1 (sequence is synthesized)
attccaggagagcagaaagcaatctatctccctccaaaaacaagttgccatttcagggaactggacacattttcactcctaatggaatcaagccagacaccttgttggagcaacaagagc

SEQ ID NO: 870679 - DNA, 120 bp, Artificial Sequence
  ENSG00000259042_2 (sequence is synthesized)
tagagatatttgttccttttagaagaagcaaaattttccagtgccaactgacagggaagaagatgaataattacactatgtcctggtaaagaggacccgagacggcttcctgattttcgt

SEQ ID NO: 870680 - DNA, 120 bp, Artificial Sequence
  ENSG00000259042_3 (sequence is synthesized)
caacaaggagacgtctatgaccctggtctccagcacacctttcttggtagagttgagaattcaaccagccagttcttcctggagattctcagagccacattgagagagcagaggacttac

SEQ ID NO: 870681 - DNA, 120 bp, Artificial Sequence
  ENSG00000259042_4 (sequence is synthesized)
aagtgctgccctatccatggtgactccccttggcctctaggcttgtctgagcagaggtagagtgaccctgccgcctgttcctcaacagtctgtgcaaattcaaagaaatagagtgtgaat

SEQ ID NO: 870682 - DNA, 120 bp, Artificial Sequence
  ENSG00000259042_5 (sequence is synthesized)
tcaaggaactcatttgaagaacaggaaaagcaactctctccttgaggttatcggggaaatgaaggttgaaacatggatcagaagacttgctgaggtcccttccaccctcagctcttccat

SEQ ID NO: 870683 - DNA, 120 bp, Artificial Sequence
  ENSG00000259042_6 (sequence is synthesized)
tctgttcccaaatgaggcccaaaacacagctttctccatcactctttaatctgttggttgatttgtctggtgcacccaaccagcactgtggccctgaaaataaaatgttaattacatcaa

SEQ ID NO: 870684 - DNA, 120 bp, Artificial Sequence
  ENSG00000242736_0 (sequence is synthesized)
gatactggaattacccagacaccaaaatacctggtcacagcaatggggagtaaaaggacaatgaaacgtgagcatctgggacatgattctatgtattggtacagacagaaagctaagaaa

SEQ ID NO: 870685 - DNA, 120 bp, Artificial Sequence
  ENSG00000242736_1 (sequence is synthesized)
aaacaagactgtgccaaatcacttcacacctgaatgccctgacagctctcgcttataccttcatgtggtcgcactgcagcaagaagactcagctgcgtatctctgcaccagcagccaaga

SEQ ID NO: 870686 - DNA, 120 bp, Artificial Sequence
  ENSG00000272583_0 (sequence is synthesized)
atccagctgccagacaacttgtactgatctttctttgctttgcctactaatcacacacaccctctcttctagcctgtgaagacttaactgattttctacggatgaaggtttcagtgtccc

SEQ ID NO: 870687 - DNA, 120 bp, Artificial Sequence
  ENSG00000272583_1 (sequence is synthesized)
tgctatgtaaactgcacaagacgttgacctttgttaaatccgaacactgtttaagataatgctatctcttacccacgaggctgtagcttggaatattcagtgctctgaaccaaattaaat

SEQ ID NO: 870688 - DNA, 120 bp, Artificial Sequence
  ENSG00000272583_2 (sequence is synthesized)
aaattagtgctttatccgggaggggaggagaaatctatgttgtaacattgaaacacattgatttgatttctctccaggatgttataacgcattaaaagatattttaaatatttttcacga

SEQ ID NO: 870689 - DNA, 120 bp, Artificial Sequence
  ENSG00000272139_0 (sequence is synthesized)
cccccttccttgcttcttggcctctccccctggaaatcgccccctcaccgtgatccaagcgttaaccgctgccatctcattggtccccagaccattccagggttccagcataaactggga

SEQ ID NO: 870690 - DNA, 120 bp, Artificial Sequence
  ENSG00000272139_1 (sequence is synthesized)
cggggaacggaaggtgggcattgccctgggaaactcatgtctgagaagccttttggcagagtattttgcgttggcacggagtcttcacccccacccctccccccgaagctcgcccacccc

SEQ ID NO: 870691 - DNA, 120 bp, Artificial Sequence
  ENSG00000272139_2 (sequence is synthesized)
tgaggacgtggccaaggagaggagggcaagggtggctttgcctgcctggaatgttctgtgctcaagtgtgggtggatggagaagatgttaggctgaaataaagactttttaattcaacga

SEQ ID NO: 870692 - DNA, 120 bp, Artificial Sequence
  ENSG00000272138_0 (sequence is synthesized)
gcggccgcggctcctccccgccccgcgcgccccgattggcctggccgcgcgccagggccgagcctgcagcgcctccggttataagttgaagaaataagaccagtttccaaataaatgaca

SEQ ID NO: 870693 - DNA, 120 bp, Artificial Sequence
  ENSG00000272138_1 (sequence is synthesized)
aagagcttggtattcctgcaggcatcagaatcacctggaggaggagatgctgctgctggtggtggcccagagaccacacattgagaaccactgctctagaaaaccatttgtctttgctga

SEQ ID NO: 870694 - DNA, 120 bp, Artificial Sequence
  ENSG00000272138_2 (sequence is synthesized)
gaagggcttgtatgtgtccaggaagtctagtgaattcgaccatgaatccagacatggccagtggctaaatcctgtgggaagacactgtgcttctctctgacccatgaacactctgctagt

SEQ ID NO: 870695 - DNA, 120 bp, Artificial Sequence
  ENSG00000272138_3 (sequence is synthesized)
caagctctctgtcacaaagacaacttgaagagacagagtggacctcacagaagataccatcgtcactcttaccaatgcaactgtggtgaacaggaccactattattccttagatcaaaag

SEQ ID NO: 870696 - DNA, 120 bp, Artificial Sequence
  ENSG00000272138_4 (sequence is synthesized)
gacagcacattcaacagcatcctcatggcatgccagcaatttgcataggatgttcacaattaaactttgattatctagtgctttgtggatgtattatgtattacagaaatctatttgcaa

SEQ ID NO: 870697 - DNA, 120 bp, Artificial Sequence
  ENSG00000272138_5 (sequence is synthesized)
agttagggtgatcccaggttagaggcgcccaggctagaagggcccggctcttggccctcgctgtcctgcccgctgtcgccgctctttggcgcccccgcaacagctccctctcagcaggac

SEQ ID NO: 870698 - DNA, 120 bp, Artificial Sequence
  ENSG00000272138_6 (sequence is synthesized)
gcggaaaggtcctctgtggacagtgagctggactgacctcacaaccctccagtatgtgcagtggctgagaatgacccactcccagcaactttctgcagccaaggggttaatcctccctga

SEQ ID NO: 870699 - DNA, 120 bp, Artificial Sequence
  ENSG00000272138_7 (sequence is synthesized)
atacagtattcagctatgtatctctgaaatcagccaagctcttttacataagaattttgcaatttcctgattaattcaggatatatgttaaattcctaaattgagcaatatgaattttta

SEQ ID NO: 870700 - DNA, 120 bp, Artificial Sequence
  ENSG00000272138_8 (sequence is synthesized)
ggtggttttgttgttgatggtaatggtttgatgtttaagacagttgctgcttatcttgacaaaccatgaactctcaaaatgtttcccaagggaagggctccatagagaagaaaggaagcc

SEQ ID NO: 870701 - DNA, 120 bp, Artificial Sequence
  ENSG00000272138_9 (sequence is synthesized)
attatttcctctatgtcaaaatgaaatgttcagacctctgaaacctaaataaatgaataaatataaaagcatagatgagatcagccttcaaatctacaaagacaaaataatcaaaaaaag

SEQ ID NO: 870702 - DNA, 120 bp, Artificial Sequence
  ENSG00000272138_10 (sequence is synthesized)
gtgtaaattacaatggtaataagagaatttaagaatatatataaattattttaacagagaaactgtgttcctccagggcctgtagttcaaaattttgtaatgcacaatgatccatcccca

SEQ ID NO: 870703 - DNA, 120 bp, Artificial Sequence
  ENSG00000272138_11 (sequence is synthesized)
aaaaatggaatattgattcagaccctaggactgcaatgtttaaaccagtggttctcacctgttagtgagcattagaattacatggaaagtttaataataaagacagatttgggggtcccc

SEQ ID NO: 870704 - DNA, 120 bp, Artificial Sequence
  ENSG00000272138_12 (sequence is synthesized)
ctccccctcagagtatgtgaatcagtagatctcagtggactcaggaatttgtagttcaaacaattcccagatgatgctgatgctggatatgtgggaccatactttaggaattgctgtttt

SEQ ID NO: 870705 - DNA, 120 bp, Artificial Sequence
  ENSG00000272138_13 (sequence is synthesized)
tgctctatggttcacaacttggccacatactagaattatctggggagcttgcttttttaatttcaattcataggccacacctcaaaacaattaaaattacaatctcttggggtgtgaacc

SEQ ID NO: 870706 - DNA, 120 bp, Artificial Sequence
  ENSG00000272138_14 (sequence is synthesized)
caggcatcagtagtttttgaagttctcaggtgtctcccatgtgcagccaaactggagaatttctacttatgttagtagttgtcagacttcagcacacattacctgaaggactattaaaat

SEQ ID NO: 870707 - DNA, 120 bp, Artificial Sequence
  ENSG00000272138_15 (sequence is synthesized)
acagattgctgggcccctctcatggagtttctgattctgtaagtctgggttgggcccaaaaattcgcatttcaatcaagttcccagatgatgcagtcagtcctgggaccatacttggaga

SEQ ID NO: 870708 - DNA, 120 bp, Artificial Sequence
  ENSG00000272138_16 (sequence is synthesized)
accactgggtaagaccaacttcaaccctggctgtatttggaatctactggggagctggcaaaaaaatactgaagttgactccattctcaaaaacaaaagaaaaccagattgggatataat

SEQ ID NO: 870709 - DNA, 120 bp, Artificial Sequence
  ENSG00000272138_17 (sequence is synthesized)
tagtttgggttggggtctggcataagtatgtttttaaagcttcccaggtgattctaatatgcagccaagacctggaatcactgcaaaatcaagcaaggtgaagacgcagtaaatgtatca

SEQ ID NO: 870710 - DNA, 120 bp, Artificial Sequence
  ENSG00000272138_18 (sequence is synthesized)
gaatatatttcaaccactacatgcagtatctttattgaaaaaatatactacattgaaataaatgtaagatcatgagggtcatttctgaatttaagaaagggccaggcacagtggctcatg

SEQ ID NO: 870711 - DNA, 71 bp, Artificial Sequence
  ENSG00000272138_19 (sequence is synthesized)
ggaggctgaggtgggaggatcgctttagtccaaggattcaaggttattgtgagctatggaaagaaaaggaa

SEQ ID NO: 870712 - DNA, 120 bp, Artificial Sequence
  ENSG00000272138_20 (sequence is synthesized)
tatctcagaaagaaaaggaagggaaaaggaaggaaaggaaaagactaggttaagccaggaggggattctccctaccccttttattgctataaatgcaacataccgtctgaattttttttt

SEQ ID NO: 870713 - DNA, 120 bp, Artificial Sequence
  ENSG00000272138_21 (sequence is synthesized)
aatgttacatggtaacccacccctttggtgatctgcagccaatcatgtaaacagaaacattataactgttattataaaagtagtttcctataaatgagaaattacgcttatatctaaata

SEQ ID NO: 870714 - DNA, 120 bp, Artificial Sequence
  ENSG00000272138_22 (sequence is synthesized)
aacttgaaacctgatcaaacaccctagccccaagaaaataactctgggtttggacaacacaacctagagtaacgttttactgccacttgatgtttctgaacatacagggtcatttttaat

SEQ ID NO: 870715 - DNA, 120 bp, Artificial Sequence
  ENSG00000272138_23 (sequence is synthesized)
cacgtagtatggaaataagttgtctgctacagacagtaaaagctgagatttgggagtggagttggggtgtgggcagggagagtatcaaaaggagttggcttttaactggggctttcttgg

SEQ ID NO: 870716 - DNA, 120 bp, Artificial Sequence
  ENSG00000272138_24 (sequence is synthesized)
acagctctatgatatcagttagatacatgtttgtaagtaattatttctacttcagttttcacagaaaatagtgatactattgtgttttggcagctgatttagtaaattgccattcatgac

SEQ ID NO: 870717 - DNA, 120 bp, Artificial Sequence
  ENSG00000272138_25 (sequence is synthesized)
cctgctagaatatactatgcaaggtccacttcttatgcctcagaaatttagcactggaaaagaacttagggctcatcaaatctcctaattttatagtttaggactgactttacacccact

SEQ ID NO: 870718 - DNA, 120 bp, Artificial Sequence
  ENSG00000272138_26 (sequence is synthesized)
agagtggctataaccaaaaagacaaacaatagcaaatattggtgggaagctggagaaaaactaaaatctcatgactgggaatttattgccaatttggaagcagtttggcagtttccttag

SEQ ID NO: 870719 - DNA, 120 bp, Artificial Sequence
  ENSG00000272138_27 (sequence is synthesized)
aagttaaacataaatttaccatcaactgagcaattctgctcctaagttatctatttacccaagagaaatgaaaacatgttcacacgtttacatgttcatacatgctgcatgtaaatgttc

SEQ ID NO: 870720 - DNA, 120 bp, Artificial Sequence
  ENSG00000272138_28 (sequence is synthesized)
atagcagcattattcatagtggccaaaaggtggaaacaattcaaatgtccatcaactgatgaatggataaacaaaatgtgtttatacccagcaataaaaagggaaaactgaggatacatg

SEQ ID NO: 870721 - DNA, 120 bp, Artificial Sequence
  ENSG00000272138_29 (sequence is synthesized)
ccacaacctggatgaaccgtgaaaacatgctgaaagaaaccagacacaaacgatgacatatatgattccatttatatgaaatgtctaaaataggcaaatctgaaagagacagaaaataga

SEQ ID NO: 870722 - DNA, 120 bp, Artificial Sequence
  ENSG00000272138_30 (sequence is synthesized)
ttagtagttgcttagaactagggaatgggagaggttagcattacgggggatttgaggacgaaaatgttctaaaattggtgatggttgcacgtatctgtaaatatgctaaaaaccgttgaa

SEQ ID NO: 870723 - DNA, 90 bp, Artificial Sequence
  ENSG00000272138_31 (sequence is synthesized)
atggttgcacgtatctgtaaatatgctaaaaaccgttgaatcacacactgttaaaaatatttttatttatgtatttatttatttttgagg

SEQ ID NO: 870724 - DNA, 120 bp, Artificial Sequence
  ENSG00000272137_0 (sequence is synthesized)
aggcgtgagccaccactcccggccaacaatacattctttaataataagtaataaacatttttaaatacatttaatactcttaataatactaaaattaatttaaataataattttactatt

SEQ ID NO: 870725 - DNA, 120 bp, Artificial Sequence
  ENSG00000272137_1 (sequence is synthesized)
tagagttgggaaaatagagaacaatgtatggttgtactatattgtaaatatggttgtaatcatcaattgactatcacaattctttcaattacagaatagtttgtgaacatggcatacaaa

SEQ ID NO: 870726 - DNA, 120 bp, Artificial Sequence
  ENSG00000272137_2 (sequence is synthesized)
taaaaagtagtactactaagtataaaattccaaacatcttggggctacctgttaaaattcaccctgtactcttgaaagcaaacgtgcatctaaataaactaaaataaagattttactaca

SEQ ID NO: 870727 - DNA, 120 bp, Artificial Sequence
  ENSG00000272130_0 (sequence is synthesized)
gttaataacattttagttattttaaagaatgatagtaatttagagatgtattctgaatgtttttaaatgaaaagatatgcctgggatttcttccaaaatgaatcttgtaggttgggaaga

SEQ ID NO: 870728 - DNA, 120 bp, Artificial Sequence
  ENSG00000272130_1 (sequence is synthesized)
aatgcgtacactaaagcttattttatcttattttactgtatatactgttaaagcttgcattattttcataaatgcatttgctaagtgcaactgttatcaaataaagtggattgggctcta

SEQ ID NO: 870729 - DNA, 89 bp, Artificial Sequence
  ENSG00000214049_0 (sequence is synthesized)
gaattaggtggtcttctatacggacatgcttgacacttggtgccaaaatctgggccagggggactccttcgtgagaccggccccctgtc

SEQ ID NO: 870730 - DNA, 120 bp, Artificial Sequence
  ENSG00000214049_1 (sequence is synthesized)
aaatctgggccagggggactccttcgtgagaccggccccctgtcctggccctcattccgtgaagagatccacctgcgacctcgggtcctcagaccagcccaaggaacatctcaccaattt

SEQ ID NO: 870731 - DNA, 120 bp, Artificial Sequence
  ENSG00000214049_2 (sequence is synthesized)
tcgggatctgcaatcagaactattgaacttctccattcagaccgccactcacacctatgggaaaagggtgtccacgcagtccctggtcacacttgaagcagtccggagaaatatcagccc

SEQ ID NO: 870732 - DNA, 120 bp, Artificial Sequence
  ENSG00000214049_3 (sequence is synthesized)
taccccagtaatccccagaaggaacttacacttttttttaatcttttcctacaacttcatattttataaataaaaagacaaaaatgtcaggcctgtgagctgaagcttagccattgtaac

SEQ ID NO: 870733 - DNA, 120 bp, Artificial Sequence
  ENSG00000214049_4 (sequence is synthesized)
gcaggagccaagaagtctggagcagccgaaaaaccacaaagaagtgaaacagccagttcctgccttaactaattaacccaccttacgacattccaccattatgacttgtccaccattatg

SEQ ID NO: 870734 - DNA, 120 bp, Artificial Sequence
  ENSG00000214049_5 (sequence is synthesized)
acttgttcctgccctgccccaactgatcaatcaaccctgtgacattcttctcctggacaatgagtcccatcatctctccaccatgcaccttgtgaccccctcctctgctgaggataacca

SEQ ID NO: 870735 - DNA, 120 bp, Artificial Sequence
  ENSG00000214049_6 (sequence is synthesized)
ccatgcaccttgtgaccccctcctctgctgaggataaccacctttaactgtaactttccacgcctacccaagccctataaagctgcccctctcctatctcccttcactgactctcttttc

SEQ ID NO: 870736 - DNA, 120 bp, Artificial Sequence
  ENSG00000214049_7 (sequence is synthesized)
ttgctcacacaaagcctgattgggtgtcttctatacggacacgcgtgacaggaacctcaacccaaaggcagtctgatgaggtgtctaagataaaagtagcggcacaaaggcttttgtaaa

SEQ ID NO: 870737 - DNA, 120 bp, Artificial Sequence
  ENSG00000214049_8 (sequence is synthesized)
tgaagactgatgctgcccgatcgcctcagaagccccttggaccatcacagatgccgagcttcgggtaactcttacggtggagggacagcaaaagaaacagcaaatgcctccacgcctgca

SEQ ID NO: 870738 - DNA, 120 bp, Artificial Sequence
  ENSG00000214049_9 (sequence is synthesized)
agccatatgaagacaccctagctggacgatcagtccttgtcaaaagtctgacccctcaaactctacagcctcaatggaccagaccctacccggtcatttatagcacaccaactgccgtcc

SEQ ID NO: 870739 - DNA, 120 bp, Artificial Sequence
  ENSG00000214049_10 (sequence is synthesized)
cctacccggtcatttatagcacaccaactgccgtccatctgcaggaccctctccattgggttcaccattccagaataaagccatgcccatcagacagccagcttgatctctcctcttcct

SEQ ID NO: 870740 - DNA, 120 bp, Artificial Sequence
  ENSG00000214049_11 (sequence is synthesized)
cctggaagccacaagattaggccgagagccgatcagacaaacaacctacaacccttaagctcctggcagcgcccagccaaggccatgcttccttgcaacactccttccaaatggccatcc

SEQ ID NO: 870741 - DNA, 120 bp, Artificial Sequence
  ENSG00000214049_12 (sequence is synthesized)
cagcatgcttccaagcaggcttcatccgttcctctggaccctcatctcttaagacctgccgcctataaaaaggattatatcttgagaccctatcctctaaaattttttccacacccaaaa

SEQ ID NO: 870742 - DNA, 120 bp, Artificial Sequence
  ENSG00000214049_13 (sequence is synthesized)
catatggggccagttccacatatttggcaaccagaccagcatccaggacaacacaaagtatgttgtttgttgttagagggcttgggacatttcactctttgccagcctcagcttaatcca

SEQ ID NO: 870743 - DNA, 120 bp, Artificial Sequence
  ENSG00000214049_14 (sequence is synthesized)
tagcaacagggaatactattcgtatgatggaaaatggggacaaaaggctttggtacataaaacattattccttccttggcctaaaaactcatcgccacctacattaaagctaatatgcct

SEQ ID NO: 870744 - DNA, 120 bp, Artificial Sequence
  ENSG00000214049_15 (sequence is synthesized)
taactggcaccttgttagctacataaaaatgcaccctagacccgaaacttactagactcattataaaattttctttaaggtgtccacgcagtccctggtcacacttgaagcagtccggag

SEQ ID NO: 870745 - DNA, 120 bp, Artificial Sequence
  ENSG00000214049_16 (sequence is synthesized)
gaagaaatgacccaggagctgatattcatgaccctccaagagacccggcagcttgtgggcatctcagatgagccccaggcagttctgaaacccaggaccaggaaaagataagagggtggg

SEQ ID NO: 870746 - DNA, 120 bp, Artificial Sequence
  ENSG00000214049_17 (sequence is synthesized)
ctgaggtcacatcaccctgtaacgtttccaaaagggaactgtcaggcctctgagccgaagctcagccattgtaacccctgtgacctgcacatatatgtccaggtggcctacaggagccaa

SEQ ID NO: 870747 - DNA, 120 bp, Artificial Sequence
  ENSG00000214049_18 (sequence is synthesized)
gaagtctggagcagctgaaaaacaaggaagtgaaacagccaattcctgccttaactaattaacccaccttacgacattccaccattatgacgtgttcctgccctgccccaactgatcaat

SEQ ID NO: 870748 - DNA, 120 bp, Artificial Sequence
  ENSG00000214049_19 (sequence is synthesized)
cgaccctgtgacattcttctggacaatgagtcccatcatctctccaccatgcaccttgtgactccctcctctgctgacaacagataaccacctttaactgtaactttccacagcctaccc

SEQ ID NO: 870749 - DNA, 120 bp, Artificial Sequence
  ENSG00000214049_20 (sequence is synthesized)
aatcgaccctgtgacattcttctggacaatgagtcccatcatctctccaccatgcaccttgtgactccctcctctgctgacaacagataaccacctttaactcctgtttaggtggtcttc

SEQ ID NO: 870750 - DNA, 120 bp, Artificial Sequence
  ENSG00000214049_21 (sequence is synthesized)
catcagggcagttccctgagaggatccttgatgggaataccagacaggctccccaggtatagctaggcgagattacatggtctcttgcctagctgaagggctgaaaaaggcagcatacaa

SEQ ID NO: 870751 - DNA, 120 bp, Artificial Sequence
  ENSG00000214049_22 (sequence is synthesized)
agctgttaattatgacaagctttaagaagccacccaaggtaaagatgaaaatccagcccagttcatggcccgtttggtggctacccttagaaactttacagccctagaccctgaagggcc

SEQ ID NO: 870752 - DNA, 120 bp, Artificial Sequence
  ENSG00000214049_23 (sequence is synthesized)
tacagccctagaccctgaagggccagaaggccatcttattctcaatatgcattttatcactcagtcagctcctgacattacaaaaaaagcttcaaaaattggaatctggccctcaaaccc

SEQ ID NO: 870753 - DNA, 120 bp, Artificial Sequence
  ENSG00000214049_24 (sequence is synthesized)
ccttcaaggtgttcaacaatagagaagaggcagccaagcagcaacgtctttcagagctgcaattgcttgcctctgctgtaagacaaaccccagccatgccttcagcacacaaaaacttca

SEQ ID NO: 870754 - DNA, 120 bp, Artificial Sequence
  ENSG00000214049_25 (sequence is synthesized)
ttcagcacacaaaaacttcagagcaaccaaaccacagcctctaggcactcctttaaaaccatctcatggaccttgcttcaagtgccgcaaaactggccactgggccaaggaatgcctgca

SEQ ID NO: 870755 - DNA, 120 bp, Artificial Sequence
  ENSG00000214049_26 (sequence is synthesized)
cccactggaaatcggactgtccaactaatatcacagccccttctagggtccctggagctctggctcaaagctctctggctgactccttcccagatctcctcggcttagtggctgaagact

SEQ ID NO: 870756 - DNA, 62 bp, Artificial Sequence
  ENSG00000214049_27 (sequence is synthesized)
ggtattcagtggaaacttcataccccctaccgtcctcaatcttcaggaaaggtagaacggat

SEQ ID NO: 870757 - DNA, 120 bp, Artificial Sequence
  ENSG00000214049_28 (sequence is synthesized)
ctcagaattagggcctgtccttgagaagccacagggtacaacccatttcaattttatatggatgcaccttcttactcagccacaatcttgttccagacaccagccccctgggcaactatc

SEQ ID NO: 870758 - DNA, 120 bp, Artificial Sequence
  ENSG00000214049_29 (sequence is synthesized)
ggacaatgagtcccatcatctctccaccatgcaccttgtgactccctcctctgctgacaacagataaccacctttaactgtggtcttctatacggacatgcttgacacttggtgccaaaa

SEQ ID NO: 870759 - DNA, 120 bp, Artificial Sequence
  ENSG00000214049_30 (sequence is synthesized)
acccgccggcatcatgagccagacctccaagaaggcatcagggcagttccctgagaggatccttgatgggaataccagacaggctccccagatctcctcggcttagtggctgaagactga

SEQ ID NO: 870760 - DNA, 120 bp, Artificial Sequence
  ENSG00000214049_31 (sequence is synthesized)
atatactcagtgaccaccctcccagaagacactgcattgtgtgcgtttcagctttttgcgtcacctcagtgaaggtggttttcctgtccttagccatagttttctcccttcactaggcta

SEQ ID NO: 870761 - DNA, 120 bp, Artificial Sequence
  ENSG00000214043_0 (sequence is synthesized)
gggaataccaggggtgggcactgtcaagagacccagctttgacttcaaatgccacccagagggacaactgctcactttcagagcaggagcaggaggccagaggagagtaccagctgaaac

SEQ ID NO: 870762 - DNA, 120 bp, Artificial Sequence
  ENSG00000214043_1 (sequence is synthesized)
tgattagagccaagatagccaaccaaatgacttcaggaagacctcaggcttcattatcatctcatttccatgctaaaaaaacccagctccctagaacaatgggaaatattgggcacttca

SEQ ID NO: 870763 - DNA, 120 bp, Artificial Sequence
  ENSG00000214043_2 (sequence is synthesized)
tcaggcgagttcaggtgcatttctagagattgtccaggtgctggtaacaataatagagaaccatccatatccacaagaggcagaacctcttccagcaaaatggtgctgcctcacccaaag

SEQ ID NO: 870764 - DNA, 120 bp, Artificial Sequence
  ENSG00000214043_3 (sequence is synthesized)
ctggttgaggctttattcaattcaaattcaagctgttaaatcgaggctctcagactcctgctgcctggccagtggagaaattaactttcacatatggctttgggatttctctctgtcatc

SEQ ID NO: 870765 - DNA, 120 bp, Artificial Sequence
  ENSG00000214043_4 (sequence is synthesized)
ctggtcgacgtgttctctcatttttctgaagtctgggacctcaacacagacatctgggtgaaggccttgacagcagcgctggtgcaaaatgaattgtcacatcacacccaacgttctcaa

SEQ ID NO: 870766 - DNA, 120 bp, Artificial Sequence
  ENSG00000214043_5 (sequence is synthesized)
cctttagaatctgaaagtaagaaaaacacctcaaacattgattctgagtaatcagcacagatttctaaaagaaactttatgggatgctgagacatgaataaaaacaactttattcctttg

SEQ ID NO: 870767 - DNA, 120 bp, Artificial Sequence
  ENSG00000214043_6 (sequence is synthesized)
agcccgaaaggccctctttccacaggggagcagtgaaaagtagaggttgcccatgtggattcccaagtcagatagatgtggattcagatcccagctctgctgcttgctacccaagagacc

SEQ ID NO: 870768 - DNA, 120 bp, Artificial Sequence
  ENSG00000214043_7 (sequence is synthesized)
atggactgtggactctttaggtctcagggtttttgtttgttgtctgtttttcacttccaaaaccagaaaatgagaagatattttccataagatggcggtggagaagagaacttgatggac

SEQ ID NO: 870769 - DNA, 120 bp, Artificial Sequence
  ENSG00000214043_8 (sequence is synthesized)
cttgcttggacaaaatgccttcaccgctaactcagtcagctatggcgatgggtcaaggacctggtggttttacagagaagacccttggtcaaatctttgtgaatgaagcaaccattctga

SEQ ID NO: 870770 - DNA, 120 bp, Artificial Sequence
  ENSG00000214043_9 (sequence is synthesized)
tgttcaataacaggaatgcaccagtttataccaaactatctgtactattgagaacagcaaaaatatctgaccaaaaacaccaaagagtgacattttaaaagacatcaaagaactctcaag

SEQ ID NO: 870771 - DNA, 120 bp, Artificial Sequence
  ENSG00000214043_10 (sequence is synthesized)
gcttccagagttggaaagatcaagaaagagagaatgcaacttcattaagtgactcaactccaaataggagcatttcaagagtatgtatttcaacaaagaagtattagaagatgacagtgt

SEQ ID NO: 870772 - DNA, 120 bp, Artificial Sequence
  ENSG00000214043_11 (sequence is synthesized)
ccttgcagtatcttttaggggctatcagaacatgatttctgctatattctatcatcggagccttaataatgttaactataattcaagggaagatcaaataaacttcacctttcaaggaaa

SEQ ID NO: 870773 - DNA, 120 bp, Artificial Sequence
  ENSG00000214043_12 (sequence is synthesized)
ctgagtctagtcagtcagttctactcttgggctttgtagttctgttcatcagtgaactcttctgttttgttgaaaccagttggagaagggtttccagaaacctgcacttgaagagcatca

SEQ ID NO: 870774 - DNA, 120 bp, Artificial Sequence
  ENSG00000214043_13 (sequence is synthesized)
gctggcacagagatcttggctgaacccactgctgtgtttgactaggaatgagagtgggcacacggagagggcagcccaccaggcaggtgtgtctcacatcactggggagcccttttcatt

SEQ ID NO: 870775 - DNA, 120 bp, Artificial Sequence
  ENSG00000214043_14 (sequence is synthesized)
caaagatgaccagcttataaaagatcagtgatgggaagtcccaggtagggcccccaggacctacagcaggggccagcaaagaatggtcagccgtctctctactgggtcagaaagaaataa

SEQ ID NO: 870776 - DNA, 120 bp, Artificial Sequence
  ENSG00000214043_15 (sequence is synthesized)
cttggccatgtgagctgtccagcatggatgccagaccagaccaaaatccagattcagacagctgctccctatagcaggggaaaccccaaacacagacaagacaaagcagcagagcaactt

SEQ ID NO: 870777 - DNA, 120 bp, Artificial Sequence
  ENSG00000214043_16 (sequence is synthesized)
ccttacccagaccactggcagtcccaatccttctccacccctcaggttgcctggttactggacatgcggacattcactttgattatgctccattcgagaatgctagaatgaaaatgtggg

SEQ ID NO: 870778 - DNA, 120 bp, Artificial Sequence
  ENSG00000214043_17 (sequence is synthesized)
taaatggtgaaggaattcaaggaaaagaaaatgcacccaccatgtttatgttataataccatgctggaccagacattttgtcattcaaggatgaatgtgttacaggggtccttgctccca

SEQ ID NO: 870779 - DNA, 82 bp, Artificial Sequence
  ENSG00000214043_18 (sequence is synthesized)
ggatgaatgtgttacctgcttccaagatggcagtggcttccaagatggtgggtggcttccaagatggtggcaagccttgtgt

SEQ ID NO: 870780 - DNA, 120 bp, Artificial Sequence
  ENSG00000214043_19 (sequence is synthesized)
tgagtgttatagctctattagaagcagtgggtcatggaagagaaccatggaacccagtaattagtgtttagctcaattaggacgaacccaggcacttaactgtgcaggagcaatggcaag

SEQ ID NO: 870781 - DNA, 120 bp, Artificial Sequence
  ENSG00000214043_20 (sequence is synthesized)
cacttaactgtgcaggagcaatggcaagcctttagcccgatggagaggggcaatgggtgcctcacttgatcaggagtacagcagacaccctgctggatctggagggatggaagtcagcgg

SEQ ID NO: 870782 - DNA, 120 bp, Artificial Sequence
  ENSG00000214043_21 (sequence is synthesized)
gcggcgggtctgcaacagcggccagcagcagtggtggacggcgagcaaaagcccagctccagccataacaaacacagaccagaagagtgcagttccaagatttaatagagtgaaaacaga

SEQ ID NO: 870783 - DNA, 120 bp, Artificial Sequence
  ENSG00000214043_22 (sequence is synthesized)
ccatacaaagggagggaacccaaatggggttgccgttgccagctcgaatgcctggtttatatcccgatcattgtccctcccgctgtgctcccacgcaatagatgattggctatttctcta

SEQ ID NO: 870784 - DNA, 120 bp, Artificial Sequence
  ENSG00000214043_23 (sequence is synthesized)
aggaaacagacacaactccagtgtggactcccgcttccctgcactgctgctccatcctcagggcggaggccacatcgtccagctagctgtgagaacctcatcatgctccttgattgtgtg

SEQ ID NO: 870785 - DNA, 120 bp, Artificial Sequence
  ENSG00000214043_24 (sequence is synthesized)
cagcaggtgtctgctgaagtcctccacactctgcctgtgagaaaactgtactacagaaaggtgagcaccttgcccaaagttacgcagaaagtgaaaaaacaagaattctaacccagacaa

SEQ ID NO: 870786 - DNA, 120 bp, Artificial Sequence
  ENSG00000214043_25 (sequence is synthesized)
ctagagataaaatagacaagtggcttcatgcatcagtagcattgaaagacacctcgaatgtggccttacttcaaggtgatggaatttctttttaagctcagcttctacttcccttctgag

SEQ ID NO: 870787 - DNA, 120 bp, Artificial Sequence
  ENSG00000214043_26 (sequence is synthesized)
gaagttcatgacagggagctgctgcaactgatgtgactttcaactctaatatcccgatgatgtaaatgcactgatcagctcagcaggatttaaggtctcatccgctgagcagtgcctcct

SEQ ID NO: 870788 - DNA, 120 bp, Artificial Sequence
  ENSG00000214043_27 (sequence is synthesized)
cattaaagattgaataattgaaggcactatgcttggtgctgaagaaggtctaaggaggtctacaccacagaggctgcacccactcctcagccttgctgagccacaccattctcatctcta

SEQ ID NO: 870789 - DNA, 120 bp, Artificial Sequence
  ENSG00000214043_28 (sequence is synthesized)
agggaacaggtggaggacacttggaagggcacccaccccgggtctcacaggagtctgcacccgcaggtcacactggcattagcccctcatcctctggagttcatctcatccaggcgaaga

SEQ ID NO: 870790 - DNA, 120 bp, Artificial Sequence
  ENSG00000214043_29 (sequence is synthesized)
cagctggctggcctcagagggtgagacgcaactcgagggtaaaaacatttttacagggcatggacacaaaagtggcctttacctctggataagcttttaaaacttcccatttacatgtaa

SEQ ID NO: 870791 - DNA, 120 bp, Artificial Sequence
  ENSG00000214043_30 (sequence is synthesized)
aggtgtactttctatgtgccaccaagaaacctaaagtgagtaaaaggtgtttcactttaatcaagttccccaatgagggggcacagctctgaaaagcactgtcacaacaggagattcgag

SEQ ID NO: 870792 - DNA, 120 bp, Artificial Sequence
  ENSG00000214043_31 (sequence is synthesized)
tgggcactgtcaagagacccagctttgacttcaaatgccacccagagggacaactgctcactttcagagcaggagcaggaggccagaggagagtgtgagtctaacatctgcacagtgaga

SEQ ID NO: 870793 - DNA, 120 bp, Artificial Sequence
  ENSG00000214043_32 (sequence is synthesized)
tgcaacttcattaagacacaaaaaggaacaggatacagaagtggaggcagttcagcgaaaaagatgagaagaaggagaatgtccacaaataaatttcacttataaaagttcagataaaaa

SEQ ID NO: 870794 - DNA, 120 bp, Artificial Sequence
  ENSG00000214043_33 (sequence is synthesized)
caaggggcaagttttctggacttgcctagaccttatagcagattaagtacttttatttcactgaacaaagtttagagatcattttacatcactgaacaaagtttagagatttggagagta

SEQ ID NO: 870795 - DNA, 120 bp, Artificial Sequence
  ENSG00000214043_34 (sequence is synthesized)
tttgtttttaatttctatggatctgcttatacttctcttttgcaaattgaaacaccgtggaagattttttggaacttaggttgagagttgtacatggcttcagagttgctgtggatttct

SEQ ID NO: 870796 - DNA, 120 bp, Artificial Sequence
  ENSG00000214043_35 (sequence is synthesized)
atctccatggggccatctgtctcatctgtctatataatggtcatgcactttgcagagcctgcttcaatgtctgctatactatggccactctgccagtgttgttgacaaacagatgggttt

SEQ ID NO: 870797 - DNA, 120 bp, Artificial Sequence
  ENSG00000214043_36 (sequence is synthesized)
tgatggcagagaaacttatatttagcaagtcttccttttgcccttgaacttttccacctgttgtttgcaccagcaactcccatggcaaatgtgaaaaagcaaaaaataaggaatattaca

SEQ ID NO: 870798 - DNA, 120 bp, Artificial Sequence
  ENSG00000214043_37 (sequence is synthesized)
gttcaataacagggtaagtgctggccaatgatgtcattatcgtccatcctgtggcttccacacatcagtgatcttattagatacctgcaatttcaacccactatatcagaattccatagg

SEQ ID NO: 870799 - DNA, 120 bp, Artificial Sequence
  ENSG00000214043_38 (sequence is synthesized)
ttctttccttgtttatcttggaatttttttccaattgcagccttgaaaaccatttccaataatgtcagaatttgcttaaaagattgtgaaagacggtaatctggattgtaatactgggtc

SEQ ID NO: 870800 - DNA, 120 bp, Artificial Sequence
  ENSG00000214043_39 (sequence is synthesized)
aaagagaccataccaggagccaaccatgctaaatctaactttaaaatacagaattacaatgttaagacaagttccatagagtgataaggtctatgtggtacttactattttacacacatt

SEQ ID NO: 870801 - DNA, 120 bp, Artificial Sequence
  ENSG00000214043_40 (sequence is synthesized)
ttcctacacttagtgtaactgtctcctaattaaatgcaattgttttaaattagctgatgtgtgttttatgtgatatagctttatatcctaagccagaataaaaatattctgagagtgaca

SEQ ID NO: 870802 - DNA, 120 bp, Artificial Sequence
  ENSG00000214043_41 (sequence is synthesized)
gatggcggtggtgagtaaatgtaattatatgtctaaagctatgggcatgaaagcttggcacacatttaagtaagtgcttgataaatgttaattcttacaactattggtatcatttagatt

SEQ ID NO: 870803 - DNA, 120 bp, Artificial Sequence
  ENSG00000214043_42 (sequence is synthesized)
taggttgctgagttagtgggaaataatgtccttatcatgtgaggaatccctattctcaaaaggggttattatcattagaatgctaactgttttcaaaacagctaattgaccattttattc

SEQ ID NO: 870804 - DNA, 120 bp, Artificial Sequence
  ENSG00000214043_43 (sequence is synthesized)
agaagcaccatctgctactcattagggtctaggtttctgtcagctcacgggtgcccatatgtgagttgataaccctatttcagtcttggttgttgaatcctcagtgtctgcggttgactg

SEQ ID NO: 870805 - DNA, 120 bp, Artificial Sequence
  ENSG00000214043_44 (sequence is synthesized)
actatcaggtatttgcatctctgaaagtaattttcagcagtgagtttttagttaggttctttggttacagttctggataattaacactaaaatgagacatcttagaaggctttggctcag

SEQ ID NO: 870806 - DNA, 120 bp, Artificial Sequence
  ENSG00000214043_45 (sequence is synthesized)
ataattgagagaagtgaatgttgaacaagattcaggaagggaagagctgggataccccaatgtctggatttcatgctctttttctccaagcacatccactgtggggcttggcctcaatcc

SEQ ID NO: 870807 - DNA, 120 bp, Artificial Sequence
  ENSG00000214043_46 (sequence is synthesized)
ggtcactggcggcctggttacttgggtcatccctatccacatggcttgtgtgagcttcctcacggcatggcagccgcatagtggctggagttcttacacagtgcctggttttccccagag

SEQ ID NO: 870808 - DNA, 120 bp, Artificial Sequence
  ENSG00000258038_0 (sequence is synthesized)
agtggcaacctgcttgggtccccttccaccctgtggaagctttattcttttgcccttcacaataaatcttgctgctgcttactctttgggtctacattacctttatgagctgtatcgctc

SEQ ID NO: 870809 - DNA, 78 bp, Artificial Sequence
  ENSG00000258038_1 (sequence is synthesized)
actctttgggtctacattacctttatgagctgtatcgctcaccatgagggtctgcggcttcactcctgacagaagcac

SEQ ID NO: 870810 - DNA, 65 bp, Artificial Sequence
  ENSG00000258038_2 (sequence is synthesized)
agaaggaagaaactccggacacatctgaaatctgaagccgacttcattcttaaagtcagtgagac

SEQ ID NO: 870811 - DNA, 90 bp, Artificial Sequence
  ENSG00000258038_3 (sequence is synthesized)
aacccactggaaggaaccaattctgggcacataaatatgcagcaaaatacaatatgtctcactccgtcacccagactggagtgcggcctc

SEQ ID NO: 870812 - DNA, 120 bp, Artificial Sequence
  ENSG00000258038_4 (sequence is synthesized)
tgtacatctagcaatacctaacaaaataggaaatcaacttggaaagccaatggctgtgttttgagtttatggagagccatatgtggcaaggaactgagggtggcatccaggcaacagact

SEQ ID NO: 870813 - DNA, 120 bp, Artificial Sequence
  ENSG00000258038_5 (sequence is synthesized)
tcaagaaactgaggctgtcagtccaacaacccacaagaactgaatctgaccaacaatcacaggaacaaacttagaagtatactctttcccagacaaaccttcagatgagaccacagcccc

SEQ ID NO: 870814 - DNA, 120 bp, Artificial Sequence
  ENSG00000258038_6 (sequence is synthesized)
agccataagcttgaaaacaatctcatgagggaccttgagccacaggcatgtagtaaagctatgccaggaatcctgcctgccccacagaaaatgtaaaaaaaataaatttttattgtttta

SEQ ID NO: 870815 - DNA, 73 bp, Artificial Sequence
  ENSG00000258038_7 (sequence is synthesized)
gtcattctcctgcctcagcttccggagcagctgggactgctggcgcccgccactacgctggcctagcggttct

SEQ ID NO: 870816 - DNA, 88 bp, Artificial Sequence
  ENSG00000258038_8 (sequence is synthesized)
acccgccaacactcttgacaacagtgctgtgctaagaacttgggggacttcaaaaagttcaccagttcctgtgtccatgggtgaaaag

SEQ ID NO: 870817 - DNA, 120 bp, Artificial Sequence
  ENSG00000258038_9 (sequence is synthesized)
ttcaaaaagttcaccagttcctgtgtccatgggtgaaaagattttctacatctttccttgactagaaacagaagtcctgaaacaagaatataacgtcaggaggccagaggctttgtcctg

SEQ ID NO: 870818 - DNA, 120 bp, Artificial Sequence
  ENSG00000258038_10 (sequence is synthesized)
tttccacactgaataaaagcacctgagtcctggtaagtgctcatatgattggctcaataaaagaataataaatgaattggaaagaggagacagtgaaggatataggagatgtacctgata

SEQ ID NO: 870819 - DNA, 120 bp, Artificial Sequence
  ENSG00000258038_11 (sequence is synthesized)
gcaacttactgcctctcagctcaaaattcacccttcaaaaccttttctacaccaatggatagaattcctgtcagcatttctcttttacgttgaacacaatgttaagcttcctcagtgaag

SEQ ID NO: 870820 - DNA, 120 bp, Artificial Sequence
  ENSG00000258038_12 (sequence is synthesized)
gaccctagatggacattgcaggaagaagggacttcccctgttggacctagaggttgtaccagcattgtaggtgggaggacatccactggctctttgcaatagccatgtgtccataaagta

SEQ ID NO: 870821 - DNA, 120 bp, Artificial Sequence
  ENSG00000258038_13 (sequence is synthesized)
aggtgtgagccactgtgcccggctgaaagcctgatatatctttctaccatagcaagaactagcagcaccttacccagtatgagaccgacccaggtctgccttaatatatataccgtaata

SEQ ID NO: 870822 - DNA, 120 bp, Artificial Sequence
  ENSG00000258038_14 (sequence is synthesized)
actttttaccacatggcaaaaataattgtattttgcaacagactaaaagcttaatgctatacagactttgggttggtggagttacttgaggatttactccagcaaaacaaaaaaaagaat

SEQ ID NO: 870823 - DNA, 120 bp, Artificial Sequence
  ENSG00000258038_15 (sequence is synthesized)
gaaagaaagagaaagataaaaatatgaaagaagcaacagacctattccagaaatgtaatgaaaaaaggccacgaagtttgacaactatgtattaaatttacaatcagtccaaattagact

SEQ ID NO: 870824 - DNA, 120 bp, Artificial Sequence
  ENSG00000258038_16 (sequence is synthesized)
ggtagtcagattgatatgagaagtacattttcaaaaagatgtactataccaaataatatgagtgcaaaactctggatgattttagtaataatgtgaagacacatatttcttttgacaatt

SEQ ID NO: 870825 - DNA, 120 bp, Artificial Sequence
  ENSG00000258038_17 (sequence is synthesized)
aaaataggaaatcaacttgataaggacattttctcctaaaactgttagattttatcatctgtataacatacattttttcatctctatagtatgaaaacatccatatggatatgcatcatt

SEQ ID NO: 870826 - DNA, 120 bp, Artificial Sequence
  ENSG00000258038_18 (sequence is synthesized)
gcttttcaggtgtcaaaatttgtggataaatatatagtttataagaagcaaataagtggcaaataacaaactgtgactattaaagtaatatgaaattcaaattcaaataaaaatacatgt

SEQ ID NO: 870827 - DNA, 120 bp, Artificial Sequence
  ENSG00000258038_19 (sequence is synthesized)
gtgactaataaataaagctgatagctcagggttcaaagtaagaaagaactagttatattaatgaagtcatttaacttagctataaaacaataaaaagcaagaacttattgaaaattataa

SEQ ID NO: 870828 - DNA, 120 bp, Artificial Sequence
  ENSG00000258038_20 (sequence is synthesized)
gaatctgtagtactgtcactgcaaccatacgctctagaaatatattgctttagagaaaaagcagcaaggccaaataaattgatacagaagaaatgtttagatatgtttttgcaagtttct

SEQ ID NO: 870829 - DNA, 120 bp, Artificial Sequence
  ENSG00000258038_21 (sequence is synthesized)
gctttgtcctgcctaatgtgttatttccacactgaataaaagcacctgagtcctggttctggagattggggcatgatatcttccttgggccattacttgtcctgccacttggaataggtg

SEQ ID NO: 870830 - DNA, 85 bp, Artificial Sequence
  ENSG00000258038_22 (sequence is synthesized)
tcaggaaacgtcagaaaatacaaaatgctctgtaggaagtaattgtctaaatgagaggtgaagccagtgggacttcctggattgg

SEQ ID NO: 870831 - DNA, 78 bp, Artificial Sequence
  ENSG00000258038_23 (sequence is synthesized)
atcagtgctctgtgtctagctaaaggatcgcaaatgcaccaatcagcactctgtaaaaatctgttagaatgcaccaat

SEQ ID NO: 870832 - DNA, 90 bp, Artificial Sequence
  ENSG00000258038_24 (sequence is synthesized)
tttgtagtcaatcagcgttctgtgtctagctaaaggtttgtagacacatcaatcagcactcagtaaaaacgcaccaatcagcactctgta

SEQ ID NO: 870833 - DNA, 77 bp, Artificial Sequence
  ENSG00000258038_25 (sequence is synthesized)
aaatggaccaagccaataagggaataaaagctggccaccagagccagccagtggcaacctgcttgggtccccttcca

SEQ ID NO: 870834 - DNA, 120 bp, Artificial Sequence
  ENSG00000258038_26 (sequence is synthesized)
gaggcaatgtattgtaatggagatttccgtttcatttctcagcagagagcagccactgtcttttgtgtttggatagacatatggatataagaaaaattatagaataggatagaagacata

SEQ ID NO: 870835 - DNA, 120 bp, Artificial Sequence
  ENSG00000258038_27 (sequence is synthesized)
gtaatctaatgagtgttctgactgaatgttctaacctatgaaattatcagtccaaaactacatgttcagaacttacgtgcaacattatcttgcgttatattagtaagtacattaaaggaa

SEQ ID NO: 870836 - DNA, 120 bp, Artificial Sequence
  ENSG00000258038_28 (sequence is synthesized)
atagtgggaagaataaaattaagagaagaaaaaaggtttttttttctttttacttgaagagcttcttttcaggaatggtatgagtttttccccaagccaccttaattttaaagtggctat

SEQ ID NO: 870837 - DNA, 120 bp, Artificial Sequence
  ENSG00000258038_29 (sequence is synthesized)
aagaacccagagagtggtactaaaagtaactaaaagtctcttaagaggtacttgcttttcaaagctattgctgagattcatgtaaattaaatgtgtgcaaagaaaaatgtgtagagaatt

SEQ ID NO: 870838 - DNA, 120 bp, Artificial Sequence
  ENSG00000258038_30 (sequence is synthesized)
attttaacactcttgactgcttcctccaatttgaatttgttggatttctttttactctcccaaagtccacttaaagaaagaaatgttcaatattaaattaagaaacattaagagaaatac

SEQ ID NO: 870839 - DNA, 120 bp, Artificial Sequence
  ENSG00000258038_31 (sequence is synthesized)
aatttgctaggtgtggcaatatgaccagtgaaaaacaacaagggcagcatttcctgcagttcggtggcacagtatggttcaaagaggtataaaaggaagtcacaggcattttaaaaaggt

SEQ ID NO: 870840 - DNA, 120 bp, Artificial Sequence
  ENSG00000258038_32 (sequence is synthesized)
atatctgaaactactctggctatttaaagcagaaaaggatttaatacaggaattaagttcatacaaatttattggaaggccgggataacaggatccagtacctcagaagtaacccacccg

SEQ ID NO: 870841 - DNA, 120 bp, Artificial Sequence
  ENSG00000258038_33 (sequence is synthesized)
atctgtagtactgtcactgcaaccatacgctctagaaatatattgctttaggtatgcaacccatagattagaaaactatgtactgttgactccagagccacattacatctgttatattgg

SEQ ID NO: 870842 - DNA, 120 bp, Artificial Sequence
  ENSG00000258038_34 (sequence is synthesized)
cacaagcaaaaatggatgcctggaggcctttcaatattcagaaattaattattgggcactgggatctgtgaaaatgctgttgtagaaaaatccagggcccctgtgattatgctgaccaac

SEQ ID NO: 870843 - DNA, 120 bp, Artificial Sequence
  ENSG00000258038_35 (sequence is synthesized)
agaaacggtagacctgtggctttcaaactaccctcctttcaaatatcacgttactatattttattgtccaaacctaaaccacattctgtgttcatctgcaaaagagactcagaaatgtgg

SEQ ID NO: 870844 - DNA, 120 bp, Artificial Sequence
  ENSG00000258038_36 (sequence is synthesized)
attttagcttattagcatcaaaagtgtaggaaagcttagtattgatggtggtgtggacagtgagcacaaatccaccagaactcccactattcttctgtttgtccatttcctgaccattca

SEQ ID NO: 870845 - DNA, 120 bp, Artificial Sequence
  ENSG00000258038_37 (sequence is synthesized)
tgcttctcttcctgtacatacatttccaaacaatattatctacaacaatcaattttcacccaatccaatgcaatgattctcccatacaaataaaacctacttatactgttcccaaaagaa

SEQ ID NO: 870846 - DNA, 120 bp, Artificial Sequence
  ENSG00000249614_0 (sequence is synthesized)
gtagtttacattaaggaagactcctgatgttgtacactctatggattctacaaatgtataatgagacaatcaaacttcagataatcatgcaacaaggtttccagccagttccaggtgtag

SEQ ID NO: 870847 - DNA, 120 bp, Artificial Sequence
  ENSG00000249614_1 (sequence is synthesized)
acaccactcccagccatcaagaaactactgtcaaggcaagggttctgtgatcctcaatagggtaaatgctggaggggctccaatttggaagtgttacattatcaagttaaatcataagag

SEQ ID NO: 870848 - DNA, 120 bp, Artificial Sequence
  ENSG00000249614_2 (sequence is synthesized)
caatttataaaagagatagcttggaattaaactacaaaagctgcttaaggtaaaatatgcgagggaactctcttgttgccattgtgagaccctggagaacagatggaaccaactctcaag

SEQ ID NO: 870849 - DNA, 120 bp, Artificial Sequence
  ENSG00000249613_0 (sequence is synthesized)
agatacatctggtccaatgaacatctgagacagatagctgaaccacatttgtggtgatgaaaggtttggtcagaaaaggaggctgggctgtcgtgtcatgagagagccacaattcttcaa

SEQ ID NO: 870850 - DNA, 120 bp, Artificial Sequence
  ENSG00000249613_1 (sequence is synthesized)
atcagcttcagcacacatctcttcttggcccttgacagaagaagcagagtaacttttcttaggtggcataattcttcaaaatgtgttcattttgaagaacaggggtgatggatggtaata

SEQ ID NO: 870851 - DNA, 120 bp, Artificial Sequence
  ENSG00000249613_2 (sequence is synthesized)
cacaggcagggatcaacagtcccagaactgaaggaagagttgacaaatgtatcaaagatgcctaatcaaaatgtgtccacattctgctaaataaattctggttgagcagaactaacaaaa

SEQ ID NO: 870852 - DNA, 120 bp, Artificial Sequence
  ENSG00000249613_3 (sequence is synthesized)
agaacaagagagggtgggaaaataagaaaggaaaatagaacattttagggaaagggaatagtgtgtgcaaagatgaagaagtataaaagaaaatgtagcttattccagaaactgctaaaa

SEQ ID NO: 870853 - DNA, 120 bp, Artificial Sequence
  ENSG00000249613_4 (sequence is synthesized)
ggatcaatatgctgtcgtgtcatgagagagccacaattcttcaaacatatttaactgctggagagaatggctcagaatcccaggtatcagcttcagcacacagataaaatataagaaaga

SEQ ID NO: 870854 - DNA, 120 bp, Artificial Sequence
  ENSG00000249613_5 (sequence is synthesized)
tcacagtaggtaaatattagattccaaaagtatatgaaaaaacagctgaggaatgtgaaacatagagaaaattctatttgttagcagttctccccctactcctgtgacctgaaaaaaatt

SEQ ID NO: 870855 - DNA, 120 bp, Artificial Sequence
  ENSG00000258035_0 (sequence is synthesized)
ggggaagccgctccgagtcgcccctgagcctagatgggtcgtgagcatcgtcattccagaccaggctgggcagattctgcccggagactgagattgtacatcaggcccacagctgcgcgg

SEQ ID NO: 870856 - DNA, 120 bp, Artificial Sequence
  ENSG00000258035_1 (sequence is synthesized)
cgcattaggagacggcgccatcaataacgaggcttctgcggagcgaacagaatacatgacatacatgatggggattcagctgaaaaattttcagacatctctattcttttatcttctcgg

SEQ ID NO: 870857 - DNA, 120 bp, Artificial Sequence
  ENSG00000258035_2 (sequence is synthesized)
agggggggcccttttgcctctctcttgagtcttggcgaactctggagaaagtaaaagccaaacctgcctgctctctcccgttctcctgaaggctgcacacctgcccctcccgccccgaga

SEQ ID NO: 870858 - DNA, 120 bp, Artificial Sequence
  ENSG00000258035_3 (sequence is synthesized)
ctggggagctcccgggtccagtgattgcatagcacggacgccgctggaaacaccttcgagaattcattaggattgcacaacaagattttagtcgaggaagagatcagttccctcaggtca

SEQ ID NO: 870859 - DNA, 120 bp, Artificial Sequence
  ENSG00000258035_4 (sequence is synthesized)
ctggaatggatcgttaaagtagggcaacaagtgttctgccgcatgacactttttcaaaaatgcgagttggtgagaaagaattcaggagatacctttgtagcgaatggcaccaaccgcagt

SEQ ID NO: 870860 - DNA, 120 bp, Artificial Sequence
  ENSG00000258035_5 (sequence is synthesized)
gagggtctgtggctgttaaacactccgaacaggatttatgtttattgcagtttgcaacacgaattctcctcacctaaaaggaaagaggacaatggttcagatggaattataagcaacagc

SEQ ID NO: 870861 - DNA, 120 bp, Artificial Sequence
  ENSG00000258035_6 (sequence is synthesized)
aggaaaactacaacaccttatctaatgaagggccaaaaagagcctatttatcaacttgaactcaacacctccatactggcactgggcagtgggtctcaagatctaggacatgaagtcatt

SEQ ID NO: 870862 - DNA, 120 bp, Artificial Sequence
  ENSG00000258035_7 (sequence is synthesized)
gtatcacaatcacctggggagcttttgacagtgcgtattcccaggcctctgccgcagagactctcgctaagtctgggggcagagcctaggaagttgtattttttcatttaaaagattttt

SEQ ID NO: 870863 - DNA, 120 bp, Artificial Sequence
  ENSG00000258035_8 (sequence is synthesized)
gacacagggtctcactacgttgcccaggctggttttgaacttctgggctcaaagcactcctcccaaaagtgctgaggttgcaggcgtgcaccactgtgtctggccaggaatctgtatttt

SEQ ID NO: 870864 - DNA, 120 bp, Artificial Sequence
  ENSG00000258035_9 (sequence is synthesized)
aagagctctctctcaggaatgaagtgcttcgtgctgcatcctgccttcaacgacaggaaactgagtttgttacacaaatctctggaagatatggagctaggaagagccgttgccgtctgc

SEQ ID NO: 870865 - DNA, 120 bp, Artificial Sequence
  ENSG00000258035_10 (sequence is synthesized)
agctactgaacacagtgtgatagcacactttatctgccagagctcagttcccaactgtactaaggtttttaaaggcacattgaagttgcagccagcaaacttcagtaagcaacacagcaa

SEQ ID NO: 870866 - DNA, 120 bp, Artificial Sequence
  ENSG00000258035_11 (sequence is synthesized)
ctcctaaaatcgccctatttggggagggggaggctaagacttattaacttcattatattatcgccaacagtgtttatgtctttcaatttatgtcttattaaatattcattatttttaaac

SEQ ID NO: 870867 - DNA, 120 bp, Artificial Sequence
  ENSG00000258035_12 (sequence is synthesized)
ccaccaagtttcattaacatctaaactaaatggattatgggactaaattgatttctgaagcctttaaagtgccatctatatttctttgttgaggttgcgctgcaaggacaagataagcta

SEQ ID NO: 870868 - DNA, 120 bp, Artificial Sequence
  ENSG00000258035_13 (sequence is synthesized)
gccaggatttgtccaatgccctgatcacttttcaaggaaaagatgtcataacctaagagaaggcaatgtttttgcataaaatattctatagtgaactcggtttaagaagatttagggaaa

SEQ ID NO: 870869 - DNA, 120 bp, Artificial Sequence
  ENSG00000258035_14 (sequence is synthesized)
gctcattagagtttctttttcccttgttgaaagatacttttcatgcaatatgggaagatgaggagctgtcctgtgaaaattgaagttaaggaaaaaaattctctgtgggtctaaggttgg

SEQ ID NO: 870870 - DNA, 120 bp, Artificial Sequence
  ENSG00000258035_15 (sequence is synthesized)
aacaatagatcactgtttagataaggaagcctcatgactatgagcagaaaaagaaaagtcggatgacctttaggattaaaaaaataagtaaaaccatgccacacatcttgctttaaaata

SEQ ID NO: 870871 - DNA, 120 bp, Artificial Sequence
  ENSG00000258035_16 (sequence is synthesized)
attatcgaattgactcctgtacacagctctacaaatacagacagggatgctacataaatgaatggatctaaaagattatggcaagactgctcactgagtgtgcaacaaacaaatcccgtt

SEQ ID NO: 870872 - DNA, 120 bp, Artificial Sequence
  ENSG00000258035_17 (sequence is synthesized)
cgtgatcagtgaattattcatgagcatttttctggcccttgcttcgtttgtctgccagtgactctgacggaaacagcccgcgaaggctctctcctcctttgcttctccagcaagagcccc

SEQ ID NO: 870873 - DNA, 120 bp, Artificial Sequence
  ENSG00000258035_18 (sequence is synthesized)
ctgacacccagttgggtttccgatctgctaatgatgatttccatacggatcatggaatcaggttgcctggttttcatacagagacagtccatatgtggccaatggcattttggaaatgag

SEQ ID NO: 870874 - DNA, 120 bp, Artificial Sequence
  ENSG00000258035_19 (sequence is synthesized)
tattagggaataacaaaggctctgccccaggagtgtcagcaggagtttggcactcaatgtggaaacgaggaggaccagggacgaggccctcccacacccctgccaggggcagcgccgtca

SEQ ID NO: 870875 - DNA, 120 bp, Artificial Sequence
  ENSG00000258035_20 (sequence is synthesized)
cctcagctcctggcttgttttgctcacacccctccagtggagttgaaaataaaagaaacagggggagtagtcaaatcatttccccatccctagagctgcctcttgccattgtcaggaaac

SEQ ID NO: 870876 - DNA, 120 bp, Artificial Sequence
  ENSG00000258035_21 (sequence is synthesized)
agcagcccacaaagagggcaccccagctgggcagacccagacatctaggcagccagtcagagcctgcaagtagggcggtgagaggcagggagtaactgagcatcacacagagcactttct

SEQ ID NO: 870877 - DNA, 120 bp, Artificial Sequence
  ENSG00000258035_22 (sequence is synthesized)
gcaggcaaaaccacacagcaggtagtaagggaacttgtggaactcattatgccaggaagttgtacatgctagatagtataaataacttctttagcaggttagagaaataaggagttctag

SEQ ID NO: 870878 - DNA, 120 bp, Artificial Sequence
  ENSG00000258035_23 (sequence is synthesized)
aagggacctctctatttttctctattttgtgaggaaaacaaggactatcctgagctggatccttcagttccaagttgacttcatggaggataaccacgcccttccatttcatagtcccca

SEQ ID NO: 870879 - DNA, 120 bp, Artificial Sequence
  ENSG00000258035_24 (sequence is synthesized)
acactgctgacagatgcagctggcagcccgtgatcctgagccggaattaaccagaatagaggtatttccttgtagttcacaaatgcctctgtaacactgatggattttaataagtgtcat

SEQ ID NO: 870880 - DNA, 120 bp, Artificial Sequence
  ENSG00000249618_0 (sequence is synthesized)
gggtgtgactatcaggaaccatggctcactggagcaccatctttggagtctagctaacacagcatcttggatgcactcctaagagaagactacctgaaaggcgtgtacactggtctagca

SEQ ID NO: 870881 - DNA, 120 bp, Artificial Sequence
  ENSG00000249618_1 (sequence is synthesized)
gttgagatcagctagtgttccatctatcttctgtcatgtatctcttctaagatgtcttgatcgactgaccccaaagccagagggtaccaggtcaaaaagcaagtttggaagtctggaaaa

SEQ ID NO: 870882 - DNA, 120 bp, Artificial Sequence
  ENSG00000249618_2 (sequence is synthesized)
ctggtgtgtgcagagattacatgcaaaggtgctgctggttactcttggttcatctagcaatagatgatctgaatgttagagttcgccaaatattgttcctgggcagtctttgctctacca

SEQ ID NO: 870883 - DNA, 120 bp, Artificial Sequence
  ENSG00000249618_3 (sequence is synthesized)
aatcaactttctccatgggggagctagaagtcaccccacattctccgccatggccagctctacattctaagagaaccaatggctctacccaacatattcttctcaccacagatgacaaag

SEQ ID NO: 870884 - DNA, 120 bp, Artificial Sequence
  ENSG00000249618_4 (sequence is synthesized)
acacaaggagccaagacagatcattcaagcatattcattgcctctatcttcatcccattaaataacatcccgccaaccaaagcaagttatctgcataagaataaatattccacctactct

SEQ ID NO: 870885 - DNA, 120 bp, Artificial Sequence
  ENSG00000249618_5 (sequence is synthesized)
ctgtggacagcacccaagatggaaacaactgacagtctatggccagggctatactctggtgaaactgaaaggtgtctgcatggaagtgtctgactaccaccatccactcaggcaaatgca

SEQ ID NO: 870886 - DNA, 120 bp, Artificial Sequence
  ENSG00000249618_6 (sequence is synthesized)
tttgtttccctctattcattattagaagagaggagattacataccagacatataccaataggttttctcttcataatacctacgtcatctagtagcataacataaggcagaatccttcaa

SEQ ID NO: 870887 - DNA, 120 bp, Artificial Sequence
  ENSG00000249618_7 (sequence is synthesized)
aggttgactcctagagatggaagagctgtaagcagagacagaaaagtatgttttcacacaaactctttggctcattagcagatggcagcaatgagccaataaaatatatttttctccttt

SEQ ID NO: 870888 - DNA, 120 bp, Artificial Sequence
  ENSG00000249618_8 (sequence is synthesized)
ctttggagtctagctaacacagcatcttggatgcactcctaagagaagactacctgaaaggcgtgtacactggtctagcagttgagatcagctagtgttccatctatcttctgtcatgtg

SEQ ID NO: 870889 - DNA, 120 bp, Artificial Sequence
  ENSG00000249618_9 (sequence is synthesized)
gaggagttcttgctctgtcacctagtctggaatgcaagggcacaatcatagctcactgcagcctcatactcctggactcaaatgatcctcctgcctcaccctcctgagtagttgggacta

SEQ ID NO: 870890 - DNA, 120 bp, Artificial Sequence
  ENSG00000249618_10 (sequence is synthesized)
caggctatactggttattgtggatccaaaaatcctaggacacagactttgccctcaaattatttactgcatagtgggtggcctgaaaagcaaacataagcactaaatatggaaaaatgca

SEQ ID NO: 870891 - DNA, 120 bp, Artificial Sequence
  ENSG00000249618_11 (sequence is synthesized)
agcaaagtttctatagaaaacctattacactgtggtataaatcaagatgaacctgcagacatctattttagtttggaagtctggaaaagttcaagattggccatctgcagctggtgagag

SEQ ID NO: 870892 - DNA, 120 bp, Artificial Sequence
  ENSG00000249618_12 (sequence is synthesized)
cctcaggctgcttcccctcatggtggaaggtgaaggggagctggtgtgtgcagagattacatgcttttctaggtcatcattctaggctttgttgaagcatgcatttttggcatgagggtg

SEQ ID NO: 870893 - DNA, 120 bp, Artificial Sequence
  ENSG00000249618_13 (sequence is synthesized)
agcatctctagacagtcacatgcagaataacaactgggttttaggtgtaccaagttcttagtatggaaaaaagatatcctacaaaattttgtctctacacatgttgaagttcatctctca

SEQ ID NO: 870894 - DNA, 120 bp, Artificial Sequence
  ENSG00000249618_14 (sequence is synthesized)
cccctctctactctcttacttatgcttcaagcaaatggaattactttttttcatactgagacattaaaacaggaaatccttcttcctaggactcctgttcaccaccactacctctacaca

SEQ ID NO: 870895 - DNA, 120 bp, Artificial Sequence
  ENSG00000249618_15 (sequence is synthesized)
tagcagatccacgtaagacacttgcatccaagacaagtcagaatgattacatatgaaagttttaattgcactgtatggggatattgctgtgttgtgaattaaataagaattcatattttc

SEQ ID NO: 870896 - DNA, 86 bp, Artificial Sequence
  ENSG00000249618_16 (sequence is synthesized)
tcttgacttcctgtgcagaggttgctaagaaccttggtaagaatcttctatctataaaattgtgaagaagaataaaaaaatttttg

SEQ ID NO: 870897 - DNA, 80 bp, Artificial Sequence
  ENSG00000249618_17 (sequence is synthesized)
attagaagagaggagattacataccagacatataccaccctcccgaccacaggtgatctgcccgcctgagcctcccaaag

SEQ ID NO: 870898 - DNA, 120 bp, Artificial Sequence
  ENSG00000249618_18 (sequence is synthesized)
atgccaaggatgttccatgcatagttccataggagactgcacagttggaacctgggctccaccacactcacaaactatgggacttcagagagcagtcacacacgtggatgatcaaaggtc

SEQ ID NO: 870899 - DNA, 120 bp, Artificial Sequence
  ENSG00000249618_19 (sequence is synthesized)
aagcatctattcttgcctgagtctatctccattgattgcctatagcaatgtcaggctggctgctgttttaaattgagcatttcatgtataaagcataccagctgaggaggcatgtttgct

SEQ ID NO: 870900 - DNA, 120 bp, Artificial Sequence
  ENSG00000249618_20 (sequence is synthesized)
atcagtagaaactgaggcctactgccaacagctacatgtgagggcttgggagaagataccatgattctagttaagccttttgataatggcagctccagcagatagcttgtttgcagcttt

SEQ ID NO: 870901 - DNA, 120 bp, Artificial Sequence
  ENSG00000249618_21 (sequence is synthesized)
caattgtaggggaaccgtctggggaactgaaagaaacctttagggatatgatttggcaaatgcatttgtttccctctattcattattagaagagaggagattacataccagacatatacc

SEQ ID NO: 870902 - DNA, 120 bp, Artificial Sequence
  ENSG00000249618_22 (sequence is synthesized)
agactctctgatcctctcataatttacctattgttgatttcctgaatctttttaaatcctttgcaactgaagatggtctctccatcagagaagcaattaaccaaatgcctgactacagcg

SEQ ID NO: 870903 - DNA, 120 bp, Artificial Sequence
  ENSG00000249618_23 (sequence is synthesized)
ataaaaggttaacttaaatcctggcacacaaaggagatgtcagaccagaacaaatcagcatggaaatacctggaggagatacaaggttaaggtggagcatatgtacagtcaagaggatgt

SEQ ID NO: 870904 - DNA, 120 bp, Artificial Sequence
  ENSG00000249618_24 (sequence is synthesized)
tcatgactagtggaatgtgtttttcagattgcaaagactggaaggtgcaggtgacaaggagattaaacaaggtcacttgttttctttccttctctgaaataaagaaggtcagtctggtaa

SEQ ID NO: 870905 - DNA, 120 bp, Artificial Sequence
  ENSG00000249618_25 (sequence is synthesized)
attgacacctcagagagcaaaattctggcaatgggtcatccttcaatgaataagtagtcattaaaattctactatatgcaaagcaacatgccagctattttgaagcattcaaagaaaggt

SEQ ID NO: 870906 - DNA, 120 bp, Artificial Sequence
  ENSG00000249618_26 (sequence is synthesized)
tttctcttcataatacctacgtcatctagtagcataacataaggcagaatccttcaaaggttgactcctagagatggaagagctgtaagcagagacagaaaagtaataaaaatagacaac

SEQ ID NO: 870907 - DNA, 120 bp, Artificial Sequence
  ENSG00000249618_27 (sequence is synthesized)
tcttggaaacacatgcttcctcttcaatggggacaaagttttaggaatgccaaaagaagaggttagaagagcaattagaagacaagcgtgaataaatgaatctttaaaatgcatctaaaa

SEQ ID NO: 870908 - DNA, 120 bp, Artificial Sequence
  ENSG00000249618_28 (sequence is synthesized)
agcaagatggttgaatgaaaaactccaataaccacagaagactgatttaataatggaatactatcagtaaagctcatttagaatctgtaattagatttcatccttgattatatgtgcaaa

SEQ ID NO: 870909 - DNA, 120 bp, Artificial Sequence
  ENSG00000249618_29 (sequence is synthesized)
tacctcctaagaaaataaccgtttaatagcttaattttggtttagaagccatttccagactttgaatctaatgttctaaatggtttctaaatttttgtgtagtatgatattctatgaaaa

SEQ ID NO: 870910 - DNA, 120 bp, Artificial Sequence
  ENSG00000249618_30 (sequence is synthesized)
tggagctgtactctggagcagcaagtgacaagtgaagacaacctccctccctgccttttctggtctgagtaacattgtcattaaaattgtcaaataaattaagataccaagacaaaaaaa

SEQ ID NO: 870911 - DNA, 120 bp, Artificial Sequence
  ENSG00000249618_31 (sequence is synthesized)
tattatgaatcaacataattcatcttctgcagcttttacctgacaaaagaaaatgtgccttattcttccctatgcaactcaaaatccaaacaaagaactatagacgtgtcaactttcatc

SEQ ID NO: 870912 - DNA, 120 bp, Artificial Sequence
  ENSG00000249618_32 (sequence is synthesized)
gcttaggtattttttaaagaaaaagagaacactttttaaaagattatgcattgcctgagttaagagagttaagaagataaataagaatagatttgttttatcttatagatgaacctcttt

SEQ ID NO: 870913 - DNA, 120 bp, Artificial Sequence
  ENSG00000249618_33 (sequence is synthesized)
ctttcaatcagttattataggatggaataataaaacattaaaatactatacatataaaactaatcattacaaattaaatggactgcactattacaattttagattgaattatgcggtaga

SEQ ID NO: 870914 - DNA, 120 bp, Artificial Sequence
  ENSG00000249618_34 (sequence is synthesized)
taatgatcacaaaggtttaatattcattcaattgagagaagagttcaagttcctcttcacttgaatcttggtgagctctgtgagtgccttatgaatatagctgcaataattccatgccag

SEQ ID NO: 870915 - DNA, 120 bp, Artificial Sequence
  ENSG00000249618_35 (sequence is synthesized)
tttctgggccacagcattaagaggctaatagcatccactttttgtctgttatgacccttgctcttaaggccctaagctgtagtatgagtccaactatcctcctgaataaaccacgtggtg

SEQ ID NO: 870916 - DNA, 120 bp, Artificial Sequence
  ENSG00000249618_36 (sequence is synthesized)
gagaggccctgagattacaaaataaaatagtgagcccagtagaatccagctctgccaagatcccaaacatgggaataaagctgtcttggatccagcagaccacctcagctatctatggct

SEQ ID NO: 870917 - DNA, 120 bp, Artificial Sequence
  ENSG00000249618_37 (sequence is synthesized)
actaccaagtattcatgtcatgtaatatggagctaataattgtccagaatgagcctgcattatttgctatttcacaaaattataaaatatattagaaggtagttattccaaaccactaaa

SEQ ID NO: 870918 - DNA, 120 bp, Artificial Sequence
  ENSG00000249618_38 (sequence is synthesized)
gtggaggcttatggttcagcaaccatagataacagtaggtgatccccactgttgagatgtgatgacttaacacgatagatggagggaggagaaaactagcagaacccacagtgagagaac

SEQ ID NO: 870919 - DNA, 120 bp, Artificial Sequence
  ENSG00000249618_39 (sequence is synthesized)
tggatttagtaacgtacacagacatcttactggagaggaaaattcaaggaagaatttttactgccacttcagtctgtttgtgtccaaactagtgtgtttgaaggcattctggcttatatt

SEQ ID NO: 870920 - DNA, 120 bp, Artificial Sequence
  ENSG00000249618_40 (sequence is synthesized)
attattattattattgttattatttattaccactattattcatatattagtgttttaacttcattgatgagacaagatgacgaactttgacaattcttttgttcatgaaagggatacaat

SEQ ID NO: 870921 - DNA, 120 bp, Artificial Sequence
  ENSG00000249618_41 (sequence is synthesized)
cgcccagctccactttgcctaggctatgatataggaaacaaaattagatctatcctaagaaaacaagaatgaagaatagcttatccaatcaataaaaaattactgtcatttggataagaa

SEQ ID NO: 870922 - DNA, 120 bp, Artificial Sequence
  ENSG00000249618_42 (sequence is synthesized)
catgagacaaaagatatataattgagcactctgatgccaaggatggtgagttactcatctttctattccaggctataactcacatgaaaaagatgaacattaaatacttactaaatttta

SEQ ID NO: 870923 - DNA, 120 bp, Artificial Sequence
  ENSG00000249618_43 (sequence is synthesized)
gacagagactgcaaaccaggtggtgacaattgccctggcaacaccacatttgtatttattcacttactaaattttccaccagatatttttcaatgtagctcattaaaaacatttctgttt

SEQ ID NO: 870924 - DNA, 120 bp, Artificial Sequence
  ENSG00000249618_44 (sequence is synthesized)
tgcccttgtagttattcaagtggtcccaccaacaatgctcgaaaggcacagtaaaccaagcttttctaggtcatcattctaggctttgttgaagcatgcatttttggcatgagggtggca

SEQ ID NO: 870925 - DNA, 120 bp, Artificial Sequence
  ENSG00000249618_45 (sequence is synthesized)
gatataaatggaagtcgactgtgatttttcccagtcattgctttctgttaatgagatctgttttatttctcttttcttttttcgtcctactaaaaatgcatgtgattgtcatagctgaaa

SEQ ID NO: 870926 - DNA, 120 bp, Artificial Sequence
  ENSG00000249618_46 (sequence is synthesized)
ttccctctattcattattagaagagaggagattacataccagacatataccaatagaagcttcaagggtcagatcctgatatggacaagacaccgctgaattctctctccaacaaaagat

SEQ ID NO: 870927 - DNA, 120 bp, Artificial Sequence
  ENSG00000249618_47 (sequence is synthesized)
tacttcaatgcaggaaccaactcccagctgaagattgattacaatattagctatgattggcgggacactgtgactcacgcttgtgatcccagcactgtgggagcctgaggcaggtggatc

SEQ ID NO: 870928 - DNA, 120 bp, Artificial Sequence
  ENSG00000282898_0 (sequence is synthesized)
cttcagaggagatgatttgagtaaactccatctcccatgtggtgttgcaggcctcgtatctactaaactctccttattacaagtcaggaagaaccccttaggcagttactttactatact

SEQ ID NO: 870929 - DNA, 120 bp, Artificial Sequence
  ENSG00000282898_1 (sequence is synthesized)
gaaatataggaaaaaaatcaatcattttcagagctgaacaaactaaatgtttaccataacagatcctcaattaggaaatatctaaataatatacctcagaagagagactatggtcccagc

SEQ ID NO: 870930 - DNA, 120 bp, Artificial Sequence
  ENSG00000282898_2 (sequence is synthesized)
ctcaagcaatcctgccacctcagtctaccaagtagctggaactacagacctgaaccaccacacccagctaattttttattttttgtaaagatggggtctcactgtgttgccctggctgac

SEQ ID NO: 870931 - DNA, 90 bp, Artificial Sequence
  ENSG00000282898_3 (sequence is synthesized)
ttttgtaaagatggggtctcactgtgttgccctggctgacctcaaactcctgaacccaagcaatcctttcagaggaatgagccattgtgt

SEQ ID NO: 870932 - DNA, 120 bp, Artificial Sequence
  ENSG00000233175_0 (sequence is synthesized)
tagctgtttttccagttctgcaatcttggccatggattcgttctccgcgtcccgaagccgctctgtcagctgtagcaccagcacatgttcctccatgtgctccagcacagcgttcttggt

SEQ ID NO: 870933 - DNA, 120 bp, Artificial Sequence
  ENSG00000233175_1 (sequence is synthesized)
gcgcccccacatcaaaaatattgtccaggtacgcctggatctgcacctgcagcttgtcactctcggtgagccgaagcctctgtcccccagatggaaggagtggggtgaggcctggtgtgt

SEQ ID NO: 870934 - DNA, 120 bp, Artificial Sequence
  ENSG00000233175_2 (sequence is synthesized)
gtgtgggggggagtctttccaaaccacccccctgccaccactgccatccagaggaaggggcctgagccctagcctactttttctttattttttaatatataattcacaaatcataaaatc

SEQ ID NO: 870935 - DNA, 120 bp, Artificial Sequence
  ENSG00000233175_3 (sequence is synthesized)
aatccaaacctccctcgcccaactctgcccgccacagatgcccctgggctcccctccagaccctgccccgcatccccgccagcctgaagctcctgcgcacctgggctgggggagccggtc

SEQ ID NO: 870936 - DNA, 120 bp, Artificial Sequence
  ENSG00000233175_4 (sequence is synthesized)
ggcacccccggagtcggagcatcaccgccgctcggagttgccacagcgacggggaggatctcgatggagacagcatcccccggcccccgcagaatacggattaaccccttctcctccagc

SEQ ID NO: 870937 - DNA, 120 bp, Artificial Sequence
  ENSG00000233175_5 (sequence is synthesized)
tcctccaccttcagctccagggccgagggccgcgtcggggcagcgggaggcgctttctcaggctctgggggacgcctggagggccccatggcggtcgattcgctgaagcgctcctacgaa

SEQ ID NO: 870938 - DNA, 120 bp, Artificial Sequence
  ENSG00000233175_6 (sequence is synthesized)
ccccacgggaggggtcagtgcccaccagcaggctccttggcaccaagcctccatcttcttcccggggtggagggagatgtcaagcctagaagcctcagctggcctgttcttgggcgcctg

SEQ ID NO: 870939 - DNA, 120 bp, Artificial Sequence
  ENSG00000233175_7 (sequence is synthesized)
gcctaccacccgccccagcctcacccgcagggtctccaactccttgcgcgcctggcttagctgtttttccagttctgcaatcttggccatggattcgttctccgcgtcccgaagccgctc

SEQ ID NO: 870940 - DNA, 120 bp, Artificial Sequence
  ENSG00000233175_8 (sequence is synthesized)
tgtcagctgtagcaccagcacatggtgagccccgacccgcagcccggcactggcaccgccggtgagggggcggcatcaggcatgcctgcctggaagactgggggaggctcccagatccgc

SEQ ID NO: 870941 - DNA, 120 bp, Artificial Sequence
  ENSG00000233175_9 (sequence is synthesized)
tcagcccaggtgccaagggtgggccgagcctggcactcgaacccaagcaaataaggagaggaaaccaagatggcaaaactgacactgagagagaggaagaggcctatccaaggtcacacg

SEQ ID NO: 870942 - DNA, 120 bp, Artificial Sequence
  ENSG00000233175_10 (sequence is synthesized)
gcaggcaacggcagagccaggatttaaacccaggtctacctgaccccagcactcatgctgctaaccactcagccatactctgccgtgggcaggcagttcagtctggggggcagtacaggg

SEQ ID NO: 870943 - DNA, 120 bp, Artificial Sequence
  ENSG00000233175_11 (sequence is synthesized)
taccacaatgttgatgaactgcatgcaggccacctgggagccagggacatggggagatctatgatcctctaggtggggttgctcaatgccttccacctccacttaccccaagcctccctc

SEQ ID NO: 870944 - DNA, 120 bp, Artificial Sequence
  ENSG00000233175_12 (sequence is synthesized)
cttctccacagttctcactccactaactcccagccttggcctgcccaacatttcacctccatgttccctcaatccagccccctgccaacatccacccttcccctactgaccactcagtcc

SEQ ID NO: 870945 - DNA, 120 bp, Artificial Sequence
  ENSG00000233175_13 (sequence is synthesized)
ttacgctttgcgggggcagagcccattgcccagcacccaggaccctagctgctccctgcacccaagagggcctggcccaggcctcaggctgctgggctcctgagctcaccatgaagtcga

SEQ ID NO: 870946 - DNA, 120 bp, Artificial Sequence
  ENSG00000233175_14 (sequence is synthesized)
tgttgctgtcctcattccggaaatattccatcagcttttcaaagcggtgctgctccccacacacctgggtaaggggaatggctctcactgaggcccagtgacacacgtcctaagctacct

SEQ ID NO: 870947 - DNA, 120 bp, Artificial Sequence
  ENSG00000233175_15 (sequence is synthesized)
tctggctgccacacctgtgcttcaacaggctcctctccagttaattctaagttgagccacgtcactcttctgctcaaaacctccactccctctcaatctcccactctccctcactttttc

SEQ ID NO: 870948 - DNA, 120 bp, Artificial Sequence
  ENSG00000233175_16 (sequence is synthesized)
cactctggccacactggcatcctggcacattcccaccccagggcctttgcacttactgttccaactccctggagtgccctcactcccacaccaagtcccttgcttccttcacagctttgc

SEQ ID NO: 870949 - DNA, 120 bp, Artificial Sequence
  ENSG00000233175_17 (sequence is synthesized)
tgaaatctcacttgctcagtgaggccttccctgaccaccctgcaaccaattccccctccctctgcaacattgctggcttttttctcacagcatttatcatttcctaacatactatgtaat

SEQ ID NO: 870950 - DNA, 120 bp, Artificial Sequence
  ENSG00000233175_18 (sequence is synthesized)
ttgcttgtttattatatcgtttctgtctttccctatatggtttcctttgttcactgatgtgcccaagtgccctgttcctgacacatagtaggcactcaataaatattcattaaaggaatg

SEQ ID NO: 870951 - DNA, 120 bp, Artificial Sequence
  ENSG00000233178_0 (sequence is synthesized)
tataagaggaggaagagagacctgagctagcatgctcagccccctcaccccctgtgctaccttgggactctgcagagtcctcgacagtaagaaggctctcacctgttatgcccctggacc

SEQ ID NO: 870952 - DNA, 120 bp, Artificial Sequence
  ENSG00000233178_1 (sequence is synthesized)
ttggacttctcagcctccataactggtgcctgtgcagcagtattcactgtgataggaagtgagaagcagtctgagtgttcattgctgagggaatcaagggcaaaatatcatggatgcact

SEQ ID NO: 870953 - DNA, 120 bp, Artificial Sequence
  ENSG00000233178_2 (sequence is synthesized)
catggacaaataagcagcagtttgaagcaacaacctagatggatgtacagccatcaagaggatcttaaagtgtggtctttagtggaaaaaaaggaggcagaactccataggctgccctct

SEQ ID NO: 870954 - DNA, 120 bp, Artificial Sequence
  ENSG00000233178_3 (sequence is synthesized)
caccagcaggaggttggagggtgagaagagacaagttggggcatttctcccccctgccaagttcagctcttgtctgacagcccacttttcacaactccagacctcactaggctgtggtca

SEQ ID NO: 870955 - DNA, 120 bp, Artificial Sequence
  ENSG00000233178_4 (sequence is synthesized)
ccctgacctctcccctggacccttcttagtcctaggggtgttaacagcttcctgctattgctgatgctaaggttacatttgaacatatttatctgctaaagcaaaataattcccatcatt

SEQ ID NO: 870956 - DNA, 120 bp, Artificial Sequence
  ENSG00000233178_5 (sequence is synthesized)
ctatagcagaagcaatgtatgggagactgagtaattacatataagctcacatcactatctcttccaccactgtcatccatcatgactgatctgggagatgaaacagcacagatctaaagg

SEQ ID NO: 870957 - DNA, 120 bp, Artificial Sequence
  ENSG00000233178_6 (sequence is synthesized)
acgtggtaagaatcgagatcaccagagatcagtagatacttgcatacttgcaggattaacactgtctggattccaacgatcagctgagtatgttcaagataaagctatagtacatatttt

SEQ ID NO: 870958 - DNA, 120 bp, Artificial Sequence
  ENSG00000233178_7 (sequence is synthesized)
acatgtgtgggtgtcatttctaatcccagcatcacagtcaggtccagatacctgtttctgatctttggtcctatgcctaatctcctccaagagtccttccctggatctcctatctaagca

SEQ ID NO: 870959 - DNA, 120 bp, Artificial Sequence
  ENSG00000233178_8 (sequence is synthesized)
agatgctcgatgcccaccaatgagtactgcaccaagttcatttccactagcctgtgttacaatttgtgtttctgtatgtttcccttacttgttattctttgtcttccgcattagactgaa

SEQ ID NO: 870960 - DNA, 120 bp, Artificial Sequence
  ENSG00000233178_9 (sequence is synthesized)
agcactgccacggggaccatgtctaggacataggaggtccttaataaatatttcttgagtggataaatggtgaaccataggggtggcataagagcaaatagagggtagatgagcactaat

SEQ ID NO: 870961 - DNA, 120 bp, Artificial Sequence
  ENSG00000233178_10 (sequence is synthesized)
ccattcaccaccctgtttatgggtgatggatcttggatggcctttttcatagtcaaaacatactttttagatctggcttcttgggatgtattcaaggatgctagccatgtttgagactgt

SEQ ID NO: 870962 - DNA, 120 bp, Artificial Sequence
  ENSG00000233178_11 (sequence is synthesized)
aaatatgtctagtgaatagggcttcaggctgtgtgtgtttgccttgttttgcacagaattcggcacagccccaagcacagatgggtgcttcataaatattatggaaggatgatgacacaa

SEQ ID NO: 870963 - DNA, 120 bp, Artificial Sequence
  ENSG00000233178_12 (sequence is synthesized)
aagattatttaatacctctacatggggtggagacggacctcaggccacaaacatactttcaatgtgttttacttctgaaatcatttgaaccaaaatgtttcagcaacacagattcatctg

SEQ ID NO: 870964 - DNA, 120 bp, Artificial Sequence
  ENSG00000233178_13 (sequence is synthesized)
caaccacaaatcagacacattcagaatgacaaagccccaaaagaatgccattttcaaggctgaaactgtattattctgggctaaatggaatccttgttttagtgacactgtaagagtaga

SEQ ID NO: 870965 - DNA, 120 bp, Artificial Sequence
  ENSG00000233178_14 (sequence is synthesized)
ccttggggagccacaattatctgtgaacaatgaaagtttgtctgaataattcatcagcctcaagggtacaggcctccccttattctggaatcccaggagtttaggcaagtgtgtcattta

SEQ ID NO: 870966 - DNA, 120 bp, Artificial Sequence
  ENSG00000233178_15 (sequence is synthesized)
atggatctcaactgtgtcctcagttgttattattccagggcctggcatttatgggcacattcctataattttactaattaaagaaaaaataagctatatgggaaaccactgtcaaggtcg

SEQ ID NO: 870967 - DNA, 120 bp, Artificial Sequence
  ENSG00000233178_16 (sequence is synthesized)
aaattttgaagctgcattgattttacctaggaagaaagaagcttataaagtgtccatcatgagaatccacctgggacctacacaacagatcaaatacccagaacaaatcaccaagtcaga

SEQ ID NO: 870968 - DNA, 120 bp, Artificial Sequence
  ENSG00000233178_17 (sequence is synthesized)
gccccacagaattctgattcccaaccagcaagcatgaataatccttttaaatggtcacttacatatcagaacaggtcctttgtgaaatttctaagcaaggcctctggtttctgactgaaa

SEQ ID NO: 870969 - DNA, 120 bp, Artificial Sequence
  ENSG00000233178_18 (sequence is synthesized)
cagagatttattgagaaggaggggtaaagtgaaatcaagaactactgggaaatttccacaagaaacaaggacaaatggtttttgttgtcagaataaaaccagcctcccctagccatggtt

SEQ ID NO: 870970 - DNA, 120 bp, Artificial Sequence
  ENSG00000233178_19 (sequence is synthesized)
tggaaagttatttgctagcccacaggggacaatattctcaactggtttatcagggacccttttgatccaattataattattgggcagatacagtagtaccctattatcagaagacctagt

SEQ ID NO: 870971 - DNA, 120 bp, Artificial Sequence
  ENSG00000233178_20 (sequence is synthesized)
ttcaaatcctgagtcaatttctaattcactgtgtgaccttgtacaagtcacttaagctctctgatcattggttcaacatctttaatatgaggagagtaatacctacctcaattacctcat

SEQ ID NO: 870972 - DNA, 120 bp, Artificial Sequence
  ENSG00000233178_21 (sequence is synthesized)
aaaattattgcaaagatcaagtgagttgatatgttacaaattatttctaaattataagattctgtataagtggaagggttaaatatactcccatattattaaataccctacatatcactc

SEQ ID NO: 870973 - DNA, 120 bp, Artificial Sequence
  ENSG00000233178_22 (sequence is synthesized)
aggatcctatatgactctgagttctcaatttctagaaatggtcccatttttgctttgttccctacaattctacggagtcttttttttttttaaaggaagggtgtaggcaaaggtaaatgg

SEQ ID NO: 870974 - DNA, 120 bp, Artificial Sequence
  ENSG00000233178_23 (sequence is synthesized)
gagaaaacatggaatcacataccactctttggtgctgctaggcaagaattttaaactgagtttagttcaccatcgtggacttaaggtccatatcacctcagggagacaagtagagtggga

SEQ ID NO: 870975 - DNA, 120 bp, Artificial Sequence
  ENSG00000233178_24 (sequence is synthesized)
ggcatccaaaaggtaggtgattcttctcccctctagtgaagaatacaaggtcaatttacaaaaaagcaccagcagcaaataattggaaaattaaattcataaaacattcataatagcgtc

SEQ ID NO: 870976 - DNA, 120 bp, Artificial Sequence
  ENSG00000233178_25 (sequence is synthesized)
catgatttaaaaacactccccagctctatccttgagattcacgctgaagccacggacctccctgaatctagcagaacaccttacacagagaatattaacacattttgttggcagtgaagt

SEQ ID NO: 870977 - DNA, 120 bp, Artificial Sequence
  ENSG00000233178_26 (sequence is synthesized)
tgaagcaacaacctagatggatgtacagccatcaagaggatcttaaagtgtggtctttagtggaaaaaaaggctggagtgcaatggcatggtatcggctcactgcaacctctgtctcctg

SEQ ID NO: 870978 - DNA, 120 bp, Artificial Sequence
  ENSG00000233178_27 (sequence is synthesized)
agtagctgggattacaggcatgcgtcatcatacctagctaatttgtcccatagaatctcatcttctggattttgtggctattttttcatggtgttgattcattcataaggtaaaatttat

SEQ ID NO: 870979 - DNA, 120 bp, Artificial Sequence
  ENSG00000233178_28 (sequence is synthesized)
atatacagtgaaatgcatcttatgggtacaattcaatgagttttgaaaagtgtgtacatccatgtaaccaccacccagattaagacacagaacattcccgtcacctcagaatgtttcccg

SEQ ID NO: 870980 - DNA, 120 bp, Artificial Sequence
  ENSG00000233178_29 (sequence is synthesized)
gtgccttcttcctacccctcatacagtaacattgtaataatttctattgccacatatatgtttacctgttctgaaacttcacagaaatggaattatatattatgtatttgtttgttactg

SEQ ID NO: 870981 - DNA, 120 bp, Artificial Sequence
  ENSG00000233178_30 (sequence is synthesized)
gctttttatcatttaatatttttttattcatccatacccactgcatgtgtcagtatttcattccttcttgttattgtgtagtatacaaatatataaatatatcacaatttatttttgcaa

SEQ ID NO: 870982 - DNA, 120 bp, Artificial Sequence
  ENSG00000233179_0 (sequence is synthesized)
ctctgccctacaaccgacagccacacctcccttggcaccaggatttgcctccagtctgacagccttccttcccagcatgccttgccctggcctgggcagtgttgtccacacccacatgag

SEQ ID NO: 870983 - DNA, 120 bp, Artificial Sequence
  ENSG00000233179_1 (sequence is synthesized)
ggtggtgtcggtgctgcccacgtcccagctgtgaggtcagccagccacagaagcagcagctgtggggacaagcttctgtgcgcagctctgtcgttcagcagctgtgtccttcagaaagcc

SEQ ID NO: 870984 - DNA, 120 bp, Artificial Sequence
  ENSG00000233179_2 (sequence is synthesized)
cagtgactaaggaatatgcccagcagagacacggcaagaccacaaaccatcttgggaccctgagaaagaagacacggtgggcggattcaacagtcttatggggtcacaatgcacagggct

SEQ ID NO: 870985 - DNA, 79 bp, Artificial Sequence
  ENSG00000233179_3 (sequence is synthesized)
gcggattcaacagtcttatggggtcacaatgcacagggcttgtttcctatgaaagagagaatccacttaagaataaact

SEQ ID NO: 870986 - DNA, 120 bp, Artificial Sequence
  ENSG00000275358_0 (sequence is synthesized)
ccatatgggatcctcaagccccctgctgaagcagatgtatgcgcagactccacatacctcatcctcacccggagttcatggggacatcgagaaataggagccagaagggaagggagccct

SEQ ID NO: 870987 - DNA, 120 bp, Artificial Sequence
  ENSG00000275358_1 (sequence is synthesized)
gtcaccttgtgaagctgccaccatggcagccctagagatatagctgagaaagctcctcattttttcttactcaattttttttctcatctctttatctataggtaagcttgcttaaaagaa

SEQ ID NO: 870988 - DNA, 120 bp, Artificial Sequence
  ENSG00000275358_2 (sequence is synthesized)
tcgccaattaccagaggaagtaaggcttgcccaaaaccgagcaaaccagaaccagtggcccctgtcacctttagatcattagcatatcattataatgctaaagtccccactcatagaaga

SEQ ID NO: 870989 - DNA, 120 bp, Artificial Sequence
  ENSG00000275358_3 (sequence is synthesized)
gaatcatagaagagaatcgttgccactttctgcacacgtgtcgtatgaagagcctgttcatgatctgcacctgcgtgtctgaagttcctccccacataagcttacatagctcctgcccca

SEQ ID NO: 870990 - DNA, 120 bp, Artificial Sequence
  ENSG00000275358_4 (sequence is synthesized)
catctaaccctgttacattccccagctccccaccgctctggaagaagctgtctttagagcaagtgctctctccttctccatgcctggccgggaataaaacctgcttttccttttccccaa

SEQ ID NO: 870991 - DNA, 120 bp, Artificial Sequence
  ENSG00000267879_0 (sequence is synthesized)
gctatggtctcctgccttgacctctgtccttcccatctagcctcctgatttattcttcctcagcccacatcttccatcagaggatcccacgaaaacagtgccaaagagaattcagaacta

SEQ ID NO: 870992 - DNA, 120 bp, Artificial Sequence
  ENSG00000267879_1 (sequence is synthesized)
cgtccactggtccagtaacccatgataagaaaactgaggctcagaacgggaagttcattgctcatcatcaaacatccaggaaatggtggagcctgaatgggaactcagcttccaacatgg

SEQ ID NO: 870993 - DNA, 120 bp, Artificial Sequence
  ENSG00000267879_2 (sequence is synthesized)
ggtccacaggccttagattcagtcctgccttgatccctgagctgttccaccatgcagtgtgacagaaagaactagaaagaacttggactttcaacccagctttgaatcctggttgcccac

SEQ ID NO: 870994 - DNA, 120 bp, Artificial Sequence
  ENSG00000267879_3 (sequence is synthesized)
ccaccctgtgacttcggggtctctgttgccaaggctggagtgcagcggcatgatcatagttcattgcagcctcaacctcctggactcaagtattcctcctgcctcagcctcctgagtagc

SEQ ID NO: 870995 - DNA, 120 bp, Artificial Sequence
  ENSG00000267879_4 (sequence is synthesized)
agggaccacagagggaagtgaccagaggactaagtcaaaacactgcaggtagcccaccagagaggtgaggatcagctgggtctttgatgaagtcactgagctggtgaattaaccaacgat

SEQ ID NO: 870996 - DNA, 120 bp, Artificial Sequence
  ENSG00000267879_5 (sequence is synthesized)
ggagcctcttcatgtcatgatttttcagattccccttctgggttagagttgcttggtccttgtagccaaaatcatctttataagacctcaatgttcaatcagaatattgactcagatccc

SEQ ID NO: 870997 - DNA, 120 bp, Artificial Sequence
  ENSG00000267879_6 (sequence is synthesized)
aaatctgatcccaagccacaaatccaaatccgattctaacttgattccatatcttgaagccacataaatcaacaaactcaaccatgcctccagtcttagctctcttcccaaccctcatcc

SEQ ID NO: 870998 - DNA, 120 bp, Artificial Sequence
  ENSG00000267879_7 (sequence is synthesized)
ccatatcccatttcagcccatatcccattttggccattgttaatgtgaagatgaccaatttaatttttagaatagtcttttttaaaaaaacaaattagtaatttggatcctatagctgac

SEQ ID NO: 870999 - DNA, 120 bp, Artificial Sequence
  ENSG00000267879_8 (sequence is synthesized)
tacctctcatctaaatttaattttttcttagtttttcttctatacagtggatttcttattttttagggaaaagttgttgattgtttatgcaatagtttaacaccaatcctttatatattt

SEQ ID NO: 871000 - DNA, 120 bp, Artificial Sequence
  ENSG00000267879_9 (sequence is synthesized)
aacaaatatggattgggtggtagctatctaccaatgaggatacaatggtgtgcaaacctagatagtgtctcttccctcaaggagctgatagtgtcatgtaaaagaaatacagtcaattca

SEQ ID NO: 871001 - DNA, 120 bp, Artificial Sequence
  ENSG00000267879_10 (sequence is synthesized)
taaacaagtgtaaaattacaactacaaggcatgctctgaaagacaggtgcagggtattatgaaggcacttccagaggggttagacccaggaattgactatgagctgagatttgaaagaat

SEQ ID NO: 871002 - DNA, 120 bp, Artificial Sequence
  ENSG00000267879_11 (sequence is synthesized)
attaaactagaagaaatcttctaggaactagaagtagactagaagaaatcttctagtaactagaaatagtaaactagaagaaaatttcttctggtaactagaagaaaatttcttctggta

SEQ ID NO: 871003 - DNA, 120 bp, Artificial Sequence
  ENSG00000267879_12 (sequence is synthesized)
actagaagaaaatgggaggagaatggggagtgtgttgtgtagagaaaagagcatgtgcaaaggcccaaggcattattgctggagctcggaggccagaggttaactgggaccagataatga

SEQ ID NO: 871004 - DNA, 120 bp, Artificial Sequence
  ENSG00000267879_13 (sequence is synthesized)
gctttatcctgtggataatgaagaactatttgaaccttagtcagagaaataacataacaagatttgtattttcaaaacatcaacctagctactgtatgaaggctggatttgggtgggatg

SEQ ID NO: 871005 - DNA, 120 bp, Artificial Sequence
  ENSG00000267879_14 (sequence is synthesized)
tgaagatactgggcaaccatgggggaagtcattgttgttgtctagatgagggaagatggtgacttggatacaggtggttgaaaggtggagacgatgttaagtacatgggttcaaaatgca

SEQ ID NO: 871006 - DNA, 120 bp, Artificial Sequence
  ENSG00000267879_15 (sequence is synthesized)
cttaggagagagaatcaacaagccttggtgatggattgaatgaaggttgtgttgaggtagtggaagatgttaagatttcaaagtctgttgctcgatggacagtgatgccattcattgaga

SEQ ID NO: 871007 - DNA, 120 bp, Artificial Sequence
  ENSG00000267879_16 (sequence is synthesized)
agacatggtagatgtggtcaaatggttctgatatgacaagaaaagacctcagaccctgacttcaagcagaaccctaaatccaacctttactttgacacaactcccaacacgtattttgac

SEQ ID NO: 871008 - DNA, 120 bp, Artificial Sequence
  ENSG00000267879_17 (sequence is synthesized)
ataagccccagcctttttgtttgtttcaatagctttcggggtacaagtggcttttggttacatggatgtatcgtatagcagtgaagtctgagattttagtgcacccatcacccaagtagt

SEQ ID NO: 871009 - DNA, 120 bp, Artificial Sequence
  ENSG00000267879_18 (sequence is synthesized)
gtatattgtacccaatatttatagtgttttatcccttatcctcttcataccctcccccttctgagtctccagtgtccattataccacttggtacccactgcttagctcccacttacacat

SEQ ID NO: 871010 - DNA, 120 bp, Artificial Sequence
  ENSG00000267879_19 (sequence is synthesized)
agttacttcacttagaataatggcttccaactccatccaagttgcttcaaaagacattatttgattctttctatggttgagtagtattccgtggtgcatacacatcacattttctttatc

SEQ ID NO: 871011 - DNA, 120 bp, Artificial Sequence
  ENSG00000267879_20 (sequence is synthesized)
ccgtggtgcatacacatcacattttctttatccactcatcagttgatgggcacttactttggttccatatctttgcaattgtgaattgtactgcgataaacatacgtgtgtatgtgtctt

SEQ ID NO: 871012 - DNA, 90 bp, Artificial Sequence
  ENSG00000267879_21 (sequence is synthesized)
tgtagatctacttttagttctttgagaaatcaccatactgttttccacagaggttgtactactttacattcccaccagcagtgtataagt

SEQ ID NO: 871013 - DNA, 120 bp, Artificial Sequence
  ENSG00000267879_22 (sequence is synthesized)
ccagcagtgtataagtgttcccttttcatcacatccatgccaacatctattgtttttttgactctttagtaagccccagtcttaaccccaaaccttaatctgtacccaatcctgaacctc

SEQ ID NO: 871014 - DNA, 120 bp, Artificial Sequence
  ENSG00000267879_23 (sequence is synthesized)
cccaatcctgaacctcaaattctgctttatccttgatgaaccccaatttgtatctcaaccaataacctaaatcttgactgagttcttgactccaaatatcaactcaggctaggatccaga

SEQ ID NO: 871015 - DNA, 120 bp, Artificial Sequence
  ENSG00000267879_24 (sequence is synthesized)
cctcaatcaaacttaaccctcctgacccttgaccttaaccctgaaccattagccataagccaaactcaaccttgacctgagcagtgaatgtcaccatagcctgagtatcaagcctgccac

SEQ ID NO: 871016 - DNA, 120 bp, Artificial Sequence
  ENSG00000267879_25 (sequence is synthesized)
gggataattcagacattagtctccattcccatcatattctaggaagcccacattcatatcctcccccatgaacccattccctcacatccaacaccaattctaacactctcaccccatccc

SEQ ID NO: 871017 - DNA, 120 bp, Artificial Sequence
  ENSG00000267872_0 (sequence is synthesized)
tgactcatcactggacccagcacacaggtgatgtaattcttctgccttgtttttgtacccaggagccattgtaatccatctctgggcccatcatttaaatgatgtgactatccttttctt

SEQ ID NO: 871018 - DNA, 120 bp, Artificial Sequence
  ENSG00000267872_1 (sequence is synthesized)
cctgagccctattcacagggaaaatagtgacacatctgtgggcttctcaccgaaatgatgtgactttccttcctgggctcacctctcaagggaattttgacatattactggaccaagcac

SEQ ID NO: 871019 - DNA, 120 bp, Artificial Sequence
  ENSG00000267872_2 (sequence is synthesized)
ctaggtgatgtggctctgacaaacgagaaattgtgatgtaccactgttccacacctaagagatctgactctcttttcatgagccctgcatttattgtgtattgtgacatatggcttggtc

SEQ ID NO: 871020 - DNA, 120 bp, Artificial Sequence
  ENSG00000267872_3 (sequence is synthesized)
caacgcctaggtgatgtgactctctacttcttcctcggccatgccaaagaagaggattgtgacatatcactggatccagcacttaggtgatgtaaatcttttcttttgctgagccatgca

SEQ ID NO: 871021 - DNA, 120 bp, Artificial Sequence
  ENSG00000267872_4 (sequence is synthesized)
tatttttggtattgtgacatgtagctggaccgaacacctacaggactggatcagaggctacttaataagccctgcccataggcggccttgtgacatatgtctgcatctatcaccaaagtg

SEQ ID NO: 871022 - DNA, 120 bp, Artificial Sequence
  ENSG00000267872_5 (sequence is synthesized)
atgtgactctttttctgcctgcatcctgcacatagagaagattgtgacatatcgctgggcccagtaaccaggtgatgtgtcttttctggcaggtcttttcccacagggagcattgtaaaa

SEQ ID NO: 871023 - DNA, 120 bp, Artificial Sequence
  ENSG00000267872_6 (sequence is synthesized)
tatcactgggctcggccaccaggttatgtgacccttctgcctgtgccctgcttcctggaaatgtgacattcctcatacagcacccaggtgatgtgactcttctgctcattttctacttat

SEQ ID NO: 871024 - DNA, 120 bp, Artificial Sequence
  ENSG00000267872_7 (sequence is synthesized)
agttgggattgtgacaaatatcctggcccaactcataggtgctatgatgattcccgtacctggaatcagccaatagggagatagtgtctcttgtattgtagcctagggaaacaagtaaga

SEQ ID NO: 871025 - DNA, 89 bp, Artificial Sequence
  ENSG00000267872_8 (sequence is synthesized)
ttaccaatctttggtgtgtttcataaaccatttgggtggcacaaagaatgtcttcagagggcttagcgcacaggtgagattgtttctaa

SEQ ID NO: 871026 - DNA, 120 bp, Artificial Sequence
  ENSG00000267872_9 (sequence is synthesized)
gtcttcagagggcttagcgcacaggtgagattgtttctaaaatgcagaaactgccaactgttaggactgtcacccttacacatggcaaaagccagctagtgagctcctgaatctcacagg

SEQ ID NO: 871027 - DNA, 120 bp, Artificial Sequence
  ENSG00000267872_10 (sequence is synthesized)
tggacacagttcaaagttggaattgtgactgtcatatattaacatttggccacaattaaggtggtgactcattaataaatgcagtacataggtaggtgaagactctctgatctagaccct

SEQ ID NO: 871028 - DNA, 120 bp, Artificial Sequence
  ENSG00000267872_11 (sequence is synthesized)
gtcaactagagagtggggactctgtaatctggaccttgccaactatgctcagaaaggtctcagagcagactgtgacttttatgcacactctacaaagccctcaggcggtgcagaaagtgt

SEQ ID NO: 871029 - DNA, 120 bp, Artificial Sequence
  ENSG00000267872_12 (sequence is synthesized)
tccaacagagcccagcacacaggtgaaaacccctgcctgtgccctgcccatatgggcaattttgacatgttgctgagtctgatacctgggtgatgtaactctctggcctggtcctgccta

SEQ ID NO: 871030 - DNA, 120 bp, Artificial Sequence
  ENSG00000267872_13 (sequence is synthesized)
caaggttttctgtaacatatctatgcaccagtcaactttgtgttttgataatcctcttctaccaatttctgctcaaaagaaggattttgacaaataattgggaccagcacctagctgaca

SEQ ID NO: 871031 - DNA, 120 bp, Artificial Sequence
  ENSG00000267872_14 (sequence is synthesized)
ttattctacttttctttcaaggtttggttttcaggggatgttgtgacatgtcactaggctaacagacaggtgatattcttctgccttggctcttccaaaataaagcatttttacacagtg

SEQ ID NO: 871032 - DNA, 120 bp, Artificial Sequence
  ENSG00000267871_0 (sequence is synthesized)
agtttttcccttacatctaccgggtgtgggaactcacccagcgcatccgactgcacaatgaaaaaaagtagttttcctttacaatgaggcttggcccccagggcgatggtgccacaagcc

SEQ ID NO: 871033 - DNA, 120 bp, Artificial Sequence
  ENSG00000267871_1 (sequence is synthesized)
agatcactgggaccactcagagaaagggaacacagaagcctggcatgccagcaaaaagcagggtttttgtgagcagtgtcttgcaccaaactcctgtctcctcctgtgacttagaatgcc

SEQ ID NO: 871034 - DNA, 120 bp, Artificial Sequence
  ENSG00000267871_2 (sequence is synthesized)
attttgcccagcccctattcaagacggatttgctgtggttcaaatgcttctgacaatattcctcatggtgaatgctggattttgcatgcccgaggccctgggccacactgtatgtttgct

SEQ ID NO: 871035 - DNA, 120 bp, Artificial Sequence
  ENSG00000267871_3 (sequence is synthesized)
ttttgcaagggctgtatggctatgactagttatgtggaccctgcattcctatgtaaatgaccctccataaaaaccccagaaatgaatgcttgagtgaacttccctggcttgtattataat

SEQ ID NO: 871036 - DNA, 120 bp, Artificial Sequence
  ENSG00000267871_4 (sequence is synthesized)
gtgctaggattacagacgtgagccaccccctctggccagactcttataattaaatttaaatggttttttcagaggcatatgaaccagagcaactctatcttaaataggagctgggtaaaa

SEQ ID NO: 871037 - DNA, 90 bp, Artificial Sequence
  ENSG00000267871_5 (sequence is synthesized)
tggttttttcagaggcatatgaaccagagcaactctatcttaaataggagctgggtaaaatgaagctaaaacctactagagtcacaggat

SEQ ID NO: 871038 - DNA, 120 bp, Artificial Sequence
  ENSG00000267871_6 (sequence is synthesized)
aggttgcagtaaaggagctggccaaaaccaccaaaaccaaaatggtgacaagagtgacctctggtcttcctcactgctacactcccatcagtgccacgacagtttacaaatgccatggca

SEQ ID NO: 871039 - DNA, 120 bp, Artificial Sequence
  ENSG00000267871_7 (sequence is synthesized)
aatgccatggcaatgtcagggagttaccctatgtggtctgaaaaggggaggcatgaacaatccaccccttgtttagcaagtcactaagaaataaccataaacatgggcacccagcaaccc

SEQ ID NO: 871040 - DNA, 120 bp, Artificial Sequence
  ENSG00000267871_8 (sequence is synthesized)
tcgggtaacacttttctcgcaaaccacaaaagggacaatgctgaggagacccccctgactcaaaggaaatagactgcagcactgattggatgactttggaatgaaaaaaagtagttttcc

SEQ ID NO: 871041 - DNA, 120 bp, Artificial Sequence
  ENSG00000267871_9 (sequence is synthesized)
gtccctatgtgaccgtaatgggagataacacccagagttttgtgcctgctttcatgtggacttcattctatgtgatttttccctttggtgatcctggtctatatccttttattgtaataa

SEQ ID NO: 871042 - DNA, 120 bp, Artificial Sequence
  ENSG00000225919_0 (sequence is synthesized)
aacctgtggtatgctgagaaagcctggtgaaattgtactcagccttcacacctcaggttagatgtcatttcctatgagaagcccgcctcgttcaggacgtccatgatctctcacagcctt

SEQ ID NO: 871043 - DNA, 120 bp, Artificial Sequence
  ENSG00000225919_1 (sequence is synthesized)
ctcaacacggtgttttatagctttttaaaaaattctgtgatcatattatgctcagcaaacagagagagactattcttgttccctgtgcctaggatgtgcttgatgtatggatctgtctcc

SEQ ID NO: 871044 - DNA, 120 bp, Artificial Sequence
  ENSG00000225919_2 (sequence is synthesized)
agcgggaccagaaaaccatatgtggcaatacttataaactgcctctagctatatagattaatacagaatcatctttctgtatgagttttccaccaataaacatgtgtagatataagcaaa

SEQ ID NO: 871045 - DNA, 120 bp, Artificial Sequence
  ENSG00000229854_0 (sequence is synthesized)
cctgctgcagcggtgggccctgtgaagttttttgaatgcctatgagtggccccttctggctgtgcacgaaggatgagttggggggcaggtagagatggacagccccaggaagaggcaagg

SEQ ID NO: 871046 - DNA, 120 bp, Artificial Sequence
  ENSG00000229854_1 (sequence is synthesized)
cagctgtgcaggtgtccaaggtcccgtggcggaggagccagcctgaggcagtggctgtccaggaccacagaagaaggaaggatctatcctgcttggtcctcacaagagaggagccctgcg

SEQ ID NO: 871047 - DNA, 120 bp, Artificial Sequence
  ENSG00000229854_2 (sequence is synthesized)
tcacacggaggcgcagcagatagaagcccaggcctgggggtgttaagtacagttcaggaggggctctccaggagcctatgggaagtgaaatgtccgcgtcctatgcacataggtgctccc

SEQ ID NO: 871048 - DNA, 120 bp, Artificial Sequence
  ENSG00000229854_3 (sequence is synthesized)
tccctttccctgtccctctctctggggaaaccaactcttctctcttgagctttatcctggctcttccccgccctgctccaggcacaggggctccctcctcaccagccaacccccactgca

SEQ ID NO: 871049 - DNA, 120 bp, Artificial Sequence
  ENSG00000229854_4 (sequence is synthesized)
gcctcagcccctgaccttgttatgaggccagctgctcaggcttgtgtgtggaaatgacctaagcccctcccgagctggcctctttgttctttattgtctgttcctcctgattgcgcctct

SEQ ID NO: 871050 - DNA, 120 bp, Artificial Sequence
  ENSG00000229855_0 (sequence is synthesized)
tgtttgcttctccttctgccatgattcatagtgtccagaatgaatctaagtagaagaagggaagacgagaaggacacaagaaggaagacaaggaaaaatgtcgacctcaaagaactagag

SEQ ID NO: 871051 - DNA, 120 bp, Artificial Sequence
  ENSG00000229855_1 (sequence is synthesized)
gaaaaatgtcgacctcaaagaactagaggaacaacactggagttatacgaaacacccagaattagaatcagagcaatttgattggatttactacagctgattctagatacaagaacttta

SEQ ID NO: 871052 - DNA, 120 bp, Artificial Sequence
  ENSG00000229855_2 (sequence is synthesized)
agtacaataaagaagaatataaatgtaagaatgtagagggtcacaaacattgtttgaaatatccatgcttttcattttggagtgaaaagaggaaaaatactaactgtaaaattaaattca

SEQ ID NO: 871053 - DNA, 120 bp, Artificial Sequence
  ENSG00000229855_3 (sequence is synthesized)
ttactatatcaaagtcaagcctgcctatcaagtcatttgacagttaaaaatgttttgtttatcccataaactttatgaaaaaactagttcattgccaaagggatgttacttacagcaaaa

SEQ ID NO: 871054 - DNA, 120 bp, Artificial Sequence
  ENSG00000229855_4 (sequence is synthesized)
atgtttgcttctccttctgccatgattttcccctatattctcaccagtaactaaaagcttctgggagccttctgcattccgtggtttgggtccctttcctccatcttcaaaaccagtcta

SEQ ID NO: 871055 - DNA, 120 bp, Artificial Sequence
  ENSG00000229855_5 (sequence is synthesized)
tttgggtccctttcctccatcttcaaaaccagtctaacagcattttcatatctctatgatactaatttcctcttttttgaggcataaacatattttcattgaaaatcgtgaagaattgag

SEQ ID NO: 871056 - DNA, 120 bp, Artificial Sequence
  ENSG00000229855_6 (sequence is synthesized)
aaggaaaggagtctgaaattttaaatgtttttttaggtgagattctacaagtcatcaggttctttcttgctggctaagccctaacctctggaattcataatcggaggacctcataaggat

SEQ ID NO: 871057 - DNA, 120 bp, Artificial Sequence
  ENSG00000229855_7 (sequence is synthesized)
tatggaaacagaatttcatggtaaaataagtggaagtgctaaattctcaaggaaacattaacctttaacagtggttgcttctaaagttccaaacataaggttataattctgagaggaata

SEQ ID NO: 871058 - DNA, 120 bp, Artificial Sequence
  ENSG00000229855_8 (sequence is synthesized)
gaaggaagaaaaacttttgtccctaaattttccacttttctcctcgttctcttgtccacaccatatggctagacatgaccactttgaaatgaaggtgatgttgtctttcttggattccat

SEQ ID NO: 871059 - DNA, 120 bp, Artificial Sequence
  ENSG00000229855_9 (sequence is synthesized)
atggcagactgaattttccctcatgggagaagaatcagatactgtataatggattgaaatgcttaagttcatggccagcttcaaaagtaagctgaaggaaggactacttttcaaatgaag

SEQ ID NO: 871060 - DNA, 120 bp, Artificial Sequence
  ENSG00000229855_10 (sequence is synthesized)
aagctaattatttgtgctcgattagatgatgtgggaaatagtgtttctagtttcacttttaaatatcaacaagcaagtcaactgattatagattacgagttgctctttagaaatctggac

SEQ ID NO: 871061 - DNA, 120 bp, Artificial Sequence
  ENSG00000229855_11 (sequence is synthesized)
aaaatgatattccttgtcattgccaatagctcttgtttgcacaaggttcatttatcatctcttcttgttttcaggtttgagcatgagtcattgtggtaaggttcttgtatgtggctgatc

SEQ ID NO: 871062 - DNA, 120 bp, Artificial Sequence
  ENSG00000229855_12 (sequence is synthesized)
atattgaatgctaattcagaacatattgtacaatagacataccaaacttcaataatgattaattttatttagtctattgcttgaattacttgtaaaatatggtttattgttctttaaaag

SEQ ID NO: 871063 - DNA, 120 bp, Artificial Sequence
  ENSG00000229855_13 (sequence is synthesized)
atcaaatattctatcgaaatccaaaccacattaatcatctgtttctaaatactatatatccatgctttgtgtaaatacaacttgatatctaaagctattaaactaaattttaaaattcct

SEQ ID NO: 871064 - DNA, 120 bp, Artificial Sequence
  ENSG00000229855_14 (sequence is synthesized)
ggaagagtatatatacaatgttgatcactccctctctggttctgttttttcaggattcccctgacctctacaacaagtttggttgtctcatattctctccagttccttaggccagctcaa

SEQ ID NO: 871065 - DNA, 120 bp, Artificial Sequence
  ENSG00000229855_15 (sequence is synthesized)
gttttatcagtatcttttggacccaatgagtccttcctggcctcactccagaagaagactggcctcagtccagagaaacaaaaaatgtgaaattcacccactggaactctccttctccaa

SEQ ID NO: 871066 - DNA, 120 bp, Artificial Sequence
  ENSG00000229855_16 (sequence is synthesized)
gtatcagtctccttccagaatttccggcttctggtctcttttcaaggaatttagaagtttcccaaatggctcttcagataattaatatagtggaacttgtacatgggataggaaaccaag

SEQ ID NO: 871067 - DNA, 120 bp, Artificial Sequence
  ENSG00000229855_17 (sequence is synthesized)
gagattgataatgtaccaaagcagattcacttaatttgtgtaaacatatcatataatccttgcagcagcagattcagtgtttaataagaatgagggatatgaaagctaacttgagaatac

SEQ ID NO: 871068 - DNA, 120 bp, Artificial Sequence
  ENSG00000229855_18 (sequence is synthesized)
ttcacaatcaacaattgtttaagaatatcttaaagagaagaatttaaaacatctggttagaagacaaagacctaaaacgtctttaaatgttccatgagcacttgaaaaagcacaggattt

SEQ ID NO: 871069 - DNA, 120 bp, Artificial Sequence
  ENSG00000229855_19 (sequence is synthesized)
gctgcatgcagcctcattaatgatctgtctcaggagtaaagaaaccaccaaggagatcaacttggcaagattttcacttcagattcccctgacctctacaacaagtttggttgtctcata

SEQ ID NO: 871070 - DNA, 120 bp, Artificial Sequence
  ENSG00000229855_20 (sequence is synthesized)
atgtttgcttctccttctgccatgattttcccctatattctcaccagtaactaaaagcatagtgtccagaatgaatctaagtagaagaagggaagacgagaaggacacaagaaggaagac

SEQ ID NO: 871071 - DNA, 120 bp, Artificial Sequence
  ENSG00000229855_21 (sequence is synthesized)
taggctgaatgaatcactggtggaaaaataatgaccaggagccaacaacaagctgaaaaaacaagaatccataatctccatatgagaggaaactgtgtggtaagatggatttaatgggtc

SEQ ID NO: 871072 - DNA, 120 bp, Artificial Sequence
  ENSG00000229855_22 (sequence is synthesized)
tgggctaaaatggtaaaagtataatggatgtagctaaaacaaacaaggtccaactctaaaccagcacaagaaaaacagagcaagggcatttgatttcatttaaaagaaattaaattttaa

SEQ ID NO: 871073 - DNA, 120 bp, Artificial Sequence
  ENSG00000229855_23 (sequence is synthesized)
atcaaagtaaaaaatgtaagtcattacaatattgaggtagttagtggagttgactgtataagaaattggctactactttcaaagggcttcatcattttaaagctatacaaatatttgtct

SEQ ID NO: 871074 - DNA, 120 bp, Artificial Sequence
  ENSG00000229855_24 (sequence is synthesized)
tggataaggttaaaattatgaagacatcaaaattcaaagaaagttcaatgccttttgggggtcagaaagtctgaaaataaaaaattcatgtattttcttttgttcataagaaatgaaaag

SEQ ID NO: 871075 - DNA, 120 bp, Artificial Sequence
  ENSG00000229855_25 (sequence is synthesized)
tggtctttcattttttcccatctaatatatcaatatagcaacttttgtcaaacaaaggagataaacatctgggttactatgggtaagtttttctctttcttttcttaagggcaaccatgc

SEQ ID NO: 871076 - DNA, 120 bp, Artificial Sequence
  ENSG00000229855_26 (sequence is synthesized)
tttccatttgtctgtaatactagaaatatttcactgtatttttctactctatgcctcaactctatatttgacttcattagattttataaattgtctctaaattttattttgtgtttatac

SEQ ID NO: 871077 - DNA, 120 bp, Artificial Sequence
  ENSG00000229855_27 (sequence is synthesized)
tctaaacaaatttatactttagggtttttgcctatggagtcgaaatagtttatcattttctgactgtaattcctgtaacatatttaaaaattaaaaactaacttttttcatgttgaatta

SEQ ID NO: 871078 - DNA, 120 bp, Artificial Sequence
  ENSG00000229855_28 (sequence is synthesized)
gcttctccttctgccatgattttcccctatattctcaccagtaactaaaagcaacttttgtcaaacaaaggagataaacatctgggttactatggcttctgggagccttctgcattccgt

SEQ ID NO: 871079 - DNA, 120 bp, Artificial Sequence
  ENSG00000229855_29 (sequence is synthesized)
gccagtctttcctgtgctattctcgtgttggtgaataagtttcacaacatcgggggcttatcagggctttccgcttttgcttcttcctcattttttctcttgctgccaccatgtgagaag

SEQ ID NO: 871080 - DNA, 120 bp, Artificial Sequence
  ENSG00000229855_30 (sequence is synthesized)
atgactggcttgagtatcaccctaaaccaagttcccctatattctcaccagtaactaaaagcatagtgtccagaatgaatctaagtagaagaagggaagacgagaaggacacaagaagga

SEQ ID NO: 871081 - DNA, 76 bp, Artificial Sequence
  ENSG00000229855_31 (sequence is synthesized)
gatagccccttttgcttggcacttctccttcctgccaccatgtgaaaaaggacatgtttgcttctccttctgccat

SEQ ID NO: 871082 - DNA, 120 bp, Artificial Sequence
  ENSG00000229855_32 (sequence is synthesized)
aggtaaagcaagccccacatggcaaagaactgagggacagacaataagaaacaagctctcagcccaacaagccacaaggaagtgaattttgccaacaaccaagtgagcttggaagcagat

SEQ ID NO: 871083 - DNA, 120 bp, Artificial Sequence
  ENSG00000229855_33 (sequence is synthesized)
ccttccataatcaagctttgagacaaaactgcaacctggattgaccccttgactgcaactttgaagagaacaactaaattgtgtccttactgctgatccacaggattctgtgttgcttta

SEQ ID NO: 871084 - DNA, 120 bp, Artificial Sequence
  ENSG00000229855_34 (sequence is synthesized)
aactactgtttgtggtaacattgtaacacaaatatacataaccaataccatttacatggtgcttactatatgtcaggcactattccaagagtttactcttttaatctacgtaactcaagg

SEQ ID NO: 871085 - DNA, 120 bp, Artificial Sequence
  ENSG00000229855_35 (sequence is synthesized)
atataattcatctcattttataaataaagaagagaacacagagcttaaataacttgtcaaagttcacagagcaagcatctccaatcaaaatatataataatatgcttctctgtaaaaata

SEQ ID NO: 871086 - DNA, 120 bp, Artificial Sequence
  ENSG00000229855_36 (sequence is synthesized)
atattttgttaatgaaatggagtttaataggcctgtatgctacccacatctgaattccactgaagtattttctcacaaatattttatacctcacaaaatattttatacacaaatatttta

SEQ ID NO: 871087 - DNA, 120 bp, Artificial Sequence
  ENSG00000229855_37 (sequence is synthesized)
tatctcacaaaaatttttatacctcctggcaaactcaatcaaaccaagaaataggatgccttaattggttagacaagggagagttgaaattcgtttcagcttgtctgcaatctgtttgta

SEQ ID NO: 871088 - DNA, 120 bp, Artificial Sequence
  ENSG00000229855_38 (sequence is synthesized)
acacagagaagaaatttttgccagaagacaatttaacgagggtgatgtaaatattttagccaatatcatgtaaccatcttcttcccatattaactatcttgttccataatttccatcccc

SEQ ID NO: 871089 - DNA, 120 bp, Artificial Sequence
  ENSG00000229855_39 (sequence is synthesized)
cacttaaacaatcctgatattgcctaatgttaaaatatgtttaaaagaaaagttttaacttaggctaaaatatcattttcataaatagagctaaggaaatgacaattgattagaaaataa

SEQ ID NO: 871090 - DNA, 120 bp, Artificial Sequence
  ENSG00000229855_40 (sequence is synthesized)
atgtcatgttgccacattactgaactacattatactataggatatcccaagtactgtaatgtggagtagtgttagattttggataacagatgggagaccagttttgatgcaaagatttta

SEQ ID NO: 871091 - DNA, 120 bp, Artificial Sequence
  ENSG00000229855_41 (sequence is synthesized)
gttgatttcctgagttaaatcagatgttcatccctataaattaagtagcaatcttatccctattctagcattataaatgcctctattatatcatgtaataaatgttgaccatagttaaaa

SEQ ID NO: 871092 - DNA, 120 bp, Artificial Sequence
  ENSG00000229855_42 (sequence is synthesized)
tacagaagtgtgacatatttctttgatataaccccataaacatcccctacccgtctgtccttccttagcattcagagtactctagccacatggaactaccataccaaaacatttgtttta

SEQ ID NO: 871093 - DNA, 120 bp, Artificial Sequence
  ENSG00000229855_43 (sequence is synthesized)
tacctatgtatgtgtaataatttcataccattgttcagtttattgaatgttgaagatattaaacaggacacttgtgtaatgtaactgctcttggattagtcacaatagaaaggtatttgc

SEQ ID NO: 871094 - DNA, 120 bp, Artificial Sequence
  ENSG00000229855_44 (sequence is synthesized)
ttaggttgtcagctgtgacaaactgaatcactaaattacctcaattttaaaattaataaaagatatttaagatatatcaattttttcttctggtctgataataaaagcatggaaaattca

SEQ ID NO: 871095 - DNA, 120 bp, Artificial Sequence
  ENSG00000229855_45 (sequence is synthesized)
ggaaaatggaaaaatcctatggcttatcaggaaagatgatgttttgtatcaatatgtctaccctgagagctttgtccatcttcttttgttacttttagctaatcctttagaggggcaaag

SEQ ID NO: 871096 - DNA, 120 bp, Artificial Sequence
  ENSG00000229855_46 (sequence is synthesized)
agaacagagaaagaaaatgaaaacaaaaagatggcacgtatcaatcatttatccagataaacctatttccatatattgggtgttctatgtatttaaggatatatgttaataattaactca

SEQ ID NO: 871097 - DNA, 120 bp, Artificial Sequence
  ENSG00000229855_47 (sequence is synthesized)
aaagttatgagtaaatttcatttagctcaaaacgtttccatacacaatctgttatgtcagaaaatattaaccaaggttcccaccttaccgatagaaaaaaataaccaactcccagttgca

SEQ ID NO: 871098 - DNA, 120 bp, Artificial Sequence
  ENSG00000229855_48 (sequence is synthesized)
tcaaatctacagttttggtgaacgttagtttcatgaccattaaaaaacagagattaacagatgctttcagatccaaaataaggcagtcttttatatacaaaagccttggcacatgtctgc

SEQ ID NO: 871099 - DNA, 120 bp, Artificial Sequence
  ENSG00000229855_49 (sequence is synthesized)
aaatgctactgagaaaggtagcattgcaaactgttcagtctcatagttgattcaaaaacactgctcccttctttttcttctctaacatgccagtctagaaattcagctcctgtgccatag

SEQ ID NO: 871100 - DNA, 120 bp, Artificial Sequence
  ENSG00000229855_50 (sequence is synthesized)
ggatgattggtattagagtcttccttcttgcatgcatcccctacagtgctgcaatgaggatggtagaaatgggaaacacgtcccctcttacttgagtgcctgtagcacatttgttaaact

SEQ ID NO: 871101 - DNA, 120 bp, Artificial Sequence
  ENSG00000229855_51 (sequence is synthesized)
gtttgttgtcacttctctgtaaaatattaactggaagttggttccctttttgcagcagccaatgaaatattcattctcttgagattatttgttggtttttcaagaaccttcctctccttg

SEQ ID NO: 871102 - DNA, 120 bp, Artificial Sequence
  ENSG00000229855_52 (sequence is synthesized)
cacaatttcccagtgctagagacttggcttaggattaaatttctttttaaagcatctcaaatcaccatactgtcttttgtcctctggtatgggttgtccagggagtaagtttacttttgt

SEQ ID NO: 871103 - DNA, 120 bp, Artificial Sequence
  ENSG00000229855_53 (sequence is synthesized)
tctgtaataaactacccgcaaacttagtggccccatcacattattatcacttacaattattactaggtgcttcttctggtatggaccacctagtctgatctgtttggctagctcaggcat

SEQ ID NO: 871104 - DNA, 120 bp, Artificial Sequence
  ENSG00000229855_54 (sequence is synthesized)
ctgtagtaaactaatgagtcacctaaccaattggatattataggatagccttgcctatgagtttggagattgaacaactgaggcaacaggcatcttatctacgtgttttttcgttcttca

SEQ ID NO: 871105 - DNA, 120 bp, Artificial Sequence
  ENSG00000229855_55 (sequence is synthesized)
ttttctagaaagttagcaggctgatttacatggtcacccaagctttccaaatgtagccagagagggcaagtttcaatgtatgaaaacttttctagatgagaatgcttcttttgggaagat

SEQ ID NO: 871106 - DNA, 120 bp, Artificial Sequence
  ENSG00000229855_56 (sequence is synthesized)
tctatgtatacccctctcattgctttccacaatattcccagctgaggagagacatgttgaacaattcaaatgaactaataacactcaatttcttaaaatctagtggatgctgatgtgttc

SEQ ID NO: 871107 - DNA, 89 bp, Artificial Sequence
  ENSG00000229852_0 (sequence is synthesized)
gagccagcggagctgcttgcgactacactccaacctgggcaacagagcgggactccattccaaaaaaataagaaaaacagaaaaataat

SEQ ID NO: 871108 - DNA, 120 bp, Artificial Sequence
  ENSG00000229852_1 (sequence is synthesized)
ggactccattccaaaaaaataagaaaaacagaaaaataataattacatctgcaaagaccttatttccagtgaattggatttccctgtgcagcaggcaagaagaatctgttggatgattac

SEQ ID NO: 871109 - DNA, 120 bp, Artificial Sequence
  ENSG00000229852_2 (sequence is synthesized)
agggtccacgaggctggtgtcagacctattgggagaccctctgcgttagtgagaaaaacggcaagaaatgggagcacgcggaaacctccaagactagagccaccagatgccaccgacagc

SEQ ID NO: 871110 - DNA, 120 bp, Artificial Sequence
  ENSG00000229852_3 (sequence is synthesized)
acgcagctggaccagcacgggggagggccttcgtgggtcgagagctcgctcgggagatagttggtgcttttctttcaggagaagaatccctggcggagtctgaccgttctctggcgcaca

SEQ ID NO: 871111 - DNA, 120 bp, Artificial Sequence
  ENSG00000229852_4 (sequence is synthesized)
caagttaaacgcactgttccgtgagcagctttgttggagacagcgcggttcacattctcttccaacggagccgctgactgcggagctgggaggggacgtgacagaacccagccatccaac

SEQ ID NO: 871112 - DNA, 120 bp, Artificial Sequence
  ENSG00000229852_5 (sequence is synthesized)
gtccccccacccctccccagctgggacctccggctgcttccgggctgcgctgggtggcgtcaaggagccgcccctctgggccgcgtccctccctcacgccctgcacactggccctgtgtg

SEQ ID NO: 871113 - DNA, 120 bp, Artificial Sequence
  ENSG00000229852_6 (sequence is synthesized)
gccggcggggcgcctaaaagggcggaaggatgcaggggcggagggggctcgggattgcacgcctagctcagaccccccagccaggacccctcgcgctgttggacacgccagcctcccgac

SEQ ID NO: 871114 - DNA, 120 bp, Artificial Sequence
  ENSG00000229852_7 (sequence is synthesized)
cctgcggctcctacgggaggtgacaaggaccctgccaacctggcctgaatggcccagtttgatacagatcaggttttcaatgaatgagaccgcggtgtggtctaggcggagggatgagag

SEQ ID NO: 871115 - DNA, 120 bp, Artificial Sequence
  ENSG00000229852_8 (sequence is synthesized)
gaggggattctgctgggataagtgggggcggggtaaggaggggattcttttcctgggctgaggagaacgcagggacaaagtacacaggggtagttgagtgagcaggtgaggccctaggct

SEQ ID NO: 871116 - DNA, 120 bp, Artificial Sequence
  ENSG00000229852_9 (sequence is synthesized)
ggttccccaccttctcaggatcggagccactcacttcctggtactctctgcagtctcctggcgttaaataacatccctttgctggagactctggattcacatccataatcgcagcctccc

SEQ ID NO: 871117 - DNA, 120 bp, Artificial Sequence
  ENSG00000229852_10 (sequence is synthesized)
ctactcatcccctcacgcttcccatgaactaaccttgaaggacccgaccagagccctgacctccgtcccacacacctgctacatggaaggtgttctccacatcagttcaaggcagtgtca

SEQ ID NO: 871118 - DNA, 120 bp, Artificial Sequence
  ENSG00000229852_11 (sequence is synthesized)
ttcaggatgttcaggctctaaaccttggactcctcctccagatttctctctccttccttctccttgtctctcccttgcacttacggttcacttttccttcgtagctttgtagctcattcc

SEQ ID NO: 871119 - DNA, 120 bp, Artificial Sequence
  ENSG00000229852_12 (sequence is synthesized)
cccttccactttccacaccaccttctggtctgttaattaaatattacctggtttccactgacaccttccctgggttcccaattgaaaatcacaacatcatcctcctcctctgcttttttt

SEQ ID NO: 871120 - DNA, 120 bp, Artificial Sequence
  ENSG00000229852_13 (sequence is synthesized)
ctccaaattatatcctcacccaattatgtgttattctcattaatcttgcttaattaattagcagacattattaatgcctgtttcccctatcaccaccactagactatgaactcctaagga

SEQ ID NO: 871121 - DNA, 120 bp, Artificial Sequence
  ENSG00000229852_14 (sequence is synthesized)
ctccttccttccaccactgttgtactcgcttcacctagaactgcttggcacatacaatgtgctccataaatatttgttgaatgaaagactagacacaacttaggattcactcccccatgt

SEQ ID NO: 871122 - DNA, 120 bp, Artificial Sequence
  ENSG00000229852_15 (sequence is synthesized)
ggcatccataagccctgtatgcaggtaaaatgtcagtgggttgactaaatactggaagtggaaaaaacttcacctctttggtttgcagttgtctaggatatttaggccaatggaaaatcc

SEQ ID NO: 871123 - DNA, 120 bp, Artificial Sequence
  ENSG00000229852_16 (sequence is synthesized)
agttttccttagaattaagccagtgccgccagacttgccagtttaccatgcttgtctgactggtcctcagcatgggtcatacgtgtccaatgaattcaaacaaaatcttgagaagacacg

SEQ ID NO: 871124 - DNA, 120 bp, Artificial Sequence
  ENSG00000229852_17 (sequence is synthesized)
agcctgggcgacagagcgagactccgtaaaaaaacaaaaaaaaaaccttgcccttcattccccatttctatcataatctacacagagttttgaacaggcattttaaaatcaacaatatat

SEQ ID NO: 871125 - DNA, 120 bp, Artificial Sequence
  ENSG00000229852_18 (sequence is synthesized)
aacaggcattttaaaatcaacaatatattatttacaattttgttagtatacataactctaactcactgttaaaaatcacctgtctttatatccattaaatgacacttgcatatgctccaa

SEQ ID NO: 871126 - DNA, 120 bp, Artificial Sequence
  ENSG00000229852_19 (sequence is synthesized)
agcgcgcggctgcggcgcgggaagcaacccagagccctcctcccgcctgctctgtgtaggagacagcctgcggagcccactgccggcgcgcagagagcccagcagctcttgagtccagga

SEQ ID NO: 871127 - DNA, 120 bp, Artificial Sequence
  ENSG00000229852_20 (sequence is synthesized)
ccagaaggagttcaaggtcctgctccatatgggacagctagattctgagggcaatgttgagatcctcatctccagaaggtgctggtgccagaaatatgacaaaaggctgattgacgggcc

SEQ ID NO: 871128 - DNA, 76 bp, Artificial Sequence
  ENSG00000229852_21 (sequence is synthesized)
ggcagactgagtgagattctgtctaaaaaaaaagaggcctggtgtggcggctcaggcctgtaatcctagcactttg

SEQ ID NO: 871129 - DNA, 120 bp, Artificial Sequence
  ENSG00000229852_22 (sequence is synthesized)
aatcgcttgaacccagagtgtggaagttgcagtgaaccaagatcatgccacttcactccaacctgggcgaaagagcaaaacttcatctcaaaaaaagaaaagtatttaaaaaaaaaaaaa

SEQ ID NO: 871130 - DNA, 68 bp, Artificial Sequence
  ENSG00000229852_23 (sequence is synthesized)
ttgatgggttcttggtctcactgacttcgagaatgaagtgttccttcttatgtttggatgtgttcgga

SEQ ID NO: 871131 - DNA, 89 bp, Artificial Sequence
  ENSG00000229852_24 (sequence is synthesized)
cggagtttcttccttctggtgggttcgtagtctccctggctcaggactgaagctgcagaccttcacggtgagtgtgtttcgttcctccc

SEQ ID NO: 871132 - DNA, 89 bp, Artificial Sequence
  ENSG00000229852_25 (sequence is synthesized)
tagaacaaagcttccacggtgtggaaggggaccccaacgggttgccgctgctggctccggaagcctgcttttattctcttatctggccc

SEQ ID NO: 871133 - DNA, 78 bp, Artificial Sequence
  ENSG00000229852_26 (sequence is synthesized)
ttggacagggcgctgagggtccccactagattaaccagatacagagtgtggatacaaaggttctccaaggccccacca

SEQ ID NO: 871134 - DNA, 120 bp, Artificial Sequence
  ENSG00000229852_27 (sequence is synthesized)
gcccagctggcttcgcctagtggatcctgcaccagggctgcaggtggaggtgcctgccagtcccgcgccctgcggtcgcactcctcagcccttgggtagtcgatgggactgggcgccatg

SEQ ID NO: 871135 - DNA, 120 bp, Artificial Sequence
  ENSG00000229852_28 (sequence is synthesized)
catggagcagggggtggtgctcgtcggggagctcaggcagcacaggagcccgtggagtgggtgggcggctcaggcatggcgggctgcagttcccgagcccttgccccgtgggaaggcagc

SEQ ID NO: 871136 - DNA, 86 bp, Artificial Sequence
  ENSG00000229852_29 (sequence is synthesized)
gtgggcggctcaggcatggcgggctgcagttcccgagcccttgccccgtccagcgccggtggactggcactgctgggggacccagt

SEQ ID NO: 871137 - DNA, 73 bp, Artificial Sequence
  ENSG00000229852_30 (sequence is synthesized)
ccaggcagaggaggcgcggaccaggcgggtctcaaactcccaacctcacgtgatctgcccgcctgggcctccc

SEQ ID NO: 871138 - DNA, 120 bp, Artificial Sequence
  ENSG00000229852_31 (sequence is synthesized)
ttacaggcatgagtcactgtgcccagcctgaatctttttatgcttattgtttgtggattttgtttcattcttacgaatgccctccttattccatgactataaaatatttgctaatggttt

SEQ ID NO: 871139 - DNA, 120 bp, Artificial Sequence
  ENSG00000229852_32 (sequence is synthesized)
tgctaatggtttcctgtggtatggtttgagttttcttttttacatttaaatgtttgatgttcctgaggtgtgattcgatttaggttgttaggtatagttcaaatgaatttttattatttt

SEQ ID NO: 871140 - DNA, 120 bp, Artificial Sequence
  ENSG00000229852_33 (sequence is synthesized)
ggtatagttcaaatgaatttttattatttttattattttacctatttaagtctaattttactgtttgttgttgttgttgttgttggagacagagcctcactctgccacccaggctggagt

SEQ ID NO: 871141 - DNA, 120 bp, Artificial Sequence
  ENSG00000229852_34 (sequence is synthesized)
aaattcctggactccagttatcttcccacctcagtctcctgagcagctgggactacaggcatggaccactatgcctggccaattttttaattgtttttatttttgtggagacaaggtctc

SEQ ID NO: 871142 - DNA, 72 bp, Artificial Sequence
  ENSG00000229852_35 (sequence is synthesized)
aattttttaattgtttttatttttgtggagacaaggtctcaccatcttgcccaggctgatctcaagctcctt

SEQ ID NO: 871143 - DNA, 120 bp, Artificial Sequence
  ENSG00000229852_36 (sequence is synthesized)
aggttataacctgtttattccaatggtaattcaatccttgattgagtaatccgccttttccacagtaatctgaattgtaccctttattaaatattaaatttctatgcatatatgtgggtg

SEQ ID NO: 871144 - DNA, 120 bp, Artificial Sequence
  ENSG00000229852_37 (sequence is synthesized)
tatttttggttttctgttctatttcattgattggtcttttcatgcattaataaaactgcagccttttatttattgaagtattgtactatttagtacgcagataggactaagcctttttca

SEQ ID NO: 871145 - DNA, 120 bp, Artificial Sequence
  ENSG00000229852_38 (sequence is synthesized)
actatttagtacgcagataggactaagcctttttcatgcctgttttttgtagagtttgtagtttaggaatcattttaaaatttttacatggtttaacccaggaggcagaggttgcagtga

SEQ ID NO: 871146 - DNA, 120 bp, Artificial Sequence
  ENSG00000229852_39 (sequence is synthesized)
tagcagcctcacctgccaggctcaaactccagatccaaagtccacaaatatatcataaatctgaagaggaactgggagaagcttctgctggcagctcatgccattgttgccattgaaaac

SEQ ID NO: 871147 - DNA, 120 bp, Artificial Sequence
  ENSG00000229852_40 (sequence is synthesized)
cctgctgatgtgtcatatcctgcaggaatactagctagtgggctgtgctgaagtttgctgctgctgctggagccacatgtattgctggtcacttcacttctggaacctttgctaaccaga

SEQ ID NO: 871148 - DNA, 120 bp, Artificial Sequence
  ENSG00000229852_41 (sequence is synthesized)
tccaatcatcttctgccacccacatcttctggtggttactgattctagggctaactatcagcctctctcaggggcttcttatggtaacctacctacctaccactgctgtatgtaacagat

SEQ ID NO: 871149 - DNA, 120 bp, Artificial Sequence
  ENSG00000229852_42 (sequence is synthesized)
tctcctctgagctatgtggatattgtcatcccatgcaacaacaaggaagctcaatcactgagtctaatgtagtggatgctggcccaggaagctctgtgcatgtgttgcaccatctcccat

SEQ ID NO: 871150 - DNA, 120 bp, Artificial Sequence
  ENSG00000229852_43 (sequence is synthesized)
gatcatgcctgatctctacttctatagagatcctgaagagattgaaaaggaagagtaggctgcagctgaaaaaggaggaatttcaaagtgaatggactgctgtagtgcaagtttactgct

SEQ ID NO: 871151 - DNA, 120 bp, Artificial Sequence
  ENSG00000229852_44 (sequence is synthesized)
actcaatctgaggttgcagactggtttaaagacatgcaggtgccctctgtgcctattcagcagttccctactgaagattggagcacttagcctaccatgaatgactggtctgcaacttcc

SEQ ID NO: 871152 - DNA, 120 bp, Artificial Sequence
  ENSG00000229852_45 (sequence is synthesized)
actgctcagaccactgaatgggtaagaataaccactgagtggccttaagctgttcttccacaagctcttaaacaagatggaaataacgctgatggaaataaacaacagtttccaagaaaa

SEQ ID NO: 871153 - DNA, 120 bp, Artificial Sequence
  ENSG00000229852_46 (sequence is synthesized)
tgggacacaggtgtctggacctttcataagtaaacagaattcctagcgacggaattgtgtatgcagtatggaaacaccttataatatactgtcctggatattgtaaaggtgaaccaacat

SEQ ID NO: 871154 - DNA, 120 bp, Artificial Sequence
  ENSG00000229852_47 (sequence is synthesized)
tctgttaaatttagagcaagttgcagaaaactatatgatacttaattctgtgctatatgtataatggtttcttagggttttttaaattttttttttcttagagacagtgtctcactctct

SEQ ID NO: 871155 - DNA, 72 bp, Artificial Sequence
  ENSG00000229852_48 (sequence is synthesized)
gtctcactctcttgcccagaggctcaagtgatactcccacctcacctcccaagtagctgggactacaggcat

SEQ ID NO: 871156 - DNA, 120 bp, Artificial Sequence
  ENSG00000229851_0 (sequence is synthesized)
tttttttttttttttttaatcattttttggttatgccaggtgtctcctgtgtgtccctccagatccctctccagccctagaaacctgagctctataaatgttgcctctctccactcatct

SEQ ID NO: 871157 - DNA, 120 bp, Artificial Sequence
  ENSG00000229851_1 (sequence is synthesized)
tctctttggcttcaggttgagttcagccaacagatgcccctgtaggatttggacacagggagccaggggagaggggcatcagctgcctggttagcagggctgtgatgattcttctaccta

SEQ ID NO: 871158 - DNA, 120 bp, Artificial Sequence
  ENSG00000229851_2 (sequence is synthesized)
tgactctcagtgctgttgcctcttcctctggatcttggaagcttccatgctgaggtctgaaggttcccatggctgtctctttgcccaaggggcaaactttccatcagggcatcttctgtg

SEQ ID NO: 871159 - DNA, 120 bp, Artificial Sequence
  ENSG00000229851_3 (sequence is synthesized)
aaaaacctcagtcaacacagtaagtgttttcttgttttcctgctgaccaacctaattctggtttcatacagggcagccaggtgcccacctaaaagactgcacttctcaacttccagttgt

SEQ ID NO: 871160 - DNA, 120 bp, Artificial Sequence
  ENSG00000229851_4 (sequence is synthesized)
ttctatggataatggttggaagcagaaattgggttggggcttccagataatcccccctcacagggactgcttcaagagaaagggatgccctttggttctttctcctttccactgcctgga

SEQ ID NO: 871161 - DNA, 120 bp, Artificial Sequence
  ENSG00000229851_5 (sequence is synthesized)
atgtgatgtctgacactgtggcagccatactggcataatgaggccaactctctgccatgctaagagtggcagagctgggaattgaaaagagcctgctagccttgggttgcttccccttga

SEQ ID NO: 871162 - DNA, 120 bp, Artificial Sequence
  ENSG00000229588_0 (sequence is synthesized)
ggggaggggggtcaaggtggcaagcagagctgggggcccagagtccgctcccgtgccgcgcggcgagtcgcttacatgcccaggtcgctgtaggtgttgaagaactccatctgattgcac

SEQ ID NO: 871163 - DNA, 120 bp, Artificial Sequence
  ENSG00000229588_1 (sequence is synthesized)
gatcacctcggagttgttcagcaatgagacacttgccttgaacaaaaaggtttcaaggacgtagaagagctccttttgaaaactatgttgcagcctggaggagaaaggtggtacacttgg

SEQ ID NO: 871164 - DNA, 120 bp, Artificial Sequence
  ENSG00000229588_2 (sequence is synthesized)
tataggccggttggtcccctgaacttctcctagagactcttcctggcagagcctgaatgtaaggaaactgtcagccatcaaaaaaggcagtgaagtcaattaaaaatcaagtgtaaactc

SEQ ID NO: 871165 - DNA, 120 bp, Artificial Sequence
  ENSG00000229588_3 (sequence is synthesized)
ggatctgaagaaatcttgcaagctgaagcctgacagtttggtgcaaacctccgagggctcaccacttcagtagaacatgcatggttcaggtggttttacaggaacaacactaacaaagtc

SEQ ID NO: 871166 - DNA, 120 bp, Artificial Sequence
  ENSG00000229588_4 (sequence is synthesized)
tgttcagcaatgagacacttgccttgaacaaaaaggaggctaactacagaggaccaccctgcccttgcatattccaagacagactcatctccatccttgcgcgtgactcccgtaggactc

SEQ ID NO: 871167 - DNA, 120 bp, Artificial Sequence
  ENSG00000229588_5 (sequence is synthesized)
gcagatggctccgttagtgacctgcttgcataaaaccctcggtccccttccttttctttgaggaagttctcattaacgatcattctccttataatagcctgaataaaatcatatatttaa

SEQ ID NO: 871168 - DNA, 120 bp, Artificial Sequence
  ENSG00000229589_0 (sequence is synthesized)
gctacacttagtgactctgagggacatgcaaccctccccgcatgctgctgctgctgctgcacctacaatcctgccacccccaatgagatctgcccacccctcttggccgccttccccacg

SEQ ID NO: 871169 - DNA, 120 bp, Artificial Sequence
  ENSG00000229589_1 (sequence is synthesized)
ctcaggttttcctcactctttccctgggttccacgcgcccgcgtagcccgaactccgaccctgaggctccgcgtcccggcccccatcgcaggggcgcctctaggaaccagaatcccgcag

SEQ ID NO: 871170 - DNA, 120 bp, Artificial Sequence
  ENSG00000229589_2 (sequence is synthesized)
atgactgcacagacaagatcgtgcccccaagttcggcgagccgggcgcccaccgcgcccccagcccacgcccccggagttcctgcgccacccacagcggccctgagcttcaatctgcact

SEQ ID NO: 871171 - DNA, 120 bp, Artificial Sequence
  ENSG00000229589_3 (sequence is synthesized)
ttcaaaacttcccagttgcctccagagccctgcagttgaagatcttgtctagcacatggttttgctgttttcctcaccccgaactccctccttggagggccatcgttctctgtctcagat

SEQ ID NO: 871172 - DNA, 120 bp, Artificial Sequence
  ENSG00000229589_4 (sequence is synthesized)
tccaccctccttatcacacaactagagcttcggaggaacgtgatggggctcccaactaaggagggaaagaccatcatagctcagggatgaggctccgagatcctcagataacattaattg

SEQ ID NO: 871173 - DNA, 120 bp, Artificial Sequence
  ENSG00000229589_5 (sequence is synthesized)
tcctctgtcttctcttgacttggcacatccttgcttggagcagggcaggagcagctgaaagggaggtggcacctggaggtctcagtcatttcacttctctgagcctcagttttcccatat

SEQ ID NO: 871174 - DNA, 120 bp, Artificial Sequence
  ENSG00000229589_6 (sequence is synthesized)
gcaaagtgaagaggtacactccctcagggttttgcatcttcttaatggcagaaacctagtcaaacaaaatattatgtaaatgttcactataggcagggcgaggtggctcaaacctgtaat

SEQ ID NO: 871175 - DNA, 74 bp, Artificial Sequence
  ENSG00000229589_7 (sequence is synthesized)
tgttcactataggcagggcgaggtggctcaaacctgtaattccagcacttttagaggcccaggaggacctgtct

SEQ ID NO: 871176 - DNA, 69 bp, Artificial Sequence
  ENSG00000229589_8 (sequence is synthesized)
agaatcgcttgaacacaggaggtgacagagtgagactctctctcaaaaaaaaaacaagtttataaagga

SEQ ID NO: 871177 - DNA, 120 bp, Artificial Sequence
  ENSG00000229589_9 (sequence is synthesized)
gtgagactctctctcaaaaaaaaaacaagtttataaaggaatgtatattgttctgattgacattgaaatagggtcaactacccccggtcaccagagcagcaggaacacctcaggggccac

SEQ ID NO: 871178 - DNA, 120 bp, Artificial Sequence
  ENSG00000229589_10 (sequence is synthesized)
atctaagccatttaacacaggattgaatactatgcgactgtgtgccaagcaagaagcagtgttgtatgggacaccctagctgtgtataaggtatctggtaataacacaggaggccacagt

SEQ ID NO: 871179 - DNA, 120 bp, Artificial Sequence
  ENSG00000229589_11 (sequence is synthesized)
gatagactgtgataacggaagtaattccatatccagtttaagtgtcttttctagggagtataaatcgttatctccattccaatatggactgaaaggtatcgacttttatccatgtgccaa

SEQ ID NO: 871180 - DNA, 120 bp, Artificial Sequence
  ENSG00000229589_12 (sequence is synthesized)
aaattagattggctggttcctctcttctactccataccaggtcaggtatcataataaggactcagagtggtccaagctgcccaaatatctgtgtcttccactctgacctgtctgggaacc

SEQ ID NO: 871181 - DNA, 120 bp, Artificial Sequence
  ENSG00000229589_13 (sequence is synthesized)
ccaaatttatatccaactgcttacttgacaactgcagttggtagcctatcaggcatctcaaatttgacctagccaaagcagaagtcctcattttccccgtaaatctcctccccagttttc

SEQ ID NO: 871182 - DNA, 120 bp, Artificial Sequence
  ENSG00000229589_14 (sequence is synthesized)
cctgtctgaatcaatggcataagcaactacaccattgctcaaatcagaaccttatgagtcctactgaaaccagccaaagagtcccatagacagttgtttttgtttttgtttttgtttttg

SEQ ID NO: 871183 - DNA, 120 bp, Artificial Sequence
  ENSG00000229589_15 (sequence is synthesized)
cctcccaaagtgctgggattatagaagttgacccttttgcagttaaagctggaaacttacttgttttatccgagttccttcctcaggaaaggaccttcaggcctctcacaaaaagtatca

SEQ ID NO: 871184 - DNA, 120 bp, Artificial Sequence
  ENSG00000229589_16 (sequence is synthesized)
aagaactgaagccataaaaagtatcaaaagaactgaaaccagatcactgcactagatgctgggcccctcagtcaccatgattgcttccttgcccctcccatgttcctgttttcttacata

SEQ ID NO: 871185 - DNA, 120 bp, Artificial Sequence
  ENSG00000229589_17 (sequence is synthesized)
ttgttacatttctttcctgctatataaacccttggttttggtcagtcaaggagatggatttgagactgcactcccatctccttggctgcagcacctgattaaagccttcttccttggcaa

SEQ ID NO: 871186 - DNA, 120 bp, Artificial Sequence
  ENSG00000224758_0 (sequence is synthesized)
cggagtccaagtactgcctctggagtcgactcccacctcaaacctcactcgaatgatggcgtcccagtcctctctcagaagacgtccatcagcaacgtgattctgtcctcccagccaagc

SEQ ID NO: 871187 - DNA, 120 bp, Artificial Sequence
  ENSG00000224758_1 (sequence is synthesized)
tggcagctcccggagcccctgccctatcgctggtctcccgggctgtgcaggccctgcagggactgtgagccctcctcacgcggaggaagcagagggggctggacctgccggcctggcaca

SEQ ID NO: 871188 - DNA, 120 bp, Artificial Sequence
  ENSG00000224758_2 (sequence is synthesized)
cgtggagaggccgactgttgtgcacactcacgcaggcacacacacacttgctcacacacacactgaactcatgctcacacatgcctgtcaggctcacactcacactcgctcatccgtgca

SEQ ID NO: 871189 - DNA, 120 bp, Artificial Sequence
  ENSG00000224758_3 (sequence is synthesized)
ctgacactcatacacggccagcgtcctaaggcggaagagtgaaggagaaaggcctgcactccaaggctgggctgcaagtgcagcgggggtgaggggtgggggatcgccggagcagaaata

SEQ ID NO: 871190 - DNA, 120 bp, Artificial Sequence
  ENSG00000224758_4 (sequence is synthesized)
aattacagccaacccggtcaacacgtttccaaattttccaagacgtttgctgacgtcgttagctggtgacatcctcttcttcacatttttaaagcttaaaaataaaagtcctggatccaa

SEQ ID NO: 871191 - DNA, 120 bp, Artificial Sequence
  ENSG00000224750_0 (sequence is synthesized)
ctttgtgttcatgtgcattcaatgtttagctgccacttataggtgagaacatgtagtatttggttttctctttcgtttagctcatttaggatagtggcctccagctctatccacgttctg

SEQ ID NO: 871192 - DNA, 120 bp, Artificial Sequence
  ENSG00000224750_1 (sequence is synthesized)
acctttccagtctgcaatacctgcttgaccactaagaccaaacagctcaaattaaagctttccttggccatggtgactgagtcaaggacagactcataatctaaggcaaagcaataagtc

SEQ ID NO: 871193 - DNA, 120 bp, Artificial Sequence
  ENSG00000224750_2 (sequence is synthesized)
atcaggagactcaatacctgcgtgtctctcaaccattggaaaaagtgaatattctttgtatctggatgtgaatgagaaaatacacaaccccaggagctgctagaacccatcttgagtttg

SEQ ID NO: 871194 - DNA, 120 bp, Artificial Sequence
  ENSG00000224750_3 (sequence is synthesized)
ggcatctgtgacaagattctttacccatctttggaaacttataaagaaaatattagaacaaagaagaatgaggaaggcacaaaacagttccagaacttctaagcaaccaaaagtaactga

SEQ ID NO: 871195 - DNA, 120 bp, Artificial Sequence
  ENSG00000224750_4 (sequence is synthesized)
tcatattgtaagaatccagttagctcagaccaaaggaaactccttttaaatttagagcccacagttgaaacctgtgaggtcaaccaactgaaagtaaatacatgattaaataagaatttc

SEQ ID NO: 871196 - DNA, 120 bp, Artificial Sequence
  ENSG00000224750_5 (sequence is synthesized)
cacagttggaattgtgtgcaaagatgaatttgacatagtacctttcaaaagggcctttaagacagaaaagcaacacaaactctccttacagggttgatgacagttagacagaaactgtat

SEQ ID NO: 871197 - DNA, 120 bp, Artificial Sequence
  ENSG00000224750_6 (sequence is synthesized)
gaaactcagcacaatgagaaaagttcattaaaggaaaatcgagaaaatgattagtgttgactgtgagccttgaataatgggcagaattatatccagtggaaatagtagaaagagatagaa

SEQ ID NO: 871198 - DNA, 120 bp, Artificial Sequence
  ENSG00000224750_7 (sequence is synthesized)
gaggttttttaaaaaataaaggcacacagcttgaaacgccttgtacgcagaccagcctcttcctcagcaccccagggagcctcctgatacccctagccatgcttttggatctaatatccc

SEQ ID NO: 871199 - DNA, 120 bp, Artificial Sequence
  ENSG00000224750_8 (sequence is synthesized)
gactaatccaatatggctgagatccttatcaaaaggagaaattcagtcacagggacagacaggtacagagagaagatgatgtcaagagacaacgggagaatgccacatgaaggtggagga

SEQ ID NO: 871200 - DNA, 120 bp, Artificial Sequence
  ENSG00000224750_9 (sequence is synthesized)
ttggagtaatgcatctacaagccaagaaaaccttgttgggagtttgattagacggctgagaaagacagcaaatctacagggtttgtcaaagataagatcgttgtcatggcatgaaaagga

SEQ ID NO: 871201 - DNA, 120 bp, Artificial Sequence
  ENSG00000224750_10 (sequence is synthesized)
tgacctttccagtctgcaatacctgcttgaccactaagaccaaacagctcaaattaaaggtaacaaattccgcagaggcaattgttcaacacaggaaaaagaaaccactttaaggatttt

SEQ ID NO: 871202 - DNA, 120 bp, Artificial Sequence
  ENSG00000224750_11 (sequence is synthesized)
aaactggaagagattttacataagctgttttaaacaaaaccattggatgacctggagtaacagtgtcggaaactcagctgagctggatagagaactgagctgcccgttgttggagaagtt

SEQ ID NO: 871203 - DNA, 120 bp, Artificial Sequence
  ENSG00000224750_12 (sequence is synthesized)
gattaaagcagcagccgaagatcgaagtaacagtcaagactgtaatcacttactgcaatagtataagcaagaggccaaaaccaaagaaactgccaactcacccaggtcttctaaattccc

SEQ ID NO: 871204 - DNA, 120 bp, Artificial Sequence
  ENSG00000224750_13 (sequence is synthesized)
cagaaaggtgcactagtggagggtcagtgaatcaggacagacatgggggtcagctcacgattgaggaagccccaaacaaaaatctccagtagtattatgaaccctggagcaggaggttgg

SEQ ID NO: 871205 - DNA, 120 bp, Artificial Sequence
  ENSG00000224750_14 (sequence is synthesized)
agtgagacaaggagagctaggagtagaagagtatggagtcggaggagggaacggtttcttaaggtctcctcccactctactcttaagaaagcttcagtagaagcacctgaagaaaactcc

SEQ ID NO: 871206 - DNA, 120 bp, Artificial Sequence
  ENSG00000224750_15 (sequence is synthesized)
agcaggaagccctcagataaagaaacttctgaatgaagacacctaggctaggaatgcaaatatgtttaagagcatgggccattaggggaatctgagttccagaatgcaattctctttaaa

SEQ ID NO: 871207 - DNA, 120 bp, Artificial Sequence
  ENSG00000224750_16 (sequence is synthesized)
gattgcaatgcactgggtatgccccaagtctggggagggcaactttcctcggaggggtttgccagataaagcctttgtcattgcctgtggttgggcctgaaatatcaaacatagattttt

SEQ ID NO: 871208 - DNA, 120 bp, Artificial Sequence
  ENSG00000224750_17 (sequence is synthesized)
cacttgatattttaaatgaaaagacccaccaacatatctgatatccatatctgatacccagtagaattggaatgctgctatcaccactgtcactattgtcactaccacacctgcctctag

SEQ ID NO: 871209 - DNA, 120 bp, Artificial Sequence
  ENSG00000224750_18 (sequence is synthesized)
aaacccagcaatctggaggatggaccctggataatgttgcaggcaaacctcatttctctacaactgtgctttccaccaacagtcgattaaaggaagacgaagatcgagtgtgtgtggatg

SEQ ID NO: 871210 - DNA, 120 bp, Artificial Sequence
  ENSG00000224750_19 (sequence is synthesized)
atacagcaaataaaccttcttctagttcttaaagattatggttttcagtgtttagtgagcatccgtgttcatctttaaaggatagaaaaatgcaggaggcatcttgtatccatgaagata

SEQ ID NO: 871211 - DNA, 120 bp, Artificial Sequence
  ENSG00000224750_20 (sequence is synthesized)
ctaaaacacggatttcctcaggaaattgatcactcaagcatccataatcttagtagactgcccttatagtcgtattgcagaatgtgtgatctgccatctactgagggctcatttttccct

SEQ ID NO: 871212 - DNA, 120 bp, Artificial Sequence
  ENSG00000224750_21 (sequence is synthesized)
ctcctctctcatccaagattggtgatagtttcaaatttttctcccactattatgtagaataatttccaaacttgacactcaattgaatcatggtgtccaggaaaatagataaaataaata

SEQ ID NO: 871213 - DNA, 120 bp, Artificial Sequence
  ENSG00000224750_22 (sequence is synthesized)
tgacttcatataccagaagtcatattcctttgaatacaatcagggccataaatggcacttgcttctataacacaaagtgctattataattatatacatgattttttaaataattaagtaa

SEQ ID NO: 871214 - DNA, 120 bp, Artificial Sequence
  ENSG00000224750_23 (sequence is synthesized)
cttggaaccagtttctattgcaataattataagaaacaaagacctccaactgaatgaacccctctgaaatattttaataaactctgaggagtactatttgtcaagcaaagaaatactgaa

SEQ ID NO: 871215 - DNA, 120 bp, Artificial Sequence
  ENSG00000224750_24 (sequence is synthesized)
ttaaggtaaatgccagcttaggatgaaaagaacagcaacagtgcctaccttcattacctcagcctctccctggctaagataatcacttaatcttttatgcctttgctaaaacctcattag

SEQ ID NO: 871216 - DNA, 120 bp, Artificial Sequence
  ENSG00000224750_25 (sequence is synthesized)
taaaaaggagacctgcctactaagcataaggttaaggctttaatggactttagaaatcatttacttttatgactcaaagcactgaagtgcaaattctttttatttgaatatttgagggca

SEQ ID NO: 871217 - DNA, 120 bp, Artificial Sequence
  ENSG00000224750_26 (sequence is synthesized)
ttaaatgagcatttttaatggatttcaattgtcaggataaaataaaatttctcaaggggaatctgaattttaacaaacattaaaatcaaagaagtaaaaagatgaataaatggagaaaaa

SEQ ID NO: 871218 - DNA, 120 bp, Artificial Sequence
  ENSG00000229587_0 (sequence is synthesized)
gttaggtcgaaaattatcaatgatgtgtatctttttataatttgctttatggcaaagcaaaaaaactaaacttttaattcccctcattatgacatagttgtaaacaagtgagggatctgt

SEQ ID NO: 871219 - DNA, 120 bp, Artificial Sequence
  ENSG00000229587_1 (sequence is synthesized)
ggatctgtacctctgagcaagcagagattcttaacttttttatgccttggaaccattgttcagtctgaagcccatggtctgcttttcagaataattttttttttattttatttatttatt

SEQ ID NO: 871220 - DNA, 67 bp, Artificial Sequence
  ENSG00000229587_2 (sequence is synthesized)
ttgaccaggctggagtgcagtggttgcagtgagctgagatcatgccattctagcctgggcagttcct

SEQ ID NO: 871221 - DNA, 120 bp, Artificial Sequence
  ENSG00000229587_3 (sequence is synthesized)
tcattttttgattttttaaaaaatttctagcacttacatatacatgcacacccctacacatatactctgtctgtacccaaattccctatctctttgtatacatgatctaccttttgcact

SEQ ID NO: 871222 - DNA, 120 bp, Artificial Sequence
  ENSG00000229587_4 (sequence is synthesized)
acgtgctttaacgtacttttcatggttattttaaaatccctacctaatgattcttacattctgtttgtgcgactgttttcttgaaggcttccttataacaataagttccacattttcttg

SEQ ID NO: 871223 - DNA, 120 bp, Artificial Sequence
  ENSG00000238201_0 (sequence is synthesized)
aacacccatgcaacgagtctgcgaggccgaatggaagccagctggctgcaggggagagagcaagagagtctggcagaaggtgcacctggagaaggaagtagaggccaggccagtgtggag

SEQ ID NO: 871224 - DNA, 120 bp, Artificial Sequence
  ENSG00000238201_1 (sequence is synthesized)
ggccctgctgctcccggagggtgctcctgccagagttctcctagttccttgcaaggagccctggaaaaacaatcccaccctgggtctaacatagtctcggggacttttaaaccaatgccc

SEQ ID NO: 871225 - DNA, 120 bp, Artificial Sequence
  ENSG00000238201_2 (sequence is synthesized)
agctagaaaaaacatctcaggcagttcgcggatagaagaggaaataatattaagagcctgccatatgttgaatgtttactatgtctcagcagcatataaatgctttagtttcttacagaa

SEQ ID NO: 871226 - DNA, 120 bp, Artificial Sequence
  ENSG00000238202_0 (sequence is synthesized)
gatgctggtttctgcagcagcctctctgcaacctgagggcagcaatgccgacaggcagcaagctgcaggcacacttgacagatgtgaagatctgggttctggggatgctgttgagctgct

SEQ ID NO: 871227 - DNA, 120 bp, Artificial Sequence
  ENSG00000238202_1 (sequence is synthesized)
atggagaacggtttctagatggggagggaatctgcctttggaacttttagcgacctggtatggttcaacattccatcactatgcaaaaataaataaataaattgcagaccaacgtacaaa

SEQ ID NO: 871228 - DNA, 120 bp, Artificial Sequence
  ENSG00000235635_0 (sequence is synthesized)
ctgagctaagtcttgaaagatgacaaggcttttgacaatacacaaatatagggctgccaagtttgatgagtgtaacaaacaaatagagccctgagatacagagtaacactcggggcccac

SEQ ID NO: 871229 - DNA, 120 bp, Artificial Sequence
  ENSG00000235635_1 (sequence is synthesized)
aagagtattccaggcaaaaaaaaaagacatatgtgaggcctgaaggtggttccctgctaagccaagtggccaaagtttgagttctttcatcatcatagtcatggaccaacatctcagcag

SEQ ID NO: 871230 - DNA, 120 bp, Artificial Sequence
  ENSG00000235635_2 (sequence is synthesized)
tggggtcaaaatcatgatcctcagaagacaaagacccaactggaataaaacaaactgaatcactttacacatttacaaggctattaacaaaagaaaataaaaatttgtgttcttctgcca

SEQ ID NO: 871231 - DNA, 120 bp, Artificial Sequence
  ENSG00000286307_0 (sequence is synthesized)
atccctaggaacggctgggacaaaatggaagccacatcaacctccctcactggccaggacaagacaggtgagacactggacagtgaccgcgcaaggatgccctgcagcccccgtgatcac

SEQ ID NO: 871232 - DNA, 120 bp, Artificial Sequence
  ENSG00000286307_1 (sequence is synthesized)
cacagaagatgccacctggggaccgagggtggctgtgcgtgccagccttctggtgccctccccgcctgcggtcacctgtctgaagagcagctcctgctcactgggctggcgctggcccgg

SEQ ID NO: 871233 - DNA, 120 bp, Artificial Sequence
  ENSG00000286307_2 (sequence is synthesized)
ctccacctcccgtgggggctctgcctcttcctcatcgctctcaatgggctcctgcttcacctgcacgccggcctgtgcgtgcgcctccttctgccccggcagccggtccaggtagggctc

SEQ ID NO: 871234 - DNA, 120 bp, Artificial Sequence
  ENSG00000286307_3 (sequence is synthesized)
gtccagcagagcctggtgctcacggagctcctcctccgtctcctccgggtggctctccggctgccgggctggctcgcttggcttggggatgatctgcaaggcggaggtaacacatgaagc

SEQ ID NO: 871235 - DNA, 120 bp, Artificial Sequence
  ENSG00000286307_4 (sequence is synthesized)
acagagagctgggtcctctgagctcatctgacaggagaagggatgctgcaaaccccaccctctggggcagacaatcagggactcagggcaccttatcaccctgccacaggccagcaggca

SEQ ID NO: 871236 - DNA, 120 bp, Artificial Sequence
  ENSG00000286307_5 (sequence is synthesized)
cctttatctcccaacaggcactggggtgcctgagtgcctaagaaaataatgcccagtaggaccccagcccagggtcaaggtgacctggcccagggaaggaggctgactaacatttggggt

SEQ ID NO: 871237 - DNA, 120 bp, Artificial Sequence
  ENSG00000286307_6 (sequence is synthesized)
ttactaagcacctcttctgtgtcaggcaccgagaaacagaaaagaagctgcaggtgtcaacagagtctgcagaggagagcttgagtgtgaaggggagaggccaatgctgacctcacagcc

SEQ ID NO: 871238 - DNA, 120 bp, Artificial Sequence
  ENSG00000286307_7 (sequence is synthesized)
acaactgctaagagaaacagcccaccacccactcagcggaagacaaccacgtccacaatgctcactgcccaatcccaccaacacgccacggcctcccctcctgcaggatcccaccgatgt

SEQ ID NO: 871239 - DNA, 120 bp, Artificial Sequence
  ENSG00000286307_8 (sequence is synthesized)
gccatgacctccctcctgccggatcctgggaacactccaggacctcccttcctgctgaatcccagggatgccacggcctccccttctgcaggatctcagggacaccatgacctcctttct

SEQ ID NO: 871240 - DNA, 120 bp, Artificial Sequence
  ENSG00000286307_9 (sequence is synthesized)
tgcaggattccatgggtgctccatgacctgccccgctatggggccccaagaaccgcaacatcctccctcctgtgggactccctagatgcccccgacctcttttcctgttggatctcacgg

SEQ ID NO: 871241 - DNA, 120 bp, Artificial Sequence
  ENSG00000286307_10 (sequence is synthesized)
atttccccattctggattccaagtatcagcgactcccaaagactgtgaaagaacgtcccacaatcccaaagtcccagatcgaggggtctctccggatgctcgattcatctgtccccgtgg

SEQ ID NO: 871242 - DNA, 120 bp, Artificial Sequence
  ENSG00000286307_11 (sequence is synthesized)
ggaacggcctgaagggcagattcgagggacggtgggacaagccgagttcctggcagagagaggagctacagcgcgtggaggatggatctcggcaccgcatccgactgtttccagaaggaa

SEQ ID NO: 871243 - DNA, 120 bp, Artificial Sequence
  ENSG00000286307_12 (sequence is synthesized)
actgaggtgtgcaaggaagactgacacctgaaatcccccgagcccttgcatttcaacacccttagagcactgcatgctgctccacactcacgcgaggcggcctctccagcagcctgaact

SEQ ID NO: 871244 - DNA, 120 bp, Artificial Sequence
  ENSG00000286307_13 (sequence is synthesized)
acggggcacgggttggtgggcactcagtgtccgcttgctcccaggggtcagccgtatcagacgacaccggtccccacgcagcagggctgagacgcagactcacacacacacaacatggtg

SEQ ID NO: 871245 - DNA, 120 bp, Artificial Sequence
  ENSG00000286307_14 (sequence is synthesized)
agttttcagcctccagagccctgctgtgcctcactgtggaacatcagagacttcagattgggcggggggtttgttttatgattgatcatcccttaactttctttctaagagcagtttaaa

SEQ ID NO: 871246 - DNA, 120 bp, Artificial Sequence
  ENSG00000286307_15 (sequence is synthesized)
gtacggcagtaaaagccgagtgaagaaaacgcagatccattgtttatctctaaaccgaaggcagcttttcttcagaaaagctttcaacctggcacagggaaatggagccaggtccagccg

SEQ ID NO: 871247 - DNA, 120 bp, Artificial Sequence
  ENSG00000286307_16 (sequence is synthesized)
ggtgcaggcagcgtgggtgtcggggcgggccggccatcggcagtgtgggaaccagtaggcggcgtggcacgtaaggaactcagcttcagaaagccaaactcgcagggaggagagtgcagc

SEQ ID NO: 871248 - DNA, 120 bp, Artificial Sequence
  ENSG00000286307_17 (sequence is synthesized)
ggtgggtggccgcgcgtcgggaacaggaacgtgctgtccacgggtgagcgtgccgttgggagaggaataagttccgggacctgatgcacagtttggtggccccgatattcacggacctta

SEQ ID NO: 871249 - DNA, 120 bp, Artificial Sequence
  ENSG00000286307_18 (sequence is synthesized)
ccacagacacaatgagagccccgtgaggccaagggggcatggatgaggtcccttgtggcgatcatttcacaacgcatacaagtatcaaatcatcacgccgtacgctgtaaatacatgcga

SEQ ID NO: 871250 - DNA, 120 bp, Artificial Sequence
  ENSG00000286307_19 (sequence is synthesized)
ctgtttccggttagactttcacaaagccggggagaaacaagttcaactaaggaatctagcaacattgtccccatttgctctgacaggtttctcagtggttgaccaaaaaaagcatgtgtt

SEQ ID NO: 871251 - DNA, 120 bp, Artificial Sequence
  ENSG00000235237_0 (sequence is synthesized)
gtgaagtcgcggccaggagcgtgaccacgctggaccgtgtctgctgcctccccgggagtcgcaagtgcccacaggacaagcaggggaagcaaactgggcccctggcttctgggaagacag

SEQ ID NO: 871252 - DNA, 120 bp, Artificial Sequence
  ENSG00000235237_1 (sequence is synthesized)
catgagggcagaccaaggaaaggcagccgagaccagcagacctgcaagggatctcggaggctctcaggcccagctgcttgctgaatagctgtgcacattgaggctgaagaagtagatgcc

SEQ ID NO: 871253 - DNA, 120 bp, Artificial Sequence
  ENSG00000235237_2 (sequence is synthesized)
catgtcaaagcacccatcaaggttcacaaagaccctttcgaagagcagcgtctggaagtcctcgccgctgtgcagggccgtcttgcggcccactgagaaggcgaagaagcgcttctggca

SEQ ID NO: 871254 - DNA, 120 bp, Artificial Sequence
  ENSG00000235237_3 (sequence is synthesized)
cggggcgccggggctgcccatctcccccttgtcacccttgctgccctgagggccaggctccccttggggaccctccctgcccatgtaccctggcaggcccattgggcctgggtccccttt

SEQ ID NO: 871255 - DNA, 120 bp, Artificial Sequence
  ENSG00000235237_4 (sequence is synthesized)
gtcacctgtggggataaaaaggggacaagtcagggtggacatctgagcctgctccaaggaggtgcccacactcatctgtgacggctctgcccctgtcctggcccagagaagaagccagca

SEQ ID NO: 871256 - DNA, 120 bp, Artificial Sequence
  ENSG00000182912_0 (sequence is synthesized)
aactttccttatggtcatctttgggtggagccaccacttccagttctgatcttctcattctggttgagtacctgggcttgccagtgcaccccccaggaacaccgcctagtccagggctcc

SEQ ID NO: 871257 - DNA, 120 bp, Artificial Sequence
  ENSG00000182912_1 (sequence is synthesized)
cacaggtctcagactgacaggagactgggtcatatgaccagcactagccaatgagctgtgagtacacgtgacacagggacaagctgggtcatgtgactggcactagccaatgagctgtga

SEQ ID NO: 871258 - DNA, 120 bp, Artificial Sequence
  ENSG00000182912_2 (sequence is synthesized)
ggacgtgagcacaggtccagctaggctgggtcatatgacaagcattagccaatgagctgtgaggacacgtgagtacaggtccagctaggctgggacatgtgactggcactggcccatggg

SEQ ID NO: 871259 - DNA, 120 bp, Artificial Sequence
  ENSG00000182912_3 (sequence is synthesized)
acatgtgggagccgtgcatggcagtggccagcgtccttgtcctgcgggggctctgtggacatcactcgccttcagaacactgagccctcctacctcctgatatccagggctgccgatggg

SEQ ID NO: 871260 - DNA, 120 bp, Artificial Sequence
  ENSG00000182912_4 (sequence is synthesized)
aaatcccaggctgccgcggctcctgtgtgctttgaagttttcaggatttttgtcaaacatccggggacccttagctggagaggatggcatgggtgacacgcagctggccagggtgcgcga

SEQ ID NO: 871261 - DNA, 120 bp, Artificial Sequence
  ENSG00000182912_5 (sequence is synthesized)
ctctgctctcaagaccccctggaggcccgccccctgccccccaccagctcattcgttagatgattggaagtgactgcctacgtcttctttcaggataaagcctcaagtcctgcaactatt

SEQ ID NO: 871262 - DNA, 120 bp, Artificial Sequence
  ENSG00000182912_6 (sequence is synthesized)
ggaagatctgaaagagagtaaaccgggaccacgtggttctgcttgggtcggtgccagcggcctggtttctgaaggcttctgaacatcagcatctctctccagatccacggctgctacgtg

SEQ ID NO: 871263 - DNA, 120 bp, Artificial Sequence
  ENSG00000182912_7 (sequence is synthesized)
acgtttcaaatcccttcctggttctggcaaagctcctcaaacatgctccagtgtgctggggctctgcatgtgtgagcctggggccagcagggcgcacgttcatgtcagggcaccagtatg

SEQ ID NO: 871264 - DNA, 120 bp, Artificial Sequence
  ENSG00000182912_8 (sequence is synthesized)
atcctgatgacacatgactggtgtggagccccgggtgtttccacgggaactgctgtcggccggattgctgtgctctgcagctgtgcccaagtccccaagccaccctttcgttgctgctcg

SEQ ID NO: 871265 - DNA, 66 bp, Artificial Sequence
  ENSG00000182912_9 (sequence is synthesized)
ctgtgcccaagtccccaagccaccctttcgttgctgctcgatgtcaccatttgcttttgttgtttt

SEQ ID NO: 871266 - DNA, 85 bp, Artificial Sequence
  ENSG00000182912_10 (sequence is synthesized)
ccaaaggcaccatttgccttttgagccactgtccccgcgtatcgagccctccttgggagtcccaatttccagcccatatcacgct

SEQ ID NO: 871267 - DNA, 120 bp, Artificial Sequence
  ENSG00000182912_11 (sequence is synthesized)
gccctccttgggagtcccaatttccagcccatatcacgctcttggccccagcttgcagctgctttcgcatctcaacctcaccagcctcaagtccaactccaggtcaatgattactggtca

SEQ ID NO: 871268 - DNA, 120 bp, Artificial Sequence
  ENSG00000182912_12 (sequence is synthesized)
gaggggccattcctgctgagccctgtggtcaggctaacccatgaccgaaggctcctgaaccctccttcaggtccgctgtccgcacaccagcacgtggccaccagcccaggacacccttgt

SEQ ID NO: 871269 - DNA, 120 bp, Artificial Sequence
  ENSG00000182912_13 (sequence is synthesized)
atgcgtgttgtggtgagaggactgtgcagggaccagtaagacaaggaacttatgctcagctctgtcccgtgccacatcaaaccaagtgacaggccgcattgcttggcttgatcccagttc

SEQ ID NO: 871270 - DNA, 120 bp, Artificial Sequence
  ENSG00000182912_14 (sequence is synthesized)
tgccacgggcaaagccctccaccgttctgagcctctgtgtccttgtggataacagggaccagtggcagcaagcccctctcaaggtgctgtgagggtgatgtgggcggatgcgggcagagc

SEQ ID NO: 871271 - DNA, 120 bp, Artificial Sequence
  ENSG00000182912_15 (sequence is synthesized)
tcttggcacaggtgctctacagagtcgaggctcagccagtgtgagccgctaccaccacctacctcctgaggctgttaccaaggccaatggctggaaggaatcttgctcacccccaatccc

SEQ ID NO: 871272 - DNA, 120 bp, Artificial Sequence
  ENSG00000182912_16 (sequence is synthesized)
agtgcactgagcctcactctgcccccgtggcaggaggctcatcccgcctcttcctggctcccaggcacgctcacctgttccatccacagcactagcgagctcaaggtgtgttccttctgg

SEQ ID NO: 871273 - DNA, 120 bp, Artificial Sequence
  ENSG00000182912_17 (sequence is synthesized)
cactgctgcctcctcacctgggcgcctgcggctcatctgggcggccacagcagcctcccaatggctcactccctcccagccaccgaccagtcattatcgtgcagccctgtcaaccccaca

SEQ ID NO: 871274 - DNA, 120 bp, Artificial Sequence
  ENSG00000182912_18 (sequence is synthesized)
agggcaggcttcacgtttcacttgcagcctgtggctctgggtggtgaccctgctgcctactcccagccccactgccctgcaggtaccctcccaactttcccagccctcacttcctcctgg

SEQ ID NO: 871275 - DNA, 120 bp, Artificial Sequence
  ENSG00000182912_19 (sequence is synthesized)
tgagggctgggaaagtggggagggtgctccctgacatctgctctcctcgtgccctgaacatccacgtaaagctgcccttccccactggaccatgagtgcccgaagggtggggcggtggtc

SEQ ID NO: 871276 - DNA, 120 bp, Artificial Sequence
  ENSG00000182912_20 (sequence is synthesized)
acctggatgacgctgtgccccagcctgccagagggctgagcacgtgggagtcccggagcaattctctgcacgcattaaggcgtgtgattggtccctgtgagccgcggctcctggtccggc

SEQ ID NO: 871277 - DNA, 120 bp, Artificial Sequence
  ENSG00000182912_21 (sequence is synthesized)
ccctgcgggcttctcaaggtggtcacactcccggtttcctaagctgctcttactcctgctgggtggaggggctccaggaacctgcgactgctgaactccatcttcctcccttctgttttg

SEQ ID NO: 871278 - DNA, 120 bp, Artificial Sequence
  ENSG00000182912_22 (sequence is synthesized)
aagctcattcccatgtgctacctgcaggcttgctctaatgagatgtatgtatggaatgttatgtatggaatgttccagaatgccttcaatcatttcagccataaagccccacccaccaca

SEQ ID NO: 871279 - DNA, 120 bp, Artificial Sequence
  ENSG00000266053_0 (sequence is synthesized)
cctgtctgtcaaccccacacacgctttcccagtttcattttagacgtctcctgaaagctgagcatttgttatcttaaagcctcttaccagtttggatagatatggatcttccaaaattaa

SEQ ID NO: 871280 - DNA, 120 bp, Artificial Sequence
  ENSG00000266053_1 (sequence is synthesized)
atcaatttaggaagattataaaaactgaagtttccggaacaataaatgggagaattaatcttctgaatcaaggacgtatccctgaatctggggagctctctatcaaaatatacatgctgg

SEQ ID NO: 871281 - DNA, 120 bp, Artificial Sequence
  ENSG00000266053_2 (sequence is synthesized)
aaccctaccaaaggaataataaatctggaatgaggctctgactgtctaattaggaaaagactccttcctggaattctgcacatctccctacaccttagtgacggttaaataaataattat

SEQ ID NO: 871282 - DNA, 120 bp, Artificial Sequence
  ENSG00000266053_3 (sequence is synthesized)
ggaagcgggacgtaccaagcggcaggcggcggaggggtgcgggccggaactccgcccttcgtgctggtcggtctccacgccccactcggactagtgtcaccgcctccccgccgcagacac

SEQ ID NO: 871283 - DNA, 120 bp, Artificial Sequence
  ENSG00000266053_4 (sequence is synthesized)
tatccgacaaaggagggggaatcaaaggctgggcgaagaggcagggcaggcgccggtgacgctgctgggcaagcgggctctgcagtagcatttgtggcgaccgtggcagtggctgtgact

SEQ ID NO: 871284 - DNA, 120 bp, Artificial Sequence
  ENSG00000266053_5 (sequence is synthesized)
ggaagcttctggaaatggcggcgatgaggacccccacatagggatggccatagcagccacaaaaggaagcaaacaagaacaagtcctgatggagcaatttatgaagacaggcagcataga

SEQ ID NO: 871285 - DNA, 120 bp, Artificial Sequence
  ENSG00000266053_6 (sequence is synthesized)
cacatagggtattcacctgttatttttacacggggtgggtggacgagcgtgatccaactcaggcaaaatgacgctgcgaccgcagcccgaggactaggcgaagttcccccgctaagccgg

SEQ ID NO: 871286 - DNA, 120 bp, Artificial Sequence
  ENSG00000266053_7 (sequence is synthesized)
accaggccggagaagctgcacctacgcccagagcccgcggccccccgcctcaggtggggccctgggccccgccccgaaagcgcggtagcgtgcacctgccctggcaccagggggtctaga

SEQ ID NO: 871287 - DNA, 120 bp, Artificial Sequence
  ENSG00000266053_8 (sequence is synthesized)
aaagaggaattcagtgcaccctcccacacgtagtgttggggatttgagagggagctgctcaggtactaggaagggtgccggaggaaaattgaccgtcgcagcgtggcagcagcgtgtact

SEQ ID NO: 871288 - DNA, 120 bp, Artificial Sequence
  ENSG00000266053_9 (sequence is synthesized)
cactcccttctgggcgcgttatttacgtagaggttaatctgcaacaacagcgtctgtttatgacttagtgcatgcagttacaagtttatgttacactgtcctttaacgtcttgatgaact

SEQ ID NO: 871289 - DNA, 120 bp, Artificial Sequence
  ENSG00000266053_10 (sequence is synthesized)
gagggttcaggtgtgatcacagcagatgaagtgacattcagacctgacagggacggcgaggtcccatcaaattactatgtaaagcataaacctgcattaaagatcaggagtttttccttt

SEQ ID NO: 871290 - DNA, 120 bp, Artificial Sequence
  ENSG00000269085_0 (sequence is synthesized)
taaaaagtcaatgtgctatctggactatactgtcaggaggtgaaagagtcaccttctcttccttgacgctactggcgcacacacagcagctatcagcacctgggatcaagcacaccagag

SEQ ID NO: 871291 - DNA, 120 bp, Artificial Sequence
  ENSG00000269086_0 (sequence is synthesized)
aggcaggctgagtggccctgctgtctgaaggggcctcagttttatcctccaacgccttggggctccactggtgctcacctctcttctccaagcctaggtcttcagcatgaggctggagat

SEQ ID NO: 871292 - DNA, 120 bp, Artificial Sequence
  ENSG00000269086_1 (sequence is synthesized)
ctgggtgaatggcctccatcaacatcttccttcgcccacctctccagtagcagagtgcagataagactggacgggacagccctgctgaacccacggcagacctccaaagaggagtccagg

SEQ ID NO: 871293 - DNA, 120 bp, Artificial Sequence
  ENSG00000269086_2 (sequence is synthesized)
actgtactggaaggaagtgaccacaagatgacaccgttgatcttccagacactcccgctgttatgaggaaaggagtcatttgcagcctggaggaggactctaccattccaagatattcag

SEQ ID NO: 871294 - DNA, 120 bp, Artificial Sequence
  ENSG00000269086_3 (sequence is synthesized)
ctgaacaccctagtagtgctagccggcagcagtggctcctgagacctccacaccagagtcccgcacacattcaaggccaccacctccttcatgctcctctgtgatcacctctccaagtcc

SEQ ID NO: 871295 - DNA, 120 bp, Artificial Sequence
  ENSG00000269086_4 (sequence is synthesized)
cggtgtcaggagccttctctgtggccgccctggagagacttgagcctgggacgtgacgtgctgggctgtgaagctttctgagaagggaaacctgtggcctgacctgcctgaatgctgcac

SEQ ID NO: 871296 - DNA, 120 bp, Artificial Sequence
  ENSG00000269086_5 (sequence is synthesized)
ccaacctcatctcttcctgggaggcaggctctcttcgcttgtttttacaaatttggtaaaacagcatttcagtcctagtccctggtagtgaccctgccaggatttgacccaggctgtctg

SEQ ID NO: 871297 - DNA, 120 bp, Artificial Sequence
  ENSG00000269086_6 (sequence is synthesized)
actctatttatgcacaaatcacgtattaccattttttattgtccttagtccatggcacacatataatgagcacttacgtggcccactaggaagtctttcctttttgcttcaaactcagat

SEQ ID NO: 871298 - DNA, 120 bp, Artificial Sequence
  ENSG00000269086_7 (sequence is synthesized)
tctgaagatgacctgggactgctgttcacaagcaaatccccattgggcatttctattctcattgagcttgcagcaaaccatgaaggtccctgtggcctatcttctcccaaagccaaggat

SEQ ID NO: 871299 - DNA, 120 bp, Artificial Sequence
  ENSG00000269086_8 (sequence is synthesized)
tggcctatcttctcccaaagccaaggatgggagatggtacatcaggtgggcacaggattcatgctgatttaaaagctttatggcagggcacatgcctcatgcctgtaatcccagcacttt

SEQ ID NO: 871300 - DNA, 63 bp, Artificial Sequence
  ENSG00000269086_9 (sequence is synthesized)
ggaaaaagaaaaaattaagggtctaaaaatataagaacgagactaagtggaaaagaccataag

SEQ ID NO: 871301 - DNA, 120 bp, Artificial Sequence
  ENSG00000269086_10 (sequence is synthesized)
taaaaatataagaacgagactaagtggaaaagaccataagcaacccataacgccatatttactatctgggtttttaagagaaaatttgtaaccactgttttgtagttttctgtgagtcta

SEQ ID NO: 871302 - DNA, 120 bp, Artificial Sequence
  ENSG00000269086_11 (sequence is synthesized)
acttgcagagcttttgctaatttattcctatgtattttatgtgagttgtaaacactactgtaaatggtatcattccaattttagttttcaatcattcatcaatggtatacagaaattttt

SEQ ID NO: 871303 - DNA, 120 bp, Artificial Sequence
  ENSG00000269086_12 (sequence is synthesized)
aaaaatacacattgacttgtatactgagaccttggtaaattcacttttgacttctggtagcttcttcgttttctatgaatcatgtttatgtgaataaagctactttaacttctgttttaa

SEQ ID NO: 871304 - DNA, 120 bp, Artificial Sequence
  ENSG00000269086_13 (sequence is synthesized)
gagcttcgggattccgcctacccggtagcggctgtttagacccagaccggcccctgcgcgatatgagcaccgctcaggactgcagctgttgggcaccagcagccaggccaccacctcctt

SEQ ID NO: 871305 - DNA, 120 bp, Artificial Sequence
  ENSG00000269086_14 (sequence is synthesized)
aaacctatcctctccatgtgaagcaccaacttgggggtgtcaactaaaaatatgagacccgtaaacttggaaaggaagactttatttcttgagaagggttgcaaactgcaggctgggaag

SEQ ID NO: 871306 - DNA, 120 bp, Artificial Sequence
  ENSG00000269086_15 (sequence is synthesized)
tggcacctccagctgagaccacaaacagtggactttctcaaactggggtattgacctctgatgaaccgccatgcaaacccgtgcctttcaacataaaaagaagcccttcgaggtgctcac

SEQ ID NO: 871307 - DNA, 120 bp, Artificial Sequence
  ENSG00000269086_16 (sequence is synthesized)
cttcaagcttgctagaggaggaggaagagcagtcttcaagaggcctggccaggtggaatgccccccagtctgagtttgtctggtgcttccttaccatgagactggggtcttggagttttg

SEQ ID NO: 871308 - DNA, 120 bp, Artificial Sequence
  ENSG00000269086_17 (sequence is synthesized)
aggttttggaaagacacctcagaagttaagtatctttcttgtcacattgcattaggggggtacatggtatcaatatctcttttctctggtgatgtaaaacttgatcatttgaataatgta

SEQ ID NO: 871309 - DNA, 120 bp, Artificial Sequence
  ENSG00000269086_18 (sequence is synthesized)
tggggtcactggagggcagagcctgctcagagcgagtacagaagcagcccaggtcttcccagcaccaggttcactggaagtgccaggtgtgggagagggagctggggagggaagagggct

SEQ ID NO: 871310 - DNA, 120 bp, Artificial Sequence
  ENSG00000269086_19 (sequence is synthesized)
atgctggttcccgagctgaatgatgtacccaagaggccaggtagctgcagcaggtgctaagatgaggaggagacgccatcatggggtgcaaatatggagcacaaaaggctggaccctcat

SEQ ID NO: 871311 - DNA, 120 bp, Artificial Sequence
  ENSG00000269086_20 (sequence is synthesized)
agcaggttgagtttgacataactagaatgggttgagcctttccagcagagtaaggttctttcatggtggacagtggccacccactgccatttctacaagaagattttgcttcttaggcac

SEQ ID NO: 871312 - DNA, 120 bp, Artificial Sequence
  ENSG00000269086_21 (sequence is synthesized)
ttttacaaatttgaaaccaacaactgtcagcattgacaccatcaggcctttctcttctaatttaaccttgcagccaaccacacggctatctgtgcgggatctctccccaagctcaaggac

SEQ ID NO: 871313 - DNA, 120 bp, Artificial Sequence
  ENSG00000269086_22 (sequence is synthesized)
gacaaggctgccatttgctgtgcccaccacagagggacatttactccacctgaagcacaagtattttctcagtgatgttggctcctacaaagtcaaaaggggtaggctccctggcttacg

SEQ ID NO: 871314 - DNA, 120 bp, Artificial Sequence
  ENSG00000269086_23 (sequence is synthesized)
ctccaggagtttggactgaaagggacactaaaagtgtcttcctctaagtttatgatgttgccctcctctggctacaacagtgctctggccataagcatcccaggttctctgaatgatggt

SEQ ID NO: 871315 - DNA, 120 bp, Artificial Sequence
  ENSG00000269086_24 (sequence is synthesized)
gggtatggaaatgttcccaaacacaggtatggcggtgtcccctcccactgtaccaatctatgcccagggctggaaggtccgtggtgctctgaactggattcataaacagtagcatctcca

SEQ ID NO: 871316 - DNA, 120 bp, Artificial Sequence
  ENSG00000269086_25 (sequence is synthesized)
gaagaaacgcagcagagggcaaagggcgaggtccaacggcccagccccagcaggggactctcgagcttcgggattccgcctacccggccaccacctccttcatgctcctctgtgatcacc

SEQ ID NO: 871317 - DNA, 120 bp, Artificial Sequence
  ENSG00000269086_26 (sequence is synthesized)
gtgggaacatgtgtttattagccaggtgggccccaaatgctctgacgaggtgcagaaagaggactctttgtcacagttgtgctgtgccctcccattgcaacacatgtgctctgaacaggt

SEQ ID NO: 871318 - DNA, 120 bp, Artificial Sequence
  ENSG00000269086_27 (sequence is synthesized)
ggagcccaggtgctttgcatgtaggcggacacaagagggcctctaagcacaagtgtggtgttggaaccctcaaggctaccgatgcattctggccaggtgtgtcccaggtggtctgactat

SEQ ID NO: 871319 - DNA, 120 bp, Artificial Sequence
  ENSG00000269086_28 (sequence is synthesized)
agacagcaacagaattatctccagcaccgttatagagatacccgtccaactgatgtgctctagcgggatgggacccgggtgatccgaacacaaggaggaacagaagtttattctgatata

SEQ ID NO: 871320 - DNA, 120 bp, Artificial Sequence
  ENSG00000269086_29 (sequence is synthesized)
tgctccttcttagcgatgttatctccttcaatagtaacaggtatgctttggctgggtgggcctcagtcactctgtagccaggaaggaaagggctcccaaaacagatttctgctccgtaga

SEQ ID NO: 871321 - DNA, 120 bp, Artificial Sequence
  ENSG00000269086_30 (sequence is synthesized)
gctgatcttccctcattgcaacagggatgctataggcaggcaggacctggtgctcaggtctaagcccttcctagaataagttgtggttctgagtgttgtcagcccttctgcagatttcaa

SEQ ID NO: 871322 - DNA, 120 bp, Artificial Sequence
  ENSG00000269086_31 (sequence is synthesized)
tgacccctgacaaggagccagggtttgggacagacacaatgactgcaaacctgccaccacccaaaggggcttagatattgatggtgcatggcactgctgcagtggccctttatcttgatc

SEQ ID NO: 871323 - DNA, 90 bp, Artificial Sequence
  ENSG00000269086_32 (sequence is synthesized)
tctcctgcctcaggcgcctccgcctctgcctcctgggttcaagcaaacctccgtctcctggatccaagtgattctcctgcctcagcctcc

SEQ ID NO: 871324 - DNA, 120 bp, Artificial Sequence
  ENSG00000269086_33 (sequence is synthesized)
gtcgctcagatagcgacaggaagagaagtcagtttccccctgcaggtaggatcagtacttttcctaagtggctgcacttctttgaggtgcaagcatacagtgctgtctttctgagagccc

SEQ ID NO: 871325 - DNA, 120 bp, Artificial Sequence
  ENSG00000269086_34 (sequence is synthesized)
tggcatgacaccaaggggaggcccccttctgatgtaaacactgagcttgctgggttgcataaggcctctcaggggtgatataaaccgagggggtaaaggtgaccgtgttgctcccaggaa

SEQ ID NO: 871326 - DNA, 120 bp, Artificial Sequence
  ENSG00000269086_35 (sequence is synthesized)
ctgttttcagaagatgcacaggtgcagcaggaggattcctgccagaagcaggaacagagagggcagggagaaaaaggaggatggtggcctgggggccaggcggggtgaggcttactgagg

SEQ ID NO: 871327 - DNA, 120 bp, Artificial Sequence
  ENSG00000269086_36 (sequence is synthesized)
aagttgtccgtgaagagcagtttgtgtgctgtctgacactgagagtctagtaagaaatttggagaggtctcctagctgcatgttcctccaaggcaaaccatgctggatgtttgtgacatg

SEQ ID NO: 871328 - DNA, 120 bp, Artificial Sequence
  ENSG00000269086_37 (sequence is synthesized)
tcattggaacacacaccagagaaagtgtgtgctagagcagagagggaagacaaggcaccaaaggacaaaggggaatcccagcaggacttttgagagcttgagacagctcatgctctttgc

SEQ ID NO: 871329 - DNA, 120 bp, Artificial Sequence
  ENSG00000269086_38 (sequence is synthesized)
aggtgcttggcaccaggtgtgcccgatgacatggaaaagcatccaggactgtgtattataggaccccacataactgtcacccccagatcaccaggtctgcaggctcctcagcatctaacc

SEQ ID NO: 871330 - DNA, 120 bp, Artificial Sequence
  ENSG00000269086_39 (sequence is synthesized)
taggggcagcaactagtgcctgtgagtctcctagcccttttctctggggttattggaggtcagaggtcagagcgccctagatcctgccaggaaggggccctggctcacaggaggtcaggg

SEQ ID NO: 871331 - DNA, 120 bp, Artificial Sequence
  ENSG00000269086_40 (sequence is synthesized)
taggagaggtgggggtgtggccagcagggatcaactctgtctcatgccattactggtgcacccaggtggcccagcagggctgcagctgcaagacacgtgctctgatggggaggagagacc

SEQ ID NO: 871332 - DNA, 120 bp, Artificial Sequence
  ENSG00000269086_41 (sequence is synthesized)
aagcagtgtggggcgtgatttgccctgacctcttcctttcaggcaacctctgcagaggacactagtttacccccacaatgtccccttcccatgtggtagctcagggttaccacacactgt

SEQ ID NO: 871333 - DNA, 120 bp, Artificial Sequence
  ENSG00000269086_42 (sequence is synthesized)
ttcctccagggatccctctagggcctctcaagtcttggagcaggcatatcttctctgtggccacccaggaaggtgtgggtccatgggcatgagatgtgagtccagctgggctgtgaaggt

SEQ ID NO: 871334 - DNA, 120 bp, Artificial Sequence
  ENSG00000269086_43 (sequence is synthesized)
ttctgagatgggtacttggcaccccaattttcccaggtcctgcaccccataccatcccttccaggcaagcagatcttccctcttttaacaaatttttcgaattgcaaacagcatttagga

SEQ ID NO: 871335 - DNA, 120 bp, Artificial Sequence
  ENSG00000269086_44 (sequence is synthesized)
ctttgcgccttcctcaggtcacccatgtgggcgtaagggagagtcaggatttgaactcagactgtctgattccagagtttatccattgaccacctgacagtggtgatgcctcatcatgtg

SEQ ID NO: 871336 - DNA, 120 bp, Artificial Sequence
  ENSG00000269086_45 (sequence is synthesized)
tgtcacgtatttacatttttaaatagtccttagggtacttagcaccatgtacacctgtcatgagagtgttcactgcctgcatcagaagatgcagggtggagagcaccaattgtcagcaca

SEQ ID NO: 871337 - DNA, 120 bp, Artificial Sequence
  ENSG00000269086_46 (sequence is synthesized)
accatattgggcatttctctgctaaatgagtcttgcacaaaccacacagctgtctgtgaactatcttctcccaggtacaggacaggagaccacttaggtgcaagatacactctgtcttaa

SEQ ID NO: 871338 - DNA, 120 bp, Artificial Sequence
  ENSG00000269086_47 (sequence is synthesized)
gagccttatgctccaaggacaccaacatctcttgtgacaattccatagacctactttttaggatcctggctgaaattggcaatttactgatatcaaatagtgtactctatcaggatggta

SEQ ID NO: 871339 - DNA, 63 bp, Artificial Sequence
  ENSG00000269086_48 (sequence is synthesized)
ctctatcaggatggtaaatagttccttatatttagaactctttttttttttcctatagcctcc

SEQ ID NO: 871340 - DNA, 120 bp, Artificial Sequence
  ENSG00000269086_49 (sequence is synthesized)
tgacctcaggtgatccacctacctcagcttcccaaaagcgtgagccaccgcgcccggcctttagaatgctttaattttctctcagagactattttgtggttgggaatgacaaattacagt

SEQ ID NO: 871341 - DNA, 120 bp, Artificial Sequence
  ENSG00000269086_50 (sequence is synthesized)
cagttcatgagctgaattctttccagtctgtttctgtaatgccaataaccttagaatggtgataagagttttcaaagtttgtagaaaagaggaaaggaaaaaaggaagaaaaacagagga

SEQ ID NO: 871342 - DNA, 120 bp, Artificial Sequence
  ENSG00000269086_51 (sequence is synthesized)
aaatatgcaacagagaccatatgcaatcttcagagcctataatatctactatctggtcctttacagaaaaatttgcctcttttgtgattttcagtgtataagtcttgtacagtatttact

SEQ ID NO: 871343 - DNA, 120 bp, Artificial Sequence
  ENSG00000269086_52 (sequence is synthesized)
aatttatccttatgtgttttataagttttttgtatgctatcgtaaatggtatcttttacattttagttttcagtattcaccactggaaaatacagttgatttttatatattcaccttgta

SEQ ID NO: 871344 - DNA, 120 bp, Artificial Sequence
  ENSG00000269086_53 (sequence is synthesized)
tgctagaactttgctaaattcactctttacttttaatagtttctttgtgaattccttaggatattctatgttcacagtcatgttttctatgaacaaagagagttttgcttcttccttttt

SEQ ID NO: 871345 - DNA, 120 bp, Artificial Sequence
  ENSG00000269086_54 (sequence is synthesized)
agtctttctgaggcaagtatggaggggaggacagggtggcccagcttcgtagagatcactacctgctcaaaccccaaacagaaaggagtcatttgcagcctggaggaggactctaccatt

SEQ ID NO: 871346 - DNA, 120 bp, Artificial Sequence
  ENSG00000269086_55 (sequence is synthesized)
taaagagggagaatatttagtctccacctcccggaagaaggagcatccatatgtattatttgcaatttgtctgtaagataggtttgtctaccccattaaaaagtgggcaaaggatatgaa

SEQ ID NO: 871347 - DNA, 120 bp, Artificial Sequence
  ENSG00000269086_56 (sequence is synthesized)
aaaggatatgaacatacacttctcaaaaaaagacatacatatggccaacaaacatgggaaaaagagctcaacattactatcattaaagaattgcaaatcaaaaccacaatgagataccat

SEQ ID NO: 871348 - DNA, 66 bp, Artificial Sequence
  ENSG00000269086_57 (sequence is synthesized)
aatgctggcgaggttgcagagaaataggaatgcttttactctgttggtgggaatgtaaattagttc

SEQ ID NO: 871349 - DNA, 79 bp, Artificial Sequence
  ENSG00000269086_58 (sequence is synthesized)
acccagcaatgccattactgtacatgtatgcatacatatgttctttgcagcactatttgcagtagcaaagacatagaat

SEQ ID NO: 871350 - DNA, 120 bp, Artificial Sequence
  ENSG00000269086_59 (sequence is synthesized)
taaatcattctactgtaaagatacatgtatgcatacatatgttctttgcagcactatttgcagtagcaaagacatagaatcaatctaaatgctcatcaataatagactggataaagaaaa

SEQ ID NO: 871351 - DNA, 77 bp, Artificial Sequence
  ENSG00000269086_60 (sequence is synthesized)
ctggaagccattattctcggcaaactaagagcagctgaacaacgagaacatatggacagggggaggggattaacaca

SEQ ID NO: 871352 - DNA, 120 bp, Artificial Sequence
  ENSG00000269086_61 (sequence is synthesized)
gttctcacttataagtagcagctgaacaacgagaacatatggacagggggaggggattaacacacactgggccctgtcaggggagggtgtgaggggagagcattagggaaaagagctaat

SEQ ID NO: 871353 - DNA, 120 bp, Artificial Sequence
  ENSG00000269086_62 (sequence is synthesized)
gatgggttgataggtgcaacaaaccaccctggcacacgtttatttatgtaacaaacctccacatcctgcacatgtaccccggaacttaaaaaataaataaaataattatttttaaaaaga

SEQ ID NO: 871354 - DNA, 120 bp, Artificial Sequence
  ENSG00000262967_0 (sequence is synthesized)
agtcttattccactgcgatacgcagtagtcagttgaccacagaggattttataaaggagaagagagaccagcataggacagagatacatcaaacccacctctcaccagagacaccagtcc

SEQ ID NO: 871355 - DNA, 120 bp, Artificial Sequence
  ENSG00000262967_1 (sequence is synthesized)
cttgcttgcctctgtcgctaagcccagaacatgccctgcagctgctcctctggaggccatctcccagccaggggctccactgctccactttaattaatctgggtggctgaaagtgtttta

SEQ ID NO: 871356 - DNA, 120 bp, Artificial Sequence
  ENSG00000262967_2 (sequence is synthesized)
ttagtaaactgtaactgttttagaagtaaagaaaaaaaaggttactacatctagttaaattcacttccgattggttgaaacacaagggaggggctgggccgggtggctcacacctgtaat

SEQ ID NO: 871357 - DNA, 73 bp, Artificial Sequence
  ENSG00000262967_3 (sequence is synthesized)
gaaagctcttttggttaacagcatatttacaattagttaactgtattcttaaatacttttaacctgagtaaca

SEQ ID NO: 871358 - DNA, 120 bp, Artificial Sequence
  ENSG00000262966_0 (sequence is synthesized)
gagcctcacaggaagggaacggccaggctgggagctgaagcaaggcccgggattctcaagccagcaactacggctccacagagcaggccccccaccctcctcctgggcttgaaagggtgg

SEQ ID NO: 871359 - DNA, 120 bp, Artificial Sequence
  ENSG00000262966_1 (sequence is synthesized)
agaggtggggttgcccaccctgtcatgcttcacggaggctctgtcgctgtgtcccaagaagccaattctgtaagaaaagatccagccttgacggcccatggagacgtgcagaagaggcgg

SEQ ID NO: 871360 - DNA, 120 bp, Artificial Sequence
  ENSG00000262966_2 (sequence is synthesized)
cggcgaggaggggaggctggagagggtctctgacctttccctatggtctcttaaattcgtccatggtaggaagggagatggagcatgggcagtgcctctaagtcggccgtgcgaatgcaa

SEQ ID NO: 871361 - DNA, 120 bp, Artificial Sequence
  ENSG00000262966_3 (sequence is synthesized)
agggccacagcacaggctcctactgtcttcgaagcccctgatgcaagcgtgagcatcagggcctcaggccggctgacctcccttagccagctggtaatcctaagattcatgccaagacat

SEQ ID NO: 871362 - DNA, 120 bp, Artificial Sequence
  ENSG00000262966_4 (sequence is synthesized)
tctcccctccgagctgatggaacacagctgtgcaccagtaacttctggatccttggatttggctgaagggaggtcaccaaaggttgctcggtcactgcacgttcagagccaagtcacacg

SEQ ID NO: 871363 - DNA, 120 bp, Artificial Sequence
  ENSG00000262966_5 (sequence is synthesized)
tggacaccctcattggcccaggttgtctttatcttggcagcggccgacccagagcagactctgggtggagtcaggatggtgcattgttctcccccacagccggtgacccgcttagctgcc

SEQ ID NO: 871364 - DNA, 120 bp, Artificial Sequence
  ENSG00000262966_6 (sequence is synthesized)
tgggctggcaccagctgaggtctggcggagtgagggccgtccccggtaatggcagggccactgtgtctgctgggtgcggcagacgcttcctaagggcccactctttggttcaacatgagc

SEQ ID NO: 871365 - DNA, 120 bp, Artificial Sequence
  ENSG00000262966_7 (sequence is synthesized)
tgatgcttgctcctgggtttccaaatctttctgagattctgcaagaatctgacctattcctctggtttatggaggcagcgggctgacttgtgtttccccaccagcagatcattgttctag

SEQ ID NO: 871366 - DNA, 120 bp, Artificial Sequence
  ENSG00000262966_8 (sequence is synthesized)
gaagggaggcaatcagggtcccaaaggggctgcccaaggcagagtattcttcagcagtagctgccccgtgccaactcctgcaaactccttagcacatccacactctctcatacgtgtcga

SEQ ID NO: 871367 - DNA, 120 bp, Artificial Sequence
  ENSG00000262966_9 (sequence is synthesized)
atcccttggtccttgcgacagccctctgaaatgcgcgtgacagcacagaggaggccagggaccagaaaagacaactgcaggagaaagctgggggctgtgcggagaggtggaaagagcctg

SEQ ID NO: 871368 - DNA, 120 bp, Artificial Sequence
  ENSG00000262966_10 (sequence is synthesized)
gatctctgagggaactaccctttctaaatggccccctttgtatttcttgttctgcaaggagaaataagctcctatcttataatatgatgtgggttttctgttacctgtacccagtgcaat

SEQ ID NO: 871369 - DNA, 120 bp, Artificial Sequence
  ENSG00000262966_11 (sequence is synthesized)
cctaacagacttgcctggaattcattctcaatctccagccaaaggagattacccaaagaacttttcctaaaaattcacaaatcgagatggcccccattataccctgtgcaaagtctgagt

SEQ ID NO: 871370 - DNA, 120 bp, Artificial Sequence
  ENSG00000262966_12 (sequence is synthesized)
ttcaaggtgtagggagagttgacagatggcaatgccatactatggcctggaaagggagaatgtgactggcagtgccaaaggaagagaggctgagcccaagggaagactcaggccctggcc

SEQ ID NO: 871371 - DNA, 120 bp, Artificial Sequence
  ENSG00000262966_13 (sequence is synthesized)
ttgaggaagaggaagtcaaaagcatcctgctgtagtcccttgaccctgaaatatacacagacacagacacatcaaagttcctactaacacacagagactcacacatattcccagaaacac

SEQ ID NO: 871372 - DNA, 120 bp, Artificial Sequence
  ENSG00000262966_14 (sequence is synthesized)
acagatacaagcagactcctactaattctccctccctcgctctcatctacatacattgactcacaaacacacggattcttatctacaaactcacccacgcacagacatatactcagatcc

SEQ ID NO: 871373 - DNA, 120 bp, Artificial Sequence
  ENSG00000262966_15 (sequence is synthesized)
acaaagccacacacacagacacagacacacagggccacgggggggcaggggaggggaggtgtggagtgagctggggagaaggtggcagttaggtgagtggaggtcttttcctttgcaggg

SEQ ID NO: 871374 - DNA, 120 bp, Artificial Sequence
  ENSG00000262966_16 (sequence is synthesized)
gaggtggtgggggtgtctggtgagggagacaaagagagagcctccctaattcctctgagaacgtggtctgggtcagaacatcttccgccataggaagccgctgggtggctcccatgtccc

SEQ ID NO: 871375 - DNA, 120 bp, Artificial Sequence
  ENSG00000262966_17 (sequence is synthesized)
tggaagtcagccacttttttcagagggaggtcaatcccttccatggcaggtcaccccgtgtgcaaggagcaggcagcacctggccatgggaaacaatcaacccggggattttttccataa

SEQ ID NO: 871376 - DNA, 120 bp, Artificial Sequence
  ENSG00000262966_18 (sequence is synthesized)
agagaaaggtgaggccagacggaagcccaggtccctgagaacacggcaagatcaggtttcccatgaaaccgcaggctggagagcctcccagtgaagcagagaacccacgcggtccttgct

SEQ ID NO: 871377 - DNA, 120 bp, Artificial Sequence
  ENSG00000262966_19 (sequence is synthesized)
ctgggtcatgagacagggacagacagctcaggtgacccacgcgctttcagacaggtaagaggggatccaggtctggcgccccaccctcccagtgaccctgggttagtgcctttctctctc

SEQ ID NO: 871378 - DNA, 120 bp, Artificial Sequence
  ENSG00000262966_20 (sequence is synthesized)
tggaccaccggtggctcacctgtaaggacagaggtctccctctaaagtcccactgaagtgacttacaacttaacaggctaaggtttttgcctccctgctgggtccaaaggaaccagggca

SEQ ID NO: 871379 - DNA, 120 bp, Artificial Sequence
  ENSG00000262966_21 (sequence is synthesized)
gcagcccccaccctttgaccatcgccccttctgctgccgttcctcagtgtcttggcaagagggcaggggaaagggctcctgttgcagggcacaccgggccttccgtacacccttactgct

SEQ ID NO: 871380 - DNA, 120 bp, Artificial Sequence
  ENSG00000262966_22 (sequence is synthesized)
ggccctgcctgcaccagcacccacctgcatggtgccagaatcttgttgagatttggtttgtcggtgaagagagggagtacccagggacttccgagagccctggcaaagctgacctggatg

SEQ ID NO: 871381 - DNA, 120 bp, Artificial Sequence
  ENSG00000262966_23 (sequence is synthesized)
caagtagctgccttttcccactccctctgacactctctgaagggatccctgaaggctcctgggctctgccagggaggagacacactcctgagcctggcaccctttccactgaagcacata

SEQ ID NO: 871382 - DNA, 120 bp, Artificial Sequence
  ENSG00000262966_24 (sequence is synthesized)
ctaaggctttccagaagtctgtcctgggctcctatccagaggtctggctacttttcctgaggactctggctccaggggctcttgaggtcaggcaggaccttcaaatggcagtgatccaag

SEQ ID NO: 871383 - DNA, 120 bp, Artificial Sequence
  ENSG00000262966_25 (sequence is synthesized)
gccacgtgcccatagaggacaggaaagccagctgggcatgagctcctctggagcagcttcaggtaggacaggggagacagaacagccacagccccaccctcacttcagacaccaccacag

SEQ ID NO: 871384 - DNA, 120 bp, Artificial Sequence
  ENSG00000262966_26 (sequence is synthesized)
ccaccacccaggcctctggccagtcctgaagttccgcttctggcctgaccttgtgctatgggctaaactgtgtactccctgccacacacaatgctgatgcggaaactctaatccccagta

SEQ ID NO: 871385 - DNA, 120 bp, Artificial Sequence
  ENSG00000262966_27 (sequence is synthesized)
cctcaaagttggatgtatttggacataggggctttaaagagctgattaatttaaagtgaggtcactggggtggaacctgatccaacatgaccggtgtccttattagaagagggcatcggg

SEQ ID NO: 871386 - DNA, 120 bp, Artificial Sequence
  ENSG00000262966_28 (sequence is synthesized)
atacagatgagtgcagtggaaagaccctgtgaagacacagggagaagacggttatctgcaagccaaggaaagaggcctggagcagatgtttcttggaacaaaaccagccctgctgacacc

SEQ ID NO: 871387 - DNA, 120 bp, Artificial Sequence
  ENSG00000262966_29 (sequence is synthesized)
ttgatcttggacttccagcctccagaactatgagacataaacttctgttgtttaagccaatcagtctgaggcactttgcagcctgcactgactaacacacctgtgtggagcctcaggtaa

SEQ ID NO: 871388 - DNA, 120 bp, Artificial Sequence
  ENSG00000262966_30 (sequence is synthesized)
gcatcttcttctccaggaccctcctaggcctgtcctgtactcatgggaaggaagactgccccaccactccaccaatcagctctttcatcccctggctccctgtggaagtcaccacctttg

SEQ ID NO: 871389 - DNA, 120 bp, Artificial Sequence
  ENSG00000262966_31 (sequence is synthesized)
ctggaagaggaaaaccttctccatggcaggccatgtctctgagggtccccaaaacccccacaggccagcagagcagctctcagcttccatgatctttagagcccctgctggctctgattc

SEQ ID NO: 871390 - DNA, 120 bp, Artificial Sequence
  ENSG00000262966_32 (sequence is synthesized)
ccaacaggtctcacagctcacagaccatctgagggctgttctcaaaagggcactggcagaggccttgagcaggaagtgctgcaggtcctaagagccctcagaaggctggcacgaggtcag

SEQ ID NO: 871391 - DNA, 120 bp, Artificial Sequence
  ENSG00000262966_33 (sequence is synthesized)
agaagggaggccggccccatcagcagccccctcctcacctgtacagcaatgcagggggtgccctctgttccagtccagaagaagaaagggctcacacagcaagtgctgaaggcatccctc

SEQ ID NO: 871392 - DNA, 120 bp, Artificial Sequence
  ENSG00000262966_34 (sequence is synthesized)
ccaaagtctgatgggaaactcccttcctagtcctcacaagacttccaagggacagaggaatgcaacagacagagaaaacaccctgccctgaatcccgggacattgccccagcagtgaatg

SEQ ID NO: 871393 - DNA, 120 bp, Artificial Sequence
  ENSG00000262966_35 (sequence is synthesized)
tggaaatcttgccaagtttccccagggagggctgaaccctggagccaattgtgaggctccatgtgactccaagtcctacagctcatgccaaagggctgcatctgcctgtggccctcctgg

SEQ ID NO: 871394 - DNA, 120 bp, Artificial Sequence
  ENSG00000262966_36 (sequence is synthesized)
gctgggggagacagtcttctctgctttgagtagtatcagtctgcataggtggacgccatccacaaagaacgtaggggtagacgaggccctgtggacaggccccacggcgtgggccaggct

SEQ ID NO: 871395 - DNA, 120 bp, Artificial Sequence
  ENSG00000262966_37 (sequence is synthesized)
gctccctggctgctgtggaggtcagggaggtcgactgcagcagcttgcttggtgcagtgaggacagtccaaagagtcagcaagggccagcatcttcagagaaaagcaggatccagaggct

SEQ ID NO: 871396 - DNA, 120 bp, Artificial Sequence
  ENSG00000262966_38 (sequence is synthesized)
ccccaggtccccatatctctggtgggtgtcaggcctcttggaggaagcctggtgggaccctcactagaggtgacactggagagaagatgatgtcagggacagaggtgtccaagcacccat

SEQ ID NO: 871397 - DNA, 120 bp, Artificial Sequence
  ENSG00000262966_39 (sequence is synthesized)
ttcttccccactccccaaaacaggagtgaaggatcagcaaccaaaagaagaaacacaggaaaaccagcagggcattctggaatggagcggacctaatgctggagtgcaatggtgcaatct

SEQ ID NO: 871398 - DNA, 120 bp, Artificial Sequence
  ENSG00000262966_40 (sequence is synthesized)
agtgattctcctgcctcagcctcctgacctcagccttccagtgctctgagaatgggacccaactcctctccagacaccaaggagctgactcttcccaccccttcctccctctcttccctt

SEQ ID NO: 871399 - DNA, 120 bp, Artificial Sequence
  ENSG00000262966_41 (sequence is synthesized)
ctcttcccaccccttcctccctctcttcccttctgaccaagggcccaccaagccctttcctgcttccagactttggttcttcctggaatgttcttccctcagcttccttgtggctgtttc

SEQ ID NO: 871400 - DNA, 120 bp, Artificial Sequence
  ENSG00000262966_42 (sequence is synthesized)
ctccccacaccccaggtctcatctcagatgtcctgtccgcgagaagcccctccagggccaccttgtagcgcagcttgcccagttactctctccttccaccctgctgctttcctccatgta

SEQ ID NO: 871401 - DNA, 120 bp, Artificial Sequence
  ENSG00000262966_43 (sequence is synthesized)
actcaccacaatccatcattatcttcctttttcttctttgtttattgtcaacctcccatcaaaaagcaagctccaagggcccatgtctagcatgcaataagcgttacacaaacatgtggt

SEQ ID NO: 871402 - DNA, 120 bp, Artificial Sequence
  ENSG00000262966_44 (sequence is synthesized)
gaatcaaatgaacaaacaatcttgttaccaatctggatgtaactcaggccaatctgccgtcctttcctggtggggagaggggggcatgttgctgcccctgcacatctggaggaaagaatg

SEQ ID NO: 871403 - DNA, 120 bp, Artificial Sequence
  ENSG00000262966_45 (sequence is synthesized)
agggggcaggtgggatgacagtcccctcacatcctaggtcatccgcaatccaatgcccctgcactctccactcttacattctctgtgttaacaagggagggaggatcactgaaatctgaa

SEQ ID NO: 871404 - DNA, 120 bp, Artificial Sequence
  ENSG00000262966_46 (sequence is synthesized)
gataatccccaaacgtcatttcagctgtctgtgtcaacctcctctgaagctatgctttcctttgccccagcagttgctaacgaggcacaaaagaataaatgtttcaagttgcacaaccta

SEQ ID NO: 871405 - DNA, 120 bp, Artificial Sequence
  ENSG00000223404_0 (sequence is synthesized)
tgggagtctttaatgaataaggggtgctttaaaaaatctgtgtactttctatgacatatacttatattttgtatttctacgttagttaatgatgcagatatgggtattttaaaactcgaa

SEQ ID NO: 871406 - DNA, 120 bp, Artificial Sequence
  ENSG00000223404_1 (sequence is synthesized)
cagttgacccttgaaccactcggcttggagctgtgtgggttcacttatagtcaaaatttcctgtgcctctgccactcctgagacagaaagagtaatccctctaattcctcctcttcctaa

SEQ ID NO: 871407 - DNA, 120 bp, Artificial Sequence
  ENSG00000223404_2 (sequence is synthesized)
gcctaatcaacctgaagatgacgaggatgaaaacctttctgatgatccacttccatttaatgaatagttcaaagtgttgcaatgtgtacaaaataagaggagtgtctgtgcctttgaaag

SEQ ID NO: 871408 - DNA, 120 bp, Artificial Sequence
  ENSG00000223404_3 (sequence is synthesized)
aggaatctgataaccaaaagttctattcacctcaacctaatcaacctgaagatgacgaggatgaaaacctttctgatgatccacttccatttaatgaatagttcaaagtgttgcaatgtg

SEQ ID NO: 871409 - DNA, 120 bp, Artificial Sequence
  ENSG00000223404_4 (sequence is synthesized)
aagcctacaaaatactactaaacaacaccaaacacatttcttcataataaaatgaaatttgactagaattgtaagtggtgttttgcttaataaaatctcaatgtcagaagttattacaaa

SEQ ID NO: 871410 - DNA, 120 bp, Artificial Sequence
  ENSG00000223403_0 (sequence is synthesized)
tgttaattgatttttagaaattcttcccatttgttcaaagctgtttggttttctagctttttctgcccttccaggatgaggctgagattagctgcaggaggcacgagtcagttgggtctg

SEQ ID NO: 871411 - DNA, 120 bp, Artificial Sequence
  ENSG00000223403_1 (sequence is synthesized)
ggttctctcttccacttgtcggggggtgggggcaccaaagccccagaggaagtgacaggccctgtgttcccctgcagatgccgactgatcgcgcccccgcccctccagcaaacgccccag

SEQ ID NO: 871412 - DNA, 120 bp, Artificial Sequence
  ENSG00000223403_2 (sequence is synthesized)
cgctgagagccaaatgctctggggaactccatctgcaacgggctggagcgtggtgttagggctcatattttatgcatggggctgactaaatgggaacatttggagatgaaaattgctgtt

SEQ ID NO: 871413 - DNA, 120 bp, Artificial Sequence
  ENSG00000223403_3 (sequence is synthesized)
aatgcatctacacatctttggaatatattaaatgtgtgtgtgaggggaagagtgacattagccttatttaatagcttcaatataaccatccccgcacaccacggcgttaacaggcacggc

SEQ ID NO: 871414 - DNA, 120 bp, Artificial Sequence
  ENSG00000223403_4 (sequence is synthesized)
ccccccgccgagtctcccaggccaccactcaggaagagtgctgggtgcatcacgcgccacttgagaattagggggtgagtccggcgtcggcccggcatgcagcagcgtgcatgttccccg

SEQ ID NO: 871415 - DNA, 120 bp, Artificial Sequence
  ENSG00000223403_5 (sequence is synthesized)
ccgatttctaacccaaacacagtgaccctgtgccacttgatgcagaatttcattaaaagcaaaaatgattgatttatctattgtttgcggagaagaaaaaataaacaaagggcctttctc

SEQ ID NO: 871416 - DNA, 120 bp, Artificial Sequence
  ENSG00000223403_6 (sequence is synthesized)
atcagataagccaaataagaacgtgtgccccacaggtggccaggatgaaagtctccatggacccttcaaccagaggctctgtgacttgtcccgtcttcagtgcggtgtgtaaaccctgcc

SEQ ID NO: 871417 - DNA, 120 bp, Artificial Sequence
  ENSG00000223403_7 (sequence is synthesized)
gccggtccaagttcacgaggtgtgctcccttctccagtgcaagggcccggtttatccccactatgtctcctggacgtggttgggaaattgaacaacctggacctccgttcccatttcctt

SEQ ID NO: 871418 - DNA, 120 bp, Artificial Sequence
  ENSG00000223403_8 (sequence is synthesized)
gttgtttcagcgggagataagaggagaagtaatagctgtcgtgttggggcgcttgccttggtcctgggccccatcagctgctgtgaggagacagtttcttttccatagttgaggaaatgg

SEQ ID NO: 871419 - DNA, 120 bp, Artificial Sequence
  ENSG00000223403_9 (sequence is synthesized)
agcgcagagaggttgagtgagtcaaccaaggtcacccagctggaggtggggcagggtctggctccaggctgtgtgctctcacccaccctgcttgcacgggctttaggaatagcccctgtg

SEQ ID NO: 871420 - DNA, 120 bp, Artificial Sequence
  ENSG00000223403_10 (sequence is synthesized)
tcctggaagacagatcgctcaccgaatgggcctcttttcttggtatcatatgatgaggtaggctcactttcccccagacttagcttgccagaatattcatggttttttctctgtactcac

SEQ ID NO: 871421 - DNA, 120 bp, Artificial Sequence
  ENSG00000223403_11 (sequence is synthesized)
ctgtcatctctccaacttggtgccatcacccatgaagtgggatgctttggtgcgtgtctggcctggggagagggctgcttgctttgtcagaagactcaaagcatgatgggcatccaaata

SEQ ID NO: 871422 - DNA, 120 bp, Artificial Sequence
  ENSG00000223403_12 (sequence is synthesized)
ccaaagacctatgttgacctgtgtttttcactccgcttgatggcagttgagggctatattcactgcctcagttgcatggagtgaacaagacctagtgaaggtggtgggtgcgctgagacc

SEQ ID NO: 871423 - DNA, 120 bp, Artificial Sequence
  ENSG00000223403_13 (sequence is synthesized)
atctggttgatctctcctgggtgggaccaggtgctcccctcaccacccccacccttgtctgtgtaccaccactctgcacagacacgttggctggtgcagtcctggagacccacggagctc

SEQ ID NO: 871424 - DNA, 120 bp, Artificial Sequence
  ENSG00000223403_14 (sequence is synthesized)
acggtcgtcaggggtcctcaaggattcagagaacccccaaatgtcagggctgctcccttcttgtcctgcctctctgctcacacccttggacaggaggaagcacacgggaggcactcagag

SEQ ID NO: 871425 - DNA, 120 bp, Artificial Sequence
  ENSG00000223403_15 (sequence is synthesized)
aacgtttgtggaatgaataaataaaagcatattttgagggaataaagaagcagaaaaacaaagaagaatctggggaagatgggcataaatctccaccaagtgctgccaaggcttcccagg

SEQ ID NO: 871426 - DNA, 120 bp, Artificial Sequence
  ENSG00000223403_16 (sequence is synthesized)
cgaggctgctgaaaagaccctgtggagcggctgctctgcctgggataaacacatttcaagagtctcagtccccgctttgccaccatctcctcctctgatctcctttcctgcttcaaaaga

SEQ ID NO: 871427 - DNA, 120 bp, Artificial Sequence
  ENSG00000223403_17 (sequence is synthesized)
ctccagaatcttctcggttctcagagaaggctgaatccacctatgacctagtgggagcaccctgtgccgaaactgtttaccttctggtccccggagccatgggtcacgacctgggcctca

SEQ ID NO: 871428 - DNA, 120 bp, Artificial Sequence
  ENSG00000223403_18 (sequence is synthesized)
tgtaggcccgctcctcagcagaccccaatctgcggcttctcccacctcactggggaagaaggagagccctggggatgtggagaagccaccccccaccccgccacatcccccacatcttac

SEQ ID NO: 871429 - DNA, 120 bp, Artificial Sequence
  ENSG00000223403_19 (sequence is synthesized)
agaatctcgattgaatccccgggggcacatccctcagcaggacagcaacagtctttgccgcagcctggggagggctgtgctggggatgagcgccgagtggccgtggactaagtgaaggaa

SEQ ID NO: 871430 - DNA, 120 bp, Artificial Sequence
  ENSG00000223403_20 (sequence is synthesized)
atgaccatgctcttctcccagctggatggcgaggccgggcaggaaccgcggaattcctgctcttcgttttcaaacactttgctgtcaagctatttgaataataaatacacattataaaaa

SEQ ID NO: 871431 - DNA, 120 bp, Artificial Sequence
  ENSG00000223403_21 (sequence is synthesized)
ccgggaagcagggcatgatggggcctcattcatcattttcccgttatcccagcagcgtgcaggggagcaggtacagcacctgcctgtgcagctgcactgcctgcccgaaggccctaggcc

SEQ ID NO: 871432 - DNA, 120 bp, Artificial Sequence
  ENSG00000223403_22 (sequence is synthesized)
ctgggccaagtgagtgaccagagggggactgggaatggaaaggacctcaaggaaggacaagctgagctctgggaggccacctcctccaggaagccttccctgattcatccttcacaggca

SEQ ID NO: 871433 - DNA, 120 bp, Artificial Sequence
  ENSG00000223403_23 (sequence is synthesized)
gtctcaatttgcagtcagatatccactgctctgattcttagatcagcaagtatctccctacccagactgcaggctctgctggggccgcggctgtttctgacttgtgcacaatggcatccc

SEQ ID NO: 871434 - DNA, 120 bp, Artificial Sequence
  ENSG00000223403_24 (sequence is synthesized)
tgtacctagcacaggactgagtccagagaaagtgctcagtgatgcttgttggccttgtctctcctctgtgggcagcacagggcacccggcgggtcctgagggtgtggacatcccacggca

SEQ ID NO: 871435 - DNA, 120 bp, Artificial Sequence
  ENSG00000223403_25 (sequence is synthesized)
gagcctgcggttgatcccgaccatgaaccaaggcctggggcgggggtggccacatcaggccacttctgccaggagagatgtggctgtgagctgggggtctggcctgtccccggaggcatt

SEQ ID NO: 871436 - DNA, 120 bp, Artificial Sequence
  ENSG00000223403_26 (sequence is synthesized)
ccttgggtttgcatccatcagaagatccactggttgcctctatttgggcctggagcagggatgggatttttccaaggtacatggggtctaggggagacccaggcccattattagggtcgg

SEQ ID NO: 871437 - DNA, 120 bp, Artificial Sequence
  ENSG00000223403_27 (sequence is synthesized)
tcttgagaaggcagagatcaggccaccactttatttggtgtagctcctcgctccattggtgtgtgctgagtgaatgaatgcatcagggactcctgcttcctgcccagagccccctccgca

SEQ ID NO: 871438 - DNA, 120 bp, Artificial Sequence
  ENSG00000223403_28 (sequence is synthesized)
ccccacacagccttgctccaaggagaaggggtcagagccaactggacagtgctacagcatggggagcctcgaccaggctcggccctcgacgatgggataggcagacagccccctgtgcaa

SEQ ID NO: 871439 - DNA, 120 bp, Artificial Sequence
  ENSG00000223403_29 (sequence is synthesized)
gcagctagcttgcagggtcccgagaggccaaaggccctggtctttcctggggcaagaggctgctgagaaggtgcacagagcctgggtgcaggaaaccatccagaatgctgcttcccgcca

SEQ ID NO: 871440 - DNA, 120 bp, Artificial Sequence
  ENSG00000223403_30 (sequence is synthesized)
tctgtgagatcttcgttttctctaacactcaaaaatagatgtttctgttatgctctctcgttggcaggggagcggcaggacctgccaaggcctgggggagcccgccagcctgctgagttc

SEQ ID NO: 871441 - DNA, 120 bp, Artificial Sequence
  ENSG00000223403_31 (sequence is synthesized)
tactgtacaaacagttggggagggggcgctgtctctgttaacttgaaattccccgatcagtaaacatgccaatttaaagtgtaattaactcaggccggaaaaaattcagatttggactgc

SEQ ID NO: 871442 - DNA, 120 bp, Artificial Sequence
  ENSG00000223403_32 (sequence is synthesized)
ttttcacagttgaggttgtttttcttttatttatttatctctttccgggtgtggtggtatctgtggctggttttagccaggaaaaatagaagggggaccgggtggggagggggctggttg

SEQ ID NO: 871443 - DNA, 120 bp, Artificial Sequence
  ENSG00000223403_33 (sequence is synthesized)
ggagaggaaaggctggaaggaaaggaagagaaacgggcgggtggcctgacacccagcagccaggtgtctataggttttctgtcctgggagggggctgtcagggtgatgcccgcctgcaga

SEQ ID NO: 871444 - DNA, 120 bp, Artificial Sequence
  ENSG00000223403_34 (sequence is synthesized)
gagggggtcattctgcgaggttgggctgcagacccctgtgccagcgggcctggtgattcggaaatgatggggcactgtggagagaccccaggaaaacacccagtgctgcttttgacattc

SEQ ID NO: 871445 - DNA, 120 bp, Artificial Sequence
  ENSG00000223403_35 (sequence is synthesized)
gacaggtaagaaaactgaggtccacagagggcagggtgcattgctgtggcttttgttctgagcactgtctccccagctttggggttgagactctggggtcaagacccacctctgatgaac

SEQ ID NO: 871446 - DNA, 120 bp, Artificial Sequence
  ENSG00000223403_36 (sequence is synthesized)
gagcggcttccttctttgtaaaaattgaggcgacccagaccaagaagggctgcaaaatcaccaagccaggacctcaatacccaaggggctggggtttcggccaccctgtggcagagcttt

SEQ ID NO: 871447 - DNA, 120 bp, Artificial Sequence
  ENSG00000223400_0 (sequence is synthesized)
ccttcctgcacttcacaggaggcaaccatgagctctgtgtctcatctgcacctgggcacgtggtcatgttggataacccacgtggcaggaactaagggcacctctaggagctgaggtggt

SEQ ID NO: 871448 - DNA, 120 bp, Artificial Sequence
  ENSG00000223400_1 (sequence is synthesized)
tcaatgcaaacttagccagccagacacctggattagagcttggctgagacccaagcagaggactcagtgaaacatgcctgtgctctatttattatgtaagcattaaaaagctgataagaa

SEQ ID NO: 871449 - DNA, 120 bp, Artificial Sequence
  ENSG00000285569_0 (sequence is synthesized)
agagttaaagcactcccacggacaggagacagaactgcctgtggagaattgcattatagccaagcgccgggatatatatttatctgtgcctgacattctcatctctttttaaaggaaaag

SEQ ID NO: 871450 - DNA, 120 bp, Artificial Sequence
  ENSG00000285569_1 (sequence is synthesized)
ccacacatttggccaaaagatgaagtggaaaaaatgtactgttgaacaaatatccaggatggttgctcagaatgtataaaatgatgaactgtgtggaaaaatcatgcctgtggcaaattg

SEQ ID NO: 871451 - DNA, 120 bp, Artificial Sequence
  ENSG00000285569_2 (sequence is synthesized)
tcagcaggctatatttgggggtccgaatgcagggcccctgccaactgagttcacagagccttagtgtttttccacttctatttatagcgatgcacacattcacacacaaaaaatgcaggg

SEQ ID NO: 871452 - DNA, 120 bp, Artificial Sequence
  ENSG00000285569_3 (sequence is synthesized)
gacattggacttcgtttttaaatgatgaaaatgttcgaaatgtatctggtttcagcacgtgagagccgctctgctgtctacgatcagccttgcttactgaagaagggattaatcaacgtg

SEQ ID NO: 871453 - DNA, 120 bp, Artificial Sequence
  ENSG00000285569_4 (sequence is synthesized)
gggaaaacaacgtaataggatcctttgggaatctgaaagtctgaaaacaacttttttctctatttcctttttaaaatgtaattcacttcaacaaaactttattgagcaccaacgatgcaa

SEQ ID NO: 871454 - DNA, 120 bp, Artificial Sequence
  ENSG00000285569_5 (sequence is synthesized)
aatgttgaaatggacatctgattgttgtctctcagcctccattcctcctgccccttttccagcagccattgcttctagttggagaaccacgtgtttccagtgagggagattcttctttcc

SEQ ID NO: 871455 - DNA, 120 bp, Artificial Sequence
  ENSG00000285569_6 (sequence is synthesized)
agcttcagatgttgaacacaagacctggcttggccaatcagggcaagccatccccctgggcacagtgattggctcaggcccaccccgagctggaccaatcagagtgaagagtgagacttt

SEQ ID NO: 871456 - DNA, 120 bp, Artificial Sequence
  ENSG00000285569_7 (sequence is synthesized)
ggccaggaatgctgaaacaaagactgagccttagtgttggatttgaaggaagaagccccaggagctgctgagagctgttttataaccatgagccatgtaaaatgtgcctccttcgtcttc

SEQ ID NO: 871457 - DNA, 120 bp, Artificial Sequence
  ENSG00000285569_8 (sequence is synthesized)
taagtttcctgaggtctccccagccacgcttcctgaacagcctgcggaacggcccagtcccaaggcacaagaccacttgtgccagcagccagcagcgtgcatcagcaagacagcagaagc

SEQ ID NO: 871458 - DNA, 120 bp, Artificial Sequence
  ENSG00000285569_9 (sequence is synthesized)
gcagaagcaggaagacagcctgctggaagacacttaccctggccggaagacatgtacccctgaagatggagaaagaggccttccgggtactacgtagcagtcacgtcagaccgggacact

SEQ ID NO: 871459 - DNA, 120 bp, Artificial Sequence
  ENSG00000285569_10 (sequence is synthesized)
tcctgtttagagaggactataaaactccggtccggtaatcacttggggctgacgccattttaggcctcatcccgcctgcacccaggcactcattaaaacagcgtgttgccccacactgcc

SEQ ID NO: 871460 - DNA, 120 bp, Artificial Sequence
  ENSG00000285569_11 (sequence is synthesized)
tcgtgttgtctgttggtgcgctctcggggttcaaaccgatacaagaacctttcaaatggtagtaagattaaaggtttttactaagttattaataacaaaaaaggcacagatcttaaatgt

SEQ ID NO: 871461 - DNA, 120 bp, Artificial Sequence
  ENSG00000285569_12 (sequence is synthesized)
gcagttatgaattttggcaattgtatacattcatgtaatcactacccacaacaaaaatagaatgtttccaccaccacaaaaagtttgcaacacccctgtacctctttctagtgcatttcc

SEQ ID NO: 871462 - DNA, 120 bp, Artificial Sequence
  ENSG00000285569_13 (sequence is synthesized)
aatcatgtcctcatacctacctaccccacaaccattttttaatctcttccagagctaacgcttaatacattgaattttacataatcttaggatagactgtcccacataaaggagactatc

SEQ ID NO: 871463 - DNA, 120 bp, Artificial Sequence
  ENSG00000285569_14 (sequence is synthesized)
tgcaataatttatgttggaagaataagatattgatgtcaattaatacattttgtgtcctggtttaaaaatgctcctactattaattaaaattttaaagacattttcttgtgaaagtataa

SEQ ID NO: 871464 - DNA, 120 bp, Artificial Sequence
  ENSG00000285569_15 (sequence is synthesized)
agggatacttttttctattttgaacattatgagttcaaaagttcattctgatagaaaattttattttgtgtgtttcaactatgtatggatggaaataaaactaggaagaaatatagataa

SEQ ID NO: 871465 - DNA, 120 bp, Artificial Sequence
  ENSG00000285569_16 (sequence is synthesized)
ctgaggtctccccagccacgcttcctgaacagcctgcggaacgggaatatggcttgtgaaccgtactgtctggggtccgaatcctggctctagtatttcccagttgtggagttttgggca

SEQ ID NO: 871466 - DNA, 90 bp, Artificial Sequence
  ENSG00000285569_17 (sequence is synthesized)
atcctggctctagtatttcccagttgtggagttttgggcaagcatgccctcatcctcctgagcctcagcaacgacacttatctgacaagc

SEQ ID NO: 871467 - DNA, 120 bp, Artificial Sequence
  ENSG00000285569_18 (sequence is synthesized)
cagccacccgaagtgctggtattacaggcgtgagcccccatgcccagcttcaatatttcttttaagtgtggtttgtttttttcactgccaacacatttttatcttaatgttaccacccaa

SEQ ID NO: 871468 - DNA, 120 bp, Artificial Sequence
  ENSG00000285569_19 (sequence is synthesized)
gtcaaccagaagtcatttaagaaatagctggtgtagaaaataattttgcaaaatgagaaatcagttcaaaggctggattccaaactggcatgagcctgtccccagtgttggtgtctcgtc

SEQ ID NO: 871469 - DNA, 120 bp, Artificial Sequence
  ENSG00000285569_20 (sequence is synthesized)
tccatgtggtcttttgccaactcatctgcttttgcccccgacctgcccttgggcagaatccagtgcagatcctcatgcatttaggaagggtgtctgaaggcttactcagcagccaccagt

SEQ ID NO: 871470 - DNA, 120 bp, Artificial Sequence
  ENSG00000285569_21 (sequence is synthesized)
catcatgtcttttctattttctattaccacattcagttacaaacaggtacacaaatatgaagagaaatggagggcaagggacgtaagatggtgcatgtttctcctgccctggtaaaacgt

SEQ ID NO: 871471 - DNA, 120 bp, Artificial Sequence
  ENSG00000285569_22 (sequence is synthesized)
tggttgcctgtgacaggaagaggtcgtgggggtaggcagagcagggtaaggttttaaacaaattcttttttgcaatatttactgattattttattttttctccattgaagagactctttt

SEQ ID NO: 871472 - DNA, 120 bp, Artificial Sequence
  ENSG00000285569_23 (sequence is synthesized)
ttctttttttgctctattcagccattttatgctttaactctgcagacaataacaaaaaatacactaaactacatttagacagatgggaagaaatggagaaaagaacaattactcaaaaca

SEQ ID NO: 871473 - DNA, 89 bp, Artificial Sequence
  ENSG00000285569_24 (sequence is synthesized)
agatgggaagaaatggagaaaagaacaattactcaaaacactaagctgaagctgagtgttgtggcatgcactcacagtcccagctactc

SEQ ID NO: 871474 - DNA, 120 bp, Artificial Sequence
  ENSG00000285569_25 (sequence is synthesized)
ctgtctcaaaaacaaaacaaaacaaaaaaccccactaagttgatgaaaatggtcaactttttttgcctatggacatctacatgcgcccgcatcatttgttgaaaagattgacctttcccc

SEQ ID NO: 871475 - DNA, 120 bp, Artificial Sequence
  ENSG00000285569_26 (sequence is synthesized)
gaaaagattgacctttccccattaaattgttttatcagttacacattaagtttctatgagagtaagaagaacaataggtttggaagaaggtttgaagatacaagtcaaagtctgaaagag

SEQ ID NO: 871476 - DNA, 120 bp, Artificial Sequence
  ENSG00000285569_27 (sequence is synthesized)
acttgttctaatgtggaataactcataagtttttctgattaaactgttaattttcatagaattatagactcacatgcagttgtaagaaataatacagagaactcctgtggattctttaca

SEQ ID NO: 871477 - DNA, 120 bp, Artificial Sequence
  ENSG00000285569_28 (sequence is synthesized)
cagtttccccagtggtaaacttggaaagttatagtagaatatcacagccaggatattgacactgatacaaagtacaggacagtttcaccatcataaagatcttttgtgttgctcttctag

SEQ ID NO: 871478 - DNA, 120 bp, Artificial Sequence
  ENSG00000285569_29 (sequence is synthesized)
atagccacacctaccccaccccaccactgtccctggcctccgacaaccactaatctgttttccattctttaattttgctacttcaataatgttatataaataggacaatacaggatacaa

SEQ ID NO: 871479 - DNA, 120 bp, Artificial Sequence
  ENSG00000285569_30 (sequence is synthesized)
gggcccccagttgtttaaaatcaggagtcagtacccctggagctgcagaaagaactctcctgaatcagtttaggactatgttctgtcgcatgatgcagaacggtgcctacagtgggttct

SEQ ID NO: 871480 - DNA, 120 bp, Artificial Sequence
  ENSG00000285569_31 (sequence is synthesized)
ttgaacagctttctcttttcttatttcttgccccactttctgcttgtaaaaaggcctagaggtaagcagccctggactgttgcagctactcaagaaggtgtggcctttgcttcctggcac

SEQ ID NO: 871481 - DNA, 120 bp, Artificial Sequence
  ENSG00000285569_32 (sequence is synthesized)
tcagatggcagctgacctctaggtatgcatcattcacatctgagacaggaaagagagggaaggaccaagggtgaggggctaaatgaaacagccagtgaggtccactccctttcaaaagct

SEQ ID NO: 871482 - DNA, 120 bp, Artificial Sequence
  ENSG00000285569_33 (sequence is synthesized)
gacctgaagcctcaacccaggacatcactagcacatctgggtcacatgggcttctacggtctggcctgggaatctagaccctcattaactgcatggtacccattgggaagtctgttctaa

SEQ ID NO: 871483 - DNA, 120 bp, Artificial Sequence
  ENSG00000285569_34 (sequence is synthesized)
tcccacactcagatccagttgacatttttgacatggaccagacatcagatttgacacgtttgattatagttgatacagggaaatgcctgtatcaactataatcagatttatcaagtccag

SEQ ID NO: 871484 - DNA, 120 bp, Artificial Sequence
  ENSG00000285569_35 (sequence is synthesized)
ccgtgaggctggactttggaacctgggtggggtctggagagggagagaaggaaggagagaaatgtaggtggagcaacagtgtaacaaggctggggaaagttctgagactgatggctactt

SEQ ID NO: 871485 - DNA, 120 bp, Artificial Sequence
  ENSG00000285569_36 (sequence is synthesized)
tctgaggtggtcccctacagtttcaaagcttcccggagctccacctctgctgagaaacccctcaccgagcttccctttctgtctggttctgttgaacgcaaacgacatctgcttcccact

SEQ ID NO: 871486 - DNA, 120 bp, Artificial Sequence
  ENSG00000285569_37 (sequence is synthesized)
gtaagtttcctgaggtctccccagccacgcttcctgaacagcctgcggaacggcaggaatgaaagattctccccagtgcctgaaagcttgaagggatgaataactcctcccttctcaggc

SEQ ID NO: 871487 - DNA, 120 bp, Artificial Sequence
  ENSG00000285569_38 (sequence is synthesized)
tttttctatatgctgttttggttttaagatcttgagaaagaagtccaggaattcacaagcttgaaaaggagatgctgaggccactgtgaagacttgaatacttttgccttggaggcagtc

SEQ ID NO: 871488 - DNA, 120 bp, Artificial Sequence
  ENSG00000285569_39 (sequence is synthesized)
ccaggcccaccactctcagcaaaggtctcctcctgccctttcccagatctaacacaggacagcaggcggagaggaaccacccccttttccttctcactattctggctcttgttagagtga

SEQ ID NO: 871489 - DNA, 120 bp, Artificial Sequence
  ENSG00000285569_40 (sequence is synthesized)
cagtgggatgggaactaggactctttgtcattgccaggggttgccttgaaggactggagtctgagagtaagcaaactttatgacccacaaaaaaaaaaccagcttcaggaaagcttaatg

SEQ ID NO: 871490 - DNA, 120 bp, Artificial Sequence
  ENSG00000285569_41 (sequence is synthesized)
gagttcctggtgtgaacttagaagcaaggtttgataattaattctgacctggctatttgtgaataaacaaagattaatacagtgatttccattttgctgagtatttttcggcctctgaac

SEQ ID NO: 871491 - DNA, 120 bp, Artificial Sequence
  ENSG00000285569_42 (sequence is synthesized)
cacaagagtttctatctcataatgagagctggcttcttgtgtttttgaggcagaattttgacagtgtttcttgtgcattcttcaccatcatttggagccaccaccttggcaacgtctgta

SEQ ID NO: 871492 - DNA, 120 bp, Artificial Sequence
  ENSG00000285569_43 (sequence is synthesized)
gacaaggagataagggactctcaaatctatccttgaagaggaagtggccccagagttccgataaaatcctgccgtatacgggctgtataaaagcaatttgaccacttgcgattttgagtc

SEQ ID NO: 871493 - DNA, 120 bp, Artificial Sequence
  ENSG00000285569_44 (sequence is synthesized)
ttaagaatctttcaatttctcagcctctggcaggagtaagagaataatatcctggatgtttataaaattcgataaccttttaaatccatcccacttgaaggaatagctagatttctggac

SEQ ID NO: 871494 - DNA, 120 bp, Artificial Sequence
  ENSG00000285569_45 (sequence is synthesized)
ccccattttctgaggctttccaggatggacgcatgctatcagctccccctgcaggtctgactctttcctgacagggaattcctggaggtccactgagaaaatggattctggaagggctct

SEQ ID NO: 871495 - DNA, 120 bp, Artificial Sequence
  ENSG00000285569_46 (sequence is synthesized)
aaattgtgtcgcacagacgaaatgcttcgactgcttggaaatgacccacctttctgctggaagccacatgtcctgggaatgcaccaaagtctgaatctgtcagtaccttactatgctgca

SEQ ID NO: 871496 - DNA, 120 bp, Artificial Sequence
  ENSG00000285569_47 (sequence is synthesized)
ggaaaacaaagtcccacccagaactccagtgcccaggcaggaccttccttgcgctaaacgcgctttagaatgttcaattctctctcttctttgtaagcactgtggccctgtggtaaatcc

SEQ ID NO: 871497 - DNA, 120 bp, Artificial Sequence
  ENSG00000285569_48 (sequence is synthesized)
atcacagataaaatggcctctacatgagccatgtgctaaaaaaggatacgtacacccattgtgtgttgagtctaaaagttgtttctcaaaaagttttggattgtcccaaattttatatgt

SEQ ID NO: 871498 - DNA, 120 bp, Artificial Sequence
  ENSG00000285569_49 (sequence is synthesized)
gagccttagtgttggatttgaaggaagaagccccaggagctgctgagagctgttttataaccatgagctcaaactttatagcaagacaaagccagaatgttcaggtgaagaagcagagaa

SEQ ID NO: 871499 - DNA, 120 bp, Artificial Sequence
  ENSG00000285569_50 (sequence is synthesized)
tggctgtgtgagtttcctaggctgtcggaacagagagccacaaactgggtgtcttcaatccatacaaatgtaattatctcacagttctggaagctggaagtctgaaatcaaggtgtcagc

SEQ ID NO: 871500 - DNA, 120 bp, Artificial Sequence
  ENSG00000285569_51 (sequence is synthesized)
ggggctatgcttcctctaaagcctctaggtaggaaattccttgcctctccagcttttggtagataagtttttggcttatcccagcttactccaatctctgccctgtcttcacatggcctt

SEQ ID NO: 871501 - DNA, 120 bp, Artificial Sequence
  ENSG00000285569_52 (sequence is synthesized)
ctcatgtctctgtgtcctggcctgttcttccaaggatgccaatcattgggattagggtcagtctaaatccaggatgatttcatcgcacaacacttgactaattacatctacaaagatcct

SEQ ID NO: 871502 - DNA, 120 bp, Artificial Sequence
  ENSG00000285569_53 (sequence is synthesized)
atttccaaataaggtcatattctgaaggttctggtggcataaattttgggggacactattcagcccactacattgaccaataacaaagccaactgacgcgccataatttatgtcagctaa

SEQ ID NO: 871503 - DNA, 120 bp, Artificial Sequence
  ENSG00000285569_54 (sequence is synthesized)
actatggagcccctcctgatgtctgtgctgggacccccggtggcattgctggactctcagtcttcctgtgaacctaaccagctgtgtcctctcttttaaaaatttatttttgtttgagat

SEQ ID NO: 871504 - DNA, 89 bp, Artificial Sequence
  ENSG00000285569_55 (sequence is synthesized)
aatttatttttgtttagtacagtggctgttcacaggagtgatcacagtacacggcagcctcaaactcctgggctgaagtgatcctcctg

SEQ ID NO: 871505 - DNA, 120 bp, Artificial Sequence
  ENSG00000285569_56 (sequence is synthesized)
gggactacaagagcatgccactgtgcctggctttgtgctctctcttaataattagaataactaacttactatggaggaagtactgtgacaaaagcttcttgcaaacttagacactctcct

SEQ ID NO: 871506 - DNA, 120 bp, Artificial Sequence
  ENSG00000285569_57 (sequence is synthesized)
tggcttttgacatgtcaaggattttcaagtaaggaaaaaagagagaaagaagaatgggcgaggaagggacgataaccccacttttcagatacgactgtaaaaaactgaagcaacttgctc

SEQ ID NO: 871507 - DNA, 120 bp, Artificial Sequence
  ENSG00000285569_58 (sequence is synthesized)
agagaatgggacaatgctgagatgtgagggcactctttctaactccaaatgtgtgctttttaacctcttacttctttcttggctcagaaggaaaataaataaaatatagcatgaaagcct

SEQ ID NO: 871508 - DNA, 120 bp, Artificial Sequence
  ENSG00000285569_59 (sequence is synthesized)
aatgaattatgttgaggctgggctatccaagatggccaattaaaggagaaaaagagaagttcactgtgcagtatgtttaagccctgagctccacctatgaatttacaatttttgcttaca

SEQ ID NO: 871509 - DNA, 120 bp, Artificial Sequence
  ENSG00000285569_60 (sequence is synthesized)
agaaccttcacttgcatcatgttgggaaagaataagcccgaaggagactaatctgatgccttcaggaccttttgttttcaggctgagcagtagcctgacagtggtgggggcaaatggaaa

SEQ ID NO: 871510 - DNA, 120 bp, Artificial Sequence
  ENSG00000285569_61 (sequence is synthesized)
ggaaagccatttggtggcagggatcatccagtttataagtataaaaaagttgtgactcagcttttgacagggacccaggagagggactttgaattgagtcattatggattattctctgaa

SEQ ID NO: 871511 - DNA, 120 bp, Artificial Sequence
  ENSG00000285569_62 (sequence is synthesized)
tccagtaggccaataggccaatgtgttttatggctcaagaggttaaactagtctgggacatgatttcttaagattttagaaacaaaccaaaatatatcactcttctcatgtgcaaagtca

SEQ ID NO: 871512 - DNA, 120 bp, Artificial Sequence
  ENSG00000285569_63 (sequence is synthesized)
tggtgcatttgtgcctggcattctgtgtgtgtttctgggggtttaatctcaagaaaactactgtaattcctcatttgttttactgatagggaaaaagatctccatataaatgaaatttcc

SEQ ID NO: 871513 - DNA, 120 bp, Artificial Sequence
  ENSG00000285569_64 (sequence is synthesized)
aggtatttgaagagtaaccaactgagaactaaaacattttaactttgagcctttgggaagggctctttccaaatggtagtatacatctgtgcacttttctaagactaggaaatgacagga

SEQ ID NO: 871514 - DNA, 120 bp, Artificial Sequence
  ENSG00000285569_65 (sequence is synthesized)
tgatttagggtcaccagtaggaacaccatttatcatatggactagacacagtgatgatgtcagtggcaagatactagagtggacagagtctgagctttgaagtcgccctgaccagctttg

SEQ ID NO: 871515 - DNA, 120 bp, Artificial Sequence
  ENSG00000285569_66 (sequence is synthesized)
aattccagctgcctcctagcagctatacaatcttgtaggagtgacctaacctctcagcctcagtttccttatatataaaatgggggtaataattcttacctcctggggtcattgtgagga

SEQ ID NO: 871516 - DNA, 120 bp, Artificial Sequence
  ENSG00000285569_67 (sequence is synthesized)
ttaaatgagataatatgtatctattagatacatagtgtgtacataaaactttcagcagcatacctgacaaatagaatgtgctcacatcattattatcaacaatacaaaaaagtcagctgt

SEQ ID NO: 871517 - DNA, 120 bp, Artificial Sequence
  ENSG00000285569_68 (sequence is synthesized)
tgtcgttattgtccctacaataatgctacgctaactatcccaagattgttattttcatcgtaaggacatggagttcattgggttttatatccatttgtgttttttttaaatgtttgcttt

SEQ ID NO: 871518 - DNA, 120 bp, Artificial Sequence
  ENSG00000285569_69 (sequence is synthesized)
gcagctctcttcctgtgtgggagtacttgccaaaacatgacttccccatcctttctcattccattcatttatccaacatgcattggtgacacaatgcaatgtgagaaaacacatgccaga

SEQ ID NO: 871519 - DNA, 120 bp, Artificial Sequence
  ENSG00000285569_70 (sequence is synthesized)
agagtcccaaatacaatgttttgagaactgagaggaaagggggatgaataaatgaagaatggatgcatgagcgtgtcacaaatgaagaaattgacaggaaggccataagagcaaggggca

SEQ ID NO: 871520 - DNA, 120 bp, Artificial Sequence
  ENSG00000285569_71 (sequence is synthesized)
aacaccagagcgctttccatatgcctgatagagtcttcccaaaagcacacacctcattttccattgtcatcaaatatcagcatacaccatcatagggtttgcctttggcatgaatgatct

SEQ ID NO: 871521 - DNA, 120 bp, Artificial Sequence
  ENSG00000285569_72 (sequence is synthesized)
ggaagaatctcggaggtcctcaagcccctacccttcaagatgcagtaatggaaacattggtgtctcaaacccaacaggtccaaagtacgtatgtgtcacattcacggccaaagcagcccc

SEQ ID NO: 871522 - DNA, 120 bp, Artificial Sequence
  ENSG00000285569_73 (sequence is synthesized)
tcttccctctatgcctatttcatatgctgatgatacatccaggaagactgcaacaaatctgagaggcattgggaatcgaaatttccactgcctcccacctccagttatcccagtgcagat

SEQ ID NO: 871523 - DNA, 120 bp, Artificial Sequence
  ENSG00000285569_74 (sequence is synthesized)
aactccaagcagggacgaccagatgagtggatcctcagcacacaggctgaggatgaccatcagacaactaggaacagccaacaccttgaactggaggtactccaagagttgtgtttttaa

SEQ ID NO: 871524 - DNA, 120 bp, Artificial Sequence
  ENSG00000285569_75 (sequence is synthesized)
tttttgatgttagttgtaagatgcattcctttagagctattaattatgtaagtaatagtagacaaacatggaccctgaggaagggaaccaagggaagggggcctgaattttctgctcttt

SEQ ID NO: 871525 - DNA, 120 bp, Artificial Sequence
  ENSG00000285569_76 (sequence is synthesized)
tgggcgggtgatgactccaagtcattacaatctagatgcatccttattttgcagccacagcttgctgagatctgagcacataatcagatacactgacatggatgttaccgtgtggacaag

SEQ ID NO: 871526 - DNA, 120 bp, Artificial Sequence
  ENSG00000261706_0 (sequence is synthesized)
gaaggccaatggctcctggtgtcattaaagactctgtttttacctcctctgggcctcgggagaccagcctggcaccagaggaggggctggcagagccccaggctccagtccacacccacc

SEQ ID NO: 871527 - DNA, 120 bp, Artificial Sequence
  ENSG00000261706_1 (sequence is synthesized)
ggccccaggtctggccatgggctgggccctggtgtgcagacagcagtggccactgctccagggcctttgcaccagcctgctgcaggtccaggcggtcatggggagtggagccgcagcggc

SEQ ID NO: 871528 - DNA, 120 bp, Artificial Sequence
  ENSG00000261706_2 (sequence is synthesized)
ctcttgttttccttcccctcttgggagacggctgctcctcctggctgtttccagaaagtgtgtttgttatttggctcctggaaacaccatctgatgaaacaggctctgttgggctggcct

SEQ ID NO: 871529 - DNA, 120 bp, Artificial Sequence
  ENSG00000261706_3 (sequence is synthesized)
tggaagaacatggaaaattccctaagagcaaattgatgctcagcttccgcgggcaccaacttgctgcggaatcctgctttgcagatcatcgttcctcgagcattcggacgcctcgggccc

SEQ ID NO: 871530 - DNA, 120 bp, Artificial Sequence
  ENSG00000261706_4 (sequence is synthesized)
cagaagttcaagaacaagaaagctctgtttcatgcagacacgctcacgcatgcacacatgctcacacatgcacttatacgtgcacacacacacacacaacacacacacacgcacactcac

SEQ ID NO: 871531 - DNA, 120 bp, Artificial Sequence
  ENSG00000261706_5 (sequence is synthesized)
acaaccatggccatgtagccccagtctcagcatcatgtcctctatttagaaatattggctaaacacctaataaataactaaacagaaatgtaatctttaataaagtctcataaaccaaaa

SEQ ID NO: 871532 - DNA, 120 bp, Artificial Sequence
  ENSG00000261707_0 (sequence is synthesized)
agaatgtcctcatttgtatggtcaaggctgggttgcagagaagtccatgttgcagctcatggaaaaaaagaaccaaagggactcaagaacactggcttatgtcttagattggagatgacc

SEQ ID NO: 871533 - DNA, 120 bp, Artificial Sequence
  ENSG00000261707_1 (sequence is synthesized)
tggaaagtcaactttcacccataacccattggcctaaaacaatagaaggcaactggaaaagaggcaaggattctaactacatactgcagaaaaaatattcacacctgtcaaattccaaca

SEQ ID NO: 871534 - DNA, 120 bp, Artificial Sequence
  ENSG00000261707_2 (sequence is synthesized)
gctggcattgttgttgttctacgaataagcacacacagaatcctcgtgaatagttctttgtctcttgctctagtaaatcataacctgcttgtagcttttttatgaaccttcaggaataac

SEQ ID NO: 871535 - DNA, 120 bp, Artificial Sequence
  ENSG00000261707_3 (sequence is synthesized)
caacactgcaaggtttgccgtcattcccttgatctggtaagtgacaccgtcttcagggtttgtgtactcaaagatatgattaataaaacggtgaccaagacgtgtgacgtaatgctggtc

SEQ ID NO: 871536 - DNA, 120 bp, Artificial Sequence
  ENSG00000261707_4 (sequence is synthesized)
atggacctgtggatgcaggaaataggccagaggcaccaggaatacatccttaacttcagcaggattcggctgggcctggaagttgtggtctattaaacccacaaatggagttatcaatgt

SEQ ID NO: 871537 - DNA, 120 bp, Artificial Sequence
  ENSG00000261707_5 (sequence is synthesized)
atctgtctaaaagcagaaaacaaaacagacaaattaagaagtgaagtgatactgcttcaaatcctaaaatcatgccacttctaggtgagctaagaaaatacaccgaacctgggagaaggg

SEQ ID NO: 871538 - DNA, 120 bp, Artificial Sequence
  ENSG00000261704_0 (sequence is synthesized)
catccctcctctagagaagttgctgagaacacagctcctcaccatggactggacctgaaggatcatttttttggtggcagcagctacaggtgcccaattccaggtgcagctggtgcagtc

SEQ ID NO: 871539 - DNA, 120 bp, Artificial Sequence
  ENSG00000261704_1 (sequence is synthesized)
gaaggtgtcccgcaaagctctggatacaccttcaccagctacgatattcactgtgtgcgacaggcccctggataagggtttgaaaggatgggagggatctactctggcaatggtaagaca

SEQ ID NO: 871540 - DNA, 120 bp, Artificial Sequence
  ENSG00000261704_2 (sequence is synthesized)
ggctatgcacagaagttccagggcagagtcaccatgaccagggacatgtccacgagcacagcctacatggagctgagcagtcagagatctgaggacatagatgtgtactactgtgcgaga

SEQ ID NO: 871541 - DNA, 120 bp, Artificial Sequence
  ENSG00000261703_0 (sequence is synthesized)
ttcaggcaccgtctacaaacggggtttaaaatgagctagcgccatctactgggcgaatgccgtaaggtcggttgtgaggtcccggaatctgcaaaggaatgaatgaattacaaatctgtg

SEQ ID NO: 871542 - DNA, 120 bp, Artificial Sequence
  ENSG00000261703_1 (sequence is synthesized)
gagattccacttggattaagacttgcataagtggggagttgagtccagtctctttcccccactgcaataccctgttgcggtgacatgtaataataataaaaagacttgcatgaactcctt

SEQ ID NO: 871543 - DNA, 120 bp, Artificial Sequence
  ENSG00000269553_0 (sequence is synthesized)
gaaagaaagaaagatgggcaacagttgcagaacctaacccacagataggttttgtttgaccagctctgtacatttttagtttattttttatctttttgagacagggtcttgccctgtcgc

SEQ ID NO: 871544 - DNA, 120 bp, Artificial Sequence
  ENSG00000269553_1 (sequence is synthesized)
cagcctcatgagtatctgggattacaggcgtggtggcacctgcctttacccagctacttggggggctgaggccagagaaacgcttgagcctgggaagcagaggttgcagtgagcggagat

SEQ ID NO: 871545 - DNA, 62 bp, Artificial Sequence
  ENSG00000269553_2 (sequence is synthesized)
cacactccgtgagcatcccaaatgccacatccccataatgcaaccagacccggtcctcccgg

SEQ ID NO: 871546 - DNA, 120 bp, Artificial Sequence
  ENSG00000269559_0 (sequence is synthesized)
gcgcccccgccgacctcccaccgccagcggctccgcacccggcgcccgcagccctcgtacctcacaccgctgctccgaaagccccggaacgcactcccgggctctcccggtgcccttacg

SEQ ID NO: 871547 - DNA, 120 bp, Artificial Sequence
  ENSG00000269559_1 (sequence is synthesized)
acgcactcccgggctctcccggtgcccttacggagggtgctgtgcttctgcccaacgccggcgctcggccaaggcggccgcggagcagcgagaagccgcggaccggcaccgtcatggccg

SEQ ID NO: 871548 - DNA, 120 bp, Artificial Sequence
  ENSG00000269559_2 (sequence is synthesized)
cggatccccggcttccggactggggctccacctcccgcgactccagtcctcgcggctggaggcctggctccgccctcacccgggctggcagggcagcaagtagcgcttcccagccaggtt

SEQ ID NO: 871549 - DNA, 120 bp, Artificial Sequence
  ENSG00000269559_3 (sequence is synthesized)
ccggcagacacgcagagtggggtaaagagcggttcccaggaccggggacggaactgacagagtgccgggtccgcagggggcggggccaggacccaagtcccgggccctctgaggatgtgg

SEQ ID NO: 871550 - DNA, 120 bp, Artificial Sequence
  ENSG00000269559_4 (sequence is synthesized)
aagcgtgcagtgtggcctggcgactgggccccgcacccagccaacatatagctggcattcccatagcgacggcacagagaaggcctccaaactatcactttaggcagcacgccccacttt

SEQ ID NO: 871551 - DNA, 120 bp, Artificial Sequence
  ENSG00000269559_5 (sequence is synthesized)
ccaccaagccagagatcctgcccaacagtctccgtgactacgtggaattggatttaaagcaggaaagaagtaataggttcattgtttcccacttcctttgtgagattccttggaagttgg

SEQ ID NO: 871552 - DNA, 120 bp, Artificial Sequence
  ENSG00000269559_6 (sequence is synthesized)
agaaaagaacaaaggtgtgtggagaaggagcaaaacctggctgaacaaggaaggtctggactttaggatttctatacttctactttatcatctccacttttggaaggaaatattgaccaa

SEQ ID NO: 871553 - DNA, 120 bp, Artificial Sequence
  ENSG00000269559_7 (sequence is synthesized)
agcttgtgtggtgaggaagcaaaatatctgctccctctgaaaaagtaaaacattagactgtccattcattttgcaaattaagacagacacacaaaaaacagtcacagataaaaccagctg

SEQ ID NO: 871554 - DNA, 120 bp, Artificial Sequence
  ENSG00000269559_8 (sequence is synthesized)
ggaagttaacaggaaacaacttttctcccaaggtcaggctgctgctgttgagtcagaacaacgtctttcatagctgcacttttactgagaaaacttgttttttaaaatcatagactgtca

SEQ ID NO: 871555 - DNA, 120 bp, Artificial Sequence
  ENSG00000269559_9 (sequence is synthesized)
gaaaatatgctctttaaaatcatatcaataagaatgggataccctactctttcctggctgatctaaatccatttgacacaaataagcagcctagaagaaaatacaggaaaaaatctaggt

SEQ ID NO: 871556 - DNA, 120 bp, Artificial Sequence
  ENSG00000269559_10 (sequence is synthesized)
gaccttgggtttggcaatgagactttagataaaacacttaaatcacaattcataaaagaaaaaaacaatttaaacttctgccatgcaaaagacactgttaataaagaaacaaatcacata

SEQ ID NO: 871557 - DNA, 120 bp, Artificial Sequence
  ENSG00000269559_11 (sequence is synthesized)
ctgggagaaaatattcgcaaaacatttttacaagacttacacccaaaatatacgaagaactcttgaaactcaacaattaaagaaaaaagaaaagcaactcagttaaaagtgagcaaaaga

SEQ ID NO: 871558 - DNA, 120 bp, Artificial Sequence
  ENSG00000269559_12 (sequence is synthesized)
tctgaaaacacccaccaaaaaaggcatacagaggtcaaaaaaaatggaaaaatattcaatatcatttatcattaaggaaatacaaattaaaacaacagtgagataccactacactcccat

SEQ ID NO: 871559 - DNA, 120 bp, Artificial Sequence
  ENSG00000269559_13 (sequence is synthesized)
tagaaccgctgaagtccaaaaaattgataatacgaaatgctggcaaggatgtgtggcaacaggaactctcattcattgttggtgaataaaaaaatgattcagtcactttggaagacagtt

SEQ ID NO: 871560 - DNA, 120 bp, Artificial Sequence
  ENSG00000269559_14 (sequence is synthesized)
tggcagattcttacaaagctaaatatcatttaaccatgcaatccagcaaccatgttcctatgtatttacccaactgattttaaaatatgtctgcaataaaccaccatatgaatgtttata

SEQ ID NO: 871561 - DNA, 120 bp, Artificial Sequence
  ENSG00000228064_0 (sequence is synthesized)
acagacttcaacagtcttcaggaagactcggcttcataatctggcccataaggaaagaattccccaagtctgccctaatcttctgtgtaggacctaggtatgatgtcctttaagttccct

SEQ ID NO: 871562 - DNA, 120 bp, Artificial Sequence
  ENSG00000228064_1 (sequence is synthesized)
tctaactccatgattctataaactcagcccagctttccgattttagcagagggtaatcagttacatgaaaacaccaatgtcaaccttccatgatgtggaacacctgcttttcctacaaga

SEQ ID NO: 871563 - DNA, 120 bp, Artificial Sequence
  ENSG00000228064_2 (sequence is synthesized)
aataggctataaggagacttttgattcagcgctaacatgtaaagcttgaaagtcatcactcccatccctaaaacaagaaaacagtagaacaaactgaaaatcaacaactgttcttgaact

SEQ ID NO: 871564 - DNA, 120 bp, Artificial Sequence
  ENSG00000228064_3 (sequence is synthesized)
gttcagagaactgaggtcccagggcaaaggaccaccctgaaatctggagacccaggagaatatagagatcacagccgagatctgcttatctgaagtggaagctgttggagccagaaactg

SEQ ID NO: 871565 - DNA, 120 bp, Artificial Sequence
  ENSG00000228064_4 (sequence is synthesized)
gcaggaacacctgcgcggtaattttgacaaatggctggaaatgttagtgtggactaggatgacagtgagaaactcctgggggattaagaagaccttcatgctttcttaggtcaatctcca

SEQ ID NO: 871566 - DNA, 120 bp, Artificial Sequence
  ENSG00000228065_0 (sequence is synthesized)
ctcaagaggcactacaagtgacatgccactgggcagtttagcaaaagctggaggtgccttgacatttgcagtacactgaaacagtggctggcttgaaaaatcccaaaacgattttctgca

SEQ ID NO: 871567 - DNA, 120 bp, Artificial Sequence
  ENSG00000228065_1 (sequence is synthesized)
ggagagcccttttgactaatatgaggtacaaagaaaaagaagtctacaacagatgtgctgaagctcagaaaatggcactacaaagtgtggcactttgacatgctaagtactttgaactaa

SEQ ID NO: 871568 - DNA, 120 bp, Artificial Sequence
  ENSG00000228065_2 (sequence is synthesized)
cttgtcttaccaccccgtctctctaccctgtttctcccctaaaactctcagagaggctttctgtgaactttcccttatctgactaagggaagttcctccagaagcaatgcaattgttatg

SEQ ID NO: 871569 - DNA, 120 bp, Artificial Sequence
  ENSG00000228065_3 (sequence is synthesized)
aaccccttccctggaatccacattaaccagagaagattatctcatgtagcaagagaggagactaaaggtctttctgtccaggataccatatctacagaggctttacatccatttttctga

SEQ ID NO: 871570 - DNA, 120 bp, Artificial Sequence
  ENSG00000228065_4 (sequence is synthesized)
gagttcatcagaccatgtctgtgcaaaaaccgggacaattccagtgtacactaggaaaaagttattcagcttatttcagctttgcaagaaacttctcatcaaagaaacacacaggcttct

SEQ ID NO: 871571 - DNA, 72 bp, Artificial Sequence
  ENSG00000228065_5 (sequence is synthesized)
ttcaaaagagcttccccagacatgtggaactgcccatccgtggctgcccatggaccaatcagcatgcgcttc

SEQ ID NO: 871572 - DNA, 120 bp, Artificial Sequence
  ENSG00000228065_6 (sequence is synthesized)
cccatccgtggctgcccatggaccaatcagcatgcgcttcctctcttctgagctcatgaaaaccctggactcagccagacttgcacactcgtcaggacaacatccctgcagaaaggagct

SEQ ID NO: 871573 - DNA, 120 bp, Artificial Sequence
  ENSG00000228065_7 (sequence is synthesized)
acttgccatgtttctcctctcctctgtgagctggaaccccatcaggacaacttgcctatggaaaggagctacccactttgggtctcctgaaagctgttttgtcactcagtgaagctcctc

SEQ ID NO: 871574 - DNA, 120 bp, Artificial Sequence
  ENSG00000228065_8 (sequence is synthesized)
tgccttcctcaccctcaaattgtccatgtatctcgttcttcctagatgcaggaaaagaactgggacctgctgaatggtgagaatgaaagagctgtaacacaaacagggctgaaatatgcc

SEQ ID NO: 871575 - DNA, 120 bp, Artificial Sequence
  ENSG00000228065_9 (sequence is synthesized)
ccctgctcaccacattgtgagtgatgaggagaaaagagctgcagcccttctgggaatgcagacatcaggtctccctgaactagggctgtggcactctctttggggctctgcttttgggca

SEQ ID NO: 871576 - DNA, 120 bp, Artificial Sequence
  ENSG00000228065_10 (sequence is synthesized)
ccatcgcattccccttgtctagatgctggtgcccacagccaaagctgcttttaatatgcctggtctagcttcagtcttccatggagctggtgcctgtgccagtgcctggaaccgcccacc

SEQ ID NO: 871577 - DNA, 120 bp, Artificial Sequence
  ENSG00000228065_11 (sequence is synthesized)
tgcccatggcagttaggggatgcggctggtagcacaagccgagcaggggctgctgggctgagtgggtggaatgagcccagcgagcacaagcaaaacctaagcagaggcaccaccagccac

SEQ ID NO: 871578 - DNA, 120 bp, Artificial Sequence
  ENSG00000228065_12 (sequence is synthesized)
agaggtttctggctggcaaattgacaccctaggaatcccatgacagcctgggctccctggttgcccactgcattctgggagagcttaaggatccactgtctttaacatcaagttttctaa

SEQ ID NO: 871579 - DNA, 120 bp, Artificial Sequence
  ENSG00000228065_13 (sequence is synthesized)
cctatatctgttgagactttttaagttacatcatttcagaaacattaaccatttttccgtcagaatcaaagcctgaattccaaatcttttggtaccagtagcatatttttacagtaattt

SEQ ID NO: 871580 - DNA, 120 bp, Artificial Sequence
  ENSG00000228065_14 (sequence is synthesized)
tcatttttcaaccctggccgttctgattttgtagtgtaccagcccctactctggcatgagatggaaaggctagggaaactaggggttcaaacattgcattttcagctgtttgagataata

SEQ ID NO: 871581 - DNA, 120 bp, Artificial Sequence
  ENSG00000228065_15 (sequence is synthesized)
taagctttgtgttatgattctgcaggaaaataaataagtagataaataaatagcaccaaaaaataaccattaaatgtctctgaggggcagactaatgataagccataaattagggcataa

SEQ ID NO: 871582 - DNA, 120 bp, Artificial Sequence
  ENSG00000228065_16 (sequence is synthesized)
atacattgatcagctggctactagcaaaccaccagaactctgccgctatctggaatgataacctgtgggatacagtcaactttctgccagagctccatttgagcttgagcctgtcatact

SEQ ID NO: 871583 - DNA, 120 bp, Artificial Sequence
  ENSG00000228065_17 (sequence is synthesized)
cagctgatgcccaagtgaccccttctctcatctttcattcatttttcatgcttacattttcatactaccctgctttgttcccttgccacctcttacttccctccagaggtttacagccat

SEQ ID NO: 871584 - DNA, 120 bp, Artificial Sequence
  ENSG00000228065_18 (sequence is synthesized)
gacactgaatctgccggcacattgatcttcgacttctgccttcagaaccatgaaagggtgaggcaatgaaaagccaatctgtaattgtctgctctttcttaccctgctgctaactactga

SEQ ID NO: 871585 - DNA, 120 bp, Artificial Sequence
  ENSG00000228065_19 (sequence is synthesized)
gtgtggaacctggaattcaaacggctgggtaggaagcacgctagcaggggcctctggccttgctgagggtccctgtttccccttttccttccttttcacccaacaaaaccctgctttact

SEQ ID NO: 871586 - DNA, 120 bp, Artificial Sequence
  ENSG00000228065_20 (sequence is synthesized)
cacccttcaaaccatctatgagcctaaattgtcgtggtcgtggaatggacaaggacccagtctttagctgaactaagggaaagtcctgctttttggcgcgcaacaggggagctcaagaaa

SEQ ID NO: 871587 - DNA, 120 bp, Artificial Sequence
  ENSG00000228065_21 (sequence is synthesized)
caggcctcactcacggcatatggaactaaccacgcccctaactaagaaggcacaccttagttgcagttagcacacaattaaagcaactctccaagttttaccttaaagttcaaaattgct

SEQ ID NO: 871588 - DNA, 120 bp, Artificial Sequence
  ENSG00000228065_22 (sequence is synthesized)
aggagttgaaactactagaaatatatttacatgcaagagtcaaagaaactttgaactatttatggcctttaataattaagtaaggtatactcctgtgatcaagacttggagcatatttgt

SEQ ID NO: 871589 - DNA, 120 bp, Artificial Sequence
  ENSG00000228065_23 (sequence is synthesized)
ttctctctgcctggttcctctagaaattggaaactatcagaacagagaccaactccgtttcccgatccctttgcaatctgcattgaaccatgagtcaagttcttgataaaggagtgaaaa

SEQ ID NO: 871590 - DNA, 120 bp, Artificial Sequence
  ENSG00000228065_24 (sequence is synthesized)
tggtaagtctaaagcaatgaaaagctgctgtattgactacacatgccttcatttcttctaccctgcttctttcatgcctgcttatctgaatgacaccaggatgacatttaaggcacatct

SEQ ID NO: 871591 - DNA, 120 bp, Artificial Sequence
  ENSG00000228065_25 (sequence is synthesized)
gaagatggggaaaccacagcacagaataaggctgggcccttgaatcaataaatgaaggagaactactcaagagaacaaaaccaccagcaatatccacctgtatttgtcttttcataatgt

SEQ ID NO: 871592 - DNA, 120 bp, Artificial Sequence
  ENSG00000228065_26 (sequence is synthesized)
aatcaactagaggaatgaacatcacctaaagacaaaacaggatctttgtatacatcttctgggaaggagttgttatcatttccacaaggccaattgcatcattcggataaaaacattata

SEQ ID NO: 871593 - DNA, 120 bp, Artificial Sequence
  ENSG00000228065_27 (sequence is synthesized)
ttgttgtctttatttggaagtaaaatatattttaaagagatgtgaatgattataaagtttataataggtatactgtgatgactttgtcaaacgttaacttgactaggctgaatgatattt

SEQ ID NO: 871594 - DNA, 120 bp, Artificial Sequence
  ENSG00000228065_28 (sequence is synthesized)
cctagaattccctttcctttgttttctattaaagagggaatgttttctggtagaccatgtaatagagatagaagttcttcttttttacgcattcattcattattatagtttaatgaatca

SEQ ID NO: 871595 - DNA, 120 bp, Artificial Sequence
  ENSG00000228065_29 (sequence is synthesized)
taaatgaaaaaaaaaccctcttccagaagcatttactaacactttcaggtatatgagaatggaataattttcagaaactgggctttctgtattttccctgttggctatttcagaccagtt

SEQ ID NO: 871596 - DNA, 120 bp, Artificial Sequence
  ENSG00000228065_30 (sequence is synthesized)
cccgacccttctccatccttctccatgccctgggaaaccgacttttatagactgcaaaagtatgctctcttacactttggtttcttattgaggtcaaataataaaaatcactgccaaaaa

SEQ ID NO: 871597 - DNA, 120 bp, Artificial Sequence
  ENSG00000228065_31 (sequence is synthesized)
agagctatatgttcctttctcaagaggcactacaagtgacatgccactgggcaggtaagatcctctcaaatgaagggactgtgaatatttgactaataatacaaatatttactggatatt

SEQ ID NO: 871598 - DNA, 120 bp, Artificial Sequence
  ENSG00000228065_32 (sequence is synthesized)
ttacagtgatatttacaaatatcactggctaacttttcccagcttgatatcctgaaagaggcacagtttcagtagtaaatggtaaatttaccttgattgcactgaaggctatttctttaa

SEQ ID NO: 871599 - DNA, 120 bp, Artificial Sequence
  ENSG00000228065_33 (sequence is synthesized)
aactattttctttccttttgactattccatgtatcctttcagaagtaaacattgtttttacccctttaaaaagtctacttataccatctacttaatttggaatttatctaacattgccag

SEQ ID NO: 871600 - DNA, 120 bp, Artificial Sequence
  ENSG00000228065_34 (sequence is synthesized)
tttgatatagatacagaaatttaatgagaaaatgcagttctatatttagaatatggattcttcaagatgtttctgacacacatttgttttcattgaaacattaaacaattatttagctaa

SEQ ID NO: 871601 - DNA, 120 bp, Artificial Sequence
  ENSG00000228065_35 (sequence is synthesized)
ggtgaagagctatatgttcctttctcaagaggcactacaagtgacatgccactgggcagggggcaggtctttcctgtgctgttcttgtgaaagtgagtaagtctcatgagatctgaaggc

SEQ ID NO: 871602 - DNA, 85 bp, Artificial Sequence
  ENSG00000228065_36 (sequence is synthesized)
tcttgtcttctgccataattgtgagtcttccccagccatgtggaactgtcttggttggagtccaggtatctgcaaattaaataag

SEQ ID NO: 871603 - DNA, 120 bp, Artificial Sequence
  ENSG00000228065_37 (sequence is synthesized)
ctgtcttggttggagtccaggtatctgcaaattaaataagcacttgaagtgatagtatctgagtgtccgtaggcaaatgttaggagaactgaatcagatgttctttgaaagattttcatg

SEQ ID NO: 871604 - DNA, 120 bp, Artificial Sequence
  ENSG00000228065_38 (sequence is synthesized)
gttctaaaatgttctgatttaaaatccacaaagaaaaaaagcattgaaaatgaatcagcaaactagatgtaattaaagcttcttgcaattccattaataaactttttagaatgaattaca

SEQ ID NO: 871605 - DNA, 120 bp, Artificial Sequence
  ENSG00000228065_39 (sequence is synthesized)
cagcactgttcacattatgtaagtgataaaattgacctaaatatccatcaatggacaaatagatcaagaaaacatgataaacatacacagtggaatactatacagctacaaaaagaatga

SEQ ID NO: 871606 - DNA, 120 bp, Artificial Sequence
  ENSG00000228065_40 (sequence is synthesized)
atgtctttatcagcagtgtgaaaacagagtaatacagaagtaatttctatgacattatataagaactaaagttttatttttccaaaaatgttgaatgttgatgctgtattctggtgatgt

SEQ ID NO: 871607 - DNA, 120 bp, Artificial Sequence
  ENSG00000228065_41 (sequence is synthesized)
gaatgttgatgctgtattctggtgatgtttgttttaccagaaaaatacatcatattcaggatatgaactaaacaaaaattagttgctactgctcaactgacttaaatatgagatgttgtc

SEQ ID NO: 871608 - DNA, 120 bp, Artificial Sequence
  ENSG00000228065_42 (sequence is synthesized)
taattatctctgattgcttcctttggtttctagtgattaattatgcctaattattccttgatttttggaaaatcacatttaagtttcctctgcaaagaaaagaataggtaaatcaagtcc

SEQ ID NO: 871609 - DNA, 120 bp, Artificial Sequence
  ENSG00000228065_43 (sequence is synthesized)
tctagaaaaaaagcataaaaatatagttttgaaattctaaaactcataaagggaaataaaaatcccattcgtttttattttaatattttgctagaaagtacaatggaaggaaagaagtct

SEQ ID NO: 871610 - DNA, 120 bp, Artificial Sequence
  ENSG00000228065_44 (sequence is synthesized)
tttttctaagacagcagtattttagtcaattgtgtatcaacagacttctgtataactgggagccacatcttggaaatgctctttccaatggcagtgacatctgaggagagtccactctga

SEQ ID NO: 871611 - DNA, 120 bp, Artificial Sequence
  ENSG00000228065_45 (sequence is synthesized)
tatggacactatactaggaggagacaagagtacagtaggaaaaaattagtctgtgcggtgaaggagtcctacattgtccctcagtagatttctataaaatttcacttaattagtagcaag

SEQ ID NO: 871612 - DNA, 120 bp, Artificial Sequence
  ENSG00000228065_46 (sequence is synthesized)
taacagagttggaatgaggacctagatctttcattttaatctaatactctttcttccactattttagttagagtcatatgggcaagcccacaattagtacatgaggacatttttaatggg

SEQ ID NO: 871613 - DNA, 120 bp, Artificial Sequence
  ENSG00000228065_47 (sequence is synthesized)
taagattacagagaaccattaattctagccattaaattaatcaattcagcaaagctctgattcccccttcccttaattgttaaataagtagttctccattcagttgttaaaggattattt

SEQ ID NO: 871614 - DNA, 120 bp, Artificial Sequence
  ENSG00000228065_48 (sequence is synthesized)
cttgataacaaggaaataataaacttcttaagacaccctggtatgaatagctgaaattgattgatagtaatctcagtaaatcgtttcattctaatttttggtatatctatactgctttga

SEQ ID NO: 871615 - DNA, 120 bp, Artificial Sequence
  ENSG00000228065_49 (sequence is synthesized)
ataactcttctacctacagcccattaataaatatttgcctagtcaaattttagtttgtgctatactcctagaaggacatggggtgtatggaagcgaaactaactggatatttaaggcatt

SEQ ID NO: 871616 - DNA, 120 bp, Artificial Sequence
  ENSG00000228065_50 (sequence is synthesized)
tctactctttatttctatgagaccacagttacagttagataggaagaataaattctggtgttctattacatagcagagtgactacagctaaaaatagtgtattatatatttcaatatagc

SEQ ID NO: 871617 - DNA, 120 bp, Artificial Sequence
  ENSG00000228065_51 (sequence is synthesized)
tagagaagaagatcttgaatgttatcaccacaaagaaatgataatgctgtggtaatgggtatgttaattatcctgatatgatcattaaacaatgcatatatctattgaaacatcacagta

SEQ ID NO: 871618 - DNA, 120 bp, Artificial Sequence
  ENSG00000228065_52 (sequence is synthesized)
ggcagtggctgctatggaaacaagtcctgatgcatgacagaggaggaaagctatcagtcctgtggttaaagaggggacatttccactagatttccaattgcatatggaatcaagaaagaa

SEQ ID NO: 871619 - DNA, 120 bp, Artificial Sequence
  ENSG00000228065_53 (sequence is synthesized)
gcaactgggaattacttcacacagcaaatctaaggaagagactgttaatttggctttgccagttactccttctcaaggcccataattaaatgtgagtttctgggcactaatgcaaaagcc

SEQ ID NO: 871620 - DNA, 120 bp, Artificial Sequence
  ENSG00000228065_54 (sequence is synthesized)
agatttgctctgagcctgcggggcttataaattggttgcttttgcaaactgttattgttcctttaggtcaagaggggaagaattattgactttgttcagttgaattaaatgctccccttg

SEQ ID NO: 871621 - DNA, 120 bp, Artificial Sequence
  ENSG00000228065_55 (sequence is synthesized)
tggtttgaaagaagaaatttgcctccctcaccctctaagattacatacaaagggagaattgtttttgggcaagttagacttgatgaaaaaatatacagttctactggattatagcactgt

SEQ ID NO: 871622 - DNA, 120 bp, Artificial Sequence
  ENSG00000228065_56 (sequence is synthesized)
gtgttgccttagagtcacatgactccagttttgccttctatatgaagcccaaggctttcatctttttctgatacagtgggctcttcagctttaagcactgacttttgtgtgctagtatac

SEQ ID NO: 871623 - DNA, 120 bp, Artificial Sequence
  ENSG00000228065_57 (sequence is synthesized)
aatgcctgtacactcccacaaaaagctcaagatgtccttacacgtatttgctgtaggtgtccttcagccgatttcagtgcctagaatctagatgctttgcacctagtttcacctttgctc

SEQ ID NO: 871624 - DNA, 120 bp, Artificial Sequence
  ENSG00000228065_58 (sequence is synthesized)
acagatgctagtgccttttagaatcccaagaggccaaagtaaaactgaaaagcctaggaggacctggtgtggcaaaatctcatcatgatccatgcaacagtggaggcaatgttacgctct

SEQ ID NO: 871625 - DNA, 120 bp, Artificial Sequence
  ENSG00000228065_59 (sequence is synthesized)
gcctcaggttatacttctatgcaaattaaaaataaaattcataggaagcaattatattagagttggtatttaatccagcattcttctgaattatcttacatataaacttagttcatctta

SEQ ID NO: 871626 - DNA, 120 bp, Artificial Sequence
  ENSG00000228065_60 (sequence is synthesized)
actcaaaacctctcactgttgatcctaagcattttcatcctcagactactgagggtgggggaaacacgaccccaaactccgttgctccgttgggggtcgtcgggggaaaggccttttcct

SEQ ID NO: 871627 - DNA, 120 bp, Artificial Sequence
  ENSG00000228065_61 (sequence is synthesized)
tcctttttcaggacagacaggaaagccggggctcctcactccccctcccctctgtgcccgggacgggatgcatggcccaagggtcccacacagctggctagatggttctcagacacaagc

SEQ ID NO: 871628 - DNA, 120 bp, Artificial Sequence
  ENSG00000228065_62 (sequence is synthesized)
caccgcagccttccttttcccctgccagggggttaaactttatcagagagtaattaagctttaaccctgctgttgaaatcacttgcagacgaataagaagttcttccccaggcattttta

SEQ ID NO: 871629 - DNA, 120 bp, Artificial Sequence
  ENSG00000228065_63 (sequence is synthesized)
tgctccccagctatcactgtatgctctgcaaagttttgcttgtgaaataaatcctctattttgttttacatcctgaggccatggcttataactctggcggcaaggatttgtttagcaatc

SEQ ID NO: 871630 - DNA, 120 bp, Artificial Sequence
  ENSG00000228065_64 (sequence is synthesized)
ttgtttgcatcagtgcagtaagagtccattttcaatggcggaattcttttctcactcttttcgttgtttaataattattatagcaataataataataataaataccaattattacattaa

SEQ ID NO: 871631 - DNA, 120 bp, Artificial Sequence
  ENSG00000228065_65 (sequence is synthesized)
ggcactacaagtgacatgccactgggcagcctctcaactcaggagatacagtgtggaagatcttattgaaaccacctttgcaaaaattataactgagaaaactatgacaatgaaagagat

SEQ ID NO: 871632 - DNA, 120 bp, Artificial Sequence
  ENSG00000228065_66 (sequence is synthesized)
ctacctgattccatcttgcttctaacctctacgctctcctaatttatacctgggtttaggcagaactattttttggaggaacttagtttatagtttaactttggaacaaagatgatcaca

SEQ ID NO: 871633 - DNA, 120 bp, Artificial Sequence
  ENSG00000228065_67 (sequence is synthesized)
gcctcatcccaaaacaaactcccttcctgcctggaggctagattgcctttgtgggactaacaaattagctacaagattagagattatgatttaggagtcatgcatctggaggctacaaga

SEQ ID NO: 871634 - DNA, 120 bp, Artificial Sequence
  ENSG00000228065_68 (sequence is synthesized)
cactgtacttgatggcttatttggtcttgtggcccccacccaggaattgactcagtgcaagaggacagctgggactcccaatgatttcatctctcaccgcaccagtcagcactccccact

SEQ ID NO: 871635 - DNA, 120 bp, Artificial Sequence
  ENSG00000228065_69 (sequence is synthesized)
gtccaacccctgccaccaaattatccttgaaaacctcgatccccaggttttcagggagactgatttacgtaataataaagctctggtctcctgcacagctggctctgtatgaattaaact

SEQ ID NO: 871636 - DNA, 120 bp, Artificial Sequence
  ENSG00000228065_70 (sequence is synthesized)
cttgataaatcggctctgtctaggcagagggcaaggaagaccccttgggcagttacattatctcttttcttcttagaacataagtctttctccattgtattgaaaggtcattaagagtct

SEQ ID NO: 871637 - DNA, 120 bp, Artificial Sequence
  ENSG00000228065_71 (sequence is synthesized)
tgaaaggtcattaagagtctgttcaaataactcatatgtgaaatatgacaagaattccatactaatataatgttatccagtaatatttacagcaaagttactatttatgcagtgttttgc

SEQ ID NO: 871638 - DNA, 80 bp, Artificial Sequence
  ENSG00000228065_72 (sequence is synthesized)
aacatcaactgggtgaagagctatatgttcctttctcaagaggcactacaagtgacatgccactgggaccgcaatctcgg

SEQ ID NO: 871639 - DNA, 90 bp, Artificial Sequence
  ENSG00000228065_73 (sequence is synthesized)
acatatttttaaaacctgcagaatgtttgtattacttttgtcatagtacataacatttaaatggatttcttgtttgtgtatgtgtgtata

SEQ ID NO: 871640 - DNA, 120 bp, Artificial Sequence
  ENSG00000228065_74 (sequence is synthesized)
taacatttaaatggatttcttgtttgtgtatgtgtgtatattcattcacaacactgatagtttttctgaatatttcctttggattttattcttttctcattcaactaaataagaacctgc

SEQ ID NO: 871641 - DNA, 120 bp, Artificial Sequence
  ENSG00000228065_75 (sequence is synthesized)
accatctttttctagtgtaaaaattacaatatctgaagtgaaactactagaataaatcttgtgacaattcttaaggattatcttttagttggtatggtttccaaaaaagattgtactaag

SEQ ID NO: 871642 - DNA, 120 bp, Artificial Sequence
  ENSG00000228065_76 (sequence is synthesized)
ttttactcccagtggaaatatttaaaggcaatacttccatttcttttttacagaatagaatccaattattctttttcatcccattgttgtatacagactttatttcatttacttgtagat

SEQ ID NO: 871643 - DNA, 120 bp, Artificial Sequence
  ENSG00000228065_77 (sequence is synthesized)
caaaggttttttggtttcctatcttttggacactgttttgggtactagagagagcatgagtagctaagtttctgaaatttacagtgaatggaaaaagataggcataaatgaaacaatcac

SEQ ID NO: 871644 - DNA, 120 bp, Artificial Sequence
  ENSG00000228065_78 (sequence is synthesized)
gctacagttacagttgtaaaactgtggtcagtgctatggaggagtgtacaaggtgatatgagagatcataatagggaagttaaatctctggttcatgtaaaactgccatggacacactct

SEQ ID NO: 871645 - DNA, 120 bp, Artificial Sequence
  ENSG00000228065_79 (sequence is synthesized)
cagtgaacttagagctaaaagaggagtaatagccattagacacaaaaaagcagatagaaaatgttctgggaagaataatgtctataaaggatctggggtaggagagagcattgttctttg

SEQ ID NO: 871646 - DNA, 120 bp, Artificial Sequence
  ENSG00000228065_80 (sequence is synthesized)
gtgatatgagattggagggataggtgaatataaaacataagcataaaaactagatagtatttaaatcctttccttggatcttaatgagaagcactaaagagatttaaatagagaatgaca

SEQ ID NO: 871647 - DNA, 120 bp, Artificial Sequence
  ENSG00000228065_81 (sequence is synthesized)
acatgtaatttggcttttaaacaaagttatgttttttaatgcagaaaataaattggaatgaagcccatgtgaatgcatggagacaaggtgaaaaggtagatgagaaaaaagttggaaata

SEQ ID NO: 871648 - DNA, 120 bp, Artificial Sequence
  ENSG00000228065_82 (sequence is synthesized)
tttgcaggtacatttgacaggaccaggagatgtcttgggcattcatgatgatggaagagtggtcaataatgactctattttctagcttgtatcatgagatgaatggagacccgtagaaga

SEQ ID NO: 871649 - DNA, 120 bp, Artificial Sequence
  ENSG00000228065_83 (sequence is synthesized)
ataagttttgtgagtgactgggtcatgtaatatattttggatttgttaaatgtgaactacttttaagaaactgtggggaaaaacttcgttttgtttacatccatgaatcatttgaagcac

SEQ ID NO: 871650 - DNA, 120 bp, Artificial Sequence
  ENSG00000228065_84 (sequence is synthesized)
gaaaaataattctcagctgaagatacaaatatgagggccctgggtgtataactgaaggcacgagtataaatgggattatttagggagggcttaaaagtggatagagagtaaattcacaga

SEQ ID NO: 871651 - DNA, 120 bp, Artificial Sequence
  ENSG00000228065_85 (sequence is synthesized)
ctataggtacaaaataatcaccaatgacaatatattatgcagcttaagaccaattgtatgtattttcctgacaatgtcttttagagcctgtgactagttttctcctgaagatgtggtgat

SEQ ID NO: 871652 - DNA, 120 bp, Artificial Sequence
  ENSG00000228065_86 (sequence is synthesized)
tctcctgaagatgtggtgatcttcttatcaatttttaagagtacttaaatgttttaacaattatatttaactcaaaattagtttccaacttgttttcctttaattataatttaaagtgta

SEQ ID NO: 871653 - DNA, 120 bp, Artificial Sequence
  ENSG00000228065_87 (sequence is synthesized)
taaaaatttatgaagtcatatctattgcctttgtctcttattactttaccaatgcttacaaaaactttcctcattaatgcttatataaatcttcttttttattgcaaatttttccattct

SEQ ID NO: 871654 - DNA, 120 bp, Artificial Sequence
  ENSG00000228065_88 (sequence is synthesized)
tctggtttgtaaaatgcctaaagtaaaatgtgtatctgaattaattaatcgttaaatatcttttcaattttctcaacccaatatattggacaattcacctcttactcccagagttttatc

SEQ ID NO: 871655 - DNA, 74 bp, Artificial Sequence
  ENSG00000228065_89 (sequence is synthesized)
ctggcttgaaaaatcccaaaacgattttctgcaggagagcccttttgactaatatgagagtctcgctctgtcat

SEQ ID NO: 871656 - DNA, 75 bp, Artificial Sequence
  ENSG00000228065_90 (sequence is synthesized)
actggccaacattatgtattttaaaagatgtcttcaaatagaaacacacataaaataaggccatttatgaatcag

SEQ ID NO: 871657 - DNA, 120 bp, Artificial Sequence
  ENSG00000228065_91 (sequence is synthesized)
aaatagaaacacacataaaataaggccatttatgaatcagttgaaaataaatataaaatctggttatatgaaaatataaccagagctctcagggccctaaccctgtgtttcccttaggaa

SEQ ID NO: 871658 - DNA, 120 bp, Artificial Sequence
  ENSG00000228065_92 (sequence is synthesized)
actggagtgaaaatacagaagttggtgccctttgcagcagccaggagtccgactcctcctcttcctgtgtggaacctggaattcaaacggctggagtcaaagaaactttgaactatttat

SEQ ID NO: 871659 - DNA, 88 bp, Artificial Sequence
  ENSG00000228065_93 (sequence is synthesized)
tctgccatgattgtaagtttcctgaagctgtctcttttctttataaatttctcagtctcagatatttctttacagcagtgtgaaaaca

SEQ ID NO: 871660 - DNA, 120 bp, Artificial Sequence
  ENSG00000228065_94 (sequence is synthesized)
cacagggaattgaagtgatgcaggaaatactggaaatctgcctgcctgctgctacttctctctgtagcattggaaaaacaagttaacttctttgcttccatttcatcctccacttacgtg

SEQ ID NO: 871661 - DNA, 120 bp, Artificial Sequence
  ENSG00000228065_95 (sequence is synthesized)
acaggaagaagattacctgctatttctaaagaactttgaagctaaaagctagtgtgtaaccagaaaaagtgctttaattagatttcaaatgattcaagcatagtccagtgtaaaacaact

SEQ ID NO: 871662 - DNA, 120 bp, Artificial Sequence
  ENSG00000228065_96 (sequence is synthesized)
agagcccttttgactaatatgagatggcagagcctccatcaagccaggtggactgagtagcgcaaactctctctttacccgtgttggacaggtaagatgtgcctgcttccccttctgcca

SEQ ID NO: 871663 - DNA, 120 bp, Artificial Sequence
  ENSG00000228065_97 (sequence is synthesized)
acataggtccccagagaatttcaatatgtctgatgtcaagaacggaaagtgagacagccaggtgggagggggtccctggagaatctccaaccagcctgcgcactgggaatgcgcactgga

SEQ ID NO: 871664 - DNA, 120 bp, Artificial Sequence
  ENSG00000228065_98 (sequence is synthesized)
taagtgagtaaaaaagtattaatacatcattgggattcaagatttcagttgttaatgatagcacagcatagctcatcctagatgagattttaatgttggaaaaaggttactggatctgga

SEQ ID NO: 871665 - DNA, 120 bp, Artificial Sequence
  ENSG00000228065_99 (sequence is synthesized)
gagtattggatcagaaagcattgagtgaatagttttcataggttttaaagaatatatttgtttagattgttcaatatatgcatttctataaatgtgtattagggatgtcaatgtggttaa

SEQ ID NO: 871666 - DNA, 120 bp, Artificial Sequence
  ENSG00000228065_100 (sequence is synthesized)
agtagaaaaatacttttaaaatcctgctgtggaacaaagaagggagataacttggaaaattggtggggaacagggaaattcaaaaggaatggcagaagcatgggcatacagggaatgtaa

SEQ ID NO: 871667 - DNA, 120 bp, Artificial Sequence
  ENSG00000228065_101 (sequence is synthesized)
tatggtcatttttatagttgaggggaaagcagtatcatatagcaggtgttctatgtctctttgctgaatacatgaaaataagtaaaatcaataaaaggaaatggatttatatcaagtact

SEQ ID NO: 871668 - DNA, 120 bp, Artificial Sequence
  ENSG00000228065_102 (sequence is synthesized)
tggttcctctagaaattggaaactatcattgtcagcataacctcattcttcttggacacgggacaagaattcaggatgcaccaaatgcaggtataagaaagaatgtaacactgtggccct

SEQ ID NO: 871669 - DNA, 120 bp, Artificial Sequence
  ENSG00000228065_103 (sequence is synthesized)
tggggctgggtcagccccagagccatgggcctgagcgaggcagaagaactgaacaatctgtaacacagctgggcaagggtacacctggcctagctgcaggctgagcacgggatctggctg

SEQ ID NO: 871670 - DNA, 120 bp, Artificial Sequence
  ENSG00000228065_104 (sequence is synthesized)
gggtgcatgccaagtgcagcccacatggctgaatggtccaggtacctccacccaggagcccaggaccaagcagagcccaggtgggggtgttgccagctgcagaggtctctggctggcaaa

SEQ ID NO: 871671 - DNA, 120 bp, Artificial Sequence
  ENSG00000228065_105 (sequence is synthesized)
gcagcactaaaaaaaatcatatgtcaaaataatttaatgcttaaactgttactatgatattcttagtttttgtataaagaagaatggaatatagaaggttagaggttcacctccacagaa

SEQ ID NO: 871672 - DNA, 120 bp, Artificial Sequence
  ENSG00000228065_106 (sequence is synthesized)
atagtaagctgaagaagcagaatttaagctcagattttctaacttgaaatgttgtaatacactgtaactatctcaacagtagcaaacaaagccacaaatttatgaaaattctgctgctat

SEQ ID NO: 871673 - DNA, 120 bp, Artificial Sequence
  ENSG00000228065_107 (sequence is synthesized)
ttcaataagtttaaaaataaatgttttgacaatttaaaaatgaattaagttaaagctattgttaaataaaacgtaaatggaagacacaacttcacatttaaagagtgaaacaacaatatt

SEQ ID NO: 871674 - DNA, 120 bp, Artificial Sequence
  ENSG00000228065_108 (sequence is synthesized)
tgtaaactgaaacaaggtaaaacctatataaaaaaatgcttacaaaatttccagaagagacttactggcattgtagagatagatataaatttctgaataaaattctttgcagttatttta

SEQ ID NO: 871675 - DNA, 120 bp, Artificial Sequence
  ENSG00000228065_109 (sequence is synthesized)
aactacttttctccctctgtaagtcttaaagaagttcaatgagctataagtgaactcaggtagacaactcaacaaaatcaagaagacaatacatgaacaaaatgatactttgaataaata

SEQ ID NO: 871676 - DNA, 120 bp, Artificial Sequence
  ENSG00000228065_110 (sequence is synthesized)
aatataaaccataaaaaacttgaattattcagttcagtcataatacatgactttaaacttcaaaacagtttgttatagtacagccaaaatcattaaaattggtcagctaagaagtatata

SEQ ID NO: 871677 - DNA, 120 bp, Artificial Sequence
  ENSG00000228065_111 (sequence is synthesized)
ttttttctagttctctaatggatagctgtacattatattcacaacttacaaaatctgtccagcaagataacagattagaagacacttaacattgcttcccccacaaaggtataagcagta

SEQ ID NO: 871678 - DNA, 120 bp, Artificial Sequence
  ENSG00000228065_112 (sequence is synthesized)
actattcaaagacaataaaactaccctgaagttactagaacttgagagagaagcagaggaactgatggagcctgcagaaatgagagaagctgtgactgataaatgacgattttagaatct

SEQ ID NO: 871679 - DNA, 120 bp, Artificial Sequence
  ENSG00000228065_113 (sequence is synthesized)
gccacccactaccccaagccacataacagctcacagaaaatttctatacatttaggatgtctgagttggaagaaattcgaagttgaaaataaacattcaatttccctatcagttgaggag

SEQ ID NO: 871680 - DNA, 120 bp, Artificial Sequence
  ENSG00000228065_114 (sequence is synthesized)
gcttcatgggaagtctacatgggtctcatcccatggaaaacactgagagttccaggagggctgaatgacctgagtgaactgaagataaaatcaggagagctgattgcagcaactgtcctg

SEQ ID NO: 871681 - DNA, 120 bp, Artificial Sequence
  ENSG00000228065_115 (sequence is synthesized)
gcaggatttttatttcatttgcaatgaatgaagaagcacagctctgaaagactgaattcccagcactgggtgtcagctctaccaaatgcggtacagattgcaatctgaccacagaatctc

SEQ ID NO: 871682 - DNA, 120 bp, Artificial Sequence
  ENSG00000228065_116 (sequence is synthesized)
accacaaagaatgccggggtctcctctgattatagctactggctataagttctaactagggtttaatgcaaattttccctgtagtctgcttggggagttggcctcattcttgaatttttc

SEQ ID NO: 871683 - DNA, 120 bp, Artificial Sequence
  ENSG00000228065_117 (sequence is synthesized)
tcagaaagttattgccaaaaatgtgagttctcaccgcagtgaaagaggaaatccagctatgagcatatataatacaggagaaagaatgcagagaaaacacattcttttcttgctactcag

SEQ ID NO: 871684 - DNA, 120 bp, Artificial Sequence
  ENSG00000228065_118 (sequence is synthesized)
ttgccagagaagtatatctataatattttcagttgtgatgctatgtcccattgaattcaaccacacattggaaaaatcagtttaccctagaatctagttattgttgtggtacagtttaat

SEQ ID NO: 871685 - DNA, 120 bp, Artificial Sequence
  ENSG00000228065_119 (sequence is synthesized)
gttattgttgtggtacagtttaatttttgtcaaataattctttctaaaatttctaatgtaagtctttaattttcaagatattttgcttagaagatgatatggtttggctgtgtccccacc

SEQ ID NO: 871686 - DNA, 120 bp, Artificial Sequence
  ENSG00000228065_120 (sequence is synthesized)
gaggagttgtaccatattggtagttattaacatgtactgtacttatgaatcagtctgaaaatcttgctaaactgcatattctgagcttttcttaatttttttttgttttctcggaaacgc

SEQ ID NO: 871687 - DNA, 120 bp, Artificial Sequence
  ENSG00000228065_121 (sequence is synthesized)
attattcctatgaagcttttacacatgctgagactaaatggtctgttctatgtcattgattctatttgcctagttgtctatttaccttgtagttttgaggtaataaatggtcctttaaac

SEQ ID NO: 871688 - DNA, 120 bp, Artificial Sequence
  ENSG00000228065_122 (sequence is synthesized)
atgaggtaagtttctacaaaataataatgtgtaaaatcatcaccttctactctaaaatttctgggtttattttttgtcagtttgtttatttcaaggaagataaagatatttacaatgagc

SEQ ID NO: 871689 - DNA, 120 bp, Artificial Sequence
  ENSG00000228065_123 (sequence is synthesized)
gatttctacttttgcatcttccacactttctcttgctgccaccatgtaagaagcgcctttcacctcctaccatgattctgaggccttcctagccatgtggaactaggccaatgctggtga

SEQ ID NO: 871690 - DNA, 120 bp, Artificial Sequence
  ENSG00000228065_124 (sequence is synthesized)
agaaactgaacattttataactggttagacatggtatggaacagaggaaatccacactgaaaaagctgctcagagggagaagagaagactcaaaaggcaaaattccaaaggaaaatgcta

SEQ ID NO: 871691 - DNA, 120 bp, Artificial Sequence
  ENSG00000228065_125 (sequence is synthesized)
atcggtaagcaagagactgaatagaggaaaagagatgaggaagaactcccaggaaagcattaagattgccctggtgcagtgaaatggagggggtctgatagacgtgctggagtggaacat

SEQ ID NO: 871692 - DNA, 120 bp, Artificial Sequence
  ENSG00000228065_126 (sequence is synthesized)
ggagaagtagagagcatctgtgaaccacccagccaccgcctgagtgaatagcatctgtgccgagcaccaggaataggcacgagagccaagccattgctctaggacaaactgagctcactg

SEQ ID NO: 871693 - DNA, 120 bp, Artificial Sequence
  ENSG00000228065_127 (sequence is synthesized)
ggaaccctagcaggaatctctgcggaagaggtttactatcatctgccattctcattactgttcaaagaagcctctgacagaagcagaaccccaaccaactgatggacagtggcacaaagg

SEQ ID NO: 871694 - DNA, 120 bp, Artificial Sequence
  ENSG00000228065_128 (sequence is synthesized)
ggcactaaagttatattaggaatgtttgcatcttattattcaggctccatctcgagcagatggctcagcgtcttcaaaggggatttagagcattgcagagcaggatggcagtgcagcagc

SEQ ID NO: 871695 - DNA, 120 bp, Artificial Sequence
  ENSG00000228065_129 (sequence is synthesized)
ccaggtaaaggaagatctgtgagaagtccaagtcacacaagatctgtgaagaacaaaagtctactcaagtgttattcataattatttaatgtgcttggctaaagtaatggttctatcatt

SEQ ID NO: 871696 - DNA, 120 bp, Artificial Sequence
  ENSG00000228065_130 (sequence is synthesized)
gggattgtcctagagagtcatgcataacatacacaacttaaagatgaattataactccatctctactgaaaagaaaatacgaaaattagctggatgtgggggcgggcttctgtaatccca

SEQ ID NO: 871697 - DNA, 120 bp, Artificial Sequence
  ENSG00000228065_131 (sequence is synthesized)
gcagtgagccaagaccgtgccattgcactgcagcccgggcaagaagagcggaactcagtctcaaaaaaaaaaaaaagaattagatgacaatattttttttttttttagacaaatccttgc

SEQ ID NO: 871698 - DNA, 120 bp, Artificial Sequence
  ENSG00000228065_132 (sequence is synthesized)
ttacaggcgtgagccaccacacctggctagataacaatctttaacctactgcatgggtgacagatgcctttgccggagtctagtacactcaataatggttcagaggcagtggtagtagta

SEQ ID NO: 871699 - DNA, 120 bp, Artificial Sequence
  ENSG00000228065_133 (sequence is synthesized)
gtggtagtagtaatgggagcagactggggaaaatccagacatcgtttttctcatcaccacttcccattaataaaaaaaattaaaaaagaaaaccctggcatctggccaggccccttattc

SEQ ID NO: 871700 - DNA, 120 bp, Artificial Sequence
  ENSG00000228065_134 (sequence is synthesized)
tgaagaattatgctcagttataggcctttaacagaagtagattggctgctaaaatttgaaaaagtctcaagcccaatttaagacatttggagtttatcttagaggaatgtcctttaaaaa

SEQ ID NO: 871701 - DNA, 120 bp, Artificial Sequence
  ENSG00000228065_135 (sequence is synthesized)
tattacaatcctgaacatttactatattctactactacggaagcctgtcacctctgtgggttctgttttagcacttattggttatgatcactatacactggatatgtttctgttttttca

SEQ ID NO: 871702 - DNA, 120 bp, Artificial Sequence
  ENSG00000228065_136 (sequence is synthesized)
tctatatgtgaaagattaaaaatagtacaactcctattgtgattgctactgctaaatggttttgttcacataaagtacttcgcagagtgacagacctataaaaatgctattgttattatt

SEQ ID NO: 871703 - DNA, 120 bp, Artificial Sequence
  ENSG00000228065_137 (sequence is synthesized)
attactagctattaaaaacattctatgcttctacaaaagatgtctttttaacagtcagttaattttattcctggtgtcagagtcctaactaaagttagccagtcatttatgaatgttgtg

SEQ ID NO: 871704 - DNA, 120 bp, Artificial Sequence
  ENSG00000228065_138 (sequence is synthesized)
ttgtccctgtggatattttaaaaattaatatgctaattctaatttgtgtatttttaagattctatgtgtttttccaatatggttagagttttataatgcaaagttgcaattgtactctat

SEQ ID NO: 871705 - DNA, 120 bp, Artificial Sequence
  ENSG00000228065_139 (sequence is synthesized)
atatctgaagcaaactggtggattctgaatgattaaaaataataataaccaaagagaaaagaagtagtggatgaggttggcagagatgaggaactgccatttctccaaagctctgaacca

SEQ ID NO: 871706 - DNA, 120 bp, Artificial Sequence
  ENSG00000228065_140 (sequence is synthesized)
aaagcaaagactcatttgaatgttttaccaagcttgagtactttacaaaacttgaaagtgtgcaagagcaaagaggtatcatttagcacactataaatagcatcttctttaaaaatgttg

SEQ ID NO: 871707 - DNA, 120 bp, Artificial Sequence
  ENSG00000228065_141 (sequence is synthesized)
tacacatttctcatatttgaaagtaaataacctgagatttaaaacatctgtcaaacaatctgtgaatgttatgtgccattttaatacattttgacattatttcatgttgaaacatacttt

SEQ ID NO: 871708 - DNA, 120 bp, Artificial Sequence
  ENSG00000228065_142 (sequence is synthesized)
ctctgattgtattgactggattatatagaacctctttgactgacttagtctataacttgcccagataaaatgtacattgcaagtaaataaaatatgggtgatatgggaatgaaatttcaa

SEQ ID NO: 871709 - DNA, 120 bp, Artificial Sequence
  ENSG00000228067_0 (sequence is synthesized)
ggggtctgtatctcaaagcctttaaaatgctgatggaaggagtggagatccagcgttcagggtagaaaagaggaaaatccatggaaccataatctatggatggctttaggaatgggattg

SEQ ID NO: 871710 - DNA, 120 bp, Artificial Sequence
  ENSG00000228067_1 (sequence is synthesized)
cagaactttatacctaaaagggtgaattttactgcatgtaaattatacctaaacacatgactttttaaaaaggcctgaaatcttaactactcagctaaaaataaaataaaataaaataaa

SEQ ID NO: 871711 - DNA, 120 bp, Artificial Sequence
  ENSG00000228060_0 (sequence is synthesized)
ggcaggttcccaagagctgtgaccaaacagcacacccacctgtgggactgctggcacaaagtagccacccgctgcaggctggaactgatttaagatggcattggcaggaagtgctctcat

SEQ ID NO: 871712 - DNA, 120 bp, Artificial Sequence
  ENSG00000228060_1 (sequence is synthesized)
tccagccactcgttgcatatactggttggtcagttaatggcccagagagcctcctgaagtggaggatagggaagtaaagaagtgcatcactccataactctctaccaatgagatgggcca

SEQ ID NO: 871713 - DNA, 120 bp, Artificial Sequence
  ENSG00000228060_2 (sequence is synthesized)
atatctgtagatcaaccactgcacacacagacattataaagataacccatcctctggcatactgaatgacacaaaggacaaaaattattttggcttgtaatagccaagacttattgtctc

SEQ ID NO: 871714 - DNA, 120 bp, Artificial Sequence
  ENSG00000228060_3 (sequence is synthesized)
ttcttctccccatatggctttgatttgtccaggttcttgatgaagacgtttcccacaccagattttctcaaagagggatccctctgagaccacatgatgcggattggctttcccttaatc

SEQ ID NO: 871715 - DNA, 120 bp, Artificial Sequence
  ENSG00000228060_4 (sequence is synthesized)
acgtcagctcccacaggccaacagcctaagaacagattactccaggacttttcaagtgaggtattgcatcaaagttatcaagtcatttagtctgcaatccacctatggagacaagtgaca

SEQ ID NO: 871716 - DNA, 120 bp, Artificial Sequence
  ENSG00000228060_5 (sequence is synthesized)
tcagtcatcaaaatggacacaactgatcacacatggaaaagttctctgtactatcacaaggataaaaccaccataccttctgcctaagtagacagtgcgcagatggcaggccctgcaccc

SEQ ID NO: 871717 - DNA, 120 bp, Artificial Sequence
  ENSG00000228060_6 (sequence is synthesized)
accttttgaagccttaatggaagttctgtagaattctaggacttcagctaccctgggtgctcaaccaacttccccatccaacaccttggaatgcttccttagcttcccaaccaagtccgt

SEQ ID NO: 871718 - DNA, 77 bp, Artificial Sequence
  ENSG00000228060_7 (sequence is synthesized)
acaccttggaatgcttccttagcttcccaaccaagtccgtgtgtacaccagagacaatttaaagaaccaaaggctgg

SEQ ID NO: 871719 - DNA, 120 bp, Artificial Sequence
  ENSG00000228061_0 (sequence is synthesized)
gctgaagtgacttcacagagggaagtaagcagtaattcaactcagccttagatagaaagcttttctatgaataatgggaaataaagttaaaggaaatgatgcaaataaagcaagaaaaaa

SEQ ID NO: 871720 - DNA, 120 bp, Artificial Sequence
  ENSG00000228061_1 (sequence is synthesized)
atactgatgatcagaaaaaagaaaagtatttgaggtctgaaagatcctcaaaatagagaagagccaatgacttcatacaccgaatcggctaaatcctgtctcacattttcactgtagcca

SEQ ID NO: 871721 - DNA, 120 bp, Artificial Sequence
  ENSG00000228061_2 (sequence is synthesized)
gaagagccactctggtcaagtagaaaccctgaagtttgccgtcatttcatccagggtctgcaggtatgcaatgggaatgttccttttggcatttgcaaaattagtgctccaaaatgaaat

SEQ ID NO: 871722 - DNA, 120 bp, Artificial Sequence
  ENSG00000228061_3 (sequence is synthesized)
tattttctaagctttttagatctaagttaaatgaaacatacatatttttgaatttcctttagaggcctttagtattaaaaccacatataagaatttcttgagatactcagagcaaaagaa

SEQ ID NO: 871723 - DNA, 120 bp, Artificial Sequence
  ENSG00000228061_4 (sequence is synthesized)
agcatgatttttttcatcaaatgatttctaaagtacaatactgacaagttttgctatttaataaatgatgaaaaaatgagtttttcctttagaaatatatcaagtagtggcattttttct

SEQ ID NO: 871724 - DNA, 120 bp, Artificial Sequence
  ENSG00000228061_5 (sequence is synthesized)
tctgtttttcattaagatagcttatgtgctaaagggatattagttgctctaaaatcagtttaagcaaatacatcaaacatttacccaatcaaatatttgtaaattacagagtatattaca

SEQ ID NO: 871725 - DNA, 120 bp, Artificial Sequence
  ENSG00000228061_6 (sequence is synthesized)
aacacttagtagttctgtttctaaatgaaaaattataacaggcatcttcaattatatatttattttcattatatatttattttcaggtaacactagtatctataggtgtttgcatcctaa

SEQ ID NO: 871726 - DNA, 120 bp, Artificial Sequence
  ENSG00000228061_7 (sequence is synthesized)
ttcatccagggtctgcagacactataaatgacacattatgaaaagaagtgtttcagagagtatcatgtaaactggactaattccgctacagcagttctacaaagtcttgaagaaaatctt

SEQ ID NO: 871727 - DNA, 120 bp, Artificial Sequence
  ENSG00000228061_8 (sequence is synthesized)
cgaagtactgcaatataattttcttggagccaaaccataaaacacatatataaatgtttatgtctgcaaaacttaggaagaagggagaagagaccttttcccctttgcatatttagacaa

SEQ ID NO: 871728 - DNA, 120 bp, Artificial Sequence
  ENSG00000228061_9 (sequence is synthesized)
tgctgaggctgtatcctcctggtctaaaaattgagataactgcattacaggtaaccatggtatctttatgagagactgttagtaagattctaaatatttgactttgcttcgtgcaacttt

SEQ ID NO: 871729 - DNA, 120 bp, Artificial Sequence
  ENSG00000228061_10 (sequence is synthesized)
tcttaaatttcctgagtaacttagttatgaataaataaatagtgcaatgtaaaaatattagaccctaagttcaatttataaaatgaagatttttatataaaaattacggtcaaggtgtca

SEQ ID NO: 871730 - DNA, 120 bp, Artificial Sequence
  ENSG00000228061_11 (sequence is synthesized)
tattttaattatatttctcaaagaaagatgattcatttgatataactaattataagtttcatatcctacgtgttgatgaccacacagaaactttaagacatataatagccaaatatgaat

SEQ ID NO: 871731 - DNA, 120 bp, Artificial Sequence
  ENSG00000228061_12 (sequence is synthesized)
ctactcttccttgccaaatgaagcaatgatgttctgccagccaaactaacaggaagcatgtgaaatgaacacagaagcaaacaggacttacactgcctaagggaaagtcagcaagatggc

SEQ ID NO: 871732 - DNA, 120 bp, Artificial Sequence
  ENSG00000228061_13 (sequence is synthesized)
agtttcaatcatttggaataatactaaagcagccttaggcttttctcagaatggaaacatgtcactattactgcaatatttcaacaaatcagaatgcagagaaaagaacacttatgcaac

SEQ ID NO: 871733 - DNA, 120 bp, Artificial Sequence
  ENSG00000228061_14 (sequence is synthesized)
aactgtcagtgaacataaatgactcagggaaaaatgttttttcttccaaagtgcttaatagatttttcaaaagcttaccacttagaaacaatttccttatatattctccttaaggaatta

SEQ ID NO: 871734 - DNA, 120 bp, Artificial Sequence
  ENSG00000228061_15 (sequence is synthesized)
ttaatataaagacaaatttatataaagaggataaactcaactgggaagagtactcctgtcatggaccctcagatgaacaagcatttataaaggctactgacaatatttcttaatcaaaag

SEQ ID NO: 871735 - DNA, 120 bp, Artificial Sequence
  ENSG00000228061_16 (sequence is synthesized)
gctgaaagagaggttctcagaagaccacggagaacatagaggaacttggtaaggctgtgactgttgccaccattttctgcacagcaaatatcgtctccccataaagaaattcagcaaaat

SEQ ID NO: 871736 - DNA, 120 bp, Artificial Sequence
  ENSG00000228061_17 (sequence is synthesized)
ttctgggcaaaagaagaaggcgttaacaaaacctggcatgtgcaaataattgaaaattcattattagaattgatgggaaaaaatttattgaccatggaaaggaagaaaaatgaatacaac

SEQ ID NO: 871737 - DNA, 120 bp, Artificial Sequence
  ENSG00000228061_18 (sequence is synthesized)
actgaaatgttagaagatgaaagcctaaaggaacataagctagtaaatgaataagagagaattacagtcaggactatgtaactaagaagatgtatgattctggacaagacacacacatta

SEQ ID NO: 871738 - DNA, 89 bp, Artificial Sequence
  ENSG00000228061_19 (sequence is synthesized)
gagacagtgtctttctctgttacccagatgcagtgcagtggccttactatagcttatggtagtctcgaactcctgggctcaagtgatct

SEQ ID NO: 871739 - DNA, 120 bp, Artificial Sequence
  ENSG00000228061_20 (sequence is synthesized)
ctcctgggctcaagtgatcttcccacctctgcctccagagtagctgggactacgtgcatgtgccaccagatctagctaatttttcttttattgtttttgtagagacagggtcttgctatg

SEQ ID NO: 871740 - DNA, 120 bp, Artificial Sequence
  ENSG00000228061_21 (sequence is synthesized)
atcctcctgcctcagcctctcaaagtatttggattacaggtgttagatactgcatccagccagttttattcattttaaattaaaaggagaagccaggcgctgtggttcacacctgtaatc

SEQ ID NO: 871741 - DNA, 120 bp, Artificial Sequence
  ENSG00000228061_22 (sequence is synthesized)
tttattcattttaaattaaaaggagaagccaggcgctgtggttcacacctgtaatcccagcacactgggaggctgaggagggcagatcgcctaaggtcaagagtttgagaccagcctggc

SEQ ID NO: 871742 - DNA, 73 bp, Artificial Sequence
  ENSG00000228061_23 (sequence is synthesized)
acctgaaaaggagagaagataacattgttgctctataattcaatacaattgaagggatataatggcctggata

SEQ ID NO: 871743 - DNA, 120 bp, Artificial Sequence
  ENSG00000228061_24 (sequence is synthesized)
cttggtgaacagactgggcaaagcgagagccctctttctacgtgccttagggtggtgatagggcagccaaagaccaagtgcttcagctgagggatacagattagagatgaggacctaact

SEQ ID NO: 871744 - DNA, 120 bp, Artificial Sequence
  ENSG00000228061_25 (sequence is synthesized)
gcagtgtttgtgctacaaagaagctgaagatacatgctctttctgtcatcaacctgtcctatggctgtggataaactcaactgggaagagtactcctgtcatggaccctcagatgaacaa

SEQ ID NO: 871745 - DNA, 120 bp, Artificial Sequence
  ENSG00000228061_26 (sequence is synthesized)
gcatttataaaggctactgacaatatttcttaatcaaaagatgaagctgaggctgaaaaaattaagacttgactaagactatgaaactagttggatccatctgcctctaagatcccaggt

SEQ ID NO: 871746 - DNA, 120 bp, Artificial Sequence
  ENSG00000228061_27 (sequence is synthesized)
cactactttacttactaccaaggctaattataagctaagaatactgagtttgattatcttcaccatggatgttcaactaagaacatataaagtgtaggaatgtattaagggcaccaagaa

SEQ ID NO: 871747 - DNA, 120 bp, Artificial Sequence
  ENSG00000228061_28 (sequence is synthesized)
gaacaatgaccagcagaaacctctgagccacagctaggaaaatactaagaactatgaggatgcacaaattacatgtatggtctaagcaatgcaggttctgacagggatactattaagagg

SEQ ID NO: 871748 - DNA, 120 bp, Artificial Sequence
  ENSG00000228061_29 (sequence is synthesized)
ggttatgatccttcatgaaaaataactcagcttgacatcactctgacttcctttaattactgatgtaaacaaggttttagactatgtctcctactacccttcactgttgctgtcatctac

SEQ ID NO: 871749 - DNA, 120 bp, Artificial Sequence
  ENSG00000228061_30 (sequence is synthesized)
ccaactctgggtcatgactcacctttctaacactctggcctttcagtattttgatctctcttccaacaatcttatctccattctatttaagttgatcatccccatggttgttttttagac

SEQ ID NO: 871750 - DNA, 120 bp, Artificial Sequence
  ENSG00000228061_31 (sequence is synthesized)
catgtaattatcaataactgccatacctctataatctcaatttcatgcacacccctctacataaccactactttctttccacctagtacccataggcaatcatttgaccctgctgagatc

SEQ ID NO: 871751 - DNA, 120 bp, Artificial Sequence
  ENSG00000228061_32 (sequence is synthesized)
tctatatcattgtctaccacacctttcactcacctgctttgataagctctttcaattaattaaccatctcaatccatggtcaatccttatcctcacttccttgctcttctcttgctttgt

SEQ ID NO: 871752 - DNA, 120 bp, Artificial Sequence
  ENSG00000228061_33 (sequence is synthesized)
cacacttactgctattcttgttaaacacaactctctgtctattccacacttgcctcaatgtagctaaaaatggccagagaaacagactggtatgactttaacttcatgaccacaaacctc

SEQ ID NO: 871753 - DNA, 120 bp, Artificial Sequence
  ENSG00000228061_34 (sequence is synthesized)
ctccatcttcattatcagtttataacctttcaatgagaaaacagaagcagccagaagggacacctagcacacattttctacctgctatggtttgaatgctcatgtccccacaacacttgt

SEQ ID NO: 871754 - DNA, 120 bp, Artificial Sequence
  ENSG00000228061_35 (sequence is synthesized)
atgttgagctctaatatgcaacagtattaaaaggtgagaatttgagaacacatggacacaagaaggaaaacaacacacactggggccttttggaaggtgaaaggtgggaagagggagagg

SEQ ID NO: 871755 - DNA, 85 bp, Artificial Sequence
  ENSG00000228061_36 (sequence is synthesized)
agtaatgacgcttatgtaacaaacctgcacttacacccctgaatttaaaagttgaaaaaaaaaaacaataaaaaacagaggtgaa

SEQ ID NO: 871756 - DNA, 120 bp, Artificial Sequence
  ENSG00000228061_37 (sequence is synthesized)
taaaagttgaaaaaaaaaaacaataaaaaacagaggtgaaaattttgggaggtgattaggtcatgagggtggagcactcataaattagattaacactgtcttaaaagaggtccatgggaa

SEQ ID NO: 871757 - DNA, 120 bp, Artificial Sequence
  ENSG00000228061_38 (sequence is synthesized)
cctgtattcctcttctgccatgcccgaggttacacagagaagacacctatctatgaagaaagtgggccctcaccagaatctgactatgctggcacccttatcttggaacttcacagcctc

SEQ ID NO: 871758 - DNA, 120 bp, Artificial Sequence
  ENSG00000228061_39 (sequence is synthesized)
cagaaccataagaaatacatttctgttatttataagctgctgtttatggtatttttgttatagtagcctgaacagactaagacaccacattctcagcacgtgtagccaaatatatactct

SEQ ID NO: 871759 - DNA, 120 bp, Artificial Sequence
  ENSG00000228061_40 (sequence is synthesized)
gtcttctcacaggctgccatatgtgaactaactaaactcctataccaacccagtacctccacctgtgcacgggcctcataccataaaatatcacttgggcaattctctcctctctccttc

SEQ ID NO: 871760 - DNA, 120 bp, Artificial Sequence
  ENSG00000228061_41 (sequence is synthesized)
attattaacttctccttttctactgattgtttcctataatatataaacatatcgttatctctcccttgaaaaaataaaaccaccacttgtcccatctcatttaccagctactactctatt

SEQ ID NO: 871761 - DNA, 120 bp, Artificial Sequence
  ENSG00000228061_42 (sequence is synthesized)
tttctgcaccaaaccccttaaattttctaaaattcagtgcctccaatcctctccttacattttcacttaaatccattccaagtagtatgtgaccacccccatcccatccattaaaactgc

SEQ ID NO: 871762 - DNA, 120 bp, Artificial Sequence
  ENSG00000228061_43 (sequence is synthesized)
ttttattatggtgactgatgacctccaatggctaaattcaattggtctgttttcttttttttggtaacaactttattgagatagaattcaggtaccatacaattcacccactgaaagtgt

SEQ ID NO: 871763 - DNA, 120 bp, Artificial Sequence
  ENSG00000228061_44 (sequence is synthesized)
acagttcaatagttctagtatattgacagctatttaagtattaccataattttagaatattttcattccttcaaaaaggaatctcatacctgttttatcaactccctccaattctcctag

SEQ ID NO: 871764 - DNA, 120 bp, Artificial Sequence
  ENSG00000228061_45 (sequence is synthesized)
ccctaaggaaccattaatgtactttctgcctctctatatttcatattattatttcacacaaacgaaatcatgtaatatgttgtcttttatgaagggtactatggtttgaatgtcggtccc

SEQ ID NO: 871765 - DNA, 120 bp, Artificial Sequence
  ENSG00000228061_46 (sequence is synthesized)
ctttaaaactcatgttgaaatttagttgccattgttaccgtattaagtggtgggacctttgaaaggtgatttggccataagggctccaccatcatgggcaggattggtgccagtacaaaa

SEQ ID NO: 871766 - DNA, 120 bp, Artificial Sequence
  ENSG00000228061_47 (sequence is synthesized)
gggtgagttcagtcctttctcactctcctggttcttccattcttttgccatgtgaggaacagggttcctcccctctggaaagtgcagtgttcaaactaccgtgttggaagtggagactcg

SEQ ID NO: 871767 - DNA, 120 bp, Artificial Sequence
  ENSG00000228061_48 (sequence is synthesized)
gtccttaaccgacaccaaacatgctggcaacttgaccttgggctttcaaactttcagaactatgagaaataaatttctattgtttatacattacttagtctacggtattgtgttatagca

SEQ ID NO: 871768 - DNA, 120 bp, Artificial Sequence
  ENSG00000228061_49 (sequence is synthesized)
gcacaaaacagactaagacaattgttttctctcacttactataatgtttaaaggattcatctgagctgtaccctgtatcagtacttcattcctttttatggtgaaataaatattacattg

SEQ ID NO: 871769 - DNA, 120 bp, Artificial Sequence
  ENSG00000228061_50 (sequence is synthesized)
cccaggatgaagtgcagtgacacaactgaacctcactgctgacccctgaactcctgcgctcaagtgatccttccaccgcagccttctgagtagatgggactacaggcgtgcaccaccata

SEQ ID NO: 871770 - DNA, 120 bp, Artificial Sequence
  ENSG00000228061_51 (sequence is synthesized)
cctggctaattaaaaaaaatttttgtagagtcgaggtcttgctatgttgcctaggttggtcttccactcctggcctcaagtgatcctctcaccactcagtaggcgagagccactgcaccc

SEQ ID NO: 871771 - DNA, 120 bp, Artificial Sequence
  ENSG00000228063_0 (sequence is synthesized)
agagaggcgctatgcctccctgccggcgacacgatacagcgctgcagaaccgaccccgacgcagccgccatcgctgatgccactgccagtcatgcggttccgcccctgcgttgccgcgcg

SEQ ID NO: 871772 - DNA, 120 bp, Artificial Sequence
  ENSG00000228063_1 (sequence is synthesized)
gggccgcgcacgcaaatacgcaggcacgcgcgggagcacgcccgggagcgcgcatgcgcagcgctgctggcccgctctctgaggagctttcaatactttggggtcaagtttgaggcagtt

SEQ ID NO: 871773 - DNA, 120 bp, Artificial Sequence
  ENSG00000228063_2 (sequence is synthesized)
gtaactgtactgagtttagttttgctaataatggtattctacgtgtgtcagcctcgtgtggacttctgtaatgactaatggatatgtttatatcctgagcatttgctgtaggaattttaa

SEQ ID NO: 871774 - DNA, 120 bp, Artificial Sequence
  ENSG00000228063_3 (sequence is synthesized)
atgcaatcccaaaactcaagattaccttatttggagaaatattcgtgttactatgtttaaaatttaatagaaccatattttacctttcactttgggactcgcacaggatgtttgcagctc

SEQ ID NO: 871775 - DNA, 120 bp, Artificial Sequence
  ENSG00000228063_4 (sequence is synthesized)
ttgatatacaggaactagaacgtgtcttttaagagcatgcggttttataattacgtggaagtatgctacgcaagggaaaaaagcctcttgctagtgttaagggtcttcataaacagaaac

SEQ ID NO: 871776 - DNA, 120 bp, Artificial Sequence
  ENSG00000228063_5 (sequence is synthesized)
cgcaaggaacctgggatctgacagctgttggaggaatgcctgtgaggaaggaggaggaacagaagaatgctttgatgtcttaaatggtacatccaaacttaagtgaaatagagctgtgag

SEQ ID NO: 871777 - DNA, 120 bp, Artificial Sequence
  ENSG00000228063_6 (sequence is synthesized)
gacattttggggagaagtgacctagataagcactgactgttgcattcatctctcttcttgctgattgtgatgatttcctgtgccatagccattcaaagtctgccaaaaaagctagcatgt

SEQ ID NO: 871778 - DNA, 120 bp, Artificial Sequence
  ENSG00000228063_7 (sequence is synthesized)
aattttctttctctacttctctacatttggaggatggaaatgtagatgttcttccattgtgccagcctcctcattcttctttctccaatgccgcatcttcctgcaaacttcctgccacaa

SEQ ID NO: 871779 - DNA, 120 bp, Artificial Sequence
  ENSG00000228063_8 (sequence is synthesized)
ctcaaacaacaggaaaataaatgatctgaaatcctcctgaactgcagcctacctatcgtggtctctatgggtgcaaacttccttccagaagcttgttcagctggctaaaacaggacattt

SEQ ID NO: 871780 - DNA, 120 bp, Artificial Sequence
  ENSG00000228063_9 (sequence is synthesized)
gccaatgcagccaaaagttgggtcttatactggctacctcctatgcagagtgaaaaacttttctttctcccacagccacagacatcgctcctcttccagctcaacatctttcaaagggat

SEQ ID NO: 871781 - DNA, 120 bp, Artificial Sequence
  ENSG00000228063_10 (sequence is synthesized)
cagcaaaagaaataccaaagcctgtgtccttctgacatagtgagctgtcgaggtagtccagggaaaagatgacagtgaattgagttatgggatggcaatggagactgaaaagaatctgtg

SEQ ID NO: 871782 - DNA, 120 bp, Artificial Sequence
  ENSG00000228063_11 (sequence is synthesized)
tttattatatgtatatatatcattaaggtagaactagtggattttctctggcactgcacatgggaagcaagtgaaggagagtgatctagaatgacgccaccatttttgcctgagaaattc

SEQ ID NO: 871783 - DNA, 120 bp, Artificial Sequence
  ENSG00000228063_12 (sequence is synthesized)
agtactcagaggtgtctgtcattcagagagatggaggaaacaagaagaggagcaagttgggggagagggtaagcagaatcaaaaactgtgttgatacattaactttaggatgcatagtag

SEQ ID NO: 871784 - DNA, 120 bp, Artificial Sequence
  ENSG00000228063_13 (sequence is synthesized)
acatcagagtacagatggagtttaggagcaaagttatatagagagataaatttgagaacctgtaattcttttatttgtggcagataattagacaaatgatttctaaatattcccatgact

SEQ ID NO: 871785 - DNA, 120 bp, Artificial Sequence
  ENSG00000228063_14 (sequence is synthesized)
actacagaacatcaataaattccttaataatactagaaggagaaatgtggtttaaattttcccaggggttttctaacctttcagcaattctctttcttttcagcaaatgtttggtaatta

SEQ ID NO: 871786 - DNA, 120 bp, Artificial Sequence
  ENSG00000228063_15 (sequence is synthesized)
tgctggaatattggggtgggggtgctttctttttaaggccgctatttctttatgtatttctctggtctttaagctctcaagtagagtcatctgatgtgatttctcagctaatatgggcat

SEQ ID NO: 871787 - DNA, 120 bp, Artificial Sequence
  ENSG00000228063_16 (sequence is synthesized)
tttataacttgcccagagcctcattgttttcaattctgttttttttcccccattagttctttaaccatatttgtgactttgtattttgagacattctggaacattctccggtagaataaa

SEQ ID NO: 871788 - DNA, 88 bp, Artificial Sequence
  ENSG00000228063_17 (sequence is synthesized)
gtattttgagacattctggaacattctccggtagaataaaactataatactatgggaataaaaaatacaatactaagaaaacaaccat

SEQ ID NO: 871789 - DNA, 120 bp, Artificial Sequence
  ENSG00000228063_18 (sequence is synthesized)
gaattgcttgaacctgctctttttttgacatgaccacaccctgcagcagctcgcccacttactccactatgtgacattggacaagtcatttagcatctcctggcacaatttccccacttg

SEQ ID NO: 871790 - DNA, 120 bp, Artificial Sequence
  ENSG00000228063_19 (sequence is synthesized)
tacggtagaggtaataatcctaatgcctaccagaaggtaataaataaggattaaattagataacacaggtaaagtgcttagaatggtgtttagaatttagtaagtcatggctattgttat

SEQ ID NO: 871791 - DNA, 120 bp, Artificial Sequence
  ENSG00000228063_20 (sequence is synthesized)
acttctttgaagacagaaacacaggactggcaacatttaccataagctgactgagcagccattgggccttgagtgaacattggtggtagccaggcagtacttgtctcagtacttgcctca

SEQ ID NO: 871792 - DNA, 120 bp, Artificial Sequence
  ENSG00000228063_21 (sequence is synthesized)
ggcctggggtgtcggtgaccacagggagagcatccatctgcttgaggaaaggagaacaaagaaaataaagggcttaatcttgcacttgattgccagctcagccatagtagaatacagcac

SEQ ID NO: 871793 - DNA, 120 bp, Artificial Sequence
  ENSG00000228063_22 (sequence is synthesized)
caagtaaattcctaaggatcctgattccaggtcctggctcccagatgacattttaggacttgtcttgggcttagggggagctcgtcatactgaagggaaaaacacaagcctggctggatt

SEQ ID NO: 871794 - DNA, 120 bp, Artificial Sequence
  ENSG00000228063_23 (sequence is synthesized)
tgccaccagctgaataaagagtgcttgggccttgagtgaacattggcaatagccaaggagtggtcaccatggaccttaggcaagaaacccggtgccgtgctggctttggatctgacccag

SEQ ID NO: 871795 - DNA, 120 bp, Artificial Sequence
  ENSG00000228063_24 (sequence is synthesized)
aagcatggttgggaatttctgctatctgtttgtcattaggatttgtttttctttccttctaagacttaaatgtcttttaattataggtcagctgattctgtaactgaagagttgagtagc

SEQ ID NO: 871796 - DNA, 120 bp, Artificial Sequence
  ENSG00000228063_25 (sequence is synthesized)
aaggaatgattaggatctagaacagttttctctcttgcatggaaaaaaaagcaccaattagtattaatgaatcactgcttgtataaggcagccaggtttctagtttccccaaaatacgag

SEQ ID NO: 871797 - DNA, 120 bp, Artificial Sequence
  ENSG00000228063_26 (sequence is synthesized)
aatgacctaattttgcccaagaaattttgttttcttattattattactgtagttgcactttttataaatgaaatctttgtataaaggactatctaaagtttttaggtatactgtttagaa

SEQ ID NO: 871798 - DNA, 120 bp, Artificial Sequence
  ENSG00000228063_27 (sequence is synthesized)
ataatgattaagagtatatttaaatttcttacattaaatataaatgtactgaggctgaaaacaagagcttatttttggttacatatctgaattaaacctgtgtactcttattttggtagc

SEQ ID NO: 871799 - DNA, 120 bp, Artificial Sequence
  ENSG00000228063_28 (sequence is synthesized)
ttagtcaaggattgattttattgtcttaatggaaggagaaaggaggatactgtttgtcagggactgttgaaatagtcatgctgttcatttgtggtgtgtgatataaatgtaaacctttcg

SEQ ID NO: 871800 - DNA, 120 bp, Artificial Sequence
  ENSG00000228063_29 (sequence is synthesized)
gaaggtaatttggcatatttgtccaaaagcctgaaaaatgtttgtactgtttgataatatacaagcatttctaggaatatataactaagaaataattataggcacaggaaagattcacag

SEQ ID NO: 871801 - DNA, 120 bp, Artificial Sequence
  ENSG00000228063_30 (sequence is synthesized)
ttacaatgtgtaaagttggaaacagcccaaaatgatcaactagggattcctgttacagaggaagaaactttcttctgtcttgttcagggcagtatcccaagtgtcaaaaacagtggctga

SEQ ID NO: 871802 - DNA, 120 bp, Artificial Sequence
  ENSG00000228063_31 (sequence is synthesized)
ctggcctgaacacatgcatggagggtgccagccccatgcctgccagtgctctgcccccgtgccaccaccactactggtgcaaacacacccatggatgccagaagccccacacccctctcc

SEQ ID NO: 871803 - DNA, 120 bp, Artificial Sequence
  ENSG00000228063_32 (sequence is synthesized)
ccttgtctctgcctcagcttcctggtgcaactgtagccagaagaggagagagaagaggacattggagtgcacgagaagaatatattataaaagaatattgcttgattaaaaagcattttt

SEQ ID NO: 871804 - DNA, 120 bp, Artificial Sequence
  ENSG00000228063_33 (sequence is synthesized)
acttcttgtccatttactttttagtttatcatacacaccatgtttactagtactaaaactgtcttaaaatattgcaattttgaccctttttctaattgacctttatgtttttacaagcac

SEQ ID NO: 871805 - DNA, 120 bp, Artificial Sequence
  ENSG00000228063_34 (sequence is synthesized)
attttattacatatgaatgagactttactatgttatatgtaactcttaattctgtaaataatagattgcttatctgaaatatagctgatatttgtttcttaattatttggctattcccta

SEQ ID NO: 871806 - DNA, 120 bp, Artificial Sequence
  ENSG00000228063_35 (sequence is synthesized)
gcaccctgccatgctgctgctgttggtggtagttgcaaatgatcacagatcccactaccatcactcaatgaagcactttggctggcaccacccagcagaatgttgtgaccagtggtctgg

SEQ ID NO: 871807 - DNA, 120 bp, Artificial Sequence
  ENSG00000228063_36 (sequence is synthesized)
gaacacctcagcctctacagtacagtagatccctaacctcaaggggacagagaacaaagccaggggcctgataccagctccccagaattagaggatgcagcccaggaatcctgagctggg

SEQ ID NO: 871808 - DNA, 120 bp, Artificial Sequence
  ENSG00000228063_37 (sequence is synthesized)
gcttggccccctaaaccattccagaaacaaatccagtcaaccaactcactttataccacagtcaaacccccaaggacataaaagaggttaaaagaaaaaaaaaaaagaacccatccaaag

SEQ ID NO: 871809 - DNA, 120 bp, Artificial Sequence
  ENSG00000228063_38 (sequence is synthesized)
gctacctactttgggtttccttgactcatcaggaccaactgcctgtggaaaggtgctagaagctacggactagaggtctcctctctgctgagagctggacactctttgggacaacctgcc

SEQ ID NO: 871810 - DNA, 120 bp, Artificial Sequence
  ENSG00000228063_39 (sequence is synthesized)
tgtggaaaggagctacccacttcaggtctcctgagagctgttctgttcctcaatgaagctcctgtctgccttgctcaccctccggttgtctgcagaacttattcttcctggatgtgggac

SEQ ID NO: 871811 - DNA, 120 bp, Artificial Sequence
  ENSG00000231934_0 (sequence is synthesized)
ggtggcatttggttgcctttcctggggagaggcggcaggtgctcagctctgcagacgtgggggcaagagaaggcccaagctgcctcgagaagagcagaggtgccccatggggaccatgat

SEQ ID NO: 871812 - DNA, 120 bp, Artificial Sequence
  ENSG00000231934_1 (sequence is synthesized)
gaccggtcgcatgtgccaaagccagcccccggcagggccagcgcagggtttctgcggggccgtcctgtggctctgatatctatgagtgggtggccagcaaaggcacaggcaccagcagaa

SEQ ID NO: 871813 - DNA, 120 bp, Artificial Sequence
  ENSG00000231934_2 (sequence is synthesized)
aggagcagagatgcccagaacatgctgtcccccaatgccagccccaagcgaggccagcttagggtgcggtgggcagagccatcctgcagctctgagatccacgaagtggaggtgggagta

SEQ ID NO: 871814 - DNA, 120 bp, Artificial Sequence
  ENSG00000231934_3 (sequence is synthesized)
cacggcgttggagctctcacaacttgagctcaattttattccggagccatgacctgcagcacattggtgaccagaagacgcccaaagctttgaaaatggacttatcgacctcaaaccaat

SEQ ID NO: 871815 - DNA, 120 bp, Artificial Sequence
  ENSG00000231934_4 (sequence is synthesized)
gggacatattcctacatggccttctcccctgttagggttcccagggtatgtctttaatgtctggtttaatagaagaagacttggttctcctttctgcttctatgtttaatttcttgtgac

SEQ ID NO: 871816 - DNA, 120 bp, Artificial Sequence
  ENSG00000231934_5 (sequence is synthesized)
cctttctgcttctatgtttaatttcttgtgacatcccacgtcaggtagctgggaaactccaattatacttgtgagagaatgaaagtggaaaagctgggcagatgtgcctgagacaggttt

SEQ ID NO: 871817 - DNA, 120 bp, Artificial Sequence
  ENSG00000231934_6 (sequence is synthesized)
agacaaagcaaaggtatgaaaggaacacacgtccctgactgactaggaggaacagagctgcctgctgtctggaaccgcttcctcccagactaagagagaaataaacttctgttttctata

SEQ ID NO: 871818 - DNA, 120 bp, Artificial Sequence
  ENSG00000231934_7 (sequence is synthesized)
gggcacggctttgtgagccagtgcctggactcccacgtgacaaatggaagggcagcgcgtggagggaactcaaggcctgattggttcttcctaagcaggacacgatctcgttggcagggc

SEQ ID NO: 871819 - DNA, 120 bp, Artificial Sequence
  ENSG00000231934_8 (sequence is synthesized)
tgaggaacaacgctctcctgagggttttctttaaggggcgaggatcactgccgctagctcctttgaaagcaaagttaagaggcagcgcaggaaggcacagcaggaaggctcatggttaga

SEQ ID NO: 871820 - DNA, 120 bp, Artificial Sequence
  ENSG00000231934_9 (sequence is synthesized)
ctacagagaaggaagcagccactgctggggacctaccctgtgctggtcactgacaagctgtctcattaaaccttcccggaccctcaacccctcctagtatcttatcctcattttacagat

SEQ ID NO: 871821 - DNA, 120 bp, Artificial Sequence
  ENSG00000231934_10 (sequence is synthesized)
gagaagactgcggccaagagaggtccaatgccagtgggatcagcttcgatgggatgcgcacagactgacctcttctccccagccccttcaacttcccagagctgcagggggcctgggagt

SEQ ID NO: 871822 - DNA, 120 bp, Artificial Sequence
  ENSG00000231934_11 (sequence is synthesized)
tcttggtaacagcacattaaacctctgtttgtgggaactttaatttaaacacaaattagagaaggcaaatgactctggcagccagataagccatcccaggaaaacaaggagaaagccaag

SEQ ID NO: 871823 - DNA, 120 bp, Artificial Sequence
  ENSG00000231934_12 (sequence is synthesized)
agaatcagcccagataaggtctgactttaaactactgctgatacccagaagcctgggacagatgaaatctaggggtcctgaatgaagaaccccagaagctccacaccccagttgtccttg

SEQ ID NO: 871824 - DNA, 120 bp, Artificial Sequence
  ENSG00000231934_13 (sequence is synthesized)
ctctgggctctatgccagctccctttcctgtgttctctatatttctatctttttgcaaaattttatcctgattctttggctccatccctcccacccccaccctactgttttagagaatgc

SEQ ID NO: 871825 - DNA, 120 bp, Artificial Sequence
  ENSG00000231934_14 (sequence is synthesized)
actttctttactttgcttctcatcttcttctgtgacctactattctgagaaagttctacttgttatctaacctccatctatgctactacctttagagtctaatacatcctgcttagtgat

SEQ ID NO: 871826 - DNA, 120 bp, Artificial Sequence
  ENSG00000231934_15 (sequence is synthesized)
aactctctaggcctgggtaccggagggagggaggcgggcaaaggaagggagatgggcacccccagtctttccatcctcctcattcgtctaggtgcacccgaatcccctattccttatttc

SEQ ID NO: 871827 - DNA, 120 bp, Artificial Sequence
  ENSG00000254030_0 (sequence is synthesized)
gccacccccttggtcactctgttcccgccctcctctgaggagctccaagccaacaaggccatgctggtgtgtctcataaatgacttctacccaggagccatagaaggaaaatggcaccct

SEQ ID NO: 871828 - DNA, 120 bp, Artificial Sequence
  ENSG00000254030_1 (sequence is synthesized)
atgcggccagcagctacctgagcctgacgcccgagcagtggaagtcccacagaagctacagctgccaggtcacgcacaaagaaagtaccatggagaagacaatggcccatgcagaatgtt

SEQ ID NO: 871829 - DNA, 120 bp, Artificial Sequence
  ENSG00000231937_0 (sequence is synthesized)
tgaggatgtcttctccccttaaaccaggtctcttgactcggagtcttccaaggattgattctggagtgtaagtcagcaatatgaacttgatgctcattttggcctaaagatggagtcatg

SEQ ID NO: 871830 - DNA, 120 bp, Artificial Sequence
  ENSG00000231937_1 (sequence is synthesized)
ggcacgatcatagctcactgcagcctcaaaggcctgggctcaacggatccttcctcctcagcctcttgaatagcagattttatacacatctgcaaagtctttggccctatccacccttcc

SEQ ID NO: 871831 - DNA, 120 bp, Artificial Sequence
  ENSG00000231937_2 (sequence is synthesized)
gggccaataaaagccatgcagcttccatttggttctctttggttgcttgttcatccctctggagatgtttcttatgagaacccagaagccatgctataagaagccacaaggagaggccat

SEQ ID NO: 871832 - DNA, 120 bp, Artificial Sequence
  ENSG00000231937_3 (sequence is synthesized)
aagccacaaggagaggccatgtatagaaactccagtcaacagttccagatgaacctgtccttcaacactcagagccaagctgccagacatagacgggattttaccatgttgcccaggctg

SEQ ID NO: 871833 - DNA, 120 bp, Artificial Sequence
  ENSG00000231933_0 (sequence is synthesized)
attgtgatgagggtgatgatccagcagtcccagtgtgtcaggtcctgggctgggatccatgtcgtccttacaacagttcagcaagaaacatgttattcgatccattcactgaggaggaaa

SEQ ID NO: 871834 - DNA, 120 bp, Artificial Sequence
  ENSG00000231933_1 (sequence is synthesized)
ctgaaatcactcggagaggaggagtgattcagccccaaattccaaagtggtagaaatggacttgggcttccctaatgtcttagctagtcccccatctacctgtccattcctgggacaggt

SEQ ID NO: 871835 - DNA, 120 bp, Artificial Sequence
  ENSG00000231933_2 (sequence is synthesized)
gagtcattctgcctgaacttccacagttagactgagacataaaatgctaatctacctggaaagacaggggtatatgtcagagccattcttccagatcagatgacctgttaaactgagact

SEQ ID NO: 871836 - DNA, 120 bp, Artificial Sequence
  ENSG00000231933_3 (sequence is synthesized)
tctgcaccatctgaaccatcagtcactctctggcccagagaggtggtgttatttgccaaggacacacagcaggtggccaagatggagccaagccattttccccactgcagggctcatggt

SEQ ID NO: 871837 - DNA, 120 bp, Artificial Sequence
  ENSG00000231933_4 (sequence is synthesized)
atcctcaaggtcacaggctcagctaatacctcgatcacccacagtggaggtgagagcctgcccactctctaacacttctgtggcccagactatccccacatcttaccttttgctccagct

SEQ ID NO: 871838 - DNA, 120 bp, Artificial Sequence
  ENSG00000231933_5 (sequence is synthesized)
ctttcctggctgtcagctccgagtccagcctctcctcgcattgctgcagacgctttctgaggaactcgttctccatctgagcacagtcgaagcgcatctgccactcgtctgctgtttaac

SEQ ID NO: 871839 - DNA, 120 bp, Artificial Sequence
  ENSG00000231933_6 (sequence is synthesized)
ggagtcagggagaccaggataagaggccaaatgagtacccctgatctccattcccctggacatctcaagggcacaaattctctggacacacggagggaataatgctgacattttatagaa

SEQ ID NO: 871840 - DNA, 120 bp, Artificial Sequence
  ENSG00000231933_7 (sequence is synthesized)
gctgacccactggatatccttctcacccaactccattaggctggggagagtaagaggcacggtgacaaggtggcaaagatgtcaccatgccatccaatcacgaggtctccaggaaactgt

SEQ ID NO: 871841 - DNA, 120 bp, Artificial Sequence
  ENSG00000231933_8 (sequence is synthesized)
tactagcacaccatttgttagagtgtgaactggttagaatgtagacgagggatagttggaggccacagaagacaagcagagagaccaaactatctgtacattcatctagaaaggctagat

SEQ ID NO: 871842 - DNA, 120 bp, Artificial Sequence
  ENSG00000231933_9 (sequence is synthesized)
aaaaatatattatatatagataagattgcattagatttgtaatgttaccttcaagaaagaaggaaatttcaggatatcagaaatgcagaggacacaaagccctaacagtaatggtacata

SEQ ID NO: 871843 - DNA, 120 bp, Artificial Sequence
  ENSG00000231933_10 (sequence is synthesized)
ctaatattatggcggccaggatgagggggaagagcagttgatagatccagaagtgtcctttaggatagaggtttgtgtttcaatgcccagacagagacaggagacaaggctctgggctca

SEQ ID NO: 871844 - DNA, 120 bp, Artificial Sequence
  ENSG00000231933_11 (sequence is synthesized)
tctctggatagaagatccacatgtacagacaatatttttcatgtctcacagtgaccagcatttgtaataatagtggagatggaaaaaccttaaggggtttgtgtcctcttcctccctctt

SEQ ID NO: 871845 - DNA, 120 bp, Artificial Sequence
  ENSG00000231933_12 (sequence is synthesized)
gggaaacagagaactctaccaatgtggaggcatcactctatcctgggcccagcaaactcaggaggcagctgcatctacatttcgattaagcatcgagagatgcaaggaaacaggggtata

SEQ ID NO: 871846 - DNA, 120 bp, Artificial Sequence
  ENSG00000231933_13 (sequence is synthesized)
ggattcttgggagaaccatacaggaataagctcatggtttcgactttgttggttctctagcaggacgcaggtatcctcaaggtcacagccaatgcacccacagactttacctaccctgcc

SEQ ID NO: 871847 - DNA, 120 bp, Artificial Sequence
  ENSG00000231933_14 (sequence is synthesized)
tcaacttgatgacccctgagccaccggataactcatatccccaccagccgacatgatcagaagggatatgtgaggattagccacagagcagccaaaatgacatacctagaaaatctgacc

SEQ ID NO: 871848 - DNA, 120 bp, Artificial Sequence
  ENSG00000231933_15 (sequence is synthesized)
cagaatgcacacggccttaaacaaacaaaagtcaagactcttgcatcttcctccaggaaacactctcccaaatgtcctagtttagatctgggaaagagcacgcaactcagcacactggct

SEQ ID NO: 871849 - DNA, 120 bp, Artificial Sequence
  ENSG00000231933_16 (sequence is synthesized)
ttgaagaaatggcctcattaaaaaattgctttaaataagcaaaactctgagttaatgaagcctgtaattctaaattcagtatttgaaggcaaatgggatgttctcttatattctgctgct

SEQ ID NO: 871850 - DNA, 120 bp, Artificial Sequence
  ENSG00000231933_17 (sequence is synthesized)
cagaaaaggttgctgttttattactttttaatgtagcataaatatcccccttcatcagggaaactgactcaactttataatttgttattaaagaactgggctgctttcctgcagttgtcc

SEQ ID NO: 871851 - DNA, 120 bp, Artificial Sequence
  ENSG00000231933_18 (sequence is synthesized)
caccaacaggaagaggaaccaggatcagtccacttagatgtactgactgcatcatttagtcctcagcacaagggggcgatcttatcaccaacctacggataaggaatctggctgggaagg

SEQ ID NO: 871852 - DNA, 120 bp, Artificial Sequence
  ENSG00000231933_19 (sequence is synthesized)
actgaatgacctgctcaaggtcacacatctagaaagaggcacctttaggacttgaatgagatgacttttatatcaatgcctgggctcctaatcgccatgctgtcttgaccgtctgcaaca

SEQ ID NO: 871853 - DNA, 120 bp, Artificial Sequence
  ENSG00000231933_20 (sequence is synthesized)
aacccttcactcgacaaatggggatgttaaggcccagaaaggcaaagaaagttccccaaggtcacaagatcaattggccacatagttgaggctggctaagagaaaagaataatttcttgc

SEQ ID NO: 871854 - DNA, 120 bp, Artificial Sequence
  ENSG00000231933_21 (sequence is synthesized)
gactcttccaggttacaaagtcagctccaggatcaaataactttgggccagatcgtgaaggagttgaacgccaggctaaagcgctcagaggttctcctgcgagtagtagagaaccacaaa

SEQ ID NO: 871855 - DNA, 120 bp, Artificial Sequence
  ENSG00000231933_22 (sequence is synthesized)
aggatgaggagcagctgagtgaggcacccgtgttgtattttagtaaaatctctctgcattggagcctgcttggaccaggacattgctcctggacaaggttatagctaactcattctctgc

SEQ ID NO: 871856 - DNA, 120 bp, Artificial Sequence
  ENSG00000231933_23 (sequence is synthesized)
cacaatattcacagagcccttgagcctcaaccttggaccaagaaactatgctttaactctgagttttaaataacgcttcctccaggcagcctgtcctgaccacctccaactgtctaaagt

SEQ ID NO: 871857 - DNA, 120 bp, Artificial Sequence
  ENSG00000231933_24 (sequence is synthesized)
tcttgagtgctcactcttctaagattggttgccttatactgtttagttgtctctataagtgtattcatatcttcccttttccaaggaaatttcataatccttaagggcaagggagctgtt

SEQ ID NO: 871858 - DNA, 120 bp, Artificial Sequence
  ENSG00000231933_25 (sequence is synthesized)
tcagtcatctgtgagtccttcacaccctctggaagagttccctacaagcagattcccctacatgttgatacaagctcatggattgcttaatgaacctaatacaataatcagataaaaaga

SEQ ID NO: 871859 - DNA, 120 bp, Artificial Sequence
  ENSG00000231933_26 (sequence is synthesized)
gacttaacaggccacttgatgccaaagaatagctactacaaacaccagctcctagcaaacagcccacactgaccagccaattgcctgaggccagatagacaggggtatatgtcagagcca

SEQ ID NO: 871860 - DNA, 120 bp, Artificial Sequence
  ENSG00000231933_27 (sequence is synthesized)
acagggaaatgtgaaggttttgagaccgctgataattatgtaatagataagaaacatgagttaaagtgacttccacaaggttcacgtagaaatggaactggaactcagatatcctgagtt

SEQ ID NO: 871861 - DNA, 120 bp, Artificial Sequence
  ENSG00000231933_28 (sequence is synthesized)
gtgtgggaatcagtgagtctagcacagggcttacccggaatttcatcagccctcagaaccaagctttgtgacccatagggtaatcatgccacaaacaatccaaccaaaatgaaaccatcc

SEQ ID NO: 871862 - DNA, 120 bp, Artificial Sequence
  ENSG00000231933_29 (sequence is synthesized)
caggccactctgaacttagaagccaaagcgggaaacagagaactctaccaatgtggaggcatcactctatcctgggcccagcaaactcaggaggcagctgcatctacatttcgattaagc

SEQ ID NO: 871863 - DNA, 120 bp, Artificial Sequence
  ENSG00000231933_30 (sequence is synthesized)
tcacttccattgtttataaaatcccatgtgatctcacccaggcccacctctgcaaggcaatcacatgatactttttgctcacgttgagaatagaatagatacacaaatataacctccacc

SEQ ID NO: 871864 - DNA, 120 bp, Artificial Sequence
  ENSG00000231933_31 (sequence is synthesized)
caactcagggactcccaacccaatctgcgtcagcaaagactttctggagagagtgacatttaagctaagatcttaagaatagttggagatatctaggcaggagagaaaaagaaagattgc

SEQ ID NO: 871865 - DNA, 120 bp, Artificial Sequence
  ENSG00000231933_32 (sequence is synthesized)
tctgcaccatctgaaccatcagtcactctctggcccagagaggtggtgttatttgccaaggacacacagcaggtggccaagatggagccaagccattttccccactgcaggggctcagct

SEQ ID NO: 871866 - DNA, 120 bp, Artificial Sequence
  ENSG00000231933_33 (sequence is synthesized)
tctgcaccatctgaaccatcagtcactctctggcccagagaggtggtgttatttgccaaggacacacagcaggtggccaagatggagccaagccattttccccactgcagggagcacgct

SEQ ID NO: 871867 - DNA, 120 bp, Artificial Sequence
  ENSG00000231933_34 (sequence is synthesized)
aacaatcccccaaagacctttgtcagatgaagaagccagctcaggaaagctgtaggataaataagataaataatatttaatgcagatcaagttcaaaatctatgccacctccatggaaat

SEQ ID NO: 871868 - DNA, 120 bp, Artificial Sequence
  ENSG00000231933_35 (sequence is synthesized)
ataattctccttcctacttcttggaaaggaggcagtttccacaaattcacatcttggctcacacaggaacatttttctgtattttatcatgggccttctaaaagaggctgcttcccacct

SEQ ID NO: 871869 - DNA, 120 bp, Artificial Sequence
  ENSG00000231933_36 (sequence is synthesized)
gagctggagaactttagacacagccaaggcgtccaagcatcacaggttctgaggttttgcatgaagaagcctatgagtgtgcgaatctgggtacaaatccaggctccaccatcgcctcac

SEQ ID NO: 871870 - DNA, 120 bp, Artificial Sequence
  ENSG00000231933_37 (sequence is synthesized)
tgtaacagcaacccaaagggaatgcaaatatgggaaccacaccgtgcagattcaagattagcatcttgctggtgcacaaggcccagtctctgccagaatggctcacgtgatctgagagtc

SEQ ID NO: 871871 - DNA, 120 bp, Artificial Sequence
  ENSG00000231933_38 (sequence is synthesized)
caagtcctaaatgagaaggccatattttggcctcctccttattctctagcccaattttcaccaacaggaagaggaaccaggatcagtccacttagatgtactgactgcatcatttagtcc

SEQ ID NO: 871872 - DNA, 120 bp, Artificial Sequence
  ENSG00000231933_39 (sequence is synthesized)
gattcttgggagaaccatacaggaataaggtgtgacgggacagggaggaagattagagcaaaacaagggagttgaagtgagggagttaggagaacctggataccccagaaaacgccagct

SEQ ID NO: 871873 - DNA, 120 bp, Artificial Sequence
  ENSG00000231933_40 (sequence is synthesized)
ccaatgtagcccaccctggcagcccaggtgatggtgagagatgcaactcacttcttctgcttcttctccagctcatggtttcgactttgttggttctctagcaggacgcaggtatcctca

SEQ ID NO: 871874 - DNA, 120 bp, Artificial Sequence
  ENSG00000231933_41 (sequence is synthesized)
tttggtaactgttgtgcgcctgacacagctttaccctctttgaatggggagagcagtagtttctgttccacaggttgctataaggatgaactgtgatctcatcattcctcataataatgg

SEQ ID NO: 871875 - DNA, 120 bp, Artificial Sequence
  ENSG00000231933_42 (sequence is synthesized)
ccatctggaactcaagctggctcgaccctctgcccctccaaactggacatacaagagacaaaggggtggcatgcagaggccacgaaccgcagcaggggtgtcatcatgatgcatggtcct

SEQ ID NO: 871876 - DNA, 120 bp, Artificial Sequence
  ENSG00000231933_43 (sequence is synthesized)
ggaagggtgtctgatccctgtctgttaacagaaattcccttccaaggaagcagatgcacatggaagaagatatcttctagctgttctctggcctaatgtgtctcaaagtgtggtcccagg

SEQ ID NO: 871877 - DNA, 120 bp, Artificial Sequence
  ENSG00000231933_44 (sequence is synthesized)
acaggcacctttagcactctagcatgttagaaatacagcctccccaaggccacgccaagcctactgattcagaatctctaaggctggagtctagcaatctgtattcggagaagtcttaca

SEQ ID NO: 871878 - DNA, 120 bp, Artificial Sequence
  ENSG00000231933_45 (sequence is synthesized)
gaccctctgcccctccaaactggacatacaagagcggttggggaatggagtgagtaattcagccagcatccatgaagatacccaggtgctaggttccaacaagagactttttgtttcacc

SEQ ID NO: 871879 - DNA, 120 bp, Artificial Sequence
  ENSG00000231933_46 (sequence is synthesized)
acttccaaatttcaatgtctctgttcatgcaagtctgttccagccctgcccagtctaggggctgaacacaaatcatcagaatgagtcccttgctttgcctgagactgggtatacacaagt

SEQ ID NO: 871880 - DNA, 120 bp, Artificial Sequence
  ENSG00000231933_47 (sequence is synthesized)
atggacacggtgctcagcacttcatcctccagggattgcctttctgccagtggctcagcactgtgcctatgacagcaccattcagaagctgcttcaccgcccacccacagcaggcgggtg

SEQ ID NO: 871881 - DNA, 120 bp, Artificial Sequence
  ENSG00000231933_48 (sequence is synthesized)
gaatgaactaaggagcagacacacaaaggagggctatgcagccataaagacagaacaaggaggagctccacaagaatggaaacggcaagattttcagaatacattttaagtagaaaatac

SEQ ID NO: 871882 - DNA, 120 bp, Artificial Sequence
  ENSG00000267011_0 (sequence is synthesized)
cacacagacctattcattcattcaagaaaaatgtactgaataccgtggggccgagtcacttgattgtcctgggcttcgctctctgcacttggaagatggggcccataatgattgtgagga

SEQ ID NO: 871883 - DNA, 120 bp, Artificial Sequence
  ENSG00000267011_1 (sequence is synthesized)
tcacgaggatccatggtaagaactaaaatgaaccagggtgcttgaggaaaaaaagctgaataatggagacgacttcttctctcctgggggatcacagagggttactggatgaagtgagtt

SEQ ID NO: 871884 - DNA, 120 bp, Artificial Sequence
  ENSG00000267011_2 (sequence is synthesized)
actttgagaggacgaagcgggcggatcacgagagacgaggttttgccatgttgccaggctggtctccaacttctgggatcaagcaatccttccgcttgagcctccaaagtgctgtgattg

SEQ ID NO: 871885 - DNA, 120 bp, Artificial Sequence
  ENSG00000267011_3 (sequence is synthesized)
ctctgcgaggttcagttggcctgtccctgtcctatcaccgtttgtcaccgtttggggagcgccacggaatgccctgtctccaatcgagaggtgcactcgtcgccctggcaacggagtccg

SEQ ID NO: 871886 - DNA, 120 bp, Artificial Sequence
  ENSG00000267013_0 (sequence is synthesized)
gtgtttgtctcctgggatgctgtggggttgaccctggatagcattcacggtcattagctcatggtgttcttgggagacatttgaagtcagctggtgtcctgctgatggagctgctgagtt

SEQ ID NO: 871887 - DNA, 120 bp, Artificial Sequence
  ENSG00000267013_1 (sequence is synthesized)
cagcatcacatcgacataatttcatgatgcgtttgcatgaagggctttggtgccatttctgagtgagacttcagaagcctcctgaatcctattctggcccatcgtggcatggtcagcaga

SEQ ID NO: 871888 - DNA, 120 bp, Artificial Sequence
  ENSG00000267013_2 (sequence is synthesized)
tgagaaacagatggactggtgtgtggtgggaggaagctgtcctggtcgagctctgcttcaggccagtcctttctgagattggagaagtgagaagaggagcagagagaccagctgggagct

SEQ ID NO: 871889 - DNA, 120 bp, Artificial Sequence
  ENSG00000267013_3 (sequence is synthesized)
gctgtagtaacccaggtgagggagatggtggtctggaccagtgcttcgcatggaggtggacagaagtgatataactgatttaagtcaaccagctgcttgatccaaataatgccaaatgag

SEQ ID NO: 871890 - DNA, 120 bp, Artificial Sequence
  ENSG00000267013_4 (sequence is synthesized)
tttattgccatctcttcatattttacaaccagatcacttctgcataaaaccacatggaagaataagaagggaaaaacaatcaagcaataaactgttcatctgaaaatagttaaattctcc

SEQ ID NO: 871891 - DNA, 120 bp, Artificial Sequence
  ENSG00000267013_5 (sequence is synthesized)
aacagttgattttaaaatattttcctaaaatctattaagatttgttcaaagtaattcttctatggaggcacatctctggactgaaacaaccagcctttgcctttggtgtggtcctgtttc

SEQ ID NO: 871892 - DNA, 120 bp, Artificial Sequence
  ENSG00000267013_6 (sequence is synthesized)
agtcaaaatggctaacaggctatgaagaaaatcaaattccaagttactcaaatgtggagaaaatctggaggtctggtatgggcatcttttcaaaatgttttaattacacattgatttaca

SEQ ID NO: 871893 - DNA, 120 bp, Artificial Sequence
  ENSG00000267013_7 (sequence is synthesized)
aatgacattgtctagtatggtagttttaaaaaaatcatcatttttaaacatctgccaaattttaaatggtagtttttcatgaaagtacaaagaaaacttcatccacgatcacgaaatttt

SEQ ID NO: 871894 - DNA, 120 bp, Artificial Sequence
  ENSG00000267013_8 (sequence is synthesized)
ccaactcatatatcctgatcaaaacaaagactttctatggacaattgttgaaccacgcctgaccttggaccctgtgctatctactcttctcagtgtcattctctatctagtttggctttt

SEQ ID NO: 871895 - DNA, 120 bp, Artificial Sequence
  ENSG00000267013_9 (sequence is synthesized)
ccaagtttaatcactaagatattcagatattattacaaaatattattacaagccctttaattaccttgataatattactggcaatattaaaaacttttagcagtatctttcatggtgtgt

SEQ ID NO: 871896 - DNA, 120 bp, Artificial Sequence
  ENSG00000267013_10 (sequence is synthesized)
gctttgcctgaaaaggaaagatatctctgattaaagtttgaaaccattaataatatagaacaccatacaaatgacacttttccaaattagaaattttaagatcaaagattatttacgggc

SEQ ID NO: 871897 - DNA, 120 bp, Artificial Sequence
  ENSG00000267013_11 (sequence is synthesized)
ttatatttgtatctaattttaacatttttatgtagagaagaggtctcgctgtactgcacaggccaatctcaaactcctgacttcaagctatcctcctgcctcaatcttttatttactttt

SEQ ID NO: 871898 - DNA, 120 bp, Artificial Sequence
  ENSG00000267013_12 (sequence is synthesized)
caaggctgcatgtttatatcctctcataccactaacatcctggctaatgtcttaatgactaattttttccagttttaccacggaattgtcttgaagttggtgcatatttcacagactcca

SEQ ID NO: 871899 - DNA, 120 bp, Artificial Sequence
  ENSG00000267013_13 (sequence is synthesized)
atctgaagtgtggatcacagcatttgttagaaactagttgactttgactctttttcactctgagatagaatctaattggacctgttatcttgatttttattggtcaaagctttcatttca

SEQ ID NO: 871900 - DNA, 120 bp, Artificial Sequence
  ENSG00000267013_14 (sequence is synthesized)
ggcctcctaataggatgctgaccagccaatggaatgtttgcctttggtcaggtgttcaccctctggtccaattagccgaggccaaaatgtagtagggaattgtagccaaagaatggataa

SEQ ID NO: 871901 - DNA, 120 bp, Artificial Sequence
  ENSG00000267013_15 (sequence is synthesized)
ggaatttcctaaggcagtcttgctcagcaggtgctatgtcagtttttagaagagtttgtggttgtgataattgctctaagggttggcccatactgcgtatgatctaaggatctaagaata

SEQ ID NO: 871902 - DNA, 120 bp, Artificial Sequence
  ENSG00000267013_16 (sequence is synthesized)
atttattaccaaagtagcaaaagaacttcttgtaaataacctctgacaaatattttttattggcgtgtaccctaaagatagcagtacagtgaagctccagtaactgaaaagatcctggat

SEQ ID NO: 871903 - DNA, 120 bp, Artificial Sequence
  ENSG00000267013_17 (sequence is synthesized)
tggtattaagaaattagagttaaaggcttatgtaactgtcttatagataattttaggcaaagcagtcttgaaataaattctgctaatcagttaaagaaacagttgaatattttttaatag

SEQ ID NO: 871904 - DNA, 120 bp, Artificial Sequence
  ENSG00000267013_18 (sequence is synthesized)
caagagcactagtcttagaatcaggaaccatgggttggctctgagactctctgtctcatcttggggaaatcatttcagctttctggccccacccggtgttttcccggagcccataagatg

SEQ ID NO: 871905 - DNA, 120 bp, Artificial Sequence
  ENSG00000267013_19 (sequence is synthesized)
aatgttgtaataggctacttctacttctaaagcatccttgatctgaaatttgagaaacagaactgagaatcaaaatgaaataaaagcttgaatagatgttaggagaccaaaaaaaaaaaa

SEQ ID NO: 871906 - DNA, 120 bp, Artificial Sequence
  ENSG00000267013_20 (sequence is synthesized)
aaagccagagagaaattatttatagagcattcactatgatatcccgtgcgctttacacatgttgacttctcattcctcagagaaaggctctgaggttgtatccagtttacagtagaaaac

SEQ ID NO: 871907 - DNA, 120 bp, Artificial Sequence
  ENSG00000267013_21 (sequence is synthesized)
aggtaagataccttgccccagccatacaaactgtaaacagtggagtcaacccaattttgtttagcgaaaagaataataaagtgctttccatcataccaaattcttccttaaatgcaggga

SEQ ID NO: 871908 - DNA, 120 bp, Artificial Sequence
  ENSG00000267013_22 (sequence is synthesized)
gaaacaatgcttatggaaaaatagaggcaggtaaaaaaaacagtaatgttttacgaagaaataacagcattttcactaaatgatgtggagcttgggttgagaatgctgatatatgactca

SEQ ID NO: 871909 - DNA, 120 bp, Artificial Sequence
  ENSG00000267013_23 (sequence is synthesized)
gaattcaaaccttttgcactgattgttttcacttagattttatgaaagctgtaggtgtgtgagttaacgaggaatgcttcagcacttccctggtcatgcataaacatctacatgcaaaac

SEQ ID NO: 871910 - DNA, 120 bp, Artificial Sequence
  ENSG00000267013_24 (sequence is synthesized)
agcaaggagtgctctgtttatcacagctgcagtcaagccaacaaaactgtttctaccactgaggatgaaatttgtaaaattttctctcaaaaaataaaataagcctcttgtttgattgcc

SEQ ID NO: 871911 - DNA, 120 bp, Artificial Sequence
  ENSG00000267013_25 (sequence is synthesized)
gtggctgtgggaaagagattagagtggacgacaggaaaccagtaggaggctatcgcagtcatccagctgaggaaagatgacttgacacgacttcagaagcctcctgaatcctattctggc

SEQ ID NO: 871912 - DNA, 120 bp, Artificial Sequence
  ENSG00000267014_0 (sequence is synthesized)
cagccccatgccttaagcaaagtgtgggatggtctcgggaggacacccacaaatgtaagtaggaaggtgggaagcagcctctcctctaatatagaaaaacaactgtgacagacagaacaa

SEQ ID NO: 871913 - DNA, 120 bp, Artificial Sequence
  ENSG00000267014_1 (sequence is synthesized)
agcatgtggttcagacacgagaccctgagctagccctggggagggagacagcagctttgcagccgttatcctcaggaagccctgagcgctgagaggcactgttacagaaccgaactgggg

SEQ ID NO: 871914 - DNA, 120 bp, Artificial Sequence
  ENSG00000267014_2 (sequence is synthesized)
tccactcgctaggcctacctaggtgcctggaatttcccttcgaggaacgcaggagttttctttattttcatgcttgggaaggctcattaggcccctaagagagggtcccttccccatctc

SEQ ID NO: 871915 - DNA, 120 bp, Artificial Sequence
  ENSG00000267014_3 (sequence is synthesized)
aggactaaaatgcaatgaagatgttgctcagaggcagctggagagggatgggtctgtggaggatgccccgcagagtgaagtcgagatgatgcagccaccagggccggaggggagggacat

SEQ ID NO: 871916 - DNA, 120 bp, Artificial Sequence
  ENSG00000267014_4 (sequence is synthesized)
tccactttttaaatcagctttctgaagcatgatctccatataatcacctagaagcgtacagcacaatgatcttgacagatgccagcatccttggaaccactgccaccaccaacgtctcaa

SEQ ID NO: 871917 - DNA, 120 bp, Artificial Sequence
  ENSG00000267014_5 (sequence is synthesized)
accattccatcaaacccagaacactcctggtgccctgaagcgtctcccttcagtggcagaaccagcagagattcagtggtcacaaggctggtctggaactcctgggtgcaagcgatcctt

SEQ ID NO: 871918 - DNA, 120 bp, Artificial Sequence
  ENSG00000267014_6 (sequence is synthesized)
aagtgctgggattagaggcataagccaccgcgcccagccaggaatggattttctcacagttctcgatggcggaagtctgagatcaaggtcttggcagggctaggtctctctgaggccttt

SEQ ID NO: 871919 - DNA, 120 bp, Artificial Sequence
  ENSG00000267014_7 (sequence is synthesized)
tcctctctctgtctttccttgtcttccttgtgtccacagttgtgtccaaattcccctttctcataaggacgtcagtcatgttggattagggccctccctcctgaccttgttttagcttaa

SEQ ID NO: 871920 - DNA, 120 bp, Artificial Sequence
  ENSG00000267014_8 (sequence is synthesized)
tctctgcaacttaacccttaacctcagtaaagatcctatttccaaatgtgttcacattctgaggtcctgaggattaggactttgaaaggattaaaacaggctcttctggcatattgacaa

SEQ ID NO: 871921 - DNA, 120 bp, Artificial Sequence
  ENSG00000267014_9 (sequence is synthesized)
tttcagctaaagactcttgagaaacagcaggtgcaaaaagatcacagtgacctccatgctgtaccttgagatgaaattccaatgcgaaagatgccctctccaccctagaagggaaagcaa

SEQ ID NO: 871922 - DNA, 120 bp, Artificial Sequence
  ENSG00000267014_10 (sequence is synthesized)
catccttatctttgggagtgaaaagtccaaactgagagcatacttgcctttctctggaggggctctgccagcatgaattcctttacgggtggaagcctcacagtccagtctaccagtgag

SEQ ID NO: 871923 - DNA, 120 bp, Artificial Sequence
  ENSG00000267014_11 (sequence is synthesized)
gtccacatgggattggctggagggagctacgaagtcaagcggcgtcaggtacagagaaacaaatcccacatccaagggccaggaggcggtagagcaaaccacgcacagccgggtgactta

SEQ ID NO: 871924 - DNA, 120 bp, Artificial Sequence
  ENSG00000267014_12 (sequence is synthesized)
agggcaaggaagtcttcctgcaggaggtgaatttggcacaagggatacgtttttaggccctgagtggaggatctgggtttcaaactggacttttgaaaaacacactcttattgtagaagg

SEQ ID NO: 871925 - DNA, 120 bp, Artificial Sequence
  ENSG00000267014_13 (sequence is synthesized)
gcctgcgggtttgttttaatcacttctcaaagctacgctaggcattcgcagctcaggatccccagtttagcctaataaaaaaaagtaattacatcatattacagataatttgattgtgtc

SEQ ID NO: 871926 - DNA, 120 bp, Artificial Sequence
  ENSG00000267014_14 (sequence is synthesized)
tgagacgataattgagttaaaacgcttattgtaacagacacatcagattggcaaggaggaagctcggcttaaatacaaacagtgttgagagtggaattaaaggattgccattgcagttaa

SEQ ID NO: 871927 - DNA, 120 bp, Artificial Sequence
  ENSG00000267014_15 (sequence is synthesized)
cggcctgggtctggctcctggccattaattttaaataatttgcatttaactttgaaccaccacacctggccatattggatagtgcaggaggaataaactcactggcacatccttctgggg

SEQ ID NO: 871928 - DNA, 120 bp, Artificial Sequence
  ENSG00000267014_16 (sequence is synthesized)
cgtctactgtgtgcccccctccaagcggagtgtgtgggaacagagagcagcatccctgccacagtgggtggcggtctgcttgagagatattttattttcttgaaacaaataaaaaagaca

SEQ ID NO: 871929 - DNA, 120 bp, Artificial Sequence
  ENSG00000267014_17 (sequence is synthesized)
aaaggatgcatggtgtaaacactggtggtcaggctaaaatcaaaaaaccattagtgggcaacacagcacagagtgggctctgcccaggccacatgtgtgcagtgccagggctcggcttca

SEQ ID NO: 871930 - DNA, 120 bp, Artificial Sequence
  ENSG00000267014_18 (sequence is synthesized)
gacccagatgtccacacccagccctgcctattacacaaaggcggacagagctgtgggccagcggctggcaaaaggccttggggcaaccagaactctccatcagggcattgcagcctttaa

SEQ ID NO: 871931 - DNA, 120 bp, Artificial Sequence
  ENSG00000267014_19 (sequence is synthesized)
gagaaggtgggaactgctgcatttgccccgccctggatctcagcccaggaaacccactgtcacagaacaacagtcttaggagctttcttatcgagacagtaggaagcttttaaacacatc

SEQ ID NO: 871932 - DNA, 120 bp, Artificial Sequence
  ENSG00000267014_20 (sequence is synthesized)
agtggtgaacgccaggcgggtctctggaactttttcatcttggaaaactgaaactctctactcattgaacactgtacacttgattgagagcaaattgtatgtgtttttgccagcctcttc

SEQ ID NO: 871933 - DNA, 120 bp, Artificial Sequence
  ENSG00000267014_21 (sequence is synthesized)
ctgaaggcggacatttgtcttgatctgtattggaattctttatctatgtttaaattttgtatgagattgaattcatgtgtatgtgaactgaaatgaaattaaaatgtcaaactacaaaaa

SEQ ID NO: 871934 - DNA, 120 bp, Artificial Sequence
  ENSG00000267014_22 (sequence is synthesized)
ttccccgcagacttcagttgcttcttcacagctctgctctttgtcccgtccaatctctgagtaactaactcactgcttctgcaggtcttcatttctgcaggagggctcccatgctacata

SEQ ID NO: 871935 - DNA, 120 bp, Artificial Sequence
  ENSG00000267014_23 (sequence is synthesized)
aatcctgcattacacttttctcctgttagtctatgttatgtccatttaattctcaggcccagccgggaccctaagaggacagaggtggagtttttccacccctacaactttacccaatca

SEQ ID NO: 871936 - DNA, 120 bp, Artificial Sequence
  ENSG00000267014_24 (sequence is synthesized)
aatagtaattattttctgaacataaattcctgagtagtgaggacacaattatatctacaaacagtcataagaaaataattactccacgttccacctgaagcaacagtccataaaagctct

SEQ ID NO: 871937 - DNA, 120 bp, Artificial Sequence
  ENSG00000267014_25 (sequence is synthesized)
ggtgccgctctccaggaagccgggctctttccatcagaaactcacggccgatgccagtactgagaaaagggctcccaagcactgcgggactcaccaggcagcttatgacaggctttccaa

SEQ ID NO: 871938 - DNA, 120 bp, Artificial Sequence
  ENSG00000267014_26 (sequence is synthesized)
gtgtgattgctctgcccgcgtgacacccaggcccaccgtgtatatgaccaccccaacaggccgacacttaagacaccccagaggatgaacacgcacgtctttcgttcacagactgcagtc

SEQ ID NO: 871939 - DNA, 120 bp, Artificial Sequence
  ENSG00000267014_27 (sequence is synthesized)
tccagcctcaccccctgggccacccaccctcccccgctggactgacagccttcccgtaccatccagaggccatggcctactttgtcaaccctcccttgtgaagatcctcatcttcctgcc

SEQ ID NO: 871940 - DNA, 120 bp, Artificial Sequence
  ENSG00000267014_28 (sequence is synthesized)
atgcctgcccagccagactctagccctgcatcagccagacccactggtagatgtcggggcgatctcacactcggtcctggagctgcccaggaacctcactgtcctcctgtaatctccctc

SEQ ID NO: 871941 - DNA, 120 bp, Artificial Sequence
  ENSG00000267014_29 (sequence is synthesized)
gctctccttggccacttgctcacctggtgagctttcccctctccaaagcgactccacctcctactccagatcctctccatcccaatccacagagggcatgggataaaggagaagccccag

SEQ ID NO: 871942 - DNA, 120 bp, Artificial Sequence
  ENSG00000267014_30 (sequence is synthesized)
acaggaacttcttcaacttctgcctctggccctcaaagacgcctgcaaacagtgtcacctgtaaagctcttctgcttgggttttgtcctaaggagatgcctgttctcctcctcactcagg

SEQ ID NO: 871943 - DNA, 120 bp, Artificial Sequence
  ENSG00000267014_31 (sequence is synthesized)
ctggctcctcacagtctccaatcctgtcccatcctgactcctttgcaagcctcctatgtgggcttcggtgccccccacctcgaaagcttattccctcaactccacgggcacctcagtcaa

SEQ ID NO: 871944 - DNA, 120 bp, Artificial Sequence
  ENSG00000267014_32 (sequence is synthesized)
acttccggaagatctccctccttgctcagggcagcctctttgcaccctagcctctgtctcagcatctgctagcatcgctctcgcagcaggagccgccctgctctgctcaccaagatgctg

SEQ ID NO: 871945 - DNA, 120 bp, Artificial Sequence
  ENSG00000267014_33 (sequence is synthesized)
ccagtgtagctgggccggagctctgcaccgcgctggagtcccgctctccccagagccccggccctgctgtgtgctgctcctccgtttctctgcaactccctcctgggcctctgaggttct

SEQ ID NO: 871946 - DNA, 120 bp, Artificial Sequence
  ENSG00000267014_34 (sequence is synthesized)
acgagaccctgagctagccctggggagggagacagcagctttgcagccgttatcctcaggaagccctgagcgctgagaggcactgttacagaaccgaactggggtccactcgctagggag

SEQ ID NO: 871947 - DNA, 120 bp, Artificial Sequence
  ENSG00000267014_35 (sequence is synthesized)
accgagttttcacagcaataaaaaggaaagtgtttatttgcagggcaccaagcaaggaggatctggaagctactgctcagctcctgacctcccacatggcttgagggtgaaggtgtttaa

SEQ ID NO: 871948 - DNA, 120 bp, Artificial Sequence
  ENSG00000267015_0 (sequence is synthesized)
agggtgcctatgagttaataattaccttctggatagtttgggagggtaattgccttttatacatacactcccttaacatacaacgataatgattaagaattttcttgtaattcccacgag

SEQ ID NO: 871949 - DNA, 120 bp, Artificial Sequence
  ENSG00000267015_1 (sequence is synthesized)
gtgattatttaacagagcaacaggccagggtaggctggcgtggggagcagcgctgctgagagtcactgactcgcagcgttacggacacggctctgcagaacgaggcttgcacccaacaga

SEQ ID NO: 871950 - DNA, 120 bp, Artificial Sequence
  ENSG00000267015_2 (sequence is synthesized)
agctcctcatcgccacacatcatcgccacacatcggacttatattcatttacgggacctaagagtatgacacatcatcatgacaaagttgaagaagaactagcactgcggcaacctgagt

SEQ ID NO: 871951 - DNA, 120 bp, Artificial Sequence
  ENSG00000267015_3 (sequence is synthesized)
gggattcaggaaacgcagtgaggtcccgctgaaaatcaccttcgagtttcagaggaacatctgaagtcagactttacataatgtaaagaataaagagcaaaactcgagaaagtcatataa

SEQ ID NO: 871952 - DNA, 120 bp, Artificial Sequence
  ENSG00000267016_0 (sequence is synthesized)
cctggttaggacctgggatgccggaaatctgagactctgccttcccctcctgagacactctgaaaccctgcttagaaatcgagcacaatggctctggcctcccagagaaagacacggatt

SEQ ID NO: 871953 - DNA, 120 bp, Artificial Sequence
  ENSG00000267016_1 (sequence is synthesized)
tgcaaaggcaaagagctgcatttttctccgagctggagctctttccggtttccactatggggcttaaacaaaactgcagctttacagttcccctgttggtgttttctccttcttggtgac

SEQ ID NO: 871954 - DNA, 120 bp, Artificial Sequence
  ENSG00000267016_2 (sequence is synthesized)
taacaaggtggaagagccaacaagaaccctgtgtgctcctttgcaggacctggaagggacaggtggtgccctgccccaggagtcctcctgctcaggagcctgggagttgaggaggtctgg

SEQ ID NO: 871955 - DNA, 120 bp, Artificial Sequence
  ENSG00000267016_3 (sequence is synthesized)
aagcagtgggcccacagtgccatcgccttgggaacccacagtgccttggatgtggctccctcggtcctagctttgcaggcagcctacctggactgcacccacctcccagaagagctgctc

SEQ ID NO: 871956 - DNA, 120 bp, Artificial Sequence
  ENSG00000267016_4 (sequence is synthesized)
gagaggcctatgaaagcttatgacgcattttccaagtgcacaccccagcaacttcaaatgctttctgaaactctccccaggaaaaagcagtgtgcatggaccgctacctggtcacacctt

SEQ ID NO: 871957 - DNA, 120 bp, Artificial Sequence
  ENSG00000267016_5 (sequence is synthesized)
gagatagccactttcatcctctctggaacaccgcctggggggatgcagcacagggcatccaagcaacccctgagctcagggtagagacaccaggaagcagcaggcaggccgtgaccccgc

SEQ ID NO: 871958 - DNA, 120 bp, Artificial Sequence
  ENSG00000267016_6 (sequence is synthesized)
aggcctgctccatggctcctgctgcctgcaccatggcatgaagctcagatgcatctctggacttggggttctgaccagatggagccaccaatcctctgaagaatgaaacacacaggggtc

SEQ ID NO: 871959 - DNA, 120 bp, Artificial Sequence
  ENSG00000267016_7 (sequence is synthesized)
acccttgcctcctagctgcagggaatgacgaccacccagcccttcctttcctcaaatcttctccaggcttctgtgcatggctctgctgaccttcctcctgtctctggctattctctcagc

SEQ ID NO: 871960 - DNA, 120 bp, Artificial Sequence
  ENSG00000267016_8 (sequence is synthesized)
ctctgccgtctcctcctccgccctcacccacggagtcagtcctggtgccttgagagcccctctccctagctgacttcacccagcccctgagcattcaatgccaacaatgccaccttcttt

SEQ ID NO: 871961 - DNA, 120 bp, Artificial Sequence
  ENSG00000286499_0 (sequence is synthesized)
acatgtctaagtatagagacatggtgaagtgcctcctaacagagcagaagtgaccccatcgaagactacttcttggggaggatttcacacagttcatcatcaagcaaagatcattgcctt

SEQ ID NO: 871962 - DNA, 120 bp, Artificial Sequence
  ENSG00000286499_1 (sequence is synthesized)
ctgagcagaagagactctaaataaatatagaagaatagaaatctgaagtggaaagttgtagccagagcatgcatatgatactggcagatcttttctaaagagaaattcattttccataaa

SEQ ID NO: 871963 - DNA, 120 bp, Artificial Sequence
  ENSG00000286499_2 (sequence is synthesized)
tgctttacaatggatcctgacgataagacatcttgccaaatgatttgctgctcatcataaagatttcccagtaaataaaatttccaggctcatctcctgttattgcatgaatgttttgga

SEQ ID NO: 871964 - DNA, 120 bp, Artificial Sequence
  ENSG00000286499_3 (sequence is synthesized)
actacatctcaggaaataagtgaggattgcaaattatgactttcaggttggaaatccagcaatgaactttgttgacttggtctggccatactggccatggcttagcatttgacagaactt

SEQ ID NO: 871965 - DNA, 120 bp, Artificial Sequence
  ENSG00000286499_4 (sequence is synthesized)
tagggtctacagtttctccgcaaaggaagttctgagcaatggaagcaaggctgggctgagcaaaaaacttcctaaagtgattttggtttcagaaatctgatttattctctcagaatcaca

SEQ ID NO: 871966 - DNA, 120 bp, Artificial Sequence
  ENSG00000286499_5 (sequence is synthesized)
cataacattctcagctccgagagagtgtgcgcatcactttagaaagaactcttgactggaaagcagtagatgtaggttcaagtttagttccccagtttggtaggtgaggggaacccctcc

SEQ ID NO: 871967 - DNA, 120 bp, Artificial Sequence
  ENSG00000286499_6 (sequence is synthesized)
aaaaacaatgcatgagaaagaatagaaagagcattggacatggagcctctgtagggctgaattcctgctcaccacttactcctgatactgggaagattttcaacgtctccaagactgggg

SEQ ID NO: 871968 - DNA, 120 bp, Artificial Sequence
  ENSG00000286499_7 (sequence is synthesized)
tttttcatttgcaaaaggcagattataatctcttttgggatggttatgagcatgttaaataagataatttttaaatgctcccagcagagtgaattgaaaatggaagatgctgaacaccaa

SEQ ID NO: 871969 - DNA, 120 bp, Artificial Sequence
  ENSG00000286499_8 (sequence is synthesized)
catattaattagttaatatttatttattaagcacttaatatatcccaggcactgcgcttagtgcttcacatacattctgtcatttaatcttcatgacaaccttaggagagggctgcagga

SEQ ID NO: 871970 - DNA, 120 bp, Artificial Sequence
  ENSG00000286499_9 (sequence is synthesized)
acttggagtactacatgtaataacatactggtcatcactcttggcaaatattgaaagcttcacttggtccctgacacctaaaggataaagaagagcttgatgatctgatgtgaggtcttt

SEQ ID NO: 871971 - DNA, 120 bp, Artificial Sequence
  ENSG00000286499_10 (sequence is synthesized)
tgcccatctgcaacacctctttctaaatgatgttgggtaagaatctggttttattttcctccataaagaaagccacccagggatgtgttggagcagcttgtgccatgtggcaagagccaa

SEQ ID NO: 871972 - DNA, 120 bp, Artificial Sequence
  ENSG00000286499_11 (sequence is synthesized)
ttgttaaatattgaggaattttgtaagctggttgctaaattgttggcagtttgaaataggccgtgctgggagtttttataccatgggaattatcaataaatcaagtattttttcctttag

SEQ ID NO: 871973 - DNA, 120 bp, Artificial Sequence
  ENSG00000286498_0 (sequence is synthesized)
agccactgtagcaaataacagaacccaaagagggagtcatgggaatctcaacttgaagccagtcgatcagaacttccggaagcccagacttgagaccgggcttaatatacacaaggccat

SEQ ID NO: 871974 - DNA, 120 bp, Artificial Sequence
  ENSG00000286498_1 (sequence is synthesized)
agagctagacccaggccatggaggagcatggaggaccgcaattctaaaagctttgccagcttaaaagtaagtgcatccaggaagcagctgaaacttcacgcagatttgtggatatagaca

SEQ ID NO: 871975 - DNA, 120 bp, Artificial Sequence
  ENSG00000286498_2 (sequence is synthesized)
tgaagggaatatggcttcctttgtagtgagttctgtctgcagatggacactcaaaccatgaaaagctcagcctacgccgggcagtcgacatcgtggctccggccagcaattcttccacta

SEQ ID NO: 871976 - DNA, 120 bp, Artificial Sequence
  ENSG00000286498_3 (sequence is synthesized)
gatttaatgagagcgtggaagtccctgaacaacctgaaggcacatttgaggagaagcacacactcagtcagggaatggagccagaatttcatctgcttgagatggaagtgaagaaatttc

SEQ ID NO: 871977 - DNA, 120 bp, Artificial Sequence
  ENSG00000286498_4 (sequence is synthesized)
tggagactggagtggattataggagaaagtaccagggtttagcctgtgcttaaaatggaaattcctcgcattctcatttcagcttctctgagggaggaagggcattcctgaaacacagct

SEQ ID NO: 871978 - DNA, 120 bp, Artificial Sequence
  ENSG00000286498_5 (sequence is synthesized)
agtgatgcacttttaaacagtttaggccatcgctaataagcttcaagtctcagcttttctgtttgtaagttaaaaatttggaggtaaaaaattagtgctttcatttatagtacatcacaa

SEQ ID NO: 871979 - DNA, 120 bp, Artificial Sequence
  ENSG00000286498_6 (sequence is synthesized)
tatttccaagaaatagcccgacagggagaaactttcctacagtcacgaaccatttgactcctacaactccatctttggaggctgccagcatgttctgagtccagggcagatccgatgaat

SEQ ID NO: 871980 - DNA, 120 bp, Artificial Sequence
  ENSG00000286498_7 (sequence is synthesized)
aattttcctgcttctcatcctagaatatctgcctgcctcacaggatcaagtccaagccccaaacctgccattcagggacctcaattctgcatcctacctactgcttcagctgaggctcct

SEQ ID NO: 871981 - DNA, 120 bp, Artificial Sequence
  ENSG00000286498_8 (sequence is synthesized)
gcgtgcggtgcctggaacacgagcagcaggggctgcctccgcacaccggcgcgcgcacacccggtgtctttgctcatgcagtcctggggcctaggacgcctcctcctgctcttccttgcc

SEQ ID NO: 871982 - DNA, 120 bp, Artificial Sequence
  ENSG00000286498_9 (sequence is synthesized)
ttgctcatatctgctcattcttcaattcttggctggtatcatctcttccaggaagcctcctcctccgggtctgtgtgccctgatagcttgcttcctctatgttattttattaaaaagatc

SEQ ID NO: 871983 - DNA, 120 bp, Artificial Sequence
  ENSG00000263707_0 (sequence is synthesized)
tgtggccattaaactgatcctgcaagacctgacatgagccgtccaaggaaaaggtagcagcccttgggtctaaccaggcaaaggtcaaacaaaaggccgaagtcaccacccgaaaggaac

SEQ ID NO: 871984 - DNA, 120 bp, Artificial Sequence
  ENSG00000263707_1 (sequence is synthesized)
agcagagaacacttggcaagctcatggacgctgctcctggcggcgttcctagggcccgtgatgtatgtacacgcgaggcaggatgggcggtgtcatgtcagagggcggtgctctcagact

SEQ ID NO: 871985 - DNA, 120 bp, Artificial Sequence
  ENSG00000286495_0 (sequence is synthesized)
gtgcctagccggcccccacaatcagcacggctgctctgacgtagagggccacctggcaagacactgggggaaacctccagcaaagagccagaaaggaactgaggtcctccgtccgacagc

SEQ ID NO: 871986 - DNA, 120 bp, Artificial Sequence
  ENSG00000286495_1 (sequence is synthesized)
ctgtgaagaactgcagcctgccaataaccacgtgagtttagaactggatcctactccagttaaggcttgaaatgactgtagcttcagccaacacctgactgcagcctcatgagagaccct

SEQ ID NO: 871987 - DNA, 120 bp, Artificial Sequence
  ENSG00000286495_2 (sequence is synthesized)
aacgcagaggaccctgctgtgcataactggaaactatggtttcttagcaggatggctgtgactcaggatctctcataaaatttaagtcaatctattggctgaggctgctgtcatctgaag

SEQ ID NO: 871988 - DNA, 120 bp, Artificial Sequence
  ENSG00000286495_3 (sequence is synthesized)
cccatggctattagctggaggcctgcattcctcaaaggctcttggctagaggcctcagttaattcctgaccatacgggcctctccacagggctacctgagtatcctcaagacatggcaac

SEQ ID NO: 871989 - DNA, 120 bp, Artificial Sequence
  ENSG00000286495_4 (sequence is synthesized)
tggccttccccagagacagtgattcaaaaatgagaaagagaggctaagatggaaggcacaatacttttttataaattagcctttaacatctttcagaggtggaacttaattcctctccct

SEQ ID NO: 871990 - DNA, 120 bp, Artificial Sequence
  ENSG00000286495_5 (sequence is synthesized)
ttatgtgtgggctggatttagtgagttgattctcatagacagaataaaacaaagcacaagtgtttattttttttcttgtacttcctgtagttttacctttgtgaatattgatattgtgtt

SEQ ID NO: 871991 - DNA, 120 bp, Artificial Sequence
  ENSG00000286495_6 (sequence is synthesized)
attcagtgcttctatctgcactgttaattgcactttttaacaaaattgaaagcccattttgacttatttaatgctttgtcctgtattcaaccttgtctgatattaaaatgactaacttgt

SEQ ID NO: 871992 - DNA, 120 bp, Artificial Sequence
  ENSG00000286494_0 (sequence is synthesized)
agggaattttctgaatgaatattcaactgaaaatatttaaatagaaaagaagatgagtatgctgtgtgtgtatgtacgaggagatgcaggtgccctttcctgcattgcctgttatgctgt

SEQ ID NO: 871993 - DNA, 120 bp, Artificial Sequence
  ENSG00000286494_1 (sequence is synthesized)
caaacctcccatttgggcaggcctgaggagagacagctcactcagtatcagcttgggcagcttgaagaccagactgaggtcatctgaaggctctctattaaatttttttaatagagataa

SEQ ID NO: 871994 - DNA, 120 bp, Artificial Sequence
  ENSG00000286494_2 (sequence is synthesized)
aaatgtgagtatcccagaaggaagcttttatgacagcatagaaagtcacatagcatcaattctgttttagtcacagaccctcatagacccaagatccttcaaagaaagaatgagtgttac

SEQ ID NO: 871995 - DNA, 120 bp, Artificial Sequence
  ENSG00000286494_3 (sequence is synthesized)
atattggatggggttgcagtttgcttagtccctagcttagttaggtccaagttcttgtcaaacaaccaataagaataagggacatggacaccagagaatgagtagaataggatttattaa

SEQ ID NO: 871996 - DNA, 120 bp, Artificial Sequence
  ENSG00000286494_4 (sequence is synthesized)
gcaaattgaaagctcttagcaaaaagagggggcctgaaagcaagttgccagaaatggggctgagttctgtgtttttgatatggcagaagtcaggatgttttctgtgggtttgtgacttca

SEQ ID NO: 871997 - DNA, 120 bp, Artificial Sequence
  ENSG00000286494_5 (sequence is synthesized)
tgtttgttattacccatgaatacctaagcaaaaccgagggagggctaacacaacaatactaatgccatgttaatgacattataatgagctgggttaagttaagtacatttaggttgattt

SEQ ID NO: 871998 - DNA, 120 bp, Artificial Sequence
  ENSG00000286497_0 (sequence is synthesized)
aacgttttccctggatctttggggttttttttatttctgaagcctcctgagtcacaaaaaacttttaaaataaatttgttatgcttttctcttgttaatctgtcttttattataggagcg

SEQ ID NO: 871999 - DNA, 120 bp, Artificial Sequence
  ENSG00000286497_1 (sequence is synthesized)
tccaccatgtcccttgcagtcttctcttctattcccttcaagagtgccgcttcctctatctccaaaacttcccattgctgaggtccagaatgtctacttttttgtcctctgcaacattcc

SEQ ID NO: 872000 - DNA, 120 bp, Artificial Sequence
  ENSG00000286497_2 (sequence is synthesized)
tctagtgtctcctgcagctttgacgataaacaatcgccttttgcaaatgtgtcccacagctccacgtctccaggtgctacacaattagatgcttccagagggcagaacgtgctagatgga

SEQ ID NO: 872001 - DNA, 120 bp, Artificial Sequence
  ENSG00000286497_3 (sequence is synthesized)
ctgtgacatcgagttgacctggcttcacatctcagcactgcctctcatttaccggaggatactgggaaaattgtgtaacctctctgagtcttggtttagatatcagtaaaattgtgataa

SEQ ID NO: 872002 - DNA, 120 bp, Artificial Sequence
  ENSG00000286497_4 (sequence is synthesized)
taataagaacccccagctaaggttgttataaagtgaaacgatggacataatgcaaataggaggcttattcattcattcctttatttatttgctcagcaagcatctatggtgcccctccta

SEQ ID NO: 872003 - DNA, 120 bp, Artificial Sequence
  ENSG00000286497_5 (sequence is synthesized)
gtgatattgcgaaagccctgagtcttttcacctcaacacatcttctaaatgtgcacttctctatttttgccttttgctcgtcttccagtcttctaggttcaagcccataattcttggtaa

SEQ ID NO: 872004 - DNA, 120 bp, Artificial Sequence
  ENSG00000286497_6 (sequence is synthesized)
tgctaccttctctcagctcctgtattccaaccatcaagtcttgcttgacttgctcatttttttctttctttttcccaccatcctaggaccaagcccatgtcagcacaaacctggatcctt

SEQ ID NO: 872005 - DNA, 120 bp, Artificial Sequence
  ENSG00000286497_7 (sequence is synthesized)
ctttcatgccaatcctcaagttttgactttatttcagttggaaattggcatccagggaagtgtttgaatagggaaggaaaaggatcaaagtggtgcttttggaagtttaatttttgctcc

SEQ ID NO: 872006 - DNA, 120 bp, Artificial Sequence
  ENSG00000286497_8 (sequence is synthesized)
acatgagttccagtgggaagtggccagtggcaaggagacaagtaaaaagttttaacaatttaaatataaactgataaagacttaaagtaaggtgatgctattaggcatggaacggagaaa

SEQ ID NO: 872007 - DNA, 120 bp, Artificial Sequence
  ENSG00000286497_9 (sequence is synthesized)
gaggaggctgcaagaggcattttgaaggaacctgtgtgggagtgaattaggtttgaggtgtgaagataactccacaatttagagtcttggtaactaggagactaatgatacctgtttcac

SEQ ID NO: 872008 - DNA, 120 bp, Artificial Sequence
  ENSG00000286497_10 (sequence is synthesized)
aacttcagtagcactttgtgctgctcacgtgtgtcttttcacctaccatctggtgtatgttattttttttaatgaataattgtctttctctacaaattggttataaactccgtaaagcaa

SEQ ID NO: 872009 - DNA, 120 bp, Artificial Sequence
  ENSG00000286496_0 (sequence is synthesized)
cgcgcccctcgggaggctgtagtcctgcccccggcgcggccagcccgcgctcccgcacaccccgcccgctcgcccgcgcgtgtgtacgtgcgccggaggcctggagagaccggagtttaa

SEQ ID NO: 872010 - DNA, 120 bp, Artificial Sequence
  ENSG00000286496_1 (sequence is synthesized)
accggagtttaacgcccagtctttctttcagggtccccctcctggatgtggcaggcctcccagattcccctggaagttctgacttgcccatacacacaaggacctcaggaaacccaatag

SEQ ID NO: 872011 - DNA, 120 bp, Artificial Sequence
  ENSG00000286496_2 (sequence is synthesized)
tgactttcctcagatctgtgaattccttcttctggaaaataaccttctcaacaattgtctcacatggagttccatcagtgagtcccaccgggtctacctagaagctgtatccagaatctg

SEQ ID NO: 872012 - DNA, 120 bp, Artificial Sequence
  ENSG00000286496_3 (sequence is synthesized)
gtcactgcacaacatctcctctgcttcctccctgctttgaggcaccattgaatctctcttggttgaaggcagtaaccttctaactggtctccgcttgcatcccttcccacctatgtctgt

SEQ ID NO: 872013 - DNA, 120 bp, Artificial Sequence
  ENSG00000286496_4 (sequence is synthesized)
tctcaacatagctgccagcgtgatcacggcccttctctacttaaaatcctccaaaacactccatgttgcataaagggcaagatgtctttaaaatgcgaaagaggcacttctggagcactc

SEQ ID NO: 872014 - DNA, 120 bp, Artificial Sequence
  ENSG00000286496_5 (sequence is synthesized)
tctgccacatctgacctcaatttgtgcccctttccgtcttatttactctgttccagccacactgccctcctggattctgtaaacattccaagcatgctgccacctccaggcatttgcact

SEQ ID NO: 872015 - DNA, 120 bp, Artificial Sequence
  ENSG00000286496_6 (sequence is synthesized)
ggctgatccctctgctttgaatgctcttgctttactccaatggcatcctctcagtgagggctactctatccactttatagaaaaccatgtaccttccctgtactctgcttcctccttaca

SEQ ID NO: 872016 - DNA, 120 bp, Artificial Sequence
  ENSG00000286496_7 (sequence is synthesized)
ctgatttacttgcctttcagagcatgtgtctccttctaacatactgtacaatttatctatgtttgatgtctgtctcctagaaaaatttgagttccataaggtcatagatttttcttcttc

SEQ ID NO: 872017 - DNA, 120 bp, Artificial Sequence
  ENSG00000286496_8 (sequence is synthesized)
tgttcacactgctatatcctcaacgtctagaacaaactctgatatatagtatatatcagaatatatataaattctgatatataggtatccagtaattatgtgctgagttactgggtgatt

SEQ ID NO: 872018 - DNA, 120 bp, Artificial Sequence
  ENSG00000286496_9 (sequence is synthesized)
actgggtatactggaagaacccagtcaacaacctcgaactgaactgaattagcgtcaggtttccctgtggatggaaatgatctgctcttccaagctgtttcctatgtgtcataatgagaa

SEQ ID NO: 872019 - DNA, 120 bp, Artificial Sequence
  ENSG00000286496_10 (sequence is synthesized)
agactaattcctcttcctaacacacacccacttcacagaggaatgctttgagacgtaattaaatggtaacgtggagaaagcattttgattttctaagagaagcactttattaatttgagg

SEQ ID NO: 872020 - DNA, 120 bp, Artificial Sequence
  ENSG00000286496_11 (sequence is synthesized)
ttttattgtgcgaaagaattataagtgacacaggggcaagtacagagatgagaacaatgttaaagggattatagtgttcacaatactacattggaattgtatgagataattgagttaaga

SEQ ID NO: 872021 - DNA, 120 bp, Artificial Sequence
  ENSG00000286496_12 (sequence is synthesized)
ttgatataagcagcatggaataaagcaaaatagtttgggaaatcttaccccaaatgacaagttttaaagaaatagcttcttttttgtaatcaactctcaattatttacagcacaatatcc

SEQ ID NO: 872022 - DNA, 120 bp, Artificial Sequence
  ENSG00000286496_13 (sequence is synthesized)
tcattaatgaattattcttcgcttttactatccttttgtccagttcgtggccatttttcttctaattagaaattccatactaatgtcagagagttgataaagaaaaaagaagtaaaaatt

SEQ ID NO: 872023 - DNA, 120 bp, Artificial Sequence
  ENSG00000286496_14 (sequence is synthesized)
aagatttgtcttcttcatgagtttattcctcgctcattccagttgacatgtttaaattctgatctggagtatttccaaaattacccaattttaaaatgtcatattctttttaattaactg

SEQ ID NO: 872024 - DNA, 120 bp, Artificial Sequence
  ENSG00000286496_15 (sequence is synthesized)
ctcgcccgcgcgtgtgtacgtgcgccggaggcctggagagaccggagtttaacgcccagtcttcttcctaagttggagaaatgggaaacgatttgaaagctgccaaccggaggtgaaaat

SEQ ID NO: 872025 - DNA, 120 bp, Artificial Sequence
  ENSG00000286496_16 (sequence is synthesized)
cttgccacttgtgaaactgaaggaacatccccaaggcctggcttctccttttaacagaaggtgctcagaggaactttcctcttgcccactgccctcatcctctagcaattttcaaagagc

SEQ ID NO: 872026 - DNA, 120 bp, Artificial Sequence
  ENSG00000286496_17 (sequence is synthesized)
ttctgaggtgctgatcctcctagctatagtcttcgtactgctgccacaaattcttctgtaaggattagaatgacataaaggagacagatcacttttgtctcggtggtagtaaagcaacct

SEQ ID NO: 872027 - DNA, 120 bp, Artificial Sequence
  ENSG00000286496_18 (sequence is synthesized)
gtgcctctggctttcagggggaagggctgggccgctgtaaatctagttttccttcctctcctgggccagctgtggaggagagggagggagagaaggagaagataatcaagatcagctgta

SEQ ID NO: 872028 - DNA, 120 bp, Artificial Sequence
  ENSG00000286496_19 (sequence is synthesized)
aatctagttttccttcctctactgggccaggtgtggaggagagggagggacagaaggagaagataatcaaggtcagcctttcctgaccccttggtctaagcagactagaccttattggag

SEQ ID NO: 872029 - DNA, 120 bp, Artificial Sequence
  ENSG00000286496_20 (sequence is synthesized)
ataacacttctactcaaacaggggtccatgtggaccaatgtattaccccagccccatgcaggtcttgtcaggtttctctcaaggaacaaatatttatctaacctagcccctgttccaagt

SEQ ID NO: 872030 - DNA, 120 bp, Artificial Sequence
  ENSG00000286496_21 (sequence is synthesized)
actacaggagaaatatcattgtcccaaactacacacactctagtctgacctgtctcccactccaactccccacatctttccactgtagcctctggaacttagaatcttcttcagcaaaat

SEQ ID NO: 872031 - DNA, 120 bp, Artificial Sequence
  ENSG00000286496_22 (sequence is synthesized)
tctcttcgttttcgacttctcgaaatatttctttaacgtttttgctctcgctgaaatctacttatccctcctttaacccctctctcttccctcttgttcagtctgctcctgagaagttga

SEQ ID NO: 872032 - DNA, 120 bp, Artificial Sequence
  ENSG00000286496_23 (sequence is synthesized)
tgtgacttgcatgacttggattaataaatttgcaaatacaactgggtatgctcactcagtttgaccattttcctcttaagagagaaccgcctgaaggaagcagtcttcctcctcctttgc

SEQ ID NO: 872033 - DNA, 120 bp, Artificial Sequence
  ENSG00000286496_24 (sequence is synthesized)
atctctgggtaaagtttccatcctcataggaagctgtacccaagctctatatatagagagcctatatatatatatagctctatttatcatatatataattggctctatttaatttatata

SEQ ID NO: 872034 - DNA, 120 bp, Artificial Sequence
  ENSG00000286496_25 (sequence is synthesized)
tataaattatacacacacataaacatacatatatataatatctcttgacaccctttccacttattgccaccctattttccttcttccctttatgccaaaatctttccattccatgttgaa

SEQ ID NO: 872035 - DNA, 120 bp, Artificial Sequence
  ENSG00000286496_26 (sequence is synthesized)
cctgttccactttggcaaatgacctccatggtgctaagctgatggtcaattctcaattgtcatatgaattgacttttcagcataaattaacccggacaccactctctattatttctcttt

SEQ ID NO: 872036 - DNA, 120 bp, Artificial Sequence
  ENSG00000286496_27 (sequence is synthesized)
ctgcattactggctgctttttctcactctcattgcttgttcctctttgtctttttgacccccaaattctgaagcatcttggatcttagtcattaagcctcttctcctctcaatttacatg

SEQ ID NO: 872037 - DNA, 120 bp, Artificial Sequence
  ENSG00000286496_28 (sequence is synthesized)
cactgtacctaaagtgacccaattcaggctcatacattttagtatttcattattaaacactaataacttccaagtgtatatttttaaccaggatctatcccctgaaatccagtctgtcaa

SEQ ID NO: 872038 - DNA, 120 bp, Artificial Sequence
  ENSG00000286496_29 (sequence is synthesized)
atgctcactttacatctccacttgaatatctaattatgcctgattcagcttgaagatagcaaggatattgtcactgcctcagatcctaggcatagtatagttgctggtgcatagtagatg

SEQ ID NO: 872039 - DNA, 62 bp, Artificial Sequence
  ENSG00000286496_30 (sequence is synthesized)
tggccaggctggtctcgaactcgtgatcccaggtcattatgtattttgtaatggattttttt

SEQ ID NO: 872040 - DNA, 120 bp, Artificial Sequence
  ENSG00000286496_31 (sequence is synthesized)
agctatgtattttgtaatggatttttttgcattatcttatttaattcttactaatgaccctatagttataatagttatctcatttacatcaatacaacaatgaggaaggagaggatcaga

SEQ ID NO: 872041 - DNA, 120 bp, Artificial Sequence
  ENSG00000286496_32 (sequence is synthesized)
aaggttgggtcaacttcccaatacaaccaacatagccaagaagtggcagtggtggtttgtactctatcgactgcattagctggaacaatgtttctcaggatcctcttgcccgtatgcatg

SEQ ID NO: 872042 - DNA, 120 bp, Artificial Sequence
  ENSG00000286496_33 (sequence is synthesized)
taagtgtatgcatgtaagtacggttggcccaaagacgaattcttgcaagatttgggaaacagagtgaaacagtatctattcctctctcaaggtctttgtagtttgctgtgacaacacatg

SEQ ID NO: 872043 - DNA, 120 bp, Artificial Sequence
  ENSG00000286496_34 (sequence is synthesized)
cagacacctggagggttctagcatgtcctggccctcccccacttcacacccagatcttccaaatttccagcacagctgatcaacagtagccacacacccatcacaagggccttaacatgg

SEQ ID NO: 872044 - DNA, 120 bp, Artificial Sequence
  ENSG00000286496_35 (sequence is synthesized)
ttccattatattcataatggttccactttcatgaaagagtggctggcagagctcaaatccaagacttctgggttcttttcactattctacaagaaatccaacttaggtagataagatctt

SEQ ID NO: 872045 - DNA, 120 bp, Artificial Sequence
  ENSG00000286496_36 (sequence is synthesized)
gagacaaatagctgcatgtaagtgaaaaactgaatgacagtgtatgaactactgaaggagagattgacattcaaaccgggctcttcaaggactagcaggatatctactatatgaagggtg

SEQ ID NO: 872046 - DNA, 120 bp, Artificial Sequence
  ENSG00000286496_37 (sequence is synthesized)
aaggagtttctattcagacacaaagggaagaaatgctgaaacccattaggaaaattactagtaataaaaacatcatgtattgaattcctgctgtctctaaccatattaaaaatagtctta

SEQ ID NO: 872047 - DNA, 120 bp, Artificial Sequence
  ENSG00000286496_38 (sequence is synthesized)
ccatagctgacaaaacttccctataaggtatgtaagacaccaatgtcctagttaggaaacttggccatgatcgcacaccttctaaatatcagagtcttgactcaaatatgcctgtgtctg

SEQ ID NO: 872048 - DNA, 120 bp, Artificial Sequence
  ENSG00000286496_39 (sequence is synthesized)
actgtaaagccctgtgaaaaattatgcacaaatgcctcctagcaacagtatgagtttaaaaaagctagagttctcccatcaaggtgcctctcattctattttctccctcatctgccatcc

SEQ ID NO: 872049 - DNA, 120 bp, Artificial Sequence
  ENSG00000286496_40 (sequence is synthesized)
ttccacacacctacctctcaccgtgctctctgggcagttatgactcaagattgttcgtgtctaattactgttgccaagcaaacatgaagaaggaaggttcaagaaatagcatatttcaca

SEQ ID NO: 872050 - DNA, 120 bp, Artificial Sequence
  ENSG00000286496_41 (sequence is synthesized)
atttttctactgttatttgttagtcctcattagactactcagaatttgtgttactgtatattggaaacaaaattatgtctatcaccttaacgtttctacgacttgtatttttcaaatata

SEQ ID NO: 872051 - DNA, 120 bp, Artificial Sequence
  ENSG00000286496_42 (sequence is synthesized)
aacttagtgaattagactaggtcgtctccaaaaacccatcataagattcaacatgttctcttttgtgctttctttctagataatggagtcctttatgttgtaaacaagaataaaaaagaa

SEQ ID NO: 872052 - DNA, 120 bp, Artificial Sequence
  ENSG00000286491_0 (sequence is synthesized)
agacatcacctcctgagtcaggcactgccaggtgagaggctcagctgcgtctctcgggggccttaaagcttctttttttggaaagtggcttttatggtcgggccacggtataatttgccc

SEQ ID NO: 872053 - DNA, 120 bp, Artificial Sequence
  ENSG00000286491_1 (sequence is synthesized)
agtgagggcagctgctgaggaatgcaggggaggaagaacctgagacagcgccacgttcctggtaatatagtcccatgatcccacacaaagaagattcctggccgggcacaatggctcaca

SEQ ID NO: 872054 - DNA, 120 bp, Artificial Sequence
  ENSG00000286491_2 (sequence is synthesized)
cctctaatgccagcactttgggaggccgaggagggaagatcacttgagctcaagagttcgagaccagcgtgggcaacatagtgagacaccattcctacaaaaataaaaaataaaaaaatt

SEQ ID NO: 872055 - DNA, 79 bp, Artificial Sequence
  ENSG00000286490_0 (sequence is synthesized)
aacgtggctcttctgccagttcattcggcgggtccccgactccacagcatggactgagtattgctctgcagcccaggcc

SEQ ID NO: 872056 - DNA, 120 bp, Artificial Sequence
  ENSG00000286490_1 (sequence is synthesized)
ctcgaactcctcacctcaagtgatccacttgccttggcttcctaagaagtgtaagtccttgtccatgctctggatctgtgccaattcctacagcttcttctggttggcatccaaagccct

SEQ ID NO: 872057 - DNA, 120 bp, Artificial Sequence
  ENSG00000286490_2 (sequence is synthesized)
cagttctgacataaagtatttatgggatagataagatcagttcaagatcataaagtattgaaaggtggatatactagaggtagacaagaggtttgggaggataaatcatggcttcccgct

SEQ ID NO: 872058 - DNA, 120 bp, Artificial Sequence
  ENSG00000286490_3 (sequence is synthesized)
gttcatttccctttgtccaatgccattaatatgcatgtgatacccagagagtgaaagatttatttcccattcagcttaactacacaaacatttattcattaagcacctattttctgatac

SEQ ID NO: 872059 - DNA, 120 bp, Artificial Sequence
  ENSG00000286490_4 (sequence is synthesized)
gttccatagcaggcagtcagtgaaatgaggtatttggaaaaataattttgtttctaatacagtaagaaattagtagttcgactttcctagcatgacaactttgtattaatacctgtgagt

SEQ ID NO: 872060 - DNA, 120 bp, Artificial Sequence
  ENSG00000286490_5 (sequence is synthesized)
tattaggtagaatatagagatgaatgtgacatagtcaaaaagcttgaggtcttctggaagagacaaaatatgtgtttattcattcaataaatatttattgagcatttattatgtacctcc

SEQ ID NO: 872061 - DNA, 120 bp, Artificial Sequence
  ENSG00000286493_0 (sequence is synthesized)
agtcaacctgtcagtcaacaggcagagggctgcattccttcgttcgtatgttccttggttcattcattcagagacctccgaagtgtttcttgaggaaatgtggctgcagaccctagaaga

SEQ ID NO: 872062 - DNA, 120 bp, Artificial Sequence
  ENSG00000286493_1 (sequence is synthesized)
ctaaggttgccgagaagtagacagcacctctagatcctagtcaacatctctacaggcttgaagtctccccagagggcaaggttggaataaatctgaagcctgtggcttgcctgggagctg

SEQ ID NO: 872063 - DNA, 120 bp, Artificial Sequence
  ENSG00000286492_0 (sequence is synthesized)
ggatttccagccacgggtagtttaccgagagaaaaagctgcgggcgtcgctccctcttttacataagaaaggctaagctctaaaaggcagacaacttcttcctggcccttcggagaagct

SEQ ID NO: 872064 - DNA, 120 bp, Artificial Sequence
  ENSG00000286492_1 (sequence is synthesized)
ggaacctaggccctgagtcgtgaggaagaggaaagactacatggggtcactatgtaaggtgttcctggtgacagctcctgctgaggacccagctgacagcaagcaccaacctccagacaa

SEQ ID NO: 872065 - DNA, 120 bp, Artificial Sequence
  ENSG00000259023_0 (sequence is synthesized)
gagaacccagcagagagaggacggaggtgaacggcaaaagggtcagatgtctccaacctgccatgggctgggggtacagagagaaattggtgatggggtctgcctcccgtgggagaggca

SEQ ID NO: 872066 - DNA, 120 bp, Artificial Sequence
  ENSG00000259023_1 (sequence is synthesized)
gataccacagtcgcaaacccactgtgtgcctggcgcccttgcggtcatcccagatttttgcccacatccctctgttccacccagaggccacctgcatgcaggcatggtggatggttgctg

SEQ ID NO: 872067 - DNA, 120 bp, Artificial Sequence
  ENSG00000259023_2 (sequence is synthesized)
aagcaggcccagctccatgatgatgcctctctccagagacctcctgacctcctgacctgcacagcccgggagaccacagcccacagccgctgccccaggtgtccacaagcatctcagccc

SEQ ID NO: 872068 - DNA, 120 bp, Artificial Sequence
  ENSG00000259023_3 (sequence is synthesized)
ctccacagcccacgcatctcctctttcattggctcatggggagtgaaggacaatgtctgaattaaatgccgtgctttaaactgaaagggaaacttagcaaataaatgagagtaacaacac

SEQ ID NO: 872069 - DNA, 120 bp, Artificial Sequence
  ENSG00000259023_4 (sequence is synthesized)
gagaacccagcagagagaggacggaggtgaacggcaaaagggtcaggtgggagacaggcagatgaggctggcgcaggggctggggtgaagtgtgtgagggagcccctggccgctgctcac

SEQ ID NO: 872070 - DNA, 120 bp, Artificial Sequence
  ENSG00000259023_5 (sequence is synthesized)
ctgccctgccactgtgttctcctctcagcagcctgtctttccaacatccactcctgcctcctctctcccaagacccagtccatctcattcccacacagccactcatggactcatttgcta

SEQ ID NO: 872071 - DNA, 120 bp, Artificial Sequence
  ENSG00000259026_0 (sequence is synthesized)
aggcacgtggctcacactcctggcacccctgggggtagctgttgaggccatgcaccttctcgcctgtctcacttccttactacactgcgtgtgctcctcaatcccccaaacccttgtctc

SEQ ID NO: 872072 - DNA, 120 bp, Artificial Sequence
  ENSG00000259026_1 (sequence is synthesized)
aggtctgactctagagaaactcaagttttgtaagtggagctgagcttccagggaacttttcaagatggctgggacattatgcaatcaaaacggatctgggacaaaggaatggtatgagca

SEQ ID NO: 872073 - DNA, 120 bp, Artificial Sequence
  ENSG00000259026_2 (sequence is synthesized)
cctgccaccaggtgaggaatggtgctctcaaaaagcccagatgagagattctcaaacttaaagctttattcagaaatagggtctttgcatatgtaaccaagttatgatgacttcctgagg

SEQ ID NO: 872074 - DNA, 120 bp, Artificial Sequence
  ENSG00000259026_3 (sequence is synthesized)
ttaagagaagaggggaatttggacacaaactcacactcagaggagacacagtgggaagatgaaggaagagatcagagtgatgctgccaggggccaccagaacggggaagagccaagaaaa

SEQ ID NO: 872075 - DNA, 120 bp, Artificial Sequence
  ENSG00000259026_4 (sequence is synthesized)
gatcctcccgaagggcctttggagagagaaagacccttccaacaccttggtttcggacttctagcctccagatcagtggaagatcatgtttctgttgttttaagccacccggtttgtggt

SEQ ID NO: 872076 - DNA, 120 bp, Artificial Sequence
  ENSG00000259026_5 (sequence is synthesized)
gctgtgtagggcagcactgggaaactcatgtatgtggattttgtcacaagtccgctgaaaaggcttcattttcttttttcaaaacaataaagcgaaatgttaaaaaaattaagtcctcca

SEQ ID NO: 872077 - DNA, 120 bp, Artificial Sequence
  ENSG00000259026_6 (sequence is synthesized)
tttgaagatggaagaaagggccatgagccagggactgcatgcctccttaagagccagaagggttaagagaatggatgcaactctggaaccaccagaaggaacactggccctgccaacacc

SEQ ID NO: 872078 - DNA, 120 bp, Artificial Sequence
  ENSG00000259026_7 (sequence is synthesized)
ttgatcttagcacagtgagacttgtatcagaattctggcctctgaaaccataagaagtgggtgctcaaaggaagtttgcagaaccaaatgatcattgaaaagatggccagacaaggatta

SEQ ID NO: 872079 - DNA, 120 bp, Artificial Sequence
  ENSG00000259026_8 (sequence is synthesized)
tgaggctagacaggctacgtgatgaagcagatgcagatcctcttcacctgcacatcctccagccattcagcttcaggatgggattcaaggtagacgtccaggagccactgcgtgcagctc

SEQ ID NO: 872080 - DNA, 120 bp, Artificial Sequence
  ENSG00000259026_9 (sequence is synthesized)
tctgttggggactgcctccaagctcacatgaccacacatccaggaggcatgggctggaactaaacctcaccccctccttcaagcagcctcgacaatgacccacccccagctcgtccctta

SEQ ID NO: 872081 - DNA, 120 bp, Artificial Sequence
  ENSG00000259026_10 (sequence is synthesized)
tcaggtgggatcattctaaggcacgtggctcacactcctggcacccctgggggtagctgttgaggccatgcaccttctcgcctgtctcacttccttactacactgcgtgtgctcctcaat

SEQ ID NO: 872082 - DNA, 120 bp, Artificial Sequence
  ENSG00000259028_0 (sequence is synthesized)
agctagagggaatcttgcaaaagcaggcaagatgctaaaaagtgggctggtatggaaagctctttaatggcaaaaaaaaatgtgtataaggagcaagaataatgtccctcatctccaaag

SEQ ID NO: 872083 - DNA, 120 bp, Artificial Sequence
  ENSG00000259028_1 (sequence is synthesized)
atgtccgtgtcctatctcctaatcacaagaacctatgaatacgttgctttacatggcaaagggactttgaggatgtcattagaggtcctgagattagtgacttcaacatgaattttgggg

SEQ ID NO: 872084 - DNA, 120 bp, Artificial Sequence
  ENSG00000259028_2 (sequence is synthesized)
gaagctggagaaggcaaggaaatggatttttccctagagcctccagaagggaaagcagctctgatgatgccttagttttaacccagtgaaaaccatgtcaaatttctaacctacagaact

SEQ ID NO: 872085 - DNA, 120 bp, Artificial Sequence
  ENSG00000259028_3 (sequence is synthesized)
attagaaaatcaatttatgttgttttaagccactaaatttgagatttttttgtcatgttagtaacagaaagctaatggaatgtcaaaacttaaggaccaaataaatacatcttgagaccc

SEQ ID NO: 872086 - DNA, 120 bp, Artificial Sequence
  ENSG00000214900_0 (sequence is synthesized)
acagccaagcaacccaaagtgatttctgtatttctcaatccagcccaagagtggattggcaggaagggtgcaggacctaacccaatgacaatgctcgcaggaggagccctccagaaggca

SEQ ID NO: 872087 - DNA, 120 bp, Artificial Sequence
  ENSG00000214900_1 (sequence is synthesized)
acagccccacaggcctcctcactcagaagtctttgaaggacgcatgtcaagcacaggatgtgtgctttttcctactgtaaacaagcaagtctctaaaaatattcatgagatttttctact

SEQ ID NO: 872088 - DNA, 120 bp, Artificial Sequence
  ENSG00000214900_2 (sequence is synthesized)
cggtactagtagatcagcatgttaactaggttaattcccaactgtcctaccaccaactacctagcacgaggctctcaacaacctgcagccagatcccaggtggtcccaatggctacattc

SEQ ID NO: 872089 - DNA, 120 bp, Artificial Sequence
  ENSG00000214900_3 (sequence is synthesized)
attgaatacagcctgagcaatactctcactccactcttcactcagctgaccctgtattctgtgaattctgccctagctccaaacctcttggtacaaaggaactctctacgtttagttctc

SEQ ID NO: 872090 - DNA, 120 bp, Artificial Sequence
  ENSG00000214900_4 (sequence is synthesized)
tcgacaactacctactataagatgaagtttccaggaactcatgtgatcatgagactctgcagtcacttcagggggtcttgttgactggctcggggggctggtgtcaagcccaagcagaag

SEQ ID NO: 872091 - DNA, 120 bp, Artificial Sequence
  ENSG00000214900_5 (sequence is synthesized)
aaaaaaaaaagcctaccttttgagttactttcagaagataacacaggttctcgaggctggacagtccaagatcaaggtgcctgcatctggcgtctagtgtggaccctattcctggtttgc

SEQ ID NO: 872092 - DNA, 120 bp, Artificial Sequence
  ENSG00000214900_6 (sequence is synthesized)
agcattgttggtgctctgagggtgtcagccaggccactcatgcagaccattgcggcagcactgaaaatggaagaaagatgggattctgctgtcttttgttttggctgatgaacagcaccg

SEQ ID NO: 872093 - DNA, 120 bp, Artificial Sequence
  ENSG00000214900_7 (sequence is synthesized)
cttacacttcctgttctctgcaaggcagccagagtgacctttcactaatccttgtatgacctctgaaaatatgacctgaagcagatggatgcactcacataagaaacatcacctgtggcc

SEQ ID NO: 872094 - DNA, 120 bp, Artificial Sequence
  ENSG00000214900_8 (sequence is synthesized)
ttcatcgaaaatgggcctgctgcttgaagaagttgggctcttggagttctctagcacaggggccatgaaaatcaatgacttccttgtttgctgacggagcagaggtagaatctcttggtg

SEQ ID NO: 872095 - DNA, 120 bp, Artificial Sequence
  ENSG00000214900_9 (sequence is synthesized)
ccatttccccgaaccatcgcttggatgatgaagcacatcgcagagtactgcttcatcaccattcaggaattgtacccttttaaatttctatatgggtatgcgctgcttttgacacagctt

SEQ ID NO: 872096 - DNA, 120 bp, Artificial Sequence
  ENSG00000214900_10 (sequence is synthesized)
ttgttgtaagcaggcactaaaatagaagcttataattagctatctggggaggcaagtgtgtggtagaacagagctcagcaagagaaaagtcaaggcaggtcctggggaaacactgcatgg

SEQ ID NO: 872097 - DNA, 120 bp, Artificial Sequence
  ENSG00000214900_11 (sequence is synthesized)
aagatgagtaatacagagcccaagagtggattggcaggaagggtgcaggacctaacccaatgacaatgctcgcaggaggagccctccagaaggcaacagctccaaacctcttggtacaaa

SEQ ID NO: 872098 - DNA, 120 bp, Artificial Sequence
  ENSG00000214900_12 (sequence is synthesized)
agttggcaaacgtgaatctactagaagattgacatggagatcgagtaggtattctttttattaatattccgtcatcaaactgtctttacaaatatctaccttcattttggctcttcccta

SEQ ID NO: 872099 - DNA, 120 bp, Artificial Sequence
  ENSG00000214900_13 (sequence is synthesized)
ggtggtaactaatacatctgactagtaaatcatgtctaatatataggacttcataatgtgttacatagcgcttgatgctcaaatgcaaacgtcctgtttttttgggttttttgttgttgt

SEQ ID NO: 872100 - DNA, 120 bp, Artificial Sequence
  ENSG00000214900_14 (sequence is synthesized)
tgttgttgttgttgttgttgtttttaagagacagtgtcttcactctgtcacccaggctaagctggaatgcagggggccaaccatagctcactgtacccttgaatgcctgggctcaagtga

SEQ ID NO: 872101 - DNA, 63 bp, Artificial Sequence
  ENSG00000214900_15 (sequence is synthesized)
agctcactgtacccttgaatgtagccactgcgcccagctgtattagtctattttcacactgct

SEQ ID NO: 872102 - DNA, 66 bp, Artificial Sequence
  ENSG00000214900_16 (sequence is synthesized)
ttcactatcacaagaacagcacaggaaaggcttgtccccatgattcaattatctcccacttggtcc

SEQ ID NO: 872103 - DNA, 120 bp, Artificial Sequence
  ENSG00000214900_17 (sequence is synthesized)
gatgctcaaatgtttttattacataagtaatacattttagctctttctgtgatgaaccaattgtatatccttattttaaacactgtctagtttgtaaatgttttgttttaggcattatgc

SEQ ID NO: 872104 - DNA, 120 bp, Artificial Sequence
  ENSG00000214900_18 (sequence is synthesized)
cagagaaattgttccctgaaatgaaaatgttttatttgtagaagcgtatcacagtctcttcatcagaatctgatacttttatttatgcacaaatccaagcaggttagaatttgaataaga

SEQ ID NO: 872105 - DNA, 120 bp, Artificial Sequence
  ENSG00000214900_19 (sequence is synthesized)
atagggagagcatttttgaaacaggtacactgacttgggcaagaggtgagaaaaagtgaaggagagagaaaaatctatatcaaaagtaggcataccaaaagaaacagctgaaagttgaaa

SEQ ID NO: 872106 - DNA, 120 bp, Artificial Sequence
  ENSG00000214900_20 (sequence is synthesized)
acatttctcagaagagaaggaaatctccccatattgcccccctccatttctattccacaggagtgaaagggtgacatttttggatcaaactttgtagaagcatggcagccagcctctagg

SEQ ID NO: 872107 - DNA, 120 bp, Artificial Sequence
  ENSG00000214900_21 (sequence is synthesized)
agggcccctaagatgactcttgtctggtggccttcatgctcttgtgtagacccctcccagtagaaataggcctgacctgtgtaactgataggatattgtggaaatgatgaagtgtgactt

SEQ ID NO: 872108 - DNA, 120 bp, Artificial Sequence
  ENSG00000214900_22 (sequence is synthesized)
ccaaggctagttaataaaagacattgcagtttctgcctttggatctgtcttggatcatttgatctgagggaagccagttggcatgtcatgaagacatacaagcaaccccatgaagaggcc

SEQ ID NO: 872109 - DNA, 120 bp, Artificial Sequence
  ENSG00000214900_23 (sequence is synthesized)
cacgtggtgaggaactgaggcctcctgccaacatccagcagcaacttaccaacagtgagagtgaaccacttaggaaccggatccttcagttccagtcaagccttcagatgtctgcaaccc

SEQ ID NO: 872110 - DNA, 120 bp, Artificial Sequence
  ENSG00000214900_24 (sequence is synthesized)
tggacaacatcttgactgcaacttcatgaaagaccctgagggagccccaaaccacctaagattgccccaaattcttgacccacaaactatgagataacaaatattcatcattggctgggc

SEQ ID NO: 872111 - DNA, 61 bp, Artificial Sequence
  ENSG00000214900_25 (sequence is synthesized)
cacaaactatgagataacaaatattcatcattggctgggcatggtggcttatcgaaaccag

SEQ ID NO: 872112 - DNA, 120 bp, Artificial Sequence
  ENSG00000214900_26 (sequence is synthesized)
aacatcctcaactctgctcacccatggttttctcccgccctcccagagctcctcctgctggccttcattggcatcaccagcactggagctattccagtgaggatttttgctgcggcacat

SEQ ID NO: 872113 - DNA, 120 bp, Artificial Sequence
  ENSG00000214900_27 (sequence is synthesized)
atcccccaaatatccattctgttcttcttccttagtgatgggcccccgacatgaaactggcactcagaatgaagaatgccttttccagcctccctcgctggtggagtctccgtgttccag

SEQ ID NO: 872114 - DNA, 120 bp, Artificial Sequence
  ENSG00000214900_28 (sequence is synthesized)
ccaatgaatctttaagcaatttgccaagacggagaatctcactggcctggtggggctgagccttccttcactggctgaccaactgggaagtgggctgctgcctagatcaggagaaagaat

SEQ ID NO: 872115 - DNA, 120 bp, Artificial Sequence
  ENSG00000214900_29 (sequence is synthesized)
tgtgccatgaaaaatggaaaactcctgagaagctgttccagcgtcaggagagcagcagacaagctggactggggaagattcttcctgcaagacctgcagagtgtatgacacataaccagc

SEQ ID NO: 872116 - DNA, 120 bp, Artificial Sequence
  ENSG00000214900_30 (sequence is synthesized)
acccaagaaatgtctaccgaggaattaatgaatgaggaaatacctctgtacactcaccagacactggctgctggttgtcacggtgctaagagctgtgggaaacatgaagagcaatgagac

SEQ ID NO: 872117 - DNA, 120 bp, Artificial Sequence
  ENSG00000214900_31 (sequence is synthesized)
caggtccctgctctgaggagacgtgtgccagcgaagtttctctcccactcttcctcaggcaccagtctacgtttctagtaaaaacttgcttggccacttgtgtagaaagaggaattaatt

SEQ ID NO: 872118 - DNA, 120 bp, Artificial Sequence
  ENSG00000214900_32 (sequence is synthesized)
taatatttgaatactcagctgactggttctccatgggagcaagtagccaagtaaatatccaagagagaacgagggaagggacaaaatggcaccaagcctgaattgtgaagtcctctatca

SEQ ID NO: 872119 - DNA, 120 bp, Artificial Sequence
  ENSG00000214900_33 (sequence is synthesized)
tcctgcaacaccctggatatgcaaaccgaatatcctctctcttgcccaagagtggattggcaggaagggtgcaggacctaacccaatgacaatgctcgcaggaggagccctccagaaggc

SEQ ID NO: 872120 - DNA, 120 bp, Artificial Sequence
  ENSG00000214900_34 (sequence is synthesized)
ggagagatggggtgcacagccaaggaaagccaggaacaggttccggcttccatcactcagatactcaggaatccctgggtaccccacactgattcacactgcgctgagctgtccatggca

SEQ ID NO: 872121 - DNA, 120 bp, Artificial Sequence
  ENSG00000214900_35 (sequence is synthesized)
cagaaccatttgtccactgatgcttcctccctccagggacactgtccatcttcaacaagggaggatcccagatactcaccatgggcattcattttataaaagtcccaactgtggctcagg

SEQ ID NO: 872122 - DNA, 120 bp, Artificial Sequence
  ENSG00000214900_36 (sequence is synthesized)
ggtcggtccttgcaccttattaggatttacctatgactttatctgcactcacataagcactagggggacaggaagctgttactgcagtcccgggggcctctctcccgatgcctccattta

SEQ ID NO: 872123 - DNA, 120 bp, Artificial Sequence
  ENSG00000214900_37 (sequence is synthesized)
aagactttgttctgtttgttcacagtgtagatctaccgacttttttgtgtgtctattttaactcacaaattccacggcctcctccttgaagacaagaacagcatcttctttgcatcttgc

SEQ ID NO: 872124 - DNA, 120 bp, Artificial Sequence
  ENSG00000214900_38 (sequence is synthesized)
cccatccttgcacttattgctcaggaatagttgattatccagttccataattaatctgtctttccttgagcacctacaatatgagttctaggttctacagggaatacaaaaatgagtaga

SEQ ID NO: 872125 - DNA, 120 bp, Artificial Sequence
  ENSG00000214900_39 (sequence is synthesized)
catgaatggagagcagggcaaaagagtggagaaagtcagagtagtagcttatttcataaagtttggtaggaaacaggagagagactgggttgagaggattgtagaagtgcatggggaggg

SEQ ID NO: 872126 - DNA, 120 bp, Artificial Sequence
  ENSG00000214900_40 (sequence is synthesized)
aggttgtggttgaagataaacggaggtgactagcgggtggataattgatggagcgaagggtggaagagcctagagggaaggaatgggccaggcaccgtgctgaccacaggcagattgatt

SEQ ID NO: 872127 - DNA, 120 bp, Artificial Sequence
  ENSG00000214900_41 (sequence is synthesized)
cctgaaaaaaagagtcacctcttcagcaagactaaaggaagagggagggaagtgaaggtggggagggaagggagaatggaaggagatgtagctaaatttggacacagaggtgaaagagaa

SEQ ID NO: 872128 - DNA, 120 bp, Artificial Sequence
  ENSG00000214900_42 (sequence is synthesized)
aatggctcaccctaatgtcctcaggttttcactgttgaatgaaggaagggacgtaagccccgacattaaagcgccaaagttgacaaggatccattgctgggatgattgggggtggcatat

SEQ ID NO: 872129 - DNA, 120 bp, Artificial Sequence
  ENSG00000214900_43 (sequence is synthesized)
gcgactcagagagggccatgtggcctgtttgggggaggtcaagggaaaacgaggggaaaggagagcaaagttggggaaataggaattatctctagggccatcttttcttccctctcccac

SEQ ID NO: 872130 - DNA, 120 bp, Artificial Sequence
  ENSG00000214900_44 (sequence is synthesized)
tcacaccccatgtatcaggatcctgaggcccatctggccttccccaagttctgaagttctctctccttccctcgtggtgtacttctctggctaagtaactacttgctgttactggttcag

SEQ ID NO: 872131 - DNA, 120 bp, Artificial Sequence
  ENSG00000214900_45 (sequence is synthesized)
taggtgctcctggctttgtgtgctctcctctctcaggtaccagtgtgatattcttagaagatgggagaggcacagttagattttggttcacatagtctgtgatactttgttatggcagcc

SEQ ID NO: 872132 - DNA, 90 bp, Artificial Sequence
  ENSG00000214900_46 (sequence is synthesized)
ttttggttcacatagtctgtgatactttgttatggcagccccaacaaactaataaattcatcttacagctatattttaaaagtatgagtt

SEQ ID NO: 872133 - DNA, 120 bp, Artificial Sequence
  ENSG00000214900_47 (sequence is synthesized)
gggcaacagagagagactctgtctcaaataaataaataaaatttaaaaattaaaagtatgaaatatatttcatcagcattttaaggattatttgatatgtcaaaaactgagttatagagt

SEQ ID NO: 872134 - DNA, 120 bp, Artificial Sequence
  ENSG00000214900_48 (sequence is synthesized)
tatagagtagtttagactgtataaataaactaatcataaatatattcaagaagaaggtatttgcttaacaaaagacttaacattaaacatttgttcaaattcatctactcttttcaagaa

SEQ ID NO: 872135 - DNA, 120 bp, Artificial Sequence
  ENSG00000214900_49 (sequence is synthesized)
aaatatttcttaaaacaaggttttgttaactatggcagagtagtcattaatttccagcaaacctggctgcttcccctattagcacatgggattaaattatctcctgtgaagggactggtg

SEQ ID NO: 872136 - DNA, 120 bp, Artificial Sequence
  ENSG00000214900_50 (sequence is synthesized)
ttttgggacatgggacattgtcttaacccaggcagctataacacatatactgcagactggtggcttagaccaggggtccccagtccttgggccgtggactgctactggtccatggcctgt

SEQ ID NO: 872137 - DNA, 120 bp, Artificial Sequence
  ENSG00000214900_51 (sequence is synthesized)
taggacctgaggtgcagagcaggagatgagcagcactccagtgagccccacatcctgccagataagcagcggcgtcagattctcacaggagcgcaaaccctgctgtgaactgtcatgtga

SEQ ID NO: 872138 - DNA, 120 bp, Artificial Sequence
  ENSG00000214900_52 (sequence is synthesized)
gggatggagcttgtgtgctccttatgagactttaatgcctcccaccactggtccgtggacaaattgtcttccacaaaatgagtccctggtgtcaaaaaggttggggactgctggcttaga

SEQ ID NO: 872139 - DNA, 120 bp, Artificial Sequence
  ENSG00000214900_53 (sequence is synthesized)
atgccttttccagcctccctcgctggtggagtctccgtgttccagccaatgaagtagggcatgcagttgcctgccccactgaagtcaacttcagcctgaagattgggagacttccgaaag

SEQ ID NO: 872140 - DNA, 120 bp, Artificial Sequence
  ENSG00000214900_54 (sequence is synthesized)
tggaaaacttggaaggaggaagcctggacagcctgcagttgaggggacctgcacaagctcacaggactcttcatcaccatgacaccacgctcaccgcaaaataaaaatgatcaaacctgt

SEQ ID NO: 872141 - DNA, 120 bp, Artificial Sequence
  ENSG00000214900_55 (sequence is synthesized)
tgacctttcactaatttcaacacaagtcattggttgggagtagagggcactctgcatggtcgtctggaaccagggtttgcctacatgatgggtctccatttgccaccggccttggacgtc

SEQ ID NO: 872142 - DNA, 120 bp, Artificial Sequence
  ENSG00000214900_56 (sequence is synthesized)
tccactggatgctctgatttcacctgataagtaaagggagagagacagagcatggagaattacacagatctgcatggaacaatgctgcttctctgcatgactagagtttgttttctcttt

SEQ ID NO: 872143 - DNA, 120 bp, Artificial Sequence
  ENSG00000214900_57 (sequence is synthesized)
gtgctagtgaaactgccctcagagcagaaataaactgttggctctcaagtttttccagactaaccggactggccaatgcctgaggctctgtgttcaagataaaagtgcctaagaaagaaa

SEQ ID NO: 872144 - DNA, 120 bp, Artificial Sequence
  ENSG00000214900_58 (sequence is synthesized)
agtgcaggtaggcagtccccacttctgcagggctggtgggctctggggatcctgtctcagcctgctgaacagcccagagtggctttaaaaaaaaaaaaaaagcctgaacaaccttttttt

SEQ ID NO: 872145 - DNA, 120 bp, Artificial Sequence
  ENSG00000214900_59 (sequence is synthesized)
gcacatgggtcacagtcaagcttcttaaacttggatgacagtaaacctatgactaactggataattaaagccacaagtctggaggcctgggcagggctctgctctggaatctccggtggc

SEQ ID NO: 872146 - DNA, 120 bp, Artificial Sequence
  ENSG00000214900_60 (sequence is synthesized)
aatgtctaccgaggaattaatgaatgagccatcttgtgatcatctggcaagacagcccaagaataaagccgtcaccatggagactaagaagagacagaaagacactgggtcttcattgtc

SEQ ID NO: 872147 - DNA, 120 bp, Artificial Sequence
  ENSG00000214900_61 (sequence is synthesized)
tcgtccagctgttcatgaggccttatctgaagcccacgtgacctccggactactcacttacatgagagaataaagctcttttttgtttagaccaaataaatacataatacaattacataa

SEQ ID NO: 872148 - DNA, 120 bp, Artificial Sequence
  ENSG00000214900_62 (sequence is synthesized)
atacccatagttaccactgggagcagggtgggccgtttacactcctcatcctacctcgccatcaccttaggaagcagccattctccttgtctttactgtagaggaggaagcctggacagc

SEQ ID NO: 872149 - DNA, 120 bp, Artificial Sequence
  ENSG00000214900_63 (sequence is synthesized)
ctgcagttgaggggacctgcacaagctcacaggactcttcatcaccatgacaccacgctcaccgcaaaataaaaatgatcaaacctgtcatgatgtcagcagcaccggtgttggtctttg

SEQ ID NO: 872150 - DNA, 120 bp, Artificial Sequence
  ENSG00000214900_64 (sequence is synthesized)
tgggaaagaaaaacacaggccagggctgcagcacgattgtgtctgcccagctcttgcagcctggagaacaccgttggattccctcccacacatgctcccaggctgcctgcctgcctcact

SEQ ID NO: 872151 - DNA, 120 bp, Artificial Sequence
  ENSG00000214900_65 (sequence is synthesized)
tacctgctcagggtggggcttgagggtggcccctgggaagagtaagaactggccaagactgagatgtccttccctcatttaaggtaccgccttttcccttttcccgccatcctgggtgca

SEQ ID NO: 872152 - DNA, 120 bp, Artificial Sequence
  ENSG00000214900_66 (sequence is synthesized)
tggatacttgggattagaaactggactggaaatgtaatctttcttcggtttggggctgagaactggggattagtaggattttgagtttatggcacagccttttcttacaccatttcctaa

SEQ ID NO: 872153 - DNA, 74 bp, Artificial Sequence
  ENSG00000214900_67 (sequence is synthesized)
ttgagtttatggcacagccttttcttacaccatttcctaaaaagcagttaagattacaccaggcacagtggctt

SEQ ID NO: 872154 - DNA, 120 bp, Artificial Sequence
  ENSG00000214900_68 (sequence is synthesized)
tccgtctcaaaaaaaaaaaaaaattacagtcatctcccagaaaaatcaagaaggaagaaccttggaggttcaacctatagaagatatgttctcatggaataaaccaaaaataatttttat

SEQ ID NO: 872155 - DNA, 120 bp, Artificial Sequence
  ENSG00000214900_69 (sequence is synthesized)
tatgttctcatggaataaaccaaaaataatttttattttctaaaaaatcaagaacagaagtctctcaacatttaagttttacaaacaaatagaatctgagccactgggttaaacatgaca

SEQ ID NO: 872156 - DNA, 120 bp, Artificial Sequence
  ENSG00000214900_70 (sequence is synthesized)
aacgacacacagtaacaaatattgaagacatcataatgccaaagcaacagaagcagcaccagaaatgttgctgaggccaccatttaattaacgcaagttgaacatatggctttggttaca

SEQ ID NO: 872157 - DNA, 120 bp, Artificial Sequence
  ENSG00000214900_71 (sequence is synthesized)
tgtggttccaggccagaggcatggaagtcagtgtttgtgggaaagccaggaggaaaagctcctctccccacctccaccttgtcactccaggttctggtgaccccatctcgggacacggcc

SEQ ID NO: 872158 - DNA, 120 bp, Artificial Sequence
  ENSG00000214900_72 (sequence is synthesized)
tcccatttcactcctgcaccaaccccactcttgtaacactgcacatgcaagatgtgagcatcttcaaagtacgaatattgccttcttcattttagaatccatgatgtgcttgtggggaga

SEQ ID NO: 872159 - DNA, 120 bp, Artificial Sequence
  ENSG00000214900_73 (sequence is synthesized)
atgaatgaatgctcaaacatgaatggagagagacagagaggaagtgcaggtctaaccaaggaaaccttctttcctagaaaatcgttgatgagcccggaaagagttggctgaacaacggta

SEQ ID NO: 872160 - DNA, 120 bp, Artificial Sequence
  ENSG00000214900_74 (sequence is synthesized)
ctgagttccctccaggattgtggagtttcttttacagccacatgtggataagaaactaagggccacagaccaaatgacaggtcggatggcaaccctggaaaagtcacacagctcagcctg

SEQ ID NO: 872161 - DNA, 120 bp, Artificial Sequence
  ENSG00000214900_75 (sequence is synthesized)
ttggaggaagaggagcagtagaacctgtgtggagcctgacagaacccaagatgccattcacgaaccgagaggtctttcaagatcacacacagttctacgacacagacatttcgtcttctt

SEQ ID NO: 872162 - DNA, 120 bp, Artificial Sequence
  ENSG00000214900_76 (sequence is synthesized)
gccactcagtagcggggcccatccctctgtgcctccaagggaccacttcacacacccctttttcgcctccagagtagatggaaccgtggaacgagggaatcctgccctctggttgtgtct

SEQ ID NO: 872163 - DNA, 120 bp, Artificial Sequence
  ENSG00000214900_77 (sequence is synthesized)
gtcatctcctactgggaccagagccacaaaagccacaaaagacccaactctctccagcgtgcaggcatcccaactagaggaagcaaggaggcagagaccaagaggacatcaagaggcgtt

SEQ ID NO: 872164 - DNA, 120 bp, Artificial Sequence
  ENSG00000214900_78 (sequence is synthesized)
atcccgcgccttaccccaaatcaataagtctaatactgggtttcaggctactgaaaatgaaatttgagggcaatagaccttttgggagcaatttgccttttaaaatattaaagtccttta

SEQ ID NO: 872165 - DNA, 120 bp, Artificial Sequence
  ENSG00000214900_79 (sequence is synthesized)
aataacactacctggtgaggatgacgaggaaaaatatagggcatagggtggcctccccacaggcatttttcttcttttctctttcctaacagggtcccatacttcctagccatgctgttg

SEQ ID NO: 872166 - DNA, 120 bp, Artificial Sequence
  ENSG00000214900_80 (sequence is synthesized)
gcagggattaacatcattgcaattctctgggtagaccttgggaggtttaaaccaaccagtgacccctatcatcctagctccagagattggcttagggatagtcacccaatgcaggccaat

SEQ ID NO: 872167 - DNA, 120 bp, Artificial Sequence
  ENSG00000214900_81 (sequence is synthesized)
atcacctttgtcttacagtttatttaactgaaacaaataaacaaaccaaaacacgccagtttttcactcctctgtcaaagcctttccaagatcactaagcttgtgatgtcctgggtgaat

SEQ ID NO: 872168 - DNA, 120 bp, Artificial Sequence
  ENSG00000214900_82 (sequence is synthesized)
atgcgcatgaccccgtgtgtgggcagaggctcttagcaggggccgagagcattggaggcatcttgagggccagagtccccagccccagatcacagatacggcatgatcaaaatgtgaggg

SEQ ID NO: 872169 - DNA, 120 bp, Artificial Sequence
  ENSG00000214900_83 (sequence is synthesized)
agcaggggcagagattatttggaataacgtgctgagtttgtatacttttgacaattaaaagccctatgtccccctgatgttacgcatatgctccagaggagccactcgggacaaagaatc

SEQ ID NO: 872170 - DNA, 120 bp, Artificial Sequence
  ENSG00000214900_84 (sequence is synthesized)
aataatgggcgcttggtgtgcattgaaagctgacagtgtatatttgtggggactatacagggaaaggaatatgaagccttgacaagatatggtgagtatgtatcggtgaggtaggtaact

SEQ ID NO: 872171 - DNA, 120 bp, Artificial Sequence
  ENSG00000214900_85 (sequence is synthesized)
cattcataagggactttgcaaggtggcaacactggttcaaagatattacgagaataaagattttgtgtactcagagaacgaaaaggaatgctgacgtaagatcacaaagttagatactaa

SEQ ID NO: 872172 - DNA, 120 bp, Artificial Sequence
  ENSG00000214900_86 (sequence is synthesized)
actggctaatgtgctacagggcagcaaaactataacctttgaggtaatttatctgaccagataggaatcatttgcatctctgtagaacagaaaaacacttactttttttttttttttttt

SEQ ID NO: 872173 - DNA, 120 bp, Artificial Sequence
  ENSG00000214900_87 (sequence is synthesized)
ttttttttttttttttttgagacagtatctggctctgtcccccaggctggcgtgcagtagcatgatcttggtttactgcaacctccacctcctaggctcaagccatcctcccacctcagc

SEQ ID NO: 872174 - DNA, 120 bp, Artificial Sequence
  ENSG00000214900_88 (sequence is synthesized)
cagcacttacattttaatagtttctacacagtactatctcatgttattttattttttaaaatcgataatgggactcttgctatgttgctcacactagtcttgaactcctggcctcaagca

SEQ ID NO: 872175 - DNA, 120 bp, Artificial Sequence
  ENSG00000214900_89 (sequence is synthesized)
aggcatgagccggggctcctggcctaactaatttcagagttaagaacgtttggactctattttatagtaaaaaataagtcaaagctaccttcccctagatagccaaatgactctcagatg

SEQ ID NO: 872176 - DNA, 120 bp, Artificial Sequence
  ENSG00000214900_90 (sequence is synthesized)
ggctcgttagacagtgctttaatttaatattgaaagaactttttgcttcccctcctccaagttttaataattcttaacagagggaaacagcaacaaaatttttgctgtagtgggtattaa

SEQ ID NO: 872177 - DNA, 120 bp, Artificial Sequence
  ENSG00000214900_91 (sequence is synthesized)
agaagggaaaacaatcatgaatgccggagtcaaaatgcccaaggagcggaggcaccagcgttctccacctggtttggcggcgcaccagcagtgtgacctggaatctgatctctctggagc

SEQ ID NO: 872178 - DNA, 120 bp, Artificial Sequence
  ENSG00000214900_92 (sequence is synthesized)
tcagtgtcctcacctataatatggggtattgaactacacacttggcaggactttgccctaaagctaattttcaaaataaaaaaaaaaaagccacttcccttttcccacattaaccctgag

SEQ ID NO: 872179 - DNA, 120 bp, Artificial Sequence
  ENSG00000214900_93 (sequence is synthesized)
agagaaagaggaagcgggaagcccgcacatggaagcaatttattgcagacgttcctgggctgggagaggagccttctgactgctgcagagaccatcacccggtcctgcacctttaccgga

SEQ ID NO: 872180 - DNA, 120 bp, Artificial Sequence
  ENSG00000214900_94 (sequence is synthesized)
ggtgcggagaactgctcggcccgcaccgggctcgggggtgttcacgggctgcgctgcctcccctgcgcgcaggacaggagtcgccagaggccggtggtggatttcctccccgcatctcag

SEQ ID NO: 872181 - DNA, 120 bp, Artificial Sequence
  ENSG00000214900_95 (sequence is synthesized)
ctctccgtccaaagtcaaattgctcttttctccgcccacgcgggcgtggcagctgatatccggccgctgggcgtccccgcgcccccgggggccccgccctgcagctatctccgcggccca

SEQ ID NO: 872182 - DNA, 120 bp, Artificial Sequence
  ENSG00000214900_96 (sequence is synthesized)
cccggcggcgcctccctgcagggctgctccccagcccaaaccgccgcggcgcgacgtggagccagccccgcaaagctgcatccaccccccgaggaccagcccctcgaaggcaaggccagg

SEQ ID NO: 872183 - DNA, 120 bp, Artificial Sequence
  ENSG00000214900_97 (sequence is synthesized)
acctccccgggcggctgcagccgtgagccacccctgttttgtgaaacacacactctgccatttcaggccgcacttgcccgttgccatgggcgttttctatgttgacacaagcagggacac

SEQ ID NO: 872184 - DNA, 120 bp, Artificial Sequence
  ENSG00000214900_98 (sequence is synthesized)
ggaatcccttgactttgagttgcagatcgtgggtgttggcgtctccgctgctttaccaggaaggatggaaggggcttcagcctccattctcactttccttctcaaggagttggctaagca

SEQ ID NO: 872185 - DNA, 120 bp, Artificial Sequence
  ENSG00000214900_99 (sequence is synthesized)
tcaggagttttctcttaggcttctctcaggtcccctttccctgagaggtgaaaagtttttcagaaaggtgagcagctttctctttattcccagggaccacttcacacacccctttttcgc

SEQ ID NO: 872186 - DNA, 120 bp, Artificial Sequence
  ENSG00000214900_100 (sequence is synthesized)
atggaggtcttagggttctcgaatagtaagatggatgtcagagccaaacgtcaacttgaaatctggatggaaatggctccctccaagcccgaacctcaggggaaggctcagcagtcacag

SEQ ID NO: 872187 - DNA, 120 bp, Artificial Sequence
  ENSG00000214900_101 (sequence is synthesized)
cccaccagtgtcctctcagctgccaacgctgctcagagagggaagtgctgctgctgccgggaggggcacagccctgaagattacggaagacagtgggcagagaatgtggaaaatcaccca

SEQ ID NO: 872188 - DNA, 120 bp, Artificial Sequence
  ENSG00000214900_102 (sequence is synthesized)
gaggttgctgctcacacttcatgtcttcagagcatcacccctcattttatagctggagagatggggtgcacagccaaggaaagccaggaacaggttccggcttccatcactcagatactc

SEQ ID NO: 872189 - DNA, 120 bp, Artificial Sequence
  ENSG00000214900_103 (sequence is synthesized)
aggaatccctggttctcgaggctggacagtccaagatcaaggtgcctgcatctggcgtctagtgtggaccctattcctggtttgcagttcttcattgttattgtctcagatcaccaaaaa

SEQ ID NO: 872190 - DNA, 120 bp, Artificial Sequence
  ENSG00000214900_104 (sequence is synthesized)
gagtggaagcaaggaaaaataaggaaagaaatacactggatcccattgtttacaatgtggtcttggctccagtgtgttgaggaccgatctatagcaggaattcccaaacttgaacatggt

SEQ ID NO: 872191 - DNA, 120 bp, Artificial Sequence
  ENSG00000214900_105 (sequence is synthesized)
gactcgcaccagactgagtcactcctggatgttctggtgggagggttttggggagtcccccacacagccccacctcgcctccaagaggctggaggccccacaggtgggtgcggtgttggt

SEQ ID NO: 872192 - DNA, 120 bp, Artificial Sequence
  ENSG00000214900_106 (sequence is synthesized)
ggccagccccttggtggccgtggccagtgggtgggcgaggagactggtccagttggtggacctcatgcctggtgggtgccgcccacggcaccgggtacttccttggtccttttggtgctg

SEQ ID NO: 872193 - DNA, 120 bp, Artificial Sequence
  ENSG00000214900_107 (sequence is synthesized)
ttggcacagcctttccagagcagcgaatggatgccagtctcctcccacacccctccaggaacgcagaccaacacagctgctctattaaatgtgtgcacttcttattctgagtatgtctga

SEQ ID NO: 872194 - DNA, 120 bp, Artificial Sequence
  ENSG00000214900_108 (sequence is synthesized)
ttttatgctgttcccgtaacacccagcaccagtccccaaggatgagtgctgaagatccatagccatggcagggcagggcctaggtactgaaggaagatcccactcagagttcagttccac

SEQ ID NO: 872195 - DNA, 120 bp, Artificial Sequence
  ENSG00000214900_109 (sequence is synthesized)
ccactgcaaaacgccctccgaggaccctcactagaccagttcctccaagtgcggtccgcaggctgccatcagcgggatcacgggccttgtatgacctctgaaaatatgacctgaagcaga

SEQ ID NO: 872196 - DNA, 120 bp, Artificial Sequence
  ENSG00000214900_110 (sequence is synthesized)
gtccttagtactctggtttccacagaataatcctcatgcagtgagtagtggaagtcaggaggaataaactgcctagatgtcatgaagggaaaacaatgcacaatagacttgtgcagaatc

SEQ ID NO: 872197 - DNA, 120 bp, Artificial Sequence
  ENSG00000214900_111 (sequence is synthesized)
tattcctgtccgtttccctgtgaatccagattgctgaacactggccgatgtctgagctgtggtttccccctggatttgaaatttagttactagaagacaatgcttttgaatggcttcttg

SEQ ID NO: 872198 - DNA, 120 bp, Artificial Sequence
  ENSG00000214900_112 (sequence is synthesized)
gccatgactttcacagggcctgctggctgttgcctgatgattgtctgataggcctagccccttggcaaagcaatgtttcatttgcaaaactacgcttgtccggtgcctcctgggaactga

SEQ ID NO: 872199 - DNA, 120 bp, Artificial Sequence
  ENSG00000214900_113 (sequence is synthesized)
aagcctggcatcagcagaggaacgcaaattgggcaaatcacggatctcccaggcgtgcgttgcttgggggccatggtacacagcactgctaaaagtctaggacaatctatgtgttttagg

SEQ ID NO: 872200 - DNA, 120 bp, Artificial Sequence
  ENSG00000214900_114 (sequence is synthesized)
agcaaaccagtgccttgcacttctaagctgtatcctttgctccctccctgagaggcagccgtgtgctctgggcttcctagccttgtatgacctctgaaaatatgacctgaagcagatgga

SEQ ID NO: 872201 - DNA, 120 bp, Artificial Sequence
  ENSG00000214900_115 (sequence is synthesized)
tcacccatggttttctcccgccctcccagagctcctcctgcgtgagtaatgcagtgtgtgctggtgcagtgtctcactgaaaaaagaaagaaaccctgatttgcagcattggccaatttc

SEQ ID NO: 872202 - DNA, 120 bp, Artificial Sequence
  ENSG00000214900_116 (sequence is synthesized)
tgtagtgtaaatactcccaccatagcagatttcaggttaccaagggtttcacaactggttcacaagtcttgactgtaatgaccagctcatgcaactccagcatctcatcatctccgccct

SEQ ID NO: 872203 - DNA, 120 bp, Artificial Sequence
  ENSG00000214900_117 (sequence is synthesized)
acacccaggctgaatatcactttcagcttctcagtcagaaggagaagtggttaactatgccaggatggtaatgactaaatatcagaatggtgagtgtggagggtcaggatgtctgccaaa

SEQ ID NO: 872204 - DNA, 120 bp, Artificial Sequence
  ENSG00000214900_118 (sequence is synthesized)
ttggagatgactcttcacttctcaatcttggtgtctcatctggggaagctggagggagacatgcacagcttctcatgaacagtcctggaagcccttaccccaaggcctcatggggctctc

SEQ ID NO: 872205 - DNA, 120 bp, Artificial Sequence
  ENSG00000214900_119 (sequence is synthesized)
tccagggcttgctctttgtcactcctttaaaagcctgtcattcattgccagagaacagaagactccatcctaaggccaagttgaaaacggcaggcttgggagctgtctagactctgggtc

SEQ ID NO: 872206 - DNA, 120 bp, Artificial Sequence
  ENSG00000214900_120 (sequence is synthesized)
ctggcttttgtcttggctggtgtcaaaatggactctttaaaaactgtcctcaggaagattccccatccaactctgaacagcctggactgatctttttctgatttttaggggtcttgtgaa

SEQ ID NO: 872207 - DNA, 120 bp, Artificial Sequence
  ENSG00000214900_121 (sequence is synthesized)
caagagtcaggtgggcgggcagctcttgtaaagctgaacataaccaaatttgtccatagcctgtgacagcaaagatcacaaaattcttccctcccctttagggcctgggagtgacgccga

SEQ ID NO: 872208 - DNA, 120 bp, Artificial Sequence
  ENSG00000214900_122 (sequence is synthesized)
accaaggggaggatagtgacctattttatctcccaaacattgggcagccagttgcatttgcagatttaaaatccacccacactactgcagtttctgttctcctgcccccccgagcatact

SEQ ID NO: 872209 - DNA, 120 bp, Artificial Sequence
  ENSG00000214900_123 (sequence is synthesized)
tctggctggagctggttttgtaaagtggagttggctgtgggtgtgggagtcctcctcggagagcctggtctgacagccccagtcaacagccctcccatgggcatttgggctgctccagtc

SEQ ID NO: 872210 - DNA, 120 bp, Artificial Sequence
  ENSG00000214900_124 (sequence is synthesized)
ctccagtcccggcaggtgcacagctcaggggaatctggttttgtcttggtctcagccagggaagtctagttaaagaaagaaaaggttggccgggtgcagaggctcacacctgtaatccca

SEQ ID NO: 872211 - DNA, 120 bp, Artificial Sequence
  ENSG00000214900_125 (sequence is synthesized)
agcgaagtttctctcccacgtgagtgtgctacaagaaaatctgaacccgagaatctgattcagtaggtctgcactttctccactttgccagataattctgattgagaccgtcaaggctgt

SEQ ID NO: 872212 - DNA, 120 bp, Artificial Sequence
  ENSG00000214900_126 (sequence is synthesized)
gactagtggggaggcagtagagtattttctgtgctagactgaggcagccctgaagcactgcgcaagcacatggaaaagagaaacgagattgggccgggcacggtggctcatgcctggaat

SEQ ID NO: 872213 - DNA, 82 bp, Artificial Sequence
  ENSG00000214900_127 (sequence is synthesized)
aaacgagattgggccgggcacggtggctcatgcctggaatctttgggaggccacggatcacttgaggacagggcctactaaa

SEQ ID NO: 872214 - DNA, 120 bp, Artificial Sequence
  ENSG00000214900_128 (sequence is synthesized)
tggtggacctcatggcccacacggcctctaaggaataagacccccagaccactagccccagcaaaaacacaagaggaagagagaggccctcagctgctggtgagtccctgacgtgtccag

SEQ ID NO: 872215 - DNA, 120 bp, Artificial Sequence
  ENSG00000214900_129 (sequence is synthesized)
ttccctgccacactgagaatctcccctccccgcaatttccatgcagaccccctgaaaagggaagggccttggaagccccaccttgtcatctaccatcaataaagtcccctatgctcagcc

SEQ ID NO: 872216 - DNA, 120 bp, Artificial Sequence
  ENSG00000214900_130 (sequence is synthesized)
gccctgacacagccaaggccaagggcagtgcaggcacagccaccgtgactctctgctgggaggttaacagctccatcagttcagggactgcctgacccagcctgaccaaattagagcaag

SEQ ID NO: 872217 - DNA, 120 bp, Artificial Sequence
  ENSG00000214900_131 (sequence is synthesized)
atgggagatacagcatcatcaaagttttatcttttcgtcctgccatccttagaatatggctttcatcttcaagatcacttcctaagctatgaggatgcaaaggtataagaatgacatagc

SEQ ID NO: 872218 - DNA, 90 bp, Artificial Sequence
  ENSG00000214900_132 (sequence is synthesized)
cctaagctatgaggatgcaaaggtataagaatgacatagcggactttggggactcggtgtggggagaagttgggaggggtgagggataag

SEQ ID NO: 872219 - DNA, 120 bp, Artificial Sequence
  ENSG00000214900_133 (sequence is synthesized)
gaatcaaaaaccacctatacccccaaaaccactgaaataaaactaaaaattaattaaaaaaaaaaacaacataacttcatggtccaatgtgacagctagagcgccaatcatcatgttaaa

SEQ ID NO: 872220 - DNA, 120 bp, Artificial Sequence
  ENSG00000225938_0 (sequence is synthesized)
ctgaggaggcagaggacggcccggagtctcgtagcgcaccgccctggtcccacaccccccgcagccctaggaggatcggtgtgctgagcttgtggccaggagctccccgagccactttcg

SEQ ID NO: 872221 - DNA, 120 bp, Artificial Sequence
  ENSG00000225938_1 (sequence is synthesized)
cggcgctctggggaggagaggctgggaaggggctgcgagagatgctacttaagaacgtgaggctgagaggcggacttggtcagatctgcctgcgtgacaagctcaggacaggacgcttct

SEQ ID NO: 872222 - DNA, 120 bp, Artificial Sequence
  ENSG00000225938_2 (sequence is synthesized)
gcccttgcattactgttgtaaaagtttccacccagtccctggtcgcactgcgttcccatcccggcagatgtgaactcaaaaacttcctccgctgtgcagtttcaattggcagacacaccc

SEQ ID NO: 872223 - DNA, 120 bp, Artificial Sequence
  ENSG00000225937_0 (sequence is synthesized)
agcagcaagagattagtctttgagaacaacactctccatctcattctgtccttcccgtaccgatctcctaaaagctacaccaggacccacctaccttctgaggatgagaggaggctttct

SEQ ID NO: 872224 - DNA, 120 bp, Artificial Sequence
  ENSG00000225937_1 (sequence is synthesized)
aacggagggtgagaaggatgcacgactacagctcttcagcatctctcttctgagcagttaactggaaatacagattcgcctccattttctggtcacatgatctctggcacatctaaataa

SEQ ID NO: 872225 - DNA, 120 bp, Artificial Sequence
  ENSG00000225937_2 (sequence is synthesized)
ggatgatcacctgcctcccagatctccccatgcagccgctgtggctagggggcacagctggggctgtgctgagtttcatttgggaatatacgataccctttcacccacgttgtggagtca

SEQ ID NO: 872226 - DNA, 120 bp, Artificial Sequence
  ENSG00000225937_3 (sequence is synthesized)
aaaatgctctttaatttttatgtcagttgaggaaaactgctgctactcctgctcccgagtgagactggatgtgaatgggctcaaagcacaagttgtaaggaatttagttctcttgaaacc

SEQ ID NO: 872227 - DNA, 120 bp, Artificial Sequence
  ENSG00000225937_4 (sequence is synthesized)
tctttttaaaaaaaaatcctgtagtttcacagcacatacctatatgacagcaatgtaattattttcattgaatgaacaatggttaagatcataataaaatggactgtggaagcatagcag

SEQ ID NO: 872228 - DNA, 120 bp, Artificial Sequence
  ENSG00000225937_5 (sequence is synthesized)
gattcataaggaagtccagcttcggtcctagagaaagttaggatgcttgtctaagatcagtacgacttcagcgactgggagaaaaaggggtgtggaagttaacctgtggaccctgcagtc

SEQ ID NO: 872229 - DNA, 120 bp, Artificial Sequence
  ENSG00000225937_6 (sequence is synthesized)
acaaggccaagttcaaagctgatttctaccacttattagcaagtgtggacgttactaaacctcatggcaccttaagactgctcatttacagaatggacagtaatcatgatgttctttaaa

SEQ ID NO: 872230 - DNA, 77 bp, Artificial Sequence
  ENSG00000225937_7 (sequence is synthesized)
aggcaggagaatcgctgcattccacactccagcgctggcaacagagtgagactccctccaccccctccccccctcca

SEQ ID NO: 872231 - DNA, 120 bp, Artificial Sequence
  ENSG00000225937_8 (sequence is synthesized)
gcaacagagtgagactccctccaccccctccccccctccaaaaaaaaaaaagttctggaagacggaaagtccaagatcaagatcctgacatactcgctgtctgatgagcacctgcctcct

SEQ ID NO: 872232 - DNA, 120 bp, Artificial Sequence
  ENSG00000225937_9 (sequence is synthesized)
gattcataggctgccatctttttgctgtgtcctcacgtgacagaaaaggtgaggttctctctgaggtctcttttataagggcaataatcccactcatgggggctctggccccatgacatg

SEQ ID NO: 872233 - DNA, 120 bp, Artificial Sequence
  ENSG00000225937_10 (sequence is synthesized)
atcacctcccaaaggctccacttcctaatactatcattttggggatttggattttaacatatgaagtttggggcaacacaaacattcagaccggcgagtagggagaaaataaagcacttc

SEQ ID NO: 872234 - DNA, 120 bp, Artificial Sequence
  ENSG00000225937_11 (sequence is synthesized)
tttgtacatgacttcattcttgggcttcctagtattccagtacctgaacatggcagcagaagaggtctaaatggaagcaattattgtattatctattgcctcatacaggttttgagaacc

SEQ ID NO: 872235 - DNA, 120 bp, Artificial Sequence
  ENSG00000225937_12 (sequence is synthesized)
acaagccttcctaccctccacactgacccgggaaaggtggggccactctatgtggtgcagcatccttctttatgggacagtataagatggtaaatggagaggctaccccatttctgttcg

SEQ ID NO: 872236 - DNA, 120 bp, Artificial Sequence
  ENSG00000225937_13 (sequence is synthesized)
cacacagttctgctgtcatcaacagcagccaagttcttttcgtgtgtagctgtattccttcttgatgagataaaactaagaaatgtgctcaattgtagccttgctgtatagaaagcacaa

SEQ ID NO: 872237 - DNA, 120 bp, Artificial Sequence
  ENSG00000225937_14 (sequence is synthesized)
gaggctaccttgtaccttctcttccttatttacaggttagagtctatttattagtaagctgccaggttgatgagtcaaggaattatgaagctctggcagttgcttgcctccagccccatc

SEQ ID NO: 872238 - DNA, 120 bp, Artificial Sequence
  ENSG00000225937_15 (sequence is synthesized)
aaaagagacagggtttcattatgttgcccaggctggacttgaactcctgagttcaaatgatctgcctgcttcggcctcccagagtgctaggactacaggcatgagccatagcacttggcc

SEQ ID NO: 872239 - DNA, 120 bp, Artificial Sequence
  ENSG00000225937_16 (sequence is synthesized)
tgtcctcacgtgacagaaaagaatccatcaagcttgagttgatttattgaactgtctcttggctcagcagtacaactacagcaaatgaactggtctgcaggctcactgacactctctgaa

SEQ ID NO: 872240 - DNA, 120 bp, Artificial Sequence
  ENSG00000225937_17 (sequence is synthesized)
gatggcgggttcctaaaaagtcatgagagttgagggatgcatttcagtgtatgctcagagacatcatggctttcatcatcttccttcttcttctgagtaaccaactctagaagcaatttg

SEQ ID NO: 872241 - DNA, 120 bp, Artificial Sequence
  ENSG00000225937_18 (sequence is synthesized)
acttggagcgtcagtggaggcgtcttaaatctggatgactgaactgcattagaagagacagagtctcactgtcagttaggatggagtgcagcaccgtgatactagctcactgcagtctca

SEQ ID NO: 872242 - DNA, 120 bp, Artificial Sequence
  ENSG00000225937_19 (sequence is synthesized)
tgagtagctgggactacaggcaagcatcacaatgcccagatgaatcacggtgtttggaaaggatgcaggcattttctaccccacagaactttacaatccatacaagcatttctctctaca

SEQ ID NO: 872243 - DNA, 120 bp, Artificial Sequence
  ENSG00000225937_20 (sequence is synthesized)
tccatacaagcatttctctctacattatcacatttaaccctcaacacaatctggataggtggataagaaggctgaaaccacaggaaatttttgtgatgggtccaggaaaaaaaaaattac

SEQ ID NO: 872244 - DNA, 120 bp, Artificial Sequence
  ENSG00000225937_21 (sequence is synthesized)
gggtagcaaatggctgtgaatttaaagtcaaagcttctgatccttttctattccatgatcacccttgaccaggggaactggtccaggcaacgtagtctaggaggggctcagggggttcag

SEQ ID NO: 872245 - DNA, 120 bp, Artificial Sequence
  ENSG00000225937_22 (sequence is synthesized)
acaggagcagatcagaaggtggcaaatagggacaagaacctaaggtctgctctgctccagtgcaaagcaggtgtttgctggagaagcagacttcatactggaagaaacaagcccctttta

SEQ ID NO: 872246 - DNA, 120 bp, Artificial Sequence
  ENSG00000225937_23 (sequence is synthesized)
gctggtggccactgagctgactgagttacagtcccctcgaggtagagtgttcagccacagaagccttgcctgctcacctccccgtctgggtctccctccctggagaccaccatttgaggt

SEQ ID NO: 872247 - DNA, 120 bp, Artificial Sequence
  ENSG00000225937_24 (sequence is synthesized)
gtaatggaaatagtgcatttgatgcctgcctctgtcacagagtttttgtgtgactgtgaactcatacttacctctgatacaaacaggaagcagggagatactgggtagaagagggcagtt

SEQ ID NO: 872248 - DNA, 120 bp, Artificial Sequence
  ENSG00000225937_25 (sequence is synthesized)
cccttaccccaccctcaatcctggaaacccgtatccctaaatgggaataagcattcctgttttcacacccaaatgttgccttttggcccaccacgccctgctatcctgtgcccacacaga

SEQ ID NO: 872249 - DNA, 120 bp, Artificial Sequence
  ENSG00000225937_26 (sequence is synthesized)
ccccaaaccccaggctccatgagcagatgagcagaagagcagagggacagcagaagagcagcgtggcagagaaggagagaagaaaaggagtgtctgaacatcgagaggactttggctggg

SEQ ID NO: 872250 - DNA, 120 bp, Artificial Sequence
  ENSG00000225937_27 (sequence is synthesized)
ccaggggaagatcatcttcccactccattccctttccagctccccatccatcctgctgaaagccatcttcgtctggcaataaaatcccccacatttaccatctttcaatttatccatgtg

SEQ ID NO: 872251 - DNA, 120 bp, Artificial Sequence
  ENSG00000225937_28 (sequence is synthesized)
atttaccatctttcaatttatccatgtggcctgattcttcctggatgctggacaagaacccaggtaccaagagggcactgagctggttaacacttaagccatctgtggactgcagagtta

SEQ ID NO: 872252 - DNA, 120 bp, Artificial Sequence
  ENSG00000225937_29 (sequence is synthesized)
aaagagcactgtagcatgcccactggggctttgggagtcacaggcacccagccctagatgctaccacggggccggagcccagaagcactcgccctggctcctgcacctgcccatctgcgt

SEQ ID NO: 872253 - DNA, 120 bp, Artificial Sequence
  ENSG00000225937_30 (sequence is synthesized)
gctcctcctcccataaggggtttgagcacacagctgccaaacagatgagccacacccctgtcacacgtcctgcgagggcagtcagggaattctccagtttcacttcctttgtacactaac

SEQ ID NO: 872254 - DNA, 120 bp, Artificial Sequence
  ENSG00000225937_31 (sequence is synthesized)
gattcataggctgccatctttttgctgtgtcctcacgtgacagaaaagccttctccatctcctacacactctgaaataatctgtcagaagatcctcatcctgccgtgctggcttactctg

SEQ ID NO: 872255 - DNA, 120 bp, Artificial Sequence
  ENSG00000225937_32 (sequence is synthesized)
aggaagaatcagcatgagtcaacccaccaggtttcccagagcttaatccagaagggacccaaacactagggctgctggagctaccttcaccaatacaggggtaatcatagtaccttttac

SEQ ID NO: 872256 - DNA, 120 bp, Artificial Sequence
  ENSG00000225937_33 (sequence is synthesized)
tgggaggattaagtgagataatgcttactcaactgccaggtacacggggaaatttgaacacagagacatgcatagagggaaggtgatgtgaagatgaaggcagagatccaggtgatgctt

SEQ ID NO: 872257 - DNA, 120 bp, Artificial Sequence
  ENSG00000225937_34 (sequence is synthesized)
ctatgcaccaagaacactacagattaccagcaaaccatcagaagctaggggacaggcatggagcagattctctcccacagctcttggaaggaacttatcctaccaacgccttgatcatgg

SEQ ID NO: 872258 - DNA, 86 bp, Artificial Sequence
  ENSG00000225937_35 (sequence is synthesized)
aaaagaaaaaagagagagctgcagtctttttcatttagcctcctatgaacatatgtctaggtcacaaatcctttccttgtatcctc

SEQ ID NO: 872259 - DNA, 120 bp, Artificial Sequence
  ENSG00000225937_36 (sequence is synthesized)
aaatcctttccttgtatcctctgaccttgtggcgtcctgtgtccttttactgtgctcaggcctccaggttggagtcatgcaaaaccatctaagaaacaactgagccttaggaaaagctag

SEQ ID NO: 872260 - DNA, 120 bp, Artificial Sequence
  ENSG00000225937_37 (sequence is synthesized)
aagagcttcttctactaaatgataaacatcaaaggcagtccaagagttttaaagcccaaatgagaaagaatgcccccgctacacacacatagcaccctacactcacgtcacctaaggttt

SEQ ID NO: 872261 - DNA, 120 bp, Artificial Sequence
  ENSG00000225937_38 (sequence is synthesized)
atatcttaatgacttcataaaatatgttcattataaaacatttgtagaaactcacaaaaaaaaacctaattcccagttaattactatattaaatgtattccttctcatcttctctctgta

SEQ ID NO: 872262 - DNA, 120 bp, Artificial Sequence
  ENSG00000225937_39 (sequence is synthesized)
cttctatgagtgttctcttttgcaatagtgtgaccctattacacataatattttttaacttctcttttcaaaattaacagccctctaagcattcttttcaacttctaaaattaaatcttg

SEQ ID NO: 872263 - DNA, 120 bp, Artificial Sequence
  ENSG00000225937_40 (sequence is synthesized)
ttgtggccatagatgacttctgtttgcttttgtaactccagctgccagcctactgctttgcacacagtaagtgttcaataactattgaaaaagtgaatgtatgaatgagtgaatgatgat

SEQ ID NO: 872264 - DNA, 120 bp, Artificial Sequence
  ENSG00000225937_41 (sequence is synthesized)
gtggcttgcagctctcaaaacagtttggcagctaagagaggctgaggctgaaggaggggagggaagaagctgatttgcagctgttctggaagacggaaagtccaagatcaagatcctgac

SEQ ID NO: 872265 - DNA, 120 bp, Artificial Sequence
  ENSG00000225937_42 (sequence is synthesized)
agcagaaatttatagacaccgctgcagggcagcacatataggtgtggagtgcatgaccatacaaaaatattacaggtcccgtattcagaaactgtaccaggagctatctactttagcaac

SEQ ID NO: 872266 - DNA, 120 bp, Artificial Sequence
  ENSG00000225937_43 (sequence is synthesized)
atagcctcaggtacaaatttacatgcaagaattcatattctaccaaataaatcccaggcaaacagagtaatgcaaaaacatatttcctgctgtcaagaaaatttctggcaaaattaatca

SEQ ID NO: 872267 - DNA, 120 bp, Artificial Sequence
  ENSG00000225937_44 (sequence is synthesized)
accattcatccattcaggctctttgcatacccttttgtcaaagagggaatactaagagatttcttttctcttccatgcactcatttcaatgaattgaagaatccatcaagcttgagttga

SEQ ID NO: 872268 - DNA, 120 bp, Artificial Sequence
  ENSG00000225937_45 (sequence is synthesized)
tttattgaactgtctcttggctcagcagtacaactacagcaaatgaactggtaacttctcctaaaaccagcagtgattcaattcaacaatatctgatttatttaactctttataattcca

SEQ ID NO: 872269 - DNA, 120 bp, Artificial Sequence
  ENSG00000225937_46 (sequence is synthesized)
gatttaacttatttttgcatttctaagcagaacaattttttggataaaaccttgcatatttgcatgcattatttagtattctgaaagcagtgattaaaacatacagagcctaagacttct

SEQ ID NO: 872270 - DNA, 120 bp, Artificial Sequence
  ENSG00000225937_47 (sequence is synthesized)
tcttttaagagactttaatagcacatttaaattaggtagttttttaaacaacgacttatttaaatacctacagctgtgttttaaatgtttcaaagtgttttttttctggtggttaatgtt

SEQ ID NO: 872271 - DNA, 120 bp, Artificial Sequence
  ENSG00000225937_48 (sequence is synthesized)
aatattaacattagatgaccaatcactttggtttagagcactaaaaacatacaaaatgcttatttttgtatttaatcattctaccaggtaaggagaatcactgtgaggggatatttaagg

SEQ ID NO: 872272 - DNA, 120 bp, Artificial Sequence
  ENSG00000225937_49 (sequence is synthesized)
ccccatggagcccatttatcacacaaccaactttgcatttttctttgtaaagatgtacgacctttgcctattagatttcattagcagggcaccatacaaggctcctttgcacatggcagg

SEQ ID NO: 872273 - DNA, 120 bp, Artificial Sequence
  ENSG00000225937_50 (sequence is synthesized)
atagaaagctcaacatcctcgcctcgaggatttgtgggaacaagctcgtcttcaatctttgtccctgggaggcacttttaacacctgccaaccatagcactatcatcagaaaaacattta

SEQ ID NO: 872274 - DNA, 120 bp, Artificial Sequence
  ENSG00000225937_51 (sequence is synthesized)
gagatttatcttcgggctggtaattataagagataatttgtttggagtatggataaagttggtctagcataaacaaactagaggctcaaattacatgatgaacatcattaactattgatt

SEQ ID NO: 872275 - DNA, 120 bp, Artificial Sequence
  ENSG00000225937_52 (sequence is synthesized)
agatttttagagggatgaagtcaaaggtagcatgtgtcatagagcacattaacctttcaaagccctttgaaagactttgaaatatattattatcttatcacagcctcataatcaccctgt

SEQ ID NO: 872276 - DNA, 120 bp, Artificial Sequence
  ENSG00000225937_53 (sequence is synthesized)
gaagtgggcagagctggtgttggaatccaattttataagaaaactgacacggggagggagctaagagcttaagggcctcaaccaaactacattacgcatggattacctcgtatattccac

SEQ ID NO: 872277 - DNA, 120 bp, Artificial Sequence
  ENSG00000225937_54 (sequence is synthesized)
tattcttatcccattttccacaaagaacaccaaactgcagaagtaaaacaggatactaaggaggaagagaaaaatctcatggacaaatatatagtagatgtaaaaataaatgctagagtg

SEQ ID NO: 872278 - DNA, 120 bp, Artificial Sequence
  ENSG00000225937_55 (sequence is synthesized)
caggagtagaattcctggtttggataccagctgtagcccatgcagctctgtcattaagtagtgatgtggctcgatgtgaaaagtgacagcctcaagctctcggtttagagccatgcctat

SEQ ID NO: 872279 - DNA, 120 bp, Artificial Sequence
  ENSG00000225937_56 (sequence is synthesized)
aaacacaggaagtactcaataaatgacactattaatagtctttaatgctatcatgaatgatgataacaaaaagaatggggttggcaagcaccactgagcctttcccaaatataagtctat

SEQ ID NO: 872280 - DNA, 120 bp, Artificial Sequence
  ENSG00000225937_57 (sequence is synthesized)
ataatcgcttaccagaaatccctggaaccagggatatagtttgttactgaatttttttttttttaatttgagaaaggtaaaatggtgcttataatgtatactatgaatcaacccaagtga

SEQ ID NO: 872281 - DNA, 120 bp, Artificial Sequence
  ENSG00000225937_58 (sequence is synthesized)
agcctagggcagctcccctaaagcacacaaatatatatgcatcaaaatatataaagagggataaaggccataaatatcacatcagagtttgctgtcagagtttcaaaagccctagagttt

SEQ ID NO: 872282 - DNA, 120 bp, Artificial Sequence
  ENSG00000225937_59 (sequence is synthesized)
aaaagccctagagttttcggaactctttagatttcaaaattgtagatgggggactacagacctggattaattctcaataaaatgttaactatccaccaggcgcggtggctcatgcctgta

SEQ ID NO: 872283 - DNA, 120 bp, Artificial Sequence
  ENSG00000225937_60 (sequence is synthesized)
ccgagggagaccaggaagatctgcatggtgggaaggacctgatgatacagaggtaagtgctttataaagcactcaatttctactcagaaatttttgatggccttaagttcctctactcgt

SEQ ID NO: 872284 - DNA, 120 bp, Artificial Sequence
  ENSG00000225937_61 (sequence is synthesized)
tggatttatcctcacggagtctggattttctacccgggctcacctccgtccctccatatttgtcctccactttcacagatccctgggagaaatgcccggccgccatcttgggtcatcgat

SEQ ID NO: 872285 - DNA, 120 bp, Artificial Sequence
  ENSG00000225937_62 (sequence is synthesized)
gagactccctccaccccctccccccctccaaaaaaaaaaaaggtctctggctttgagtgtgaattttcttcacggtttacaattctggaagacggaaagtccaagatcaagatcctgaca

SEQ ID NO: 872286 - DNA, 120 bp, Artificial Sequence
  ENSG00000225937_63 (sequence is synthesized)
tactcgctgtctgatgagcacctgcctcctgattcataggctgccatctttttgctgtgtcctcacgtgacagaaaagatccctgggagaaatgcccggccgccatcttgggtcatcgat

SEQ ID NO: 872287 - DNA, 120 bp, Artificial Sequence
  ENSG00000225937_64 (sequence is synthesized)
gagcctcgccctgtgcctggtcccgcttgtgagggaaggacattagaaaatgaattgatgtgttccttaaaggatgggcaggaaaacagatcctgttgtggatatttatttgaacgggat

SEQ ID NO: 872288 - DNA, 120 bp, Artificial Sequence
  ENSG00000225937_65 (sequence is synthesized)
aaacaaaatggaatactgtgatgacatgaggcagccaagctggggaggagataaccacggggcagagggtcaggattctggccctgctgcctaaactgtgcgttcataaccaaatcattt

SEQ ID NO: 872289 - DNA, 120 bp, Artificial Sequence
  ENSG00000225937_66 (sequence is synthesized)
catatttctaaccctcaaaacaaagctgttgtaatatctgatctctacggttccttctgggcccaacattctccatatatccagccacactcatttttaatatttagttcccagatctgt

SEQ ID NO: 872290 - DNA, 120 bp, Artificial Sequence
  ENSG00000225937_67 (sequence is synthesized)
actgtgacctttctacactgtagaataacattactcattttgttcaaagacccttcgtgttgctgcctaatatgtagctgactgtttttcctaaggagtgttctggcccaggggatctgt

SEQ ID NO: 872291 - DNA, 120 bp, Artificial Sequence
  ENSG00000225937_68 (sequence is synthesized)
gaacaggctgggaagcatctcaagatctttccagggttatacttactagcacacagcatgatcattacggagtgaattatctaatcaacatcatcctcagtgtctttgcccatactgaaa

SEQ ID NO: 872292 - DNA, 120 bp, Artificial Sequence
  ENSG00000225937_69 (sequence is synthesized)
ttcatttcccacttttgtgcccattctcaagacctcaaaatgtcattccattaatatcacaggattaacttttttttttaacctggaagaattcaatgttacatgcagctatgggaattt

SEQ ID NO: 872293 - DNA, 120 bp, Artificial Sequence
  ENSG00000225937_70 (sequence is synthesized)
aattacatattttgttttccagtgcaaagatgactaagtcctttatccctcccctttgtttgattttttttccagtataaagttaaaatgcttagccttgtactgaggctgtatacagcc

SEQ ID NO: 872294 - DNA, 120 bp, Artificial Sequence
  ENSG00000225937_71 (sequence is synthesized)
acagcctctccccatccctccagccttatctgtcatcaccatcaacccctcccatgcacctaaacaaaatctaacttgtaattccttgaacatgtcaggcatacattattccttctgcct

SEQ ID NO: 872295 - DNA, 120 bp, Artificial Sequence
  ENSG00000225937_72 (sequence is synthesized)
gagaagctcttccttgtctcttaaatctagaatgatgtaaagttttgaataagttgactatcttacttcatgcaaagaagggacacatatgagattcatcatcacatgagacagcaaata

SEQ ID NO: 872296 - DNA, 120 bp, Artificial Sequence
  ENSG00000225937_73 (sequence is synthesized)
ctaaaagtgtaatttgattataagagtttagataaatatatgaaatgcaagagccacagagggaatgtttatggggcacgtttgtaagcctgggatgtgaagcaaaggcagggaacctca

SEQ ID NO: 872297 - DNA, 120 bp, Artificial Sequence
  ENSG00000225937_74 (sequence is synthesized)
tagtatcttatataatatacttcatttctctatctctatcacaatatccaacaagcttttcacagaattcatgcagtgcaaatccccaaaggtaacctttatccatttcatggtgagtgc

SEQ ID NO: 872298 - DNA, 120 bp, Artificial Sequence
  ENSG00000225937_75 (sequence is synthesized)
gctttagaattttggcaaatcatactggtcacttatctcaactttgagatgtgtttgtccttgtagttaattgaaagaaatagggcactcttgtgagccactttagggttcactcctggc

SEQ ID NO: 872299 - DNA, 120 bp, Artificial Sequence
  ENSG00000225937_76 (sequence is synthesized)
gggcaggttctgtgagataagacaaatcaaagggaggtgtgtacggtgccagcgactgcttcagagaatcttcctccaaaggagggtcaccaccatacaggaagtgttcaggctctctca

SEQ ID NO: 872300 - DNA, 120 bp, Artificial Sequence
  ENSG00000225937_77 (sequence is synthesized)
gtaaatcttcatcgatattctggcccattacatcatattcaaaatcaccccacgaggcttcagatgagcagatatcttgcttccctaggtccccatcaactggcgtttccggatggcctt

SEQ ID NO: 872301 - DNA, 120 bp, Artificial Sequence
  ENSG00000225937_78 (sequence is synthesized)
cggataatgtcagtttactcatgtcatctattgttcccgtggatgtgttgagacctgaggcatcgctgaaactgtggtcaaaggcagcttcgcttatatccagacaagtgtctgaggcta

SEQ ID NO: 872302 - DNA, 120 bp, Artificial Sequence
  ENSG00000225937_79 (sequence is synthesized)
gcaaagcatcaggaaccaaggcaggattctctgtggataaatgtggatcaccatcaaacaaagctcttgcaccaggctgactttcaggagaaaagctgtctgatatccaagaaccgtcac

SEQ ID NO: 872303 - DNA, 120 bp, Artificial Sequence
  ENSG00000225937_80 (sequence is synthesized)
gatgacaatataatgtctaagtagtgacatgtttttgcacatttccagcccctttaaatatccacacacacaggaagcacaaaaggaagcacagagatccctgggagaaatgcccggccg

SEQ ID NO: 872304 - DNA, 120 bp, Artificial Sequence
  ENSG00000225937_81 (sequence is synthesized)
acagaagaaatagcaagtgccgagaagctggcatcagaaaaacagaggggagatttgtgtggctgcagccgagggagaccaggaagatctgcatggtgggaaggacctgatgatacagag

SEQ ID NO: 872305 - DNA, 120 bp, Artificial Sequence
  ENSG00000225937_82 (sequence is synthesized)
gaattacaacacatatacttagtgtttcaatgaacaccaagataaataagtgaagagctagtccgctgtgagtctcctcagtgacacagggctggatcaccatcgacggcactttctgag

SEQ ID NO: 872306 - DNA, 120 bp, Artificial Sequence
  ENSG00000225937_83 (sequence is synthesized)
tactcagtgcagcaaagaaagactacagacatctcaatggcaggggtgagaaataagaaaggctgctgactttaccatctgaggccacacatctgctgaaatggagataattaacatcac

SEQ ID NO: 872307 - DNA, 120 bp, Artificial Sequence
  ENSG00000225937_84 (sequence is synthesized)
agtgtgcctctctctctttgacccattatttcagacttaaaaacaagcatgttttcaaatggcactatgagctgccaatgatgtatcaccaccatatctcattattctccagtaaatgtg

SEQ ID NO: 872308 - DNA, 120 bp, Artificial Sequence
  ENSG00000225937_85 (sequence is synthesized)
ataataatgtcatctgttaacataaaaaaagtttgacttcacaaaagcagctggaaatggacaaccacaatatgcataaatctaactcctaccatcagctacacactgcttgacatatat

SEQ ID NO: 872309 - DNA, 120 bp, Artificial Sequence
  ENSG00000225937_86 (sequence is synthesized)
tgttagaagcacctcgcatttgtgggttctcttaagcaaaatacttgcattaggtctcagctggggctgtgcatcaggcggtttgagaaatattcaattctcagcagaagccagaatttg

SEQ ID NO: 872310 - DNA, 120 bp, Artificial Sequence
  ENSG00000225937_87 (sequence is synthesized)
aattccctcatcttttaggaatcatttaccaggtttggagaggattcagacagctcaggtgctttcactaatgtctctgaacttctgtccctctttgtgttcatggatagtccaataaat

SEQ ID NO: 872311 - DNA, 120 bp, Artificial Sequence
  ENSG00000225937_88 (sequence is synthesized)
aatgttatctttgaactgatgctcataggagagaatataagaactctgagtgatatcaacattagggattcaaagaaatattagatttaagctcacactggtcaaaaggaaccaagatac

SEQ ID NO: 872312 - DNA, 120 bp, Artificial Sequence
  ENSG00000225937_89 (sequence is synthesized)
aaagaactctgagctgtcatcgtccccatctctgtgagccacaaccaacagcaggacccaacgcatgtctgagatccttaaatcaaggaaaccagtgtcatgagttgaattctcctatta

SEQ ID NO: 872313 - DNA, 120 bp, Artificial Sequence
  ENSG00000225937_90 (sequence is synthesized)
tggatgctagcttctggccatctctggctctcctcttgacacatattagcttctagcctttgcttccacgacttttatcttttctccaacacatcgcttaccaatcctctctctgctctg

SEQ ID NO: 872314 - DNA, 120 bp, Artificial Sequence
  ENSG00000225937_91 (sequence is synthesized)
ttgctttggacttccccacaagaatttcaacgactctcaagtcttttcttccatccccaccactaacctgaatgcctagacccttatttttattaatttccaatagatgctgcctatggg

SEQ ID NO: 872315 - DNA, 120 bp, Artificial Sequence
  ENSG00000225937_92 (sequence is synthesized)
ctatattgctttagatgaacattagatatttaaagctcaagaggttcaaaatccaactcattatcttctctttctttcacctccctgctcctctccctatattactgattgcactgaaca

SEQ ID NO: 872316 - DNA, 120 bp, Artificial Sequence
  ENSG00000225937_93 (sequence is synthesized)
gcatggtccccaatgtagccatgcaaatgagaaacccagtggctccttgtggtacatgcatgcaagactgctgaagccagaaggatgactgattacgcctcatgggtggaggggaccact

SEQ ID NO: 872317 - DNA, 120 bp, Artificial Sequence
  ENSG00000225937_94 (sequence is synthesized)
cctgggccttcgtgattgtcaggagcaagacctgagatgctccctgccttcagtgtcctctgcatctcccctttctaatgaagatccatagaatttgctacatttgagaattccaattag

SEQ ID NO: 872318 - DNA, 120 bp, Artificial Sequence
  ENSG00000225937_95 (sequence is synthesized)
gaactcacatgttttatctgccctatcaattttttaaacttgctgaaaattaagttttttcaaaatctgtccttgtaaattactttttcttacagtgtcttggcatactatatcaacttt

SEQ ID NO: 872319 - DNA, 120 bp, Artificial Sequence
  ENSG00000225937_96 (sequence is synthesized)
gattctttgttacaacttttcttactcttttatcaccaaagtggcttttattctctttattattattattttcttttactactatattacgttgttattattttgttctctatagtatca

SEQ ID NO: 872320 - DNA, 120 bp, Artificial Sequence
  ENSG00000225937_97 (sequence is synthesized)
ttttgttctctatagtatcaatttatttgatttagtttcaatttatttttattgctgacttttaaaataagtgattcggggggtgggagaacaggggagggagagcattaggacaaatac

SEQ ID NO: 872321 - DNA, 120 bp, Artificial Sequence
  ENSG00000225937_98 (sequence is synthesized)
agtcaacgtttgatggagacaaaatgttggagcctgctcctaccggcaaataaacggactcagggtcttcacgaatatgcagcacagccagctgggatccaggcagtctgtttttggtct

SEQ ID NO: 872322 - DNA, 120 bp, Artificial Sequence
  ENSG00000225937_99 (sequence is synthesized)
tgggactgtcttgtctctggacaaactcctcatcatgttccacaaggctatctttgccagcccctgacaaaagtgaactggatgaataattagacatgttggttcccatgccatcaagtc

SEQ ID NO: 872323 - DNA, 65 bp, Artificial Sequence
  ENSG00000225937_100 (sequence is synthesized)
gactgcaaccccaaagcatgctacacgaactctcacaactcaggaaccctcctcaagaactgcag

SEQ ID NO: 872324 - DNA, 120 bp, Artificial Sequence
  ENSG00000225937_101 (sequence is synthesized)
tcaatcctctattgttagagattaaatttataattatttattttttgtggtataaataaaactgcagtgaatacttcagaagataatttttgtatctatccctagttatctcttcaggat

SEQ ID NO: 872325 - DNA, 120 bp, Artificial Sequence
  ENSG00000225937_102 (sequence is synthesized)
aaattcctggatcttaaatttctgggtcaaagaatatattttaatgttcaccagaaagttatagaaatttaccttcccatccataaaaatacctagttttcaaaccttgtgtatttgaac

SEQ ID NO: 872326 - DNA, 120 bp, Artificial Sequence
  ENSG00000225937_103 (sequence is synthesized)
agaagaaatagcaagtgccgagaagctggcatcagaaaaacagaggggagatttgtgtggctgcagccgagggagaccaggaagatctgcatggtgggaaggacctgatgatacagaggt

SEQ ID NO: 872327 - DNA, 60 bp, Artificial Sequence
  ENSG00000225937_104 (sequence is synthesized)
ggtgacctgggcgacagtatgatactctgtttcaaaaaaaaaaacaaagttaactatcaa

SEQ ID NO: 872328 - DNA, 120 bp, Artificial Sequence
  ENSG00000225937_105 (sequence is synthesized)
gatactctgtttcaaaaaaaaaaacaaagttaactatcaaatatccagtgctcagtgaaaaagagcagggatcatttctaattatatgtggaggttaatttagaattaggcattgaagac

SEQ ID NO: 872329 - DNA, 120 bp, Artificial Sequence
  ENSG00000225937_106 (sequence is synthesized)
gaagctggcatcagaaaaacagaggggagatttgtgtggctgcagccgagggagaccaggaagatctgcatggtgggaaggacctgatgatacagagtttgataggagacaattaaaggc

SEQ ID NO: 872330 - DNA, 120 bp, Artificial Sequence
  ENSG00000225937_107 (sequence is synthesized)
tggaaggcactggatgcctgatgatgaagtggactttcaaactggggcactactgaaacgatgggatggccagagacacaggagatcagttggagcaagctcaataacaaagtggttcaa

SEQ ID NO: 872331 - DNA, 120 bp, Artificial Sequence
  ENSG00000225937_108 (sequence is synthesized)
gtttagcccaattgtttactagttgagtgaatgtggatgattggatgatcatttctcatctctgagcctcaggttccccatccataaaatgggatacacagtatgatctataaagtggga

SEQ ID NO: 872332 - DNA, 120 bp, Artificial Sequence
  ENSG00000225937_109 (sequence is synthesized)
tatagtatgatctacttcactgggttatttgaaggatgaattgagataatttatttcaggtgcctagaacaatgcccagattagtacatttggtggaactgagaaatggcataacaccaa

SEQ ID NO: 872333 - DNA, 120 bp, Artificial Sequence
  ENSG00000225937_110 (sequence is synthesized)
atttaatatatgtcagatgttactatgattatcattcaatctcatagttttgtcatggcccaatttatcctcacttgtgcctcaacaaattgaactgttaacaaaggaatctctggtcct

SEQ ID NO: 872334 - DNA, 120 bp, Artificial Sequence
  ENSG00000225936_0 (sequence is synthesized)
ctttcccgggccttggcggagctccgggaccgcgcagggcagcgccaggaacacgatgaacaggatgagcttccgcgagcggcggctctcctgcagccagcggaccagcgccagctcgct

SEQ ID NO: 872335 - DNA, 120 bp, Artificial Sequence
  ENSG00000225936_1 (sequence is synthesized)
cagggccatggctccggggctccgctgcgggcgcggtgcgcggtcccttttataagcaaaggagaaacaaacagatgccctctgacatcgctggagctctgcaggccctccgaggggacc

SEQ ID NO: 872336 - DNA, 120 bp, Artificial Sequence
  ENSG00000225936_2 (sequence is synthesized)
gtgggagcaagagctgttttcttgaaaagctacctagaataaatgttaccctgtcacagtctcttagcagaagagtgggcttgttttattaatgttagcttgttgacagcaggaggccac

SEQ ID NO: 872337 - DNA, 120 bp, Artificial Sequence
  ENSG00000225936_3 (sequence is synthesized)
ctgcccccgctctctccacctccctactcccttgcagagaccccctgtgcttctcattgctaccccatgtgtgagaagagatggttgaataggtaagtaggtcaggaacatgggtctcca

SEQ ID NO: 872338 - DNA, 120 bp, Artificial Sequence
  ENSG00000225936_4 (sequence is synthesized)
ggatgtcacaggatgtgcacaacttaaacattaaacagggaggacagaaggaaaaccacttaggaggaggaagcagatggcagagagccgtttaagatggcaggagggtatcactcaggg

SEQ ID NO: 872339 - DNA, 120 bp, Artificial Sequence
  ENSG00000225936_5 (sequence is synthesized)
agtgccccagagtgcttgctctggagtttcagaacccaaggatgcagactctaccccagggaccacatggggacagagaggcattatggtaaagggtgcctgccaggatgcccaggtccc

SEQ ID NO: 872340 - DNA, 120 bp, Artificial Sequence
  ENSG00000225930_0 (sequence is synthesized)
ccaaactgaagttgctggcgtctatcttccacgagaaccaggaggctcagctgcggctcacgctccactgcaacatgagaatgggacaacagaagaagtgacttcagaggaagaggaaga

SEQ ID NO: 872341 - DNA, 120 bp, Artificial Sequence
  ENSG00000225930_1 (sequence is synthesized)
agaggagatggctgaaacatataggaggtccaggcagcatgaacagctccctggtcagagacacatggatttgctcactggttactcaaagctgattcaaagccgattaaagctgctgct

SEQ ID NO: 872342 - DNA, 120 bp, Artificial Sequence
  ENSG00000225930_2 (sequence is synthesized)
tcatctggggtcccaacctccagtgggaaaaacattcttcttttcctgctggtgtcacccactgttccacggatccaaaacaacacccaatgtttggtacaaatttagtgaaacagctct

SEQ ID NO: 872343 - DNA, 120 bp, Artificial Sequence
  ENSG00000225930_3 (sequence is synthesized)
ttccattcttaactcatgccaagcatctcagcttggggtcaggaaaatgccaggggacatgagctcttctcctagagttagagaattctctgccttagttgcaataaaggaaaagataca

SEQ ID NO: 872344 - DNA, 120 bp, Artificial Sequence
  ENSG00000225930_4 (sequence is synthesized)
cattcttcctacaaatgccaaagtaggctcaaaatttggttcctagagtagagtattgaagtcgtggcaaagatctttccagtgatcaaagcagtggctcgttatgttccctcagactga

SEQ ID NO: 872345 - DNA, 120 bp, Artificial Sequence
  ENSG00000225930_5 (sequence is synthesized)
agctacagtctcatcttcactttctgttagctccctccatcctctgcgtaggcccacacctgcttcttacagttgtgtggattatagcacctcctctccagcctcaggacctttgtgagt

SEQ ID NO: 872346 - DNA, 120 bp, Artificial Sequence
  ENSG00000225930_6 (sequence is synthesized)
gctgctccttcttccttgactgctcttcaccagggatcctcagggcacagcccttacctcctgcaagtcttgacttaaatgtcactttctcagggaggcccacactcatcaccatttcac

SEQ ID NO: 872347 - DNA, 120 bp, Artificial Sequence
  ENSG00000225930_7 (sequence is synthesized)
acccacctcccacatgaccttattttacctgttctctcttctcctcttttttttagagtacttatgatctcatgtggtacattttggggtttttggttcttctgtatccgccactgccat

SEQ ID NO: 872348 - DNA, 120 bp, Artificial Sequence
  ENSG00000225930_8 (sequence is synthesized)
gatcagttagaatgttggaaaccaaggaaacttggttttttggcctgtgatgaaaactatggggtctaatagtatctgataaagtggcagaccctcaattattatttgctgagtaaatga

SEQ ID NO: 872349 - DNA, 120 bp, Artificial Sequence
  ENSG00000225930_9 (sequence is synthesized)
tttgctgagtaaatgaatgaaggtgtgtagacaactagctctagaagcttaaatgagtgataccatgttttataacattggaagaggccgggaatggtggctcacgcctgtaatctcagc

SEQ ID NO: 872350 - DNA, 120 bp, Artificial Sequence
  ENSG00000225930_10 (sequence is synthesized)
aaaaagaaagggggggaagaaaagaagaaggaagaggaaagggaggaggaggatttatcattcacttacactagaaacagtgaaaatagataatagctataatttactcacatcttatct

SEQ ID NO: 872351 - DNA, 120 bp, Artificial Sequence
  ENSG00000225930_11 (sequence is synthesized)
aaaacacaaattcagggtaatttatgagcaagtcattttccggtgggctttcgatagtgtgtgaatttggaatgaatgctggtacttccagctcccttccacctgcagcaccaggaagcc

SEQ ID NO: 872352 - DNA, 120 bp, Artificial Sequence
  ENSG00000225930_12 (sequence is synthesized)
attgttgtggggaggccaccaacttggctggcatgttgcttctgcctcagttagtgatgatggtgatttggagagaaaggacactctgctaggctccaaatccaaaggatcaagtggata

SEQ ID NO: 872353 - DNA, 120 bp, Artificial Sequence
  ENSG00000225930_13 (sequence is synthesized)
aatgaaatgaatatctaaataaatatcaattaggtcaaaagtttgttttcatctaaatgaaatctgaacactacttagggctatgaaacatagccagaggacatggccagctctggagtg

SEQ ID NO: 872354 - DNA, 120 bp, Artificial Sequence
  ENSG00000225930_14 (sequence is synthesized)
gggcctggacttgctctcccctgctggaagtgcttttcctcccagagctcagagcaccatgtgcgtgtgacccctgccttttcacaggccattgccacagggcatctccctggtccaccc

SEQ ID NO: 872355 - DNA, 120 bp, Artificial Sequence
  ENSG00000225930_15 (sequence is synthesized)
ggagagagagacagtcacacacaggcagtggagctcccctgcacccaccagggagcttgagcagctcatctgcagagcagggaaacatttttactaccattgggaagacgctgagcagag

SEQ ID NO: 872356 - DNA, 120 bp, Artificial Sequence
  ENSG00000225930_16 (sequence is synthesized)
aggtgaggggacagcatttcttgtctccctgtggcttgttccactcacagttcagtttctcctgttcttggggaaaaggagggaaactgtattagtcagggttctacagagaaacagacc

SEQ ID NO: 872357 - DNA, 120 bp, Artificial Sequence
  ENSG00000225930_17 (sequence is synthesized)
caataagatgtgtgcatgtgtgtgtgtgtttatatatgttcacagaatgtatatatgtgtatatatatgtatatggataactgcatatatatattatttatagagagagagaagagcagg

SEQ ID NO: 872358 - DNA, 120 bp, Artificial Sequence
  ENSG00000225930_18 (sequence is synthesized)
agacagagataaagagagattcatataaagaattatattcataatttatataataatttgttcctttaatcataaagtctggcaagtccaaaatctgcagggcaggccagaagcctgggc

SEQ ID NO: 872359 - DNA, 120 bp, Artificial Sequence
  ENSG00000225930_19 (sequence is synthesized)
accccggaaagagttgcatctagactctgaagacggtctggaggcagaattccctctttcccagggaattccagtctgttttctctgaaggcctttactgactagatgaggcccccacac

SEQ ID NO: 872360 - DNA, 120 bp, Artificial Sequence
  ENSG00000225930_20 (sequence is synthesized)
acatggaaagcaatctgccctactgaaagtctactgacttagaggtttagctcatctaaaaaataccttcgtagcaatttcgagactggtatttgaccaaatagctgagtaggttggcct

SEQ ID NO: 872361 - DNA, 120 bp, Artificial Sequence
  ENSG00000225930_21 (sequence is synthesized)
agccaatctgacacataaaattaactatcacagaaacaaaataatcaatataggtaataactgtgccagaatgctgtgatgtttcaggatgaccttgtttacatttacatttattgtcaa

SEQ ID NO: 872362 - DNA, 120 bp, Artificial Sequence
  ENSG00000225930_22 (sequence is synthesized)
aacttaccttctctttttatatgggcaattaaatctgctactgagggtatcaagtactgatttaatttacaatcttaatagataagataggttcctattttctcctctccataaaagtaa

SEQ ID NO: 872363 - DNA, 120 bp, Artificial Sequence
  ENSG00000225930_23 (sequence is synthesized)
taagtttggagaaaccaggtcggaaatacctctccagattttaaagcataacctcttgtttggaataataagtatgtaaataagcaccataaaatatgaaaccaaacatttcatcattct

SEQ ID NO: 872364 - DNA, 120 bp, Artificial Sequence
  ENSG00000225930_24 (sequence is synthesized)
tttatatacattatcccttgcatttttaaaaaataaggaacaccttattagccatattttcaaatggtgaaaccaacacccccagctcagactctgccgtggtaggctccagggtcactg

SEQ ID NO: 872365 - DNA, 120 bp, Artificial Sequence
  ENSG00000225930_25 (sequence is synthesized)
ataccagatcccatggtattttcactatatcccactctttctttgcatgtggctcttttttagctgcattgcgggtaaacaggtgtggctcttttcaaaccaattccatgcatatgtgaa

SEQ ID NO: 872366 - DNA, 120 bp, Artificial Sequence
  ENSG00000225930_26 (sequence is synthesized)
gaaaattgatcctgaagttccttttgccaaagatgcttatggagaagtgtctgtgtctggacagacaaaagtgtccatttttgcctcgaagcttggcaaaattgaaattgatgatgggga

SEQ ID NO: 872367 - DNA, 120 bp, Artificial Sequence
  ENSG00000225930_27 (sequence is synthesized)
agctagaaatacttcagtctacatttcgaatcccagctgcggggaggctggttgaggattgcccatccctcagtctgggctggattctccctccagtctctggggttctcttttctattc

SEQ ID NO: 872368 - DNA, 120 bp, Artificial Sequence
  ENSG00000225930_28 (sequence is synthesized)
acaagagggtgctaatgagatggtttaatctctataccctgtggtccacaaatacaagatgccagcgtggccaatggggcttccataagagtggcaatcaggggtctcaagcttaccatg

SEQ ID NO: 872369 - DNA, 120 bp, Artificial Sequence
  ENSG00000225930_29 (sequence is synthesized)
acgttttgggccctggaatcagatcatagttctacagttgtcctggcactagaactcatgacaaggttgtgactagacagaaggagagaaggctggaggctgacaggaagcaatgtgaac

SEQ ID NO: 872370 - DNA, 120 bp, Artificial Sequence
  ENSG00000225930_30 (sequence is synthesized)
aaatgccttcgcaggatgcatgggtttgggcaacagatggtcaggggaggtgctggtgcagacgggctcagtagcaaagcaataactgtggatggccattttatggctgcagatcacagc

SEQ ID NO: 872371 - DNA, 120 bp, Artificial Sequence
  ENSG00000225930_31 (sequence is synthesized)
acatttataaaagatgtgtgtttcatgaaaatgtgcatttcatcgtggaaatactgtggttggaggagatttctcaaagctgataaataagtgtaggtgacttaacttgcaaaagatgat

SEQ ID NO: 872372 - DNA, 120 bp, Artificial Sequence
  ENSG00000225930_32 (sequence is synthesized)
catatgtgagaacggatgtctcaaattaggaaataacttgttaagtaaaaaagcctcatgtattgatttgaagaaaaagatattttggtgctcatcaaaataaaagtataataagctgaa

SEQ ID NO: 872373 - DNA, 120 bp, Artificial Sequence
  ENSG00000225930_33 (sequence is synthesized)
cccaggccgccacacagctcccgccaagacctggtgccccttgccattttccagccgcgctcccaggagagtggaggctgcaggaagaggcgggtctttaggctcacaagagctcggcca

SEQ ID NO: 872374 - DNA, 120 bp, Artificial Sequence
  ENSG00000225930_34 (sequence is synthesized)
gaaaaaagaagacatggcctcagaagagatgctccctgagaagctgggccactttctcatgtgactgcagagtaatccatccctgcgtggagctgacaaggcaccaagctgctgggcatg

SEQ ID NO: 872375 - DNA, 120 bp, Artificial Sequence
  ENSG00000225930_35 (sequence is synthesized)
tcacttttttggtatgtctctgtggcattggacatcttctgcctcatattagatgcattgtgtagtgtttacttatccctaatttgcagccgcttatctgagcatagacactagaccact

SEQ ID NO: 872376 - DNA, 120 bp, Artificial Sequence
  ENSG00000225930_36 (sequence is synthesized)
ccatctttgcctctataaatatcaggtgtaggacctcgtacttgacaggtgctcataagatatctttctctccctttttttttttttacttgagttcaagtgatgagggtctagtaatag

SEQ ID NO: 872377 - DNA, 120 bp, Artificial Sequence
  ENSG00000225930_37 (sequence is synthesized)
gtattgctaagcagagcaaattcaaataattgtttagaaaagtattgatgactgtatctgattaagagtataaaaaatgggggaggagctatgctgagcccccaattttaagttagagac

SEQ ID NO: 872378 - DNA, 120 bp, Artificial Sequence
  ENSG00000225930_38 (sequence is synthesized)
aggagaattctgatgcctgccacaattgatatcttataatgctgcatttgcaagcttaacattcaatcgtttttcatttagagtccaaagcaatcattgaccatggtgcctgggtgttgg

SEQ ID NO: 872379 - DNA, 120 bp, Artificial Sequence
  ENSG00000225930_39 (sequence is synthesized)
ctgtgaagcctgaattctaaaacacaattgtaaacgtattttgccttatattgagataagcacatacaatacttaagacatgcaatattttaaagaaatacaaaaaaattgctaactggc

SEQ ID NO: 872380 - DNA, 120 bp, Artificial Sequence
  ENSG00000229005_0 (sequence is synthesized)
taacgagatgtgagcagaaacaacctgtgtcacacctgggcagaagctttaaaggccagtgctgcccttgttggggaagcaagtatagatatgaatcgttccacaacgcggagcgccccc

SEQ ID NO: 872381 - DNA, 120 bp, Artificial Sequence
  ENSG00000229005_1 (sequence is synthesized)
ataaagtcacctgtccaaggtcatactgtggatgtagctctaacccaagccctcccgactgcagcacaaattctcagccactaccctattagccccttcatttgaaggtgtcttcatcat

SEQ ID NO: 872382 - DNA, 120 bp, Artificial Sequence
  ENSG00000229005_2 (sequence is synthesized)
tgccaagattccttttcctcccggccccctaagtcttcaggattccctcatctcatctccccagagaagccatgacaccatcttctccaaaaacaaagtcagcgctttcactgtagatgg

SEQ ID NO: 872383 - DNA, 120 bp, Artificial Sequence
  ENSG00000229005_3 (sequence is synthesized)
ctaactatctcacaatataggtccccaaccactgaccaaactccagtccaggcagccaccagctggcctggtcttgctgcttcctttagcggcttccaaggtccagggacagggggtctg

SEQ ID NO: 872384 - DNA, 120 bp, Artificial Sequence
  ENSG00000229005_4 (sequence is synthesized)
ggccaccaagaggctctgctaggctgtccctgcagccacagccaccccactggacccctgcctcccatctgagaggacagccctcttcctggagctgggatctgacacttgctgatacca

SEQ ID NO: 872385 - DNA, 120 bp, Artificial Sequence
  ENSG00000229005_5 (sequence is synthesized)
gctgggcgtgtactataggtataagaatagtctttggagcatcatctgagatagtgagccaagatcgtgcaactgcactccagcctgagtaacagagtgagactccatctcaaaacaaac

SEQ ID NO: 872386 - DNA, 120 bp, Artificial Sequence
  ENSG00000286915_0 (sequence is synthesized)
gggtgacaaagtgagaccctgtctcaataatagtaatagtaataataattgcatctaattttcacgtctgagaagattcttttaacttagggctaaagcaatcaatgatccttttaaacg

SEQ ID NO: 872387 - DNA, 120 bp, Artificial Sequence
  ENSG00000286915_1 (sequence is synthesized)
acttagggctaaagcaatcaatgatccttttaaacgagtggttcctaagcatatatgccataatcagacatctagaactggaaatggaccatcagatcaaagtccatgaggactcccacc

SEQ ID NO: 872388 - DNA, 120 bp, Artificial Sequence
  ENSG00000286915_2 (sequence is synthesized)
agcatcagtctccaagaatctgtacgtggctcccagagactgagaccaagacacattagcaggaggcaacttatttgaggaagcaccagagccagtgcccacaggaagaatggtccacag

SEQ ID NO: 872389 - DNA, 120 bp, Artificial Sequence
  ENSG00000286915_3 (sequence is synthesized)
gtgcactggggccagcacagatgactgcagctatgggtcacgagcaatggcaggacaactcagcagtcaagaacccagctacagtggaacaggagacattaatcctaggaagcagtgtgt

SEQ ID NO: 872390 - DNA, 120 bp, Artificial Sequence
  ENSG00000286915_4 (sequence is synthesized)
attatttttgtcccatactagtgattggaagagaaagtccaaccagactcagctctggactttggttcatcactgggagtggagaagtgctcgtcttcctttcatgtgaacaaagaagcc

SEQ ID NO: 872391 - DNA, 120 bp, Artificial Sequence
  ENSG00000286915_5 (sequence is synthesized)
tgtgggtccagaaacctttgatagtcatcttggaacgacagggagagaagcctgccaagaatgaaaccaacaatgaagaagtagaattgagaaacagagagaaacttggtcttgatctcg

SEQ ID NO: 872392 - DNA, 120 bp, Artificial Sequence
  ENSG00000286915_6 (sequence is synthesized)
tcattttaggagctaaatgaagactggcctgcagctctggactgttcaattacatgaacacttatattcccttattgcttgaaacagcctgttttacttaatttaaaagaatatatcaag

SEQ ID NO: 872393 - DNA, 67 bp, Artificial Sequence
  ENSG00000286915_7 (sequence is synthesized)
gaaacagcctgttttacttaatttaaaagaatatatcaaggtcaggctcatgcctgtaatccctggc

SEQ ID NO: 872394 - DNA, 120 bp, Artificial Sequence
  ENSG00000286217_0 (sequence is synthesized)
cttctagaaagaataggagcataaaacatccaagaacagacatctccaattgtttcattgttctgcagccaacccagggagaaaaactagcagtcctgtctgcaggacttttgaatttat

SEQ ID NO: 872395 - DNA, 120 bp, Artificial Sequence
  ENSG00000286217_1 (sequence is synthesized)
tttgaatttattttgaattcggttgccacatgagcaggtggttcatgtcatgaagtggcacttctgcaaagccttgagatttcattctgaaacatagagtgtgagcagcaatatgatcat

SEQ ID NO: 872396 - DNA, 120 bp, Artificial Sequence
  ENSG00000286217_2 (sequence is synthesized)
ataggggtgagtataaaatctggtgagggatgggtggggtcccgcaacttcacctgcaataaaaatgaagacaggtgacacagaaagtgctttcaaccttatccctgcattctcttaatt

SEQ ID NO: 872397 - DNA, 120 bp, Artificial Sequence
  ENSG00000286217_3 (sequence is synthesized)
gcacaagcagtcaacaccatggttcggtgttaaggcaggagtactccaacctgcaaggaatatttggagtgcaaattggggccaccctggacaactcccaatttgaggactttcataccc

SEQ ID NO: 872398 - DNA, 120 bp, Artificial Sequence
  ENSG00000286217_4 (sequence is synthesized)
agagccaaatgaaactgaaatctattgatgctgagtgggatgtggcctatacacttgcctctacttttactgactttcttgtttctcatcggcctagtgtttcctgggattggctcatcg

SEQ ID NO: 872399 - DNA, 120 bp, Artificial Sequence
  ENSG00000286217_5 (sequence is synthesized)
acctctacactaaatgtttccaaggtcatggagaacgaccccagtgggaatccattgagtgagtgtttccttctaaacactgtcatgttttaatgactgggcagctttgataattttaaa

SEQ ID NO: 872400 - DNA, 120 bp, Artificial Sequence
  ENSG00000286217_6 (sequence is synthesized)
accaagaattcccattacagccaccaataagaaaactcttgttctctcacttctatcagagggctgcatgaatctgttagaatgagaagcacttagctgtgtctggcttttgcctgataa

SEQ ID NO: 872401 - DNA, 120 bp, Artificial Sequence
  ENSG00000286217_7 (sequence is synthesized)
agtgacttcagagagctgaagggacttcaggagacgttggtttctctggcaggaacatttgaacgttgcttggactcctgcacaagccagctcattcactctgagagcaccagagatatc

SEQ ID NO: 872402 - DNA, 120 bp, Artificial Sequence
  ENSG00000286217_8 (sequence is synthesized)
caggataaagggaggcagtgaagtcaagggcctggtcgtcttttgcagacacccacctctggggtctcagagagcccctgtgaggcccaggaagaagggaggcagtgaggtcaagagcct

SEQ ID NO: 872403 - DNA, 120 bp, Artificial Sequence
  ENSG00000286217_9 (sequence is synthesized)
ggcaatctttcattgacaccctcgtctggggtctcagcgacaatttcctgcggcttggcagagaaagagacctctgtggaggtgcgtcagtggtggactctcacctgttggatgcagggg

SEQ ID NO: 872404 - DNA, 120 bp, Artificial Sequence
  ENSG00000286217_10 (sequence is synthesized)
atagtcccatcatcctaggtgagcgcagacgtgagccagcctgaagaaacggcagccatagcctcaggaataaaccgcaatatccctaatgatccaaaaagatctgcaggatttctcagg

SEQ ID NO: 872405 - DNA, 120 bp, Artificial Sequence
  ENSG00000286217_11 (sequence is synthesized)
cctgcctacacatcgtagcgcccttgccagaacggtggtgcagtgatgtattacctgccaacagcacaatgtgaggcagggtccagccgttctgcccagcatacaacttgagggagcagc

SEQ ID NO: 872406 - DNA, 120 bp, Artificial Sequence
  ENSG00000286217_12 (sequence is synthesized)
cccttttgaagacctccaggtggacttcacaggaatgccaaagtgtggagtgatcatgtgtggatcaaggactggaatgtagcccacccacaactacggtgggaaggaccccagaccatc

SEQ ID NO: 872407 - DNA, 120 bp, Artificial Sequence
  ENSG00000286217_13 (sequence is synthesized)
attttgacgactctcacagcatgaaaatagaaggattcccagcctggatcaatcacagtcatgtatcatctacattgtctgagacctgagaggtgagactgagcctggtggacccctgca

SEQ ID NO: 872408 - DNA, 120 bp, Artificial Sequence
  ENSG00000286217_14 (sequence is synthesized)
aagtgacattgagaaagatggcaagccctgctacagtcacaaccagaagcttactgttgtatgcatggcaaaagaatgaggatactcatcatgggatttattctccttaaaatttgtact

SEQ ID NO: 872409 - DNA, 120 bp, Artificial Sequence
  ENSG00000286217_15 (sequence is synthesized)
gacctctgtggaagtgtgttggttgtggagtcttgcctgtcttctctatggtatccacggggttgtcccatgatcctaggagaggaaaaacataagccagcctgaagatacgtcaagcac

SEQ ID NO: 872410 - DNA, 120 bp, Artificial Sequence
  ENSG00000286217_16 (sequence is synthesized)
agccacaggaataaactgcaaaatccctaagaatccaaaaggatctgcaggatttctcaagcctgcctagatgtcgatgaaattccaagacaatggaggagtgtcccttcatgatgtgga

SEQ ID NO: 872411 - DNA, 120 bp, Artificial Sequence
  ENSG00000286217_17 (sequence is synthesized)
gaacctgcttggctcgaaactgaatttgaggtgaagttgtgggaccccattcaaccctcagcagatactatcctcacctgtatctgaccttattgtgttcacactgcatgtcacaggatg

SEQ ID NO: 872412 - DNA, 120 bp, Artificial Sequence
  ENSG00000286217_18 (sequence is synthesized)
aaatcccaagatgatggaggagtgcccctcatgatgtgaagcacttgatcaactggtaacataatgtgaggggaagtttcaggacaccatccacccctcatcagattgtatttacactcc

SEQ ID NO: 872413 - DNA, 120 bp, Artificial Sequence
  ENSG00000286217_19 (sequence is synthesized)
tacctcaccttgctgtagcttacactgtatgtcccagggtgaaaccccaagacaatggaggagggccaagtcatgatctgaagcaccaactcagctgggaaccaaatttgaggtgaagtt

SEQ ID NO: 872414 - DNA, 120 bp, Artificial Sequence
  ENSG00000286217_20 (sequence is synthesized)
gtgggaccccatccactcctcaccggattgtatccacatctttatctgtcttattgttgctcaagctctatgtcccaagatgaaatcccaagatgatgaaagagtgccttttcacgacgt

SEQ ID NO: 872415 - DNA, 120 bp, Artificial Sequence
  ENSG00000286217_21 (sequence is synthesized)
gacgcaactgcttggctggaactgaattcgtgataaattcaaggggcaatgtggacaggatttctactgtctcttagtgaaattgtgagacccaatccactcttcaccagattgtatcct

SEQ ID NO: 872416 - DNA, 120 bp, Artificial Sequence
  ENSG00000286217_22 (sequence is synthesized)
cacccctaactgaccttattgcagctcacattctatgtcccaagaccaaatcccaagatgatggaggagtgcaccctcacgacctgaagtacctgctcttcagggagctgaatttgaggt

SEQ ID NO: 872417 - DNA, 120 bp, Artificial Sequence
  ENSG00000286217_23 (sequence is synthesized)
ggagttgtgggaactcatccattcctcatcagattgtatgctaacccctatctgacattattgctgctcacactttatatgccagaataaaattccaagacagtggagaaatgccacctc

SEQ ID NO: 872418 - DNA, 120 bp, Artificial Sequence
  ENSG00000286217_24 (sequence is synthesized)
atgatgcgaagcacctgcttggctgggaaccgatttcgagttaaattcaagggaacctgtggacaggactgccggtatctctctctgggctggactcaggacaaagaaaaacagggagat

SEQ ID NO: 872419 - DNA, 120 bp, Artificial Sequence
  ENSG00000286217_25 (sequence is synthesized)
tctgcaagccttccaattcactgcgtattcataatccacagaaaaataaaaaaaacagagccccacagcccaagcagagccacacagataggttacaaaaaaattggtagacacatgaaa

SEQ ID NO: 872420 - DNA, 120 bp, Artificial Sequence
  ENSG00000286217_26 (sequence is synthesized)
aagaagtgttgaagtgcgttagccacatttctttaagccagctccacttacaggcatgcacacacacacaaacacataatgccacacacacacacacatacagacatttaacacttacaa

SEQ ID NO: 872421 - DNA, 120 bp, Artificial Sequence
  ENSG00000286217_27 (sequence is synthesized)
cactcccccagaaacacacagccagatagctcttgagtctgtgtggttttgcagaaagccccacctgtgagagagtaaactcggggaacacagtggggatgtacctagaaatcacagagg

SEQ ID NO: 872422 - DNA, 120 bp, Artificial Sequence
  ENSG00000286217_28 (sequence is synthesized)
ggcaactttcaaaaagactcacccatcaggcaggcctggggaatcctgaaggtccctttgtatccttagggatttcatacccctccacaaaaagaaggctgtgcagttgaaatgaaacag

SEQ ID NO: 872423 - DNA, 120 bp, Artificial Sequence
  ENSG00000286217_29 (sequence is synthesized)
tggctagattaccagtaagaagccagacatgacggccttcttctcatgctacaggaatcatgcagccttccaatagaattgggagaacaggagtttccttgttggaggctgtaatgaaaa

SEQ ID NO: 872424 - DNA, 120 bp, Artificial Sequence
  ENSG00000286217_30 (sequence is synthesized)
tttatggttttaaaagtatcaaagctgtccagccattaaaacgtgatagtgtttagaaggaaacactcaagcaatgaattcccatgagtgccattctccgtgtactgggaaacttttcat

SEQ ID NO: 872425 - DNA, 120 bp, Artificial Sequence
  ENSG00000286217_31 (sequence is synthesized)
gtgaaagtaattgagccagaatcagaaaaccctgggctgacatggaacatggaaatcacaaaaggaagagtaaagttgtgggaccccatccacccttcatcagtttgtatcttcaccact

SEQ ID NO: 872426 - DNA, 120 bp, Artificial Sequence
  ENSG00000286217_32 (sequence is synthesized)
atctgaccttattgctgctgacactccttgtcacaggatgaaatcccaagatgatgcaggtgttcctcctagagatgttaagtgcctgcttgggtggaaaccgaattggagttaaattca

SEQ ID NO: 872427 - DNA, 120 bp, Artificial Sequence
  ENSG00000286217_33 (sequence is synthesized)
agaagccctgcagacaggactactagtgtctctttctggtttggccacaggacaatgaaaccctggaagacatctgttaattggtgtgctcctcttctttttagaagagtggcttttttg

SEQ ID NO: 872428 - DNA, 120 bp, Artificial Sequence
  ENSG00000286217_34 (sequence is synthesized)
cagtgggaggtgatttggatgccggacattcttggcccacctcccacttcactgcagattcaacatgcacataaaaataaggaacacaaagccacacagccaaagcagagccacacagac

SEQ ID NO: 872429 - DNA, 120 bp, Artificial Sequence
  ENSG00000286217_35 (sequence is synthesized)
agccacaggaataaactgcaaaatccctaagaatccaaaaggatctgcaggatttctcaagcctgcctagatgtcgtaagtgaatctttgaacatcgcttggactcgttcacaagtcagc

SEQ ID NO: 872430 - DNA, 120 bp, Artificial Sequence
  ENSG00000286217_36 (sequence is synthesized)
tcattctctcagcgctactggacaccattctcaggctggcaattgccacagagggcatctgagacattgtctcaacttcatctgcaccagtgggaggcctttcccaggtgggagaacact

SEQ ID NO: 872431 - DNA, 120 bp, Artificial Sequence
  ENSG00000286217_37 (sequence is synthesized)
cagtgttcctggctttcccagagagccactgcaaggcccaggatgaagggaggcagtgagattaaggacacaatcatctttcactgacatccaactctgggacctcagaaagcctttgtg

SEQ ID NO: 872432 - DNA, 120 bp, Artificial Sequence
  ENSG00000286217_38 (sequence is synthesized)
aggcccaggatgaagggaggcaatgaggttaagggcccaactgccagaatatattccaatacccacgggacttgattactgcacacagcctctttcgtgaatggtgtcaaaagggccatt

SEQ ID NO: 872433 - DNA, 120 bp, Artificial Sequence
  ENSG00000286217_39 (sequence is synthesized)
tcctcaggcctgcctagacgttgtacgggtgagtctttttgaatcttgccccactgtgatttctaggtacagatcatctgtgttccccagggttgctctctcctagatggggctttctgc

SEQ ID NO: 872434 - DNA, 120 bp, Artificial Sequence
  ENSG00000286217_40 (sequence is synthesized)
ccatccctcaagagattgtatcatcacccctatctgaccttatttctgctcacactttatgtcccaagatgaaatcccaaaacgatggaggagtgccccttcaggacatgaagcacctgc

SEQ ID NO: 872435 - DNA, 120 bp, Artificial Sequence
  ENSG00000286217_41 (sequence is synthesized)
tcagctgggaactgaatctgagatgaagttgtgggaccccatccacccctcaccagattgtatcctcacccctatctgacctttttcctgctgacactccttgtcccaggatgaaatctt

SEQ ID NO: 872436 - DNA, 120 bp, Artificial Sequence
  ENSG00000286217_42 (sequence is synthesized)
aaaatgatggagaagtgaggcttcatgaggtgaaacatctgctcgacagggaactcaagtcgagatgaagttgcaagacatcttctacccctcaacagactgtatcttcacctctatctg

SEQ ID NO: 872437 - DNA, 120 bp, Artificial Sequence
  ENSG00000286217_43 (sequence is synthesized)
accttattgctgctcacattatttgtctcaagataaaatcccaaaactctggaggggtgctgcctcacaagatgcatcacctgctcagttgggaaccaaatttgaggtgaagttgcaaga

SEQ ID NO: 872438 - DNA, 120 bp, Artificial Sequence
  ENSG00000286217_44 (sequence is synthesized)
ccccatccacccctcactacattgtatcctcattcctatctgatcttattgctgctcacactctatatcccaggataaaatcccaagacaatggaggagtacctcctgaggatgtgaagc

SEQ ID NO: 872439 - DNA, 120 bp, Artificial Sequence
  ENSG00000286217_45 (sequence is synthesized)
acctgcttgactcagaactgaatttgaggaagaagatggatggaacataaagtaagcccactccgttagaaactatgctgaaaaatttcaagaaaccagcaaaacttagaactttgtgtg

SEQ ID NO: 872440 - DNA, 120 bp, Artificial Sequence
  ENSG00000286217_46 (sequence is synthesized)
agatagactggctagcttctggcactacaacaaaacttgagggtaaataaacatttaattggaatgaatcatagaaaactgattagaagaatacttgatgttcatgataattgtggtgca

SEQ ID NO: 872441 - DNA, 120 bp, Artificial Sequence
  ENSG00000286217_47 (sequence is synthesized)
agacagttttaagtatgtttttagtatttttatagttcaggaagatatattctaggagcagttttagatgactcttatttctgtagtaatattcaatatagtgtacctgctttgtagtca

SEQ ID NO: 872442 - DNA, 120 bp, Artificial Sequence
  ENSG00000286217_48 (sequence is synthesized)
gaagaaggctagaagttgaattcaggcattttcttccaataaagctaattatggctcattcccattgacaaggtgtagatttggattagcaattgtaattacatctgtgattcttaatta

SEQ ID NO: 872443 - DNA, 120 bp, Artificial Sequence
  ENSG00000286217_49 (sequence is synthesized)
atgatgttaattcagagatatgtaaagtgcaagtgagcttctctgctgtcactggccttccaacatttttatccagtgttgtatttgaaatttctgcttctgtaaataaatttttgaaga

SEQ ID NO: 872444 - DNA, 120 bp, Artificial Sequence
  ENSG00000286217_50 (sequence is synthesized)
tcagcggtggactctcgcctgtcttctctgtgggatcacggcatagttccatgatcttagtagagggcagacatgagccagcctaaagaaacctgcaccactgtgatttccagagggctg

SEQ ID NO: 872445 - DNA, 120 bp, Artificial Sequence
  ENSG00000286217_51 (sequence is synthesized)
ctgctgctggatggaacagcctcttgccacagattatttggctgccagggatttcaaagagcacaagagacttcagagagctgctacaaggctcaggatgaagggaggcagtgagataaa

SEQ ID NO: 872446 - DNA, 120 bp, Artificial Sequence
  ENSG00000286217_52 (sequence is synthesized)
gagcccagccatctttcactgacacccacctctggggtctcaggtatggttctatctcctaaggaatgctcaacaacgcaccagattttattccaatctccatgggacccgattctggta

SEQ ID NO: 872447 - DNA, 120 bp, Artificial Sequence
  ENSG00000286217_53 (sequence is synthesized)
ttctgcacacgtcagagacaagtttgaggtggatcataaatctgcagtgaattgggagacgtgctgagacctggcggcattcaaattatcaacccatgccaagaaagccactcttctaga

SEQ ID NO: 872448 - DNA, 120 bp, Artificial Sequence
  ENSG00000286217_54 (sequence is synthesized)
aagaaggggggtacaccagagaaaaaaaaatcccagtgtttcattgtcatgaggctaagccaggaagagacactacagtcttgtctgcagagcaccttaaatttatctgtaattcggttc

SEQ ID NO: 872449 - DNA, 120 bp, Artificial Sequence
  ENSG00000286217_55 (sequence is synthesized)
ccagctgagcaggtgctttattttacgagacggcactcctccattgttttgggattttaccctgggaaatagaatgtaagcagcaatatcccatagaggtgaggatgcaatctgatgagg

SEQ ID NO: 872450 - DNA, 120 bp, Artificial Sequence
  ENSG00000286217_56 (sequence is synthesized)
aaaaaaaaaaaagaagaagaagacaaataccacagaagtttctttcaacaccatcctcagattcctttaattgcaaaagcagtccataacatagcctggtgttcaactgggactactcca

SEQ ID NO: 872451 - DNA, 120 bp, Artificial Sequence
  ENSG00000286217_57 (sequence is synthesized)
acatagcctggtgttcaactgggactactccagagtgcaaggaatatttagagtgcaaattagagccatcctttcatacctgaagccaaaaggaagtggaatagattgatgcttattagg

SEQ ID NO: 872452 - DNA, 120 bp, Artificial Sequence
  ENSG00000286217_58 (sequence is synthesized)
atgtaacctccacacttgcctcttccttttctgactttcatgttcctcatcatcctgggttttcctgagtctagctcagcaacttccatagtaaatgtttccccactgactgagaacgac

SEQ ID NO: 872453 - DNA, 120 bp, Artificial Sequence
  ENSG00000286217_59 (sequence is synthesized)
tctcatgggaatccatcgtgtaaatgtttccttctaaacactgtcatgttttaatgactaggcaactttgataattttaaaattctaaattccctttacagccaccaacaaggaaactct

SEQ ID NO: 872454 - DNA, 120 bp, Artificial Sequence
  ENSG00000286217_60 (sequence is synthesized)
tgttctcctgcttctataggagggctgcatgattcctgcagagagagaagcatgtagcattgtctgacttttgcctggtaatctagcctctgtgtcattttatctgcatgacattctcat

SEQ ID NO: 872455 - DNA, 120 bp, Artificial Sequence
  ENSG00000286217_61 (sequence is synthesized)
tgtggagggtttctttaaatgggccattgctggattggactgccttttgccacagattgtttagctaccagggatttctgagagcaaagcggacttcgggtcagctggctacactctagg

SEQ ID NO: 872456 - DNA, 120 bp, Artificial Sequence
  ENSG00000286217_62 (sequence is synthesized)
ttgtgggtcatttcctccctctgggggctgaggttgtttgcactttgtaggattcttttgggtcctctgccaggaatcattgaacattgcttggactccagcagaaggtagtttgttctt

SEQ ID NO: 872457 - DNA, 120 bp, Artificial Sequence
  ENSG00000286217_63 (sequence is synthesized)
tcaggtgagacttgatttttctttgctttcatggggaatccacagtacccatcaacagcacaactggacacatttttgtcagcttgccagcaccacacaccccctttaagaaactgtttt

SEQ ID NO: 872458 - DNA, 120 bp, Artificial Sequence
  ENSG00000286217_64 (sequence is synthesized)
aacctcatgtgcaaactggagaggccagtccgaggtgtgagaacactctccacgttggacttggctttgtcgtggttcctacctttaccataaagccccagatgaatggaagaactgagg

SEQ ID NO: 872459 - DNA, 120 bp, Artificial Sequence
  ENSG00000286217_65 (sequence is synthesized)
tcaagagtttggccatctttgactgacagccatctctgaggtctcagctatgattatatcacccaaagaacccttgaaaacacaccagattatattccaatccccatggaccagattctg

SEQ ID NO: 872460 - DNA, 120 bp, Artificial Sequence
  ENSG00000286217_66 (sequence is synthesized)
gtacacagccttcttcatgagtggagtcagaaaagcagtttccagcaacccccgcacaatgtcgaaaagccttctcttccagcaggaccaaaccacaggatggccgatgtgtccttgacg

SEQ ID NO: 872461 - DNA, 120 bp, Artificial Sequence
  ENSG00000286217_67 (sequence is synthesized)
tcaagacttttagggtctgaccatgggttttcacatggaacctttttttctgatacaaggacagctctgcctataccattttcctctgcttaggcaggctgacggctctgacagccggat

SEQ ID NO: 872462 - DNA, 120 bp, Artificial Sequence
  ENSG00000286217_68 (sequence is synthesized)
gctcaaacctgtgtcatgaatgcgcatgcaccagtctctggtcacgaggcctgattgtgagctctgtctagcgacacaatgaatgacacagttgcctagtaaaaagtccctgcagcttgg

SEQ ID NO: 872463 - DNA, 120 bp, Artificial Sequence
  ENSG00000286217_69 (sequence is synthesized)
cagagaagacatccgtggaggtgcattggtggtgggctctcgcgtgtcttctctgtggtatccatgggaatgtcccatgatcttaggatatgacagatgtgagtcaggctgaagaaacat

SEQ ID NO: 872464 - DNA, 120 bp, Artificial Sequence
  ENSG00000286217_70 (sequence is synthesized)
caagcacccccccaggaatgaaccgcaaaatgcctaagcatccaaaaataatccgcaggattcctcaggccagcctacacactgtaggggtgtctttttgaaatttctcacattgtgatt

SEQ ID NO: 872465 - DNA, 120 bp, Artificial Sequence
  ENSG00000286217_71 (sequence is synthesized)
tccaggtacagcccacctgtgttccctggggtgttctctttcaggtggggcttcctgcagaaccacgcagcctcatgagctgcagagctgtgtgtttctgtaggagtgttgtgagtgttg

SEQ ID NO: 872466 - DNA, 120 bp, Artificial Sequence
  ENSG00000286217_72 (sequence is synthesized)
gatgtctgagtgtgtgtggctttgtgtgtgtgtgtgtctgtgtgtgtgtgcacctgtaagtaaagtcttacaaaaatgtggctaaagaacatcagcacttcatttttttttgtcacccag

SEQ ID NO: 872467 - DNA, 120 bp, Artificial Sequence
  ENSG00000286217_73 (sequence is synthesized)
ccttttgtttgcctgtcgtgtgcctctgcttgggctgcagaggtccatgttctttacgttttcatggataatgaatctggagtgaattaggaggcagcccaagaccgtcagtgtcaaaat

SEQ ID NO: 872468 - DNA, 120 bp, Artificial Sequence
  ENSG00000286217_74 (sequence is synthesized)
catttccctctggaaaaaaaaaaaaaatcactcttctagaaaaaagaggagacaaccatagcaagaaaatggatatctcatagtgtgtaattgtcctgtggccaacccagaaaaagacac

SEQ ID NO: 872469 - DNA, 120 bp, Artificial Sequence
  ENSG00000286217_75 (sequence is synthesized)
acctcgaattcagtatcccaccgagcaggtgcttcatgtcatgaggaggagtgcctctattgtcttgggatttgatcctagggcatagagtgtgagcagcaataaggtcataaaggggtg

SEQ ID NO: 872470 - DNA, 120 bp, Artificial Sequence
  ENSG00000286217_76 (sequence is synthesized)
aagatacagtctggtaaggcatggatggggttccgtaacttcacctccaaaaatgataataacaataaagagagattacacagatggtgcttccaactccatccccaccttccctttatt

SEQ ID NO: 872471 - DNA, 120 bp, Artificial Sequence
  ENSG00000286217_77 (sequence is synthesized)
gtactagcagtccacaccgtggcccagtgttcaagtggcagttctccaatgtgaaagaaacatttggaatgcaaactgggtccatactgacaaattccagatttgagggcttacatacct

SEQ ID NO: 872472 - DNA, 120 bp, Artificial Sequence
  ENSG00000286217_78 (sequence is synthesized)
ggagccaaataggagtggaatggatcaatgctgggtggcatgtagcctccacactttcctcttcttttcttgacttccatgttcctcattggcctagagtttcctggatcttgctcaaag

SEQ ID NO: 872473 - DNA, 120 bp, Artificial Sequence
  ENSG00000286217_79 (sequence is synthesized)
atttccacactaaatatttcccagttcttggagaatgactctcatctgtatccatttcatgagtgtttccttttaaacactgttgcaattaaatgactgggcaaatttgattatttttaa

SEQ ID NO: 872474 - DNA, 120 bp, Artificial Sequence
  ENSG00000286217_80 (sequence is synthesized)
actgtaaattcctgttacagccaaaaacaaggaacctctagttcccccacttctatcagagggctgcatgatttccacaagattagaaggatatagccacgttggcattttgcctggtaa

SEQ ID NO: 872475 - DNA, 120 bp, Artificial Sequence
  ENSG00000286217_81 (sequence is synthesized)
tctagcctgttttatttcatcttcacttcacggcattctcattgtggatgggctcttttcattgggctgtttctggatgggactgcctcttgccacatattatttagctcccaggtattt

SEQ ID NO: 872476 - DNA, 120 bp, Artificial Sequence
  ENSG00000286217_82 (sequence is synthesized)
cagagagcaaaagggacttcgggtacgctggctgttcagcaaggtgtgggttgttgtctcatagtggaggctgaggttgtttgcaccttgcaggaggctttcgggtcttctgaaaggaat

SEQ ID NO: 872477 - DNA, 120 bp, Artificial Sequence
  ENSG00000286217_83 (sequence is synthesized)
cattgaacattgctttgactccagcacaaggcagctctttacctcagatgagccttgatttttccttgctttcatggggaatcgatactgcccctcaacaacagtactggacaccctttt

SEQ ID NO: 872478 - DNA, 120 bp, Artificial Sequence
  ENSG00000286217_84 (sequence is synthesized)
gagtcctgccattgacacaggttacctctgagacactgtctcaatctcatctgcacctctgagaggccagttcaaggtgtgagaacattggtctaccttggacttgcctttgtcatggtt

SEQ ID NO: 872479 - DNA, 120 bp, Artificial Sequence
  ENSG00000286217_85 (sequence is synthesized)
cctgtctttcccaggaagtctcttgggggtccaggatgaagggaggcagtgagttgaagggcacagccatctttcactgacatcaaactccggttctcagatatggttttatcacccaaa

SEQ ID NO: 872480 - DNA, 120 bp, Artificial Sequence
  ENSG00000286217_86 (sequence is synthesized)
gaacccttgaaaacacaacagattatattccaatccccatgggacctgattcttgcacacaatctctttcaggaatggagtccgaagagaagttttcagataccagcccacagtctcaaa

SEQ ID NO: 872481 - DNA, 120 bp, Artificial Sequence
  ENSG00000286217_87 (sequence is synthesized)
acaccttctccttcagtgggacctgaccagagagatgacttataggggtcatgaggtcaagatatttatgatctcacagtgggttttcgcaggaagacttttttctgatactagcatggc

SEQ ID NO: 872482 - DNA, 120 bp, Artificial Sequence
  ENSG00000286217_88 (sequence is synthesized)
tctgactgtaccagtattctctgcttaggcagtctgacagctctgacaaccaggcaccacaacctgcctcacaaacatgtatacacaaatctcagggcaacaggccttattgagagcttc

SEQ ID NO: 872483 - DNA, 120 bp, Artificial Sequence
  ENSG00000286217_89 (sequence is synthesized)
ggtgactgtcacaataaatgtcaccactgcctagtgacaagtctctaaggcttttcagaggagtcttccatggaaattcataggctgtggactctctcctgtcttctctgtcggatccac

SEQ ID NO: 872484 - DNA, 120 bp, Artificial Sequence
  ENSG00000286217_90 (sequence is synthesized)
aggacagtcccatgattctaggaaagggcagatgtgagccaggctgaagaaacatcaagcagagccccaaaaataaaccttgaaatccataaggatcataaagaatctgcaagattcctc

SEQ ID NO: 872485 - DNA, 120 bp, Artificial Sequence
  ENSG00000286217_91 (sequence is synthesized)
aggtctgcttagacgtaggtgtaagtctttttgaaacttgtcccactatgatttgtaggtacagattgcctgtattccctggggtttctgtctcacaggtggggcttcctccagaaacac

SEQ ID NO: 872486 - DNA, 120 bp, Artificial Sequence
  ENSG00000286217_92 (sequence is synthesized)
gcagcctcaggagctgcaggctctgtgtttctgtgggagttttgagagtgctgaatctctgggtttgcgtgtggggggaggtattttaagtttgtgtgtgtgtgtgtgtgtgtgtgggtg

SEQ ID NO: 872487 - DNA, 120 bp, Artificial Sequence
  ENSG00000286217_93 (sequence is synthesized)
tgtgtgtgtctgtaagtgaaatctgcttacaggtatgtggctaacacacttcagtgcttctctcttttttttttttttgagtcttcaaatcttttggtggcccatttgtgtggttctgct

SEQ ID NO: 872488 - DNA, 120 bp, Artificial Sequence
  ENSG00000286217_94 (sequence is synthesized)
tgggttgtggggctctgtgttcttcattttactgtggatcatgaatcctcaatgaatcgggaggtgggctgagacccgcctgcatcaaaatcaactccctgtgccaaaaaagccactgtt

SEQ ID NO: 872489 - DNA, 120 bp, Artificial Sequence
  ENSG00000286217_95 (sequence is synthesized)
gcagaaagaagaggaggacagcccaccaaataacagacatcgcccagtgttttgttgtcctgtggctaagccaaggagagacactggaattcctgtccacagggcccattgaatttacct

SEQ ID NO: 872490 - DNA, 120 bp, Artificial Sequence
  ENSG00000286217_96 (sequence is synthesized)
cgaattctgttcccagcctagcaggtgcttcgtgtagtgaggaggtgatcctctgtcgtcttggcatttcatccttggatatagaatgtgagcagccataaggtcagataagggtgagga

SEQ ID NO: 872491 - DNA, 120 bp, Artificial Sequence
  ENSG00000286217_97 (sequence is synthesized)
tgcaatctagtaagtggtggatgtggtcccccaactacacatgcaaaaaaaaaaaaatgaaggtaaatgacaaagaaggtgcttcctactccattcccgctctctgttaattgtaggagc

SEQ ID NO: 872492 - DNA, 120 bp, Artificial Sequence
  ENSG00000286217_98 (sequence is synthesized)
agtcaaaaccatggcccagggttcaggttggagtaccccaatgagcaaggaaaatttggacagcaaattggggccatcctggcaagctcttgatttgagggctttcatacccagagccaa

SEQ ID NO: 872493 - DNA, 120 bp, Artificial Sequence
  ENSG00000286217_99 (sequence is synthesized)
aaagctctgactcatttcatctgcctgtcacttctaattgtggagagggtcttccattgggctcttgcctaatgggactgcctctcattaaacatctttggctgccatggaattcaggga

SEQ ID NO: 872494 - DNA, 120 bp, Artificial Sequence
  ENSG00000286217_100 (sequence is synthesized)
gcaaatgggatttcagagggctgcattattcctgtaagatgagaaacagacagcctattttggcttttgcatggtgatcaagcctctgttgtatttcatctgcaagtcttctcattagga

SEQ ID NO: 872495 - DNA, 120 bp, Artificial Sequence
  ENSG00000286217_101 (sequence is synthesized)
tctttaattgggctgtttctggatgagactgcctctcaccacagattatttagcagccagggatttcagagagcaaaagggacttcaggaccgtctcactggaggggttctgtcatttgg

SEQ ID NO: 872496 - DNA, 120 bp, Artificial Sequence
  ENSG00000286217_102 (sequence is synthesized)
ctgttgctggatgggactgcctctcaccacagattatttagctgcctggaatttcagagagcaaaagggacttcaggagaggacagacgtgagccagcctgaagaaacatcaagtaccac

SEQ ID NO: 872497 - DNA, 120 bp, Artificial Sequence
  ENSG00000286217_103 (sequence is synthesized)
cccaggaataaatcttgaattccctaaatatcaaaaggatctgcaagatttctgaggcctgcctacacattttagggtgcttcaagttgtgatggggcactccttcgtcatcttgtaatt

SEQ ID NO: 872498 - DNA, 120 bp, Artificial Sequence
  ENSG00000286217_104 (sequence is synthesized)
tcatcctgggacatagagtgtaagcaacattaagtgcccttcaacagcactaccagacatgttattcaggcttaccatcgtcactgtctcaacatcttctgcacctgtgagaggccagcc

SEQ ID NO: 872499 - DNA, 120 bp, Artificial Sequence
  ENSG00000286217_105 (sequence is synthesized)
cgagatgtgagaacactgttccaccttggacttgcctttgtcgtggttcctgtctttcccagagagcccctgcaagatgcaagatgaagggagacagctaggtctacagcccagacatct

SEQ ID NO: 872500 - DNA, 120 bp, Artificial Sequence
  ENSG00000286217_106 (sequence is synthesized)
ttcactgacacatgcctctggggcctcagccactcttctagaaagaagaggagcataccacaccaaaacacaagtatctattagcgttccatcatcctgcaaccaacccagcatgagaca

SEQ ID NO: 872501 - DNA, 120 bp, Artificial Sequence
  ENSG00000286217_107 (sequence is synthesized)
ggtttcctcattctggcttaacgacttcaacacaaaacgtttaaaacttcacttagaacgatcctcatgggaatccattgtagagtctcttcctttgggctgttcctggatgggactgcc

SEQ ID NO: 872502 - DNA, 120 bp, Artificial Sequence
  ENSG00000286217_108 (sequence is synthesized)
ctctttgtggaggggatcttttattggcttgttcctggatgggactgactttgaccaaatattatcaaggtgacagtgacttcagagagctgaagggacttcaggaatccagagtgaccc

SEQ ID NO: 872503 - DNA, 120 bp, Artificial Sequence
  ENSG00000286217_109 (sequence is synthesized)
tcaacagaactactggacactctttttgggcttaccatcactacagacggcctctggggcattatctcaaactcatctccacctgtgagtggacagtccgaggtgtgagaacactgctcc

SEQ ID NO: 872504 - DNA, 120 bp, Artificial Sequence
  ENSG00000286217_110 (sequence is synthesized)
aatgtggacttgcatttttcttggttcctgcctttccaagacagccctgagaggtccaggatgaagggaggcagcgaggtcaagaccccagccatctttcactgatatttacctctggtt

SEQ ID NO: 872505 - DNA, 120 bp, Artificial Sequence
  ENSG00000286217_111 (sequence is synthesized)
tctaaagtataattctaacacttaaagaaccctcaacaacactacagacaaaattcgaatccccatgggacctgattcttgcacacagcctctgtcgggcatggattcagaagggcagtt

SEQ ID NO: 872506 - DNA, 120 bp, Artificial Sequence
  ENSG00000286217_112 (sequence is synthesized)
tccactgaccacattagagtcttgaaatgcctcctcatccagctgggcctaaccacagagactgctagaaagggtcccgaggttgagaattttaggttcatgcagtaggctttaataggc

SEQ ID NO: 872507 - DNA, 120 bp, Artificial Sequence
  ENSG00000286217_113 (sequence is synthesized)
agcctttttcccaatagcagcccagctctgccgataccattttcctctgcttaggcaggctgacacctctgacagctgggcacctgagcctgcctcttgaatatgcatgtgctaaagtca

SEQ ID NO: 872508 - DNA, 120 bp, Artificial Sequence
  ENSG00000286217_114 (sequence is synthesized)
gggcattgggctgattttgagttttggttaacgtcacaatgaatgtcaccattgcctagtggcaagtccctgtggcttggcaaagaaggagaactctgtggaggtgcgtcgggcatggac

SEQ ID NO: 872509 - DNA, 120 bp, Artificial Sequence
  ENSG00000286217_115 (sequence is synthesized)
actcacctgtcttttttgtgggatccacaggataatcccatgatcctagaagaaggcagacatgagccagtctgaagaaaagccaagcacagccccagaaatagaccacaaaattcctaa

SEQ ID NO: 872510 - DNA, 120 bp, Artificial Sequence
  ENSG00000286217_116 (sequence is synthesized)
gtatccacaatatctgaaggactactcaggcctgccaagacgttgtagatgtgaatttttttaagtttgctgcactgttttttaggtacagcctacctgtttcccagggttgctgtctcc

SEQ ID NO: 872511 - DNA, 120 bp, Artificial Sequence
  ENSG00000286217_117 (sequence is synthesized)
cagttagtgtttcctgcagaaccacatagtttcaggagctgcaggtctttgtgtttctgtgggagtgtggtgagagttggatgtctgcgtgtgtgtagcattgtgtgtgtgtgtgtatgt

SEQ ID NO: 872512 - DNA, 120 bp, Artificial Sequence
  ENSG00000286217_118 (sequence is synthesized)
gttcctgtaattagagtctgcttaaaggaatgtggctgatgcactacaacacttctttgttttttttttgagtcccccaacctttggtggcctgtctttttgcctttgcttaggctgcag

SEQ ID NO: 872513 - DNA, 120 bp, Artificial Sequence
  ENSG00000286217_119 (sequence is synthesized)
ggctccgtgttctttattttctgttgatcatgaatctgcaaaggtttgtgagttggtccaagaacagctggagttcaaatcacctccctttccaaaaaaaaaaaaaaaaaaaaaacactc

SEQ ID NO: 872514 - DNA, 120 bp, Artificial Sequence
  ENSG00000244649_0 (sequence is synthesized)
tttaaagaaaagttatcttaaccattgagaagccttccttcctcagaggagagcacctccccagcagacctccgaggagaccaagggcaggacaggaagggtgaaaggaagtttcaggac

SEQ ID NO: 872515 - DNA, 120 bp, Artificial Sequence
  ENSG00000244649_1 (sequence is synthesized)
tgcaggaaataagagcttggaggtcaagggagagatcagataaaacatgaatctgatcagcatcctagtggtctagagtggagacaatctgcggagtcaacctcagtaaggacacacata

SEQ ID NO: 872516 - DNA, 120 bp, Artificial Sequence
  ENSG00000244649_2 (sequence is synthesized)
gagaagaaccaaagcctctaaagacgaagctgagaagtgtacggtcgtagaagactcgtgtctgttattcttaaaagctcaaggagatgttctgccaattgaatggaaactgtccatagt

SEQ ID NO: 872517 - DNA, 120 bp, Artificial Sequence
  ENSG00000244649_3 (sequence is synthesized)
ggggagcagagagcctcatcttttctggaactgaacatccatccttaaggccagatttctcccatcaccaactttaactcctgccctagccctctctcttccttttcaaaaccctctcca

SEQ ID NO: 872518 - DNA, 120 bp, Artificial Sequence
  ENSG00000244649_4 (sequence is synthesized)
cccaggaagggagattctggagccaagactgtaccagccacacctccccagagttgttaaggaaggaactcgaagccaggggtggtcttctggcaagcacccccactaccagtagcagga

SEQ ID NO: 872519 - DNA, 120 bp, Artificial Sequence
  ENSG00000244649_5 (sequence is synthesized)
cagatgtgtttctaatggactacactatccccggaggtcacatgattcaggctgccaagggtacctgcccttgggaaatcaactcccgaagataaattgggattgggtcctgagaagatc

SEQ ID NO: 872520 - DNA, 120 bp, Artificial Sequence
  ENSG00000244649_6 (sequence is synthesized)
tactggggagggcctgccccacatccggcagggcagctggaaccatgtgtttgatgacactctgctccctcaatgtggagcctcatcctcatctcacagtctagcaggcctctggtgggt

SEQ ID NO: 872521 - DNA, 120 bp, Artificial Sequence
  ENSG00000244649_7 (sequence is synthesized)
taggcttgtctcacccagtgtgtgagtttttttggaagtgacctgattttggagtttccctccaagcctttctcaggtacatgctttctcttttattctgtcttctttttttgatcttct

SEQ ID NO: 872522 - DNA, 120 bp, Artificial Sequence
  ENSG00000244649_8 (sequence is synthesized)
taaatctgattttctcctttttccctctcttgtctccatcttttttccagtctctcgcttctctttatttctccccatatttcactctgttctctcaccccaacctttcccttctgtttc

SEQ ID NO: 872523 - DNA, 120 bp, Artificial Sequence
  ENSG00000244649_9 (sequence is synthesized)
tctccctccctctcttcccaccccctgcctggccttccatatatcaagcagagttttatcaccttatgcaggggcagccctgccacctgccataaagttgataggctaatgacattttgt

SEQ ID NO: 872524 - DNA, 120 bp, Artificial Sequence
  ENSG00000244649_10 (sequence is synthesized)
ggatattgccatgtcacaagtccaggacagcatcaaaaatagccctgatgtctaaaccacttcagctatcttttttatttttaaaataaatacattcacatgcttttaagaaactataaa

SEQ ID NO: 872525 - DNA, 120 bp, Artificial Sequence
  ENSG00000244649_11 (sequence is synthesized)
aatatataaagtaaaaagatctttctctcacactgtctccacctctcctggtctcaccgttgtgcttaggggaaaccattgtgattagtttctcctgtgtccttccagagtgtctttatg

SEQ ID NO: 872526 - DNA, 120 bp, Artificial Sequence
  ENSG00000244649_12 (sequence is synthesized)
caaatgaaaattattgtgataatatattcctattttcccccttactacacaaaagatagactaccataatcccattctgcacttttttttcacttgataataaaaacatgattttattaa

SEQ ID NO: 872527 - DNA, 120 bp, Artificial Sequence
  ENSG00000244649_13 (sequence is synthesized)
cacatatgagttggttttccttacttaaaatatgcttatcatcccttggagcacttgaaaatattggctatttccttctgacccccatggtttcttttaaaaaatttgctgttgtttgaa

SEQ ID NO: 872528 - DNA, 120 bp, Artificial Sequence
  ENSG00000244649_14 (sequence is synthesized)
ttatttttctctacaggtattgactgctgcctcatgaaggctggtcctgtctctatagtgaatattgtgcacctcagggtagaatggagagcagaagacttcaaatcaggcagtctgggt

SEQ ID NO: 872529 - DNA, 120 bp, Artificial Sequence
  ENSG00000244649_15 (sequence is synthesized)
tcagaccccaattctagtgctaaatagctacgtgactttaggccgattgtgtgtgacttccctgagccccagtctctttgcctgcaaaatgagaaaaattataacaatgtcatcggttgt

SEQ ID NO: 872530 - DNA, 120 bp, Artificial Sequence
  ENSG00000244649_16 (sequence is synthesized)
tctgaggattctgagaggaattagtaggagagagaactaagaagctgcgggcctctacagagccattcaactggcatttcggaagatgttgcccatcagagtcagaccttcttagcatct

SEQ ID NO: 872531 - DNA, 120 bp, Artificial Sequence
  ENSG00000244649_17 (sequence is synthesized)
tccggctgggcccaaacttcccaagaccatttggacaaggtcatctctatcccaccatggcctcctcccagaggaggagaagaatcatgctgttacagcagaaccgaagatttgggcaag

SEQ ID NO: 872532 - DNA, 120 bp, Artificial Sequence
  ENSG00000244649_18 (sequence is synthesized)
ggagctaatgattatgttctgcgtcaggtcagagatgggctgggaaagccactccaaagccaagacaagcagtttcctggaaaaagaaggctgcgcggagcccagagtggcctggatcct

SEQ ID NO: 872533 - DNA, 120 bp, Artificial Sequence
  ENSG00000244649_19 (sequence is synthesized)
gcctcatttcctggaccagctccttaggtggttactggattgccaataaagcagagcttattaaagtcaacgagctcaggcttcatcgccgccatggtatccaagcaccagtctgtctgg

SEQ ID NO: 872534 - DNA, 120 bp, Artificial Sequence
  ENSG00000244649_20 (sequence is synthesized)
gatttcatttgccagatggacaaaggagaggttgttccaatacatatcctgagtggtgggggtggggagagaaggggaagaatgctctctagagaattctctttgtcctctgaagtaaat

SEQ ID NO: 872535 - DNA, 120 bp, Artificial Sequence
  ENSG00000244649_21 (sequence is synthesized)
tggatttttcctttacctgctgtgaagccttgaaaagtatgaattagcttgataatgatcctctaaagatgttcaagagttaaagacgtgtttaagttcttcaggcaatccaatatgact

SEQ ID NO: 872536 - DNA, 120 bp, Artificial Sequence
  ENSG00000244649_22 (sequence is synthesized)
acgggtttccaaaaatttgaaggaaactgaaaatcatagttcccaaaccagatattttccggtgtccagatgttcactggcatgcaaaccaaatgtctggattatgagctccttttttca

SEQ ID NO: 872537 - DNA, 120 bp, Artificial Sequence
  ENSG00000244649_23 (sequence is synthesized)
tttctttttatcagcttacatccagatgttggatccaactggtcagaggcctggggcagagacagaaatcaaatctagggtgttcatctagagtctcctgctcctccattcctgcttcct

SEQ ID NO: 872538 - DNA, 120 bp, Artificial Sequence
  ENSG00000244649_24 (sequence is synthesized)
cctcacgctgcccccacatcctccccaactcaccttcatgctacatctcggcaaatacagctcatatccaggcacggtgcagcccttgacagctgggtccgcaaaggcagatcgggtata

SEQ ID NO: 872539 - DNA, 120 bp, Artificial Sequence
  ENSG00000244649_25 (sequence is synthesized)
cacgagaatcatggagatgaataggggcaggataatttaccagaggaagcctagagtggagtgctggacagaccaccatgtggagttgccatctgaggacattgctacttggataccccc

SEQ ID NO: 872540 - DNA, 120 bp, Artificial Sequence
  ENSG00000244649_26 (sequence is synthesized)
acccacggcgccgtcggatcccagagcggctggtgcaagcttaaagtgttgctgccagacctttcttctcttctaatttaccaagtgaagaatgttgaaatatccaactataatttgtgg

SEQ ID NO: 872541 - DNA, 120 bp, Artificial Sequence
  ENSG00000244649_27 (sequence is synthesized)
atttctcctttcaatgctatcatttttggtgcttcatgtatttttgaagctctattattagcctctcttgaaccttcacagtccagccgagctgccatctcttcaaggaagttttccctg

SEQ ID NO: 872542 - DNA, 120 bp, Artificial Sequence
  ENSG00000244649_28 (sequence is synthesized)
gacattctggattcagctacccaaagaggggttttttccccctctttgtctctattatacattttataggaaggaattctgtcccagttaattcaaactgggaccagaggaacagggtcc

SEQ ID NO: 872543 - DNA, 84 bp, Artificial Sequence
  ENSG00000244649_29 (sequence is synthesized)
gagtgctggacagaccaccatgtggagttgccatctgaggacattgctacttggatacccccacaggacgcccagccaggcatg

SEQ ID NO: 872544 - DNA, 120 bp, Artificial Sequence
  ENSG00000260545_0 (sequence is synthesized)
cttcaatctctagcaccagggactggatgtcattatcagtgattcttttgatgtggccattccgtacctacaagaaagaaaattcgattagtactgaaatatctgacaaggctgaatagg

SEQ ID NO: 872545 - DNA, 120 bp, Artificial Sequence
  ENSG00000260545_1 (sequence is synthesized)
agcacactgaagcttatatacattagtctctgtgagctctgtcactgtgagtctgatccactcatggtctgcctggtgttctaaaggtgacatctgatgtcactgcccaccttttccaca

SEQ ID NO: 872546 - DNA, 120 bp, Artificial Sequence
  ENSG00000260545_2 (sequence is synthesized)
actgcaaccaagtcttgtctccttaaaaaagaataagctcaagcaagagccaagaccagttatgaagcatcatttctatcttcgacaatgcttagcacagtgctagccataaactaagcg

SEQ ID NO: 872547 - DNA, 120 bp, Artificial Sequence
  ENSG00000260542_0 (sequence is synthesized)
cccaggctggagaccccaggtcctaggagcctgtgtgggcaccagcaaggtggggacaggtgggcgcggggccgcccccttcagcctgcgcccgcagctctgtgggccccgcacccaggg

SEQ ID NO: 872548 - DNA, 120 bp, Artificial Sequence
  ENSG00000260542_1 (sequence is synthesized)
ctgccttgagggagcactggctctgtggccatgcttggctctgcgcctctccacctggcttcactgattcagtacctcacttcctctccctgacacgcattctgcgtggagctgaaatga

SEQ ID NO: 872549 - DNA, 120 bp, Artificial Sequence
  ENSG00000260542_2 (sequence is synthesized)
tatggaaggtcctccccatccccaggcacctctgagccagtaaatgtgggttcttctggaagacttggccccgccagtgcacctacggaatcgcgaccatggggtggaagcaaacatctc

SEQ ID NO: 872550 - DNA, 120 bp, Artificial Sequence
  ENSG00000260542_3 (sequence is synthesized)
ccctggggacaccgaagcccaagtcaagccccagcactgccgactccatgtgggtgaccgtggacaaagggctgggcccctcagagcctctgagatgcagagtgggtgacgtccaggtca

SEQ ID NO: 872551 - DNA, 120 bp, Artificial Sequence
  ENSG00000260542_4 (sequence is synthesized)
caggctgcagcgaggttgatgcccaggtccagcactgacgcccagcccgcccagcccaggtgaccacatccccacggctctcgtggcagaagcaccttccctagcacccctacacccctg

SEQ ID NO: 872552 - DNA, 120 bp, Artificial Sequence
  ENSG00000260542_5 (sequence is synthesized)
gggtgaaccaggcccacctgcgggtttccaggtggacgggcagagccagtgaacagcctcggataaacgcgtcacactcagacgcgggccggggccaggggtctctgacgggggtggacc

SEQ ID NO: 872553 - DNA, 120 bp, Artificial Sequence
  ENSG00000260542_6 (sequence is synthesized)
cccatctgcagaagtttctgcacaatctgtgtcttgacctgggcatctgtgaaccctaggccattccatggggccaccaagagtctcagtggtgattttaaactgtcgccctcggcagct

SEQ ID NO: 872554 - DNA, 120 bp, Artificial Sequence
  ENSG00000260542_7 (sequence is synthesized)
cagtgttcacagtcaacacagcaggctccccggccccggggcctcagggtccctctcccatcttgaagttcagccatgccctggacagaagccacatcctgacttccaaaaacgcaattt

SEQ ID NO: 872555 - DNA, 120 bp, Artificial Sequence
  ENSG00000260542_8 (sequence is synthesized)
ccactcttctgtgagcctggtgacaataacaaaaaccagcttcggtttcacgtggacctggtgtctggggtcagcaggagtgagagcactgacccaacaccgttcatctcccggcacctg

SEQ ID NO: 872556 - DNA, 120 bp, Artificial Sequence
  ENSG00000260542_9 (sequence is synthesized)
cctgtctcctgagcatctctgagctcaggaccctgggcagggtgtggggcatccggtacaggtggctcctcccgactcccctcacctctcccagggaagggacctccagccaggaggaac

SEQ ID NO: 872557 - DNA, 120 bp, Artificial Sequence
  ENSG00000260542_10 (sequence is synthesized)
cgggagcacctgtgtgggtcccaacaccgagcagcccacagtctccccagcaccgacaggcccccacgatggagagagagcagggccagggtcggacaaaagcaagtctgggaatggccg

SEQ ID NO: 872558 - DNA, 120 bp, Artificial Sequence
  ENSG00000260542_11 (sequence is synthesized)
gggccgccagccttgacctccagagctctgttaccgtgactactgatgccatcgttgttcttgttactggttttattttcattttcttcaaagacagtatatccacgtttgtttttctaa

SEQ ID NO: 872559 - DNA, 120 bp, Artificial Sequence
  ENSG00000260542_12 (sequence is synthesized)
aatctaactgcgccagatggcataaaaaatgagtctccctctcagccctggaggttcacggcccctccctagtggtcctcactgtcaccagcctctcctaggcccctgggcatggattca

SEQ ID NO: 872560 - DNA, 120 bp, Artificial Sequence
  ENSG00000260542_13 (sequence is synthesized)
gctcccccaggttccccatgatgacgatgttgttgtacacgttgatgccgtcacccccacagaagccccaagaggccagggacactagggctcacaggctttgctcaccagggcacagga

SEQ ID NO: 872561 - DNA, 120 bp, Artificial Sequence
  ENSG00000260542_14 (sequence is synthesized)
aggaccagacactgtctgagccgctgactcagtgtggccgaggcctggccaacccttcacaggcaggtggatggtggtaacccagccctgcctcctttccccggcgggccctgggcaccc

SEQ ID NO: 872562 - DNA, 120 bp, Artificial Sequence
  ENSG00000260542_15 (sequence is synthesized)
ttccctcccctggcctcagcttccccacctcagaccctgcctcctctccctggcgggccccaggcatccttccctcccctggcttcagcttcccaacctcagagtaggggctagatgggg

SEQ ID NO: 872563 - DNA, 120 bp, Artificial Sequence
  ENSG00000260542_16 (sequence is synthesized)
tggctatcacgtcccagctccgaggcctggcagagggtcctcaagcctggagaggcggcgtccctgcagcctcacgcacccacgacagacacgtcccttcccctgtcccatgtgtcatcg

SEQ ID NO: 872564 - DNA, 120 bp, Artificial Sequence
  ENSG00000260542_17 (sequence is synthesized)
cccacgggatactgcaaaagttaacatctttcccagcagaaggtcacaatgtatttgcctccctgttgagatcaactgagcctccaaggcctggctggaaaataaagaccccaaatgaaa

SEQ ID NO: 872565 - DNA, 120 bp, Artificial Sequence
  ENSG00000254261_0 (sequence is synthesized)
ctcactctgacccttaggctgtattcacagtagaccctggtttcacttttcatggttttagttatctatagacaaccaccacctgaaaataggaaaaaaaattatgtataggatttggta

SEQ ID NO: 872566 - DNA, 120 bp, Artificial Sequence
  ENSG00000254261_1 (sequence is synthesized)
gctacttagcaagaggaaggcatcagggcagtagctcctctgggaatagtaaagcacttctttctcctgctgccctgtgaagaaggacgtgtttgcatccccttccaccatgattgtgag

SEQ ID NO: 872567 - DNA, 88 bp, Artificial Sequence
  ENSG00000254261_2 (sequence is synthesized)
ccagctgccctttcccttcagccatgagtggcagcagcccgaggccctcaccacatgcctaatcttgaagactccagccagcagaact

SEQ ID NO: 872568 - DNA, 120 bp, Artificial Sequence
  ENSG00000254260_0 (sequence is synthesized)
agagtctatgcaagatgtagaagtgactgctgagcacccgctgtgcacagatcattaagccagtgctgaagaggcagtgcctctgattatgagcgcaccctcaagttcgcccaaagtgca

SEQ ID NO: 872569 - DNA, 120 bp, Artificial Sequence
  ENSG00000254260_1 (sequence is synthesized)
gtgtggagggaggattcctgaatttggaggcctcagtgggaacagatagacccaagaggaaacaaactaggagtccagtcaagccactggaggcccagaggatgttgcaaggacagcaga

SEQ ID NO: 872570 - DNA, 120 bp, Artificial Sequence
  ENSG00000254260_2 (sequence is synthesized)
gcaccccacggtccccaagtgctgattgtggcccaagaggagtcagagaccagcagagacaaggtctcactgtattgctgagtctggcctcaaactcctaggatcaagcaatcctcctac

SEQ ID NO: 872571 - DNA, 120 bp, Artificial Sequence
  ENSG00000254260_3 (sequence is synthesized)
ctcgatctcccaaagtgttaggattacagagacacatggtagaattgcacttcctggctcacctttggctgaatggggccatgtgactagtcatagccaaggaattatgacttctgcctt

SEQ ID NO: 872572 - DNA, 120 bp, Artificial Sequence
  ENSG00000254263_0 (sequence is synthesized)
ggtatatacactgttttttagacataaatcgtatcaataatctcagtaacccttctgaaaatattcaaggcaccaccctcatcaaatattgcccgaagtctgcttattgaacggcttcta

SEQ ID NO: 872573 - DNA, 120 bp, Artificial Sequence
  ENSG00000254263_1 (sequence is synthesized)
tacttaagattagtcatatagaatgtgaaaaactacgcttactgaagtatgatggagaaaggtctagctgaattttcactaactgaggttcttaatatggggagtccatagagaattcag

SEQ ID NO: 872574 - DNA, 120 bp, Artificial Sequence
  ENSG00000254263_2 (sequence is synthesized)
ggatctgtgaatatggatgggaaccttttcactaacctctatacaaaaattaacaattccttcaatcaagaatattagtaacaaactacagtagtattagaaaacctatgaatttgtcat

SEQ ID NO: 872575 - DNA, 120 bp, Artificial Sequence
  ENSG00000254264_0 (sequence is synthesized)
atggaagccccatctcagcttctctgcctcctgtactctagctcccaggtgaggggaagaggagatgagaagttatgttgatgcagtctcttgactccttgtctttgtcttcagggaaaa

SEQ ID NO: 872576 - DNA, 120 bp, Artificial Sequence
  ENSG00000254264_1 (sequence is synthesized)
agctccctggttcctcatctaaggcacatccaacagggccactagcatcctggggtttagtggtcatggattggagacagactttactatcaccatcagctgcctgaagcctaagatttt

SEQ ID NO: 872577 - DNA, 120 bp, Artificial Sequence
  ENSG00000254266_0 (sequence is synthesized)
agggttctgtttcgctggggttggcattttgtacagccaatacaaccgagaatgatggccgtcggagctcggagtgaatacagcgaatgattccaataggaaccacggactctgatctgg

SEQ ID NO: 872578 - DNA, 120 bp, Artificial Sequence
  ENSG00000254266_1 (sequence is synthesized)
gtaaacagggaacagcattagactctgggaccatctcataatgtttgtgtacattcctgttgtcttctacctcccatccaccgtgtctctctactgcctataaccagcctacataagcgt

SEQ ID NO: 872579 - DNA, 120 bp, Artificial Sequence
  ENSG00000254266_2 (sequence is synthesized)
ctaactttgaaaagctgcctgaggctgccgagaatctaccacaaggatcacagctctactgctcccagactcatcccaagctggagcaggagccaggccagctgttcaggctcactcctg

SEQ ID NO: 872580 - DNA, 120 bp, Artificial Sequence
  ENSG00000254266_3 (sequence is synthesized)
gtctttggtatgctcagggcagcggcttttctccaccagcctcaccatttgactctttatcatcatgaaaactcagtcaggtcctgcaaatggccaaagtaacaataggcaaaacctaag

SEQ ID NO: 872581 - DNA, 120 bp, Artificial Sequence
  ENSG00000254266_4 (sequence is synthesized)
tgtttttatcacggagagaaatctctgctgctggtgatagatcccagcagtagataagatttgggctacaccccacaggtagaaagcccaccatttagggaggagctgctttgaatatgg

SEQ ID NO: 872582 - DNA, 120 bp, Artificial Sequence
  ENSG00000254266_5 (sequence is synthesized)
atcaaataattagaaaactgactcctagatcactaggcaagagtccactcatctgtcttaggcatcccaccgtagatatgaacagggagagagtagaaaaggaggcttctcaaggcaaac

SEQ ID NO: 872583 - DNA, 120 bp, Artificial Sequence
  ENSG00000254266_6 (sequence is synthesized)
agtcatcataaaacccattcttctttttctgtaaaagggagagtatgcaactcagcttcagaacctgaaatccaacaatgacatgtagcaccaacagtaaagtacaattgcagcaggaaa

SEQ ID NO: 872584 - DNA, 120 bp, Artificial Sequence
  ENSG00000254266_7 (sequence is synthesized)
aatatcagtggaaagcagacgagaacaaaatgttatttagaatgagattaaatagttctacatgtttgggtttcaaaataatatatctgtaaaccttgaggttttaaaaattatttttat

SEQ ID NO: 872585 - DNA, 120 bp, Artificial Sequence
  ENSG00000254266_8 (sequence is synthesized)
ttttaattgacacataattgtacgtttttagggggtgcaatgtaatgttttgatacatgcatagattgtgtaatgaatgaatcaggcaattagtatatccatcacctcgaacatttatca

SEQ ID NO: 872586 - DNA, 120 bp, Artificial Sequence
  ENSG00000254266_9 (sequence is synthesized)
tttatttgtggttgcaatatattataccttgaatcttaagagcaaaacaaaattgggccttttgttttcttttagaaagtattgaggaagtaataatattttgggaactttactaacaat

SEQ ID NO: 872587 - DNA, 120 bp, Artificial Sequence
  ENSG00000254266_10 (sequence is synthesized)
ggagacaattaagcaaataattgtaaaaattttcttctgtgaaacatataattttctgaagacaaagggaaaaaaacagggtgctagatgatgaggagagcatgaggtgtcagacaaatt

SEQ ID NO: 872588 - DNA, 120 bp, Artificial Sequence
  ENSG00000254266_11 (sequence is synthesized)
ttgtcttcttttgcctgtatattttcccaggcttaaagaagtagtaaaattatgcatgtaagattgaattcatatacatatttcataattatgaaatttaatttccacagttatttcaga

SEQ ID NO: 872589 - DNA, 120 bp, Artificial Sequence
  ENSG00000254266_12 (sequence is synthesized)
tggcagacaaggctgtttgcttaagctgagactccttttaacaaaactcttgaagaaactaacaattttgtaagccaacttgtttattctgtgagtgacttggctgcaagagtagactaa

SEQ ID NO: 872590 - DNA, 120 bp, Artificial Sequence
  ENSG00000254266_13 (sequence is synthesized)
actgcccttttaactatactatttgtactcttacagatctgggagttgccatctctgaaaccagaaaagtgagaaagggaagttgaaagagacaaaggatctaaatgtggtatctttgca

SEQ ID NO: 872591 - DNA, 120 bp, Artificial Sequence
  ENSG00000254266_14 (sequence is synthesized)
gatctcaaaggtcaggtggcaggtgcatttccaatggctttaaggagggaagataaggtgtggtttaatggtctacctggaaattcaaattctagtctgtgcagtgtgaagattatttca

SEQ ID NO: 872592 - DNA, 120 bp, Artificial Sequence
  ENSG00000254266_15 (sequence is synthesized)
cattaggtaaatcactgatgagtcatgccccagcacatactcagtggttttccaatttcgattttattttgtactcttagaaagtaatacttatgaaggattttacaattgctaggttca

SEQ ID NO: 872593 - DNA, 120 bp, Artificial Sequence
  ENSG00000254266_16 (sequence is synthesized)
attttgggtcaaggctttgatgtttgtactgacaccaaataccaaaccttggaaaacagagaaagaagaaattggtgaatttttactcaattcaagaactcaccatttttttttcaatta

SEQ ID NO: 872594 - DNA, 120 bp, Artificial Sequence
  ENSG00000254266_17 (sequence is synthesized)
aatagttctaactgattgtttcataagaaaaaatagaaaatgaatcattatgagtctgaatgaatactttgtatcttatctattctattaaaactaaaagatgagctaaaaattttaggt

SEQ ID NO: 872595 - DNA, 120 bp, Artificial Sequence
  ENSG00000254266_18 (sequence is synthesized)
aggtattaaaatatacatttttgtaatgaaatttgttgtaacacttcccttaattttaaatttaaatggagcccagcccacaagcatttgtttataagcaatagattgggcaatagtttt

SEQ ID NO: 872596 - DNA, 120 bp, Artificial Sequence
  ENSG00000254266_19 (sequence is synthesized)
tgggataattcattttataatctgagattgttaatgctacctctattttctacctccacatttctaatgtgttactattaatttagatataatagatttgtttctgtaatttctttatgg

SEQ ID NO: 872597 - DNA, 120 bp, Artificial Sequence
  ENSG00000254266_20 (sequence is synthesized)
tcaatcatatactgagcaacaataattttgaaagcagctgtgtggaaatggggagataacagtgaatttatgtgaataatactggtttcttaaaggagattttgatctcattggaaagat

SEQ ID NO: 872598 - DNA, 120 bp, Artificial Sequence
  ENSG00000254266_21 (sequence is synthesized)
gtgccatatacagtaatctcagggatcaattaattaaatgggtctgaaagcagaggttcctgaaaatgggtagagaatggaggatatgagttacaaaaatcctatgttgaatcctggaac

SEQ ID NO: 872599 - DNA, 120 bp, Artificial Sequence
  ENSG00000254266_22 (sequence is synthesized)
taatgacttggagaactctttatactttttcatgacagtgttgtcaatgcaaacaagatgggagaatacacaataattgccagaatagattgtattagtctcacactgctaataaagttt

SEQ ID NO: 872600 - DNA, 120 bp, Artificial Sequence
  ENSG00000254266_23 (sequence is synthesized)
catgattctgaggcctccccagccatgtagaattagccagcctgtttttgatgaagagcaactgtactggagagaaagcctgtattcatattcatcgtcatcaggcaaatcgaggagctg

SEQ ID NO: 872601 - DNA, 120 bp, Artificial Sequence
  ENSG00000254266_24 (sequence is synthesized)
ttcatattcatcgtcatcaggcaaatcgaggagctgacttgcttaggatcactttacagaattctttctcaagaggatttagactccttttctattgatagggcataagaattgactcag

SEQ ID NO: 872602 - DNA, 120 bp, Artificial Sequence
  ENSG00000254266_25 (sequence is synthesized)
ccagcctacataagggaattgacttagaacactatgcaccatgatttggaaactacgaatcagacccaaatgttgaccagacaacccaagcttgaacacaggctgtcgaaagtgaatatt

SEQ ID NO: 872603 - DNA, 120 bp, Artificial Sequence
  ENSG00000254266_26 (sequence is synthesized)
gcagacattaatcctcagattttttttctttcaaatttctctatgaataatactgtgcccactagttgtttttttttttaatgttcactctaaaatgatacaaaccatcaggaataaaga

SEQ ID NO: 872604 - DNA, 120 bp, Artificial Sequence
  ENSG00000254266_27 (sequence is synthesized)
cataaaacccagtgaaatttatttggagaaaaataaattggatcccaaacttattttttcatgctgtatttacacagaaagaatctcaagttgtgcaatttagttttttttaatttacat

SEQ ID NO: 872605 - DNA, 120 bp, Artificial Sequence
  ENSG00000254266_28 (sequence is synthesized)
agaaatctagacagagaaggtgaaaaagagaagacctaacagagagctaagaaaggctcataggtggaaagaaactgccttgtctcagataaaactttggacttggacttttgagttaat

SEQ ID NO: 872606 - DNA, 120 bp, Artificial Sequence
  ENSG00000254266_29 (sequence is synthesized)
actggaatgagttaagcctttagggaactgttgcaaggacatgattgagttttgaattgtgaagacataatatttgggagaggctagggtggaatgacatggtttggctgtgtccctacc

SEQ ID NO: 872607 - DNA, 120 bp, Artificial Sequence
  ENSG00000254266_30 (sequence is synthesized)
gttgtgagagggaccaagtagagataattgtatgatgagggtggtttccccatcctgttctcatgatagcaagttagttctcacaatatctgatggtttataaggggtttcctccttcac

SEQ ID NO: 872608 - DNA, 120 bp, Artificial Sequence
  ENSG00000254266_31 (sequence is synthesized)
tccttcactggacattcattctccttcctgtcgctatgggaagaaggacatgtttgcttctacttctgcaatgactgtaagttttttgaagcctcccagccatgctgaactgtgagtcaa

SEQ ID NO: 872609 - DNA, 120 bp, Artificial Sequence
  ENSG00000254266_32 (sequence is synthesized)
ctttcctttataaattacacagtcttggatatgtctttattaacagcatgagaatggactaatacagtgtgcaactgctaaactgtattgtaagtgtagggttagccttgtaaaacattg

SEQ ID NO: 872610 - DNA, 120 bp, Artificial Sequence
  ENSG00000254266_33 (sequence is synthesized)
tccacatcttctctagtatttggcattgtcactgtttcagattttgaggtgtttgtatcttttgcccatttttttttaattgggttgttaattttctgattgttgagctttaattgttct

SEQ ID NO: 872611 - DNA, 120 bp, Artificial Sequence
  ENSG00000254266_34 (sequence is synthesized)
ttgtatattatggattatcagataagtgttttgaaattacctctgagtctttgtattctcttaatagtctttaataccagtattatacagagcagaaatgtttaattttaatgaagtcta

SEQ ID NO: 872612 - DNA, 120 bp, Artificial Sequence
  ENSG00000254266_35 (sequence is synthesized)
atttatcaatttttcttccctagactgtacttttggtgttgtatctaaaaagtcattgccaaacccaaagtcatctatattttctcacatattatcttctagatattttacagattttgt

SEQ ID NO: 872613 - DNA, 120 bp, Artificial Sequence
  ENSG00000254266_36 (sequence is synthesized)
aacaaaatattatattttcttgaccattttagattgtcaataataatgtctttattataattgtctaaaaatagtctttagaataacactttcttggttctaaagtttgatgtacccact

SEQ ID NO: 872614 - DNA, 120 bp, Artificial Sequence
  ENSG00000254266_37 (sequence is synthesized)
gttctaaagtttgatgtacccacttacatggggtgacctttgttaggctaattaaattctctgtggttttattgactgtaaagtagaactaatgatagtgcctacaaaataagggtagga

SEQ ID NO: 872615 - DNA, 120 bp, Artificial Sequence
  ENSG00000254266_38 (sequence is synthesized)
ttacttgggataatacatttaaagtatttttagaacacttaaatgactcaataaatgataattaattacaatcataataataattgtgttgtagcataatgacgcactgagatttggaaa

SEQ ID NO: 872616 - DNA, 120 bp, Artificial Sequence
  ENSG00000254266_39 (sequence is synthesized)
actttttctccaccttttatcttgttttatctccttcatgtcaggctctgatatttcttacaactggcatggtcctgactctgacagtcataatcaaccctaactaccaactctgctctg

SEQ ID NO: 872617 - DNA, 120 bp, Artificial Sequence
  ENSG00000254266_40 (sequence is synthesized)
aggttgtgaagttctatagaattatgtctaaaagagaagtaaattacaagtagataaataatgaggtaattttcttttgagatacaatgtagcatataggctttgtgatgtgttttttaa

SEQ ID NO: 872618 - DNA, 120 bp, Artificial Sequence
  ENSG00000254266_41 (sequence is synthesized)
tctcaaatattttctgttttcttaatggttgtattaatgctaaggaaaattggactataaattcaaatacatgtgttaatgcctttgttataattaatagcatatcctatacttgcacag

SEQ ID NO: 872619 - DNA, 120 bp, Artificial Sequence
  ENSG00000254266_42 (sequence is synthesized)
caggtcacccctgtatcaaaacccgcagataccaaaatccagggatgcatacctctcggtctgctggttgaatccatggatgcagaaccccagattcggagggctgaatgtactttcgat

SEQ ID NO: 872620 - DNA, 120 bp, Artificial Sequence
  ENSG00000254266_43 (sequence is synthesized)
aggttcctgagcagcagtgattatagtcacagcagactggacagtttggtgagcaagttcaggggctggcttagtgattcatagttctttcttcctcctcccccagcagttttgtttcag

SEQ ID NO: 872621 - DNA, 120 bp, Artificial Sequence
  ENSG00000254266_44 (sequence is synthesized)
gcaaaagcattttctaggaacttgttaaaactggaaggcccaaggttgcactcaggcttactgagtcagtcactccaagtggaccccatccctaaaccttgagactcactgctcctcttt

SEQ ID NO: 872622 - DNA, 120 bp, Artificial Sequence
  ENSG00000254266_45 (sequence is synthesized)
tgatctgggagagaaacagaaaaaagaaggaaaaaaaatccccaatgtgagtatgctggaaagtaaatttgaatagctttttatattgggtacttactgtgggtaatttacaaactattg

SEQ ID NO: 872623 - DNA, 120 bp, Artificial Sequence
  ENSG00000254266_46 (sequence is synthesized)
gaaggaaccacaaattcaaacacagccaaatttaaggtctctttagcagaaatcaatcttacatcatggcagttctcccattctccagtctttcacttgatagatcacttcctcattagg

SEQ ID NO: 872624 - DNA, 120 bp, Artificial Sequence
  ENSG00000254266_47 (sequence is synthesized)
atgacctacagcaattctacatgaactgctctttacatttaaacagtgctttctgtcctaacatgtcaaaatgcttgacaagcaatcaaaaggtagctcactaattttttcaactcatgg

SEQ ID NO: 872625 - DNA, 120 bp, Artificial Sequence
  ENSG00000254266_48 (sequence is synthesized)
aatagataatgatactcagcaagggcaaatcccaaagaatagtctatgctttccttgattgaatctgatttttgagaaattacatggcccaatctacatttaatatgatacaaatgctac

SEQ ID NO: 872626 - DNA, 120 bp, Artificial Sequence
  ENSG00000254266_49 (sequence is synthesized)
ttaactccctgttatttctggttgcatataattgatactacttgaagagtaagaagcagagtctcactacactggggaccctttgagagccaagtctgtgtcttagtcatctttgatgcc

SEQ ID NO: 872627 - DNA, 120 bp, Artificial Sequence
  ENSG00000254266_50 (sequence is synthesized)
ttagtgaccagtaccatacctggaatagtatatgtgatcagtaactcaaatgtatgtatttcttgaatgtatggtgcatgaatgagtcaagatacctttagcgttggaagcaatctgtca

SEQ ID NO: 872628 - DNA, 120 bp, Artificial Sequence
  ENSG00000254266_51 (sequence is synthesized)
tggagtaggaggagaaaaagtagtgaaaaaacttctaaattctcaaaacctagtgctgaactgaatgctgataataacttgacaacgtcctttggcattgcagatgttgagataccaaca

SEQ ID NO: 872629 - DNA, 120 bp, Artificial Sequence
  ENSG00000254266_52 (sequence is synthesized)
tctaatccgccaagaaagaatttcagaattaaaatttgggtgtgttcttgcgctggggatttctctgacctaccttctgatagaactttgaacccgagtcaatagtcaatatactagttt

SEQ ID NO: 872630 - DNA, 120 bp, Artificial Sequence
  ENSG00000254266_53 (sequence is synthesized)
tttacttaaaactgtaacattttaatctaattttggagacgtgaaataaaactgatgggaaactcttgaaatttttatcactggaataacctaattttgaaaacactgatggttagtttc

SEQ ID NO: 872631 - DNA, 120 bp, Artificial Sequence
  ENSG00000254266_54 (sequence is synthesized)
ttgaaatattaatattactacaagtcataagtaaaagcattctatcttaagtgagaaactataaagttggataattactatttgagtttgtggcttggtttgaataaacacttgcttgtt

SEQ ID NO: 872632 - DNA, 120 bp, Artificial Sequence
  ENSG00000254266_55 (sequence is synthesized)
ttaagtaaaagttcagctgaagtgacaatcaacctttaatcttgtaaagcttctgtgttagatattttctatctctaacatgccaaacatgcatattaaactgagtttttttgcatgcaa

SEQ ID NO: 872633 - DNA, 61 bp, Artificial Sequence
  ENSG00000258779_0 (sequence is synthesized)
ctgtgggatgcaaggaaagacaggacagcgtttcactatgttgtccaggcttgtttcaaac

SEQ ID NO: 872634 - DNA, 120 bp, Artificial Sequence
  ENSG00000258779_1 (sequence is synthesized)
agacaggacagcgtttcactatgttgtccaggcttgtttcaaactcctgggctcaagccatcagcctgcctcaacctcctaaagtgctgacattacaggcatgagccactgtgcccagcc

SEQ ID NO: 872635 - DNA, 120 bp, Artificial Sequence
  ENSG00000258779_2 (sequence is synthesized)
aatgtttcaaatacttgagatttttgatgaaccaagctggctggtgtcgcctcagtttgtctaaattaccaaggaccgctggaatttccctgggaatatgtttcgggaaaggtcagaaac

SEQ ID NO: 872636 - DNA, 120 bp, Artificial Sequence
  ENSG00000258779_3 (sequence is synthesized)
tcttcagtcgtcttcacgcttccactcagtagcaacgtttttgcacactcattgactatcaactggttgtctatgactcaaattacataatgaatccagcacataaattatttactcaga

SEQ ID NO: 872637 - DNA, 120 bp, Artificial Sequence
  ENSG00000258779_4 (sequence is synthesized)
tctgccagctaatctggctcatttcattggaattttggtcatgcccattctccttctgcactaaattaactccataacgtagtataaacagaacaagcttgtgtgtgatatgcttaactg

SEQ ID NO: 872638 - DNA, 120 bp, Artificial Sequence
  ENSG00000258779_5 (sequence is synthesized)
ttaatttacctaattaaactaattcaattaaatcatttacatctttttggtaacatgccagttgataccacagcagaagtgggatgtttcagaagatgattgttcagcaaatgaatggaa

SEQ ID NO: 872639 - DNA, 120 bp, Artificial Sequence
  ENSG00000258779_6 (sequence is synthesized)
aaaaaaataaaaggaaaacaaaatgagacaaccgtccaaatctcttggcttgaaaattaaatgatactgaaaaaatgcagctttcacggggcactgtgattagatatttttctgaaatca

SEQ ID NO: 872640 - DNA, 120 bp, Artificial Sequence
  ENSG00000258779_7 (sequence is synthesized)
attttctctacaaattggtattttaacagagtgatcacaatctattgtacaaaatattttaaacactatttgtacattcacatatttggtatgtttaagtaaagtgtgcttgttcccaca

SEQ ID NO: 872641 - DNA, 120 bp, Artificial Sequence
  ENSG00000258779_8 (sequence is synthesized)
gggctacctggaactggcttagggtgggattacatacgcctcctgccacatcggatttccttctattttgtcaggggtggcatcatccagtgagtaaatctgttagtgatctccctcgca

SEQ ID NO: 872642 - DNA, 120 bp, Artificial Sequence
  ENSG00000258779_9 (sequence is synthesized)
taacctaggaattctctcaggatccatttttccagtagttttgagaaagcgaccaacaacagcaaagagagtagttcttccattccaagagcagccatcttgcttaactgacaaactaga

SEQ ID NO: 872643 - DNA, 120 bp, Artificial Sequence
  ENSG00000258779_10 (sequence is synthesized)
gagaactgcaaggactcagtacatccctggcacagtccattctctctcacagcatattgtatgagactgtgtgagtgctgcttccacgctacactaaaaacccatggtccctgcattatt

SEQ ID NO: 872644 - DNA, 120 bp, Artificial Sequence
  ENSG00000258779_11 (sequence is synthesized)
tgagcaactgacaagcttctgaagttcaggttcgcgaacgctgagagcagcacccagtggatttgtggcagggatgcactctatctgcgcagaggaaaactcgtaggacctcctaggatg

SEQ ID NO: 872645 - DNA, 120 bp, Artificial Sequence
  ENSG00000258779_12 (sequence is synthesized)
gatgaggaaactgaggcccagagaggttaagtgattgccctgaagccacacagctaaccagagaagatataagttcctgccttccttacttcccattctcataagcaagtttccgcatga

SEQ ID NO: 872646 - DNA, 120 bp, Artificial Sequence
  ENSG00000258779_13 (sequence is synthesized)
cagataacatcattgaggttgatctcaagatgtggaacagtgggctgggagtgctgggctggccttctgttctccagttgctgggacaatggtggaggtgaggaaggtcacagaaaccca

SEQ ID NO: 872647 - DNA, 120 bp, Artificial Sequence
  ENSG00000258779_14 (sequence is synthesized)
acttccaacttctggagtctcattcattgagagctttgaccttctgaggctgctgcactgcctgtgcctgcggtaggcaggaagtaagagggaattaacacctgggagcaggtgtccaaa

SEQ ID NO: 872648 - DNA, 120 bp, Artificial Sequence
  ENSG00000258779_15 (sequence is synthesized)
tgcacagcagggttagtgtgtaaataaaatacaccagctccctttcccctgaggtggaataactgtgaggtgtgagttctacactcttccatgagttctgtcttgaaatgaagttcctgt

SEQ ID NO: 872649 - DNA, 120 bp, Artificial Sequence
  ENSG00000258779_16 (sequence is synthesized)
tgcccacagttgaaacttgctggataatgttctctttatgatcatccttctcttttcttgtttgttcttatgcttctctcagttcctgggatcaccttacaaataaatgaattttacttg

SEQ ID NO: 872650 - DNA, 120 bp, Artificial Sequence
  ENSG00000258779_17 (sequence is synthesized)
cagagtggacacaggagaaagaaaagtctattgttgtgtccaccataaaaatagacgtgtggatgaaatgatcttggagcagaatcgactagagagggtgaacttgggcagaagaaatca

SEQ ID NO: 872651 - DNA, 120 bp, Artificial Sequence
  ENSG00000258779_18 (sequence is synthesized)
actcggacaagccagagtccctgacaaggtcgtgaggtctcaagccaatgggatgacataaaaagcactgttcacaacagccaagatttggaagtgacctaagggtacatgacgaatgga

SEQ ID NO: 872652 - DNA, 120 bp, Artificial Sequence
  ENSG00000258779_19 (sequence is synthesized)
taaagaaaatgttgtacataacacaatggagtactattcaaccataaaaagaatgagatcctataatttgcagcaacatagatggaactgaaggacattatgtcaagtgaaatagccagg

SEQ ID NO: 872653 - DNA, 120 bp, Artificial Sequence
  ENSG00000258779_20 (sequence is synthesized)
cccttggggtacctctggggctggcgtctttacatcacgacgacagaaagctggcccgcacagactatggccacggcgtcttagaggttttgtttctctgcaggcgtccagtgctctgtt

SEQ ID NO: 872654 - DNA, 120 bp, Artificial Sequence
  ENSG00000258779_21 (sequence is synthesized)
tctttccctcctcaccactctccaaaccacactcacacaaatacacgtccctatgtgcaaagacgcgcatatgtatattgtatatcagtgtgacactcacacatacgtgcggtgttagca

SEQ ID NO: 872655 - DNA, 120 bp, Artificial Sequence
  ENSG00000258779_22 (sequence is synthesized)
tagcctttccccctcgagtccctgttgtgcttcccagcacccagcatcctccaaagcaggcagtggcacactatcactcataaactaaatccagccactgcctgctttgtaaataaagtt

SEQ ID NO: 872656 - DNA, 120 bp, Artificial Sequence
  ENSG00000258779_23 (sequence is synthesized)
ggggcatttccttcagcgccaccatgccagagagagcggcaacttcccacaggttgcaaatgagtccgcgtgatggggacgtgagttaattagtgcacttgggtttgagaggtgggtaac

SEQ ID NO: 872657 - DNA, 120 bp, Artificial Sequence
  ENSG00000258779_24 (sequence is synthesized)
aagctgccgctctgcatttggtggttccttttccgaacaggtggcaactgactgacgggctttctctgaagtggagaaggacatctgtgttttccatattgcggaacaccggatctttcc

SEQ ID NO: 872658 - DNA, 120 bp, Artificial Sequence
  ENSG00000258779_25 (sequence is synthesized)
aagtcacacatttgggaagacagctgaattgccttcaagttcctcctgttatggtacaaatacccacctggtgtgcaaacatgagagacgcagctttacactagaaccaatgaaagcaaa

SEQ ID NO: 872659 - DNA, 120 bp, Artificial Sequence
  ENSG00000258779_26 (sequence is synthesized)
tttgagaaaacccaactctttaggaatggagactacagatgtatgaggggatcttaataattaaaagaagaaaatatgtaaacaggaaaaatatccaactgtcacaaaactctacactaa

SEQ ID NO: 872660 - DNA, 120 bp, Artificial Sequence
  ENSG00000258779_27 (sequence is synthesized)
atcaaactgcaaagttttgtctttttaaaaatatagtcatgtgccacatgacaacgtttcaatcaaggaggggctgcatacacgacaatggtcctgtaagattacaatggcgctgaaaat

SEQ ID NO: 872661 - DNA, 120 bp, Artificial Sequence
  ENSG00000258779_28 (sequence is synthesized)
ttcctatggcccagtcacatcatagctaccaaaacatcactgtgcaaggcactactcatgtgtctgtgatgttgctggtaccaacaaatttactgcactgccagtcatataaaagtataa

SEQ ID NO: 872662 - DNA, 120 bp, Artificial Sequence
  ENSG00000258779_29 (sequence is synthesized)
aatagtgactatgttactgatttacgtatttactataacttgtgtcattattttagagtgtgctccctgtacttacaaaataaaaaatttaactgtacaacagccccaggcaagtccttt

SEQ ID NO: 872663 - DNA, 120 bp, Artificial Sequence
  ENSG00000258779_30 (sequence is synthesized)
tgttatcataggagatgacagctccatgcgtgttattgcccctgaagaccttccagtgggagaagatgtgcagctatagaataaacagtggctggaggatgatacaccaaagaaggaaag

SEQ ID NO: 872664 - DNA, 120 bp, Artificial Sequence
  ENSG00000258779_31 (sequence is synthesized)
ggatgatacaccaaagaaggaaagaaacaagtgaactcaaatcaaagaattcacatcagcttttttgaaaggggaaaaccaaaaacgtcaattgcaagcctcaacccccttcttcttccc

SEQ ID NO: 872665 - DNA, 120 bp, Artificial Sequence
  ENSG00000258779_32 (sequence is synthesized)
caaactgtttttccttttggtttatttctgcatcagagtctacctaggtttcaaaaccaattttccattttcctagaaccagccaaatatggagtgtgtgcaaaaacatggtagcttaaa

SEQ ID NO: 872666 - DNA, 120 bp, Artificial Sequence
  ENSG00000258779_33 (sequence is synthesized)
agaagaagaagtagacaattatcaaagggaagagggaggaaggaaagagaagggaaataaagagagatgacacaagggaactggaccagataaagacaaagcaatgcacttaacccacct

SEQ ID NO: 872667 - DNA, 120 bp, Artificial Sequence
  ENSG00000258779_34 (sequence is synthesized)
ggagagcacatcggaccagcaaggcgctctcagccaatcgcctgggtctgcggctgggaggagagtccgcatgggttcatttggctgaggagtgtgtttcataaaccttacggtgcagct

SEQ ID NO: 872668 - DNA, 120 bp, Artificial Sequence
  ENSG00000258779_35 (sequence is synthesized)
acacacacacacacctcaaaagcccagaggactgtcagattccactggtgtccccttgtgggttttcctggcacacagagcaaaaatggctgcaaggggaggttctctctctgttccctg

SEQ ID NO: 872669 - DNA, 120 bp, Artificial Sequence
  ENSG00000258779_36 (sequence is synthesized)
gaaatctccttgggccttgtgcagcatttggatggacacgcagcgacaggggacgtgctgaattctagataacagatgcctgccttaaaatggaggcacaaagcccagccctgtcccctt

SEQ ID NO: 872670 - DNA, 120 bp, Artificial Sequence
  ENSG00000258779_37 (sequence is synthesized)
gagagagagaaagagagagagagagagagttcctcaagagagccgggagccagggtagggaccaaaagggctggaagaaaagatgagaaggaggaatgaagtttgcttttatctgcaaat

SEQ ID NO: 872671 - DNA, 120 bp, Artificial Sequence
  ENSG00000258779_38 (sequence is synthesized)
tgaagtttgcttttatctgcaaatgttgctaagaaagaatccatcgttcaatgtaccgtggtccactctgcactttagggtctcaggctttacccagaacctggagcaagaccacttcaa

SEQ ID NO: 872672 - DNA, 89 bp, Artificial Sequence
  ENSG00000258779_39 (sequence is synthesized)
cacatttattttgtagacacgggttctcactgtgttgcccaggctagtcttcaactcctgggctcaagtgatactcacctcagcctccc

SEQ ID NO: 872673 - DNA, 120 bp, Artificial Sequence
  ENSG00000258779_40 (sequence is synthesized)
ttcaactcctgggctcaagtgatactcacctcagcctcccaaagtgatggaattacaggcgtgagccactgcgctcagctcatgtgatttcttagcctcctcccgcactaactctgggct

SEQ ID NO: 872674 - DNA, 120 bp, Artificial Sequence
  ENSG00000258779_41 (sequence is synthesized)
agttgcagctggtagacggtggtaccaggacttctgttgagtgactttggggcagccgccctacaggctcaactcccagaagctacctggcccgatcacctggaatagggagtccccctg

SEQ ID NO: 872675 - DNA, 120 bp, Artificial Sequence
  ENSG00000258779_42 (sequence is synthesized)
gtggtaggggaagaggatgcttgggttgttgaggggagactggctctggtgggaagtggaatcacacaggaatttattttaagtgcataaacaaaatgaaatgaggaaaaaaagaaaaaa

SEQ ID NO: 872676 - DNA, 120 bp, Artificial Sequence
  ENSG00000258779_43 (sequence is synthesized)
cccattttgtttgtgcacatgtatgtgtgtacatgagctattggtgtgacgggagtttgcggggatattctctccctgttacatgttttcacatttcccacaagacgggaatgaaaagga

SEQ ID NO: 872677 - DNA, 120 bp, Artificial Sequence
  ENSG00000258779_44 (sequence is synthesized)
aggaagagctgaaccattccctcaggcaagtagatctgtggcaaacaaagagtccacagctcggtctccacgggggtcagtctgacttccttccctcagaagcatcccgggctacatttt

SEQ ID NO: 872678 - DNA, 120 bp, Artificial Sequence
  ENSG00000258779_45 (sequence is synthesized)
catcttcgccgtcttccaatcttgcataatctataataatgtgattccaaatgcattttagcaaatgcaagatggaatgggactcccccggctgctcccgaacatctgatctaagaaacc

SEQ ID NO: 872679 - DNA, 120 bp, Artificial Sequence
  ENSG00000258779_46 (sequence is synthesized)
cgtaaggagctgcagtgaaaagttcactgatagaaaaaaacaaacaaacaaacagacatttgcctgtgtccctggttaggggcaaggcttttccgggttggtggctcttggtcatctttg

SEQ ID NO: 872680 - DNA, 120 bp, Artificial Sequence
  ENSG00000258779_47 (sequence is synthesized)
ttgtccttaaaaaagggataacgctgaggagctggcggttcacctttgctcttgtgtttaattgctgcaaaagccacttattaccttgtgttcttccgcagagggcacactgtctttccc

SEQ ID NO: 872681 - DNA, 120 bp, Artificial Sequence
  ENSG00000258779_48 (sequence is synthesized)
agccaccaggcctgctggtgtttggcttctctacctgccccggaagccatccccgtcacctccgagtaattctgggtcacttccagggccaggtctgtctggctccggtacaggaaggcc

SEQ ID NO: 872682 - DNA, 120 bp, Artificial Sequence
  ENSG00000258779_49 (sequence is synthesized)
ctcatgaaaggaagaagggcggaactgggatttttttttctttctttgaattttgcataaaattccgtccccagccacctaatgagaaaacatccatcatctatctttccctgggaatgt

SEQ ID NO: 872683 - DNA, 120 bp, Artificial Sequence
  ENSG00000258779_50 (sequence is synthesized)
tggtcccgctcatctgtacgcaggcagggcttgtgaaattgcttttccctcagaaaaatatgttcatttccaccttcctcagatggccctcacaaatgaaagtgctttgtcatttttaat

SEQ ID NO: 872684 - DNA, 120 bp, Artificial Sequence
  ENSG00000258779_51 (sequence is synthesized)
cggctctgagcatcctgagaattaacagaggtacatgtgctttataaaaactggaaagtgtactaaaaattcaaagttattattatttctaaaatgtctccagcctacgatttgtcataa

SEQ ID NO: 872685 - DNA, 120 bp, Artificial Sequence
  ENSG00000258779_52 (sequence is synthesized)
acacctatcattctgcatagataattgggtaattgttcctcatgccagagggaacaaacgtctctctttgaaatgtgtgtggaggcttacacatagagagccctgttataacgagggtct

SEQ ID NO: 872686 - DNA, 120 bp, Artificial Sequence
  ENSG00000258779_53 (sequence is synthesized)
gactccatagagatttgtagatgccaaaagactaacaataacctcctccaaaaaataactgcatccagcttttcataggcaagttagtaggaccacctgattccagcattttaaaagagt

SEQ ID NO: 872687 - DNA, 120 bp, Artificial Sequence
  ENSG00000258779_54 (sequence is synthesized)
caccctctatatggaaatgtggtcaaaatactagtccaggaaaggaacatgacagatttgttggccaaaacttatttcaaagcagaatctttgtaaaatatgatttttttcccacatatc

SEQ ID NO: 872688 - DNA, 120 bp, Artificial Sequence
  ENSG00000258779_55 (sequence is synthesized)
tgcatttcaagactgggttatctttgtttctttgtgattgttatttaaatacatattagttttaacttttcctaccttttcttgatcacaccatccgctgagttaaggatctgtaaacaa

SEQ ID NO: 872689 - DNA, 120 bp, Artificial Sequence
  ENSG00000258779_56 (sequence is synthesized)
agcttgaattgagccaaaatgatctaacttccaaagggaacccttgtttcctcaggtaaacttgaacgtcttcattgatgatagagaaccttgcttctcaaataacctagcatgaagggc

SEQ ID NO: 872690 - DNA, 120 bp, Artificial Sequence
  ENSG00000258779_57 (sequence is synthesized)
aacttggtagttgtttttgttgctaatatccaattccccatggcctgatacttttgtaaaatacataacagttgaattactagaaaaataaaatgtcgcttgaatgttgcagtcatgtca

SEQ ID NO: 872691 - DNA, 120 bp, Artificial Sequence
  ENSG00000257797_0 (sequence is synthesized)
aggaaggatgccagtctggttaccacggttgcattgaccccttcccagaacaaggggcttgacctctgtcctagcaaggaggtgttcctagcttctgatttcatccctgaagtctggtta

SEQ ID NO: 872692 - DNA, 120 bp, Artificial Sequence
  ENSG00000257797_1 (sequence is synthesized)
cacccaagtctggaccaggtaccccagagcccagagtcctctgttcctctcctggggagcacccctatgctgctctgcaacaacaggtggactcatctgtctccatcacactgtggccac

SEQ ID NO: 872693 - DNA, 120 bp, Artificial Sequence
  ENSG00000257797_2 (sequence is synthesized)
aggatacaggtacagatacatcactgcagatacaggtcagaggtcagtgtgtctcattgctctgctgatagggagactcaccaggaacctgctcagccctcttgaacccttcccttggct

SEQ ID NO: 872694 - DNA, 120 bp, Artificial Sequence
  ENSG00000258777_0 (sequence is synthesized)
cgccgccggcgccctccatggtgaatcggtccccgcgatgtcttcacggcgggcggcccccaggctcgctccggcctaagcgctggctccctccacacgcggagaagagaaggaaagact

SEQ ID NO: 872695 - DNA, 120 bp, Artificial Sequence
  ENSG00000258777_1 (sequence is synthesized)
acagttcaactgtcaattggttgatcacccggattttatctacaccttagcctatggttgttcatctcgtctctgcctatggcccattgactcccggatcccagctccattcttcggtac

SEQ ID NO: 872696 - DNA, 120 bp, Artificial Sequence
  ENSG00000258777_2 (sequence is synthesized)
actgtcagctggcgaaaaggaggaaaattcaggaagataaaatagctgaatgaattatccccgctccagaacgcagaggaaaaatgaaatggccagacccagatgttaaaaatgtgttcc

SEQ ID NO: 872697 - DNA, 120 bp, Artificial Sequence
  ENSG00000258777_3 (sequence is synthesized)
ttgctctttcctgccctagcaagggctgttccatgtttaggggatgaatgccgctgagagtattagcaaaaatacatgtgtcattgagtctgaggaagataactgagacatacaggtatt

SEQ ID NO: 872698 - DNA, 120 bp, Artificial Sequence
  ENSG00000258777_4 (sequence is synthesized)
tctcataatgcatgtgggcatccatagacatattcttaaatggcttaaggacttggaaactacctctaggaaacctgaaacttgaatgttggtccactagggagaagaaatgttccatta

SEQ ID NO: 872699 - DNA, 120 bp, Artificial Sequence
  ENSG00000258773_0 (sequence is synthesized)
acttccggtcagaacatcaatgaccgccatttgaatcaacaaaaggagctgtaacactgtgagggtctggtcagctgcttcattcttgaagtcagtgagaccgcaaacccaccagaagga

SEQ ID NO: 872700 - DNA, 120 bp, Artificial Sequence
  ENSG00000258773_1 (sequence is synthesized)
accaactccggacacagagggactagataatactggctgaatgaaggaatatgaacaaggccacttgaatccctactctttgggcttctccagtaaagtggattcactagtataagaatg

SEQ ID NO: 872701 - DNA, 120 bp, Artificial Sequence
  ENSG00000258773_2 (sequence is synthesized)
agaggcatctatgttctctaatttctaaaggtgatttctatcttaaaaataataattagattgaagcacccggataccttctcaaccatcatcttacatgtaaagttcctggtatagagc

SEQ ID NO: 872702 - DNA, 120 bp, Artificial Sequence
  ENSG00000258773_3 (sequence is synthesized)
tcagcacattgtcattctcacaaatggcaggcaactaaaatgatataagatgcccttcttgcatggccgtatatcttgagcttatggatgatttattgcaactggctgttacttctctcc

SEQ ID NO: 872703 - DNA, 120 bp, Artificial Sequence
  ENSG00000258773_4 (sequence is synthesized)
cttgagctcatggagggtgtcttggtcctgattatatttcaagctaaccttcccactgtgaactactggcatcttactttttgaccccttgacaagaagaactggagttaccaaaatgct

SEQ ID NO: 872704 - DNA, 120 bp, Artificial Sequence
  ENSG00000258773_5 (sequence is synthesized)
gtcatttaaggtgttggagtggaaaccagaacattacctattatcaagaaggggtttcttctaaggcattcagggcactcagaaacatacatctaaggaaagattcacttaaaaaccagc

SEQ ID NO: 872705 - DNA, 120 bp, Artificial Sequence
  ENSG00000258773_6 (sequence is synthesized)
caagacacagtcatataattgggatctccagggccctgagtaaagacagtctcctcccacttcatcgtcggtaaatcaaactctccacagatggtaataaatttaataaaataatgtcgt

SEQ ID NO: 872706 - DNA, 120 bp, Artificial Sequence
  ENSG00000258773_7 (sequence is synthesized)
ttcaaatggattattttttccagggcatttccaggttttcctgtgagtttcttgcacctacagagcctggccaaatactacaatcctgaaggcccagaaacactgggaatgcacaaggga

SEQ ID NO: 872707 - DNA, 120 bp, Artificial Sequence
  ENSG00000258773_8 (sequence is synthesized)
gttcgactaaacatgaggctctgcgccttctcactcgtcttcagaatagtttgtggaaagtccccttgccctctgccccagctcgggtatgccacctgccctcagtccagccttggtggc

SEQ ID NO: 872708 - DNA, 120 bp, Artificial Sequence
  ENSG00000258773_9 (sequence is synthesized)
ctcaaccaaatttagatgcgtaatgccacgtgcggttaatggatggtaccaaaagggcgcgcggcttctatctccgccagcgccgctttgttacctctgacaaccactcgaggctgggaa

SEQ ID NO: 872709 - DNA, 120 bp, Artificial Sequence
  ENSG00000258773_10 (sequence is synthesized)
gagacctgtgtcgtttccactcagctccagcccagcaactaagtacattcatactagggacatcaatctcagatgccaaagcctggagatttgcattgcaaataggcgaacgtggtgaca

SEQ ID NO: 872710 - DNA, 120 bp, Artificial Sequence
  ENSG00000258773_11 (sequence is synthesized)
tttcaccactgggagcagaacctgaggcatcttcctctgtgagagctatggggggggaatccactttgtagtcaaattgagtgcagaaggaaggcaagagggagggcagaaattggacca

SEQ ID NO: 872711 - DNA, 120 bp, Artificial Sequence
  ENSG00000258773_12 (sequence is synthesized)
ctctaattttgaacgacagaaagaatattgatttttgaaatattgtggtcactttttttttttcccaaaccatgggcttttcctccagtactgagatcagctttctgcatttccgcttcc

SEQ ID NO: 872712 - DNA, 120 bp, Artificial Sequence
  ENSG00000258773_13 (sequence is synthesized)
aacccataaacccatagctgaggcccagcttgtgtatatgtatcctatggactgccttttcctgacccgtgtcttctggaagggtttacttaattatttttttcaattcttatgtcccat

SEQ ID NO: 872713 - DNA, 120 bp, Artificial Sequence
  ENSG00000258773_14 (sequence is synthesized)
tcagatgtctcacttctgtaattctctatcatttaaaatctttaacaaggattcttatacaaaatggtgataaacatagaatacttttatttgagcattaaataagttactgtatagaaa

SEQ ID NO: 872714 - DNA, 120 bp, Artificial Sequence
  ENSG00000258773_15 (sequence is synthesized)
gttttgtcagctgaaatagtacacccactatagagtagagtgaatttagtgtttatttctgctgatgatgaaggagccattccaaattactctactggaattacattgaacatggacaaa

SEQ ID NO: 872715 - DNA, 120 bp, Artificial Sequence
  ENSG00000258773_16 (sequence is synthesized)
aatcttcaatcaaacaaattcatacaaaaggaattcagggtatttaatcagaagagaaggagacagaggaggcaaagataccattttcaagtgtcgggaagtccataatgtcatttagaa

SEQ ID NO: 872716 - DNA, 120 bp, Artificial Sequence
  ENSG00000258773_17 (sequence is synthesized)
gagggcatggtcctgttcagtgttgcgtgtattattgctcctttccatgcctatctcaataaagaaaatagagcagattttagttcaatataatcagtaaacaacactcaggtataacac

SEQ ID NO: 872717 - DNA, 120 bp, Artificial Sequence
  ENSG00000258773_18 (sequence is synthesized)
agaaacaacagttctctagaaatataaggctctccaaaattgtatcaattcaaatagaagctaagttcctatatgacttttcatgaatatagtaagaatgacttcttgcctatgtgaaaa

SEQ ID NO: 872718 - DNA, 120 bp, Artificial Sequence
  ENSG00000258773_19 (sequence is synthesized)
atgggactcaactagatggcccgtaatttgcaactctaaatttctagtgtacatgactgaatgagtatctgtaatatggtttgcattccctaacctcttagggagctcttaaaaagtata

SEQ ID NO: 872719 - DNA, 120 bp, Artificial Sequence
  ENSG00000258773_20 (sequence is synthesized)
aaactggtcacaaatattaattgagaaggttgcaatctattgaggagcccagtgtcagttctaagaaaaagaaatgaaagaatgcaatgcaggagttcaataaagaaatttcagaataga

SEQ ID NO: 872720 - DNA, 120 bp, Artificial Sequence
  ENSG00000258773_21 (sequence is synthesized)
agttagttattcactgcaaccaagtgcagatcatttccacttactttaccatctaactgtgaagattattaaggaaaaggactttttcttcttctctcttctaacatgttaaactaagaa

SEQ ID NO: 872721 - DNA, 120 bp, Artificial Sequence
  ENSG00000258773_22 (sequence is synthesized)
aacaattcaaagtgatgcatatgactccagctgctgccgtgtgaagtaccaccgtgagatacagcagctttctcagcaggcttgtctacgaaaacatcagggactcccctggaaattgtg

SEQ ID NO: 872722 - DNA, 120 bp, Artificial Sequence
  ENSG00000258773_23 (sequence is synthesized)
ctgattggcatcatctcttcccttctgtgacttaaaggatgccagaatcctgaccttgcctttcatcgaagtcttaatgtggtagaaggctccaggtgtgtggctgtttggctggcatcg

SEQ ID NO: 872723 - DNA, 120 bp, Artificial Sequence
  ENSG00000258773_24 (sequence is synthesized)
tctcaagcccagacctatatttactgacttagaatctatattttaacaagtgggtgatttgtgcatacagtgaggtttaaaaaccgctacgctataccacacggcctttccacaacctcg

SEQ ID NO: 872724 - DNA, 120 bp, Artificial Sequence
  ENSG00000258773_25 (sequence is synthesized)
tgtgggtcaatcattccttgatattggttcagaaccaacttgggtgcacacctgaaggaacaattgtttcctcttcttcggctgtttcctttaaacatcaggggaaatgtgtttgtgtgc

SEQ ID NO: 872725 - DNA, 120 bp, Artificial Sequence
  ENSG00000258773_26 (sequence is synthesized)
tgaaagtttaggtttctgtcctgggcatgcccagtatgaaatctctcccagggagtaaggcaaattttgtctgtggccttgaaaattatggttcatgtggccttgaaaattatggcccat

SEQ ID NO: 872726 - DNA, 120 bp, Artificial Sequence
  ENSG00000258773_27 (sequence is synthesized)
gcttggagcttggagctaccccaagctctcatgaacgtgattcaagatcctttcgaatctggtctcatgtttctaatgttccagataccatttgcaataactgtcaacaagtgctaaagc

SEQ ID NO: 872727 - DNA, 120 bp, Artificial Sequence
  ENSG00000258773_28 (sequence is synthesized)
attataacaattaaatactggtggcttgagtattagtcttcattcaacacacttttactaaataccatccctgtgcagacaagaggcaaggtactggaaatacaaaactgatcaagacac

SEQ ID NO: 872728 - DNA, 120 bp, Artificial Sequence
  ENSG00000258773_29 (sequence is synthesized)
agcctcgttctcaagaagttcacaatcattttggacgtattgcttgacattaacaaataagcaggctcatagtgggctttaacacagaaaaaatggcactaaaagatatacattgataat

SEQ ID NO: 872729 - DNA, 120 bp, Artificial Sequence
  ENSG00000258773_30 (sequence is synthesized)
aaggtcatgctcggtgagaatgttcatgataatgatcatctaatatgtatcatatgcagatacattatggttccaagcgtatgtggctctaataaacagtgtccggtatttgtggattat

SEQ ID NO: 872730 - DNA, 120 bp, Artificial Sequence
  ENSG00000258773_31 (sequence is synthesized)
ctttccaggggagcacagttgtaactgttgtacgtgctctacttgcctacagcagaacatcttgtttctgtgggattcttcagtctgccctcccatgggaaaactgatcaagagaaagca

SEQ ID NO: 872731 - DNA, 120 bp, Artificial Sequence
  ENSG00000258773_32 (sequence is synthesized)
gaggcgtctacctgtgatggatatgttggaaaggtgtatttagcatgcatattctatggcagtatatgtaaatacaattaaaatctactgacatatcttggggaaattaatttttgtgta

SEQ ID NO: 872732 - DNA, 120 bp, Artificial Sequence
  ENSG00000258773_33 (sequence is synthesized)
ttaaaattattccaatttccctggatacatgaggctgccttgaatcagtttccctaatttttaacattggcatggtccctaagcaaagctactgtgggtctgtttcatgactggggtaag

SEQ ID NO: 872733 - DNA, 120 bp, Artificial Sequence
  ENSG00000258773_34 (sequence is synthesized)
ctcagggaatacctaaacactttacagactttatttttaacattgaaaacttctataagaaaggtatatctggaaaaggatagaaaacaaataaatagaaaagttatagcaatcgtaaaa

SEQ ID NO: 872734 - DNA, 120 bp, Artificial Sequence
  ENSG00000258772_0 (sequence is synthesized)
cctgggtgaccgagtgaaatcccatctctaaaaaaatatatagcatatatttaatgttcctgcctgtttcctgactcagagcccctaaaactcttaaaatttctgaataagtgtctaatg

SEQ ID NO: 872735 - DNA, 120 bp, Artificial Sequence
  ENSG00000258772_1 (sequence is synthesized)
catccattgctaccccagctaaccccctggaagggggattgaaggttgagttgatcagcagtggcgaataatttcatcagtcatgccaacgtagtgacacctccataaaccccaagagga

SEQ ID NO: 872736 - DNA, 120 bp, Artificial Sequence
  ENSG00000258772_2 (sequence is synthesized)
gagagagagactttgaactagtacacatgatctactttgatatttatgacctttgggagaagatgttttatatgaagcagaaataaagtgtaagccaacattaaacaaaattctctgtaa

SEQ ID NO: 872737 - DNA, 120 bp, Artificial Sequence
  ENSG00000258770_0 (sequence is synthesized)
aaatgcagcaataggtttagtgaggatggatgactgccaacttctttccattttcttactggacattcaatcagattatgccccagtctcccatgcaaatagatgcaaccatgtaacaga

SEQ ID NO: 872738 - DNA, 120 bp, Artificial Sequence
  ENSG00000258770_1 (sequence is synthesized)
gttgtggccaacggaatgggcagaagtaacatgggccctgccagctgctgctgcccccgagacagtaagaccgactcctcctctttctcctcctcttcatcctactctatgtgaagacaa

SEQ ID NO: 872739 - DNA, 120 bp, Artificial Sequence
  ENSG00000258770_2 (sequence is synthesized)
gtgggtcctagaaaaatttttgctttcttgctactcttccttcttctcactggaatgtaaatgtaaagggtggagctgcagcagccatcttgctatcacaaaagaaagactgagagaaca

SEQ ID NO: 872740 - DNA, 120 bp, Artificial Sequence
  ENSG00000258770_3 (sequence is synthesized)
gcagaagagttgaccttaatgttgttgaaccactgaatcaacgctgtaaacaatctatctccaaaattcttggtatgtgagaaactaaactactgtttatttaagttgggttgtctgtta

SEQ ID NO: 872741 - DNA, 120 bp, Artificial Sequence
  ENSG00000282556_0 (sequence is synthesized)
actctccatttggagcagagcttcttcggcagccccaggtctcccgggatcttcctcggtgtcctgcggaggctctggctccagcgtgggctccagcgcaggctgggcttccggctgggc

SEQ ID NO: 872742 - DNA, 120 bp, Artificial Sequence
  ENSG00000282556_1 (sequence is synthesized)
ttcagcgctccggccaggcccaaggcgaggcggcttgaccggggtgggcggtggcgctgcagggcctttccggcccgaaagggcccttcggaggctctgtaccttctgcaatccggtgcg

SEQ ID NO: 872743 - DNA, 120 bp, Artificial Sequence
  ENSG00000282556_2 (sequence is synthesized)
ccgcagccgctgggccctggactccaccggctcctcgtccgagctctctccaacttcggcctccagctgctctgggcccagctcggactggtccgccgggcccaagggctctggtgcctt

SEQ ID NO: 872744 - DNA, 120 bp, Artificial Sequence
  ENSG00000282556_3 (sequence is synthesized)
ctggaaagcgctggctgggacttcaccctcctcctgcatgtgacggacacagcactgatcctggcagctccttacccccagcagcccgaaactcactccttaattacacaagggaaacct

SEQ ID NO: 872745 - DNA, 120 bp, Artificial Sequence
  ENSG00000282556_4 (sequence is synthesized)
tttacctccgcagccagagtctggggggaaaggcaggcgtgggaagcactaactccctctctggatatctggaacaaggaggaccttaaacttaacaataaagccaatgatggttctacc

SEQ ID NO: 872746 - DNA, 120 bp, Artificial Sequence
  ENSG00000282556_5 (sequence is synthesized)
agtctccccaaagcctcaagtttaaaagccatatgaactggctgatagtggaaaatggaagccatgaggaaatcagattagagtactacctggtgaagcctggaggacctaccaagaaaa

SEQ ID NO: 872747 - DNA, 120 bp, Artificial Sequence
  ENSG00000282556_6 (sequence is synthesized)
gcaaacttggatctttgcaaggttagaagaacgaatgggatccaagaaaaagactggtcatattcaacggctaagagcgttggagaaggcctgtggagtctcagcaggtcaggtccatga

SEQ ID NO: 872748 - DNA, 120 bp, Artificial Sequence
  ENSG00000282556_7 (sequence is synthesized)
ctcatgagtagacacctgtgtttctactgcctggtgccataatcataaacaagagtaatcagcaaatgcctttcctttctcctgctgatgttttgcccgtactcagaccccttgacttct

SEQ ID NO: 872749 - DNA, 120 bp, Artificial Sequence
  ENSG00000282556_8 (sequence is synthesized)
tagcttctacccaaagtgagcttgtcatcaaagttctccaaaaatctgcagtgttctcttgagcaaatctgcttccaagactatagcgctctgatgcattgagatgacagcaagcggcat

SEQ ID NO: 872750 - DNA, 120 bp, Artificial Sequence
  ENSG00000282556_9 (sequence is synthesized)
ttttcagtcctgttacccatatggctgctaccactgcatcctgttaaataatgtcttcaacccaagaaacctgcttcctagggaagtttctctctctctgcatttgttcccactagagaa

SEQ ID NO: 872751 - DNA, 120 bp, Artificial Sequence
  ENSG00000282556_10 (sequence is synthesized)
tgaccatcaccagattcctgaactgaaaatgctgttgacactttggaaactcgggcctctattaatagggtgaccaactatcctggtttaccttgagtacaggattttcaatgctaaaac

SEQ ID NO: 872752 - DNA, 120 bp, Artificial Sequence
  ENSG00000282556_11 (sequence is synthesized)
cagaaaaaccaggatggttggtcatctgcctcagacctaataaataccagtcaataattcagccatgagctttcttaagacactgtcttttcttgactgttgaatagtctaggacttgag

SEQ ID NO: 872753 - DNA, 120 bp, Artificial Sequence
  ENSG00000282556_12 (sequence is synthesized)
gttctggttatgccaaagcactcactcttcaaaagtttccatccagagttggataatcccacacagaaggtgttctttcaacagaccagcatccaatagacccaatgcagcatttttctt

SEQ ID NO: 872754 - DNA, 120 bp, Artificial Sequence
  ENSG00000282556_13 (sequence is synthesized)
cctggttccacattaatacatcctatctctgctatgcttaggtccctgatttataaatatttcagacatattttctcaggacacagggagtacttaaacttccacatagcagagatacga

SEQ ID NO: 872755 - DNA, 120 bp, Artificial Sequence
  ENSG00000282556_14 (sequence is synthesized)
catacaataagctgttatctggaaactcctagtgatgctttgagtactttacagtaatctttctggtcttcctctcaaccccattaagtttttctgtaactagctggtgtatctgtctcc

SEQ ID NO: 872756 - DNA, 120 bp, Artificial Sequence
  ENSG00000282556_15 (sequence is synthesized)
atctttaaggaataagtccctatttgctcatgctataatctccctcatgctctccgtccctccttccctctccttctctctttctgtctctctctctctccaccctgattgtgagatgct

SEQ ID NO: 872757 - DNA, 120 bp, Artificial Sequence
  ENSG00000282556_16 (sequence is synthesized)
acaccttaatagttttctatacctagatcccttttgaaggagtaatttcagccatcactgaaatctatgcttttttatcttgttagatttatttaggacctaatgactgtttctgagcta

SEQ ID NO: 872758 - DNA, 120 bp, Artificial Sequence
  ENSG00000282556_17 (sequence is synthesized)
ataataacgcaatcagctcatatttttctgatactctaagagcaattacatctagttgcatcaccttttccttttttattcatgtatcttaggcttctcaagatatgagactagcacttg

SEQ ID NO: 872759 - DNA, 120 bp, Artificial Sequence
  ENSG00000282556_18 (sequence is synthesized)
agcctgagataagccttaagaattccaggatagtctctccatagttccctttcttggataaagtcatttcaaaacatcttagtggatcagatttggagcagcctacttacactggtgaat

SEQ ID NO: 872760 - DNA, 120 bp, Artificial Sequence
  ENSG00000282556_19 (sequence is synthesized)
accacaactaataaataattgttctgcaccccacccacatctaaaggattcagggtgtcttttacagatataggactctcctttctctgtttctcttctctctcttctccttgattaaag

SEQ ID NO: 872761 - DNA, 120 bp, Artificial Sequence
  ENSG00000282556_20 (sequence is synthesized)
ctttgcttcagctgtccctgctcactacggcactgcacctcaccagcatcttcatggccctcacatggctcatgtgcatatcctaactctgatactaagggaggagaccacccctcatat

SEQ ID NO: 872762 - DNA, 79 bp, Artificial Sequence
  ENSG00000282556_21 (sequence is synthesized)
cctaatcggttatttgcattctaattaccggtgtatgcagcccccagtcatgtacccctgcttgctcaatcgatcacga

SEQ ID NO: 872763 - DNA, 120 bp, Artificial Sequence
  ENSG00000282556_22 (sequence is synthesized)
actggctgggtgctggaaatagagtggagaataagacaggtatggtttctgccattactatactcataatcaaatagcaataatgataagactacagaaagtgtttagcagcaaactgca

SEQ ID NO: 872764 - DNA, 120 bp, Artificial Sequence
  ENSG00000282556_23 (sequence is synthesized)
tcttagaggtgatgggagggaagtgttggagaaacccactggaggcttccatctgacacctgaaggatgagtggacactaacacaaagagaaggaggctggcagaatccagaacatgatg

SEQ ID NO: 872765 - DNA, 120 bp, Artificial Sequence
  ENSG00000282556_24 (sequence is synthesized)
agacctaggccaggcacctcctactaggaccttgattacagctttatggaaccaatggaacctggaggaaaagaagcaggtaaagatgagaaaactgatcaccctgcaaggactatcctg

SEQ ID NO: 872766 - DNA, 120 bp, Artificial Sequence
  ENSG00000282556_25 (sequence is synthesized)
agcagaaaaggggagctcctacttcatgccagacatcatgccaacacttgcatataactctcagttcatcctcagaatcctccttggggttactttatttattccactgtactatcactg

SEQ ID NO: 872767 - DNA, 120 bp, Artificial Sequence
  ENSG00000282556_26 (sequence is synthesized)
ggagactaaggccagagtgtttacattccccacttgctggggtcccagatcataatgtgggcaggatgaagccctgaagcatgaacgcatccaccttgttctgttcctttcctccctcct

SEQ ID NO: 872768 - DNA, 120 bp, Artificial Sequence
  ENSG00000282556_27 (sequence is synthesized)
cgggggaagtttgctatccctgaacctttgtgcttcttgatctcatgtcatacaatcttagacataagtctaaaagacgttgactcaccagagtccttggactggcaggggcctaggtca

SEQ ID NO: 872769 - DNA, 120 bp, Artificial Sequence
  ENSG00000282556_28 (sequence is synthesized)
gactgtggaatctccagagccaaatttgtcttttcaaattctaagttctcggcacttggtttctcatgtcacccacttggccctcttccaagtgtactttccttcttttctttccttact

SEQ ID NO: 872770 - DNA, 120 bp, Artificial Sequence
  ENSG00000282556_29 (sequence is synthesized)
tgagcaggggcaaataagatcctagttcagtactattcactataaatataatgtatgtaatttaaaattttctagtagccatattttaaaatttttttaatgaaattaacttttaaaaga

SEQ ID NO: 872771 - DNA, 120 bp, Artificial Sequence
  ENSG00000282556_30 (sequence is synthesized)
acttttaaaagatatttagtttaactcaatatatccaaaatattgccattttaacatgtaatcatatttgttaggtattaattagatattttacattcttttaggtctctgaaatctggt

SEQ ID NO: 872772 - DNA, 120 bp, Artificial Sequence
  ENSG00000282556_31 (sequence is synthesized)
catgagtagacacctgtgtttctactgcctggtgccataatcataaacaaggaagaaactgaggacaggaggggccaaacaagttacagtttcatccctccagagagccaacagagtatt

SEQ ID NO: 872773 - DNA, 81 bp, Artificial Sequence
  ENSG00000282556_32 (sequence is synthesized)
gccacccccaccctaatcttttattttgcagatgggttctctacctggccagtgccatgttgcctgtttctttactgtaac

SEQ ID NO: 872774 - DNA, 120 bp, Artificial Sequence
  ENSG00000282556_33 (sequence is synthesized)
cacaaaatcccaggacaagaaaagcctgggaaactagatcaagcttagacagccagacttctccctccgattttcaagcctcctgatccctccggtccccttctctttatgtgcctgctc

SEQ ID NO: 872775 - DNA, 120 bp, Artificial Sequence
  ENSG00000282556_34 (sequence is synthesized)
cattctgctttccttgaagctgagctttctgaggctacttatacatgttgtgataatagccatcccaattcagctcatgtgcctaccatcaaatccatcaaatgattgcagtcattgtgc

SEQ ID NO: 872776 - DNA, 120 bp, Artificial Sequence
  ENSG00000251567_0 (sequence is synthesized)
ccgctctgtgctttggagaccccctgcctctgtctctgtacaggggagcttcttcctttgttcttcccacttctatcttgcctactaaactctgggctccttaaaaccgctccacgtatg

SEQ ID NO: 872777 - DNA, 120 bp, Artificial Sequence
  ENSG00000251567_1 (sequence is synthesized)
tccgtgtcgttttgtctaagctggcatgaggaccaagaaccttggtgttcctccactcatcggagccgtatcagtaagtttttgttgaaagccagatgccaggtaaaaggaactcagtgc

SEQ ID NO: 872778 - DNA, 120 bp, Artificial Sequence
  ENSG00000251567_2 (sequence is synthesized)
attcgaagcagtgcagtgggaagggaaggtagagagaagggaaaacacattcttctacaatcaatacatgggatgtggactgattgaaggttcccttggtcacagtgattgttcttggct

SEQ ID NO: 872779 - DNA, 120 bp, Artificial Sequence
  ENSG00000251567_3 (sequence is synthesized)
tggcattactaagctggacctcttggtggttacaacctgaagaggggttgtttcaaaatgaaccacttcagagcaaagcagggctgaaagctggagagagtaaagggaaagcgttctgat

SEQ ID NO: 872780 - DNA, 120 bp, Artificial Sequence
  ENSG00000251567_4 (sequence is synthesized)
ttcatcctacatctggatccattcatatccaatgttggaacgcaccttttcagccaaggatgatggcaagtgctcagggggctgaagcaggagaaaacttgagctcaagaatttgaggct

SEQ ID NO: 872781 - DNA, 120 bp, Artificial Sequence
  ENSG00000251567_5 (sequence is synthesized)
gcagtaagccaaatggaaccactgcactccagtctaggtgacagtctaaaatgaaaagaataacccgtatcttgagattgtgagttattataaaattaaatattttggttaaaacttcac

SEQ ID NO: 872782 - DNA, 120 bp, Artificial Sequence
  ENSG00000251567_6 (sequence is synthesized)
ttggtagcaagtgatcaggcaagctgaattatttaaagaaagatgaaaattagagaaaataaaattctgaaaaatgttggcataatttttgtgaaaatgtaataaatcctttgcaatttt

SEQ ID NO: 872783 - DNA, 120 bp, Artificial Sequence
  ENSG00000251567_7 (sequence is synthesized)
ccgggggctggcggggccggccagctgctccgagtctggggcgccaagcccgcgcccacccggaactctagctggcccgcaagcacagtgcgcagcccgggttcccgcctgtgcctctcc

SEQ ID NO: 872784 - DNA, 120 bp, Artificial Sequence
  ENSG00000251567_8 (sequence is synthesized)
tgcgcagcccgggttcccgcctgtgcctctccctccacacctccccacaggctgagggagccggctcgggcctccgccatcccaggaaggggttcccacagtgcagcggcgggctgaagg

SEQ ID NO: 872785 - DNA, 120 bp, Artificial Sequence
  ENSG00000251567_9 (sequence is synthesized)
ccgcacgctgtcacctctcaagtagttaagagatagtgcattcgaagcagtgcagtgggaagggaaggtagagagaagtgctgaagaaacattttaatatggaggatcagtgctgagtca

SEQ ID NO: 872786 - DNA, 120 bp, Artificial Sequence
  ENSG00000251567_10 (sequence is synthesized)
tcacatggaggaccttgaatccacagtgtactttgggtgataaagacaaaatcatttaaaaaaaaatcgccaatatttggcattgtttgttatgagagaataaatttactacttctgact

SEQ ID NO: 872787 - DNA, 120 bp, Artificial Sequence
  ENSG00000251562_0 (sequence is synthesized)
cgaaggcttaaagtaggacaaccatggagccttcctgtggcaggagagacaacaaagcgctattatcctaaggtcaagagaagtgtcagcctcacctgatttttattagtaatgaggact

SEQ ID NO: 872788 - DNA, 120 bp, Artificial Sequence
  ENSG00000251562_1 (sequence is synthesized)
tgcctcaactccctctttctggagtgaagcatccgaaggaatgcttgaagtacccctgggcttctcttaacatttaagcaagctgtttttatagcagctcttaataataaagcccaaatc

SEQ ID NO: 872789 - DNA, 120 bp, Artificial Sequence
  ENSG00000251562_2 (sequence is synthesized)
gccacatcgccaccccgtgccttttgatctagcacagacccttcacccctcacctcgatgcagccagtagcttggatccttgtgggcatgatccataatcggtttcaaggtaatagcctg

SEQ ID NO: 872790 - DNA, 120 bp, Artificial Sequence
  ENSG00000251562_3 (sequence is synthesized)
cagctggtgttttgagaagccctactgctgaaaacttaacaattttgtgtaataaaaatggagaagctctaaattgttgtggttcttttgtgaataaaaaaatcttgattggggaaaaaa

SEQ ID NO: 872791 - DNA, 120 bp, Artificial Sequence
  ENSG00000251562_4 (sequence is synthesized)
ggtaggcattgaggcagccagcgcaggggcttctgctgagggggcaggcggagcttgaggaaaccgcagataagtttttttctctttgaaagatagagattaatacaactacttaaaaaa

SEQ ID NO: 872792 - DNA, 120 bp, Artificial Sequence
  ENSG00000251562_5 (sequence is synthesized)
aaaagataaaaggtttctaaaacatgacggagtggtaggatgaaacaatttggagaagatagaagtttgaagtggaaaactggaagacagaagtacgggaaggcgaagaaaagaatagag

SEQ ID NO: 872793 - DNA, 120 bp, Artificial Sequence
  ENSG00000251562_6 (sequence is synthesized)
gacgcagccccaccggttgcgcagtccctccccgcccccgctctcccctccgcagcctgcagcccgagacttctgtaaaggactggggccccgcaactggcctctcctgccctcttaagc

SEQ ID NO: 872794 - DNA, 120 bp, Artificial Sequence
  ENSG00000251562_7 (sequence is synthesized)
gcagcgccattttagcaacgcagaagcccggcgccgggaagcctcagctcgcctgaaggtggtaaactatacctactgtccctcaagagaacacaagaagtgctttaagaggcggcggaa

SEQ ID NO: 872795 - DNA, 120 bp, Artificial Sequence
  ENSG00000251562_8 (sequence is synthesized)
atagcttaagattttaagagaaaatatgaagacttagaagagtagcatgaggaaggaaaagataaaaggtttctaaaacatgacggaggttgagatgaagcttcttcatggagtaaaaaa

SEQ ID NO: 872796 - DNA, 120 bp, Artificial Sequence
  ENSG00000251562_9 (sequence is synthesized)
tgtatttaaaagaaaattgagagaaaggactacagagccccgaattaataccaatagaagggcaatgcttttagattaaaatgaaggtgacttaaacagcttaaagtttagtttaaaagt

SEQ ID NO: 872797 - DNA, 120 bp, Artificial Sequence
  ENSG00000251562_10 (sequence is synthesized)
tgtaggtgattaaaataatttgaaggcgatcttttaaaaagagattaaaccgaaggtgattaaaagaccttgaaatccatgacgcagggagaattgcgtcatttaaagcctagttaacgc

SEQ ID NO: 872798 - DNA, 120 bp, Artificial Sequence
  ENSG00000251562_11 (sequence is synthesized)
atttactaaacgcagacgaaaatggaaagattaattgggagtggtaggatgaaacaatttggagaagatagaagtttgaagtggaaaactggaagacagaagtacgggaaggcgaagaaa

SEQ ID NO: 872799 - DNA, 120 bp, Artificial Sequence
  ENSG00000251562_12 (sequence is synthesized)
agaatagagaagatagggaaattagaagataaaaacatacttttagaagaaaaaagataaatttaaacctgaaaagtaggaagcagaagaaaaaagacaagctaggaaacaaaaagctaa

SEQ ID NO: 872800 - DNA, 120 bp, Artificial Sequence
  ENSG00000251562_13 (sequence is synthesized)
gggcaaaatgtacaaacttagaagaaaattggaagatagaaacaagatagaaaatgaaaatattgtcaagagtttcagatagaaaatgaaaaacaagctaagacaagtattggagaagta

SEQ ID NO: 872801 - DNA, 120 bp, Artificial Sequence
  ENSG00000251562_14 (sequence is synthesized)
tagaagatagaaaaatataaagccaaaaattggataaaatagcactgaaaaaatgaggaaattattggtaaccaatttattttaaaagcccatcaatttaatttctggtggtgcagaagt

SEQ ID NO: 872802 - DNA, 120 bp, Artificial Sequence
  ENSG00000251562_15 (sequence is synthesized)
tagaaggtaaagcttgagaagatgagggtgtttacgtagaccagaaccaatttagaagaatacttgaagctagaaggggaagttggttaaaaatcacatcaaaaagctactaaaaggact

SEQ ID NO: 872803 - DNA, 120 bp, Artificial Sequence
  ENSG00000251562_16 (sequence is synthesized)
ggtgtaatttaaaaaaaactaaggcagaaggcttttggaagagttagaagaatttggaaggccttaaatatagtagcttagtttgaaaaatgtgaaggactttcgtaacggaagtaattc

SEQ ID NO: 872804 - DNA, 120 bp, Artificial Sequence
  ENSG00000251562_17 (sequence is synthesized)
aagatcaagagtaattaccaacttaatgtttttgcattggactttgagttaagattattttttaaatcctgaggactagcattaattgacagctgacccaggtgctacacagaagtggat

SEQ ID NO: 872805 - DNA, 120 bp, Artificial Sequence
  ENSG00000251562_18 (sequence is synthesized)
tcagtgaatctaggaagacagcagcagacaggattccaggaaccagtgtttgatgaagctaggactgaggagcaagcgagcaagcagcagttcgtggtgaagataggaaaagagtccagg

SEQ ID NO: 872806 - DNA, 120 bp, Artificial Sequence
  ENSG00000251562_19 (sequence is synthesized)
agccagtgcgatttggtgaaggaagctaggaagaaggaaggagcgctaacgatttggtggtgaagctaggaaaaaggattccaggaaggagcgagtgcaatttggtgatgaaggtagcag

SEQ ID NO: 872807 - DNA, 120 bp, Artificial Sequence
  ENSG00000251562_20 (sequence is synthesized)
gcggcttggcttggcaaccacacggaggaggcgagcaggcgttgtgcgtagaggatcctagaccagcatgccagtgtgccaaggccacagggaaagcgagtggttggtaaaaatccgtga

SEQ ID NO: 872808 - DNA, 120 bp, Artificial Sequence
  ENSG00000251562_21 (sequence is synthesized)
ggtcggcaatatgttgtttttctggaacttacttatggtaaccttttatttattttctaatataatgggggagtttcgtactgaggtgtaaagggatttatatggggacgtaggccgatt

SEQ ID NO: 872809 - DNA, 120 bp, Artificial Sequence
  ENSG00000251562_22 (sequence is synthesized)
tccgggtgttgtaggtttctctttttcaggcttatactcatgaatcttgtctgaagcttttgagggcagactgccaagtcctggagaaatagtagatggcaagtttgtgggttttttttt

SEQ ID NO: 872810 - DNA, 120 bp, Artificial Sequence
  ENSG00000251562_23 (sequence is synthesized)
tttacacgaatttgaggaaaaccaaatgaatttgatagccaaattgagacaatttcagcaaatctgtaagcagtttgtatgtttagttggggtaatgaagtatttcagttttgtgaatag

SEQ ID NO: 872811 - DNA, 120 bp, Artificial Sequence
  ENSG00000251562_24 (sequence is synthesized)
atgacctgtttttacttcctcaccctgaattcgttttgtaaatgtagagtttggatgtgtaactgaggcgggggggagttttcagtatttttttttgtgggggtgggggcaaaatatgtt

SEQ ID NO: 872812 - DNA, 120 bp, Artificial Sequence
  ENSG00000251562_25 (sequence is synthesized)
ttcagttctttttcccttaggtctgtctagaatcctaaaggcaaatgactcaaggtgtaacagaaaacaagaaaatccaatatcaggataatcagaccaccacaggtttacagtttatag

SEQ ID NO: 872813 - DNA, 120 bp, Artificial Sequence
  ENSG00000251562_26 (sequence is synthesized)
gtagttactcttttttccccccacccccttaatcagactttaaaagtgcttaaccccttaaacttgttattttttacttgaagcattttgggatggtcttaacagggaagagagagggtg

SEQ ID NO: 872814 - DNA, 120 bp, Artificial Sequence
  ENSG00000251562_27 (sequence is synthesized)
ggggagaaaatgtttttttctaagattttccacagatgctatagtactattgacaaactgggttagagaaggagtgtaccgctgtgctgttggcacgaacaccttcagggactggagctg

SEQ ID NO: 872815 - DNA, 120 bp, Artificial Sequence
  ENSG00000251562_28 (sequence is synthesized)
cttttatccttggaagagtattcccagttgaagctgaaaagtacagcacagtgcagctttggttcatattcagtcatctcaggagaacttcagaagagcttgagtaggccaaatgttgaa

SEQ ID NO: 872816 - DNA, 120 bp, Artificial Sequence
  ENSG00000251562_29 (sequence is synthesized)
gttaagttttccaataatgtgacttcttaaaagttttattaaaggggaggggcaaatattggcaattagttggcagtggcctgttacggttgggattggtggggtgggtttaggtaattg

SEQ ID NO: 872817 - DNA, 120 bp, Artificial Sequence
  ENSG00000251562_30 (sequence is synthesized)
tttagtttatgattgcagataaactcatgccagagaacttaaagtcttagaatggaaaaagtaaagaaatatcaacttccaagttggcaagtaactcccaatgatttagtttttttcccc

SEQ ID NO: 872818 - DNA, 120 bp, Artificial Sequence
  ENSG00000251562_31 (sequence is synthesized)
ccagtttgaattgggaagctgggggaagttaaatatgagccactgggtgtaccagtgcattaatttgggcaaggaaagtgtcataatttgatactgtatctgttttccttcaaagtatag

SEQ ID NO: 872819 - DNA, 120 bp, Artificial Sequence
  ENSG00000251562_32 (sequence is synthesized)
agcttttggggaaggaaagtattgaactgggggttggtctggcctactgggctgacattaactacaattatgggaaatgcaaaagttgtttggatatggtagtgtgtggttctcttttgg

SEQ ID NO: 872820 - DNA, 120 bp, Artificial Sequence
  ENSG00000251562_33 (sequence is synthesized)
aatttttttcaggtgatttaataataatttaaaactactatagaaactgcagagcaaaggaagtggcttaatgatcctgaagggatttcttctgatggtagcttttgtattatcaagtaa

SEQ ID NO: 872821 - DNA, 120 bp, Artificial Sequence
  ENSG00000251562_34 (sequence is synthesized)
gattctattttcagttgtgtgtaagcaagtttttttttagtgtaggagaaatacttttccattgtttaactgcaaaacaagatgttaaggtatgcttcaaaaattttgtaaattgtttat

SEQ ID NO: 872822 - DNA, 120 bp, Artificial Sequence
  ENSG00000251562_35 (sequence is synthesized)
tttaaacttatctgtttgtaaattgtaactgattaagaattgtgatagttcagcttgaatgtctcttagagggtgggcttttgttgatgagggaggggaaactttttttttttctataga

SEQ ID NO: 872823 - DNA, 120 bp, Artificial Sequence
  ENSG00000251562_36 (sequence is synthesized)
cttttttcagataacatcttctgagtcataaccagcctggcagtatgatggcctagatgcagagaaaacagctccttggtgaattgataagtaaaggcagaaaagattatatgtcatacc

SEQ ID NO: 872824 - DNA, 120 bp, Artificial Sequence
  ENSG00000251562_37 (sequence is synthesized)
tccattggggaataagcataaccctgagattcttactactgatgagaacattatctgcatatgccaaaaaattttaagcaaatgaaagctaccaatttaaagttacggaatctaccattt

SEQ ID NO: 872825 - DNA, 120 bp, Artificial Sequence
  ENSG00000251562_38 (sequence is synthesized)
taaagttaattgcttgtcaagctataaccacaaaaataatgaattgatgagaaatacaatgaagaggcaatgtccatctcaaaatactgcttttacaaaagcagaataaaagcgaaaaga

SEQ ID NO: 872826 - DNA, 120 bp, Artificial Sequence
  ENSG00000251562_39 (sequence is synthesized)
aatgaaaatgttacactacattaatcctggaataaaagaagccgaaataaatgagagatgagttgggatcaagtggattgaggaggctgtgctgtgtgccaatgtttcgtttgcctcaga

SEQ ID NO: 872827 - DNA, 120 bp, Artificial Sequence
  ENSG00000251562_40 (sequence is synthesized)
caggtatctcttcgttatcagaagagttgcttcatttcatctgggagcagaaaacagcaggcagctgttaacagataagtttaacttgcatctgcagtattgcatgttagggataagtgc

SEQ ID NO: 872828 - DNA, 120 bp, Artificial Sequence
  ENSG00000251562_41 (sequence is synthesized)
ttatttttaagagctgtggagttcttaaatatcaaccatggcactttctcctgaccccttccctaggggatttcaggattgagaaatttttccatcgagcctttttaaaattgtaggact

SEQ ID NO: 872829 - DNA, 120 bp, Artificial Sequence
  ENSG00000251562_42 (sequence is synthesized)
tgttcctgtgggcttcagtgatgggatagtacacttcactcagaggcatttgcatctttaaataatttcttaaaagcctctaaagtgatcagtgccttgatgccaactaaggaaatttgt

SEQ ID NO: 872830 - DNA, 120 bp, Artificial Sequence
  ENSG00000251562_43 (sequence is synthesized)
ttagcattgaatctctgaaggctctatgaaaggaatagcatgatgtgctgttagaatcagatgttactgctaaaatttacatgttgtgatgtaaattgtgtagaaaaccattaaatcatt

SEQ ID NO: 872831 - DNA, 120 bp, Artificial Sequence
  ENSG00000251562_44 (sequence is synthesized)
caaaataataaactatttttattagagaatgtatacttttagaaagctgtctccttatttaaataaaatagtgtttgtctgtagttcagtgttggggcaatcttgggggggattcttctc

SEQ ID NO: 872832 - DNA, 120 bp, Artificial Sequence
  ENSG00000251562_45 (sequence is synthesized)
taatctttcagaaactttgtctgcgaacactctttaatggaccagatcaggatttgagcggaagaacgaatgtaactttaaggcaggaaagacaaattttattcttcataaagtgatgag

SEQ ID NO: 872833 - DNA, 120 bp, Artificial Sequence
  ENSG00000251562_46 (sequence is synthesized)
catataataattccaggcacatggcaatagaggccctctaaataaggaataaataacctcttagacaggtgggaggtaacagcacaatatctttgaactatatacatccttgatgtataa

SEQ ID NO: 872834 - DNA, 120 bp, Artificial Sequence
  ENSG00000251562_47 (sequence is synthesized)
tttgtcaggagcttgacttgattgtatattcatatttacacgagaacctaatataactgccttgtctttttcaggtaatagcctgcagctggtgttttgagaagccctactgctgaaaac

SEQ ID NO: 872835 - DNA, 120 bp, Artificial Sequence
  ENSG00000251562_48 (sequence is synthesized)
caccgaaggcttaaagtaggacaaccatggagccttcctgtggcaggagagacaacaaagcgctattatcctaagcttttccagaagcctgttaaaagcaaggtctccccacaagcaact

SEQ ID NO: 872836 - DNA, 120 bp, Artificial Sequence
  ENSG00000251562_49 (sequence is synthesized)
cgtatgcgaagggccagagaagccagacccagtaagaaaaaatagcctatttactttaaataaaccaaacattccattttaaatgtggggattgggaaccactagttctttcagatggta

SEQ ID NO: 872837 - DNA, 120 bp, Artificial Sequence
  ENSG00000251562_50 (sequence is synthesized)
ttcttcagactatagaaggagcttccagttgaattcaccagtggacaaaatgaggaaaacaggtgaacaagctttttctgtatttacatacaaagtcagatcagttatgggacaatagta

SEQ ID NO: 872838 - DNA, 120 bp, Artificial Sequence
  ENSG00000251562_51 (sequence is synthesized)
ttgtcttgacttcaggtctgtctgttctgttggcaagtaaatgcagtactgttctgatcccgctgctattagaatgcattgtgaaacgactggagtatgattaaaagttgtgttccccaa

SEQ ID NO: 872839 - DNA, 120 bp, Artificial Sequence
  ENSG00000251562_52 (sequence is synthesized)
gtaaaggactggggccccgcaactggcctctcctgccctcttaagcgcagcgccattttagcaacgcagaagcccggcgccgggaagcctcagctcgcctgaaggcaggtcccctctgac

SEQ ID NO: 872840 - DNA, 120 bp, Artificial Sequence
  ENSG00000251562_53 (sequence is synthesized)
gcctccgggagcccaggtttcccagagtccttgggacgcagcgacgagttgtgctgctatcttagctgtccttataggctggccattccaggtggtggtatttagataaaaccactcaaa

SEQ ID NO: 872841 - DNA, 120 bp, Artificial Sequence
  ENSG00000251562_54 (sequence is synthesized)
ctctgcagtttggtcttggggtttggaggaaagcttttatttttcttcctgctccggttcagaaggtctgaagctcatacctaaccaggcataacacagaatctgcaaaacaaaaacccc

SEQ ID NO: 872842 - DNA, 120 bp, Artificial Sequence
  ENSG00000251562_55 (sequence is synthesized)
taaaaaagcagacccagagcagtgtaaacacttctgggtgtgtccctgactggctgcccaaggtctctgtgtcttcggagacaaagccattcgcttagttggtctactttaaaaggccac

SEQ ID NO: 872843 - DNA, 120 bp, Artificial Sequence
  ENSG00000251562_56 (sequence is synthesized)
ttgaactcgctttccatggcgatttgccttgtgagcactttcaggagagcctggaagctgaaaaacggtagaaaaatttccgtgcgggccgtggggggctggcggcaactggggggccgc

SEQ ID NO: 872844 - DNA, 120 bp, Artificial Sequence
  ENSG00000251562_57 (sequence is synthesized)
agatcagagtgggccactggcagccaacggcccccggggctcaggcggggagcagctctgtggtgtgggattgaggcgttttccaagagtgggttttcacgtttctaagatttcccaagc

SEQ ID NO: 872845 - DNA, 120 bp, Artificial Sequence
  ENSG00000251562_58 (sequence is synthesized)
agacagcccgtgctgctccgatttctcgaacaaaaaagcaaaacgtgtggctgtcttgggagcaagtcgcaggactgcaagcagttgggggagaaagtccgccattttgccacttctcaa

SEQ ID NO: 872846 - DNA, 120 bp, Artificial Sequence
  ENSG00000251562_59 (sequence is synthesized)
ccgtccctgcaaggctggggctcagttgcgtaatggaaagtaaagccctgaactatcacactttaatcttccttcaaaaggtggtaaactatacctactgtccctcaagagaacacaaga

SEQ ID NO: 872847 - DNA, 120 bp, Artificial Sequence
  ENSG00000251562_60 (sequence is synthesized)
agtgctttaagaggtattttaaaagttccgggggttttgtgaggtgtttgatgacccgtttaaaatatgatttccatgtttcttttgtctaaagtttgcagctcaaatctttccacacgc

SEQ ID NO: 872848 - DNA, 120 bp, Artificial Sequence
  ENSG00000251562_61 (sequence is synthesized)
tagtaatttaagtatttctgcatgtgtagtttgcattcaagttccataagctgttaagaaaaatctagaaaagtaaaactagaacctatttttaaccgaagaactactttttgcctccct

SEQ ID NO: 872849 - DNA, 120 bp, Artificial Sequence
  ENSG00000251562_62 (sequence is synthesized)
tccagaaagtcaggggtctataaattgacagtgattagagtaatactttttcacatttccaaagtttgcatgttaactttaaatgcttacaatcttagagtggtaggcaatgttttacac

SEQ ID NO: 872850 - DNA, 120 bp, Artificial Sequence
  ENSG00000251562_63 (sequence is synthesized)
tattgaccttatatagggaagggagggggtgcctgtggggttttaaagaattttcctttgcagaggcatttcatccttcatgaagccattcaggattttgaattgcatatgagtgcttgg

SEQ ID NO: 872851 - DNA, 120 bp, Artificial Sequence
  ENSG00000251562_64 (sequence is synthesized)
ctcttccttctgttctagtgagtgtatgagaccttgcagtgagtttatcagcatactcaaaatttttttcctggaatttggagggatgggaggagggggtggggcttacttgttgtagct

SEQ ID NO: 872852 - DNA, 120 bp, Artificial Sequence
  ENSG00000251562_65 (sequence is synthesized)
cgtatttgtgattgaagctgagtacattttgctggtgtatttttaggtaaaatgctttttgttcatttctggtggtgggaggggactgaagcctttagtcttttccagatgcaaccttaa

SEQ ID NO: 872853 - DNA, 120 bp, Artificial Sequence
  ENSG00000251562_66 (sequence is synthesized)
aatcagtgacaagaaacattccaaacaagcaacagtcttcaagaaattaaactggcaagtggaaatgtttaaacagttcagtgatctttagtgcattgtttatgtgtgggtttctctctc

SEQ ID NO: 872854 - DNA, 120 bp, Artificial Sequence
  ENSG00000251562_67 (sequence is synthesized)
aaaaccacagctaagtagctctattataatacttatccagtgactaaaaccaacttaaaccagtaagtggagaaataacatgttcaagaactgtaatgctgggtgggaacatgtaacttg

SEQ ID NO: 872855 - DNA, 120 bp, Artificial Sequence
  ENSG00000251562_68 (sequence is synthesized)
tagactggagaagataggcatttgagtggctgagagggcttttgggtgggaatgcaaaaattctctgctaagactttttcaggtgaacataacagacttggccaagctagcatcttagcg

SEQ ID NO: 872856 - DNA, 120 bp, Artificial Sequence
  ENSG00000251562_69 (sequence is synthesized)
gaagctgatctccaatgctcttcagtagggtcatgaaggtttttcttttcctgagaaaacaacacgtattgttttctcaggttttgctttttggcctttttctagcttaaaaaaaaaaaa

SEQ ID NO: 872857 - DNA, 120 bp, Artificial Sequence
  ENSG00000251562_70 (sequence is synthesized)
agcaaaagatgctggtggttggcactcctggtttccaggacggggttcaaatccctgcggcgtctttgctttgactactaatctgtcttcaggactctttctgtatttctccttttctct

SEQ ID NO: 872858 - DNA, 120 bp, Artificial Sequence
  ENSG00000251562_71 (sequence is synthesized)
cagttgaattcaccagtggacaaaatgaggaaaacaggtaatagcctgcagctggtgttttgagaagccctactgctgaaaacttaacaattttgtgtaataaaaatggagaagctctaa

SEQ ID NO: 872859 - DNA, 120 bp, Artificial Sequence
  ENSG00000251562_72 (sequence is synthesized)
taaaggctgagtgttgaggaaatttctgcagttttaagcagtcgtatttgtgattgaagctgagtacattttgctggtgtatttttaggaacactcagcagacacacgtatgcgaagggc

SEQ ID NO: 872860 - DNA, 120 bp, Artificial Sequence
  ENSG00000266869_0 (sequence is synthesized)
actttcagcaggtcccacactagcaccaacaccaaatcccagtactccttgcagcccctcctagtctcccatcccatcatctcacatccaatagaggactgtgagggggcgaaatggttt

SEQ ID NO: 872861 - DNA, 120 bp, Artificial Sequence
  ENSG00000266869_1 (sequence is synthesized)
tttaagtaggagaacagtatgaaaagcagctgtgtctcaccttgctctccttatggggatggagagtaactccaagacaagtggaaggagctgggcctggagagaatcatctgtacaaca

SEQ ID NO: 872862 - DNA, 120 bp, Artificial Sequence
  ENSG00000266869_2 (sequence is synthesized)
tgggaatgtcttcgagagggcaagaagtcgcttgctggatgccagcaccttgatattggacttctcatcctccagaactataattgacaataggctcccatggaagtcttctgtgcattt

SEQ ID NO: 872863 - DNA, 120 bp, Artificial Sequence
  ENSG00000266869_3 (sequence is synthesized)
ctgcaaaaatttaggaaacattaggtttgacaccatcatcatgtttgccaaggcagcaaaaatcccagccggcaaagcttcaagtgtgatgaagcggaacagcaaggacagcacggaatg

SEQ ID NO: 872864 - DNA, 120 bp, Artificial Sequence
  ENSG00000266869_4 (sequence is synthesized)
agggaccggctgctttggaagaaacatgctgtagaggaaatgtggacacagagaaacaccagggatgctcacacgcagaggacagaccacgggaaggcacagcaagaatgtggccgtctg

SEQ ID NO: 872865 - DNA, 120 bp, Artificial Sequence
  ENSG00000266869_5 (sequence is synthesized)
caagccaaggagagaagcctcaagagaaaccaacctgcccttgatcttggacctccaccctccagaactctcccagcttccccacggcttctggtaaggactcagcctcagagggggaga

SEQ ID NO: 872866 - DNA, 120 bp, Artificial Sequence
  ENSG00000266869_6 (sequence is synthesized)
agagcagaggctggttctccctttggcttgtgcatagttttccacagatttaacatgaagcaaaagtgacctggaatcttttctccttttattgccaaaatgcaaagaaaagagtcttta

SEQ ID NO: 872867 - DNA, 120 bp, Artificial Sequence
  ENSG00000266869_7 (sequence is synthesized)
gctctcagaaaaagactacatttaagagtgaaaataagaaaatgtgggagtttgaggaaaagtatcatcagctgtcaaatgtcatgaatgcgcagtcttggtcaatgggccacatgaccc

SEQ ID NO: 872868 - DNA, 120 bp, Artificial Sequence
  ENSG00000266869_8 (sequence is synthesized)
aaaactcattatcctccccaaagccaccaatatcaatacatgcaccaaatgcatcgacgcaatagttttctaccttggcctgtcaatgaagttattgaaactaaattgccaactcatttc

SEQ ID NO: 872869 - DNA, 120 bp, Artificial Sequence
  ENSG00000266869_9 (sequence is synthesized)
aggggtaggctggcatttcaactgctggttggggctagagaaagaacccttggagagatgattaagagagatgaccagataaggaggaggcaaaaaccatcccttcacacatcttattcc

SEQ ID NO: 872870 - DNA, 120 bp, Artificial Sequence
  ENSG00000266869_10 (sequence is synthesized)
ttccaatgtgggagttttccattgttttgaagcaggagaaatagggaccggctgctttggaagaaacatgctgtaggtaggatttcctcttctttcttttctacctgactttctgctctc

SEQ ID NO: 872871 - DNA, 120 bp, Artificial Sequence
  ENSG00000266869_11 (sequence is synthesized)
gtaagttgaaagtgtatagaacagtcagtgtctgatttattactattactgatgttcagggcacaatgaggccacaggaggggtagtgtcaattctattggagaatcaggcaaagcttcc

SEQ ID NO: 872872 - DNA, 120 bp, Artificial Sequence
  ENSG00000266869_12 (sequence is synthesized)
tagggatgtacccttggagctgagtcttgacttatacgcaaggattagttgggtaaatgggcagcataggagggaatgcccttctagggagaataaacatgttagaggaacccctgccta

SEQ ID NO: 872873 - DNA, 120 bp, Artificial Sequence
  ENSG00000266869_13 (sequence is synthesized)
ccacgcctctggcttaataaaacatgacctgaatgattccatcttgaagtgagtagcgaggcactcacaaggcacttataaggttaatatttatggtctgaaaataaccacattctaagc

SEQ ID NO: 872874 - DNA, 120 bp, Artificial Sequence
  ENSG00000266869_14 (sequence is synthesized)
tgaccatcaattataattacagaatatttatggccatacagaacatctcccaccaagtctgcagaatgtccagatgtcctaagaatacagctcactttacttaagtaaagtgttaatgag

SEQ ID NO: 872875 - DNA, 120 bp, Artificial Sequence
  ENSG00000266869_15 (sequence is synthesized)
tgttaacgagttaattactgttaatgagtgggcttaggttgaaggattaatggtcatctataacaccaatagcctctacctttaaagagcacatctgcatgttccaagtctaaatctagc

SEQ ID NO: 872876 - DNA, 120 bp, Artificial Sequence
  ENSG00000266869_16 (sequence is synthesized)
cccttacagtttctagtaagtagagtcactaagaaaggatggcgtgttcctccttctgttttctgaggacgccctactctgtaatagagtagtttccaataaactcaattcttttactgt

SEQ ID NO: 872877 - DNA, 120 bp, Artificial Sequence
  ENSG00000228842_0 (sequence is synthesized)
ctgcaaagcactcaactcaatgcatagctgcagtgaatagaacaaacaagaggctggctgcattgtgctattgaagtacaaaagaataaatcaaatgaagtgtcctcagcaggaaaagct

SEQ ID NO: 872878 - DNA, 120 bp, Artificial Sequence
  ENSG00000228842_1 (sequence is synthesized)
tgaatgaccacaggaaaaaaatatatatatgtatatatattttttcttcttcttcttctctcgaacagtaattattggtataaatgagctttgtgaagtcgactgttcagtgccctgaat

SEQ ID NO: 872879 - DNA, 120 bp, Artificial Sequence
  ENSG00000228842_2 (sequence is synthesized)
atcagctgcttgaaaacatctgaaaacaaagacattcatttacatctctgtccatgttaccctcctgaacatgtgtgcctgttacatatatctttggaatattgtccaggaaatcagaca

SEQ ID NO: 872880 - DNA, 120 bp, Artificial Sequence
  ENSG00000228842_3 (sequence is synthesized)
agctttaaccatggatcgattttcacaccacgtttcaatggagaacatgaactcaggccacagaactgtaacacttagaagactctgtggaatacgaacacttctctgatttatcctcat

SEQ ID NO: 872881 - DNA, 120 bp, Artificial Sequence
  ENSG00000228842_4 (sequence is synthesized)
gaaattgttttcctgatgaaaggagtgttcttcagaagaatacagaatggatatctctttgttggagaacaaccgtatttttgttttaaaatgatattaaaataaatacatttacttcaa

SEQ ID NO: 872882 - DNA, 120 bp, Artificial Sequence
  ENSG00000228843_0 (sequence is synthesized)
aacttttctatttttatttttttatttttaaaaatccaccaaaattacttaaatcatttgacagagtcatacaattttaaatgactataaaaatgtgcagatcagtgccaaattttttgg

SEQ ID NO: 872883 - DNA, 120 bp, Artificial Sequence
  ENSG00000228843_1 (sequence is synthesized)
caaaggctgaatggcagacagtaatccaagacgcagacaaccttgcttttaagccatccgttacacagagaccagcaggctcccttctacctgagggccagcggccggggttggggtggg

SEQ ID NO: 872884 - DNA, 120 bp, Artificial Sequence
  ENSG00000228843_2 (sequence is synthesized)
cgtgtagtgcgcgccagccgccccctccgggacctgcgcgccagccaccgcgcccccaggacccagcgggcctggtcctcaccactcaccccctccccagcaggcacgcatgcgggctcg

SEQ ID NO: 872885 - DNA, 120 bp, Artificial Sequence
  ENSG00000228843_3 (sequence is synthesized)
acccacacctctgcaccgccccccaacttctgggagaggactcctggctcagcccagcctctagctttccagaagcccctatatgcctacctcatcttcgttataggcgatgaaccttca

SEQ ID NO: 872886 - DNA, 120 bp, Artificial Sequence
  ENSG00000228843_4 (sequence is synthesized)
cttctgtccccgtttccgcacacgcaccaatccccactggcgatcccttccccttcggcatcacccccaccttcatgcgccccagctccccactcacatccgccccctattgggctggct

SEQ ID NO: 872887 - DNA, 120 bp, Artificial Sequence
  ENSG00000281920_0 (sequence is synthesized)
ctgtggatagagagtggggtatctccatggaaacagcggtgaaggaggagaggatgaagtagatgcaggtgggtctgtcagtttggtggtgggaagctggtagagtttcttttatgtggg

SEQ ID NO: 872888 - DNA, 120 bp, Artificial Sequence
  ENSG00000281920_1 (sequence is synthesized)
ttctgttaactctctggagtaagaggcaagattgtctgctgagaggctgaagatgaaatttatgtgatggaccagcaccagatgaagcctgagaagtttgccgaaagaacaaaggagcag

SEQ ID NO: 872889 - DNA, 120 bp, Artificial Sequence
  ENSG00000281920_2 (sequence is synthesized)
agccatttctattgtttgtggccaacaaccctgactggtacacctgcttaaaccaagagcattgttacatctgcaagaagagtctgcagctcaccatagtgtatttaagttctcaacatc

SEQ ID NO: 872890 - DNA, 120 bp, Artificial Sequence
  ENSG00000281920_3 (sequence is synthesized)
tgaggagtgggcattcacacttgttcttgttgctcaggaaaattaacctcattcagactgaggagaacagaaatactttgagaaatctcacaaaatagccatcataatgtgaagaagccg

SEQ ID NO: 872891 - DNA, 120 bp, Artificial Sequence
  ENSG00000281920_4 (sequence is synthesized)
aagcagcctgtgaagaggcgctagtggaaaggaactcaggtgcccctgccctcagtcccagctgaactctcagctgacagccatcaccaacttgccagccacaggagtgagccaacttga

SEQ ID NO: 872892 - DNA, 120 bp, Artificial Sequence
  ENSG00000281920_5 (sequence is synthesized)
gagtggatctttcagtcccagtggagccatctcagctgacacaccatggtaaaaagatgaaccatccttgctgatccttgccagtgctgcagatacataagcaaaataaatgtttttgtt

SEQ ID NO: 872893 - DNA, 120 bp, Artificial Sequence
  ENSG00000231327_0 (sequence is synthesized)
gcagctgtctttgtctggggcggcggcagcgtggcaggagcgaggggcgccccgacccgtcccctctgccctccactacccctgccggctccagcccgtccgtgtctcaccgtctttatt

SEQ ID NO: 872894 - DNA, 120 bp, Artificial Sequence
  ENSG00000231327_1 (sequence is synthesized)
taacaaagaacggagagactataaatgaccctgagcagagtggctgcgagcagggcccctggggcgtcccacgggcgtcatcctagccgcgtgagcgccgagcttgggcaccgggggggt

SEQ ID NO: 872895 - DNA, 120 bp, Artificial Sequence
  ENSG00000231327_2 (sequence is synthesized)
gccggaaccgttcccggttttctctacttggatctgagaactctgtccctccagccctgcgagcgctttgccagggtgacgggcggaaatgtccccgcatccgtgcctgctttcccagat

SEQ ID NO: 872896 - DNA, 120 bp, Artificial Sequence
  ENSG00000231327_3 (sequence is synthesized)
gggaccctccagcagtcccctccactgcccgtgcttcctcctaaccacttccccccagcgaccgcggaaggcgcttcctcccccgcagcgcgagccccaagctcctccagagccccagct

SEQ ID NO: 872897 - DNA, 120 bp, Artificial Sequence
  ENSG00000231327_4 (sequence is synthesized)
ctccccgcccccttcccgaccttgtttcatatgacccctcccccgcacatactcaatttcgtcttcccaaggcgcccactctccacatcctgatgaaaaaaagagccggctgctgtccta

SEQ ID NO: 872898 - DNA, 120 bp, Artificial Sequence
  ENSG00000231326_0 (sequence is synthesized)
gaggagaacaaaggaaggaggaagtaactggtggaatgctgagaaagcatttcagtgtgcggcatcatcatgcaagctctgtaagaggagagtaagatcagtactcctacttgtaaatga

SEQ ID NO: 872899 - DNA, 120 bp, Artificial Sequence
  ENSG00000231326_1 (sequence is synthesized)
atgaaagagaagaaaacaaaaacaagcaaattccttctaaggtgtgaggaacacgagtaaacagagaaatcacctaaggagaaaacaggaagcagatttgaaactgtggccaccaacgac

SEQ ID NO: 872900 - DNA, 120 bp, Artificial Sequence
  ENSG00000231326_2 (sequence is synthesized)
acacccagtctggtgccctggtcggttacattctgctctccctgcagcatttttagaaggtaccaaataagaaaaacgtggatgaagatggagaaagcatacaaaacttttacacactgg

SEQ ID NO: 872901 - DNA, 120 bp, Artificial Sequence
  ENSG00000231326_3 (sequence is synthesized)
tttgaagctgtcaccgcgcggaacataaagaacaggccaagaccagtgcaggcatcgacgactttctccattcagagcctccgcgcatcccaaataaataaacacatcaaaacgtgcaaa

SEQ ID NO: 872902 - DNA, 120 bp, Artificial Sequence
  ENSG00000231326_4 (sequence is synthesized)
gtggaagctgtcaccgcgcggaacataaagaacaggccaagaccagtgcaggcatcgacgactttctccattcagagcctccgcgcatcccaaataaataaacacatcaaaacgtgcaaa

SEQ ID NO: 872903 - DNA, 120 bp, Artificial Sequence
  ENSG00000265791_0 (sequence is synthesized)
gcctctctagggaaatgacatcttaatttatacctatagaatctgcctgttcacaggagtgccttaaacctaatttgagacaggagtggtaatatttggaactctgaaactaattttttt

SEQ ID NO: 872904 - DNA, 86 bp, Artificial Sequence
  ENSG00000265791_1 (sequence is synthesized)
ggctcactgcaacctctgtctcctgggttaaacggatttccctgcctcagtctccccgggaggtagaggttacagtgagctgagat

SEQ ID NO: 872905 - DNA, 120 bp, Artificial Sequence
  ENSG00000231329_0 (sequence is synthesized)
ggaagggaggaagcgtagaaggtgccgatgcacttttcctctctccagccctcctgactgctccaagaatttcatcgaacaagactcaaagaggcccagctgctctgcgttttgattctt

SEQ ID NO: 872906 - DNA, 120 bp, Artificial Sequence
  ENSG00000231329_1 (sequence is synthesized)
ctccctctctcagtccacactgacctgggaggggcttctcaaacaccacatttcctagcgtgctgtgagaagaggactgtgagctaagaagggagaaaaggcactccctcctcatcaaca

SEQ ID NO: 872907 - DNA, 120 bp, Artificial Sequence
  ENSG00000231329_2 (sequence is synthesized)
tggaaattataggatacttaatgtacatcatatccagcactttccatcaaaaagcagagtatttcagcatcatctgaacctgggctagacttaggacttatactgatgaacaaaatgtga

SEQ ID NO: 872908 - DNA, 120 bp, Artificial Sequence
  ENSG00000231329_3 (sequence is synthesized)
caggagtgatgttactcagttccaagcttaagcctctagagacagactctgcagcttccacttacatctcttgaatgccatcctgagagcaacatgtgaaaaagtccaagctagcctact

SEQ ID NO: 872909 - DNA, 120 bp, Artificial Sequence
  ENSG00000231329_4 (sequence is synthesized)
ggaagatgaaagactacatggaacacagacaagccattccggctgaggccccctaagccaacctaacaatccacccacagaattgtgagaagtcattaaattatccttttaaaccactaa

SEQ ID NO: 872910 - DNA, 120 bp, Artificial Sequence
  ENSG00000231329_5 (sequence is synthesized)
tacttaatgtacatcatatccagcttcccgactccagactgtgggagatgacacagagccagcctgcctggatgtgactcagctctgcaacttattaaagacctttggcaaatcacctaa

SEQ ID NO: 872911 - DNA, 90 bp, Artificial Sequence
  ENSG00000231329_6 (sequence is synthesized)
agacatagtggcacatgcctctggtcccagccacttgggaagctgaggcaggaggatcgcttgagcctggaaggttgggctccagcctgg

SEQ ID NO: 872912 - DNA, 120 bp, Artificial Sequence
  ENSG00000231329_7 (sequence is synthesized)
gtgagaccctgtctcaaaaaaagaaaaaatgtcactgaggcctataagagagaagcactggaaacggagtacccagggctaataagaaaacaaaacccagactcctctgcctggctctgc

SEQ ID NO: 872913 - DNA, 75 bp, Artificial Sequence
  ENSG00000231329_8 (sequence is synthesized)
aagaggactgtgagctaagaagggagaaaagatggagtctctcactccatcccccaggcactggactgcagtagt

SEQ ID NO: 872914 - DNA, 120 bp, Artificial Sequence
  ENSG00000231329_9 (sequence is synthesized)
atgtacatcatatccaggtatgatactagaactttaagcctggtaagttagttacattttataaaagcatcttatcctaagattataaattgatgacaagcaagaactgatagtacccag

SEQ ID NO: 872915 - DNA, 120 bp, Artificial Sequence
  ENSG00000231329_10 (sequence is synthesized)
catgtgtgatatccgtaagtttgatgaactgatgaatggattacatgacaataatctgtccatcatggatagaaaaagaacactactattctcatatctgctgtacccatattcatcttc

SEQ ID NO: 872916 - DNA, 120 bp, Artificial Sequence
  ENSG00000231329_11 (sequence is synthesized)
ataaaaaatgtttcaagttttacaatggagaaataaaggtgtttccatccacttccctctaaaattacccccaaacaggataaaaaaacaaaaacacaaactccatcttccatgaaacaa

SEQ ID NO: 872917 - DNA, 120 bp, Artificial Sequence
  ENSG00000231329_12 (sequence is synthesized)
attgaaaactacacagcatcctagcacgaaaatgcactacataatatgctctgaaggaaatgtagattcaggagctcttggaaccaaatcacactatcataaaatgggaagaggactcca

SEQ ID NO: 872918 - DNA, 120 bp, Artificial Sequence
  ENSG00000231329_13 (sequence is synthesized)
gactaagcatatgtgagatacacagcaaaaaaaagtttgattgattaataccttcagatcggcattctgaaaacttgactatgatcacatcatacacacattcagaaacctcagaaactc

SEQ ID NO: 872919 - DNA, 120 bp, Artificial Sequence
  ENSG00000231329_14 (sequence is synthesized)
agactaatgctccaagttcttgggtcatgttcaaggagctcctgtaattaggccccagccttgcttttccatctgatcaccagctagggtaaagtctctgcttcagccttggcccattcc

SEQ ID NO: 872920 - DNA, 120 bp, Artificial Sequence
  ENSG00000231329_15 (sequence is synthesized)
aaccaagcactgacgagccagtaaagagggaactgtcggggaatcagggctgagagaatctctgatacagcagcggaaatagtgagaatccagccttcctcccctccagaggatgtagca

SEQ ID NO: 872921 - DNA, 120 bp, Artificial Sequence
  ENSG00000231329_16 (sequence is synthesized)
tgcagggtgccatcttggaaaaagagaatggcttcagcagacaccgaacttgctggagccttaaccttagacttctcagcctccagaaatatgagtcaataaatttctgttcattatgaa

SEQ ID NO: 872922 - DNA, 120 bp, Artificial Sequence
  ENSG00000231329_17 (sequence is synthesized)
acagaagcctaatatcacccactgctccctcagtgtgttcagtacctacctgacaacatggagaggcagccaggatgtcgtaggtgtacatagtgcccagctggtgccagctgccatccc

SEQ ID NO: 872923 - DNA, 120 bp, Artificial Sequence
  ENSG00000231329_18 (sequence is synthesized)
gctacaaacatccagctttgactgtctgacccagccccctttccagcctccagtcctaccacggcacctgacaccggctacatcaaactcctggagcaaccagaactcaaggcccttttt

SEQ ID NO: 872924 - DNA, 120 bp, Artificial Sequence
  ENSG00000231329_19 (sequence is synthesized)
catatccaggtatgatactagaactttaagcctgaaagcaggcaaggtgaattaacacctataccttgaaggtgacaaggaacatcatattcgatctcatcatgtctcgacgggcttagg

SEQ ID NO: 872925 - DNA, 120 bp, Artificial Sequence
  ENSG00000231329_20 (sequence is synthesized)
agtgggaactgttcgaacaccgggagcgcccggtggcacagggcacagtttaccacgtttctgtggctggcactgagcgcggccagaatgaacttccgcaagtcttccccctggcccact

SEQ ID NO: 872926 - DNA, 120 bp, Artificial Sequence
  ENSG00000231329_21 (sequence is synthesized)
tgggcatcgtcttccatgcgcacgtggaaagtgttcagcttatgcctggggatgtgagtgaggagttcggagaggtccagccgccgaaggaactgcacgggggtgtcgaagtgtcccccc

SEQ ID NO: 872927 - DNA, 120 bp, Artificial Sequence
  ENSG00000231329_22 (sequence is synthesized)
ctgtgaactgccaaccccgcagggctgtaatcaaagtgggcatttctgaacacatggcccccagccatggccttcttgtgaggctccagatggatggcgttctttaagaactccccgagg

SEQ ID NO: 872928 - DNA, 120 bp, Artificial Sequence
  ENSG00000231329_23 (sequence is synthesized)
ataggccccccaatttgttacccttagcatcagaaaatgaaatcagtaaacaccaaatgaaagcaacaacaaaaaaattaacttcaggatctaaagttcacatttaaaacagcttcaaaa

SEQ ID NO: 872929 - DNA, 120 bp, Artificial Sequence
  ENSG00000231329_24 (sequence is synthesized)
gtggtaacagaaaacagaagggaaaaccgaagaaagttcatgaattctctacctctgagcaagagttagctagctgagtatgttaccgaatctcactttgaggactaggagtgggaatcc

SEQ ID NO: 872930 - DNA, 120 bp, Artificial Sequence
  ENSG00000231329_25 (sequence is synthesized)
agatttaattcctagttagtcattaactatatgaacttacttagatttaacttctttgggcctcagtttacctctaaaatgagtacaattgtcaatgaaattcacaaacatttaccatgt

SEQ ID NO: 872931 - DNA, 120 bp, Artificial Sequence
  ENSG00000231329_26 (sequence is synthesized)
gggtaaaacaaaaagcatagcccttgctccaaattctgacacgtctaaattctatgactgttttggctatgactttctcactcttagaataactgggtttattaggaattacaattagtt

SEQ ID NO: 872932 - DNA, 120 bp, Artificial Sequence
  ENSG00000231329_27 (sequence is synthesized)
caggggcagtgctcgttgttgcacaccaccttctggtagtcgtccttctccaggtccaccggcctaccgaagctgcagatcaggggagtggcacatggggcttctgggggaggaataaag

SEQ ID NO: 872933 - DNA, 120 bp, Artificial Sequence
  ENSG00000231329_28 (sequence is synthesized)
agagaacagatttcagatttttggattaggggtactcaacctgtacttgcaacagtatggtataaggtttttctaagacatgaatataatgaaaggcagttccagggttcctttaaagat

SEQ ID NO: 872934 - DNA, 120 bp, Artificial Sequence
  ENSG00000231329_29 (sequence is synthesized)
gaatcactccagtgaaccagggaataatatgatgaagctacttaaccaaccagtctggtggaatctctaaaaaggaccttcaacgcccttcatcctgagctttaggttgtcctgaatacc

SEQ ID NO: 872935 - DNA, 120 bp, Artificial Sequence
  ENSG00000231329_30 (sequence is synthesized)
ggggaatcagggctgagagaatctctgatacagcagcggaaataggaatgggcccgccttgatcacctggctgtgctcagctactggctggagctacctatgaaagcctcagagcaaaga

SEQ ID NO: 872936 - DNA, 120 bp, Artificial Sequence
  ENSG00000231329_31 (sequence is synthesized)
cattgatagatttcagagcactgttgctgggccccggtatgattttgcttcctgtcattggaggtctgtgaggcccattcttagagatacgagaaatcgcttcccattaaagtcttaaaa

SEQ ID NO: 872937 - DNA, 120 bp, Artificial Sequence
  ENSG00000231329_32 (sequence is synthesized)
ctttagaattcactgtctctcttcctgcaagactcagctcaaatgtcccctcctccaggaaacatcattttccccactggctatccacagtacattatcatggctcctgttgtttccatg

SEQ ID NO: 872938 - DNA, 120 bp, Artificial Sequence
  ENSG00000231329_33 (sequence is synthesized)
tctctctgccagcttcacagtgagcccttgatggtatggattctgatccccccaagtataatttaacattgtacttctcagtcataggagatagtaggtgcataataaatatgtagtaaa

SEQ ID NO: 872939 - DNA, 120 bp, Artificial Sequence
  ENSG00000231329_34 (sequence is synthesized)
cacagagcagtggggccctgggtctggcccacaaaaccattttttcctcctaggcttccaggcctgtgataagaggtgccgctatgaaggtctcagacatgccctggagacactttccct

SEQ ID NO: 872940 - DNA, 70 bp, Artificial Sequence
  ENSG00000231329_35 (sequence is synthesized)
gagtgttttagcaggcttgactttctccccccaaaatgggtttttattttctttcacaacatctggctgc

SEQ ID NO: 872941 - DNA, 120 bp, Artificial Sequence
  ENSG00000231329_36 (sequence is synthesized)
aaaataacctggtaaaatgctttatagtgatcactctggcagtcattccgctaggttcttgggagaaaagacaaagcttttgcctggggccacactgcacggcctatttctgaaaagctg

SEQ ID NO: 872942 - DNA, 120 bp, Artificial Sequence
  ENSG00000283209_0 (sequence is synthesized)
cagcataggtcaagttctggtgggtatttaagttcattatcacaccactccagagccataataaaggactacttttaatttctgctctaattactgagaaataatttacttaaatcatta

SEQ ID NO: 872943 - DNA, 120 bp, Artificial Sequence
  ENSG00000283209_1 (sequence is synthesized)
agaaaggaatctgaagaaattaaaactcattttccatataccccttcttccttggtccaggaacatttgagattatccttaatgttgggccatttctaactcagccagtgcaattgttga

SEQ ID NO: 872944 - DNA, 120 bp, Artificial Sequence
  ENSG00000283209_2 (sequence is synthesized)
atttgtggttttcagcagatttgcaatttgccttttgatttgactaatgattgctttttaagcctttgtggcatattcgttttcctaatattttaaataaatagtgaaatgtcatggaaa

SEQ ID NO: 872945 - DNA, 120 bp, Artificial Sequence
  ENSG00000250218_0 (sequence is synthesized)
acagagggcgtccaagatgcagacatggtactcgttcagagccgcctctcctgtaagacaccacaaaggtcacagcagctcccaccacaggcagggcactgctcggggctgcaagtgtct

SEQ ID NO: 872946 - DNA, 120 bp, Artificial Sequence
  ENSG00000250218_1 (sequence is synthesized)
ggaggccgacagggacagaggaagcaggagtgtccagcctacacatgcgtgcatagacagagccctaagacctgctgcactgaggtcaatcctgcctgacctcactgagattcaatcctg

SEQ ID NO: 872947 - DNA, 120 bp, Artificial Sequence
  ENSG00000250218_2 (sequence is synthesized)
cctaacttaggaataatcaagagactgggaattttctcactctagtttttagagaaatagaaaatttcaaaccatgttaaaaagttatttaataaaatgttcaatatttttcatacatac

SEQ ID NO: 872948 - DNA, 120 bp, Artificial Sequence
  ENSG00000257242_0 (sequence is synthesized)
ttttgcttttcatcacctgcaagatgtacataaaaatcacataagctggaattcaacaaaagacctctgactatgtgaagatacggtgggaagatgactgaccgcaagacaggaagagag

SEQ ID NO: 872949 - DNA, 120 bp, Artificial Sequence
  ENSG00000257242_1 (sequence is synthesized)
ccctcaccgaggaaccaaattggccagtatcttgattttggatttctcaacctcaagaaccatgagaaatgaatgtctgctgttcaagccacccagtcaatgtccatgagagcaagcatc

SEQ ID NO: 872950 - DNA, 120 bp, Artificial Sequence
  ENSG00000257242_2 (sequence is synthesized)
tttgtccgtttggctcactgttggattccctgttttaaaaatatcacccggcccagcaaaaagtttggaaaccttcatctagaaagtggtctagcaaagtgtggtccatggatgagtttg

SEQ ID NO: 872951 - DNA, 120 bp, Artificial Sequence
  ENSG00000257242_3 (sequence is synthesized)
atctgcaaactgcttgttattggttcatgacaaggtctaccaattgcattttgagagctcagataagcagagagcaatgcaatttgtcacagaaggatgattatgtatatgcactgtcat

SEQ ID NO: 872952 - DNA, 120 bp, Artificial Sequence
  ENSG00000257242_4 (sequence is synthesized)
gtctatttccatgcctaactcaaaggagacacaaggagaaagtgagctcagcctggataaattggagattgtgatgacttctaggaagcctcaggaaagagaaacaaagacaacactggc

SEQ ID NO: 872953 - DNA, 120 bp, Artificial Sequence
  ENSG00000257242_5 (sequence is synthesized)
gcaagtttggctgtggttaagtattggatggaggcaaaaagaaactgacatattttcttcttttcaattgtttgattcaccctgaagggcatggctgcttaatttttttctccagagata

SEQ ID NO: 872954 - DNA, 120 bp, Artificial Sequence
  ENSG00000257242_6 (sequence is synthesized)
ggtggacagataaagacaggaaagtaacatccacagactgccctctgtgaaggtgacagtgatgaaaggaatgcttgatctgaacactggtaaataaagtgaccgcatatttccctagcc

SEQ ID NO: 872955 - DNA, 120 bp, Artificial Sequence
  ENSG00000257242_7 (sequence is synthesized)
aggagagcaatctggctcaaaagaaacgagaacaatgacattactgccaggctgctcctaagcctttggctattctgttcagtgcacaaaaaaaagcagtgaacatagctgtgacctgcc

SEQ ID NO: 872956 - DNA, 120 bp, Artificial Sequence
  ENSG00000257242_8 (sequence is synthesized)
ttgttggtagtatcacaattctttggggctccactttaagaaattgagacctacctaccttaatccttggggggttaagctttcagactggaatgataactgaactattcatttgcagta

SEQ ID NO: 872957 - DNA, 120 bp, Artificial Sequence
  ENSG00000257242_9 (sequence is synthesized)
attctgggttttgtgcatattttaaaaaggaataccgggcttgcctatattcattacaacgtcctcccagctttcaaatcttccaatacaatgcctcttctctagtcttttaagcacatc

SEQ ID NO: 872958 - DNA, 120 bp, Artificial Sequence
  ENSG00000257242_10 (sequence is synthesized)
ctgtgactggatatgattatgggagatttacatgcatccttgtctattgtatcaaaagatcagggaataaaatgcccatcattaaaaccccaaagtgattggattggcatgaggaatggg

SEQ ID NO: 872959 - DNA, 120 bp, Artificial Sequence
  ENSG00000257242_11 (sequence is synthesized)
attgcttccctgttgaagtgaagatataaatgttccattctgacccacctttgaaaaacaattactttgccccatggattctttgttcaattagaaatttccccggggcaggtgacccat

SEQ ID NO: 872960 - DNA, 120 bp, Artificial Sequence
  ENSG00000257242_12 (sequence is synthesized)
ctagcaaagtgtggtccatggatgagtttgatctgcaaactgcttgttattggttcatgacaagaattggttccaaacagtaaagccgccagaaaaaacagacaaactcttaggaacaac

SEQ ID NO: 872961 - DNA, 120 bp, Artificial Sequence
  ENSG00000257242_13 (sequence is synthesized)
atgaaattggccttcaagttaaaaggaaggaagccgtattcccgatggctagtgtttaatgactacaggtttccaggctccctttaatcttgggagcaaataaatctactattggacttc

SEQ ID NO: 872962 - DNA, 120 bp, Artificial Sequence
  ENSG00000257242_14 (sequence is synthesized)
ggaaacctatgtgcttcgtgaggtcattgcttagagtacaactgctaccaagaacattccctgcaaactcttttgtgatcagtttcttcccttctctcatataccctctgcaggtctacc

SEQ ID NO: 872963 - DNA, 120 bp, Artificial Sequence
  ENSG00000257242_15 (sequence is synthesized)
attattattatttctacctagacagcttgatagcagccattatcttctttctgggtgtcttatcaagttccggctgtgtgcagcatgggtgataaggaaagagaaatgtcacccatggga

SEQ ID NO: 872964 - DNA, 120 bp, Artificial Sequence
  ENSG00000257242_16 (sequence is synthesized)
ttgccaaggattatttctatgcactgctgttcagcaacagccaatctctcagaactgagaagaagtcctattgttcacgctgggcagttgctattctgactatcccaagagagcagaaaa

SEQ ID NO: 872965 - DNA, 120 bp, Artificial Sequence
  ENSG00000257242_17 (sequence is synthesized)
gggatgtagttgccattgtgcaaaagattgatatttcattactctcagctaaagttctgaaaagcagaatcatcatgaaatatctttgaagagagaaaagacaagggaagaaaagaagaa

SEQ ID NO: 872966 - DNA, 120 bp, Artificial Sequence
  ENSG00000257242_18 (sequence is synthesized)
cgaaatgagttcagagctttttagaactgtgagggagtgcgaaaaaagaaaggtgtaatactttcaaacagtggaagttaaaatgccaggcgtgtaagcctcagtgaaattgagcagcat

SEQ ID NO: 872967 - DNA, 120 bp, Artificial Sequence
  ENSG00000257242_19 (sequence is synthesized)
cacgtcaccacgacttgtggtccagctgtttattgcaaagactccatcctgcgttactcatcagaaaatagttaactttgtatctggcattattttaattaaaaaaaaagttaacttact

SEQ ID NO: 872968 - DNA, 120 bp, Artificial Sequence
  ENSG00000257242_20 (sequence is synthesized)
aatatttctctctctcaagccggtagtcattgttacaattaaggatggagctcttaggtacaagcaagtcttctcgacactgttacaagaaggcattttttccccatttatacttgagga

SEQ ID NO: 872969 - DNA, 120 bp, Artificial Sequence
  ENSG00000257242_21 (sequence is synthesized)
aaacaaccaaggctcagagaggtaacatcttttgtcccaaatcaaacagctgctgccagctggttgtggctaaggagagacatacatggcagagaactgatgtctccagacaacatccag

SEQ ID NO: 872970 - DNA, 120 bp, Artificial Sequence
  ENSG00000257242_22 (sequence is synthesized)
ttttgcatggtaaaattgtacactgtgtatgcctgtaagaagcaaagccacctactctaatttttcccagctcgatgctgtgaatttgacctctgactatgtgaagatacggtgggaaga

SEQ ID NO: 872971 - DNA, 120 bp, Artificial Sequence
  ENSG00000257242_23 (sequence is synthesized)
atttaatgagcattgagaaaagctaatgtttttcattttttcccttagaagcatctatcgatcttcatttgaaattatgtgtcagaaactgcaataatagaagtaaagagaatgggctag

SEQ ID NO: 872972 - DNA, 120 bp, Artificial Sequence
  ENSG00000257242_24 (sequence is synthesized)
gtaatgtaagaatagggctaaggttatgtaagtgagggagagtttcgagagaggaatttcagtagcctttaaaattttaaataaaatacgctctataaaccaaatgcattagttaaggag

SEQ ID NO: 872973 - DNA, 120 bp, Artificial Sequence
  ENSG00000257242_25 (sequence is synthesized)
atacaaaagtgttgatttgtgactgattggaaatttaagaaaaagaaaacctggccttttccactggaatagagtcgggtgttttgtaatgggattttgttgtattggtgacttagtaag

SEQ ID NO: 872974 - DNA, 120 bp, Artificial Sequence
  ENSG00000257242_26 (sequence is synthesized)
acatattcacgtggcttcagatggaaacatctgggggcccatcaggtgggagtgacaaacatgtcctgagattgcaattgacctgggaaggttgatgagcatgcacattaataacgtcac

SEQ ID NO: 872975 - DNA, 120 bp, Artificial Sequence
  ENSG00000257242_27 (sequence is synthesized)
acaaatggattttctatgcagatgggtgggccagccacagttcacttatcagctaatacagttgtaatgtgttgcttcatatctgagagaaggcagcaccttaggatattatgtgtgtct

SEQ ID NO: 872976 - DNA, 120 bp, Artificial Sequence
  ENSG00000257242_28 (sequence is synthesized)
cacttacatatataaatgaattcccttttgaggtagatgtattttagtcaataagtcatcttctctcaatagtaagccaacaactttcctggaaatctagcaaaacaacagttctatgac

SEQ ID NO: 872977 - DNA, 120 bp, Artificial Sequence
  ENSG00000257242_29 (sequence is synthesized)
cagccttatgttttgttgcatgtgtgcataaaaaatgcagattgactctttccttttctgttttagaattggttccaaacagtaaagccgccagaaaaaacagacaaactcttaggaaca

SEQ ID NO: 872978 - DNA, 120 bp, Artificial Sequence
  ENSG00000257242_30 (sequence is synthesized)
acagtcattcatggtatgagaccaggcgatttataatgacttgtgcaaaaaaaaaaagactattgggagaaggaagtgcaagtcaaaggccacggctccttgcttcctgaattctgccat

SEQ ID NO: 872979 - DNA, 120 bp, Artificial Sequence
  ENSG00000257242_31 (sequence is synthesized)
gactaattccagcaagcggacatagacctgatcacctctgcttttccctttgctagcctgcctggtcatggatgagaagcacgctgctcttgctaccttcatgtggtggtttgggtcctg

SEQ ID NO: 872980 - DNA, 120 bp, Artificial Sequence
  ENSG00000257242_32 (sequence is synthesized)
aaacatccacctattttcagaataaactaaaataatttcttaatttcttgagggcacatttgcattatttgtaaaatttaaacaatgttacctaacccagggctacagtgggagagtaga

SEQ ID NO: 872981 - DNA, 120 bp, Artificial Sequence
  ENSG00000257242_33 (sequence is synthesized)
gagggattgacacatagaagttggtcagtaaatgttagctatcatcgtcatcattatcatcattatcaacatcatcatccaagggttgaatgatgtttttgtgtttttgtccaggtgtca

SEQ ID NO: 872982 - DNA, 120 bp, Artificial Sequence
  ENSG00000257242_34 (sequence is synthesized)
cagctgtttcctgtgactttaaccttaccttccccagacaattgagctgaacctgtatctgcgacctctgactatgtgaagatacggtgggaagatgactgaccgcaagacaggaagaga

SEQ ID NO: 872983 - DNA, 120 bp, Artificial Sequence
  ENSG00000257242_35 (sequence is synthesized)
actgaatttgctctcaaaaaagaatcctgggcaacaatacatctggcactctgctcgaggaatttgtcatgtcattgacatgttcagcctccattgtccacaccaccctgacagcagacc

SEQ ID NO: 872984 - DNA, 120 bp, Artificial Sequence
  ENSG00000257241_0 (sequence is synthesized)
tgttatacagtaccttgaacagaggggaagagtaaaccagcagcagaagagaagaggctttgctcagactccaaaatatcccacatcagggacattgcaatggacagaggcaaacttgcc

SEQ ID NO: 872985 - DNA, 120 bp, Artificial Sequence
  ENSG00000257241_1 (sequence is synthesized)
gaatcttaagcaaggtccagtgcctccatttcatcagctgcaaaatgggtaatttggtataaatcagcagttctcctgacatggggtccttggaaccttgggtgattgcataaaggggtc

SEQ ID NO: 872986 - DNA, 120 bp, Artificial Sequence
  ENSG00000257241_2 (sequence is synthesized)
tgtggtgttgtctgtagacttgaaaagcaacatatctcctatagatttgtactatttttcaaacgccactgttggagtaataaaaacaattcagttaaaagcttaactgaacttatagtt

SEQ ID NO: 872987 - DNA, 120 bp, Artificial Sequence
  ENSG00000256115_0 (sequence is synthesized)
attgtctctgtctctctctttctcctctgcttcccctcaccccacaaccaaagtcaagagcgcagaccccatgatcacctgatacttccaagcaagcaggtgttcttttcagaagccaga

SEQ ID NO: 872988 - DNA, 120 bp, Artificial Sequence
  ENSG00000256115_1 (sequence is synthesized)
agctgataacctgggctttctgatctaaccccagcccaaattcattgcaatggaggaattggggaggagattcttcctactgagaatgctcctgcctgattgtatctacttaacccactc

SEQ ID NO: 872989 - DNA, 120 bp, Artificial Sequence
  ENSG00000256115_2 (sequence is synthesized)
cagaatcagatttcaaccgtatggaatcatctacaatgcagcagatgggtttacaagtctcttggtctcttcatgtaattaacagccaagaagtctaaagcttgcattgtttacgtggaa

SEQ ID NO: 872990 - DNA, 120 bp, Artificial Sequence
  ENSG00000256115_3 (sequence is synthesized)
gatgtttcttgcccattcccatgccatgccatctgaaatcgctcctttttttattttttctgtgcagtttttttaactttgtgggatcctctgcatataaaactccattcaactacttca

SEQ ID NO: 872991 - DNA, 120 bp, Artificial Sequence
  ENSG00000256115_4 (sequence is synthesized)
gggacaaagtcaaggagacttcaaagatgagaaatgattgcactgggccttagagaggaagttcagcagaacaaggtgggaagggcacgatatcagagatcacctgatacttccaagcaa

SEQ ID NO: 872992 - DNA, 120 bp, Artificial Sequence
  ENSG00000256115_5 (sequence is synthesized)
attgtctctgtctctctctttctcctctgcttcccctcaccccacaaccaaagtcaagagcgcagaccccatgtgctcctgcctgattgtatctacttaacccactctccaagagccaga

SEQ ID NO: 872993 - DNA, 120 bp, Artificial Sequence
  ENSG00000256115_6 (sequence is synthesized)
gtgtcccaagtccttgaggacttcacagggtgttctagtgtcctgagaatatacctgcctaaggaatttggctatagctggtattgggttcctcaaaccagcccacctgcgctatgggaa

SEQ ID NO: 872994 - DNA, 120 bp, Artificial Sequence
  ENSG00000256115_7 (sequence is synthesized)
tgtcaaaattgtcctggcaagctgagggggcatccagaggtcacccagctttcccctgaagcgttgctcagaggccactgtaccataaaagggagttcccatcccacactggttctgaaa

SEQ ID NO: 872995 - DNA, 120 bp, Artificial Sequence
  ENSG00000256115_8 (sequence is synthesized)
cactttgactgtcagaggcattcataagactttctacataggggatccttgggctggcagaggtggtctttggatatgcaacggctacgtgctggcctacagagcccctttcctgtccta

SEQ ID NO: 872996 - DNA, 120 bp, Artificial Sequence
  ENSG00000256115_9 (sequence is synthesized)
gtactctgcctgctaagatagagaacggaattgccatgactttatagtctctgaacacctttaccaaaaccacctggttcttaggacagacaagtgggattaaagagagggaaagctctg

SEQ ID NO: 872997 - DNA, 120 bp, Artificial Sequence
  ENSG00000256115_10 (sequence is synthesized)
tgagaagtgggtgccaactctccctttcaaatttgttcatcaacaaactaaaggggatgccagaaatgtctggagcaatggaagaaccactggaataatgctcctgcctgattgtatcta

SEQ ID NO: 872998 - DNA, 120 bp, Artificial Sequence
  ENSG00000256115_11 (sequence is synthesized)
tctagtgtcctgagaatatacctgcctaagggcgtatctgttagggagactcccatgagggaggggagccgagggaagaggctgagtgaggtgaagagagtgtgtttgtccctccagctg

SEQ ID NO: 872999 - DNA, 120 bp, Artificial Sequence
  ENSG00000256115_12 (sequence is synthesized)
tgccagggtcttctcagcccttctcacagagggctgtctgtggacctctgttcctggaatcacccctctgcaccacccaaactccctgattatgaattacacaatacatccctaattcaa

SEQ ID NO: 873000 - DNA, 120 bp, Artificial Sequence
  ENSG00000256115_13 (sequence is synthesized)
tcctgagaatatacctgcctaagggactcatcattaaaaaggaacaaagaggccctaacccaacctcaaagagaaggaaaaggacctttttctaaatggaagaattcttttgtaagaaac

SEQ ID NO: 873001 - DNA, 120 bp, Artificial Sequence
  ENSG00000256115_14 (sequence is synthesized)
gaggaagagttagaacaagcatctgcatagcctgggaagggccactctctcccaaggcatgctgccgcttgcctctgatgtctggacgcaaacagcagatcctcaatctgctccagggtg

SEQ ID NO: 873002 - DNA, 120 bp, Artificial Sequence
  ENSG00000256115_15 (sequence is synthesized)
cctttctcttgggcttaggcacatcttgaaaggggagatagggatgactctgtgcatcagtccctctgtctggtccagtggaccttgtccttatgatggcctgtgaaaagatcttagttt

SEQ ID NO: 873003 - DNA, 120 bp, Artificial Sequence
  ENSG00000256115_16 (sequence is synthesized)
ctgagcagttatgcaagttgctcaaagcctttgagatgtcccccagaagctgagtgtagaagcagttccaccacccagcctgcattatctacacaagacaattaggcagggctctgggaa

SEQ ID NO: 873004 - DNA, 120 bp, Artificial Sequence
  ENSG00000256115_17 (sequence is synthesized)
cactctaagggccagggattagggagagaatcaaccttgcagcgccaccggtttggggaggtcatcaccacactgccctgcctctatctaaggagtgtctgagccctggaaaagccgcac

SEQ ID NO: 873005 - DNA, 120 bp, Artificial Sequence
  ENSG00000256115_18 (sequence is synthesized)
tcatggctgtcctgtggaatcctggaaaacaccatccaaacaggagaaaaagcctgaaatgagggagagaggtttcccttcagccctctgaggaaagtagaacacagaaaccctggactg

SEQ ID NO: 873006 - DNA, 120 bp, Artificial Sequence
  ENSG00000256115_19 (sequence is synthesized)
aaggggcccccaagttggcctgtgctatccccaactgctcctctctggatgcttcccacccttagattaaaccttgcttattgaccccatagaggcttcatgttctctcccggctcctcc

SEQ ID NO: 873007 - DNA, 120 bp, Artificial Sequence
  ENSG00000256115_20 (sequence is synthesized)
caaattgcccactggaatgtacgtgatgaggtcatttgtagtaagctacaacttttgtggttacccctggcagggctatttataccatgataggaaataaagtctgtgtagaacacacta

SEQ ID NO: 873008 - DNA, 120 bp, Artificial Sequence
  ENSG00000256115_21 (sequence is synthesized)
agtgtcctgagaatatacctgcctaagatctcactgatataaagtggatgaaagggagtgcaaatacaggttcctttttctccaaattccatactctctaccagtgctctgggactggtg

SEQ ID NO: 873009 - DNA, 120 bp, Artificial Sequence
  ENSG00000256115_22 (sequence is synthesized)
agtgttacacaagcaagtggcaggagaggtgcctccacaatgcagcgcgcagctcctcctgggcgtcattagcatgcagcctacgttcttcaagatggcgcccagttcagcctgtcagcg

SEQ ID NO: 873010 - DNA, 120 bp, Artificial Sequence
  ENSG00000256115_23 (sequence is synthesized)
agtgatctatgatgtgtcacttgtgctattaacaggcgttttcaatttcagcagcctcagcacatttagttcctctcccatgtgatcactgctctgtcctccattaataaccactttcaa

SEQ ID NO: 873011 - DNA, 120 bp, Artificial Sequence
  ENSG00000256115_24 (sequence is synthesized)
acccttctagcacccacctgggcagttccctctcatgccttcctcacagggtagggctggactctttgcccatgggagatgattgggaataatctctgtcctgtggggtgagctgaacaa

SEQ ID NO: 873012 - DNA, 120 bp, Artificial Sequence
  ENSG00000256115_25 (sequence is synthesized)
ggggcaactgctctacacatgtggaccatcaatatatctctattaatgagtgaattaattaaagacagacacaaaaaatgactttctcgttggtggagattgtctgttgctgagaaaggt

SEQ ID NO: 873013 - DNA, 120 bp, Artificial Sequence
  ENSG00000256115_26 (sequence is synthesized)
gatgtcagctctctggatgaggctgaggaaggagaaaaggatgaagatggaacaagccctgccttgtcaatgcttatgcttagaaagactggggagacttgcatgactatgcagtgaagg

SEQ ID NO: 873014 - DNA, 120 bp, Artificial Sequence
  ENSG00000256115_27 (sequence is synthesized)
gtccccaaagggggcttaatctgccgacccatgaaggatatcaagcatgactgggcctgttgtaacatttcagagaatgtcagccaataataataaaatcttcttcattctacatgctct

SEQ ID NO: 873015 - DNA, 120 bp, Artificial Sequence
  ENSG00000256115_28 (sequence is synthesized)
gtctctgtctctctctttctcctctgcttcccctcaccccacaaccaaagtcaagagcgcagaccccatggtaaggattctcatcttcatcccacagccaggacttggcaatatctttta

SEQ ID NO: 873016 - DNA, 120 bp, Artificial Sequence
  ENSG00000256115_29 (sequence is synthesized)
tcaagggttttaacaggacattcgcagtctttctcctaaccacacggttgggggcgggggtgcaatgaatgctggaagcccaagggcagcgttgggacggagctagtcaatgtggcctac

SEQ ID NO: 873017 - DNA, 120 bp, Artificial Sequence
  ENSG00000256115_30 (sequence is synthesized)
ggaccctctgggtgtcacatggccactaggaagcccttgagcaaaagctccgcagcaccaaagattcctgtgctcttctggatgcccagcctcccttgtatgaggttggagcctcgactt

SEQ ID NO: 873018 - DNA, 120 bp, Artificial Sequence
  ENSG00000256115_31 (sequence is synthesized)
gctgacttctggctaacgaaataagcacagtgagataagctgcgtgaagcatgccccttacagacagcctgcaagatccttcagctctttcttcctccaccacagtggccttagatggca

SEQ ID NO: 873019 - DNA, 120 bp, Artificial Sequence
  ENSG00000256115_32 (sequence is synthesized)
catataccagatggtagagctctgagacagagcccgcttgacccacctgttattggacttcgatgtcagcaagaaacaaatgtttgcggtaacattaagccactgatgtgtcaaggtttg

SEQ ID NO: 873020 - DNA, 120 bp, Artificial Sequence
  ENSG00000256115_33 (sequence is synthesized)
gagaatatacctgcctaaggcactgtggtgggattctgccattcgagaatctcagactaagatcatctgtttcaacaagcatcgatcaagcacccacattgcagctggcactctgcttga

SEQ ID NO: 873021 - DNA, 120 bp, Artificial Sequence
  ENSG00000256115_34 (sequence is synthesized)
tggtgagatgagtgtcaagaccagttccttattttacagggaaggccatcaaggttgaaagtggaaatttcccaaggtcagagacagagtggtagagccagtccatgcattctggtctcc

SEQ ID NO: 873022 - DNA, 120 bp, Artificial Sequence
  ENSG00000256115_35 (sequence is synthesized)
tgtctcctgttccagtgctcattcgtgacactgctgctctccctaacacttcatcccacgagaatactcttgagaatattgttcttggctgttccaaatagaaagatcatctgtccatta

SEQ ID NO: 873023 - DNA, 120 bp, Artificial Sequence
  ENSG00000256115_36 (sequence is synthesized)
aaagtcaaggagacttcaaagatgagaaatgattgcactgggccttagagaggaagttcagcagaacaaggtgggaagggcacgatatcagagtaagaggcactgatggtgaacaaatat

SEQ ID NO: 873024 - DNA, 120 bp, Artificial Sequence
  ENSG00000256116_0 (sequence is synthesized)
cggacacgagctctgcgaatcactttattgcgcgcgtttcggggagcgggccgtccagggaaggaagcaaagcgggaacgcactgcaggccccatccagaaatagcagatgccaacggaa

SEQ ID NO: 873025 - DNA, 120 bp, Artificial Sequence
  ENSG00000256116_1 (sequence is synthesized)
tccaagaataaagtcgtttattattttcagagcggcgggagtagggctggggaccctagggccgctccagtgggacttccctgaacccggttgtagaggatgatggcgcctttggccgag

SEQ ID NO: 873026 - DNA, 120 bp, Artificial Sequence
  ENSG00000256116_2 (sequence is synthesized)
gggcagagttcagcccacatctccgtctcgagcaatctctgcacgttctgtggggagacaacgagacccaggcattcaagcttgccacttctcctgccagggctgtgcccagaattcctg

SEQ ID NO: 873027 - DNA, 120 bp, Artificial Sequence
  ENSG00000256116_3 (sequence is synthesized)
caaatcttgtgactctggagggaattgtgacccagccaacacctcccctacaagatatgcattgccaggcctctgcaggccccagccctggcctccaagcaagatggtttgtcactctgc

SEQ ID NO: 873028 - DNA, 120 bp, Artificial Sequence
  ENSG00000256116_4 (sequence is synthesized)
acctgtgtctccacaaagaagattcctgtagactcgtgggcctcgggtcccccactcaggtagtgcttcctcacctgctcagaagtcaggctgcacctggacaagaacacaagggtggct

SEQ ID NO: 873029 - DNA, 120 bp, Artificial Sequence
  ENSG00000256116_5 (sequence is synthesized)
tagtgggtgaccagcccctgcggggtacctgtggagccacagctgcctcagcccactcctcaccacccaccttcccaagacccaggatcatgtacccgagcctactcactggacatagaa

SEQ ID NO: 873030 - DNA, 120 bp, Artificial Sequence
  ENSG00000256116_6 (sequence is synthesized)
ctcggcactggctcggccagcactggtctcatttcgggcgatgcccaacagcaggggctggctcagggtgagcagcggcaggttcacctgcggtggagggtggggtggggggaggtccca

SEQ ID NO: 873031 - DNA, 120 bp, Artificial Sequence
  ENSG00000256116_7 (sequence is synthesized)
gggccgtccagggaaggaagcaaagcgggaacgcactgcaggccccatccagttcagaatctccagagcagagcccaggaatctggattttgtacccgacacctccccatctcccacccc

SEQ ID NO: 873032 - DNA, 120 bp, Artificial Sequence
  ENSG00000246095_0 (sequence is synthesized)
agtttactgcgcgcccccgagggccggggcttccccttccccgcccccttggctttcgcagtcaaatcccgctctccgcccgccgcccgcggaagtctcaccgcgcagcagcacccccag

SEQ ID NO: 873033 - DNA, 120 bp, Artificial Sequence
  ENSG00000246095_1 (sequence is synthesized)
cccgggcggttccggggaccgaagggcgcggcacgtagggggcccgtaggatccaaactgcggaggagaagcaggaggagggaggaggaagaagacaaaggagcagcttctagttgcagc

SEQ ID NO: 873034 - DNA, 120 bp, Artificial Sequence
  ENSG00000246095_2 (sequence is synthesized)
tcaagacccgcgagttcaccctccgcgccaagcacccaactcccggctctgcctacagtcacccacagacctaatgatcgactaagcgccgtaatggcccgagatgacaccaggagactc

SEQ ID NO: 873035 - DNA, 120 bp, Artificial Sequence
  ENSG00000246095_3 (sequence is synthesized)
ccttgctgtgcgcctccggaagacgcggaacgtagcccctttctcacactcctgggacacaaaaatacccgacaactcaaagtcgccaaaccacatcttttcatgctttgaagacttctg

SEQ ID NO: 873036 - DNA, 120 bp, Artificial Sequence
  ENSG00000246095_4 (sequence is synthesized)
cccaaggctgtggcaggagtatgtccaactgtgatttgggattctttttaaacatcgaatcaaagggaagaggggagggattcgcaactaaatggtagttgttttcaagcaagtctttac

SEQ ID NO: 873037 - DNA, 120 bp, Artificial Sequence
  ENSG00000246095_5 (sequence is synthesized)
gttcggatctcactccattatttgtcagcaccaagtactaaacccacaaagcgatcgctgtacgggacaccaaacccatacctgcccgtcccctaccttccaggcaaccagtgtcaatct

SEQ ID NO: 873038 - DNA, 120 bp, Artificial Sequence
  ENSG00000246095_6 (sequence is synthesized)
cctcactatacataattcccaacatccctgcccgaagtgaggagaacggtaatttaaataatacagcgggggaggagaggacacactgtttttgaaagactgtaagcattctgctgttcc

SEQ ID NO: 873039 - DNA, 120 bp, Artificial Sequence
  ENSG00000246095_7 (sequence is synthesized)
actctgcgtccttacacttgctgagcactgacaccaaatttaaatggcgttccttcaaaactgatgtaattgtaaagagctgtaaagggcaatgacctcaagtggatgttttttcccagg

SEQ ID NO: 873040 - DNA, 120 bp, Artificial Sequence
  ENSG00000246095_8 (sequence is synthesized)
taccctacaaggtttgcacaaagcaagaaagcatcatgtaaccgaaatgctgaaaagtatagatgctgcaaaacctcattctgagactgagaactatgaatagtcagtgtatttccttct

SEQ ID NO: 873041 - DNA, 120 bp, Artificial Sequence
  ENSG00000246095_9 (sequence is synthesized)
gcggtgcagaaaaagaacaaccaaaaagaaagcaacaaggggagatgttatttattttaatgacaccaaaactaccaatcctagcaatttaataaattaaaatcatagtcctttaaatgt

SEQ ID NO: 873042 - DNA, 120 bp, Artificial Sequence
  ENSG00000253545_0 (sequence is synthesized)
ctatgtagactctgtgaagggccgattgaccatctccagagacaatgccaagaactccctctatctgcaagtgaacagcctgagagctgaggacatgaccgtgtattactgtgtgagagg

SEQ ID NO: 873043 - DNA, 120 bp, Artificial Sequence
  ENSG00000246090_0 (sequence is synthesized)
aaagcagagagctagtcaccagagggatgtgtttgatccagcacaccccttctcttcatagcagagaatcgacacccaatcaatcacagcaaaggtgctcactgtgcctgacatttctat

SEQ ID NO: 873044 - DNA, 120 bp, Artificial Sequence
  ENSG00000246090_1 (sequence is synthesized)
gagcatctccctaggtcagtacatttcacaaatttggagtaaacttttatgtgtactcaagggagatgtttagaaagggttatcttcgaagagacgcttcagaaaggagagagaatttgg

SEQ ID NO: 873045 - DNA, 120 bp, Artificial Sequence
  ENSG00000246090_2 (sequence is synthesized)
ggaaccttttccatgatttgaagaagacggcaagaagcctctcaacacatgttggcacctccatattgaaattcccagcgtccagaactgtgaactaataaatttcttcattgtaaatca

SEQ ID NO: 873046 - DNA, 120 bp, Artificial Sequence
  ENSG00000246090_3 (sequence is synthesized)
aggcgcaggtggtaaaactgaagaccttcacaaacagccagcactaatttgccaaccaaatgacggtctttggaaaacagatcctctggcctcaggtgaaaaatgagaagattaaataag

SEQ ID NO: 873047 - DNA, 120 bp, Artificial Sequence
  ENSG00000246090_4 (sequence is synthesized)
ccatgggaagattttttaaaatgacatgaaactccaagggtaaaaagtaaccttctcccgcagtatcctggttcccatgctttctgtacccacgtgcctactcttgcaatctatacattg

SEQ ID NO: 873048 - DNA, 120 bp, Artificial Sequence
  ENSG00000246090_5 (sequence is synthesized)
ttcctgttcagcagagtttggatgaatacccaacagcctgaggagactgactgttacttgaaatgaaggagtgttcttgtttgaacgatcctgctcagaaggaccagcctgggcttgcat

SEQ ID NO: 873049 - DNA, 120 bp, Artificial Sequence
  ENSG00000246090_6 (sequence is synthesized)
cagtagccactttttttccctgccaagttatctaaatgtagagcttcctgtggtctgagttttaagagattacagtccaaagatgtaagggaggctctctttgctagcatgagtctggtg

SEQ ID NO: 873050 - DNA, 120 bp, Artificial Sequence
  ENSG00000246090_7 (sequence is synthesized)
ctcactcctcagccaatgaaatctcaccaaatttgtggagtttgggaagagtttgacagctactatggcagtcatgtggacatccttgagcagctgaagttgattgagtccatggatgca

SEQ ID NO: 873051 - DNA, 120 bp, Artificial Sequence
  ENSG00000246090_8 (sequence is synthesized)
gaaccccagaacctgcagatatggaggactgactatacttgatcaagatgccctgcccggagaggaggaatctagagaggcaatctggctacagtggctttgccgagctacagtgggctc

SEQ ID NO: 873052 - DNA, 120 bp, Artificial Sequence
  ENSG00000246090_9 (sequence is synthesized)
gggggcttgcaatggctccaaccggaagggcggtgctcgagctgtggtgcgtgccgctaagttgtgcgttccagggtgcactcgccggcgaggctgcacggcgccggtttcattgctaaa

SEQ ID NO: 873053 - DNA, 120 bp, Artificial Sequence
  ENSG00000246090_10 (sequence is synthesized)
atccgacggacttgttgcagaactcgttttttttgtcgggaaagggcttccccgtgtaactttacagcagttatcgtagataagacttgcaaattacagatgtggacggtgagggaacgg

SEQ ID NO: 873054 - DNA, 120 bp, Artificial Sequence
  ENSG00000246090_11 (sequence is synthesized)
gaatttcactgaaagcgcctgagaaccagtaagagacctgcaacagctttgtgctccactggcgaatgcttcctcccctaatacacattatgtgtgcttggagacacaaggagtaagata

SEQ ID NO: 873055 - DNA, 120 bp, Artificial Sequence
  ENSG00000246090_12 (sequence is synthesized)
cagcccctcaagggactcgtcatagggagaggacacagctttgggaataaaggggccacaaaggaggagagaggagtttgctgaaacttcccaagctcccattccagcagttcctgaagg

SEQ ID NO: 873056 - DNA, 120 bp, Artificial Sequence
  ENSG00000246090_13 (sequence is synthesized)
attcatttctctctgaggatctcatgaggtggcttagcagctagaatctcttccttaacagtgggaagaacaactcctggaaatttaggtcgactttgactggatttaaaagaaagctgt

SEQ ID NO: 873057 - DNA, 120 bp, Artificial Sequence
  ENSG00000246090_14 (sequence is synthesized)
caatccttaaacaaaaggaaaacagaaaatctgctcaaggcacctgagaaaatcacaacccacacttgcgaacccctaggagacctaaagctgtggttttacaaataaacagataagtaa

SEQ ID NO: 873058 - DNA, 120 bp, Artificial Sequence
  ENSG00000246090_15 (sequence is synthesized)
cattcctactctttcctataggtactcaatcttcttaacaactcccatcccacacaggtttgcatccccagcagatacatatggctatgtggtcacccattcgatcagcctataaaagac

SEQ ID NO: 873059 - DNA, 120 bp, Artificial Sequence
  ENSG00000246090_16 (sequence is synthesized)
ttgtcttatttgatattgtgaaacccatggttatcagtgtatatgaaaatgtttggttcaggggtcaatgtacaatatgacaagcaaagtcctctaatacacagttatataaaatcactc

SEQ ID NO: 873060 - DNA, 120 bp, Artificial Sequence
  ENSG00000246090_17 (sequence is synthesized)
acctgagagccaagtggacaattggccttatattggctggagttggagccccagagggaaaatttgcctattattaggcaactcttcaaaactttacttattcgtttctaaacactgtct

SEQ ID NO: 873061 - DNA, 120 bp, Artificial Sequence
  ENSG00000246090_18 (sequence is synthesized)
cataaaatgggggatgctttagatgaattaagattagcactagattacttattcgttgaaaattagcactagatttcttattggttgaacaaggaggagtgtgcaccataatcaatataa

SEQ ID NO: 873062 - DNA, 120 bp, Artificial Sequence
  ENSG00000246090_19 (sequence is synthesized)
cctgctgcagttatgtaaacacctcaggtcacatagaagaagatatacagaaaatacatgaacaagctgtgtggttgcgtaaatataaccaaggcaccaatcccaactgtatctggtcag

SEQ ID NO: 873063 - DNA, 120 bp, Artificial Sequence
  ENSG00000246090_20 (sequence is synthesized)
gctggacaatggaggaggcttgaaacagtagctggcaagtggtagaagagatggagcagagaagcaagaagaagcagactcctcactccttcaccagggtggatttgctggtttgaagca

SEQ ID NO: 873064 - DNA, 120 bp, Artificial Sequence
  ENSG00000246090_21 (sequence is synthesized)
gacctgagttgggagaggagagaggcgagaagttttaattggatgaaatatttctttagactggtctatacttttttctttatatctaaaattcactggaagagctatgaaatctgtcca

SEQ ID NO: 873065 - DNA, 120 bp, Artificial Sequence
  ENSG00000246090_22 (sequence is synthesized)
gttcaggaaaaaccaaaaccaaaaccataaccagtgagtttataaaggaagtttatggtggattttttaaaattattttgataactgacattggggtattctccatcttatgagtctgaa

SEQ ID NO: 873066 - DNA, 120 bp, Artificial Sequence
  ENSG00000246090_23 (sequence is synthesized)
aatatttcttcgcagccaggtaatacacatgtgactcagatgccaccaaagaagtatgtgtccaagacctcaagttgaaagctgtggactgcggagggactctctggtgaagttgttgca

SEQ ID NO: 873067 - DNA, 120 bp, Artificial Sequence
  ENSG00000246090_24 (sequence is synthesized)
agcatgattaattcattggggcagcaatggcagccaagccagtggtggtatcctgtgtccaggagtggtattggtgattcagtttgcagcctctgaggtacaaggataaggaaaatggtg

SEQ ID NO: 873068 - DNA, 120 bp, Artificial Sequence
  ENSG00000246090_25 (sequence is synthesized)
accagatcagttttgctgcctcagattagacataatttcaagctgtatatctctaatcctcctaataattctatgacctacatgatatcctttaaataaatgacttatcatttaaaataa

SEQ ID NO: 873069 - DNA, 120 bp, Artificial Sequence
  ENSG00000246090_26 (sequence is synthesized)
caatgaagcattattcacaatagccaaaatgtggaaccaatccttaaacaaaaggaaaacagaaaatctgctcaagtgggaagaaactaaccctcattgagtgcctagttaacatcaggc

SEQ ID NO: 873070 - DNA, 120 bp, Artificial Sequence
  ENSG00000246090_27 (sequence is synthesized)
actttgtacacataatcaattgaatcttgaccacaaccctgtgaggtgaaaaatgagaagattaaataagccatgggaagattttttaaaatgacatgaaactccaagggtaaaaagtag

SEQ ID NO: 873071 - DNA, 120 bp, Artificial Sequence
  ENSG00000246090_28 (sequence is synthesized)
atggcctaaaatcacaggaagtggggtcaccatggtaccactaaccacgtggtcatctgtgccacagattcctacagccaccatctacagagtgaagagaagatgtttataaaagattgt

SEQ ID NO: 873072 - DNA, 120 bp, Artificial Sequence
  ENSG00000246090_29 (sequence is synthesized)
gagtctcaggatgttcaacatgatcaatgccaaataaatatcagaatacttggaagtaaagtactaatagtaggagttcctgattatcaggtgcctatgatgtgacaggcacattgtggc

SEQ ID NO: 873073 - DNA, 120 bp, Artificial Sequence
  ENSG00000246090_30 (sequence is synthesized)
ctgtgctcgaccaggagactggtgagtccttgtggatttcttccctgctcaagtgcataaagcaggtgtattgcatagcttttccaggctgagatcaaagacggagatgtgcctacccgc

SEQ ID NO: 873074 - DNA, 120 bp, Artificial Sequence
  ENSG00000246090_31 (sequence is synthesized)
agatcctagatggccatgtttgcaacagaggtaatgatgagcagtgcgaagatgtgactccaaagcctggagaaggacagaccagcatccctgcaagagatccaactgtcttcttttccg

SEQ ID NO: 873075 - DNA, 120 bp, Artificial Sequence
  ENSG00000246090_32 (sequence is synthesized)
cagaggtccataatttacatgggcctgacaaagaatactgtaacttgcagaaattatcttcagttcaaatccttcattttgggggttaaataacttgcccaagatgtcgagggagcggaa

SEQ ID NO: 873076 - DNA, 120 bp, Artificial Sequence
  ENSG00000246090_33 (sequence is synthesized)
atacttgctggtcttgcagcggctgtggagcctggaatcctgccaagaagagcatgtgtgagagatcaaaatgtttgcttacattcctcctgtgaagggagttgggaaataacctaagaa

SEQ ID NO: 873077 - DNA, 120 bp, Artificial Sequence
  ENSG00000246090_34 (sequence is synthesized)
gcccaatccaaaaacaaagatgtaccatccagtcttctctgtgagaaccaaactacaaaccatctgaatgttccaaaagtgttttgatgatgtattgatgtattttaaattatcctgaaa

SEQ ID NO: 873078 - DNA, 120 bp, Artificial Sequence
  ENSG00000246090_35 (sequence is synthesized)
atgttcttggcagatgcttaaacatgtaattactgagatgatgtagaaataccaagtgtttattaaaacaatacagagtaatacaaatggtatgtttgtcgcaatataaaagtatctaaa

SEQ ID NO: 873079 - DNA, 120 bp, Artificial Sequence
  ENSG00000246090_36 (sequence is synthesized)
ttaatctttggcccttgcttgtttaaattcttggtaaagtttgtgttttttagattacaacaattccacataaagatgatactgacacaaagcttccaatccatcccgtcttctgaaccg

SEQ ID NO: 873080 - DNA, 120 bp, Artificial Sequence
  ENSG00000246090_37 (sequence is synthesized)
ggaaataaagacaccctgcctttaggtgtctttagatctagatcaggcatctagagatttttactcctccaatacttggcagggtctatgcccgtagactcatcaggataccatgtaaat

SEQ ID NO: 873081 - DNA, 120 bp, Artificial Sequence
  ENSG00000246090_38 (sequence is synthesized)
gaggacctcccttggtaccccagaggccaactgtagacccttatgagaaaatcctgtccccaaaatgaacatccactgtcagcaggaagaagttacagaagaccagcctttgcccttacg

SEQ ID NO: 873082 - DNA, 120 bp, Artificial Sequence
  ENSG00000246090_39 (sequence is synthesized)
attaagggtcctcttgtaagtagagaggggaatgttaggaaagcaggagcctaggtgatccagagtgacaccattttaaaataaactccacctgaaaactagcaaggcatctgcacacat

SEQ ID NO: 873083 - DNA, 120 bp, Artificial Sequence
  ENSG00000246090_40 (sequence is synthesized)
ctgtttagcaagtatatacttctgtaactggaataaaaagcgttattttagaatatgcctatagtttgtaataattagccgagggaaaaaaagttcacattggtgtaggaaaagtgccct

SEQ ID NO: 873084 - DNA, 120 bp, Artificial Sequence
  ENSG00000246090_41 (sequence is synthesized)
aatggtcatgggtaataatgggaccgtggttctggtcagtgatttgatggaaggggtgtagataatatattgttgtaaataataaaaataaaaaattgttgtaagtaataaaaataaaat

SEQ ID NO: 873085 - DNA, 120 bp, Artificial Sequence
  ENSG00000246090_42 (sequence is synthesized)
aatattgttgtaagtaataaagtaggagaaatatttggtcttttgcttttgggttagtgcaacagtagtaccattacttggaggagaagttagagaaggacaagaataggcttgaataag

SEQ ID NO: 873086 - DNA, 120 bp, Artificial Sequence
  ENSG00000246090_43 (sequence is synthesized)
atgagtgagaagagagaaaaattccgtaagtggagatggccagggaacaccagggcagcagaatctaactctgaatttaatgctgttgtctgttcatattgcactgcgctgtaatctccc

SEQ ID NO: 873087 - DNA, 120 bp, Artificial Sequence
  ENSG00000246090_44 (sequence is synthesized)
tctgctatccactggggccttgggtcggtggtgctttgggaaataccagaagagggaaagtacggcaaatgtgcagtgtcacagatgataggaggaaagctggccagtgggatgattaaa

SEQ ID NO: 873088 - DNA, 120 bp, Artificial Sequence
  ENSG00000246090_45 (sequence is synthesized)
acaatttcggtgggagtgggaattcagaccatgtaaatggtctgaattaagaaaatttcaagaaacaaaaaatgtttctaatgagccaaagtgaaagctcttcatgatttctttatagag

SEQ ID NO: 873089 - DNA, 120 bp, Artificial Sequence
  ENSG00000246090_46 (sequence is synthesized)
gctctctagtgcttgtcctaatttcctgaaatctcatgggtatcttactctcctggtgcccgcctcaaacattcactgtagcaattatatgagcagcctagagaatcccaatcccagtgg

SEQ ID NO: 873090 - DNA, 120 bp, Artificial Sequence
  ENSG00000246090_47 (sequence is synthesized)
tcttgctccctggatctactttctcttaaaaatcattcccctaagtttccgtcacttggttgaagtttagtagatatctccacatctccagctagaacagcaccagaatttcaggactag

SEQ ID NO: 873091 - DNA, 69 bp, Artificial Sequence
  ENSG00000246090_48 (sequence is synthesized)
cacatctccagctagaacagcaccagaatttcaggactagggcaatagagtctgatattaaattctatt

SEQ ID NO: 873092 - DNA, 120 bp, Artificial Sequence
  ENSG00000246090_49 (sequence is synthesized)
tttggggtcccagatctaggatgggcctggtcctccatgctggttctcctgggtgatatttctgttagtttgaacagtaatcacacttttattactgtttcatcttttttttttcactct

SEQ ID NO: 873093 - DNA, 120 bp, Artificial Sequence
  ENSG00000246090_50 (sequence is synthesized)
tagactgattttatcatgtgtataaaacatacacacacctacatctcaaggataaacattaatccttgaaaaatatgtggtctaaaactatattgaggagagaaagataggacactttaa

SEQ ID NO: 873094 - DNA, 120 bp, Artificial Sequence
  ENSG00000246090_51 (sequence is synthesized)
ttgccacatgattaacacgaggtcaccacacagctttcacaaatctacaagtcattctatttaggctgagtcaagttctcccttgggccagccagagcacaaataatggagcaatgtgac

SEQ ID NO: 873095 - DNA, 120 bp, Artificial Sequence
  ENSG00000246090_52 (sequence is synthesized)
tcttcaatgacagatctctgatttccagaaaagagactttgaaatacccaattctagtaaatatgcaattaaatttccagctaaatgacctttgctcctgtagtcttcatcttggggaag

SEQ ID NO: 873096 - DNA, 120 bp, Artificial Sequence
  ENSG00000246090_53 (sequence is synthesized)
ggaaagaagtcttattctgtttaatagtttgatttttataatagggtttgtctctgttataaatcttgtttgatatttaaaatgttagctaagagaaaacttctgtttgtttttatttag

SEQ ID NO: 873097 - DNA, 120 bp, Artificial Sequence
  ENSG00000246090_54 (sequence is synthesized)
cttgagcagctgaagagatgccctgcccggagaggaggaatctagagaggcaatctggctacagtggctttgccgagctacagtgggctctacccagtttgaacctcctggcagctttgt

SEQ ID NO: 873098 - DNA, 120 bp, Artificial Sequence
  ENSG00000246090_55 (sequence is synthesized)
ttacactgtgaggggaaaaccatctacttaagcctcagtaatggcagacgctcctctctctaaggtcaagtgtaactgtttacttcagactgttgtgctggctgtgagaatttcaagccc

SEQ ID NO: 873099 - DNA, 120 bp, Artificial Sequence
  ENSG00000246090_56 (sequence is synthesized)
tcttttcagacacagaagaaagatgatgataagaagccatacattgtaagacatttaggctcactcaggtcattcacagttctgtttttcctttgactggactaagctccagctttgaat

SEQ ID NO: 873100 - DNA, 120 bp, Artificial Sequence
  ENSG00000246090_57 (sequence is synthesized)
ccaagtggtgcagttaacaaggaggagcaagaaagcaggacaaataaagcagagagctagtcaccagagggatgtgtttgatccagcacaccccttctcttcatagcagagaatcgacac

SEQ ID NO: 873101 - DNA, 120 bp, Artificial Sequence
  ENSG00000246090_58 (sequence is synthesized)
aaagacactcaagcagcactgtgaagaggcgcaggtggtaaaactgaagaccttcacaaacagccagcactaatttgccaaccaaatgacggtctttggaaaacagatcctctggcctca

SEQ ID NO: 873102 - DNA, 120 bp, Artificial Sequence
  ENSG00000246090_59 (sequence is synthesized)
ggttggtggctgtgttcgatgggtgttgcttgtgacagttggggtcctcttcagcatcagtctcgacatggctgcaactggggagtccttgggatcctcccagaatctcttcctcagcat

SEQ ID NO: 873103 - DNA, 120 bp, Artificial Sequence
  ENSG00000246090_60 (sequence is synthesized)
agaaacacaagcataacctctaccccaggtgaaaaatgagaagattaaataagccatgggaagattttttaaaatgacatgaaactccaagggtaaaaagtagatagtgagattgagact

SEQ ID NO: 873104 - DNA, 120 bp, Artificial Sequence
  ENSG00000246090_61 (sequence is synthesized)
tagatagtgagattgagactgacaccgagcattgcctgggaatcacataagataatgcagggcaaggctgctgagagcattgatctcagggtgctgctccccattacccacactgctgga

SEQ ID NO: 873105 - DNA, 120 bp, Artificial Sequence
  ENSG00000253549_0 (sequence is synthesized)
gggactgtcctcgggtcccgcggccagggctgcgcctcccctccctcgggccctacgcgcctccggcggacgcggggattcctccacagtggcctcgcagctggggcaagggggacatcc

SEQ ID NO: 873106 - DNA, 120 bp, Artificial Sequence
  ENSG00000253549_1 (sequence is synthesized)
ccggcgccgcggagccgcgagcggagcgagcgcccggggcgcacctgagcctccagcactccccgcggccgcggaaacattttcctgggcatctaaaagtattgtggacctgagacactg

SEQ ID NO: 873107 - DNA, 120 bp, Artificial Sequence
  ENSG00000253549_2 (sequence is synthesized)
tgcttacagggcctactggttttcactgtatgagaccgagaatggattatggcagttcctcttacctccgctgcatacttgactccatccacggtgtgctcagagccatgatcatccgaa

SEQ ID NO: 873108 - DNA, 120 bp, Artificial Sequence
  ENSG00000253549_3 (sequence is synthesized)
gagccccagtgaagatgaaactggcgaagtcggtagggtccagggagaggaccccctctcagcactgtgattcagataagcttggtcaacagtgaattcatgcttcttttacagagctct

SEQ ID NO: 873109 - DNA, 120 bp, Artificial Sequence
  ENSG00000253549_4 (sequence is synthesized)
actttaaccaagtgctcttagagccaaggcttaatggacaaaatgtggtcagtttgctgggtggatggtgccactcccaggacactggactcctcacaaaatgaagtctggggatatgtc

SEQ ID NO: 873110 - DNA, 120 bp, Artificial Sequence
  ENSG00000253549_5 (sequence is synthesized)
aagataaatgattgttcttttctgtctttcttattttgtttgcttgtttcattattattgaaacatcattttaacatttaggaaagcaaaattaaaacaacagatagacaatgaggatgc

SEQ ID NO: 873111 - DNA, 120 bp, Artificial Sequence
  ENSG00000253549_6 (sequence is synthesized)
atacacccaaagaacaagtcagtagtgtggtgcagtgggaagaactggacagttgagaaccaggtggaggtaggtttccaatgctggcttcaccccttgctagttctgtggtctcaggca

SEQ ID NO: 873112 - DNA, 120 bp, Artificial Sequence
  ENSG00000253549_7 (sequence is synthesized)
taaagtgctcatcatagtgcctgcatgatgatcactgagcagatgtgaattccttctccacgtgttgcttccaactacacttttcttcaagacaacgagcaaaaactttcatctacgtct

SEQ ID NO: 873113 - DNA, 120 bp, Artificial Sequence
  ENSG00000253549_8 (sequence is synthesized)
aatttagactgtgtctattcaaatgagatgaaatggaaaattcagaaatttcccagaaaaccaatcaatgtggatgattaaactagataattctcagcagcattaatttgggcttgttga

SEQ ID NO: 873114 - DNA, 120 bp, Artificial Sequence
  ENSG00000253549_9 (sequence is synthesized)
taaacatctcaacccattgcagagtgatttagaggttcaaatgtcttccaaagtatattggaaactatgcagaaaccctaagatcaagatttggcaatataagctagatcaaaatagaat

SEQ ID NO: 873115 - DNA, 120 bp, Artificial Sequence
  ENSG00000253549_10 (sequence is synthesized)
tcagagcatagctattttagaagaggttgcccacactaagtggcccagggaaagccataaatatagacctcaaacaatgaggctaggcctatatgagtttgttcaggtagaaatggagtg

SEQ ID NO: 873116 - DNA, 120 bp, Artificial Sequence
  ENSG00000253549_11 (sequence is synthesized)
gttcaattcattgcatttttcctgtccaaccactcagaacagttattatagggacatgtgagtccaatttattagaagaaactatatgaaattgacaatattcaactatttttgcacaca

SEQ ID NO: 873117 - DNA, 120 bp, Artificial Sequence
  ENSG00000253549_12 (sequence is synthesized)
aaaatggcattttcatatggttcaacctaatagatatgtttaattttgttatgttgctttcaaaatggtacttgatatataaggagaaggggaaaaaaggaaacaatagcaatacgaaac

SEQ ID NO: 873118 - DNA, 120 bp, Artificial Sequence
  ENSG00000253549_13 (sequence is synthesized)
cactgtttaagaaaatttaaatttctgtaacttggaacctcctggtaggtaggaattatgaatatcattcttcattacaaaatcattaagaatgttcatttatgtatatcaataaatata

SEQ ID NO: 873119 - DNA, 120 bp, Artificial Sequence
  ENSG00000253549_14 (sequence is synthesized)
actttattagagatggggctataaggaattattttgctgtatatcaagcaccaaaatattaaaggaagattctttcttacctcatttatcgtgaaataaagtatttctgactagtcttct

SEQ ID NO: 873120 - DNA, 120 bp, Artificial Sequence
  ENSG00000253549_15 (sequence is synthesized)
atatgcaagctcacttaagacattcaaggaggtctggatcctttcctcactgcccaggcccgggcccaccccacctttaaccgtcagggttccccactacctgggaagccccacaccctc

SEQ ID NO: 873121 - DNA, 120 bp, Artificial Sequence
  ENSG00000253549_16 (sequence is synthesized)
caaagatgcgctaggtgcgccagacgcatgctcctctgctccgctggctccgaagaaccagatctgaggccaagataaaacccgattcctgatgtccgaccccctaacattagaagtcga

SEQ ID NO: 873122 - DNA, 120 bp, Artificial Sequence
  ENSG00000253549_17 (sequence is synthesized)
gagatgaagggaaaactcggaaatcagagccatggattcaaaccagcactggaaaatgccccgggacagttcgtgctgagcgccttagccacaggaaacattttcctgggcatctaaaag

SEQ ID NO: 873123 - DNA, 120 bp, Artificial Sequence
  ENSG00000253549_18 (sequence is synthesized)
tagttgagtacatattgatttgaaataaccaaaacttttaacaaatcacttttctcagaagaatccagtaagagaaagataatttcttccaaagacatgagacgttccctggctggccaa

SEQ ID NO: 873124 - DNA, 120 bp, Artificial Sequence
  ENSG00000253549_19 (sequence is synthesized)
gaaaaattggcatctggcatacctaggaatcattcaaaatagtttaataggaaggacattttgaggccagccagcattatgacatttgtgggtcctacggcatttcaccttggtgggtcc

SEQ ID NO: 873125 - DNA, 120 bp, Artificial Sequence
  ENSG00000253549_20 (sequence is synthesized)
aaaaggaaacattttcctgggcatctaaaagtattgtggacctgagacactgtgcttacagggcctactgggttgattctaaagaagaaagaaaatctatatgcatgaaaagatgtctta

SEQ ID NO: 873126 - DNA, 120 bp, Artificial Sequence
  ENSG00000253549_21 (sequence is synthesized)
aaaagttttgaactactcaaagttaagatttggggaaatagaaatagtatataacttaagaaaattgccactggctgtgaacccccatggcattttctttgcacttttttgcttctcgtt

SEQ ID NO: 873127 - DNA, 120 bp, Artificial Sequence
  ENSG00000253549_22 (sequence is synthesized)
agattgtatgtgtttttaccatttcacacaaacttttaaagattattccacgccgttagctctgtgcttctattagtgtctctatctctctttctctctctcttccatctgagtacaatg

SEQ ID NO: 873128 - DNA, 120 bp, Artificial Sequence
  ENSG00000253549_23 (sequence is synthesized)
agtctctggtgtccccggcctggggctggcaagctgggttaggagctatgaccttggggcaaatagggatacgatcctagaggcgcaggggagcgcgcagcatgagtgctgagaggcacg

SEQ ID NO: 873129 - DNA, 120 bp, Artificial Sequence
  ENSG00000253549_24 (sequence is synthesized)
cgccctctgctgcacggccgtggaataaaacgagacaacggccccacagtcccctgcccgcagcccacgctcgggcgagcctggaggattgcatttcctcgtaggctggcagagccttac

SEQ ID NO: 873130 - DNA, 120 bp, Artificial Sequence
  ENSG00000253549_25 (sequence is synthesized)
ctcctctcccgccgcccggctcccctcggcccacggcagggccccggtgtcctgggctggcagcgaagctcggagctctgggcgtgcggcggctgcggtggctcctgggctcctccgtcc

SEQ ID NO: 873131 - DNA, 120 bp, Artificial Sequence
  ENSG00000253549_26 (sequence is synthesized)
ctgcggtggctcctgggctcctccgtccaacccgggccgcggagcctctacgcgcaccccatccccctcccggctgcggagtctggcggcggcggggactgctcgggacccggacccccg

SEQ ID NO: 873132 - DNA, 120 bp, Artificial Sequence
  ENSG00000198671_0 (sequence is synthesized)
acttgagtaggacacctaggatgcagctgctgtgtgtttttccaatttacaaggacaatcatgagggaaagagcactgtgttgggagcctaaagatgtggctccctgccaccaaccactt

SEQ ID NO: 873133 - DNA, 83 bp, Artificial Sequence
  ENSG00000198671_1 (sequence is synthesized)
ttgggagcctaaagatgtggctccctgccaccaaccacttatgcaaactttggcaatctatggcatgatcttggctcactgca

SEQ ID NO: 873134 - DNA, 120 bp, Artificial Sequence
  ENSG00000198671_2 (sequence is synthesized)
tgggattacagacatgagccaccgtacccagcctacggtctcttttataagggctctaatcccattcacgaaatctccaccttcatgatctaatcacctcccaaatgctgcacctcctaa

SEQ ID NO: 873135 - DNA, 120 bp, Artificial Sequence
  ENSG00000198671_3 (sequence is synthesized)
ataatacttaataaatactggttgagtgaaaaaaagagaaggaactgctttcccctggtgtcctggcaccaaccatctgtcattgtccttcagaagcatcggcttctgaacaatgagcca

SEQ ID NO: 873136 - DNA, 120 bp, Artificial Sequence
  ENSG00000198671_4 (sequence is synthesized)
ctaaacagacgcagtttacagatgtcagcagctggcaacaactcaacgccaccctggaaaggaagctcaatgaataggtgcctggccttttgtgtgttttcagttctcttaagcatagga

SEQ ID NO: 873137 - DNA, 120 bp, Artificial Sequence
  ENSG00000198671_5 (sequence is synthesized)
tgaatattcaagcctggaaaaaccatgctaataacaaatgtaaatcatctgggcctaacatccatggtgctgagaaacttcaagccgaaacttcaagtggaaaggtccagctgctcttgg

SEQ ID NO: 873138 - DNA, 120 bp, Artificial Sequence
  ENSG00000198671_6 (sequence is synthesized)
aaggaccaaaggacctgcccccaggaggttctttcttaacccacagtggattgagcttccagacaccctgacaattccaggagatccctgctgtcagggtctttctatgttgcccaggct

SEQ ID NO: 873139 - DNA, 120 bp, Artificial Sequence
  ENSG00000231243_0 (sequence is synthesized)
ccagatccctgcagctgcagcccctgtgggcccctgagagcctagagacaccaagatggctgaagtgcagtcaccatccttagggagaggcgagaaagacaggccatagagctgaaaatt

SEQ ID NO: 873140 - DNA, 120 bp, Artificial Sequence
  ENSG00000231243_1 (sequence is synthesized)
ggagggatccatcaattctggggaagtttcagaataggagggagcttcactccacgcagaggaaggggctcctgcaaacactggaggaaagaacatcctctgtgacgtcacagagtatga

SEQ ID NO: 873141 - DNA, 120 bp, Artificial Sequence
  ENSG00000231243_2 (sequence is synthesized)
ggctcctagttctaataggattggatgggggttgtgctgctgtgagagatgcagtgttgctcacattatcttccaaatggattcactttcattaaaatgacaattgttttacagtcataa

SEQ ID NO: 873142 - DNA, 82 bp, Artificial Sequence
  ENSG00000253898_0 (sequence is synthesized)
ccaagaacccaccaattccggacacaatttcttggctctcagtggcttccatggaagttctgcaatcaaccagcaggagaac

SEQ ID NO: 873143 - DNA, 77 bp, Artificial Sequence
  ENSG00000253898_1 (sequence is synthesized)
gttgcagtgagccaagtatgcaacaaaataaattaaaataaaaaataatatatttttctaactatcatcccttttcc

SEQ ID NO: 873144 - DNA, 120 bp, Artificial Sequence
  ENSG00000253898_2 (sequence is synthesized)
catcccttttccaaatcaggaattccccttaagttttcctcaatttccatggcaatatctttgcatagattcattaagaatttgtcctttttaaataaaaaatataaagggaactattca

SEQ ID NO: 873145 - DNA, 120 bp, Artificial Sequence
  ENSG00000253898_3 (sequence is synthesized)
ttaggcaacaaatgccttgtctgaaatatcacatttgagaatgctgctcatttaatcagaaaggtacgctactttaaagaactgaggtccactttctggagccaaaaactcataaatccc

SEQ ID NO: 873146 - DNA, 120 bp, Artificial Sequence
  ENSG00000253898_4 (sequence is synthesized)
tcagagtatttggagaactttgagaagagaggaattctcccaaatgtataggtgtcacaggtaaaatacagtcgagagattttcttggactttaattccttaaatcaggatagcaaataa

SEQ ID NO: 873147 - DNA, 120 bp, Artificial Sequence
  ENSG00000253898_5 (sequence is synthesized)
taggggcttttacaaattcaatctgtttccttacaaaaattttcagcaaagtaatttcagcaaattaattttcagcaaagtaaatgtaagaagacttatgtgaaaaattaacattctcca

SEQ ID NO: 873148 - DNA, 120 bp, Artificial Sequence
  ENSG00000253898_6 (sequence is synthesized)
tgtatctatgaagccaaacctaataaaaccagctttaatttgtgctcaagaatattatttcactgagttttcttaaatcacaaaggggagactgttatgaaaactgatataaaataaaaa

SEQ ID NO: 873149 - DNA, 120 bp, Artificial Sequence
  ENSG00000253898_7 (sequence is synthesized)
aaacaaggaagaaaagtctactagatgtctctaatggaagactgcatttttagaacatatccttataggcgattctagcctttctctgctatttggctctcacactctttaccgtgcaga

SEQ ID NO: 873150 - DNA, 120 bp, Artificial Sequence
  ENSG00000253898_8 (sequence is synthesized)
taattcacagcaatgcaaaagaatcctcatctatagccatgaaaataagttatttgttatttctggtaaaggttcaattgacctccccttccaggatgaagaaagtttcatgtctttctg

SEQ ID NO: 873151 - DNA, 120 bp, Artificial Sequence
  ENSG00000253898_9 (sequence is synthesized)
catcatttcaactattccttactacatataaatctgcacttgttaacttctattttgaattgattgtggcatctgcctgcttccccattaaaactgaataaaatctttaacacataaaaa

SEQ ID NO: 873152 - DNA, 120 bp, Artificial Sequence
  ENSG00000230051_0 (sequence is synthesized)
ccgcagagctccttctgggattctctattggctgaactcagccagaagctgccaagggagacccccacaactggatgcagcccactgaagtcagcttcctggggtgcgtagctgaaggta

SEQ ID NO: 873153 - DNA, 120 bp, Artificial Sequence
  ENSG00000230051_1 (sequence is synthesized)
gcagggagcaaaaagaatctgaaggggaagtgaacaatgtagagcgtatctgtgctgaagacgtaaggagagagtggaggtcagaagctggcatggtccctggtgcatgtatcagccgct

SEQ ID NO: 873154 - DNA, 120 bp, Artificial Sequence
  ENSG00000230051_2 (sequence is synthesized)
aaagaagtggagagtatgaacataagcaagaggaagtgatgagtatcccttccaggagaactctaagaggcagtgagtgatttgctgggctcccaagccctctgctctgatgacagcaaa

SEQ ID NO: 873155 - DNA, 120 bp, Artificial Sequence
  ENSG00000230051_3 (sequence is synthesized)
gtgcctccatcagtcgggacccctcagcagagccagcttcacagctggagtggatgaatcagaactttccccatgggagcatttataaaaaggggacacccagcgcagaagatgttttcc

SEQ ID NO: 873156 - DNA, 120 bp, Artificial Sequence
  ENSG00000230051_4 (sequence is synthesized)
agggagatctcggggagcccaacaagccaagaagagcagagcaaagcattccaaggaaggactctaagtctgcaaccgagcacacacgagcacaaggaaagaccatgtgaatacacagca

SEQ ID NO: 873157 - DNA, 120 bp, Artificial Sequence
  ENSG00000230051_5 (sequence is synthesized)
agaacgtggtgctctgcaagtcagaaacagacccgtcatcagacaccaaatcagccagcaccttgatctaggatttctggcctccaaaacagtgagaaaataaaattctgttgtttaagc

SEQ ID NO: 873158 - DNA, 120 bp, Artificial Sequence
  ENSG00000230051_6 (sequence is synthesized)
agcctatgtatcccataagctgacatcttgttgcccaaagcatgtcatgtgcgtggtccagagtcagtgttgaagggctctgcaaaatcacatggtaaagactgtggtttcagggaggag

SEQ ID NO: 873159 - DNA, 120 bp, Artificial Sequence
  ENSG00000230051_7 (sequence is synthesized)
tgaagatttgtgcgcattgctccaattgacaaccatggcactaggctcaggccacacttcttcctaacaagagagcaagtcaaagcgtggttagttaaagtccatacaaaaactcacttt

SEQ ID NO: 873160 - DNA, 120 bp, Artificial Sequence
  ENSG00000230051_8 (sequence is synthesized)
aacaggcctcctctggattgaacagctgatattaagtcataaggtaccacatcagaaagatactgggtatctttggttcagcaattccatcaccagggactttttcatcctaaggaaatc

SEQ ID NO: 873161 - DNA, 120 bp, Artificial Sequence
  ENSG00000276487_0 (sequence is synthesized)
cagtccccgcggaatttacgcactttcgtcttgtgctcttagatgttctccaggtagactgcaaccaacacctttagaataaacccacctgtgcttgggccagcctgagaggtcttcatt

SEQ ID NO: 873162 - DNA, 120 bp, Artificial Sequence
  ENSG00000276487_1 (sequence is synthesized)
ccttgctgtccagaaaaccttcaaaggctgcagcataaccagcttctaacattgtccactggagcagagactttgggagccgaggtgaagatggcgcaactaccagagggagagctggat

SEQ ID NO: 873163 - DNA, 120 bp, Artificial Sequence
  ENSG00000276487_2 (sequence is synthesized)
ccaggatgtcagaacacggctctgtacgagctcctgagatccagggctgtagttgtgagaatttgtcctaatgcctctggtctttgcctgtgcttcagcttatttgggggaacaaaacca

SEQ ID NO: 873164 - DNA, 120 bp, Artificial Sequence
  ENSG00000276487_3 (sequence is synthesized)
atctgattgctctcaacatccagttgtcactgattgggttcaaggaaattattttatcttcagaaaacattttgttatttgaagcagctatataagtgagataaatatatttgatacata

SEQ ID NO: 873165 - DNA, 120 bp, Artificial Sequence
  ENSG00000276487_4 (sequence is synthesized)
atataagcgtacatatgccttccggtctctgaaaagtgagaggaaaataggaaactaataatatttgacccctgtatcattcagggccctggtttgaacaatgcactgaaagtgcttctg

SEQ ID NO: 873166 - DNA, 120 bp, Artificial Sequence
  ENSG00000276487_5 (sequence is synthesized)
gaagaggacttaaggaaggcactatttacaaaggtgtggacagaattaagggaagccaacggggtggtgaaacacacaaggctgagtaacaggggaagccttccagcccccagtgggacc

SEQ ID NO: 873167 - DNA, 120 bp, Artificial Sequence
  ENSG00000276487_6 (sequence is synthesized)
tgtcaatgggagggccaggtcactggagcctgagtgatggtagaagggccacccaggagaagccgtgtcccttggtggagggacacagtcacttccaacgtgtggcccaaagttgcaggg

SEQ ID NO: 873168 - DNA, 120 bp, Artificial Sequence
  ENSG00000276487_7 (sequence is synthesized)
ggcgggtctgggaagcagagttgtaagtatcctgatctttctcatcttctgctctctgatctccttggtgcctcccgttcatcaacccaatctggatgctggaagacagggggtttaatt

SEQ ID NO: 873169 - DNA, 120 bp, Artificial Sequence
  ENSG00000276487_8 (sequence is synthesized)
catgcagtatttgaatattacatccctgagatgcagggtagggtggagaaaagctgagggtggacttggaggggcgcaagaagaacacccagttcagcctctcacagaagtctttgacct

SEQ ID NO: 873170 - DNA, 120 bp, Artificial Sequence
  ENSG00000276487_9 (sequence is synthesized)
tgaaggagacctgctccaccattacactttcccctcagtgatcatgtttggcaggtgtattagtctattctcatactgctaataaagacatacccaatatttggtaagttataaaggaaa

SEQ ID NO: 873171 - DNA, 120 bp, Artificial Sequence
  ENSG00000276487_10 (sequence is synthesized)
ggggggccggggcgtggagtgcggacgggcagccggttgggctgggcccggaagggtgtgcagtagagcaagaggaggaagtggagggaaaggaaccagatgcttctgagacaggctacc

SEQ ID NO: 873172 - DNA, 120 bp, Artificial Sequence
  ENSG00000276487_11 (sequence is synthesized)
atctctgcgtgcagtccccgcggaatttacgcactttcgtcttgtgctcttagatgttctccagagactttgggagccgaggtgaagatggcgcaactaccagagggagagctggattct

SEQ ID NO: 873173 - DNA, 120 bp, Artificial Sequence
  ENSG00000276488_0 (sequence is synthesized)
tctccttttcagactccaattgtccaagcatcctgggggcctctggactcagttttctttccaaaccctctcagaccctctgctgtctctccatactcctgcaccctaccccacccacag

SEQ ID NO: 873174 - DNA, 120 bp, Artificial Sequence
  ENSG00000276488_1 (sequence is synthesized)
ccctccgtcctcatcccttcaggttttatcctaaaatgagcataatgataaggggaatcacagtttctatcagcgtaattaggagggaggactctggggccagaatcaaatgtaagccct

SEQ ID NO: 873175 - DNA, 120 bp, Artificial Sequence
  ENSG00000276488_2 (sequence is synthesized)
tagctgtgtggccacgggcaagtgactgaacctctctgtgcctccatttcctcatctacacctggggaccacaaagcacatgcctacctcacaggactgtgaggattcaacacacacata

SEQ ID NO: 873176 - DNA, 120 bp, Artificial Sequence
  ENSG00000276488_3 (sequence is synthesized)
cacacatatgtgcaaggctcttagggggcggttcctggcactctgtaagcactccgtacatagaaggtatggactgggcacagtggctgacagctgtcatcccagcactttgggaggctg

SEQ ID NO: 873177 - DNA, 82 bp, Artificial Sequence
  ENSG00000276488_4 (sequence is synthesized)
gcactttgggaggctgaggcaggagagctgcttgagcccgggaggtgaaggctacaatgagctgtgatcacagctctaaaaa

SEQ ID NO: 873178 - DNA, 120 bp, Artificial Sequence
  ENSG00000253891_0 (sequence is synthesized)
aaaactttatcaatttcttatattttatctgctgcaaacatccttctattattccactcaggaccactccccaatccaagaaacagctggatagactcgacctatttcagactcagccag

SEQ ID NO: 873179 - DNA, 120 bp, Artificial Sequence
  ENSG00000253891_1 (sequence is synthesized)
acttgccaagtcatcatattacatgcggtctgttgactgataagcccgttctaatatccccaattgatggagaggatttttggcctcagctaaaatcttccgttgacactctgcccaggc

SEQ ID NO: 873180 - DNA, 120 bp, Artificial Sequence
  ENSG00000253891_2 (sequence is synthesized)
tgttatgaggtctcatgtaggctgaatacttgcccaagtcataaaagtctacatcatcaaggcatctgtggaccaagaccagagcttcatatataatccaaatgaagaaatcaagaagtt

SEQ ID NO: 873181 - DNA, 120 bp, Artificial Sequence
  ENSG00000253891_3 (sequence is synthesized)
ggttaaatcaacaatcctggagctcagtggggtaaactgaaaccggaaacatttaaatattgttagcatgcaggtgacatttaaagccacaagaccagaaaagatgatctacaaagaggg

SEQ ID NO: 873182 - DNA, 120 bp, Artificial Sequence
  ENSG00000253891_4 (sequence is synthesized)
tataatttgagaaaataagaatgtaagcactgagtcttaggaatatttaacatgtggacacaaggaagagaaaaatgacccagaaaagaaaattgaaaggcttggtatgtgagcaagaaa

SEQ ID NO: 873183 - DNA, 120 bp, Artificial Sequence
  ENSG00000253891_5 (sequence is synthesized)
gaaaacctggaagtgtttggtttcagaagccaaatgaagacagaatttcaagatagtgggactggcttactatctggaagtgctatcaaccaaagtctaatactatgcagatagcaacta

SEQ ID NO: 873184 - DNA, 120 bp, Artificial Sequence
  ENSG00000253891_6 (sequence is synthesized)
caattttgggaattcaaagaaaaaattttaatggaagtgttaattactataattcattacaatgatacatcaaaggagatgaataatacaattatgtttataaatgtcccaataagaaag

SEQ ID NO: 873185 - DNA, 120 bp, Artificial Sequence
  ENSG00000253891_7 (sequence is synthesized)
agtaaaggatattaagagtagaaatctgaaactcagcgactactttcaaacatagtacttgaaaagttttctaattatttaaaatataatatcctaatttgtataactggagttataaga

SEQ ID NO: 873186 - DNA, 120 bp, Artificial Sequence
  ENSG00000253891_8 (sequence is synthesized)
gtcctgatttatagaggtgaggttgcagtggaatcatataggtaaagttcttaggataggggtcatagaaagtactgaattttttttttttttttgaggcagggtttcactctgtcaccc

SEQ ID NO: 873187 - DNA, 80 bp, Artificial Sequence
  ENSG00000253891_9 (sequence is synthesized)
tcaacttctggactcaggtgcaccaccatgcctggctaattttaatactttttgtagtgacaggatctcgctatgttgcc

SEQ ID NO: 873188 - DNA, 120 bp, Artificial Sequence
  ENSG00000253891_10 (sequence is synthesized)
tttaatactttttgtagtgacaggatctcgctatgttgcccaggctggtctagaatttctgggctcaagcaatccgcccacatcagcctcttaaagggctgggattacaggtgtgagaca

SEQ ID NO: 873189 - DNA, 120 bp, Artificial Sequence
  ENSG00000253891_11 (sequence is synthesized)
ctgtgcctggactgaataatcatttttaattaaaatttgataagaatgaactcccattcctaactgttaaagaagattatttttctttaacatgataaaaagtcttaaactacagcaaaa

SEQ ID NO: 873190 - DNA, 120 bp, Artificial Sequence
  ENSG00000253896_0 (sequence is synthesized)
tacggcagctttagggaggtgctctgagacccgaaactagactcgactttaacagacacagacgaccctgaagatggaaatgttttcttccaaattgtgctgcacgtttttggcgagagc

SEQ ID NO: 873191 - DNA, 120 bp, Artificial Sequence; identical to SEQ ID NO: 829538
  ENSG00000253896_1 (sequence is synthesized)

SEQ ID NO: 873192 - DNA, 120 bp, Artificial Sequence
  ENSG00000253896_2 (sequence is synthesized)
caggtggaacagcctcaactgattcagtccctgaacttccgtacacagccctggagtcgtcttagagccatgatttatttaactgttctttcattttacagaacataaaatgtattgttt

SEQ ID NO: 873193 - DNA, 120 bp, Artificial Sequence
  ENSG00000253896_3 (sequence is synthesized)
taccctgtcaaagggtgagcatttccggttcccctgctgtgctttgctgcgttgttctcccctgctgcaacgttctcactccacaatcctggggcaggtaggggaggcccagctgagttt

SEQ ID NO: 873194 - DNA, 120 bp, Artificial Sequence
  ENSG00000253896_4 (sequence is synthesized)
ggatcataatcctgaaagacacaatcccaagcaccataatgtggaatgttgaaatccctaaagatcaaaatccctcaagtctaaaatccctgatatttcagatgaccacagctatagggc

SEQ ID NO: 873195 - DNA, 120 bp, Artificial Sequence
  ENSG00000253896_5 (sequence is synthesized)
taggtgcacacaattagtaaccgtagtgatatacgtgtacacgtttctcttttgacttatttctttatggtctgtcttcttataactgctacacccatgctaccgtcattagttacctca

SEQ ID NO: 873196 - DNA, 120 bp, Artificial Sequence
  ENSG00000253896_6 (sequence is synthesized)
gtgtttatgcaaaaatacctgttatcgttgcctattttattgtgtaaagtggcctatgaaatgttctgttgtgtttttatgtttctcaaatacataccttttaaaaatgtaaataaataa

SEQ ID NO: 873197 - DNA, 120 bp, Artificial Sequence
  ENSG00000253896_7 (sequence is synthesized)
aggtgctctgagacccgaaactagactcgactttaacagacacagacgaccctgaaggtgagactgtctgctggtgggatgctggatggaaatgttttcttccaaattgtgctgcacgtt

SEQ ID NO: 873198 - DNA, 120 bp, Artificial Sequence
  ENSG00000253895_0 (sequence is synthesized)
ttctcttcctcacatgccccatttctgggttgtccatcccaaccaacagttactgctggagctgaatccactagcccgcttccatgggctgtcaggaacacattgcaagggtgacacaca

SEQ ID NO: 873199 - DNA, 120 bp, Artificial Sequence
  ENSG00000253895_1 (sequence is synthesized)
tctctgcagagccaactctccttctccagagattcatccaagaaacaattttgactatacctgagctctgtgacatctgaggacatggtttgtattactgtgcaagacaaacagtgagag

SEQ ID NO: 873200 - DNA, 120 bp, Artificial Sequence
  ENSG00000253894_0 (sequence is synthesized)
ctgaagcagcagcagcagcagcagcagcagtcacctacctaggctgcagctatcagcaaggccagcccagagaaagaaaggcaacaatagaccaacaaagatgccataggccacgccttc

SEQ ID NO: 873201 - DNA, 120 bp, Artificial Sequence
  ENSG00000253894_1 (sequence is synthesized)
aaaaagaataagaagaaaaacactgaccaaggcaataattccaagaagtcaaaaattaaggcctgagaggaagaaggcagactaaagaaagtaggtaagacagtgacctgaacgaaagtg

SEQ ID NO: 873202 - DNA, 120 bp, Artificial Sequence
  ENSG00000253894_2 (sequence is synthesized)
ctggctccatgctctgtgacgttgggcgtcctcactgacctcggaagcatggtcttggtgacactggtcaggtgcatgaagtgttagaaaattttattaaagattccatggttgcatctc

SEQ ID NO: 873203 - DNA, 120 bp, Artificial Sequence
  ENSG00000253894_3 (sequence is synthesized)
ctgcagctatcagcaaggccagcccagagaaagaaaggcaacaatagaccaacaaagatgccataggccacgccttcctgctttatcctcctcctgtatcccttcattcttcttctcctc

SEQ ID NO: 873204 - DNA, 120 bp, Artificial Sequence
  ENSG00000253894_4 (sequence is synthesized)
tttcctcccctcccaaactccttccttccctcattcctccactttcatctctttgctatttctagaaagaatcttttgtcttgctaggcagagcatttataacaaaggaaagacaggagg

SEQ ID NO: 873205 - DNA, 120 bp, Artificial Sequence
  ENSG00000253894_5 (sequence is synthesized)
gatgaagcagagtagagcacttttaactgcaagagtgttaggatatgaacactgctgttaggatagaaaagagaaaatcctcagacattttttttttccagagcaagagaaaatccagtg

SEQ ID NO: 873206 - DNA, 120 bp, Artificial Sequence
  ENSG00000253894_6 (sequence is synthesized)
taaagaaagtaggacaaaagcttgttaagaggaacttgactctttgttcactgctgagtcttcggtgcccagaacagatcttggcacatgggcattcaacttctgcagactggatgattt

SEQ ID NO: 873207 - DNA, 120 bp, Artificial Sequence
  ENSG00000253894_7 (sequence is synthesized)
agatgttgcaaatgccatcttcaaggatgcccatacttcctggattctaactaccttgataaagtttcattgctttgtttttcttctgtatttcagtatggagaccttctatgtccagac

SEQ ID NO: 873208 - DNA, 120 bp, Artificial Sequence
  ENSG00000253894_8 (sequence is synthesized)
ttaatcaattttctgtacttgtccattctgcttctgctggtgttttgcagtaagccagaggtaagcaggatattgtggactataggaagaggttaaacaggtaactctgattagactttc

SEQ ID NO: 873209 - DNA, 120 bp, Artificial Sequence
  ENSG00000253894_9 (sequence is synthesized)
acaatggggtccctatattgcatttacatcgccatggaaagggccttttatcataataattctaataataactggtatttatttagcacctagtacgtagtaggaactctgcttagcact

SEQ ID NO: 873210 - DNA, 120 bp, Artificial Sequence
  ENSG00000253894_10 (sequence is synthesized)
ttatataaattatttcatttaatctttctaacaacgctgtattatttaatctttacaacaactaactatggtttttatttccaatttgtagatgagaaaattgatgctcagaggtgttgt

SEQ ID NO: 873211 - DNA, 120 bp, Artificial Sequence
  ENSG00000253894_11 (sequence is synthesized)
gcaacttagaaatgtactgcagctaggaagccacctgctggtttctcattacagctaaggtgccagagctaaggaataacacatgcctgtaacatgagcactttgggaggccaaggcgga

SEQ ID NO: 873212 - DNA, 120 bp, Artificial Sequence
  ENSG00000253894_12 (sequence is synthesized)
cattgcactccagctgggcgacagagcgagacaccatctcaaaacaacaacaacaaaaaaaaacaaaaagggatggtcagaccaggagatgaagacccaaagaggtcccttttcctatga

SEQ ID NO: 873213 - DNA, 120 bp, Artificial Sequence
  ENSG00000253894_13 (sequence is synthesized)
tgctgtcataattttcatgctcctgattatacctgcccaattattagcagacatatagacaatagcaaatctcaattcacagtcacatggtggaattcctttgcttaatgccgtaaattc

SEQ ID NO: 873214 - DNA, 120 bp, Artificial Sequence
  ENSG00000253894_14 (sequence is synthesized)
atcaagagaaagggaatggtttttgttacaactgtgaattaaaggtaggtggtgactaatcagttagccaatgcatgtcccttgagataagaaagtcaacttcttgtgatattcagggtt

SEQ ID NO: 873215 - DNA, 120 bp, Artificial Sequence
  ENSG00000253894_15 (sequence is synthesized)
ctcagatgtgatcccaaaacattaatgccagatacctgcgctcctacctgagacaaactcatggtttcagagagcagaaggtcaaagcactaaaatgaatgcattagaattaagctggct

SEQ ID NO: 873216 - DNA, 120 bp, Artificial Sequence
  ENSG00000253894_16 (sequence is synthesized)
tccatcacaaagcttcatataaatattacaccggctctataagacactcaatgtttggtttctgaacctattaatatataatgaggatacgatgtaattaatatcgtttgttttgatttt

SEQ ID NO: 873217 - DNA, 120 bp, Artificial Sequence
  ENSG00000253894_17 (sequence is synthesized)
ctgttaaatccgctttagtaataaagaatgcaaggtaattattcaaaaaggcttttcaacaaatgtcagtttcattgattaaaaatcaagtcagtgcttcatttgaaatgatatttacaa

SEQ ID NO: 873218 - DNA, 120 bp, Artificial Sequence
  ENSG00000253894_18 (sequence is synthesized)
gcatgctttaagctgaaatgaataattatcagattattgaacagcaagttatctgcaaagaattgtctacttttttgctttttgcactgaggcttgatctcaaataataataaaagacaa

SEQ ID NO: 873219 - DNA, 120 bp, Artificial Sequence
  ENSG00000253894_19 (sequence is synthesized)
agaaaaatttgaagtatagaggggaatcacaaaaattctaaatggtaactcatgtcaggaacctgaaagtcaagtcttcacttcagcattgggaagtatatgaaactgttttcggaccac

SEQ ID NO: 873220 - DNA, 120 bp, Artificial Sequence
  ENSG00000253894_20 (sequence is synthesized)
acaactctgtgagctcatcgctaagaattggtatgcaaggtcttcagaaggcttgcttgttaaagaaatctgtaacatctttagcaagaaacagaaagacagagggcagcatgggaccag

SEQ ID NO: 873221 - DNA, 120 bp, Artificial Sequence
  ENSG00000253894_21 (sequence is synthesized)
aggtagccaagaaaatagagaaaagaatgggaagtggatctacccacatcctctcccatcccctccagaaagaaatgcagcatctctttctcattgtttaagaagaaaagggggatctcg

SEQ ID NO: 873222 - DNA, 120 bp, Artificial Sequence
  ENSG00000253894_22 (sequence is synthesized)
gagacaaagccaatgaagaataaatgagtgctctgccagttcaaagtcaatgtgaagattggatggggaagcgtgcggagctcagaagcattttttttttccagagcaagagaaaatcca

SEQ ID NO: 873223 - DNA, 120 bp, Artificial Sequence
  ENSG00000253894_23 (sequence is synthesized)
aaagacagccatctgcataccaggaagagggccctcaccagacactggatctgctgcatccttgatcttgggcttccaacctctagaaccatgtgaaatacatttctgttgtttaaacca

SEQ ID NO: 873224 - DNA, 120 bp, Artificial Sequence
  ENSG00000253894_24 (sequence is synthesized)
cgctaagaattggtatgcaaggtcttcagaagggtaggcaatttgtaaactccttttgacttagctggtaagacagaaagttcttttttcatggctaaatgatacttgagaaaagaaaaa

SEQ ID NO: 873225 - DNA, 120 bp, Artificial Sequence
  ENSG00000253894_25 (sequence is synthesized)
atgtggtgaagctgaatgtatctagttgaaataaaaatgcctacctttctcctgcataggcaaaatatactacttacaagaaaaaaaggaatttatgaatagaaatagaatcaggtcaca

SEQ ID NO: 873226 - DNA, 120 bp, Artificial Sequence
  ENSG00000253894_26 (sequence is synthesized)
gtgcatttcctaattctccactggattttattactcaagcactgtatttttaccttttatcatagctgtcattcgtccttgtactttagatagcagcttatcaacccttgttatatcctt

SEQ ID NO: 873227 - DNA, 120 bp, Artificial Sequence
  ENSG00000253894_27 (sequence is synthesized)
accttctttagggtgatgatcttatctttatttttgaccacacttcctgtgcctgccccttttcttacatcaatttctgttccacttgggattttgtactcacagatgtgacatgaatat

SEQ ID NO: 873228 - DNA, 120 bp, Artificial Sequence
  ENSG00000253894_28 (sequence is synthesized)
ttatgagattaaagtgaatggtccaacatcaattcagaaaaattttgatccattcgtccaaattatttaaaatattccctttctaattgaggcagcaaggcctctagcttagtgctcatt

SEQ ID NO: 873229 - DNA, 120 bp, Artificial Sequence
  ENSG00000253894_29 (sequence is synthesized)
ttccctctctaagcatattcatgccattagggtattaatttcttctaaactaaagctcttatctcctcataattcattatgtctgtttttgattcgcactatcattgtggtctctcaact

SEQ ID NO: 873230 - DNA, 120 bp, Artificial Sequence
  ENSG00000253894_30 (sequence is synthesized)
tactcccgttaacacagtcattttggtggcttttataatacctcctctgttgttcttcaaattttgcctaaataggcaataacttaaatgaaaaagtgttcatgagtgagccagtgagct

SEQ ID NO: 873231 - DNA, 120 bp, Artificial Sequence
  ENSG00000253894_31 (sequence is synthesized)
cagaaatttggaacctttttgccatggagggtgatggtgagcttagtgataacaagaatttcccaattatggcatctacctttctaatcatctctccttccatgtgatactgtttttata

SEQ ID NO: 873232 - DNA, 120 bp, Artificial Sequence
  ENSG00000253894_32 (sequence is synthesized)
tagtttgttttgcctgcctccctcccttcccatctctcttctttcctcccttccttctctcctttccttccactcttctttcctttatgggaaaaaccattctaaatccttcaaattgtg

SEQ ID NO: 873233 - DNA, 120 bp, Artificial Sequence
  ENSG00000253894_33 (sequence is synthesized)
gtttgagtttacagtcttttattgaaattacatgttggtatgctaggagtatatgaaagctttttttccaatttgcaaagaatgtttatatgattttattatttttatatgatttttgta

SEQ ID NO: 873234 - DNA, 120 bp, Artificial Sequence
  ENSG00000253894_34 (sequence is synthesized)
ttaaaatcatcccagatatccccaaaatagaatgcaaagtttacattttaaatttactttgaaattttaaataaattttcttctaagttgtctttggattacatatccagacagattgga

SEQ ID NO: 873235 - DNA, 120 bp, Artificial Sequence
  ENSG00000253894_35 (sequence is synthesized)
ctttattgtcttcatcttatatctctggctgtcaatgaaattctatcatttcccactcaaagcccaattgatctctggaaggaggtggggtgtgcccttgtatgagctcttaagaattta

SEQ ID NO: 873236 - DNA, 120 bp, Artificial Sequence
  ENSG00000253894_36 (sequence is synthesized)
tttagcatttttttctagctcttccatcagtgaaatcaagatggtagctgaaatttaccacggtggaggatatttacatcacagaaattggcaaaggctacaaataagtttaattttttt

SEQ ID NO: 873237 - DNA, 120 bp, Artificial Sequence
  ENSG00000253894_37 (sequence is synthesized)
ttttttagaactcgttaagtatgtaccagcacaccctgtaaggttgattgatgcttgatctaggtgtcttccgtatgctttgtgtgttactcctgtggctttaccagctattatgcatta

SEQ ID NO: 873238 - DNA, 120 bp, Artificial Sequence
  ENSG00000253894_38 (sequence is synthesized)
gtctctggggataagggaagtaataaacctttgtcccaggtctcataaatagcttggttattaatcaaatgatcatttggtctggcttcctttgttcggtcctatgcttgtaagtatgga

SEQ ID NO: 873239 - DNA, 120 bp, Artificial Sequence
  ENSG00000253894_39 (sequence is synthesized)
tgtgttagctctagacagaaccatagataagggagctaaagcccagagtgattaatgacttacaaggtcacaattctagttagagggaaagatgctgggacaagaatctgggttttctga

SEQ ID NO: 873240 - DNA, 120 bp, Artificial Sequence
  ENSG00000253894_40 (sequence is synthesized)
gtcccaggtaggttttgttgctgttatacaactctctaataattttcaaaaaatcctaaatcataaatattccattgtaataagcttcagaaagcattgcaagccacagatttagctcta

SEQ ID NO: 873241 - DNA, 120 bp, Artificial Sequence
  ENSG00000253894_41 (sequence is synthesized)
aatctttgctttttttctaatctaaaaactaggatacattaagaaaagtagaaaatgtaaaaatattggtaaaaaaccaaaactcctaacaaattaatatatatatgttaagagagacat

SEQ ID NO: 873242 - DNA, 120 bp, Artificial Sequence
  ENSG00000253894_42 (sequence is synthesized)
agagacatacgtttaaacaatttactatcatctgtcaacttttaaaggaatgcctggatgtagctcttatgactttcaatcgaagtgacacaatttttccagtaattttaactgtttctc

SEQ ID NO: 873243 - DNA, 120 bp, Artificial Sequence
  ENSG00000251543_0 (sequence is synthesized)
gtgaaatgcaaatgagttttttgagtttttgttgacacctctaactgcaggatggaagcggcacaaattgttctgatcagggagcaataacatgcaacgatccccagggctcccaggcag

SEQ ID NO: 873244 - DNA, 120 bp, Artificial Sequence
  ENSG00000251543_1 (sequence is synthesized)
tcacatttccccagctccagcctcctttcaaaggccctttattaaaccaccaactatttgctgtcgagacatttaggatgaaatcattgtgttaaacaaataaacgcagcttcgtccaga

SEQ ID NO: 873245 - DNA, 120 bp, Artificial Sequence
  ENSG00000254790_0 (sequence is synthesized)
atcacatcagggttcagatcttggttctgttcccactacctgagtgacgatgaacaagttactcacccacttcaagtcttagtttttcctctgtgaaatgggactaattgtttattagat

SEQ ID NO: 873246 - DNA, 120 bp, Artificial Sequence
  ENSG00000254790_1 (sequence is synthesized)
atggtgggggttgtagtgagccgagaccacgccactatactccagcctgggcaacagagaaagactcagtctcaaaaaaaaaaaaaagttagaaaattaattttgttatatgtgagaata

SEQ ID NO: 873247 - DNA, 120 bp, Artificial Sequence
  ENSG00000254790_2 (sequence is synthesized)
gttttttgatgatgtaagacaatgtttctgttttttaatgaatactaaaacactcagcaatgagatgtcccgatgtctttagcttaccttaaactactacgcaaaaacagaccagaagct

SEQ ID NO: 873248 - DNA, 120 bp, Artificial Sequence
  ENSG00000254790_3 (sequence is synthesized)
gctttcaccaggcctctagccctgcattgccatggggattcttgcagggaagaagctgtacattaacatcttcctaattttgtaaaagttgtgtgaggtatgccgggtggtggaaggggt

SEQ ID NO: 873249 - DNA, 120 bp, Artificial Sequence
  ENSG00000285122_0 (sequence is synthesized)
tcattagtcatccattttttccctccgttctgctgaatatcaacctgaactttttttttgcatcactgggcattatcatttcacactttgagttcctggagctggaagtacagaatccaa

SEQ ID NO: 873250 - DNA, 120 bp, Artificial Sequence
  ENSG00000285122_1 (sequence is synthesized)
gagtaggcggggcgggcgctttggttccgagggtgcttctgctccgactgcttttcccacgggcgtcatctatagtccggaggacagccccagggcagaggcctctgtttttccatgtcc

SEQ ID NO: 873251 - DNA, 120 bp, Artificial Sequence
  ENSG00000285128_0 (sequence is synthesized)
cagatttagttccaagcaacagatgctacctcaggggcagaaagggaatttattgagaggatttggggtcactcacagaatcccaggagtgaactggggaatcaggattggaaagtgagc

SEQ ID NO: 873252 - DNA, 120 bp, Artificial Sequence
  ENSG00000285128_1 (sequence is synthesized)
ggccatgctggcgatggccactagacactgtagttgtctcgctgcctctgctgccccagaaataggatatggctgctcttctcattagctgttgctggtaataaatcacttcacaactta

SEQ ID NO: 873253 - DNA, 120 bp, Artificial Sequence
  ENSG00000230587_0 (sequence is synthesized)
gaaagaaaactggctcagagaggctgagtaacctgctcaagatgacacagcttgtgggtggctgagttggccttccaacccagattcctgtcatgttcctcaagccgacaggttcagctt

SEQ ID NO: 873254 - DNA, 120 bp, Artificial Sequence
  ENSG00000230587_1 (sequence is synthesized)
ggttgtgacctctgctagaagccctccctggcctccctgtgcactgagctggtggttcctcctttgcgccccaggtacatgctcagatctgtgtaccctacactttgtcctccagcttcg

SEQ ID NO: 873255 - DNA, 120 bp, Artificial Sequence
  ENSG00000230587_2 (sequence is synthesized)
tgtttggatgttcacaactcccatgagaagggcccccgagagctggcacagtgcatgtgtttcctctccagacttctacaaacctggcacataattgtttgctgaaagatggcatgttcc

SEQ ID NO: 873256 - DNA, 120 bp, Artificial Sequence
  ENSG00000230587_3 (sequence is synthesized)
taaaacagaggaagtagaaccgaataaagcgaaatccaacttcccactccctgctctcacttcctctgggacaggccttgagcaagagagacaaaaagaacaagagatgatctttccctt

SEQ ID NO: 873257 - DNA, 120 bp, Artificial Sequence
  ENSG00000230587_4 (sequence is synthesized)
taatgggatttcagtctgatcagggagatagtaacagaaagactagactagactagtgtatgattaaatgacatttgccatccccagaagagggagagacctgcatggaacagggtggtc

SEQ ID NO: 873258 - DNA, 120 bp, Artificial Sequence
  ENSG00000230587_5 (sequence is synthesized)
aaggcaggcttcctggaggaggcaaagacttagatttaacagtaccagagctccaggatagatcctcctctgactgaactccctatttctttctcccaccccaaccttcccgggtcccca

SEQ ID NO: 873259 - DNA, 120 bp, Artificial Sequence
  ENSG00000230587_6 (sequence is synthesized)
gctgaagggatacgtgtgtgtgtgtgtgtacatgtgcctgcacacatgtacacatgtggttagaaagggggtattagtatctctctcctaggatggagtctcaaggacaggcccatcatc

SEQ ID NO: 873260 - DNA, 120 bp, Artificial Sequence
  ENSG00000230587_7 (sequence is synthesized)
tcctcagtttgcccctctctctcccacttcacctagggaatggaataagaatgggataagtataacacaatgagacgaatgcagaaccaactagatgtacacccaacaatgtggatgaac

SEQ ID NO: 873261 - DNA, 120 bp, Artificial Sequence
  ENSG00000230587_8 (sequence is synthesized)
aatgaaatctgcagcacatcattcatataaactaaaaatacatgcacagagaaaggccacttttttttttttggagacaaagtttcgctcttgtcactcaggctggagtgcaatggcacg

SEQ ID NO: 873262 - DNA, 120 bp, Artificial Sequence
  ENSG00000230587_9 (sequence is synthesized)
cggctcactgcaacgtccacctctagggttcaagcgactgtcctgcctcagcttctagagtagctgggattataggagcccaccaccatggccggctaatttttgtctttttagtagaga

SEQ ID NO: 873263 - DNA, 64 bp, Artificial Sequence
  ENSG00000230587_10 (sequence is synthesized)
cgcaacgtatgttttgtagagacacagacaaagatgtgatgtcaaacacactaatgtggttgcc

SEQ ID NO: 873264 - DNA, 120 bp, Artificial Sequence
  ENSG00000230587_11 (sequence is synthesized)
cagacaaagatgtgatgtcaaacacactaatgtggttgcctcatttatggatgggggactgggctggtgaatgaggattaaaggaataaataaataaaacaagagagggcctctgtacag

SEQ ID NO: 873265 - DNA, 120 bp, Artificial Sequence
  ENSG00000230587_12 (sequence is synthesized)
aacggtgatgacagcgtgccgtcgaggagaatgatgaactcaaacttttgcacctgagagccaaacaaaagctcaaaaccaaaatctctcttagaaatgatgccactgactttaggatgg

SEQ ID NO: 873266 - DNA, 120 bp, Artificial Sequence
  ENSG00000230587_13 (sequence is synthesized)
cactcatatctgtgtgagtgggagagagaagggtttggggcagggatttgactgtagctgtaatgttttattcctttaaaaaagataagataatctgaaacaaaatgttaatatctgttg

SEQ ID NO: 873267 - DNA, 120 bp, Artificial Sequence
  ENSG00000230587_14 (sequence is synthesized)
aatctggggagaggctatgagggtttctgttaaaccattttgtgtacattttaaatacagtcatgcatgagttaatgatggggaataagttcttagagatacgttgttaagcagttttgt

SEQ ID NO: 873268 - DNA, 120 bp, Artificial Sequence
  ENSG00000230587_15 (sequence is synthesized)
tattgtgtgaacattatcgagtgtacttacacaaacttaggatggaatagctgactatataacttagactatatggtctagcctattgcttgaaggctgcaaacccatactccatgttac

SEQ ID NO: 873269 - DNA, 120 bp, Artificial Sequence
  ENSG00000230587_16 (sequence is synthesized)
acccacagatgtgaatgtcgtgtgatgttggctttccagtgtcttgcatggcgtggtagcagcagaaatgagcttggctgggcaccctctctgggccttggaggcaagcctgggctcctc

SEQ ID NO: 873270 - DNA, 120 bp, Artificial Sequence
  ENSG00000230587_17 (sequence is synthesized)
tgaaaatacaggcagcttcctttccctgacttgcctggaggagccaggccctgtggtgcggtctggctctgaggcctgtggtcctgcttgggactggcagtcttaggctgagggaacatt

SEQ ID NO: 873271 - DNA, 120 bp, Artificial Sequence
  ENSG00000230587_18 (sequence is synthesized)
ttccagagtatagccgagggacagaatgtctcagtaagacgggctcggaggggaagtgttttggaaaggcctctgcttgctctgggaggcgttcaggatgctgaggttttggaaatctat

SEQ ID NO: 873272 - DNA, 120 bp, Artificial Sequence
  ENSG00000230587_19 (sequence is synthesized)
tctcccgggcctggggaggacactggactttgaaggggaatgcagcctagaaggcctggaccctggagtcaggagatgctgctcccatccagtaagccctggctggagctcttctgggca

SEQ ID NO: 873273 - DNA, 120 bp, Artificial Sequence
  ENSG00000230587_20 (sequence is synthesized)
taccatgggtcctctttccagtttctccaccccactgctcatccccccaggttcagcttggttgtgacctctgctagaagccctccctggcctccctgtgcactgagctggtggttcctc

SEQ ID NO: 873274 - DNA, 120 bp, Artificial Sequence
  ENSG00000230587_21 (sequence is synthesized)
ctttgcgccccagtcaggaagccactccaccccagaagaaggtaatatgagtcctactacctttctgaaaggaagggacactcatgtcgggaggcttcagctgctgtgaaagaaactcag

SEQ ID NO: 873275 - DNA, 120 bp, Artificial Sequence
  ENSG00000230587_22 (sequence is synthesized)
ctaccctgaggctgccttgtagagggactgcatttaaagtgagagattcctgaggagttccagccatccagccccaagcagtgtgaacctcctagtctagaccccagcatttgagctgac

SEQ ID NO: 873276 - DNA, 120 bp, Artificial Sequence
  ENSG00000230587_23 (sequence is synthesized)
ctcagccccagccaccaattgactgcaaactcatgagacaccctgagtgagaactgcctagcttagtctctgtcaaccctcaaatttcaggaacaaaataaatgattgttgttgtcttaa

SEQ ID NO: 873277 - DNA, 120 bp, Artificial Sequence
  ENSG00000248724_0 (sequence is synthesized)
gcgatcgtgccaccgcagcgagaccctgtctccaaaaaaagagacagaaaaaggggagggttaaggaatcatttcagactcgaagagaatatggcctctcaaattaaaatgggcagtttc

SEQ ID NO: 873278 - DNA, 120 bp, Artificial Sequence
  ENSG00000248724_1 (sequence is synthesized)
cgccgaactttcaaagccgcttggtttggagagggagcaggacggccgtgcttcccaagggtctcccggcgtcgcggcccagcccggcgttacctgcagttcggcccgcagccgcttgtt

SEQ ID NO: 873279 - DNA, 120 bp, Artificial Sequence
  ENSG00000248724_2 (sequence is synthesized)
ctccgtgtccagcttggcctcgcggcggcccatggacaacaactcctggttcttgctgacgcgaaagatctcgtactccttcctgagccgctcgtactcggccgccgcgtactccagctc

SEQ ID NO: 873280 - DNA, 120 bp, Artificial Sequence
  ENSG00000248724_3 (sequence is synthesized)
cgtactcggccgccgcgtactccagctctggcaccgacgagccagtggacttgaagctggcccccagcagcccgcccgcgcccaccccgcggggcagcgacccgggcccggcccctgctg

SEQ ID NO: 873281 - DNA, 120 bp, Artificial Sequence
  ENSG00000248724_4 (sequence is synthesized)
gcgcagcaggcgggccttgggcttcacctccaccgggatctcgcaggcctcgccgccgcccgccccgtacgtgtcctcgatcacttccccgcccgcggggctcacgagcgacgaggcggt

SEQ ID NO: 873282 - DNA, 120 bp, Artificial Sequence
  ENSG00000248724_5 (sequence is synthesized)
ccccatggcgtccgttgccgctactacctagctgtttagtcctgctcagttctaccaagtgaactctgacttctaaagtctcctactacaaagtctgaattggtgaagaagaggagttta

SEQ ID NO: 873283 - DNA, 120 bp, Artificial Sequence
  ENSG00000248724_6 (sequence is synthesized)
gtgccaaggtgggtgcaagagtgaaacaaaggcaacacatccacatgcactggacagggaaatggggttacttaaaggttgtttcaaaatatggacttaggaaggagaaagaaacaagat

SEQ ID NO: 873284 - DNA, 120 bp, Artificial Sequence
  ENSG00000248724_7 (sequence is synthesized)
taaaaaggaacaagtaactaggagagaaaaatatgaagaaggttatggatatgaagatgcatttttggtgaataaattaagcccagtaggtgacctgcacaagacgcataatgtgaccag

SEQ ID NO: 873285 - DNA, 120 bp, Artificial Sequence
  ENSG00000248724_8 (sequence is synthesized)
cccaagacgcataatgtgacccgaactaagatggagctcaatgtagaaaaatgtcacacacaattttcatctctacaaagtatctttgatattgacacattcatttttctttgcttattt

SEQ ID NO: 873286 - DNA, 120 bp, Artificial Sequence
  ENSG00000248724_9 (sequence is synthesized)
gactttgctttctttgcttatttgacactttattttttaaaattttaaatatacaaattaaatagaatcattacaaatataaagtagatagaataatgaatctccatgtacatatcaccc

SEQ ID NO: 873287 - DNA, 120 bp, Artificial Sequence
  ENSG00000248724_10 (sequence is synthesized)
aagtttaaaattgttcaacattcaaacagttatttcaaccagttatttttttcgtctattctaatacccattctccaaccctccatttattattctttaataaaattttcaaggtagaat

SEQ ID NO: 873288 - DNA, 120 bp, Artificial Sequence
  ENSG00000248724_11 (sequence is synthesized)
ttataatcatggaaaatacaaatcttaaccgtacaatattggcaaatggatctacttatgtaactgtactgttacagactaaatggtgtccctccataattcatatactgaattcttaac

SEQ ID NO: 873289 - DNA, 120 bp, Artificial Sequence
  ENSG00000248724_12 (sequence is synthesized)
aatctgatagggctcatgttcttatcaggagaggaagagatgccggagatctctctttctgtgcatgcacaaagaagagatcatgtcagcatatggtgtgacggcagtgcctacacgcca

SEQ ID NO: 873290 - DNA, 120 bp, Artificial Sequence
  ENSG00000248724_13 (sequence is synthesized)
aggtaagaggcctcagattgatacctgccatggctgtaccttgatcttggactttccaacctccaaaactgtgagaaataatccacccagtattttgctattttgtaaagcagcctgagc

SEQ ID NO: 873291 - DNA, 120 bp, Artificial Sequence
  ENSG00000248724_14 (sequence is synthesized)
tgactaatatatgcacactagcatgataggaagcatagcaatctacccaggaaattctcttgtgtctctttccagtcaatttctaatgctcttcttcccacccttgaggcagccactgtt

SEQ ID NO: 873292 - DNA, 120 bp, Artificial Sequence
  ENSG00000248724_15 (sequence is synthesized)
cgtttttccccccttatattagttttgcctattttagaaattcatatagatgaaataattcagtatgttgtcttttttgtttctttcattcagtattctgtctgtaagacttacctgtgc

SEQ ID NO: 873293 - DNA, 120 bp, Artificial Sequence
  ENSG00000248724_16 (sequence is synthesized)
tatgactccttttcattgttccatagtattccatcgtgtgagtataattgatctattctcatgttgtagacatttgagttgattccagcttttgtgactataactgctatgaacattctt

SEQ ID NO: 873294 - DNA, 120 bp, Artificial Sequence
  ENSG00000248724_17 (sequence is synthesized)
gtacaagactttttgtgggcatgagttatgacttctcttggataaatgcctagaagtgaaattgctgggtcaaagactacaaatatgtttcacccattctagtgaatgtgtagtggtatc

SEQ ID NO: 873295 - DNA, 120 bp, Artificial Sequence
  ENSG00000248724_18 (sequence is synthesized)
tcattggaattatagcttaaatatccctgatgactaataatgtggaacacttttttaatgtgcttattggtcatttgtatatttttttctgtgaagtgtctgctgtgcctttacttattt

SEQ ID NO: 873296 - DNA, 120 bp, Artificial Sequence
  ENSG00000248724_19 (sequence is synthesized)
ggaattgcttactaagttgtaattcattatatgttctgcatgtagacatataatttgtgatattttctgtatgtctgtggcttgcctattcctaagaagaggaaaatagcagaagagaag

SEQ ID NO: 873297 - DNA, 120 bp, Artificial Sequence
  ENSG00000248724_20 (sequence is synthesized)
atagcatttagaagaatacacaagccacagacatacagaaaaatatatgctatcttttgatgaacacaaattttaaattttaatgaaatctaattcatcaaattttttttcctacggtta

SEQ ID NO: 873298 - DNA, 120 bp, Artificial Sequence
  ENSG00000248724_21 (sequence is synthesized)
tcacttactgcattctgcctaagaaatctttgcctacctcacattatgaaaacactattcttgattttctttgaaaggctttatggttttagtttttacgtttaggcctatgatctatgt

SEQ ID NO: 873299 - DNA, 120 bp, Artificial Sequence
  ENSG00000248724_22 (sequence is synthesized)
taatattaacatacttgaaatcacattgtgtatatagctttgtaatattctcccacctccaacactatttcatcaatcttttcacatgtcattgaagatacttcataaataatattagga

SEQ ID NO: 873300 - DNA, 120 bp, Artificial Sequence
  ENSG00000248724_23 (sequence is synthesized)
gttgtgtgactttctatgctatagatgtgctgtaatttatttaatggttcctttatttttggacatttaggttattctccctctgctgttatacttgtaataaaaatctgtttttgcata

SEQ ID NO: 873301 - DNA, 120 bp, Artificial Sequence
  ENSG00000248724_24 (sequence is synthesized)
gcatttttggctgaaaaacaaaagtactcactttcctagcctctcctgtagccaaaggaggtcatctgacacaattttggacaaggagacaaagttcaactggacagcactgctctaggc

SEQ ID NO: 873302 - DNA, 120 bp, Artificial Sequence
  ENSG00000248724_25 (sequence is synthesized)
tgttgcagattaatgagactaaggaggcttgataactaaaggcaatgtgtcatcctggattgagtcctggaccacaaaaaaaggacatcagtaggacatttggtgaaatttaaataagag

SEQ ID NO: 873303 - DNA, 90 bp, Artificial Sequence
  ENSG00000248724_26 (sequence is synthesized)
tccaaagagctgggattacaggcataaaccactgtgcctgccctggctgggcaatggattttagaggccaataatgattcaacttttgag

SEQ ID NO: 873304 - DNA, 120 bp, Artificial Sequence
  ENSG00000248724_27 (sequence is synthesized)
gcaatggattttagaggccaataatgattcaacttttgagataagataaggaaaccaaaactcaacgtggctagcttgtccagaatctcccaaaaagttagtagatgatgaagccagact

SEQ ID NO: 873305 - DNA, 120 bp, Artificial Sequence
  ENSG00000248724_28 (sequence is synthesized)
ggcaccaaagcttgcacttttaatgaggcaatgatgaatcaatcccctgaggtagagacaagggtgaccaaagaccctcaagtttgctgccactgctctgcacccaggagaatttccagt

SEQ ID NO: 873306 - DNA, 120 bp, Artificial Sequence
  ENSG00000248724_29 (sequence is synthesized)
acaacttggggaaccaggaacaggctggacagatgtgtgcattctccaaagctctccatatgttttctgttgcctgctcaggatgaaaactagccctgcaggccacttgttccagatctc

SEQ ID NO: 873307 - DNA, 120 bp, Artificial Sequence
  ENSG00000248724_30 (sequence is synthesized)
tcacagattattgggcactgaagttatagttgatctctttttgaaagtactctccactcttcaactctttgtaggttaagaggaagccaaggaggcacaaaaacaaatatttcctttgga

SEQ ID NO: 873308 - DNA, 120 bp, Artificial Sequence
  ENSG00000248724_31 (sequence is synthesized)
ctctagggctttatcaatgtgaggaacagagtttatttcaaaaaacttctgcgctcttgtgaaaagtaaagagaagaaacattttgactgttttgttaatctgtgaccttgagaactgcc

SEQ ID NO: 873309 - DNA, 120 bp, Artificial Sequence
  ENSG00000248724_32 (sequence is synthesized)
aagtcaccctaagagtcatataaagatgaaacgagagatgaaatacccggaaatgttttgttccagttactgtggctgcataacaaatcaccctaaaatttaatggaataaaacatttat

SEQ ID NO: 873310 - DNA, 120 bp, Artificial Sequence
  ENSG00000248724_33 (sequence is synthesized)
tatactctgtaattctgtgggtaatgaatttggaatgggcgcagcatgaatggcttgtcctgctccacaatgcctggtcatcagatggaagacaggagggctatgcgctagaatcatctg

SEQ ID NO: 873311 - DNA, 120 bp, Artificial Sequence
  ENSG00000248724_34 (sequence is synthesized)
aaggttcactcactcactcgaccagcagctgcttctaggtgccaaatggagccacagttcctctccacgtgggcttctcatgtggtctctctgcatggactagtttggactagtttgtca

SEQ ID NO: 873312 - DNA, 120 bp, Artificial Sequence
  ENSG00000248724_35 (sequence is synthesized)
ccatgctgcgagttagtccaaagatgttccagcactctttccttcagagcacgtagtaggattttattttctacaccttccatggattaggttattccagtccctgaagttctgtctgtg

SEQ ID NO: 873313 - DNA, 120 bp, Artificial Sequence
  ENSG00000248724_36 (sequence is synthesized)
agaaaaagaagacaggagagtccagacacaccaacaggttttccagggttggaattatgcccctggccagtggtgactgatagttctccctgagaccaacctctgcccagactgtgaaag

SEQ ID NO: 873314 - DNA, 120 bp, Artificial Sequence
  ENSG00000248724_37 (sequence is synthesized)
gacaacttgcatatcttctgttgctgagttccttctggagagaaactacggttaccttctgttgagctgcctcgccatagatctcctgcctcgattgccaggtttgtctgttcgcatacc

SEQ ID NO: 873315 - DNA, 120 bp, Artificial Sequence
  ENSG00000248724_38 (sequence is synthesized)
tctggaaactgtatttctcctgtttgcctgaagagcccggcccccgatctgtatcttgtccaggactgtaagtgctcactgctcctggaaggtgtgatttgttcccagcacccaaaccct

SEQ ID NO: 873316 - DNA, 120 bp, Artificial Sequence
  ENSG00000248724_39 (sequence is synthesized)
ggtctggtttggtctatcacagacttcctgagctctggaaggaaggctttcctcctgatatactcagaagccatttctgtcttattatcatcatctgacagagtttggtctgaagctaat

SEQ ID NO: 873317 - DNA, 120 bp, Artificial Sequence
  ENSG00000248724_40 (sequence is synthesized)
gaacaatgacaacaattgcttcttctgcaggctaggaagcctcacctgcaattgtgaaatgtcaagcagaagttgaggtaaaagaggaacaagaaaattttcttctgcccattgtacact

SEQ ID NO: 873318 - DNA, 120 bp, Artificial Sequence
  ENSG00000248724_41 (sequence is synthesized)
tctaagattaaagaaagagtctaaagctttttgaaacctctgtacaaggacatttcaacctcattgtttacaaaatcaaagaaagtaaactaattttcattcctcagattcttgagaatt

SEQ ID NO: 873319 - DNA, 120 bp, Artificial Sequence
  ENSG00000248727_0 (sequence is synthesized)
accacaccctgttattggttcacacacagacagcaaagtatgtcgctgtgcttccttgtcttcctgtgatgacccatgtgccatcttacacaaatggacaatcaatggaggtaagtggcc

SEQ ID NO: 873320 - DNA, 120 bp, Artificial Sequence
  ENSG00000248727_1 (sequence is synthesized)
agcaaaaatgaaagtgaagcaaagaaatgaaaaatgagaacgcagggagtgagattcaaatccaacataaatggaggtgagaagatatagctgagattgggatgtcaacactcaggcatc

SEQ ID NO: 873321 - DNA, 120 bp, Artificial Sequence
  ENSG00000248727_2 (sequence is synthesized)
ctagactttacataggcagccagaggaacttggcgaaggtgaccttattgacataaatgaggaaagtgaggacaaggagcaagatatcccagaggaagtgacgccagcaaaaaaaaaaaa

SEQ ID NO: 873322 - DNA, 120 bp, Artificial Sequence
  ENSG00000248727_3 (sequence is synthesized)
aaaaaattaaaatttacattttaaaaatcacattaaaggaactctcagagttaattcatgaattaaaagtgaaaaagattaaatgttgggtgctcactcaaatttagaaaggagagtaac

SEQ ID NO: 873323 - DNA, 120 bp, Artificial Sequence
  ENSG00000248727_4 (sequence is synthesized)
aatttaccagggcatagaaaatatatttttctatactgtaagttgtatgacaaaaagataacactgtgtattatttatcttttttattttctgtatgttatgatgttttaatatcttaaa

SEQ ID NO: 873324 - DNA, 120 bp, Artificial Sequence
  ENSG00000248727_5 (sequence is synthesized)
aacctgtctgactgcccctcccagggctggccaatccttagacacagcaaagggctcagctgggagtgtgcctttgatacgcaaactgcccaacctagagccatctctcctctatgtggc

SEQ ID NO: 873325 - DNA, 120 bp, Artificial Sequence
  ENSG00000248727_6 (sequence is synthesized)
ccctgcacctcaggaggcaacatttttcctctgccttagtcaaccaaaggccaggaaccaggcaactaaagaccacccgtatagttaagtgcctgctgaaatgattcaaactagccagtc

SEQ ID NO: 873326 - DNA, 120 bp, Artificial Sequence
  ENSG00000248727_7 (sequence is synthesized)
ctaaactgcccttgccctgctgggaaaccccaataaaggctgtagcctcggctttccctgtacccctgctttctgcctcctgaccaccctgaggctaccccacgtggccctgcctggtgt

SEQ ID NO: 873327 - DNA, 120 bp, Artificial Sequence
  ENSG00000248727_8 (sequence is synthesized)
ggtttgtctcctgtctctaggacctgtgagtgttgttttcctgagcttctcctctgtctcctcttgtggctgcacttgactgagcatttcatgaaagaatacagaatgcacttctcagac

SEQ ID NO: 873328 - DNA, 120 bp, Artificial Sequence
  ENSG00000248727_9 (sequence is synthesized)
tactcttggtcagtcctaagcagcacaaccttagccactgtggagctagtgccagctgtgtgaatctgtacagtggtgcagtgttaagggcaaagagcactttggagccaaggcagacaa

SEQ ID NO: 873329 - DNA, 120 bp, Artificial Sequence
  ENSG00000248727_10 (sequence is synthesized)
aactgcgcagagctcccaggcctgggtgatgatccctcttcccagacatctgaggagttgccatattgatgttctctcattgtttcggctgagctggaatgatcgaaataattctgggac

SEQ ID NO: 873330 - DNA, 120 bp, Artificial Sequence
  ENSG00000248727_11 (sequence is synthesized)
tatgacaagtctcaccagacctcgttatggatcagggagaggtgaactttaaaaataatcaagttcaaaggagagccctgtcacctgtgatcagtttcgttagcagaatcccaccagcct

SEQ ID NO: 873331 - DNA, 120 bp, Artificial Sequence
  ENSG00000248727_12 (sequence is synthesized)
tgctccccatatccaaaatgcactcacctcccacaaggcccttccctgctcttggttggagcctctgagttcagacacatgcctgaagttagtttctctggactggggagctttcccatt

SEQ ID NO: 873332 - DNA, 120 bp, Artificial Sequence
  ENSG00000248727_13 (sequence is synthesized)
tttctagagattgagctgaaaactttttatttgggaaatatacaacgtagcagagagctgtgctatttaaaacgtaatgggaggtcgaggtaggcatatcacttgaagtcaagagttcga

SEQ ID NO: 873333 - DNA, 120 bp, Artificial Sequence
  ENSG00000248727_14 (sequence is synthesized)
gtaatgggcaggctatctgcctggagacaaagtacatgcccatttctgagaacattatttgtcctggaaaggtagtttcatagtgggattcttcttccctgcttcttcctgggtcccaca

SEQ ID NO: 873334 - DNA, 120 bp, Artificial Sequence
  ENSG00000248727_15 (sequence is synthesized)
aggttgatcttcctccatacctttcttttgttccctaacattttacagcattgattttctaacaaaaggaaggaaagttcctagggaggtatatcaacatttctaaaaggaaatgtatgt

SEQ ID NO: 873335 - DNA, 120 bp, Artificial Sequence
  ENSG00000248727_16 (sequence is synthesized)
atactttgaaaatacatatttcacattataatagaatttcataatttagaaatgaaaagtacatcactctaattatatttctcttgatgaaagtaaaatttgacaagttatctctgctga

SEQ ID NO: 873336 - DNA, 120 bp, Artificial Sequence
  ENSG00000248727_17 (sequence is synthesized)
caagaatctgcatcagtgaatctgcaaagagggcaccagttaggggtggggcctcatcttcctagatggctcaggtctagagcctgttggctggtcagacataacatttttatgtttatc

SEQ ID NO: 873337 - DNA, 120 bp, Artificial Sequence
  ENSG00000248727_18 (sequence is synthesized)
aaataggaaaatgattttttaaggaccatctgggcacaggtaacaggagatgcttgtatctctcctgtagggtcagtcttcaggagacggagctgagacaggagtcctactggcaaggta

SEQ ID NO: 873338 - DNA, 120 bp, Artificial Sequence
  ENSG00000248727_19 (sequence is synthesized)
ggagcagcacactagggctttatggtccaggatgcttaagagaaagagaaatgtacgtgaagacagcctggcatccactacacaggccctgccttcaccgtgtggatgtagttgccctga

SEQ ID NO: 873339 - DNA, 120 bp, Artificial Sequence
  ENSG00000248727_20 (sequence is synthesized)
gagtggacagagaaagaagaatgagagcagtgagtcagcgaagggcctcagaatggggatctcaggaccttcagagctggcagccatgtggctgcctcaggacacagtcatgcagcacgt

SEQ ID NO: 873340 - DNA, 120 bp, Artificial Sequence
  ENSG00000248727_21 (sequence is synthesized)
ggtgtctgaggggtagacagtgattacctcctaatctcccacagatggtgccctgggcaggggtggggatgaggacccacccaagcaggcacctagaagaatttgatcctggaactctta

SEQ ID NO: 873341 - DNA, 120 bp, Artificial Sequence
  ENSG00000248727_22 (sequence is synthesized)
gcagggaggcagttctgtgtaggcaacttcatggcatcacctctgcagggccttgtgaccctacccagggttattagtcccacattcttcaagagcaatggctggagaatggcaagagtt

SEQ ID NO: 873342 - DNA, 120 bp, Artificial Sequence
  ENSG00000248727_23 (sequence is synthesized)
gaatgggagtggggacacagagacattgttaggactatagcaagacagatctaatgcatgagtcttacagtgaaaagaaaagaaagcccagtgagcagtgccaaatgccacagaatcaag

SEQ ID NO: 873343 - DNA, 120 bp, Artificial Sequence
  ENSG00000248727_24 (sequence is synthesized)
tgcctccctgctgaagatgggacaagtgaggacaaccagggcactgttttggtggaggagctggaaggaccctgggttggtgaaagaacatgaccttagcagaggcccatcacgttagga

SEQ ID NO: 873344 - DNA, 120 bp, Artificial Sequence
  ENSG00000248727_25 (sequence is synthesized)
acaaacagctgaagatctgcctggaccccctacccctctcttttttccttgtggaaactgtgtataatttggaaagagcaaggacatcctggctcgcagctggccagctccacctgcgac

SEQ ID NO: 873345 - DNA, 120 bp, Artificial Sequence
  ENSG00000248727_26 (sequence is synthesized)
ctggacagcctcgcccctccctgcggagccaggcgagttcacagggctgcctccgcttcttgcagcatgtctgctctcctggcctggcctctccagacctttccctccacgggcagcgat

SEQ ID NO: 873346 - DNA, 120 bp, Artificial Sequence
  ENSG00000248727_27 (sequence is synthesized)
ttccaaggctctcaagactccaaaccacgtcgttttgggagtgaaaaagtgaaagcacacatcgtgtcattagagcagcagggaccagctgctgggtcaacacttccgaaaacagcgctt

SEQ ID NO: 873347 - DNA, 120 bp, Artificial Sequence
  ENSG00000248727_28 (sequence is synthesized)
cctggggagcgaccggagcatctcagaatctacggtttgacctcctgccaattctcatgaacgtgcttcagagttgcacttagcctagaacatggcctgacctctatggtatgaataaat

SEQ ID NO: 873348 - DNA, 120 bp, Artificial Sequence
  ENSG00000248727_29 (sequence is synthesized)
gagctccatgaagacaataagatctcctgaaattatacagacagcaaagtatgtcgctgtgcttccttgtcttcctgtgatgacccatgtgccatcttacacaaatggacaatcaatgga

SEQ ID NO: 873349 - DNA, 120 bp, Artificial Sequence
  ENSG00000248727_30 (sequence is synthesized)
ggagggacttggggcgttgcagtccagtgagttcccactagggaactcagcacttaagactcctagagtatggtctctcaggctgatggacaggaagcctggagatggggctaagtatgt

SEQ ID NO: 873350 - DNA, 120 bp, Artificial Sequence
  ENSG00000248727_31 (sequence is synthesized)
ggaacagggacagaaacctcaagggttcccgagaaactgggacaggccggacaaggcaagatgctccccacttgtaggtccaacaagaagcacgttcttccaaagatttagggtgttgtg

SEQ ID NO: 873351 - DNA, 120 bp, Artificial Sequence
  ENSG00000248727_32 (sequence is synthesized)
aaggtggcagagggcaagcagaatactccattttaaagaacactcagccatatattagcagaagtgcaaatcaatcttttggaaacagcatcccaccttcctcggacattgatatttaag

SEQ ID NO: 873352 - DNA, 120 bp, Artificial Sequence
  ENSG00000248727_33 (sequence is synthesized)
gcagggactgctatgacattagccagactatccacacaccaaaccaggctgtccccgaggctctgattcacagctatttaccaacaccctgaatgtgttatctgaaacagcaatcaggag

SEQ ID NO: 873353 - DNA, 120 bp, Artificial Sequence
  ENSG00000248727_34 (sequence is synthesized)
agaaggctacacgaaaatctagacaggtcgcaccttcttcaacgttttgaattgcaaagtaagaggtgacaccagcccagggaggtgttgtgaccgtggaaggagaaagaatgagcaata

SEQ ID NO: 873354 - DNA, 120 bp, Artificial Sequence
  ENSG00000248727_35 (sequence is synthesized)
atctctggcacacctctgggcaaaacgctaagcagcacaaaaagtgcgagagcataggacacatggagaagagaaggtatggagcagaaatggcatttcactgggaactgggataaatag

SEQ ID NO: 873355 - DNA, 120 bp, Artificial Sequence
  ENSG00000248727_36 (sequence is synthesized)
gatctttcttcactctaactagcttggtacatttgggaaagtgatttaatgtccctgagacctggcttcttcccttgtagaacatgagagttgatgcaggtgttccttgggatcctcctc

SEQ ID NO: 873356 - DNA, 120 bp, Artificial Sequence
  ENSG00000248727_37 (sequence is synthesized)
atcctagtattctgtgaacgtgggggtctgggtagttcacagactgggacaccctctcccagattttccagagtaaatattactcccctgatgcagcctcagccaatagcatgatccttc

SEQ ID NO: 873357 - DNA, 120 bp, Artificial Sequence
  ENSG00000248727_38 (sequence is synthesized)
ccatctcaggaaatgtgtccaatcagaaaacatagagggtggatccatcggtgagagatcttgccgagcggtgtcaagacttccccgtggccctatgtttaccatgcattcgattctcgg

SEQ ID NO: 873358 - DNA, 120 bp, Artificial Sequence
  ENSG00000248727_39 (sequence is synthesized)
tgtggtccgggcctttctcacctcatccatttcacctaccaagaaaggaaatgacattcatccgggctggggcactattgcgcaacaaaacaagccaacctgtaattaaggagaactgaa

SEQ ID NO: 873359 - DNA, 120 bp, Artificial Sequence
  ENSG00000248727_40 (sequence is synthesized)
cgctgatgctgagcccagcatcttggggaaagactgctgagagtttcgcttggctttggaattcatttatcagataacatgcgctggattgacctaaactgcaacatggcccttgtaatt

SEQ ID NO: 873360 - DNA, 120 bp, Artificial Sequence
  ENSG00000248727_41 (sequence is synthesized)
ataccgtgcttttgctttggagcctgagggaaatgtggaaggcgctggagtctgagctctgggtcacctgaacgtcctgtgattatgcccggtctcacattcaaaaggagagatgggagt

SEQ ID NO: 873361 - DNA, 120 bp, Artificial Sequence
  ENSG00000248727_42 (sequence is synthesized)
gtttgtattttacccacagcagcagactcagctctaggatatgtggggtgcatgtgtcttctgtctctcctggaactcagtatctgttcattcattcattgagtacctactgtgatcaag

SEQ ID NO: 873362 - DNA, 120 bp, Artificial Sequence
  ENSG00000248727_43 (sequence is synthesized)
gcactggatggggcactatgacaatttctcttttggtattttttcaagatttgtttacttgatcttctagcccaggggtcagcaaaccacaggccatgggctagatccaggcctttgcct

SEQ ID NO: 873363 - DNA, 120 bp, Artificial Sequence
  ENSG00000248727_44 (sequence is synthesized)
agaatttttacatttttaaatgattaagaaggaaatcaaaagaagaacactattctgttacacaagaacattgtattcaatttgaattttggtgtcaataaataaagctctattagaacc

SEQ ID NO: 873364 - DNA, 120 bp, Artificial Sequence
  ENSG00000248727_45 (sequence is synthesized)
cagctgtggtgggcagaattctaaaatgtcccccagggatgctcatccttgtttaatcgcctccctttgagtgtgagtgaaacctctgaatgtactgaagtatcactcctgtgatttatg

SEQ ID NO: 873365 - DNA, 120 bp, Artificial Sequence
  ENSG00000248727_46 (sequence is synthesized)
ttacattttattgcaaagggaattcttgcagatgtcattaagattactaatcagttgacttgggggctcttcaaaagggaaattacccaggcgcgcctaacctaatcatactagccattt

SEQ ID NO: 873366 - DNA, 120 bp, Artificial Sequence
  ENSG00000248727_47 (sequence is synthesized)
acaacagggttctctcttgctggtagcagaatagaagttaaagaaacatgctacagctgaccaggaagagagcaaacatctgtactatgaactgcccagaggagccctgagtgtggccct

SEQ ID NO: 873367 - DNA, 120 bp, Artificial Sequence
  ENSG00000248727_48 (sequence is synthesized)
gatgacaagcagcagggaaaccaggacttcagtcctacaaccccaaggagatggattcttccaacaacctgaatgagcttggaagcccccagataagagcccagccagccaatactttca

SEQ ID NO: 873368 - DNA, 120 bp, Artificial Sequence
  ENSG00000248727_49 (sequence is synthesized)
tgtcagcagcgtaaaacctaagtgaacagctcagctaagtccacccagacttctgacctacagaactagaaataataagtgggtgttgttttaattgactgagtgtggggtaatctgttc

SEQ ID NO: 873369 - DNA, 120 bp, Artificial Sequence
  ENSG00000248727_50 (sequence is synthesized)
tgcagcagtgtactgacaatacagcacaaatgcacatgcatgtgcacatgatctgtggctgctttcacgctacaccagagagttgggtcgttgcagtggagaccttatggcccatgagcc

SEQ ID NO: 873370 - DNA, 120 bp, Artificial Sequence
  ENSG00000248727_51 (sequence is synthesized)
taaaatatttattactgagtctttgagagaaaaggtttgacaaacttgttctctaaccatagaagtaatctcatatcagatgtattttgtgaaggttttgtgccttacccaaggcttgca

SEQ ID NO: 873371 - DNA, 120 bp, Artificial Sequence
  ENSG00000248727_52 (sequence is synthesized)
agaaacaggacttacacccaggcacactcagcaaacattgcttctgtcaagctgaattagctccaaaaaattagtaggcaccaggctgactgcagacctactctccattccaatttttaa

SEQ ID NO: 873372 - DNA, 120 bp, Artificial Sequence
  ENSG00000248727_53 (sequence is synthesized)
aatgttagggggagaaagagtgtgtgtgtgtatttatattgttgagcagggataaaaatatcagaggaatatgtaccatatgtattttagaggttgtcatttctatattatgaatttcaa

SEQ ID NO: 873373 - DNA, 120 bp, Artificial Sequence
  ENSG00000248727_54 (sequence is synthesized)
taatagttgaatttcgtgtcatgaatttgtgttagtaattattaccttattatttttaaaggctattctgtgctccatgtgtgctccttggtgcagtggcctagagaagagaaggtatga

SEQ ID NO: 873374 - DNA, 120 bp, Artificial Sequence
  ENSG00000248727_55 (sequence is synthesized)
aaattgttgctttgcaatcagaatttgaactcactccactgtcttcttgacttcttctgccttccagatgcccttctgctttcacagtgagatgtgtcaagataatccaattcttcattc

SEQ ID NO: 873375 - DNA, 120 bp, Artificial Sequence
  ENSG00000248727_56 (sequence is synthesized)
actaatgatggttatccaggagaataattttcaatcactttcgaattagaatgccctttctctttctgtcatacacacacacacacacacacaaattaaaagatttggagaggctgaggc

SEQ ID NO: 873376 - DNA, 120 bp, Artificial Sequence
  ENSG00000248727_57 (sequence is synthesized)
aggaggatcacttggacctggagttcaaggctgcagtgagctattatcacatcactgcactccggtctggacaacagagcaagaccccatttctacaaaaataaaacaattaaaatgaaa

SEQ ID NO: 873377 - DNA, 120 bp, Artificial Sequence
  ENSG00000248727_58 (sequence is synthesized)
tgtctggcatggcgtgtatacagctttaaattgggttaaagtccatatgactctaaagactggaagaaggagctgaagagggtttactggggctagtctaacaaatagccacaaactggg

SEQ ID NO: 873378 - DNA, 120 bp, Artificial Sequence
  ENSG00000248727_59 (sequence is synthesized)
tgacctaaaatacaacaaaaattaattctctcacagttttggaggccagaagcctgaaatcaaggtgctggcagaatcagttccttctggaggctcagagggaaaaccgattccacgccc

SEQ ID NO: 873379 - DNA, 120 bp, Artificial Sequence
  ENSG00000248727_60 (sequence is synthesized)
tcctggcttcaggtggctgctggcaacccgtggcgttcgttggcttacagctgaatcactccagtccctgcccgtgtcttcacctggtcttccccctccttatgtctgtgtctcagatct

SEQ ID NO: 873380 - DNA, 120 bp, Artificial Sequence
  ENSG00000248727_61 (sequence is synthesized)
cccactgccattctcttttaaggactgctgtcgttggatttaagcctatcctaaatccagatgatctcatcccaagatcattccttaattacatctgcaaaggcccatttgctacataag

SEQ ID NO: 873381 - DNA, 120 bp, Artificial Sequence
  ENSG00000248727_62 (sequence is synthesized)
gtcacagtcagaggtactggggttgacggcttggacatatctttttggaggccacaattcaactcactacagcaggtatttagtatgttcctggagctgatagggaaacctttctcaatc

SEQ ID NO: 873382 - DNA, 120 bp, Artificial Sequence
  ENSG00000240553_0 (sequence is synthesized)
aaatccctaggctaagctgggcctgacccagcatcctctgccttctaggaagtgcccagcaagagggaaagcagacccctttagtcactccacaagcaatagctccatgagaggcatgga

SEQ ID NO: 873383 - DNA, 120 bp, Artificial Sequence
  ENSG00000240553_1 (sequence is synthesized)
ctgtgagactactccctcctgttcctccttctccatcccccatggaggaggcatcgcactttaccaagctgatgcattcctacagaagtgggccccggatttctgcaagtcgactatcat

SEQ ID NO: 873384 - DNA, 120 bp, Artificial Sequence
  ENSG00000240553_2 (sequence is synthesized)
tttaaaaaagaaaaaaaaaaagactagaactcctaccacacagcagggttttgctcaaacaaaaacaaaagcaaaaacgaccctttcttttcatctccccggctaaggcgatttcttcag

SEQ ID NO: 873385 - DNA, 120 bp, Artificial Sequence
  ENSG00000240553_3 (sequence is synthesized)
catcaacctacagccccctcgtgcacccagctgaaacgccatcaatatcgcccaacagcttccagacctatctgtgaacaaacaagtgaggtctccaagaacgccaaccgtaaccccacg

SEQ ID NO: 873386 - DNA, 120 bp, Artificial Sequence
  ENSG00000240553_4 (sequence is synthesized)
tcagggagccattttccagtcaagaaaatgaaaaggtgtgcaagaaagacctaaggaataaaatacccctcccagcaatcatcgatgccccttcccacgtcgctcgggacccagcacaaa

SEQ ID NO: 873387 - DNA, 120 bp, Artificial Sequence
  ENSG00000237581_0 (sequence is synthesized)
ctaagtcaatgttatgattccatgctgcaaacaaggaaattaagcctcagcaatcctgatattctggaacagaacaatcctttaagagatttggtattgaagaccttgttggaaatggat

SEQ ID NO: 873388 - DNA, 120 bp, Artificial Sequence
  ENSG00000237581_1 (sequence is synthesized)
cagacattgcccagaccactgtccagacccaacactggaataacccaggagagcttcgtgcttacctcccatcggcggtcattggtgaaaatctcatcattggctaagtccagctggttc

SEQ ID NO: 873389 - DNA, 120 bp, Artificial Sequence
  ENSG00000237581_2 (sequence is synthesized)
gtgagaaccattcagtgtggccaattatcagagctgtttatcacagatcgtatttgttcttaaatggtatctaccagaagaagacagccagcttttgatactaacaaaccacaatggaag

SEQ ID NO: 873390 - DNA, 120 bp, Artificial Sequence
  ENSG00000237581_3 (sequence is synthesized)
atggccgtatttatcattgcctttagcatgttaaagggtacataccacattgaccctggcagaagcattcctgatgtgttggaaaaattaagagaaataacagttctttggcaataaaaa

SEQ ID NO: 873391 - DNA, 120 bp, Artificial Sequence
  ENSG00000272338_0 (sequence is synthesized)
atattattaatgagatgtgttaaaagtactaaaagttcacatttgaagtgagctggcaagtccagaataagtccttttaatttttataccagtgtttattcctgttccccgggagaggag

SEQ ID NO: 873392 - DNA, 120 bp, Artificial Sequence
  ENSG00000272338_1 (sequence is synthesized)
gcatttttttctgtcaacactgggcgatttaagaactgacttgggggatgaaaataactatggtgagtccacaggggcaaacagttctgctccagccaatccacatctgttcaccttaag

SEQ ID NO: 873393 - DNA, 120 bp, Artificial Sequence
  ENSG00000272338_2 (sequence is synthesized)
agttcacacaccattaataagaagactcattcaccatggaaataatctgctagtctgagagaatgttggtccctaagacaagcatcttgaagtatcaaagtttcatcacagatgtttact

SEQ ID NO: 873394 - DNA, 120 bp, Artificial Sequence
  ENSG00000272338_3 (sequence is synthesized)
acttcctgtttctgtggtctaaaattcacctcaaatgtgtagttaacctgtaagtgatgaaccacttccatcacttccgcaataaaattaaaacgtgtctgctggggcaccccctcccca

SEQ ID NO: 873395 - DNA, 120 bp, Artificial Sequence
  ENSG00000237585_0 (sequence is synthesized)
cctgggatgagaactttcacatagctgctgtgttcatgtccatcaccaccctgtgaggtggatcccagcaagatgacttctaccctacaaagaggttgagaatcctgtttcaaatgctgg

SEQ ID NO: 873396 - DNA, 120 bp, Artificial Sequence
  ENSG00000237585_1 (sequence is synthesized)
ggaaagaaaaagagcgttaaaagatgaggacactgaagcaccgagaaggaaacagaagattcaggacaaagccagctctgtctcctgtaccaaccttgcatgaaaaacaaccaaggaaat

SEQ ID NO: 873397 - DNA, 120 bp, Artificial Sequence
  ENSG00000272330_0 (sequence is synthesized)
atgtttaaactttattaactaatgttcaaaactgcgatgtgtgcatagaatattacgtatgcatgttcatgtctaaagaatggctgttgatgataaaataaaaatcagctttcatttttc

SEQ ID NO: 873398 - DNA, 120 bp, Artificial Sequence
  ENSG00000272335_0 (sequence is synthesized)
ggacaatttgatttccttttatcctaattgaataccctaagtatttaggaatcttctccatttctttttatcaggtcaaagtacataagtacatattttagggtcttctgttcttgaggg

SEQ ID NO: 873399 - DNA, 120 bp, Artificial Sequence
  ENSG00000272335_1 (sequence is synthesized)
ttttttgtgttttttgttttttcttttcctattggaggtttgacacctatatttttctctgacattttggaaatttgcttcccaaagtcaaaaacataatgcctaacttttcccgatttg

SEQ ID NO: 873400 - DNA, 120 bp, Artificial Sequence
  ENSG00000272335_2 (sequence is synthesized)
tttggccaacatcaactttaagattctgtggttatctttttaccaagagatttgtcagttttactgccccagtcatttcctttttactgattagaattaggcctttgtgtagctgttcac

SEQ ID NO: 873401 - DNA, 120 bp, Artificial Sequence
  ENSG00000272335_3 (sequence is synthesized)
ctaattacttcctctaccttgtgaaaaagagcagggacgctaacatttgctgggtacctactacatgccaaaagtacttaatcgtatgcagtaatgtcatttaattttcaaaacaactct

SEQ ID NO: 873402 - DNA, 120 bp, Artificial Sequence
  ENSG00000272335_4 (sequence is synthesized)
ccaaaggaagtgtcactctccttgtttgatttcttgcttcccaaatggaaggtcctttgtattaatagtatctgtcaaatttcatacaatacttaaatatgttcttgatacgtacttcaa

SEQ ID NO: 873403 - DNA, 120 bp, Artificial Sequence
  ENSG00000272335_5 (sequence is synthesized)
tataaccaacagaatgaggcagtattcgataaagtaaaaaataagatgaatatttctagtgatttataagttacttgaggaaatcatgctgtttattcttttcctttttaggtattcttt

SEQ ID NO: 873404 - DNA, 120 bp, Artificial Sequence
  ENSG00000272335_6 (sequence is synthesized)
gtgaatttgctatttgtgtgtgaatatatctgttgcgataatgaataaccatatgaaatggataattgtatgaaaattcatttgtaattcaatagattgccagggattttaggttggtta

SEQ ID NO: 873405 - DNA, 120 bp, Artificial Sequence
  ENSG00000272335_7 (sequence is synthesized)
caaagaaagggaggaggtacccctaagtgggaacctaccaggacattcaaagcaagagcagtaagttctgaatgttctgggacaacctgggtgatatgcatggatatgggctgtggaggc

SEQ ID NO: 873406 - DNA, 120 bp, Artificial Sequence
  ENSG00000272335_8 (sequence is synthesized)
tgagcattttaatgataacttagggaaacgaggcatggccatggtgtaaaactctcaaatcccaagccctaatccaaccttaaaatccgagtcttctaaagggctgttttaaccatgaaa

SEQ ID NO: 873407 - DNA, 120 bp, Artificial Sequence
  ENSG00000272335_9 (sequence is synthesized)
ggaccataagaaaggcaattcacagaaaatgaagccatgtggccaagaaatataagaaaaacagtaaaagcccttaatctcaatagcaatagagtggatgcaaatgaatataatgagttg

SEQ ID NO: 873408 - DNA, 120 bp, Artificial Sequence
  ENSG00000272335_10 (sequence is synthesized)
ccatgtcgttcttactggattggaaaagaaattagaatgtctaaataacatgtatcatccaggatgtggggaaatgggagctcttgtaccctgcaggcaggcatttaaattggtgcaacc

SEQ ID NO: 873409 - DNA, 120 bp, Artificial Sequence
  ENSG00000272335_11 (sequence is synthesized)
gctttggattgctgctttgtagtatctggtgcaactgaagatgaacatgccctgtgacacagcaaccgcacttctaggtcaataccctaattatattcttactgtggttcacaagaaggt

SEQ ID NO: 873410 - DNA, 120 bp, Artificial Sequence
  ENSG00000272335_12 (sequence is synthesized)
atgtaagaggtcattgcctgagcactgtttagaataggggcaaactggaaatcctctaaatgtctgtcaatgaaggaatagataaattgtaatatgttcatataaaatgctgcataaata

SEQ ID NO: 873411 - DNA, 120 bp, Artificial Sequence
  ENSG00000272335_13 (sequence is synthesized)
agtgaaatttataaatatactaacgaatgaatcttgaaaacagagttgggagataaaagcaagctgttgaagaacatggtcagtatcctctcacttatgtaagttaaaaactccaaagaa

SEQ ID NO: 873412 - DNA, 120 bp, Artificial Sequence
  ENSG00000272335_14 (sequence is synthesized)
cattatctatattggtaatggcatagacatgtgtggtaaaatataaaaatattaactaaaagttctatacgcttcaggatattgttagtataataaggcaggaagtggatagcattgggg

SEQ ID NO: 873413 - DNA, 120 bp, Artificial Sequence
  ENSG00000272335_15 (sequence is synthesized)
tgagacagtggtttggtggttatgtttggttactttagttatgttagtaacattttttttttaaagaaggatctggaataattatggtaaaataatagtatttgctaagactagatgatt

SEQ ID NO: 873414 - DNA, 120 bp, Artificial Sequence
  ENSG00000272335_16 (sequence is synthesized)
ggtgtactggatttcatccgctattttctaagtttgttatgaacgcttaaaatatatatgtatgtagtaaaattaatgtaaatttgtacaaataaaaataaatggcatgtgatatatggc

SEQ ID NO: 873415 - DNA, 120 bp, Artificial Sequence
  ENSG00000272334_0 (sequence is synthesized)
tttttaagcatgagcatgtcaaggctaccaggtgacttactggagaattcagtcttggcttttgtgcttggcttgggtttctagggttcccatgtaaccaggaaagcccaccagcccact

SEQ ID NO: 873416 - DNA, 120 bp, Artificial Sequence
  ENSG00000272334_1 (sequence is synthesized)
aatactgtcggattaagtactactcacacatagcacctggttgagtcccctctcatggatcacatgcaccacaaacacaaataaaagcttcagcttccttttatgaaaggaaaataactt

SEQ ID NO: 873417 - DNA, 120 bp, Artificial Sequence
  ENSG00000272334_2 (sequence is synthesized)
atctgctgctccttcaccaactatgctttattgttatcctatcccttgagcacaggctgaaagactggccattagttatctaaccttattcatcaggcagcctacaaaacaccattctta

SEQ ID NO: 873418 - DNA, 120 bp, Artificial Sequence
  ENSG00000272334_3 (sequence is synthesized)
gttggagttccaaatagatctttgtttgtccctgatcttatagctgctatagagaaggtatatctttgtccacctgctaccaaatgttaatcattattaaagcttgtggtgggtacctgg

SEQ ID NO: 873419 - DNA, 120 bp, Artificial Sequence
  ENSG00000234186_0 (sequence is synthesized)
gccacagactcctcagaaaggctcccgagagggtgacacccaccccctctggccatgagcccctttctgccccactcctaccctccaggccaggccactgatgtcactggtgccaggaca

SEQ ID NO: 873420 - DNA, 120 bp, Artificial Sequence
  ENSG00000234186_1 (sequence is synthesized)
gcattgttctccctcccacacccgccttcacctcacaagccccatcaccatgggaactgagccagccactcagaacacagagttttcaaagggcagccttatatacggagtcacctctcc

SEQ ID NO: 873421 - DNA, 120 bp, Artificial Sequence
  ENSG00000234186_2 (sequence is synthesized)
ccagagaggtcacagccaacattcagaggcctcccagggccccctctccctggataaaccacttcagctgccccccatttttctcgagggagaaaaaggggaatcctctgtccagaatga

SEQ ID NO: 873422 - DNA, 120 bp, Artificial Sequence
  ENSG00000234186_3 (sequence is synthesized)
gcaggaaggagagccaagcctacagtcacccagcttagagctccagtcccctgcgtggccacgccatgcaggagtggctcaggagcccctgaaagtgtccagcagctacctcagtgacac

SEQ ID NO: 873423 - DNA, 120 bp, Artificial Sequence
  ENSG00000234186_4 (sequence is synthesized)
ccagagcagcgagagtcatgtttccagcgtgcagcacccgaggccagaggagggcagccatgccagcctgagcagcgggtacgcaggggacaaggagggcagcgacatcagcttggtggg

SEQ ID NO: 873424 - DNA, 120 bp, Artificial Sequence
  ENSG00000234186_5 (sequence is synthesized)
cagccaccggagagtgcggctgaacagaaggctcaacacccaggcggccagtaaccaaaccagccagctgggctccatagaccctcccagctctctaaagagccggctgactggccccgc

SEQ ID NO: 873425 - DNA, 120 bp, Artificial Sequence
  ENSG00000234186_6 (sequence is synthesized)
ccacagcaccaagcagactggagggaaagagtgaggccagcctgcccggcagcggcagcggcagcagcatcctgtccagcgccagcttcatcagcttgggcagcagtgccctcacctaca

SEQ ID NO: 873426 - DNA, 120 bp, Artificial Sequence
  ENSG00000234186_7 (sequence is synthesized)
aggtgagcagcgggctgctgacttccacagccagccttccctccacccaggccagcagccgtcagagcgtccggctggatggcagtgcccaaaacaggcagagcagccacaccagcgtgc

SEQ ID NO: 873427 - DNA, 120 bp, Artificial Sequence
  ENSG00000234186_8 (sequence is synthesized)
aggaggacaagacgggcggcaacgtgaaaaccagtgagcaggtcaccacgggggagcagcctgcccaggtgtgcatgcctttgtgagaatcctctccagcagccagagtctcccagaaaa

SEQ ID NO: 873428 - DNA, 120 bp, Artificial Sequence
  ENSG00000234186_9 (sequence is synthesized)
caacacacaggcccagcaaacacaggctgcacccagagtggatattcccaaaacaagtaggaaaggtgttttcaaaagcacacactgactgtgtcaaccatcagtgggtaatcccatttg

SEQ ID NO: 873429 - DNA, 120 bp, Artificial Sequence
  ENSG00000234186_10 (sequence is synthesized)
cctatcctgagaacacagtcagtgaggagactgtctatactgagaaccactgttgctaggaagagctgtagtatcaagattcaccaatgctgagtccacctgtgtcaaaacagcgaagag

SEQ ID NO: 873430 - DNA, 120 bp, Artificial Sequence
  ENSG00000234186_11 (sequence is synthesized)
taatgacatcgactgtgaacttcagtgacaagccatctataacaagatccatcaatggcaaaaccatctgtagtcagcagcatcctggtgggaccccctgtaccaaaactcatcagtggc

SEQ ID NO: 873431 - DNA, 120 bp, Artificial Sequence
  ENSG00000234186_12 (sequence is synthesized)
gacagatgttctcgatggcaaacgctgacgatattaagaactgtcacgagttagaaccttccatgatgaaaccatcctaaatgatgaatgccatctgcaaccaacaccagccacgatgag

SEQ ID NO: 873432 - DNA, 120 bp, Artificial Sequence
  ENSG00000234186_13 (sequence is synthesized)
ctcagaagaaacaagctgcaaccatggttgggactgtccatatcaagaaccatctgcagtgagcgccatgcgtggagagccacatccacatgaaacttcatcctggccaagcagcaccac

SEQ ID NO: 873433 - DNA, 120 bp, Artificial Sequence
  ENSG00000234186_14 (sequence is synthesized)
actctgtccatcattgtcactgcccgcagaagcactagcaagacagccacggtgcacacggagcaccttcacgactctcagctcccccaaggagtccagactaagtgactgtcaccagag

SEQ ID NO: 873434 - DNA, 120 bp, Artificial Sequence
  ENSG00000234186_15 (sequence is synthesized)
aaggatcatcaggagcagccagggatgcccccggcacacagggactaggtctagtgagaacattagagggcggtgtaaatggatccccatgcctgggcacctgtaatcccaactacttgg

SEQ ID NO: 873435 - DNA, 120 bp, Artificial Sequence
  ENSG00000234186_16 (sequence is synthesized)
gaggcaccatcccagagagctccaagcgtccttttttttttttttttcctttgagtgctgtctctggacatcttcagcccagaatcttctcaggagcaaaggcttcctgatgcctcattc

SEQ ID NO: 873436 - DNA, 120 bp, Artificial Sequence
  ENSG00000234186_17 (sequence is synthesized)
atgtcaagaaaggaggccaggagccatcctgtgttcagatggttgagacagtgactacgatggcaggacaatgccgtgagaagcacttcatggtgacagagcccaacccagccgggaaca

SEQ ID NO: 873437 - DNA, 120 bp, Artificial Sequence
  ENSG00000234186_18 (sequence is synthesized)
gctgcgatggggaagctctggagcattttgtgagcaccgtctcggtggatgggaaagccgaagtctctgcccgtctcttactggaggcactaaaccccctccctgggttgacctcacaga

SEQ ID NO: 873438 - DNA, 120 bp, Artificial Sequence
  ENSG00000234186_19 (sequence is synthesized)
cattgaagtgagtctgcccacaaaggaaaagaggccagagactgtcgtgaagacatccactaggtaccagaaggaaagctgagggggcagcaaagacaataaaaggtgtctagagaggtc

SEQ ID NO: 873439 - DNA, 120 bp, Artificial Sequence
  ENSG00000237058_0 (sequence is synthesized)
tacccggggcaggtgtggagtgtctgctgaggcgaaggcactgcggctccctggggacactcgtggcctctccaggttactacagatgggggacagcgggtcctttggattgatcgcaga

SEQ ID NO: 873440 - DNA, 120 bp, Artificial Sequence
  ENSG00000237058_1 (sequence is synthesized)
gaatgtgtgcacagtgccaggcacaggtgtggtcaagattcacctgggagaggaagtgggcaggggcagaggagtgtgcccacctgagctgaaaggctgcatggcaggtgaccattatca

SEQ ID NO: 873441 - DNA, 120 bp, Artificial Sequence
  ENSG00000237058_2 (sequence is synthesized)
ccagtgtcgccagccaggtcacctctctgaattttgtggttgcaacctccatgattccctagagctgtttttacccagaactaatgaaaaattctgcacattaaattcatgctattagaa

SEQ ID NO: 873442 - DNA, 120 bp, Artificial Sequence
  ENSG00000237054_0 (sequence is synthesized)
aacgtcacgcattggtgacgtctggtggggaccgggttttggggtttctcaccagttccgggtccccgcaggggggtcccggttctctccgttcctttgagtatgttgtggggagtggag

SEQ ID NO: 873443 - DNA, 120 bp, Artificial Sequence
  ENSG00000237054_1 (sequence is synthesized)
ctcggatagttcctagagtctaggcaagaaaagcagcactgcaggtacagagcctcctcttcccgcaaaatggcggcagctctgccgtcttccagaaccttccccaatctgcgcatgcgc

SEQ ID NO: 873444 - DNA, 120 bp, Artificial Sequence
  ENSG00000237054_2 (sequence is synthesized)
caagactccccggctttggaaataacctcactggtttcgcggcaaccgtccaaagtacaggttctcattggctaaagtcctaagtatgggtggagcaaactcaaatgcgtcttagcaacc

SEQ ID NO: 873445 - DNA, 120 bp, Artificial Sequence
  ENSG00000237054_3 (sequence is synthesized)
accgagttcccattgattggctaacctcagagactccagaaaatggaagcgtcctttggtagccgcccatcactctctcattggttaaatgacttgcggagggcggggaaaacgggactg

SEQ ID NO: 873446 - DNA, 120 bp, Artificial Sequence
  ENSG00000237054_4 (sequence is synthesized)
aaaacgggagtgaagaagccaccaaccccactcctggtgctcgcgtagactagaccagtgcgatgggcggagccaacgaggaggcacaatttacatccttggccgtccctactcggattt

SEQ ID NO: 873447 - DNA, 120 bp, Artificial Sequence
  ENSG00000237054_5 (sequence is synthesized)
gctgaaggagtcacgtcggtcgttaaggttaagctttgtagagaacagcggcgtttgtttaacgtccggggatgctgaactcgaaatccccgttctgagccggctacctaaacaaccttc

SEQ ID NO: 873448 - DNA, 120 bp, Artificial Sequence
  ENSG00000237054_6 (sequence is synthesized)
ccgaccacctctcctgacctcggtgcttgggaccagggaaaagcagatcttgccacagacttgtcttggcccacactctgccctatcgtcatggcctgctcccacaggtcataacttccg

SEQ ID NO: 873449 - DNA, 120 bp, Artificial Sequence
  ENSG00000237054_7 (sequence is synthesized)
ttcaaatcagtacccccacatttcccactgcaagggtaaatttgaaagtttctcaggtgactccttggatgtagcagtactgagtcctctaaccggaaagaaggaactgatgtccaccct

SEQ ID NO: 873450 - DNA, 120 bp, Artificial Sequence
  ENSG00000237054_8 (sequence is synthesized)
cactttccaggggcctccaggagcccctagacacttctgtggtctactgtagctaccaaaaatgtagctggttataacatggggagagccagagtcggaggacctgacttccaattctga

SEQ ID NO: 873451 - DNA, 120 bp, Artificial Sequence
  ENSG00000237054_9 (sequence is synthesized)
cttggatactaatatcacatcattgtacccatttcaaactccccctctgtaaaatggaaaattggactagatgatctcttaggacttcaaactgtaaccctgtggttttattcaaaaaaa

SEQ ID NO: 873452 - DNA, 120 bp, Artificial Sequence
  ENSG00000237054_10 (sequence is synthesized)
agaatacagaagagaaactggcttcactcactattccatctttttccaaggtggcaaactctatgcctcctccccagagaaaagcctaactgtaggttctaatggacaagagctcactgt

SEQ ID NO: 873453 - DNA, 120 bp, Artificial Sequence
  ENSG00000237054_11 (sequence is synthesized)
agctggtcagaaaggcctatatccaggactacaatagtcattgctcagcttcctaagtagggaatacaactaggcccctttgggtcttggataggctaagaggacagatctgaacatgcc

SEQ ID NO: 873454 - DNA, 120 bp, Artificial Sequence
  ENSG00000237054_12 (sequence is synthesized)
tgggtctaagtgaggtgtgggaaaatagtggcagggggcagcatggtcgtgcagtaaagggctataactttatttgtatttcctcttacacaaaaccatcaaaacaagaacagaaaaagg

SEQ ID NO: 873455 - DNA, 120 bp, Artificial Sequence
  ENSG00000237054_13 (sequence is synthesized)
ctgaaaatccgttcaaaccccatgttctcagggatattccagggagttcttgaggctgagtgcgtagcttcaaatccagcactaattcctcaccccctggcctgaggtcttcatagattg

SEQ ID NO: 873456 - DNA, 120 bp, Artificial Sequence
  ENSG00000237054_14 (sequence is synthesized)
gtggcttgagccctgcaattaattataatcccttgcccaccttgatgtaaggcaggaaagcagattgaaatgctcctctctgatgggcaaggggaatcacagcccatagatgtactgcac

SEQ ID NO: 873457 - DNA, 120 bp, Artificial Sequence
  ENSG00000237054_15 (sequence is synthesized)
cttctgtactacaggagcagaacctgaagctgcttccaaggctctggacacttggcacgcagggctagaggccaatggtatatgagcggcctgtggggttatgaatagcagaacagactg

SEQ ID NO: 873458 - DNA, 120 bp, Artificial Sequence
  ENSG00000237054_16 (sequence is synthesized)
gtgctgtcacagcccactcataccacaccttcttggaattgctgcatcgccagaaacgcacacagatggtttggccttcacgtaccgttatgggctgctgtaagaagaaagacaggaagg

SEQ ID NO: 873459 - DNA, 120 bp, Artificial Sequence
  ENSG00000237054_17 (sequence is synthesized)
ttcagggtgaagctatgaattatacatggcaatgtattaagcagaagaaaatagctgatgcaaatacagaaaaagaagaggactaaagagtaccacttctttccagagagagtggttctt

SEQ ID NO: 873460 - DNA, 120 bp, Artificial Sequence
  ENSG00000237054_18 (sequence is synthesized)
tacctcagggtcacggtccttctccctacaggctcggacctcattgtacagcttggaggaagagatgggagccagaaaggaagtgtactccccggggatgctcacaccatcatctgcaca

SEQ ID NO: 873461 - DNA, 120 bp, Artificial Sequence
  ENSG00000237054_19 (sequence is synthesized)
gcaggagagtcaaattagttccagagggagggaaatggtatgtctgtactaactgaaggatcagaaggatcaaacctcccatgtcaaaaccaaccaacgttggcatgggcatggaagaaa

SEQ ID NO: 873462 - DNA, 120 bp, Artificial Sequence
  ENSG00000237054_20 (sequence is synthesized)
gagacaaatgcatgttgtcacattactaagccagcctgcttccaactactgtcatggaggattccactactaggttaatttacagagtcacacagattaaaactgaaagaacccaagata

SEQ ID NO: 873463 - DNA, 120 bp, Artificial Sequence
  ENSG00000237054_21 (sequence is synthesized)
cacgtaccgttatgggctgctgtaagaagaaagacaggaaggttcagggtgaagctatgaattatacatggcaatgtattaagaagaaaatagctgatgcaaatacagaaaaagaagagg

SEQ ID NO: 873464 - DNA, 120 bp, Artificial Sequence
  ENSG00000237054_22 (sequence is synthesized)
aagagaagccacacccatcccaggattctcatggactcacccactgcaatcctcttactatagtcacacaaagtccggaagttgtgccacctgttcagtcaaatacagaaaagtacagta

SEQ ID NO: 873465 - DNA, 120 bp, Artificial Sequence
  ENSG00000237054_23 (sequence is synthesized)
aactagatatggccgaccaatcaccacagctcaaggagacctccctacaggttgcaccctgtacttcccctcaccctatcccttgcaccctggtacagcagcaaagggagacataccaca

SEQ ID NO: 873466 - DNA, 120 bp, Artificial Sequence
  ENSG00000237054_24 (sequence is synthesized)
tccacgttttctcctccccactgtactcctctgtgtgtgtagttggtgcattctcaattatatcatctctcaggtcctctggtgccaccaagggtacccgcatccagaactgcacatgaa

SEQ ID NO: 873467 - DNA, 120 bp, Artificial Sequence
  ENSG00000237054_25 (sequence is synthesized)
gtaccgttatgggctgctgtaagaagaaagacaggaaggttcagggtgaagctatgaattatacatggcaatgtattaagcatacagctttatccgccggtcggcctgcttggctgcccg

SEQ ID NO: 873468 - DNA, 120 bp, Artificial Sequence
  ENSG00000237057_0 (sequence is synthesized)
aatcctctcatgtatggctcccttatctaggggactttggcatgtcatgtgatctccctgtgaatgagccaagacaaggactcccagccttctgactgctaaatcattgctctcttcatt

SEQ ID NO: 873469 - DNA, 120 bp, Artificial Sequence
  ENSG00000237057_1 (sequence is synthesized)
acatcatattgtcacagctgttttgcaagatgactaatttatgagaatagttcaaacaacgtatctggaagtagatttttaaaaagagaacagagtcttcaattgccagtgattgtctat

SEQ ID NO: 873470 - DNA, 120 bp, Artificial Sequence
  ENSG00000237057_2 (sequence is synthesized)
agcttttacttcctcaagacaccactttacgttgtttattctgatccaggcacagtacaacttcattttattctccaaataaaagactgctgaagcttctgagaaaaagaaaaaagcgaa

SEQ ID NO: 873471 - DNA, 120 bp, Artificial Sequence
  ENSG00000237057_3 (sequence is synthesized)
ggatcatctttgatcatgcagtgagctgattccaaaatgtggacaaaaagcagactcaaaggcaatgattccgagaaacagtgaatgtcacaaggagacacctgggctctttataaagag

SEQ ID NO: 873472 - DNA, 120 bp, Artificial Sequence
  ENSG00000237057_4 (sequence is synthesized)
gtctctctcagcctccctgcgcttagggacagtggacagcactgcagcactgcagcactgcacttggggccattttaaacagcgaagtcaccaaaaccacgcaaaaaaatgctaaaagca

SEQ ID NO: 873473 - DNA, 120 bp, Artificial Sequence
  ENSG00000237057_5 (sequence is synthesized)
acagtatgagaagtgcaccagccttcctgtgcccgttgatggactgagaggaagatgagcccttaggatgcctgccatgctcagtgttaagggttttcaaaagaaatgcaggcagcatgg

SEQ ID NO: 873474 - DNA, 120 bp, Artificial Sequence
  ENSG00000237057_6 (sequence is synthesized)
tgcactacagactccagcctccctttgaagccaggttccagagcttcctccctttggcctggaacctcaacagcaggattgggatgaggatggaagtgtacagatatgcatatagtattg

SEQ ID NO: 873475 - DNA, 120 bp, Artificial Sequence
  ENSG00000237057_7 (sequence is synthesized)
cttatccccagctgaaatcaatgttggcatgacatgttgcaaaaccaaactgacattgaacatgacttttttcagccctttaaatagctgttcatgtagaacttagttttttatggaaga

SEQ ID NO: 873476 - DNA, 120 bp, Artificial Sequence
  ENSG00000237057_8 (sequence is synthesized)
ccttgataatcctgtctttagttactttagaagttaacttcctgggtggacttgaattgagtcttattcatctttaaatttccagggtttagcaaagtacctgcttcagagtaggtgtta

SEQ ID NO: 873477 - DNA, 120 bp, Artificial Sequence
  ENSG00000237057_9 (sequence is synthesized)
ataaagctaatgcccttcaaatcaacaagaggatttcctgtgaggggtggtcctgttttctgacactcagatggctctgagtgtggcatctcagaaaaaagaaagaaagaaaaaaaaaaa

SEQ ID NO: 873478 - DNA, 120 bp, Artificial Sequence
  ENSG00000237057_10 (sequence is synthesized)
gtgctcctctgcattggagttagccaaggagcgtgtgcagaacacttgcctcgtaggccagccgtaaggaaggatgtcccaggtgcaggcgaggttttgttcatgtgttcctggaggatt

SEQ ID NO: 873479 - DNA, 120 bp, Artificial Sequence
  ENSG00000237057_11 (sequence is synthesized)
aagaagatcaggtgcagttcaccttcagatttgaaggctgacagtacaccgttaggaggcatctgatggactacctcaacaatcctctgctggctcaaggttgcattgactagatctagc

SEQ ID NO: 873480 - DNA, 120 bp, Artificial Sequence
  ENSG00000237057_12 (sequence is synthesized)
taccctctgactgccacctgatgtccacttgtggcactatgtggataatgtccttctgcctgataacaaagagggagaggttcaatgggccctcatattgacaactaaccacacaactca

SEQ ID NO: 873481 - DNA, 120 bp, Artificial Sequence
  ENSG00000237057_13 (sequence is synthesized)
atgggaatgagccattgtcccacatgatacaacagcctgccatttccatcaaattgtggggctatatttacttatttttttggatgtaaaatgttagttttacaggaagaatggaattta

SEQ ID NO: 873482 - DNA, 120 bp, Artificial Sequence
  ENSG00000237057_14 (sequence is synthesized)
cagaaaaatttaaggggcaggcctgaacaagtcactaattacttaaagctatatggtttgcaaatgttttgctcttatttcagtacagtttcatataatgagatgggatttttccaaaac

SEQ ID NO: 873483 - DNA, 120 bp, Artificial Sequence
  ENSG00000237057_15 (sequence is synthesized)
tgatacactataaatctcagtggacatgctagtatcctttcaataaatttgcatttcaataatatggacaatatccatgtattatatacagaaggctaagaaacagaagaaattgccaga

SEQ ID NO: 873484 - DNA, 120 bp, Artificial Sequence
  ENSG00000237057_16 (sequence is synthesized)
ctatattattcaaaacatcaagaaactgatgtctgactaatgtattcaatccttgttctggagatcaacattgtgaatgcatgaatttctaagggaaaattttaaaattataatttactc

SEQ ID NO: 873485 - DNA, 120 bp, Artificial Sequence
  ENSG00000237057_17 (sequence is synthesized)
ataaattttgatgttgagaaaattagtttttggaatacatctttgatttttgtcacataatagaagaaaaatttccagtgtactaaacagcatatgacattatttatggcaaaacaaaat

SEQ ID NO: 873486 - DNA, 120 bp, Artificial Sequence
  ENSG00000237057_18 (sequence is synthesized)
gattctaattgatgtttcctttaaaaaatctaaagagtactcatcccttgacctttctgaattcccaaatatactcccttaaattaataaaattgaaaatgtaattgtatcaggaaagaa

SEQ ID NO: 873487 - DNA, 120 bp, Artificial Sequence
  ENSG00000237057_19 (sequence is synthesized)
tggcctcaaggcaggcgcgccgcacacgcttccggtccatgacgaccacagcgcagagaagcacgcgagcccaacctccacgaaaagaaaatggcagaatgggccttcgcctccctttta

SEQ ID NO: 873488 - DNA, 120 bp, Artificial Sequence
  ENSG00000237057_20 (sequence is synthesized)
cagtggctgtacgcaactgctgtacttgtaagcttggttctgattgggtgagaaggaactttttttgacaactcttattggataatagtctccatctctgactggataatcttcactaat

SEQ ID NO: 873489 - DNA, 120 bp, Artificial Sequence
  ENSG00000237057_21 (sequence is synthesized)
cggagttggagacttatccaatctgtgttgtagtacagagtctgctctcatcctatcagaaagaggcttccaggatatgtcatttgaatacagtcattgtgaaagggaggcaaagatctg

SEQ ID NO: 873490 - DNA, 120 bp, Artificial Sequence
  ENSG00000272485_0 (sequence is synthesized)
aaacttcatatgtgtggaatgacacatgtggcctctgcatctggcttctttcacatagcctaatgttttcaaggctggcgcatgttgtagcatctatcagaacttcattcctccttacag

SEQ ID NO: 873491 - DNA, 120 bp, Artificial Sequence
  ENSG00000272485_1 (sequence is synthesized)
ctgataacactccattatgtggatatggatatgccacactttatcttttcatcagttcgtggacatctggattgtctccactttttgactactacacgttctgaattaccagcgatttca

SEQ ID NO: 873492 - DNA, 120 bp, Artificial Sequence
  ENSG00000272485_2 (sequence is synthesized)
ctcactcagaatacatagagacgaggctcctcattcagaatctccctgcacctcatgatggacttggctgcacatgggacaactcagtcatttcctggaacttgcatttcactgggagag

SEQ ID NO: 873493 - DNA, 120 bp, Artificial Sequence
  ENSG00000272485_3 (sequence is synthesized)
gcctgctctcagggagggtgctttttgtggtcttccatgtacagctaattaagattctgactgggtttaggatcaaagaaagctgtcccattgcattcccacattcttccttcttctttc

SEQ ID NO: 873494 - DNA, 120 bp, Artificial Sequence
  ENSG00000272485_4 (sequence is synthesized)
aatgtcttccaagatctattttaaacgggaagtgttgtgtacttttcaggggccctttgacctgttcccagtaaatcaaaacaggaaggtaggtctcagcccttcgcctaacagccaatc

SEQ ID NO: 873495 - DNA, 120 bp, Artificial Sequence
  ENSG00000272485_5 (sequence is synthesized)
agtgtgagaccaaggtctgcacagctgtgtctatgtccagtgcccaaccagggaagtggtatttccaaaggcttccctgaggtcggtctatggtagctgtttgctaatctgaatccatgt

SEQ ID NO: 873496 - DNA, 120 bp, Artificial Sequence
  ENSG00000272485_6 (sequence is synthesized)
tggtgattaattttggaattcgactctttgagtgtataagggacagggtgcaaagggaaaacatctcagagaacttctacaaatattaggagttggtgcaagaagttcacagtgagctgg

SEQ ID NO: 873497 - DNA, 120 bp, Artificial Sequence
  ENSG00000272485_7 (sequence is synthesized)
gaaggagtgggaagaaataacagggccttggatcctttccaattcccaccccggtgcgcttggcagctcacatgatacctcgacttttccaaatattggggagaaaaagcagccaaggtt

SEQ ID NO: 873498 - DNA, 120 bp, Artificial Sequence
  ENSG00000272485_8 (sequence is synthesized)
ttatgtaagaatgaaaagggcctgaagcatttcaatttccgggtggctaaacaaaagaggacacacaccagggaaagccccttaaagtgtgtgcagaagagttggacaaaagagaagagg

SEQ ID NO: 873499 - DNA, 120 bp, Artificial Sequence
  ENSG00000272485_9 (sequence is synthesized)
catttaatcagacagagaaaaaaatagaaatgatgtcattatttgggtatagtgaggttgccatgtaggtgtgtttgtataaattccttgggcttttcctagtaatgagataatgctgta

SEQ ID NO: 873500 - DNA, 120 bp, Artificial Sequence
  ENSG00000272485_10 (sequence is synthesized)
gagcgatactaattacaaaacacaatcgccacgcaggtaaagctatacatatcataaatatagtctactgcttacaggatgagacccttgttagcatgggaggggcccgatttcataatt

SEQ ID NO: 873501 - DNA, 120 bp, Artificial Sequence
  ENSG00000272485_11 (sequence is synthesized)
tgtacacctgcaatgcagggactgatctctctgtaggtgcacatttgcctcagggtacactggcctagtgcggcactgccctacaaaggcaaatcctccatcaatacataatgaaaaacg

SEQ ID NO: 873502 - DNA, 120 bp, Artificial Sequence
  ENSG00000272485_12 (sequence is synthesized)
acccatcaaaaaaataagtcagagttggggaggcacagaaaaagtgacaaattgattccagactcttcttttttaggccatcatggaaacagttactggatttatattggaaaattccta

SEQ ID NO: 873503 - DNA, 120 bp, Artificial Sequence
  ENSG00000272485_13 (sequence is synthesized)
ccagggtgtgacgccttcaatcgcccttcgtttcccgtgatctccccaggagcaggcagaggggcatcctgggaaccgaccgcgaggtggcctggatcttactgctgccactgagtgccg

SEQ ID NO: 873504 - DNA, 120 bp, Artificial Sequence
  ENSG00000272485_14 (sequence is synthesized)
ctcccaggaatgtgggcacggggatccaaaacctcagacgcactgcaggaatgtgggcacggagagccaaaacctcagacgcaccgcaaggtgcccacaacctcattcgtgtgcttggac

SEQ ID NO: 873505 - DNA, 120 bp, Artificial Sequence
  ENSG00000272485_15 (sequence is synthesized)
acctgaaaatcctttacctggtacctttaattgacaaatttcatataatcaccacttttcgtaatatctgaggaattccactaaagaaagagggatgcctgaacactggagacacacaaa

SEQ ID NO: 873506 - DNA, 120 bp, Artificial Sequence
  ENSG00000272485_16 (sequence is synthesized)
tgtccgtattttatataagaaaggtcaaggcaatgaatttagcgttctagactgctacatttaatatggataccttgaaaagcgatgatggaataatttattgacagctttgttgtattt

SEQ ID NO: 873507 - DNA, 120 bp, Artificial Sequence
  ENSG00000272485_17 (sequence is synthesized)
taaaagtaataaaggaggcatccaaccaaacaagttcattgaatttttgatggggccatgagacctgtagatcagaaggacacaggcagtgtgatttcctcaaagtgtttgacttgacaa

SEQ ID NO: 873508 - DNA, 120 bp, Artificial Sequence
  ENSG00000272485_18 (sequence is synthesized)
aggagggaggaattaaagtgtaaggagacgttgatagttgattaaacaacagcgacctaaagggtgctgagaagtccactgctgttaacctggaggaaagtcccctgagtcccagctgtt

SEQ ID NO: 873509 - DNA, 120 bp, Artificial Sequence
  ENSG00000272485_19 (sequence is synthesized)
ggggacagctcatctgccaggcaacagaatccatgttcaagatgatttcaaggcccaaaggaagagacaaaaacaaatacaaacaattcattagaaataaaagttttttaaaatgtgaaa

SEQ ID NO: 873510 - DNA, 120 bp, Artificial Sequence
  ENSG00000272483_0 (sequence is synthesized)
ctgcaactgtcccatctgtctgacctaacatagtgggactgagatgaaagcaactgaacgtacagatgccgcttccagaccagaaccacctgagcacaggaggaaacaaacacatggact

SEQ ID NO: 873511 - DNA, 120 bp, Artificial Sequence
  ENSG00000272483_1 (sequence is synthesized)
ggcaagggaggagaatgggtttcctggctgggcactgggcaagtggacagctgcggcctgcccctctgacttggtgatcatctgccctgcactagccagaggaacctcgacctcccagga

SEQ ID NO: 873512 - DNA, 120 bp, Artificial Sequence
  ENSG00000272483_2 (sequence is synthesized)
gtactgatgatactggtgcaggagggatggtgtctgctggcgcctctggttttaagtattaatagctataattttacaggggctgaagggaaaaagataaaagaatgccaaagaaattat

SEQ ID NO: 873513 - DNA, 120 bp, Artificial Sequence
  ENSG00000272483_3 (sequence is synthesized)
gtctataattctcaacatctattgtgaatatacactagttttttaatgaactgcagttactctgaataccaaaaagcactaaaaatactttaaattaaaacttgttatcacatccacaca

SEQ ID NO: 873514 - DNA, 120 bp, Artificial Sequence
  ENSG00000272482_0 (sequence is synthesized)
tccggccccgggaacgtgcaggggggcgggaggcaagtcccatcagcactttgaactggggctgctttttagtgactcacctcccagacttcctgcaacagacaactctaaatagctcgg

SEQ ID NO: 873515 - DNA, 120 bp, Artificial Sequence
  ENSG00000272482_1 (sequence is synthesized)
gctgcacagcacaggggcgcacgaataggacgttttgtttacaggcttttgttattaaggaaattggtgtcagtcaaggtaattctagctcagatgagcaataaatatgctcccagctaa

SEQ ID NO: 873516 - DNA, 120 bp, Artificial Sequence
  ENSG00000272489_0 (sequence is synthesized)
gcaggcgtgagccaccgtgcccggccgagttgaagtactttttctggaacaaagaaacttagcataaatagttaaaatagtaagaattgtaattaagggaaatttcagctcaatatgact

SEQ ID NO: 873517 - DNA, 120 bp, Artificial Sequence
  ENSG00000272489_1 (sequence is synthesized)
tcaacagttttaaaaatgtattatttcacataagaccatggagagaggaattggaagccccagaattgattgggtcagaaattgaaaatgatattatcagtgacccaggtttgaatgtct

SEQ ID NO: 873518 - DNA, 120 bp, Artificial Sequence
  ENSG00000272489_2 (sequence is synthesized)
ctccccacagcattgacttcactaatggatgtgacctggttggcagcagcagcttgcacaacatgcttgtttgcagtgagtagtagagagaaggttttgctttcccagaaactctgaaaa

SEQ ID NO: 873519 - DNA, 120 bp, Artificial Sequence
  ENSG00000272489_3 (sequence is synthesized)
aggtcatcaaacctaaatttccttagcctttttcttccatgagcaaatcactagcagatgactgctagcaaggtgttactattacaatgaacccctaagtgtcagagaaagagttagttt

SEQ ID NO: 873520 - DNA, 120 bp, Artificial Sequence
  ENSG00000272489_4 (sequence is synthesized)
ggggaaatatcctctccaccacaatcttagtcattgaagtcaatttaacaatatattgaaatatttttcttagaagtttaaagttccattaaagagtagcaattacagaaattataggta

SEQ ID NO: 873521 - DNA, 120 bp, Artificial Sequence
  ENSG00000272489_5 (sequence is synthesized)
gcctttagttctacaagtgacatttcaaaagggagatgattcatcaatttcaaactttgcctgcaaataatactggatgaaaattaacttggcaaacataattaataatcatgggttatt

SEQ ID NO: 873522 - DNA, 120 bp, Artificial Sequence
  ENSG00000272489_6 (sequence is synthesized)
aggcttgaataaaacataaatttccttaatttatactgtaaatggagtaatttggtgatgtaaatggtaatatgtaagtgacttctgcttcagatcttacaacttaaaatatttttctaa

SEQ ID NO: 873523 - DNA, 120 bp, Artificial Sequence
  ENSG00000272489_7 (sequence is synthesized)
aattagtttttgtaccatctctccagcatgttccagcctttatcagtcagtccaggcttctataacaaaatatcatggactgaattgcttacacaacagacatttctcacaattgtagaa

SEQ ID NO: 873524 - DNA, 120 bp, Artificial Sequence
  ENSG00000272489_8 (sequence is synthesized)
gctggaaagtgcaagattaaggtgctagcaaatttgtttcctggtgagggtcctcttcccggcttgctgtatcctcacatagcagatagagagagaaagagagagagagagagcactcta

SEQ ID NO: 873525 - DNA, 120 bp, Artificial Sequence
  ENSG00000272489_9 (sequence is synthesized)
tagactctcttcctgttcttctaaggacactaattccattgatgagggccctacgctcatgacttagtctaaacctaattaattctcaaaggcctcacttcccaacactgtcacattgtg

SEQ ID NO: 873526 - DNA, 120 bp, Artificial Sequence
  ENSG00000272489_10 (sequence is synthesized)
gggtagggctttaacatatgaaatttgagggaaaaggaatgttcagtctagaacaaagccccatacatttcaaaaagctgtgggacaggagggaatggggatggtattcaatggtaccac

SEQ ID NO: 873527 - DNA, 120 bp, Artificial Sequence
  ENSG00000272489_11 (sequence is synthesized)
atccaagcaagtcttgtatggttaaaacaaatcaatataataacatgaaattttacacagaaacctatctgattataaactgtatgcttaccataatcaacactgatgtacattgtttta

SEQ ID NO: 873528 - DNA, 120 bp, Artificial Sequence
  ENSG00000272489_12 (sequence is synthesized)
aaaatacttaatagtgttctttgtttaaccaaataatagaggtattaactagtttcctagtgctgccaaaagaaattgctacaaaatttgtggcttaaaatagtaaaaaaaaaaaaaaaa

SEQ ID NO: 873529 - DNA, 87 bp, Artificial Sequence
  ENSG00000249456_0 (sequence is synthesized)
agcgcccgtcggacggggaggaggagcaggagctggaggaggagccgccgccgccagcttcctgcctgacacagctcacttcaagaa

SEQ ID NO: 873530 - DNA, 120 bp, Artificial Sequence
  ENSG00000249456_1 (sequence is synthesized)
ccgccgccagcttcctgcctgacacagctcacttcaagaagtgcacaatgtcagaacgtggaattaagtgggcttgtgaatattgtacgtatgaaaactggccatctgcaatcaagtgta

SEQ ID NO: 873531 - DNA, 120 bp, Artificial Sequence
  ENSG00000249456_2 (sequence is synthesized)
gtagagattgggatccttccagcaccgaaggaggaagtagtcctttgatatgtccagactctagtgcaagaccaagggtgaaatcttcgtatagcatggaaaatgcaaataagtggtcat

SEQ ID NO: 873532 - DNA, 120 bp, Artificial Sequence
  ENSG00000249456_3 (sequence is synthesized)
gccacatgtgtacatatttgaactggccaagagcaatcagatgtacccagtgcttatcccaacgtaggaccaggagtcctacagaatctcctcagtcctcaggatctggctcaagaccag

SEQ ID NO: 873533 - DNA, 120 bp, Artificial Sequence
  ENSG00000249451_0 (sequence is synthesized)
cgagggctgggtgggagtggctggctggacacagctggactctgctcccagaatggactgacttcagcttcagggatgacacagagactctgggaccttcttaggaaggacacaaggagg

SEQ ID NO: 873534 - DNA, 120 bp, Artificial Sequence
  ENSG00000249451_1 (sequence is synthesized)
tgcaatcccagcactttggaaggtcaaagcagaaggatcacttgagcccaggagcttgacaccagcctgggccacatagtaagaccccgtctgtactaaaaataaacattttgaaaatta

SEQ ID NO: 873535 - DNA, 120 bp, Artificial Sequence
  ENSG00000249453_0 (sequence is synthesized)
ctgttcctgctgcaaagtaattaatatcagtcgcctggaaagcagaaattgggagacaacaggctcctctttcttgataaacagattgttgggtttcctttgggaggggaaggaataacc

SEQ ID NO: 873536 - DNA, 120 bp, Artificial Sequence
  ENSG00000249453_1 (sequence is synthesized)
acatatatgttgggtgatgggggagacatgaagagtgagagactgtggagacaggaaagtagcaacatttgccatgagattttcctcgaaaccatctccttcttgaatttagacactcat

SEQ ID NO: 873537 - DNA, 120 bp, Artificial Sequence
  ENSG00000249453_2 (sequence is synthesized)
tgtttatgtgcagtggccctaggtacagaagggtcaccaccccaaggagaactataccctccggactcataaaccaaattctagccagattctcccggaataaaatactacagttcatcc

SEQ ID NO: 873538 - DNA, 120 bp, Artificial Sequence
  ENSG00000286312_0 (sequence is synthesized)
gaagtattattcattacactgaagtattattcattacactgaagtgaacagttcaggcctcttctgtcacatcagtttaaataagtacaacaaagatttatgacttcagctgggcgaagt

SEQ ID NO: 873539 - DNA, 85 bp, Artificial Sequence
  ENSG00000286312_1 (sequence is synthesized)
tactaggcaacataggtggacctccgtctttaccaaaaatttaaaaattaactaggcatagtggtgtgcacctgtagttagtctc

SEQ ID NO: 873540 - DNA, 120 bp, Artificial Sequence
  ENSG00000286312_2 (sequence is synthesized)
taaaaattaactaggcatagtggtgtgcacctgtagttagtctcagctacttgggagtctgaggtgggaggattgcctgagcctgggagttgaaggctgcagtgagccatgatcctgcca

SEQ ID NO: 873541 - DNA, 120 bp, Artificial Sequence
  ENSG00000286312_3 (sequence is synthesized)
aaaaaaagaaaagaaaaagaaaaaagaattatcaactcttactgtccctgaacattgaagatcaagagatcaatgacattctaaatgttggaatttacagtcttccagtctcctggacca

SEQ ID NO: 873542 - DNA, 120 bp, Artificial Sequence
  ENSG00000286312_4 (sequence is synthesized)
ccagtctcctggaccacaatgtacagttaatagatctttccaagctttatggtactgaatccctaattagcattccactgaagagctcttaaggaactgaaaaggaactgctgcgtacca

SEQ ID NO: 873543 - DNA, 120 bp, Artificial Sequence
  ENSG00000286312_5 (sequence is synthesized)
ctcctgctgatggtaatttcttggatccaaaacaaaatctgtgtatttatttctttgaaaacatcatttgtcgaccgtcctttcactgccatggaatgatttgccttctcaatccagtgg

SEQ ID NO: 873544 - DNA, 120 bp, Artificial Sequence
  ENSG00000286312_6 (sequence is synthesized)
attttatggggagcttgcattttctgtgccactttctccaacaagttctaaagagaaaaagaagaggatactagactaatgttctgttgatatttaataaaaggtcctctctcccctgcc

SEQ ID NO: 873545 - DNA, 120 bp, Artificial Sequence
  ENSG00000249458_0 (sequence is synthesized)
aaattagtacatgtagaaaagtttcctggaaagaagctcaaacaatgagctctaaggaattgcggataaaatactggcttctcagcttgggttctggctctagccctattgtcaacaagc

SEQ ID NO: 873546 - DNA, 120 bp, Artificial Sequence
  ENSG00000249458_1 (sequence is synthesized)
atgaagaagatatttctcttattgcaagaaatgagaaaaatttactagcaaaatatgatatgtgataccccttccaattctagaattcaatacacttatctcatttttcaaagaattcca

SEQ ID NO: 873547 - DNA, 120 bp, Artificial Sequence
  ENSG00000249458_2 (sequence is synthesized)
caaacactaaatcatataaaagattaaacaaagggagataacagttgcagacaactaggaaacactttacgatagagtgaagatttgtcagttaataaatatgtgaccttggataattca

SEQ ID NO: 873548 - DNA, 120 bp, Artificial Sequence
  ENSG00000233775_0 (sequence is synthesized)
tttctgtgtgttctatctctgatctatgtgtctatttagtcaacgaatatttatcaagggcgtgagccaccacgccatgccgggacttggtcttgttcacaggtctagaacagtgcctaa

SEQ ID NO: 873549 - DNA, 120 bp, Artificial Sequence
  ENSG00000233775_1 (sequence is synthesized)
cacatagctggggcacagtaaatgctgagagaatgcatgtgttgtcgggaggtcacttctgaggaggcaagtcttaaacgaggctagcaaggatggtcagccgcttccagagcttgggaa

SEQ ID NO: 873550 - DNA, 120 bp, Artificial Sequence
  ENSG00000233775_2 (sequence is synthesized)
cttttttgtttgtagtctgtgatcctgggagccctggggccagtttaaacagggccccatcagggtctctggaagtgaggtcactgcccaacagattcaccccactggctaactctggct

SEQ ID NO: 873551 - DNA, 120 bp, Artificial Sequence
  ENSG00000233775_3 (sequence is synthesized)
taactggctgggcctggccattcccctggaagcaactcctccccacaacagcatcagtcccacgacctctggctccttcccagggcagcatcctgcagtccggaaggaagttcttcgtcc

SEQ ID NO: 873552 - DNA, 120 bp, Artificial Sequence
  ENSG00000233775_4 (sequence is synthesized)
tgtctaaccacagaccccgctgaggcaaccccagccttttcctcttattctgccttgtgggcagaagggaggagatgggctgacccttcagcaacgggtcctggcctagacggagagccc

SEQ ID NO: 873553 - DNA, 120 bp, Artificial Sequence
  ENSG00000233776_0 (sequence is synthesized)
atgcaagacattgtgattttgaccttgttggatgctgcacctaaaggtggatggaagaggaagagtcttgggggctaccatcctggctggagaagctggcacgaggctccctcttgtgga

SEQ ID NO: 873554 - DNA, 120 bp, Artificial Sequence
  ENSG00000233776_1 (sequence is synthesized)
tgcagcaagtctgagggccaagggaagagaagagtgacatagaatctcctttccttgagatcttagaatcacgcctgcctccttacctccatccaggactgttaaaaatctcccaaggca

SEQ ID NO: 873555 - DNA, 120 bp, Artificial Sequence
  ENSG00000233776_2 (sequence is synthesized)
tttaggcctacatgtacttagcctcctcttcccacctcctgttcatctctgtttccaatgttccactgccatcactgccaggaagttctgcagagaagaatgaagaagaaccgtatgatc

SEQ ID NO: 873556 - DNA, 120 bp, Artificial Sequence
  ENSG00000233776_3 (sequence is synthesized)
ctaaacatgttctttgaagatattatcaacccaccattggccttatttactggaatgtttttataacctttatttgacacctcttcccatcatttaaaataaatctggtgcttccctgaa

SEQ ID NO: 873557 - DNA, 120 bp, Artificial Sequence
  ENSG00000249186_0 (sequence is synthesized)
ctctcttaggagctgatcaaaatcaaactaagaaattttttacacatgtgagtcttggggacttcagggtcattcaaggcagaatcaggccataaatagtaatgccagagatgacaggat

SEQ ID NO: 873558 - DNA, 120 bp, Artificial Sequence
  ENSG00000249186_1 (sequence is synthesized)
taggggagtcttgaagtataagtcctttgggggtcagaggactttagagaagctgatgttgtaaaagaaaacagacttgtcacctctggcaaagcctcaacatatgggtatgtatccgtc

SEQ ID NO: 873559 - DNA, 120 bp, Artificial Sequence
  ENSG00000249186_2 (sequence is synthesized)
agggttcagccagagaagcagaacaactggaagataattagaattatcagcctgtgccacccccatcatgtgtctctaaagaccccagactcagtcagtagaggggagatggcctgactt

SEQ ID NO: 873560 - DNA, 120 bp, Artificial Sequence; identical to SEQ ID NO: 842638
  ENSG00000249186_3 (sequence is synthesized)

SEQ ID NO: 873561 - DNA, 120 bp, Artificial Sequence; identical to SEQ ID NO: 842639
  ENSG00000249186_4 (sequence is synthesized)

SEQ ID NO: 873562 - DNA, 120 bp, Artificial Sequence
  ENSG00000249186_5 (sequence is synthesized)
agagtaaagaaaagtgatggcctcacctgaccctacactgtctcgtgacatcaagctctcaccaaatgtgacccaccccttggatccctgattcattcacctggcaccctccacttttaa

SEQ ID NO: 873563 - DNA, 120 bp, Artificial Sequence
  ENSG00000249186_6 (sequence is synthesized)
agtattctatcctaccactgccagactccaccttaagtcccaatctggtgtgatttccacatgactgaacaccattccagagagctcatctctagctggcacccctggttggcctcctct

SEQ ID NO: 873564 - DNA, 120 bp, Artificial Sequence
  ENSG00000249186_7 (sequence is synthesized)
gttctaacattcctaagcatggaccactcatacctgcatgtttcacatttccctgagggctggcatctcgtacctcctccaccaggtttttgagcaagagcttctttcacttcaaccccc

SEQ ID NO: 873565 - DNA, 120 bp, Artificial Sequence
  ENSG00000249186_8 (sequence is synthesized)
tctggggagactctgtaagcaggcctatgggaacaaacagcatctttgtcctcaccctttacatccaagtacatctgaagatatctgttataaagagagtggatttctaaactttggaaa

SEQ ID NO: 873566 - DNA, 120 bp, Artificial Sequence
  ENSG00000249186_9 (sequence is synthesized)
agaacaactggaagataattagaattatcagctcatttgtcatgtggggatcctctgtgttgggaaccgatgcttggtatcacaaaaatcaacactgagacaaagtatctctctgcaagg

SEQ ID NO: 873567 - DNA, 87 bp, Artificial Sequence
  ENSG00000249186_10 (sequence is synthesized)
tcaacactgagacaaagtatctctctcgctcgctagcagtctcgccatgagagcacacacgaacaaaggagacagggtcatttataa

SEQ ID NO: 873568 - DNA, 120 bp, Artificial Sequence
  ENSG00000249184_0 (sequence is synthesized)
gacctgatctttgcagggcctgtctcagatacttacctgtatatacctgtgggaggaagaagaaaaaggtgtgtccacctagaataatttgtttgctggaagttctgttgttggcagaaa

SEQ ID NO: 873569 - DNA, 120 bp, Artificial Sequence
  ENSG00000249184_1 (sequence is synthesized)
atggaagctacaaactagtgtggttatcagcagggaatgggatcaaagtttcagtccaacaagtccaggcaactttcagcttgaaggccaaggtgttactacttagaatttagggcacag

SEQ ID NO: 873570 - DNA, 120 bp, Artificial Sequence
  ENSG00000249184_2 (sequence is synthesized)
tatttgggagaatgagtctgtttgggagacactttaggtcataccagcagcagctgctgacatatgaacctcgcagatgaagatgccatagcatggctatttctcgactgcactgctgaa

SEQ ID NO: 873571 - DNA, 120 bp, Artificial Sequence
  ENSG00000249184_3 (sequence is synthesized)
gtttaagaacatcaaccagactgctgtgttgagaagaatacagacactgcattcagattcagtgagaaagagtgctttgatcaactaatattttctgcagtggtccatccatgtgtgttg

SEQ ID NO: 873572 - DNA, 120 bp, Artificial Sequence
  ENSG00000249184_4 (sequence is synthesized)
ggttttactgttcctggcttaagcattctctacaaccatgagcttgcaactaaaatgctgagaaatgtatggctaccataaagccagtttaaatctatatgccaaaaggccttatttaaa

SEQ ID NO: 873573 - DNA, 120 bp, Artificial Sequence
  ENSG00000249184_5 (sequence is synthesized)
attgatataaccagtgccttgttaacagatgtgacctgatctttgcagggcctgtctcagatacttacctgtatatacctgtgggaggaagaagaaaaaggcaactttcagcttgaaggc

SEQ ID NO: 873574 - DNA, 120 bp, Artificial Sequence
  ENSG00000249184_6 (sequence is synthesized)
aaaggaatgatttctagcttcctgtagacaccattagctaaattgcagtatctgcttctcttatcgtctttgccagggtcattgtttcttgcactgaacctcggaggaaggatgaggaga

SEQ ID NO: 873575 - DNA, 120 bp, Artificial Sequence
  ENSG00000249184_7 (sequence is synthesized)
gtcggcagtgatatttgggagaatgagtctgtttgggagacactttaggtcataccaggggcctggacttctccaaatgatctctccagcagagaggctggacatcttctatagcacctc

SEQ ID NO: 873576 - DNA, 120 bp, Artificial Sequence
  ENSG00000249184_8 (sequence is synthesized)
agggctcctaagaacgcggaagtaggagttgccaggtcttattaagactgagtcctgaaacaggtgcagcatcacttccactgcactctcttggttaaagcaagtcacatacccaaccca

SEQ ID NO: 873577 - DNA, 120 bp, Artificial Sequence
  ENSG00000249184_9 (sequence is synthesized)
gagtggagtacatgaggtcctgacttccaggaggtgtgtacaccaggaggggtgtttcactgggggccatcaatgtaatgaactgtcatagcaagtgaggcagagcattgattctagcaa

SEQ ID NO: 873578 - DNA, 120 bp, Artificial Sequence
  ENSG00000249184_10 (sequence is synthesized)
ttcttttagagactctgagacccttggagacagaactgtagagatcatctagcccaactcattgaggaaacggaggtcctgatgactactgtccacaggggccgtgtggatgctctgggt

SEQ ID NO: 873579 - DNA, 120 bp, Artificial Sequence
  ENSG00000249184_11 (sequence is synthesized)
tttcgcttaaagaagtgacaagttaaggaaccatatatattttgtagagaaaaaggtcttgaaatggtagtggccaattttcaaaaatttcaaatacatagcatatcccagagaatgagg

SEQ ID NO: 873580 - DNA, 120 bp, Artificial Sequence
  ENSG00000249184_12 (sequence is synthesized)
ggaacagagtgccacttatctgaattctcagccaaatgggaggatgtttcttttcctttataggcttattgttaaaaggtgttttgtacaaccgaataatttccctctaaagaaataaaa

SEQ ID NO: 873581 - DNA, 120 bp, Artificial Sequence
  ENSG00000249184_13 (sequence is synthesized)
gaaatcctgggaaccagtaagattcatgactcctgcaaaatcctaaatttccctcaataatttcccttttctaaaaagaaaaaaaagtcgctggatgaccaagattgttctaaattcctg

SEQ ID NO: 873582 - DNA, 120 bp, Artificial Sequence
  ENSG00000249184_14 (sequence is synthesized)
ggttggtatttaggctcacggagtagtttcttcagttgaggtttctgagcatcttctcaggaagatggcgctgcctcagactttcccagcacagtgcccctagtggcagaagagaaggtt

SEQ ID NO: 873583 - DNA, 120 bp, Artificial Sequence
  ENSG00000249184_15 (sequence is synthesized)
gcgtgctgctgggctctagctctaaatgtacctgaaaatactttttcttgaattctcctcttaatctttaaaatttatgttaacctttccttctgctctatgatatattcataattgttt

SEQ ID NO: 873584 - DNA, 120 bp, Artificial Sequence
  ENSG00000249184_16 (sequence is synthesized)
taaaataaaatataatgttttagattattcatcacttacggggatagtcaaggctatccccgtttccccctcccctcccctcccctccgtctaattactggacatctttgaaacacttga

SEQ ID NO: 873585 - DNA, 120 bp, Artificial Sequence
  ENSG00000249184_17 (sequence is synthesized)
caaaatcaattattttttaaattttagattaaattattttcggcaaacgttttaagtccctcccctttgacctccgtgggacgaatatacagtcatatactacataacaacctttctgtc

SEQ ID NO: 873586 - DNA, 120 bp, Artificial Sequence
  ENSG00000249184_18 (sequence is synthesized)
aacaacagaccacatatagaatggtggtcccataagattataatgaagctaaaacattcccaccacctacagaggttgtagccgtgggaaagtcgtagcacaatgcattactcacgtgtt

SEQ ID NO: 873587 - DNA, 120 bp, Artificial Sequence
  ENSG00000249184_19 (sequence is synthesized)
tgtggtgatgctagtgtaaacaaacctgctgtgctgccagccacatgaaagtctagcatatgcaattatgtacagtatgtaaaacttgatcataataataaactatgttactggtttata

SEQ ID NO: 873588 - DNA, 120 bp, Artificial Sequence
  ENSG00000249180_0 (sequence is synthesized)
agtgaagccgacagagcctcgagtgcttgatcactcattgtatcctgttaaaagtaaaaaatcctgtgcatgaaaaaagacatctctggagcccgaacaatccatttacttctttgtaaa

SEQ ID NO: 873589 - DNA, 120 bp, Artificial Sequence
  ENSG00000249180_1 (sequence is synthesized)
atacattttagattataaactgaatatggattggggaagtgctctagaaaggcaattttatttgaaaccttgcaaaagagagaaaggaaaaagaacttaccaatgagtggaaattggggc

SEQ ID NO: 873590 - DNA, 120 bp, Artificial Sequence
  ENSG00000249180_2 (sequence is synthesized)
caggtgaagtcagatgacaaggcgtctatagcatcatctggccctatgggtttctaaagaaacaggcacagtgatgggtaacttacgggaagcactcaagtggaagaatggatcataaac

SEQ ID NO: 873591 - DNA, 120 bp, Artificial Sequence
  ENSG00000249180_3 (sequence is synthesized)
ctagcaaatgaagaatgcacttttccaattcccttgctaccaaatgaggtgtgttaatgaaacaacttagatcaaagtgtatgttttgaagagagtggctactcattgagtattattttc

SEQ ID NO: 873592 - DNA, 120 bp, Artificial Sequence
  ENSG00000268938_0 (sequence is synthesized)
taaagtgagtatgttgtgcccggagaggagacccccagctccagctggctcaaccacatccaccatgctgtgtgactccagatgcatcacaggctgtctctggcccagccccagacagcg

SEQ ID NO: 873593 - DNA, 120 bp, Artificial Sequence
  ENSG00000268938_1 (sequence is synthesized)
cactcatgatcacacagggctgggctctctccacgtcccctgcatcgcccaggacggcccagtctccgaggacatccatgtatgcaaaataaaatccctctgctaggcgtgccctgcaca

SEQ ID NO: 873594 - DNA, 120 bp, Artificial Sequence
  ENSG00000268931_0 (sequence is synthesized)
ttacaggcatgagcgaccacgcctgcctggaaatgactgttttctatccttttctcagattctcatgctgcggggtggagttgggcggctttaaaaagagcccaacaggctgctcatggc

SEQ ID NO: 873595 - DNA, 120 bp, Artificial Sequence
  ENSG00000268931_1 (sequence is synthesized)
tatttcctcctgcaatggcaaaagggcatgcctgcctgcctcctttctgaacccataccccgatcccaccctcccccaagtacacacacaaacaaagttaacaaaaaaggaaccctttgt

SEQ ID NO: 873596 - DNA, 120 bp, Artificial Sequence
  ENSG00000268931_2 (sequence is synthesized)
ccggaaaccaacccagggaaacagaagtgacgagaatcttgaggaagaatcatgtcagtttggagcttgttctgggaaactgtgaaaaagtttgggagagcaaattcagagaagaggcca

SEQ ID NO: 873597 - DNA, 120 bp, Artificial Sequence
  ENSG00000223587_0 (sequence is synthesized)
gccggcgcaggcgcagagagacacaacgacgtctactttgttccttgtgaatacattccatgtgctatgacttcattgttggatgctgattagctccagaaagaaagcagtgtgaaaaag

SEQ ID NO: 873598 - DNA, 120 bp, Artificial Sequence
  ENSG00000223587_1 (sequence is synthesized)
atgaaacacagatttgaaagcaatcttgaagatcagacagaaaaccagcctatgaatcaaagaagaaaatcaaaatcagacttcataactgcttcagtaacccttggcaacagacaacac

SEQ ID NO: 873599 - DNA, 120 bp, Artificial Sequence
  ENSG00000223587_2 (sequence is synthesized)
aaaccaccagaacagaagtggagcgggcatggtatctgtttcttcaatttgtagttttatagtcaaaaactggcatgtatatacttaattggtaacatgtaagtcacgtgcctctatccc

SEQ ID NO: 873600 - DNA, 120 bp, Artificial Sequence
  ENSG00000223587_3 (sequence is synthesized)
aactctaagagaggttgagaacttaatttctggcttctaccttgggaaggatcaggcttataagctggaaaattagccaacatacacaggatattcaaagcttctaggcagtcaaaatac

SEQ ID NO: 873601 - DNA, 120 bp, Artificial Sequence
  ENSG00000223587_4 (sequence is synthesized)
tgtcaagtggtaaaacagacatgaaaaaacctttttttctctcctaaatttaaaaaaatataatttttgtaaaacactgtatgtggctttccataaaattaaaagagtcttgggagagag

SEQ ID NO: 873602 - DNA, 120 bp, Artificial Sequence
  ENSG00000223587_5 (sequence is synthesized)
ggcgcagcgccggcgcaggcgcagagagacacaacgacgtctactttgttccttgggttacacatttcctgagagtatctacatattcataggcaacaccgatgtgaatgtgacagatta

SEQ ID NO: 873603 - DNA, 120 bp, Artificial Sequence
  ENSG00000223587_6 (sequence is synthesized)
atatacagctatggaaaagttttcctcataacaattccattttatctcaggtataatcggtcaggagaaattatttcttgttgctaaaaatggaacaaaacgtttgagctaaagaaacac

SEQ ID NO: 873604 - DNA, 120 bp, Artificial Sequence
  ENSG00000223587_7 (sequence is synthesized)
atttctcattcaacacacacatccacagaagtttcttctcatgccaaagtgagcaaatctacacttgggattgtacaatttttatgaaagtaattaacaaataaaacatttaaaagaaaa

SEQ ID NO: 873605 - DNA, 120 bp, Artificial Sequence
  ENSG00000223587_8 (sequence is synthesized)
gagagacacaacgacgtctactttgttccttggtcagtcgatggcctgcgggtgtctgctggtgtctggccgtgtgctctttctcgacgtacagctgtttgtgtgtgtgcccgcgacagt

SEQ ID NO: 873606 - DNA, 120 bp, Artificial Sequence
  ENSG00000223587_9 (sequence is synthesized)
ctcgggttttgatgggcacaggatggggggccaaaaggcaaaactgttttggtgggcaaaaacagaaatgcctgtcctcatttaggtccatgggcacaggcccgaggttgtagcccttgc

SEQ ID NO: 873607 - DNA, 120 bp, Artificial Sequence
  ENSG00000223587_10 (sequence is synthesized)
cagggatcctgcccttctctactcagcacttcgctgcccctctcctgaatcacatcaattaagaactttcttcaccaccccttcgctgtcatccttttctctccactattcacccaacat

SEQ ID NO: 873608 - DNA, 120 bp, Artificial Sequence
  ENSG00000223587_11 (sequence is synthesized)
catccgggaccagaactaatgtcagcaaagcaggggaaggaagtaaacttctaggagtagaagaaaggatgaaaaagccaaccacaaccccctttcttcattaaaggcttccctctaccg

SEQ ID NO: 873609 - DNA, 120 bp, Artificial Sequence
  ENSG00000223587_12 (sequence is synthesized)
tactcgaaaacaactttgccattttgataatcaaatgaaaaagtatagtttctaactctgtactatttgtacactatttgtactttctaaatctatactattcgtattatttaaaagtga

SEQ ID NO: 873610 - DNA, 120 bp, Artificial Sequence
  ENSG00000223587_13 (sequence is synthesized)
ccataaatattataaactaagttaaccaaggttttgcctggaggcaagggaagaccaaatcccatgatacaacttaaatagttgaattccacttatgtgaaaacacacacatatgtttaa

SEQ ID NO: 873611 - DNA, 120 bp, Artificial Sequence
  ENSG00000223587_14 (sequence is synthesized)
ccaaaagcttcatgggcaaaagaaccatatcttcacatccttaatgaggataaggattgcagaggcagtactttgtagggttacacatttcctgagagtatctacatattcataggcaac

SEQ ID NO: 873612 - DNA, 120 bp, Artificial Sequence
  ENSG00000276308_0 (sequence is synthesized)
cttctctggaaagcctttttaaagtcatggacacttgtgattctcaaactttgctgcatgttagaatcatctgggggaattttagaaaatcctgatgttcaggtcacatcccagaataac

SEQ ID NO: 873613 - DNA, 120 bp, Artificial Sequence
  ENSG00000276308_1 (sequence is synthesized)
cacgccagtttctgtccgtgcgattctaacgagcagctacgtttgaaaaccaatggccaagatcagtgcttcttaagctttaagttgcaaatgaactctctgagtgaagatgttgttaaa

SEQ ID NO: 873614 - DNA, 120 bp, Artificial Sequence
  ENSG00000276308_2 (sequence is synthesized)
acgaagattctgattcagtaagtacgaggtgagatctgatattctgcatttcttgtttgctcccaggtgacaatgataccactgatacacagaccacactttgagaagcaaggttctata

SEQ ID NO: 873615 - DNA, 120 bp, Artificial Sequence
  ENSG00000276308_3 (sequence is synthesized)
gcaatggttctcaattcttattgcgcatcagaatcacccagaaggcttgctgaaacacacactcctgggccccgtccttggagattcggcttcagtaggtctgggtggagggcctgagaa

SEQ ID NO: 873616 - DNA, 120 bp, Artificial Sequence
  ENSG00000276308_4 (sequence is synthesized)
tttgcatttctaataatttccctggatgactgatccaggaaccaaagtttgagaaccactggcctagactgctttgctcatgcccctcccaggtcttccagagtgcctaagctgacttcg

SEQ ID NO: 873617 - DNA, 120 bp, Artificial Sequence
  ENSG00000276308_5 (sequence is synthesized)
tcgcagcagtcttttattcaatcagctggtgtttactcggacacttcccatgctgcaggggttgtaccgggcacataggaggcagtgccttgtagctgttgtcagcaagaactttaaatg

SEQ ID NO: 873618 - DNA, 120 bp, Artificial Sequence
  ENSG00000276308_6 (sequence is synthesized)
tggaagatgcgttgtaaattccagcctaagctttttagcttcctaactaggacagattgttttatctatacaatctgtcatagaagctattatatgttggaaactctggaagatctataa

SEQ ID NO: 873619 - DNA, 120 bp, Artificial Sequence
  ENSG00000276308_7 (sequence is synthesized)
atggccagtgcctttctaacaattttagagtcattttatttgtgagattaatgatttgaaacttcgattttgtcagagatctctagactgacctctagagataggcgtgttaagaattaa

SEQ ID NO: 873620 - DNA, 70 bp, Artificial Sequence
  ENSG00000276308_8 (sequence is synthesized)
gtgttagtttgctgagaatgatggtttcaggcttcatccatgaccctgcaaaggtcatgaactcatcctt

SEQ ID NO: 873621 - DNA, 120 bp, Artificial Sequence
  ENSG00000276308_9 (sequence is synthesized)
cagtgtaaaagcgttcagtgtttctttaacagtaaagacattttcattatcaaataatgatgttcatgtttttctagaaaaactatcattactccatttgtttaaactttgatcttgaat

SEQ ID NO: 873622 - DNA, 120 bp, Artificial Sequence
  ENSG00000224511_0 (sequence is synthesized)
aggagtcccctgctcaacagcgtgctcctggtgatactgccacccgtaacgggtactggctttgctaacatcctgacgagacgtcggggagagacgggaagtggcagagatgggatctca

SEQ ID NO: 873623 - DNA, 120 bp, Artificial Sequence
  ENSG00000224511_1 (sequence is synthesized)
aagcaatcctcctgcctcagcctcctgaagccctgggattacaagcataagccaccgcccccggccagatcacatgattctttacatctctgctgacagatttcatcactggtgctgagt

SEQ ID NO: 873624 - DNA, 120 bp, Artificial Sequence
  ENSG00000224511_2 (sequence is synthesized)
catctctgctgacagatttcatcactggtgctgagtgcagggagtcccgcagccacttacacgtgttgcattgccgggcaatacaggcctgtgtgacttgctattctatggctgggcttc

SEQ ID NO: 873625 - DNA, 120 bp, Artificial Sequence
  ENSG00000224511_3 (sequence is synthesized)
tgcctgcagatgcctggtttctccactgccaaggctcatggtctgacacatccaggaaattcaacagtgaggatgcaatgacaatgagtcgtgcatgagggttcccgggcctcgctcccc

SEQ ID NO: 873626 - DNA, 120 bp, Artificial Sequence
  ENSG00000224511_4 (sequence is synthesized)
ccctgctcaacagcgtgctcctggtgatactgccacccgtaacgggtactggctttgctaacatcctgacgagacgtcggggagagacgggaagtggcaggttgggcaagatagaggagg

SEQ ID NO: 873627 - DNA, 120 bp, Artificial Sequence
  ENSG00000224511_5 (sequence is synthesized)
aaaggactctacctcatggcttgtccagaagagggcagggccacccctgcagccaggcctcccgggccctggaggtaggagggggacgatggcctctaagagcactctgagaccaggagc

SEQ ID NO: 873628 - DNA, 120 bp, Artificial Sequence
  ENSG00000224511_6 (sequence is synthesized)
ctgttctctcgggcctgaaggcttcgcttccactgttctacgctgccgccctggcctggccacctcccctccactgtgtggctggcttttctctgccttctgctgcctgatgggatctcc

SEQ ID NO: 873629 - DNA, 120 bp, Artificial Sequence
  ENSG00000224511_7 (sequence is synthesized)
cactcacctccacgaggatctgagaggaaagggtgctgaggagaggagcgtggagtgggcaggctcttgatgccaagccaagaatctgcatggctcatttgaaacttcgcagtgcccttt

SEQ ID NO: 873630 - DNA, 120 bp, Artificial Sequence
  ENSG00000224511_8 (sequence is synthesized)
atctcttgttctcttttatgtataagctcgtctttctcccatacagttgtaaaccccaaagggtagggactgtattcggttccttatttatatcctgtaagacagtgactctcaaactca

SEQ ID NO: 873631 - DNA, 120 bp, Artificial Sequence
  ENSG00000224511_9 (sequence is synthesized)
tcagaatcacctggggagttttaaaaacttgattcctccagaaaccataaagaccaaagatttaaaaatatcaccatattaaaacagaatgaagcaaaatccttctgtaaagctaaacaa

SEQ ID NO: 873632 - DNA, 120 bp, Artificial Sequence
  ENSG00000224511_10 (sequence is synthesized)
acaaacaaactcatgaatcagtcagaagaaattataaacaaggggaaaacagtatttggaatatagatggaagacacactaatttctttaatttgcaacaaatgtctataaataagaaat

SEQ ID NO: 873633 - DNA, 120 bp, Artificial Sequence
  ENSG00000224511_11 (sequence is synthesized)
atacaaacaactcaataaatgctgggccaggaatctgaactggcagaacatggaaaagaaataccagtgaccaagaaacatatgaagagctgctcatccttcctcagaaataaagagacg

SEQ ID NO: 873634 - DNA, 120 bp, Artificial Sequence
  ENSG00000224511_12 (sequence is synthesized)
caaatcagaacaatgccagaccacttttcatgaatctgattagcaaaaattataaagtttcatgatgcccattgctgatgagagtatggaagcagatgccagtgaatgcaaacttggtgg

SEQ ID NO: 873635 - DNA, 120 bp, Artificial Sequence
  ENSG00000224511_13 (sequence is synthesized)
attttggcacctgtgtgacaaggtggggcggtggttctcacacctgcatgagcttctgaatcacatgatgaacttttaaaaacatagattctctgcgcccccatcccatactgccataag

SEQ ID NO: 873636 - DNA, 120 bp, Artificial Sequence
  ENSG00000224511_14 (sequence is synthesized)
caacatttttaaaacatgagtaacctttgacccagcaattctactgatgggagctgattctgaaatttcccacagaagagtatcaacgtcggcaagaatggatgcccacagcagcattat

SEQ ID NO: 873637 - DNA, 120 bp, Artificial Sequence
  ENSG00000224511_15 (sequence is synthesized)
ttgtatagcaaacaacctcaatgtccatcaataggaacctggataaataaactgtggcacactcttagatcttttaaagagatttagtaggaactccatttgctgatatagagcagtctc

SEQ ID NO: 873638 - DNA, 120 bp, Artificial Sequence
  ENSG00000224511_16 (sequence is synthesized)
tgagttatgttgtgcaatgaaaaaatcaagcagcagagcagtataaatggtgtaatccattttccacataacttttaaaatgacacaccatatactttggtaaatgcacaaattcttttt

SEQ ID NO: 873639 - DNA, 120 bp, Artificial Sequence
  ENSG00000224511_17 (sequence is synthesized)
caatggaaaatctacaagaagctgataacagtggcaactttgagggaaggatgagaagagaggttcttacctttcattcagtactgcttgattttcctacttcctactttgtgcattgat

SEQ ID NO: 873640 - DNA, 120 bp, Artificial Sequence
  ENSG00000224511_18 (sequence is synthesized)
tagttttagtggagaacttcagtaagtgtcatctgaaaggtggagttatgggacaattttggtttctcctttagagttttctgtaaaggatattcaataattgaagattctcaggccata

SEQ ID NO: 873641 - DNA, 120 bp, Artificial Sequence
  ENSG00000224511_19 (sequence is synthesized)
taccagatacaccaagtttgggtggagatgctggcatgggactctagaaatcagcttgtcgtgtgattctgctcatcagtcaggtttgagactcactgcagaagattctggaagaaaaat

SEQ ID NO: 873642 - DNA, 120 bp, Artificial Sequence
  ENSG00000224511_20 (sequence is synthesized)
gctctcttctctagctcaggggttatgaggatgagagggtggggtggctgcagcccttttgtttccatgaaaggagaacctgaatgaccttgtgcaacctaaggtcaaagaaatgcatgg

SEQ ID NO: 873643 - DNA, 120 bp, Artificial Sequence
  ENSG00000224511_21 (sequence is synthesized)
ctggcaagtaaaccacagagaggaacttgtccgctggtacatcagtaggccacagaatcatgcctttcccgaagaaggacgtcctgtgtctagacttttcagttatgaagccaatacgtc

SEQ ID NO: 873644 - DNA, 120 bp, Artificial Sequence
  ENSG00000224511_22 (sequence is synthesized)
ctctttgttgtttaatgcagcttgagttaggtcttttgtcacatgcaatattaagaatcctaactgatagacctccactgagacaagctgagtatgtctttatctcttgcagactgaaat

SEQ ID NO: 873645 - DNA, 120 bp, Artificial Sequence
  ENSG00000224511_23 (sequence is synthesized)
tgcctaatttataaagtatttcatgatgtttgcaagataaacccttgtctgctgccttgggctacatctgatgattgcctgcaatatttctgcctctagaaatgaactgtcaaaccaaga

SEQ ID NO: 873646 - DNA, 120 bp, Artificial Sequence
  ENSG00000224511_24 (sequence is synthesized)
agtatgtccttggaatgcatcctccactttagcaaaagaattatgtgttttgtttgctcttcatcatgtaactcttgaataaatttggatgcaacagattaagggcataaccaggaaata

SEQ ID NO: 873647 - DNA, 120 bp, Artificial Sequence
  ENSG00000224511_25 (sequence is synthesized)
tttctgtgggccatgtgtctctgtttcagcatttaagaacgcatataaggaacttcagttattttgcaatgactcttgttgctgggtggtgattcttgactccaccattggttgagtctt

SEQ ID NO: 873648 - DNA, 120 bp, Artificial Sequence
  ENSG00000224511_26 (sequence is synthesized)
gactgcaggcatcgcagcttcagggggattacggaacaccagcgcacagaagaagtacacggtaactgatagttagacaacagtcacgttgccccttgtgtttctggaaaccctgggaat

SEQ ID NO: 873649 - DNA, 120 bp, Artificial Sequence
  ENSG00000224511_27 (sequence is synthesized)
aaaggtgatctggctcagctcatatccttgggagctttagcacacaagcagacccagagatacaggcttggatctgaatctaggaggcccagcaggaatggacgggaaaacattcatttc

SEQ ID NO: 873650 - DNA, 120 bp, Artificial Sequence
  ENSG00000224511_28 (sequence is synthesized)
tctcggaacgtctcatgaaagctctatttctagggccatgttcactgtgtattcagggaactctgcctgttgttttcatgtccatttctgtaactgtcagaactatgatcccattttaaa

SEQ ID NO: 873651 - DNA, 120 bp, Artificial Sequence
  ENSG00000224511_29 (sequence is synthesized)
atttgcctgagtgcttcctcaaatgcaatggataatttccttaactatactattagcataaatttgcatatttatttcataattaaaatgagtaagaataaaaggctaattacaccaaaa

SEQ ID NO: 873652 - DNA, 120 bp, Artificial Sequence
  ENSG00000224513_0 (sequence is synthesized)
ggctttgcagctttcctgtggtcctgaacggccacatagcccctcggagccttggtggctcatctgcagagtgggagcaccttcctacattattacgaggattccccgggaacacgtcca

SEQ ID NO: 873653 - DNA, 120 bp, Artificial Sequence
  ENSG00000224513_1 (sequence is synthesized)
taatttgggaggagagcacaggctgccggccccagctctccaggcagtgtgggaccgcggggaggagcggggatgtgcgtgaggccgtccctcctgcctcgttcgcaggcacagagtaga

SEQ ID NO: 873654 - DNA, 120 bp, Artificial Sequence
  ENSG00000224513_2 (sequence is synthesized)
tggccggtgtcaagaagctgccgcgcggtccccggccgaggagaatcaaacacatacagcagcgtcaggctccgggagacctcgtgaactcagtgatttcaagtcccgtttcagaccgtg

SEQ ID NO: 873655 - DNA, 120 bp, Artificial Sequence
  ENSG00000224514_0 (sequence is synthesized)
ggtgcgggccagtgcaggccaggcccggccggggcgaggcaggtggccaggtccgaggaccgcgtcgcacagcagctttcaggacctggagagaaatcgagatgaagaagggaagtcact

SEQ ID NO: 873656 - DNA, 120 bp, Artificial Sequence
  ENSG00000224514_1 (sequence is synthesized)
tgcttcatggccagggaagggctccagcaagacatgggctcctgaaagtgacagtgtgtgaaggcccggagaggcacaggacctgcccagctgaatggagcttcatggtcccctcgccct

SEQ ID NO: 873657 - DNA, 120 bp, Artificial Sequence
  ENSG00000224514_2 (sequence is synthesized)
ccttggattgcagcaaggaaagaggtgtgtcttccgcagaaaaatgtgcatgttcttttagatgtgtggcctccgagcaaggtatttagcctgcctctatgtgctcacctggaaaatggg

SEQ ID NO: 873658 - DNA, 120 bp, Artificial Sequence
  ENSG00000224514_3 (sequence is synthesized)
tttagcctgcctctatgtgctcacctggaaaatggggtgatgaagaagatgatgatgataatgggaactccctcttggagctgctgtgcagatgaattttccttctaacagtcaggcccc

SEQ ID NO: 873659 - DNA, 120 bp, Artificial Sequence
  ENSG00000224514_4 (sequence is synthesized)
caaagattgctgcctgttccttcctttggaagctttgtcccagggaggcacccaccagatgccagctggagctcttctgtataaggaaaagtgggcaagttttgagttcaacgtgaggcc

SEQ ID NO: 873660 - DNA, 120 bp, Artificial Sequence
  ENSG00000224514_5 (sequence is synthesized)
tcaaggatgtgtgcaacccatggtacttgaatttacttattgactgttttttggaaatccttatttcccaaaactcgtggaaggagctgacttctggcaggaaacgtggaactggcagcg

SEQ ID NO: 873661 - DNA, 120 bp, Artificial Sequence
  ENSG00000224514_6 (sequence is synthesized)
tgtcgtgcaagcatctgcaatcccagtcctgagctggacttctcagagaggctgggcattatttatggagatgtcggagtgacagggggaacttctggccaggaactgccggtggtgtca

SEQ ID NO: 873662 - DNA, 120 bp, Artificial Sequence
  ENSG00000224514_7 (sequence is synthesized)
catccttaacctggctgacatcggaacaccctggggggagcatttctccaggaaaggatggtgggtcaggagcccgcatggtgtcttttcaaagcaataataaagatatcagaagggcaa

SEQ ID NO: 873663 - DNA, 120 bp, Artificial Sequence
  ENSG00000224514_8 (sequence is synthesized)
actgaccggtgcgaggcggtgctgaccggtgcgggccggtgcgggccagtgcaggccaggcccggccggggcgaggcaggtggccaggtccgaggaccgcgtcgcacagcagctttcagg

SEQ ID NO: 873664 - DNA, 120 bp, Artificial Sequence
  ENSG00000224515_0 (sequence is synthesized)
aaattatcacaggagcatgaaccctattgtgaagtacgcatgcaagggatctaggttgcattctccttatgagaatctaatgcctgatgacctggcattgtctcccatcaccctagatgg

SEQ ID NO: 873665 - DNA, 120 bp, Artificial Sequence
  ENSG00000224515_1 (sequence is synthesized)
tgccaggccagcctacctttctcacagccttcttgactacctgtcttggatgagctcactgaaagcccacataccttcattctagcatttcctcagtctggttgagctgctttggaggta

SEQ ID NO: 873666 - DNA, 120 bp, Artificial Sequence
  ENSG00000224515_2 (sequence is synthesized)
atacaggttgtaggacttccctccactcctgctcaggaccgttttcagcaggctaatcagacagcagttggcactgagtacaactggagaaatgttatcagcactgaagactgctccagc

SEQ ID NO: 873667 - DNA, 120 bp, Artificial Sequence
  ENSG00000224516_0 (sequence is synthesized)
gcctaccgaagatggagctccctcgcagggggtagcctccgaaggagaagacgtgggagtggtcggcagtgacgaggctcagcgtgtcctcctcgctggtgagctggcccgccctctcaa

SEQ ID NO: 873668 - DNA, 120 bp, Artificial Sequence
  ENSG00000224516_1 (sequence is synthesized)
gcggaggcaggcacgtcggcgtccgagtaccagttgcggttcaccgtgtgggcgtaggtgccggctggcgaggcgtgctgcactcgtgtggtggttaccactcccactgacttccctaag

SEQ ID NO: 873669 - DNA, 120 bp, Artificial Sequence
  ENSG00000224516_2 (sequence is synthesized)
caggcggtgtagggctccaggcaggcggcgaaggccatgacgtgcgctatgaaggtctgctcctgcacgccgtgaaccaggtgcgcctgcgggccgcgcgcgaacaccgccacgtcctcg

SEQ ID NO: 873670 - DNA, 120 bp, Artificial Sequence
  ENSG00000224516_3 (sequence is synthesized)
tcagaggtcagtatatgtgaccaacgtctgtgacctggccgtgacccagcagcgggccccagctcacctgctttcttggcccgattcatcacggagatgacctcgttgccgcgtgtcgtg

SEQ ID NO: 873671 - DNA, 120 bp, Artificial Sequence
  ENSG00000224517_0 (sequence is synthesized)
agaaagaacgcagccctactgacaccttggttttggcctggtgagaccaactttggacttttcacttccaaaactgtttaaagaaaaaagtctacagttccagttagtctacttttgtaa

SEQ ID NO: 873672 - DNA, 120 bp, Artificial Sequence
  ENSG00000224517_1 (sequence is synthesized)
gctggggggtcccagtcatcggtagcatggaaaacgaagagtgctctggacagtgggtggagaagattcaagtacatcttccttgctgacaatatgctctcctatcttttgtaagagtac

SEQ ID NO: 873673 - DNA, 120 bp, Artificial Sequence
  ENSG00000224517_2 (sequence is synthesized)
acaatttaaatttctaaaaattcattacaatacaaagcaaaacaatccctcgtagatttataatcaaactaatatgccacttagaaaagatttgaaataaatgcaaatacctaggtacaa

SEQ ID NO: 873674 - DNA, 120 bp, Artificial Sequence
  ENSG00000224517_3 (sequence is synthesized)
ttccaatcctgaaagactacaggaaaaactagcccaagtgactgagctggggggtcccagtcatcggtagcatgggtattttgctttggaatattatcaaatagcagggggaccagcaca

SEQ ID NO: 873675 - DNA, 120 bp, Artificial Sequence
  ENSG00000224517_4 (sequence is synthesized)
gtggacttagtgtcaagtctaggatttgattcttagctaacaaaacaagtttcctctctgagttgtgacgattaaatgcaataaaatggaaaagtgcccagcagtgatgggctttcagga

SEQ ID NO: 873676 - DNA, 120 bp, Artificial Sequence
  ENSG00000287193_0 (sequence is synthesized)
gggatccgggcggagccgcaggaggaggcgggtggttcctgctaaagaagccagttttcttgaaaaaaagaaacgtgcggggaaacgtatccgacagcaaagaacttaccaaggactatg

SEQ ID NO: 873677 - DNA, 120 bp, Artificial Sequence
  ENSG00000287193_1 (sequence is synthesized)
aacgtcttgctaacatagaagcgaaactgaagcggttctcattgccaaaaaagaagatttgagcatgaataagaacaggaattcgagtgaatttaaaatcctcagatgctccagtctgta

SEQ ID NO: 873678 - DNA, 120 bp, Artificial Sequence
  ENSG00000287193_2 (sequence is synthesized)
attcataataatgtattttttaactctgttcacctttggaggatgctggtaagctcaccccagtttgtggcctggttaataaaaggaaagcatcaagcatttgtcctgcctttatgaaat

SEQ ID NO: 873679 - DNA, 120 bp, Artificial Sequence
  ENSG00000287193_3 (sequence is synthesized)
ttacagcagagtaaccaaatactgcatgagaagaatttctcattatagaagttttcccgctaataaatgaagaagaaacagtaggattaaaacatcaccctatgaattaacggacctagg

SEQ ID NO: 873680 - DNA, 120 bp, Artificial Sequence
  ENSG00000287193_4 (sequence is synthesized)
caatgtcatcaatgactgctaattaacatcgcaaaaaggtcagttagatatcagaagtacacaacactatgaagtagtcttgccagaaaaaatttaacctgaatgtgaacaagcttctag

SEQ ID NO: 873681 - DNA, 120 bp, Artificial Sequence
  ENSG00000287193_5 (sequence is synthesized)
ggccaagagcattcccaagttatcctgaaaaactagctcaggcagtgatgggaagggggagacagacatacctcactccctcctcccttttggaattcaggcacacagctgaccagcatt

SEQ ID NO: 873682 - DNA, 89 bp, Artificial Sequence
  ENSG00000287193_6 (sequence is synthesized)
aaataacaaaacaaaacaaaaacagatcttgaagttgacaaagtagactctgtagcaatgacgccaaattccagcctgactctggtata

SEQ ID NO: 873683 - DNA, 120 bp, Artificial Sequence
  ENSG00000287193_7 (sequence is synthesized)
ctgtagcaatgacgccaaattccagcctgactctggtataggactacatgacagataggaagccttggaagaaatggaagtactttaccccacattaaatttcttcgacttattttgaaa

SEQ ID NO: 873684 - DNA, 120 bp, Artificial Sequence
  ENSG00000287192_0 (sequence is synthesized)
tcctcggcaaagatcggcgagggaggcttcgctggcttacagcggcgcgggtgcggggcggagggaaagaccaaaggcgaggtctggcttgcgagagtcctcccctgcggcccagcctcg

SEQ ID NO: 873685 - DNA, 120 bp, Artificial Sequence
  ENSG00000287192_1 (sequence is synthesized)
aagaacaatggtaatggccccggagtcggctgttcgctgagccccgctcgcaggggcggagaggcagcggcgaggcgaaaaacccctggagaaggaaccgcttaaccggaatggaacccg

SEQ ID NO: 873686 - DNA, 120 bp, Artificial Sequence
  ENSG00000287192_2 (sequence is synthesized)
ttggatagggaccccccgcggggacttcgcgtaaccaatgccacccgccggcctgtaacccacgcatttcacacccattgtgtcgacacttcctcagacgctctgagaggtgaatgagga

SEQ ID NO: 873687 - DNA, 120 bp, Artificial Sequence
  ENSG00000287192_3 (sequence is synthesized)
gccccatttccagaggacacagaggaaaagtgactagcccaaggtcaccctatcgggaaaggacagagcctaaatctaaatgccaccttcatctggatgaaccttgccgcctcccatatt

SEQ ID NO: 873688 - DNA, 120 bp, Artificial Sequence
  ENSG00000287192_4 (sequence is synthesized)
aatcagcagccttaactgagctctgtggatggattcaaacctaggccttccccaggactggagcgccctttgaccagcagccagtgatcagctccccaatgtcctatgctgggtgacatt

SEQ ID NO: 873689 - DNA, 120 bp, Artificial Sequence
  ENSG00000287192_5 (sequence is synthesized)
tgttgataaggattttcttcccagctagacctgccaagatcactcccacccccaaccccgcacaccccactccttagcaggtgccttgtcctaagcacagtggcattgagtgggaaagaa

SEQ ID NO: 873690 - DNA, 120 bp, Artificial Sequence
  ENSG00000287192_6 (sequence is synthesized)
tgccattgcacactagcctgggcgcgacagagtgaggcttcgtctcaaaaaaaaaaaaaaaatggcaggcgtcatggagcaatcaagttttaatataatatttaccagacatggcactaa

SEQ ID NO: 873691 - DNA, 120 bp, Artificial Sequence
  ENSG00000287191_0 (sequence is synthesized)
gtgctagcaaagatgtccgggaaggacagaaaagaatgtaatgtgcaattaaaacaagggagagtgattaatgtaggcaaaaattaatcacaagggcagtgtcaaagtttggtgggacaa

SEQ ID NO: 873692 - DNA, 120 bp, Artificial Sequence
  ENSG00000287191_1 (sequence is synthesized)
ctgcgtgttcagaagacacctgaaaaaagtgaaatgaagaaccaaggatcatctgagcaaagactcaaggaccatttgaacaaagacatccacatctataccacagatgacttggcatct

SEQ ID NO: 873693 - DNA, 120 bp, Artificial Sequence
  ENSG00000287191_2 (sequence is synthesized)
atggaggagtggaggtgagcaccactctaccatgtagaggaagcagccactgtggaggctgggcttgtggagattccttctggatgccctcagatctgtcattaatggggacaaagcaga

SEQ ID NO: 873694 - DNA, 120 bp, Artificial Sequence
  ENSG00000287191_3 (sequence is synthesized)
cagctccaccatccagggtactgttcttgccactgcatctagaaagaagaggaatgcaatcttgcagttagaaaaggctgtctcgctgaatatttattctcattcctctacccaaaacta

SEQ ID NO: 873695 - DNA, 120 bp, Artificial Sequence
  ENSG00000287191_4 (sequence is synthesized)
atgaaaatgtgaagtctgagtggtgtctgaacctaatattttcgtgtccgaggcacacaaggttgagctgccacttctagccatctgaaccacccagtgtgagcatatatgtggctggga

SEQ ID NO: 873696 - DNA, 120 bp, Artificial Sequence
  ENSG00000287191_5 (sequence is synthesized)
gggtgggtggtgatggtggtggtagggaggtgggggagacttctaatgagaggcagtagagagtagggtctaagagtaggtactctagagtcacactgatttcggttcaaaccccaggtc

SEQ ID NO: 873697 - DNA, 120 bp, Artificial Sequence
  ENSG00000287190_0 (sequence is synthesized)
atacttacctggcaggagagataccctggtcacgaaggtggtttttccagagcgagtcttatccattgcactccggatctgctgacccctgcagtttccccaaatgtgggaaacttgact

SEQ ID NO: 873698 - DNA, 120 bp, Artificial Sequence
  ENSG00000287190_1 (sequence is synthesized)
gtataatttgtggcagtggtagactgcattcgcgctttcccctgtatttttgtcgttttaaaaataggttttgtttgctgcagaaacgcatactgggcgtcagcgtaagctgagaatcag

SEQ ID NO: 873699 - DNA, 120 bp, Artificial Sequence
  ENSG00000287190_2 (sequence is synthesized)
gtctttgttcccatctgtaacttcactgaaactaaaaatttgggacatcgtggttctcacgtttgtaatcccagcaatctatgaggtacgtcgataggttatgtttatgttaatatcgct

SEQ ID NO: 873700 - DNA, 120 bp, Artificial Sequence
  ENSG00000287190_3 (sequence is synthesized)
cgacctcaggcgtgtgtgggcaaatatagtgaacccgtctctactaatctcttatctttttttgttgttgttctatagaaataaaactaagcttttcttttccctatgggattaacagca

SEQ ID NO: 873701 - DNA, 120 bp, Artificial Sequence
  ENSG00000287190_4 (sequence is synthesized)
aacagtccgctggagtgtatggcgcgatctcgccttactgcaacctttgcctcctgcgttcaagctattctccttcctcaaccagagaatactcagcctcccgagtaactggcattacag

SEQ ID NO: 873702 - DNA, 89 bp, Artificial Sequence
  ENSG00000287190_5 (sequence is synthesized)
accagagaatactcagcctcccgagtaactggcattacaggctcaggcaaccaaaaaattaggtatggtttcaccgggccgggcgcact

SEQ ID NO: 873703 - DNA, 120 bp, Artificial Sequence
  ENSG00000287190_6 (sequence is synthesized)
aaaaaaaaaaagagtgacagggtttcaccatgttggccaccctggtcttgaactcctgacctcaagttttccgcctgcctcgcggcctcccaaaatgttgggattacaggcctgagccac

SEQ ID NO: 873704 - DNA, 120 bp, Artificial Sequence
  ENSG00000287190_7 (sequence is synthesized)
cgcacctggcctgtttacagactttacagacacattttgtttacaagctttacaggtacagttcaattgcgattagtgtatattatgtttggcccaagacaagtgtcttttttttttttc

SEQ ID NO: 873705 - DNA, 120 bp, Artificial Sequence
  ENSG00000287190_8 (sequence is synthesized)
cagtgtggcccaaggaagccaaaatttagacaaccctgctctagagggtttgattcatggttccactgggttatgcttattgcctataattccatttgatattttccaaatttgattttt

SEQ ID NO: 873706 - DNA, 120 bp, Artificial Sequence
  ENSG00000287190_9 (sequence is synthesized)
taaaaagcgttttcctgaagcaccctaaagctttcctaataatatgagaacttaaaccagattggatgtgacaaaaccctgctggaatcctgcaacttctaaccttaatgttagatcaag

SEQ ID NO: 873707 - DNA, 120 bp, Artificial Sequence
  ENSG00000287190_10 (sequence is synthesized)
aagcaaaacacccaccagtccaagggtcagggaagctgaagatcatgcctgagctgtaacaacgcccttcccagtatacaaaagagtgtaacagccactcgaattctatcttccaagtgt

SEQ ID NO: 873708 - DNA, 120 bp, Artificial Sequence
  ENSG00000287190_11 (sequence is synthesized)
ctcctgttgcccaggctaacctagagctatctaaagatggcaaatctgggaaatgtgcattcagcttggcaaaactgatacattacaaatccaccacagtccacttcttctcaaagtggc

SEQ ID NO: 873709 - DNA, 120 bp, Artificial Sequence
  ENSG00000287190_12 (sequence is synthesized)
atcaatgtacatcttcctcctcttctttttttcctcctcttcctcttcttttgcttcttcctcctcctttttcctccttgtaaaatcatacttaaggttcaaataaagacaatatgaaaa

SEQ ID NO: 873710 - DNA, 120 bp, Artificial Sequence
  ENSG00000287196_0 (sequence is synthesized)
catacacacatcttttcatccatcactcctccactatctgtgtatctactcatccaccatctactcttacacttatccatccatgcatggattcatccatctgtccatgttacaaacatt

SEQ ID NO: 873711 - DNA, 120 bp, Artificial Sequence
  ENSG00000287196_1 (sequence is synthesized)
tattgagcaatacaccagacatcatactaggctctgggagtagactgatgagccctcagggtgcttccagtctactggggagacagaaaggaaaataaacaagtacggggtggtaagttc

SEQ ID NO: 873712 - DNA, 120 bp, Artificial Sequence
  ENSG00000287196_2 (sequence is synthesized)
gagatgcacgaggaacaagcaaaggcaccttgctcagacctgggcacctaggaaggcttcccacaaaagctgcatctgaaggatgaatatgaggtggacaggcaaaggaatggggacagg

SEQ ID NO: 873713 - DNA, 120 bp, Artificial Sequence
  ENSG00000287196_3 (sequence is synthesized)
caaacaacatgtgcggcaaagagaccagcccatgcaaagacacagagctgcaagataaacagctcacctggaatgcagcatgtgaagcgaggagagggcttgggacacctgctgtcctgc

SEQ ID NO: 873714 - DNA, 120 bp, Artificial Sequence
  ENSG00000287195_0 (sequence is synthesized)
aacgctactgtgaatccccagcatggccacagagctggaaccagggaatcagataagcaagacaaggagagccctcttctatccctcccctctgcaaagtctccatctgttaaaacccca

SEQ ID NO: 873715 - DNA, 120 bp, Artificial Sequence
  ENSG00000287195_1 (sequence is synthesized)
ctcggggtattgcataaccagctcgcagaatcagcagcacgctcctgtttgctcattcatctgttaattcattcactgagtaaacactgattaaaaacctactatattggacatccttgg

SEQ ID NO: 873716 - DNA, 120 bp, Artificial Sequence
  ENSG00000287195_2 (sequence is synthesized)
cttttgcctacccaccattcacaaacggtacccgcatttccctggaaacctgcaatctttccctcattctcagtctctgtacctgagcaggtgcaagctgcacccaatctccctcagggg

SEQ ID NO: 873717 - DNA, 120 bp, Artificial Sequence
  ENSG00000287195_3 (sequence is synthesized)
gagggcatttgatccaagatggccaatcagagcgtcgcatttgcctgccacagcgattggttcagggctgtgcatgttacccagaaaagaccaatcagaaagacagttggactcagttct

SEQ ID NO: 873718 - DNA, 120 bp, Artificial Sequence
  ENSG00000287195_4 (sequence is synthesized)
aagacttgttgaactactggaacagtggcctttttttacctcctgctagaaccgctgacaaccattttggaccacaatccacaagaaaagggaggcagcgttaaagatggtgaaaaactg

SEQ ID NO: 873719 - DNA, 120 bp, Artificial Sequence
  ENSG00000287195_5 (sequence is synthesized)
tgtaagccttggcaacactttaagccttggatcctccaggccttatgtttcactcctagattcttcaattacataaaccaacaaatcccctttctgcggaagccagttcgaggcgagatt

SEQ ID NO: 873720 - DNA, 120 bp, Artificial Sequence
  ENSG00000287195_6 (sequence is synthesized)
ctgtttcaaggtcgacagaatcctgactaatgaaatccgaagtgctgtggtgtatgctgcatgctggctatacacagatgaagcaaggtgatccataccatccttccaggcactcacagg

SEQ ID NO: 873721 - DNA, 120 bp, Artificial Sequence
  ENSG00000287195_7 (sequence is synthesized)
ctgatgtggagacagccacaaacaattacagctatttaaagccaataagataactgctttaattaaatactacacagtgcaatatgagcacagcaaagcacctgggtccaggaaggcctc

SEQ ID NO: 873722 - DNA, 120 bp, Artificial Sequence
  ENSG00000287195_8 (sequence is synthesized)
ccattacatcccacgttgcacagaagggcgatgatacttaaagctcttaacagctctctctgagcctacaaaatactgtctcaagagaccagcaaagtgctaaggtcaaataactctcac

SEQ ID NO: 873723 - DNA, 120 bp, Artificial Sequence
  ENSG00000287195_9 (sequence is synthesized)
ttgcaagtgtttcatctgaattgtgcagataatggaacgctcttaaatactacccaggtcagtttttgtgattttgattccatacgcttaaattttcattccatccttcttgaccatttg

SEQ ID NO: 873724 - DNA, 120 bp, Artificial Sequence
  ENSG00000287195_10 (sequence is synthesized)
gatttcttgtccatttgtgtgctgatcacatcacaacagcatcaaaacagccctttcaagatgaataacctacttactgaatttatttccagatgatcaagggaaggggaagagagaaag

SEQ ID NO: 873725 - DNA, 120 bp, Artificial Sequence
  ENSG00000287195_11 (sequence is synthesized)
tctctggttctataaaacatttcctgatgggttagaaatgtggctgattgcagaaaacaacaataacaacaataaaaagcacctctgggaacatctgttttgagaagaaaggcccctaaa

SEQ ID NO: 873726 - DNA, 120 bp, Artificial Sequence
  ENSG00000287195_12 (sequence is synthesized)
ggtcagtctttttaagtgaacagaagctggtgtctcttagtcctttgatgatgcatactcaacgggaaagttgtaaagataaaataattcaggaaacgaggacatcgcaggacaaattct

SEQ ID NO: 873727 - DNA, 120 bp, Artificial Sequence
  ENSG00000287195_13 (sequence is synthesized)
ccttgcctttattgtttctaaacacatcagcaattcatgtggtccagaaacacaagctacagctttccagaacaaagaatcttacagttggaaaaattagtactgactgaatacttccat

SEQ ID NO: 873728 - DNA, 120 bp, Artificial Sequence
  ENSG00000287195_14 (sequence is synthesized)
gtggactcaagagaggtgccagggactagtgtcaggagagacgaagttaagatgcctctcagataactcagatttctatgaagcagctgggttacccgtttccaaaacaccttgcaggcc

SEQ ID NO: 873729 - DNA, 120 bp, Artificial Sequence
  ENSG00000287195_15 (sequence is synthesized)
gtcatggaatttcccttcctctacctgcatgccacaggactttgcacaacaaaggtaccatccattttcttgaaaatgggattatcgggccaagcacagtggctcacacctgtaatccca

SEQ ID NO: 873730 - DNA, 120 bp, Artificial Sequence
  ENSG00000287199_0 (sequence is synthesized)
gaggtttattctgctgctgagctcctcttctgggagttttctgcttctgtgatggccaagagcaggcttccacttgggctccatctccaggaagttcacagagttttgggcctttggagt

SEQ ID NO: 873731 - DNA, 120 bp, Artificial Sequence
  ENSG00000287199_1 (sequence is synthesized)
attttgtaaaaaaactgcttgtcacctctttggagacactttgtgtgtccaaggttaagtcatatccttggttaaggtacttgggaggatactttttgttaaagcagttcaaaagccaga

SEQ ID NO: 873732 - DNA, 120 bp, Artificial Sequence
  ENSG00000287199_2 (sequence is synthesized)
aatattagaaatatgaactgttctatctaaaatctagtaataagaaatttgaaaggatttttaagagctctatcctcaaaagtcgacaataaaaactgacatttagattatatatcaata

SEQ ID NO: 873733 - DNA, 120 bp, Artificial Sequence
  ENSG00000235343_0 (sequence is synthesized)
ccgccactgcgactgccacagaacccccgccacgtgtcgccgaacctgtttaaaggggccacagccggagtttgaagagcaaagcaggagtcggcctgggcaatgcgcatgcgggaggca

SEQ ID NO: 873734 - DNA, 120 bp, Artificial Sequence
  ENSG00000235343_1 (sequence is synthesized)
cgagcccattctcccgtgacggtgactccaacggttggctgaggacgattccctgagccttgacaaagcaggagccctccgtggcagtgcgtcggggtcgaggctccagcctgaccaatc

SEQ ID NO: 873735 - DNA, 120 bp, Artificial Sequence
  ENSG00000235343_2 (sequence is synthesized)
cagggggtcgacaaaacagattcgggacaccatgctacacgcagggcctaccaggatgcagaaacagcagacggagtccggggaaagcagtgcggcatcccagcctcaggcctgcccgta

SEQ ID NO: 873736 - DNA, 120 bp, Artificial Sequence
  ENSG00000235343_3 (sequence is synthesized)
cggtgttcgggaggggaggagaccaatgtgaaaggagatggttatatctcctcgcggctcttctctgagaaatgaagccaggatacgaaacaatcttcaagaagaagctgaaaaccggat

SEQ ID NO: 873737 - DNA, 120 bp, Artificial Sequence
  ENSG00000235343_4 (sequence is synthesized)
atgacaaggatgtccccagaacacagcaggcatcctgaagctctgcctcctgaagctccccctccctcggtggaagtcggctcagggaggtcctgaggacaggactcctgggggtttggc

SEQ ID NO: 873738 - DNA, 120 bp, Artificial Sequence
  ENSG00000235343_5 (sequence is synthesized)
aaatcatgaaattgcacaatcttttgaatatggaattgggaggcctttcagttcattcagtagaaaactggaacatttttgaagggtgatctgctcgacacctttcaaagagtacaaaac

SEQ ID NO: 873739 - DNA, 120 bp, Artificial Sequence
  ENSG00000235343_6 (sequence is synthesized)
cttgtgaagtagcagatgcaatgattaccaatgtaccttataaaatgactttcagagtttgagattaaattggcttttctgaaatatgtaagtctctggaaaaactcaacatttctaatc

SEQ ID NO: 873740 - DNA, 120 bp, Artificial Sequence
  ENSG00000235343_7 (sequence is synthesized)
ttgctttggaaagcctttaagtatgtaaaaatcaatttcttatatcttctctgaaataaacatggaatatcctaaggttttattcatgtttcatgaatttcacagcattcatcatatttt

SEQ ID NO: 873741 - DNA, 120 bp, Artificial Sequence
  ENSG00000235343_8 (sequence is synthesized)
caagttatttttgatgctttgcattgtattaaaatctctcttggaatgagaggcctgaaaaacaatcataatatactgttgttgtctaacaatatatcaagtttttaatgactcttacaa

SEQ ID NO: 873742 - DNA, 120 bp, Artificial Sequence
  ENSG00000235343_9 (sequence is synthesized)
acaatgcaatatttttatcattcttgtagtttatccacatgtatttaatattactagcagaaatttagattttagtaaattaattctgatctttgtaaaataaaatgctttagttttcaa

SEQ ID NO: 873743 - DNA, 120 bp, Artificial Sequence
  ENSG00000235343_10 (sequence is synthesized)
atctattaattctttagtctatgaatccatctaacaattattattgaacaagttctaggagataagtactatacagttgctaagaattctgaaagatcatcttatacctattatacagaa

SEQ ID NO: 873744 - DNA, 120 bp, Artificial Sequence
  ENSG00000235343_11 (sequence is synthesized)
gcagagcgagacaaatgaaccaaaacttacataacactgtgacatgcgtttcaagtttaaacatcttaaaaaatacatttcataaaactaaaataaaacttgatacttgtttctactaca

SEQ ID NO: 873745 - DNA, 120 bp, Artificial Sequence
  ENSG00000275764_0 (sequence is synthesized)
tagagacagtgggtattaacaattgcatatatcacaataaatgtatgtttaatctcaggaatgcatggcagttctgtctttagaaaatgtattttttgtatttttatcaatttagagatg

SEQ ID NO: 873746 - DNA, 120 bp, Artificial Sequence
  ENSG00000275764_1 (sequence is synthesized)
cccttttaaaaaaacatattacaaattggaatattcaaagggcagctgttttattttcttccttgctgaaacataaaataatgacgtgttttaaaatttatagaatctttgatttgatca

SEQ ID NO: 873747 - DNA, 120 bp, Artificial Sequence
  ENSG00000275764_2 (sequence is synthesized)
aatatggtaatgtaatttgccattctaacagatcaaaatcagaatcagtatgatcatctatcttgatttgcgagaagcatttgataatattcaaaatccatttatgaaaaaactcttggc

SEQ ID NO: 873748 - DNA, 120 bp, Artificial Sequence
  ENSG00000275764_3 (sequence is synthesized)
tcttactgaaagatcaaacttgttccctttcagcttgggaataagacagagcttcctattaagaccaccacatctactcatctttaagctggtgattctcaccaacacatctaagcatga

SEQ ID NO: 873749 - DNA, 120 bp, Artificial Sequence
  ENSG00000275764_4 (sequence is synthesized)
aagaaataaaaattataagataaaaaggaaagaaaactctcagtacttaaagatgatataattacatagaaaatcaagaagattccatggataggcttcccaaaaaacaatatgtaacat

SEQ ID NO: 873750 - DNA, 120 bp, Artificial Sequence
  ENSG00000275764_5 (sequence is synthesized)
accagcaacaaatggtaagaaaaacacgttgttttttttttaaagtacattttcagtgacattaaataataaggattcaggaatacaacgaatataacaaaaatgtaagatatctaggga

SEQ ID NO: 873751 - DNA, 120 bp, Artificial Sequence
  ENSG00000275764_6 (sequence is synthesized)
tgcgtataacaaaaaaattataaagcttcatttaaaacatttttaaacaaaataagtagaaagtaataccatctttatggaacagagtcagtattataaatgtgtcagttttcttcaact

SEQ ID NO: 873752 - DNA, 120 bp, Artificial Sequence
  ENSG00000275764_7 (sequence is synthesized)
ggtccatagacaacacaattttaactaagattccaattgggatttctgtggaacttgatgagttagggccaaaagtaatcaagatattcatgaggaaggataacagaatggcaaaacttg

SEQ ID NO: 873753 - DNA, 120 bp, Artificial Sequence
  ENSG00000275764_8 (sequence is synthesized)
ctttaataatttgtgcagggatagacaaatactgtacaccagtctctcaatagggagatcaaaaccaaattcacacagacatgaaaagttgatttatgacagatgatgttgcagtccctg

SEQ ID NO: 873754 - DNA, 120 bp, Artificial Sequence
  ENSG00000275764_9 (sequence is synthesized)
gggaaagaatggaaatggtgctagaataattggtttctatatgtatttctatatatttatatgccattacattaaagtcaatgcctatggagtttgggaggagtgatcaaaatgttctgg

SEQ ID NO: 873755 - DNA, 120 bp, Artificial Sequence
  ENSG00000275764_10 (sequence is synthesized)
aattagatgtgatgtttgcacaactctgtgaatgtactaagaaccactgaattgtatatttttaaagcatggtatgtgaataatacctcaataaagctgttataaaaaatattttaaaaa

SEQ ID NO: 873756 - DNA, 120 bp, Artificial Sequence
  ENSG00000275763_0 (sequence is synthesized)
cacactgaggggacagtctggaggcttgcagtgactcagacacagccaattcctcccctaatagcactgaatcacggttccagcggccagtggtcgcccctcgtcaaggtctaaggctgc

SEQ ID NO: 873757 - DNA, 120 bp, Artificial Sequence
  ENSG00000275763_1 (sequence is synthesized)
tgcagccccggctcccggaggccgtttccgcgcgcacacgcgcatccatacgtacagacgtgctcgggatgcgggtcccgccggcgggtacctgggcactgcgccccatctggactgaaa

SEQ ID NO: 873758 - DNA, 120 bp, Artificial Sequence
  ENSG00000275763_2 (sequence is synthesized)
tggggacaccccttcgggggtcccaggctcctggccgtattgttctccttctcctcgtgataactccgcagtggaggtggattccgtccaagacgcccaacgtggctccgcgtagcaatc

SEQ ID NO: 873759 - DNA, 120 bp, Artificial Sequence
  ENSG00000275763_3 (sequence is synthesized)
agcgctgcaatcctggcggttacctcagcggcggcgtctctctctgcgcctcacactcgcagcccgcggccctccccaacttagggcgtttacaaaagaaactactccagacgcgctgca

SEQ ID NO: 873760 - DNA, 120 bp, Artificial Sequence
  ENSG00000275763_4 (sequence is synthesized)
aagggaggcgcatgtgcccgaaagctggcgatcagacggggggggcattctgcatgtgtgatgtttctgggggcggtggggagtgtgtgtcggggtcggggggcgggggggagtcaggca

SEQ ID NO: 873761 - DNA, 120 bp, Artificial Sequence
  ENSG00000275763_5 (sequence is synthesized)
gaaagacagggacaacctccgctatgaaggatccgcgagtcctcaaatgtaagctccgtgtgactaacgacctgcactgatttggagagcgggcatgttaaaggtcacggacaattgttg

SEQ ID NO: 873762 - DNA, 120 bp, Artificial Sequence
  ENSG00000275763_6 (sequence is synthesized)
ctggcttcagcatgaatgcctaagtgggatgtattcttcagcaatcacgtttaagtctgattcaccgaaaagtattgacgtgcccaccattcatttcagtacactgtgaaaatgcacaaa

SEQ ID NO: 873763 - DNA, 120 bp, Artificial Sequence
  ENSG00000275763_7 (sequence is synthesized)
gaaagtatccccaaattcagttaattacaaagccgtaaatgtccttgtatacacatattattacatacatgtaggtaacaacaaagattaaaatttgaagacactttaatagctttttgg

SEQ ID NO: 873764 - DNA, 120 bp, Artificial Sequence
  ENSG00000275763_8 (sequence is synthesized)
cgttcatctgcattcttgggtctattttaaagtacaaacttgcgctaacaatttccatgtgttgaaaatggacaaggtagatcattgaatggtgatcaagacttccaaacccctccacat

SEQ ID NO: 873765 - DNA, 120 bp, Artificial Sequence
  ENSG00000275763_9 (sequence is synthesized)
aaaactgttcatgacttgcttcctttttctagccggtttagggccctgtcttaagtcacccacatgtgatttcactcagggcattgtctgtctacaataatattgtgcttttaaaccatt

SEQ ID NO: 873766 - DNA, 120 bp, Artificial Sequence
  ENSG00000275763_10 (sequence is synthesized)
tcctttcttacacgtttatctacagtgcatgcgaaatctgagagcgtaatttgatggatgggcaaagagttaagtcctggtgtctggtgtggcagacctagaaaatggcagctggagggc

SEQ ID NO: 873767 - DNA, 120 bp, Artificial Sequence
  ENSG00000275763_11 (sequence is synthesized)
cagcatcattttgttactgacaattgaaacgtgttcacattgattgtacacaagtcactggtggttgttcatttgtcaatgcactattcctagctcactccacacacacaaaaaaggtat

SEQ ID NO: 873768 - DNA, 120 bp, Artificial Sequence
  ENSG00000275763_12 (sequence is synthesized)
aaaaatcaaatgtttaatacaagtttccatactattcctgtaaccatatttagcattgccaacatttcaactgttttaatagcttcaaacacttaaagtaaccattagggattaagggca

SEQ ID NO: 873769 - DNA, 120 bp, Artificial Sequence
  ENSG00000275763_13 (sequence is synthesized)
ccgtttgcccctggaatggcccaggagagcttctcctattttgaaaggtttacgtaaattatagtatttggatggagcaaagtcagcagtattaatggttgaatattaatggttgatttt

SEQ ID NO: 873770 - DNA, 120 bp, Artificial Sequence
  ENSG00000275763_14 (sequence is synthesized)
ggctacttgttttattttagtgatatgtgatattttacacatgtatggggtacgtgtatttgttacaagcgtagaatgtgtaatgatcaagtcggggcacttagggtactcatcagctgg

SEQ ID NO: 873771 - DNA, 120 bp, Artificial Sequence
  ENSG00000275763_15 (sequence is synthesized)
ggtatttattgtttctatgcgttgggaacatttcaagttctgtcttctatctattttgaaatacacaatccattgttattaactgtagtcactgtagtctgctatcaaatattagaacta

SEQ ID NO: 873772 - DNA, 120 bp, Artificial Sequence
  ENSG00000275763_16 (sequence is synthesized)
ctccttctatctaactgtatgtttgtacccattcactaacttcattcccccccaccctctatttataattttataacagacaataattttggttaatgaaataaatgggggaaagaaagc

SEQ ID NO: 873773 - DNA, 120 bp, Artificial Sequence
  ENSG00000287229_0 (sequence is synthesized)
agtgagaggaaggctggagcagaggaagcgagaaccctccagagatgcggagctggacagttttgcagctgtgctggtacctggagcctgggcaggctgggagtcctgcttaaccccaca

SEQ ID NO: 873774 - DNA, 120 bp, Artificial Sequence
  ENSG00000287229_1 (sequence is synthesized)
gcctgcatgctggcaccaagtgggggtcaaacctagggccttctgctcccaggacataagtccccctcactattcggatctgctggaagaaccagaatcccagcagaagtgctgagtcat

SEQ ID NO: 873775 - DNA, 120 bp, Artificial Sequence
  ENSG00000287229_2 (sequence is synthesized)
gtgggggagtttgctggcataacttctccccacctgcacccaaggcattgttgagaaaagaaagtctgctgccacctaagagacccagaatcagaacaacggtgtgatctgaacaagatg

SEQ ID NO: 873776 - DNA, 120 bp, Artificial Sequence
  ENSG00000287229_3 (sequence is synthesized)
aaggggtggtttcatgataagaataaactacaagcttcttctgctccttctagaggcctgatatctccaaggtaactccagaaactccaagaggagatgaagagaatccaggaagtcacc

SEQ ID NO: 873777 - DNA, 120 bp, Artificial Sequence
  ENSG00000287229_4 (sequence is synthesized)
agctgtggtgaacattgtgcctaacttgacaccctttgttttgcccatttctgctgccactctaagaaaagccactatggggtgaactcctgggctcccagggctgctccacgtcaacac

SEQ ID NO: 873778 - DNA, 120 bp, Artificial Sequence
  ENSG00000287229_5 (sequence is synthesized)
caaatctagaaacctctggtactggatttaactacccctggggttgccatgaagatgaagttccaggatcctggaaggctgagggtggaaaccaagttagtgatgaggcaggaggagaag

SEQ ID NO: 873779 - DNA, 120 bp, Artificial Sequence
  ENSG00000287229_6 (sequence is synthesized)
atggggtgagctctcttgtaaaacagagcagggagctggatctactgtttcagagtgagcaggcgatggcaagcaggaagacacactgtgtcgccggctcacacccactcctgctgcctg

SEQ ID NO: 873780 - DNA, 120 bp, Artificial Sequence
  ENSG00000287229_7 (sequence is synthesized)
ctgcctgctgatggccacgcctcctgaaaaggctggattcagggtggccgctcaacttcgcagcacctgctatctccactctgtgcccactccttcgcctgccacgtctcctacagacac

SEQ ID NO: 873781 - DNA, 120 bp, Artificial Sequence
  ENSG00000287229_8 (sequence is synthesized)
tgaaagggccctatcaatttatttggttaagatccatttcaatgctcagaaccctaatgtggtctgcagagcatgaatccagatggcctcgggttgccttgcaccagtcctgtactgtgc

SEQ ID NO: 873782 - DNA, 120 bp, Artificial Sequence
  ENSG00000287229_9 (sequence is synthesized)
atcttccaaagacctggatcctcctacttagagaacaaggagggcaggtgatgagaataagggggctatcaatggaaaagcagagcaacaagatcttacaaatacagggagaatgtccac

SEQ ID NO: 873783 - DNA, 120 bp, Artificial Sequence
  ENSG00000287229_10 (sequence is synthesized)
tgaggttgcagggttttgcagggttttgcagggatcaagggaggggcacaggtgggtaggtagaaagttccagtccctaggaaattagaaaactctccatgtatcgtctccgcactaaca

SEQ ID NO: 873784 - DNA, 120 bp, Artificial Sequence
  ENSG00000287229_11 (sequence is synthesized)
gcaccaagcagcagcccatagccaccaacaccggcttctgcttactggtcaagaggaagacatcccagggagatttgagattcgtgacatagcagtttgtgactatcagggtgctgacct

SEQ ID NO: 873785 - DNA, 120 bp, Artificial Sequence
  ENSG00000287229_12 (sequence is synthesized)
ctctgagaagcacaaggtgacacacctcaacatccagacacatctacatggtttccagagggcatctctatgacaggggccctccaatggcagcaggaggcccctgcatatggttcagtg

SEQ ID NO: 873786 - DNA, 120 bp, Artificial Sequence
  ENSG00000287229_13 (sequence is synthesized)
aaccagattcctcttgcagggcacaaatggaatgtgaggcaatgccaccatttaggggccagcacagagactcagggaacaagaagcttagagcaaagcaagtcacatgatgttaaggct

SEQ ID NO: 873787 - DNA, 120 bp, Artificial Sequence
  ENSG00000287229_14 (sequence is synthesized)
atgtgactactacagcctgcacaaggagatgttgtcacgcactcctcaagactccagagaagccaaaataaagaaaagagcccctggcaaacaaaatgatgcctgaaacccacatactaa

SEQ ID NO: 873788 - DNA, 120 bp, Artificial Sequence
  ENSG00000287229_15 (sequence is synthesized)
gcttctgcctgtcacctatgggaaagcccttggccctgccccgtggcccagccactgaaagcctatttacttttattttagaaacaaactcgtttatttaatttctcatcccagaggagt

SEQ ID NO: 873789 - DNA, 120 bp, Artificial Sequence
  ENSG00000287229_16 (sequence is synthesized)
tgaaaagggcactgggattaatagtggcaggttcctaaaagacttccagaagtgacaactagcagccacgaattagaccagggatgcacacattttttctataaagggtcagacagtcaa

SEQ ID NO: 873790 - DNA, 120 bp, Artificial Sequence
  ENSG00000287229_17 (sequence is synthesized)
taattttagctttgcgactactctactctgctctgtagcgtgaaagcggcccctgatgatatgtaaatgagtgggtatggctaggtgccagtgaaactttatttaccaaaacggacgacg

SEQ ID NO: 873791 - DNA, 120 bp, Artificial Sequence
  ENSG00000287225_0 (sequence is synthesized)
cggggaggacggccgggccaggtgaagttcgcgcacttgggccttccgcgcccccatccaccgcagccagggcctggaaggctggggagggggcgggggcggcagacgcctcctaaggta

SEQ ID NO: 873792 - DNA, 120 bp, Artificial Sequence
  ENSG00000287225_1 (sequence is synthesized)
caacttgagctctcatctacataactgaaggctgcacccagggctgtaaagagtgaaaatgcattgccgaagcatgagcacctcctgcagttctcagtagacatttgggaagcgagtgaa

SEQ ID NO: 873793 - DNA, 120 bp, Artificial Sequence
  ENSG00000287225_2 (sequence is synthesized)
cacgcggggtcttggcagccctggagctggcctagatgcagcagctttctgataaagcgaaattgttccatcggcttgccatgctttgcttagccatccgcacttcactgttgggcgaaa

SEQ ID NO: 873794 - DNA, 120 bp, Artificial Sequence
  ENSG00000287225_3 (sequence is synthesized)
gaagattttaaagaacacccttagcagatgtcagagtttgggatttggggtccatgatacccaaataagattccacttgaagaaagtaacacgaattgctttcaacacatcaatcaacaa

SEQ ID NO: 873795 - DNA, 120 bp, Artificial Sequence
  ENSG00000287225_4 (sequence is synthesized)
tgccggtagctgccacagcaccaccccaagctctgccttcctgcagggaggtgattctgcagaagttggggctcctgacaactttggggtggccatgagggacgtacctcttgcctctgg

SEQ ID NO: 873796 - DNA, 120 bp, Artificial Sequence
  ENSG00000287225_5 (sequence is synthesized)
atgaagaggacattgataaatgggatgtctttttgctgaaactctaacttacagtaaaggggggaaactcacagaagcccagtggaagcttctggagccaggagctacactgactctctc

SEQ ID NO: 873797 - DNA, 120 bp, Artificial Sequence
  ENSG00000287225_6 (sequence is synthesized)
cgcagagggtgtggaggggtaggcggcagtcagcccccagcccagagtggagggcacctgggcacatgtgtgatcagagcccacatggagggaggccagggtccagcttcccttcactct

SEQ ID NO: 873798 - DNA, 120 bp, Artificial Sequence
  ENSG00000287225_7 (sequence is synthesized)
gggaacatgggaggccctgtccccaggccatggcacacagagggaggagcaggagctctggcagcctcagaggtgtgtgccaggccgcagcctattggaaattcctcaggagtgcatggc

SEQ ID NO: 873799 - DNA, 120 bp, Artificial Sequence
  ENSG00000287225_8 (sequence is synthesized)
ctggggtcccccagcctgcgggaggcagagggggcgaggccaggtcccccggcctgtgggaggcagagggggcgaggccacgtccaccagtccgaagcctgtcctgcccagcttgctgtg

SEQ ID NO: 873800 - DNA, 120 bp, Artificial Sequence
  ENSG00000287225_9 (sequence is synthesized)
tgactctggcctcggggggaacattatctgaaatgtacatagtggaatccaggcagtgttcaccccttccctctgtgccctccgtggtcttctgtgacctgggatttgttggtcattggc

SEQ ID NO: 873801 - DNA, 120 bp, Artificial Sequence
  ENSG00000287225_10 (sequence is synthesized)
agaaacagaagatgcattattattactgtaaaaggtaaagttgtcccctaactggctcaactgtccgaagacccccctgctttttctgcttttccttgtgactcagcctggtctttcttc

SEQ ID NO: 873802 - DNA, 120 bp, Artificial Sequence
  ENSG00000287225_11 (sequence is synthesized)
ttccagggtggcatcccactgactcctacgcagccccaccctggttccctcactcccaggttcctggtccctcagggtcctagggctgagtcctccatagcccccacacacagcccagag

SEQ ID NO: 873803 - DNA, 120 bp, Artificial Sequence
  ENSG00000287225_12 (sequence is synthesized)
ctgggactgacccacggcataggacaaactcctccaggcctctgagagaactcctgggctttcatctacatgattcagaaagaatcttttttctctttcaaatgttaatgtttttaattt

SEQ ID NO: 873804 - DNA, 120 bp, Artificial Sequence
  ENSG00000287225_13 (sequence is synthesized)
ccttttttttttcatttttcattataactgctaagatttttctaattggcatgccaactgcttgcagacttgacctgtttcttgcaaaaaaagaaaatcgcttaatcattaaatacaatt

SEQ ID NO: 873805 - DNA, 120 bp, Artificial Sequence
  ENSG00000287225_14 (sequence is synthesized)
attacttcattcttctatctcttcagtctaccaaactattatatactcttgatgattgtcattttcgtcaaaagaaaactgtatccagaatcccataacacttacaaattaagtgtctta

SEQ ID NO: 873806 - DNA, 120 bp, Artificial Sequence
  ENSG00000287225_15 (sequence is synthesized)
atttttcaagttcttttggggcttgccatatgagtgtattattcttgcatattgcacattcattttctattatttttaatacataattctacaaaataagcattcttcatgatatatatt

SEQ ID NO: 873807 - DNA, 80 bp, Artificial Sequence
  ENSG00000287225_16 (sequence is synthesized)
cagccgcccgccgacccgggcctggcagaggggacgcggcgcccaagccgctcctccggatggcgacagagacggcctga

SEQ ID NO: 873808 - DNA, 120 bp, Artificial Sequence
  ENSG00000287225_17 (sequence is synthesized)
ctgacgcgcccgcagcctgggccccccacggggaggacggccgggccaggtgaagttcgcgcacttgggccttccgcgcccccatccaccgcagccagggcctggaaggctggggagggg

SEQ ID NO: 873809 - DNA, 120 bp, Artificial Sequence
  ENSG00000287225_18 (sequence is synthesized)
gggcggcagacgcctcctaagctggacacctgtcgttggatttagggcccaactgaagagtccaggatgacaccatcttgagatctttaacttaatgacaaaacctgaagaccttttcat

SEQ ID NO: 873810 - DNA, 120 bp, Artificial Sequence
  ENSG00000287225_19 (sequence is synthesized)
cggcactgccaggcacaggcacgcactttccctcagtcctctgccccacgatcactctactcgggcacctctgccactgcctggtccttgctgagccatctcctggttcatctccctgga

SEQ ID NO: 873811 - DNA, 120 bp, Artificial Sequence
  ENSG00000287224_0 (sequence is synthesized)
aggaattcacagagccagagagacactgatggaggatgtcctttctggatttgcttgagaacatttagaaaagtttccaatgattggccctagatggatggcggcagtaaggttgccaag

SEQ ID NO: 873812 - DNA, 120 bp, Artificial Sequence
  ENSG00000287224_1 (sequence is synthesized)
acgggcctgtacctagcaaaggtatttgtgtaatcaaagcttctggaactttccctgccaaggctaccaatgtgaataggctcctgaggtaaaaatgttctccccgctggggacggcgcc

SEQ ID NO: 873813 - DNA, 120 bp, Artificial Sequence
  ENSG00000287224_2 (sequence is synthesized)
cttgaagtctacatcaaaatcaagccagggtcacagctgttgcggcaccccacagtggaaaacttgcaagaaatcccagcctgaactactgctttgcctcaggtctacaggaaacaggcc

SEQ ID NO: 873814 - DNA, 120 bp, Artificial Sequence
  ENSG00000287224_3 (sequence is synthesized)
ccagagaaggggagagagagagagaaagaggagagaggagagaggagagaagagagagagagagagggggagacagagagagagagggagagaaagagagagagagagagagaaagagag

SEQ ID NO: 873815 - DNA, 120 bp, Artificial Sequence
  ENSG00000287224_4 (sequence is synthesized)
agataaactttgggggtgggaagacaaagccacttgagaaccttgtcctcttcatggagacagtccacacccaccccattcaccctcaccttatgtgagctggggttcccgcaggttggc

SEQ ID NO: 873816 - DNA, 120 bp, Artificial Sequence
  ENSG00000287224_5 (sequence is synthesized)
ccctcaaaggaaagaaaaaaaaatgactttttctgtaccccaaagatccttggcttgcagattaggtattggagaaaaatctttgaggggttgagattgcttcttgggtcacctgttctt

SEQ ID NO: 873817 - DNA, 120 bp, Artificial Sequence
  ENSG00000287224_6 (sequence is synthesized)
aggcttgaattagagtgaaatgcaattgtatgtactccatgttgtataacttggatgacacttggttcacactttgttcaagggactgaaagatcctttaagaaatttatgctcacattc

SEQ ID NO: 873818 - DNA, 120 bp, Artificial Sequence
  ENSG00000287224_7 (sequence is synthesized)
aaattcccttcaacaaatgctaaatataagaattaatgagtgtattccattttccagggacagtgctaatggtcacctagatggccaatacccctgccctctgggagttaatggggaaga

SEQ ID NO: 873819 - DNA, 120 bp, Artificial Sequence
  ENSG00000287224_8 (sequence is synthesized)
caggcattaaaaaaaaatagcattcttgcacttaaccactttggatgagtcaaggaatccagacttaaatctgctatggataaagaagaaaaaaataagttaaaggaatacaggcttatg

SEQ ID NO: 873820 - DNA, 120 bp, Artificial Sequence
  ENSG00000287224_9 (sequence is synthesized)
aaagtcatttacattaagcttctgttacatgggaaggtaacaggtttttagggcttaggtttttagggtggccagtaacctaaaatatgggagccaccagaaagaaactttaccagcatg

SEQ ID NO: 873821 - DNA, 120 bp, Artificial Sequence
  ENSG00000287224_10 (sequence is synthesized)
gtttatatatgcttgctgttcaaatgacaaagaaaacaaatctttctcttgagtgttctagcctctgcaaagcatccccttgttctacctattaaacctctgccacaaatataaaaataa

SEQ ID NO: 873822 - DNA, 120 bp, Artificial Sequence
  ENSG00000287227_0 (sequence is synthesized)
aggaaaagtaagagggggagaagctagcggcagaaaactactaggcactaagagtgaagaaaacgtgccttccacgtctccccttcccacaccctccaataaggagactttggcagaggt

SEQ ID NO: 873823 - DNA, 120 bp, Artificial Sequence
  ENSG00000287227_1 (sequence is synthesized)
agactttggcagaggtgcctaaggaagtcctgcctgagagtccattctcatgctgctataagaaatacctgagaaaaataaggagaaagagattcaatggactcacagttccacatggct

SEQ ID NO: 873824 - DNA, 120 bp, Artificial Sequence
  ENSG00000287227_2 (sequence is synthesized)
catggcagaaggtgaaagaggagcaaaggcacatcttacatggagatcacagaatgaaggtgttctctgaatttcccttatctacccaaagtctgcactcatcaaagaggaaaacaaata

SEQ ID NO: 873825 - DNA, 120 bp, Artificial Sequence
  ENSG00000287227_3 (sequence is synthesized)
cctctccttccttattggagttttcattaagtgaactcatactgcaggaggaaagacctgaagtctgtcaacccatctggacagatatattgtcacaaaccgttgcctgctctgcaggac

SEQ ID NO: 873826 - DNA, 120 bp, Artificial Sequence
  ENSG00000287227_4 (sequence is synthesized)
taatagattttgcaacaggccatcgtatgttcttcaagctcattgaattcccctaaaatcatccacatttccccatctctctttccccaaagaagtagggtatataaacatctgtaccca

SEQ ID NO: 873827 - DNA, 120 bp, Artificial Sequence
  ENSG00000287227_5 (sequence is synthesized)
atcgggatattgggtaatcactctatgatactccccataaatgctaataaatttgcatgccatttatcctattaatctgtcatttacagttgactttttagcaaactatcagaaataaaa

SEQ ID NO: 873828 - DNA, 120 bp, Artificial Sequence
  ENSG00000287227_6 (sequence is synthesized)
ggaaacgttttcctttggttcctatacaaccatatgcaatattcctatgtatattaactttaattaaaaagtagaaggaaaaaatccattagttcttcatgataataacaaaatcaggga

SEQ ID NO: 873829 - DNA, 120 bp, Artificial Sequence
  ENSG00000287227_7 (sequence is synthesized)
agtaatctaagaaacaggaaggaatgatagaattaaaaggtggctattatccaaccattattgtaataattgattcgggctaaaatcatcaaaggatactgaagtattggttaaaatttt

SEQ ID NO: 873830 - DNA, 120 bp, Artificial Sequence
  ENSG00000287227_8 (sequence is synthesized)
gttgtggaagagaatattcatgtgaactttttgaatcatcccagagattacttatgaattacaaaaggggaagaatgcctttgcaaagaagaatgtggacatcactttcaaattctgact

SEQ ID NO: 873831 - DNA, 120 bp, Artificial Sequence
  ENSG00000287227_9 (sequence is synthesized)
aaagtttacatcatcaaaaatgggaccaattgacatcatgtgcctcctgataaaatgttccaggaagggtactttacccatgcatttttcttggcaattatatttaccttattttctaat

SEQ ID NO: 873832 - DNA, 120 bp, Artificial Sequence
  ENSG00000287227_10 (sequence is synthesized)
taataaagaggggataatagggaaaattctatttgaacaattttctgcaagttggaattattttttaaaaattcaatgctatgaaagacaaatgcatgcatgcacacacacacacacaca

SEQ ID NO: 873833 - DNA, 120 bp, Artificial Sequence
  ENSG00000287227_11 (sequence is synthesized)
cacacacacacacacacacaccaggagaccagaagactcttctatattaaataaaactaaataaacctgacagtgaatgcaatatgtgatccttgagtgtgcctggaattaacaaataaa

SEQ ID NO: 873834 - DNA, 120 bp, Artificial Sequence
  ENSG00000287227_12 (sequence is synthesized)
taaataattatgaaaattatcaggacaattggggaaatttggatgaagtaaatatttgataataatagtgttaaatttcttgtgtattgcattttatttcagttacataagagaccacag

SEQ ID NO: 873835 - DNA, 120 bp, Artificial Sequence
  ENSG00000287227_13 (sequence is synthesized)
aagatgtaggatgcagtacctagtactaacagtattgccatttggacttaaattttcatcaaaataaaaaaagaactatggcaaaactgttaactagtgatgcattttggtcatgtatac

SEQ ID NO: 873836 - DNA, 120 bp, Artificial Sequence
  ENSG00000287226_0 (sequence is synthesized)
aagaagaaacaccgaaacaaatttgtacaagtgcagcatttgtgtagcatttcttttgatgtgtgttttgtgcagatgaaacaaacattaaaattttcagagatttcttttataacagta

SEQ ID NO: 873837 - DNA, 120 bp, Artificial Sequence
  ENSG00000287226_1 (sequence is synthesized)
aatgtgtcctatttgtttccagctctttgacattggacaaatttttattgttgcttgatcatcagggtgtctgcgtttgatctcgtgaaagtttcagaatgggcctggcgcggtggctca

SEQ ID NO: 873838 - DNA, 120 bp, Artificial Sequence
  ENSG00000287226_2 (sequence is synthesized)
agtgaaactccgtctcaaaaaaaaaagtttcagaatgatggccaaaacaacatttctcatttagcatagtaacacagatcttcgtgggagaagaaaggccatgtgaagacacggtgagaa

SEQ ID NO: 873839 - DNA, 120 bp, Artificial Sequence
  ENSG00000287226_3 (sequence is synthesized)
cctccagaactgcagtgttggtctgcaagcttcaagagccagtgaccctgactgccaagtgatttgccgaagggaattatggttttgcatttgatggtttccaggaactgctaagagtga

SEQ ID NO: 873840 - DNA, 120 bp, Artificial Sequence
  ENSG00000287226_4 (sequence is synthesized)
gatcatccctgaagcagtgactgccagaggaaggcgagagacatatggtggccttacaggtattctttccaaatctatattaagagattacacagaaaatgtctgcatctaaatatatgt

SEQ ID NO: 873841 - DNA, 120 bp, Artificial Sequence
  ENSG00000287226_5 (sequence is synthesized)
ctcatgaaataaagttcatgaaccttttttatttcctcttatgacctatgattgggattttgtctgaatatcaatagtgccaaaaataaatatagaactgttaagatctcactgcattat

SEQ ID NO: 873842 - DNA, 120 bp, Artificial Sequence
  ENSG00000287226_6 (sequence is synthesized)
ccattattataaggaaattgtagtaaagacattatgagtatagagacaaaaaagtagaacttataggattaaaaataatggatattttacagtatttcatgagaccaagagacagagcgt

SEQ ID NO: 873843 - DNA, 120 bp, Artificial Sequence
  ENSG00000287226_7 (sequence is synthesized)
gaagagttcatgcagtctgtggggctgagtatctttcacttctgttcttcttgcactttacctattattctcttaaccctgcatacactgccttcttgttgaaaaaaagtcatgatagag

SEQ ID NO: 873844 - DNA, 120 bp, Artificial Sequence
  ENSG00000287226_8 (sequence is synthesized)
tgatagaggacaatcagaagttctattgtttagaaagtaaatgaggaaaatgtgaaagttaggtatgtgagattaaatgtggccagcatgatatagtagaagcaaaaaaaaaaaaaaaaa

SEQ ID NO: 873845 - DNA, 82 bp, Artificial Sequence
  ENSG00000287221_0 (sequence is synthesized)
ccaggagttcaagaccagcctgggcaacttagggagatacccccgcccaccgtctcgcaggaaaaaaaagaaaggaagaaaa

SEQ ID NO: 873846 - DNA, 70 bp, Artificial Sequence
  ENSG00000287221_1 (sequence is synthesized)
gtccaaggcagggctacctctctctcaatcaatcaatcaatcaatcaatgccagcgtcgtggcgggcgcc

SEQ ID NO: 873847 - DNA, 88 bp, Artificial Sequence
  ENSG00000287221_2 (sequence is synthesized)
ccagcctgggcaacacagggaggctacctctctctcaatcaatcaatcaatcaatcaatgccagcgtcgtggcgggcgcctgtggtcg

SEQ ID NO: 873848 - DNA, 120 bp, Artificial Sequence
  ENSG00000287221_3 (sequence is synthesized)
gggcgacagagcaagacactgtctcaaagaaaaataaataaataaaataaggccctctttttccaggaccaacagactctgatggcagggacaaactgacccagcctaaactgcctcgcc

SEQ ID NO: 873849 - DNA, 120 bp, Artificial Sequence
  ENSG00000287221_4 (sequence is synthesized)
aaactgacccagcctaaactgcctcgccttccctgctcccgggaaaggggctttccctgagggaaggtagcatcttgccattttcttcctgcacagctttgccttcccagggatcggccc

SEQ ID NO: 873850 - DNA, 120 bp, Artificial Sequence
  ENSG00000287221_5 (sequence is synthesized)
gaaatgccttggagtccatctaacccacagcccagccctgttgaagctgcttccatgttgtgagatgctttatgggtaacatccatgtggtaaaacagtgaagtaggcctcttgccaacc

SEQ ID NO: 873851 - DNA, 120 bp, Artificial Sequence
  ENSG00000287221_6 (sequence is synthesized)
accaattaagaataaccatggaggaactgagtcccaccaacagctacttgagtcactatgaaagtggactcatcactgattgaaccttggaataacgatagcccaattgacaccttgatt

SEQ ID NO: 873852 - DNA, 120 bp, Artificial Sequence
  ENSG00000287221_7 (sequence is synthesized)
ttagccttgtgagatattcaggcaaagagaatgcagctaagcattatctgaatttctgactcatggaaactgtgagataataaatgtttgctgctttatccactaagattttggataatt

SEQ ID NO: 873853 - DNA, 120 bp, Artificial Sequence
  ENSG00000287221_8 (sequence is synthesized)
tgttaaacaaacacataactaatacacatacatacacaacttgcaagataaaatataactttagaggaaaaaagaagaaatcaagcaagaactagatgcagttaacataaactaagctca

SEQ ID NO: 873854 - DNA, 120 bp, Artificial Sequence
  ENSG00000287221_9 (sequence is synthesized)
acatatttcattacagcatgtggaaattgtaaagtatctttttctcatatatgttaagtactcagtaaaaaattacagtattgctgaaatctgtatactgaagttgaaaaagacaaaact

SEQ ID NO: 873855 - DNA, 120 bp, Artificial Sequence
  ENSG00000287221_10 (sequence is synthesized)
tagaggatatatgggacgtagtgaaaacataattgaaagattcaaaatcaaaatttgtataccaatttgtattttaagaaaaatgtaaagagttacaaaaagtatgtccccttctctgac

SEQ ID NO: 873856 - DNA, 120 bp, Artificial Sequence
  ENSG00000287220_0 (sequence is synthesized)
gcaaagtgaaacaggaaactttgctgccctaaacggagtatacacagtatgtgtccgggccttaaaaggtgaagaatatttagacagatgaagagcattccaggtggaaagaaccatata

SEQ ID NO: 873857 - DNA, 120 bp, Artificial Sequence
  ENSG00000287220_1 (sequence is synthesized)
agcagacactggaaagcagggtttcttcaaacacctttggtgagggcaagggagggatggtgcaagtctggatatgtgagtctgggtgaccatgggaagaactgcaaagaccacagagct

SEQ ID NO: 873858 - DNA, 120 bp, Artificial Sequence
  ENSG00000287220_2 (sequence is synthesized)
ggaatatgtgatgcctccaagccttctagccttggccaaaacaatgtcctccatgaggcaggtctggggccctcaaggagcaatggccctcagtgtatggttctcaaaccagcaccattg

SEQ ID NO: 873859 - DNA, 120 bp, Artificial Sequence
  ENSG00000287220_3 (sequence is synthesized)
ttactgaacatgaaaatccagggtgcactaaatcagaaacactggggaagaggtccaggaaatgggtcttaacaactctccaaccgattcttacgcaggccaaccactgatatagatgac

SEQ ID NO: 873860 - DNA, 120 bp, Artificial Sequence
  ENSG00000287220_4 (sequence is synthesized)
tccagctctccgagtgggtctttttaaatgttaggtcctggggccaggaagaaacagaatatcactcttccttggtgctatggaaggaattagagggattttaggggtgtaggggaaggc

SEQ ID NO: 873861 - DNA, 120 bp, Artificial Sequence
  ENSG00000287220_5 (sequence is synthesized)
aacagtgctctggggactactttatgcccagtgagaaattggttctaatcattctgcatctatgaagtccataaaggaccaagttcaagcctccgcagtcaggagccacttcactttgta

SEQ ID NO: 873862 - DNA, 120 bp, Artificial Sequence
  ENSG00000287220_6 (sequence is synthesized)
ccccaggtgacagcccagcacttgttctagggctgggtcgggtggggagggagatgtcttcagaaactcaagaaggaaagggagctttctcctggagagtgtccaccgcgtcgggcgccc

SEQ ID NO: 873863 - DNA, 120 bp, Artificial Sequence
  ENSG00000287223_0 (sequence is synthesized)
ttttattttttagagctatacttcagaagtgcagagcagcctgagggccctttttctccattttattttgtgtgtcttcttaaaaattgtatcttggctagaactactctttcttccttg

SEQ ID NO: 873864 - DNA, 120 bp, Artificial Sequence
  ENSG00000287223_1 (sequence is synthesized)
gtggttttataactcacaaggtgaatggtgataccctgaaagatcaacaggaataccctcagggtgggaatataaatctagtccctcttactctatcctgcccagaagtggaaatatgat

SEQ ID NO: 873865 - DNA, 120 bp, Artificial Sequence
  ENSG00000287223_2 (sequence is synthesized)
ccttccattataaaataaagaatggtcctaagatttgagaactccaaaaggacttagtgttacggtgaacaaccatttgggactgtttatctacttgctatctctcttttgagagagaat

SEQ ID NO: 873866 - DNA, 120 bp, Artificial Sequence
  ENSG00000287223_3 (sequence is synthesized)
aatgtctcaagagctccattctctgatgcctgcagtatgttatgaatcagtagagaatctttctgtctgtgcttggatcttgggtaagtgctcagctttctctcttacctcttaggccca

SEQ ID NO: 873867 - DNA, 120 bp, Artificial Sequence
  ENSG00000287223_4 (sequence is synthesized)
cttataagtcacaccctgtcttagtctgttttgcacggctgtaacagaataccatagactaggtaatttctaataaacagatatttatttctcacagttatggaagctagtaagtctaag

SEQ ID NO: 873868 - DNA, 120 bp, Artificial Sequence
  ENSG00000287223_5 (sequence is synthesized)
atcaaagtgccagcgtcttgaaagggccttcttgctgcatcatggtggaaggcatcacatggtgaaaagacaaacataaggagaaaaagagcgcaagagtgggcaaatccactcctgtga

SEQ ID NO: 873869 - DNA, 120 bp, Artificial Sequence
  ENSG00000287223_6 (sequence is synthesized)
caatgaacccactcttgtgataatgtcattaatttattcactctgacttcacagcctaaacacctctcattaggcctcatctcacaacactgttgctttggggactaagtttccaacaca

SEQ ID NO: 873870 - DNA, 120 bp, Artificial Sequence
  ENSG00000287223_7 (sequence is synthesized)
tgtttttggcggacaaattctgaccatagcatactctcacccagttcagtccctttgcttgtttcttcctctggtagagtactcctctgttattcttctctagcaaattccacccatcat

SEQ ID NO: 873871 - DNA, 120 bp, Artificial Sequence
  ENSG00000287223_8 (sequence is synthesized)
ctcaattccacttttaagctctatttctacaggaaagccttccccatctgtctaatttccagctctataaaatcatgctagctttgtttggacaagatactcgtgcggtcccttccatca

SEQ ID NO: 873872 - DNA, 120 bp, Artificial Sequence
  ENSG00000287223_9 (sequence is synthesized)
ctgaagtaagttttgtgggactaagattactctctcccatccctaaattacagtatctggcattaactgaccctgaattatattctaaaattggaacatatattttcttcactcttatct

SEQ ID NO: 873873 - DNA, 120 bp, Artificial Sequence
  ENSG00000287223_10 (sequence is synthesized)
gacaagctgcccatcatcagtaagttgaaaatatatcttgttaaacaaatagatgaatgacattttttcctactcatttaatgcatgtatttttttccttttttgctcagaaaacaagtt

SEQ ID NO: 873874 - DNA, 120 bp, Artificial Sequence
  ENSG00000287223_11 (sequence is synthesized)
tcttgaaggcaggggaaatgttttttgctcttttgatattgcatgcagaatctgcattatcctggaggcattgttgagtgtctgcaaggactctgattccaagaagccattggcagccta

SEQ ID NO: 873875 - DNA, 120 bp, Artificial Sequence
  ENSG00000287223_12 (sequence is synthesized)
attttccagaatcatagtactagacacagctgttaatatatagccctgaaataaatatgtgttgaatgaacaattaggtggctgtggaatgagagtttagcaagacggtcatgcttacac

SEQ ID NO: 873876 - DNA, 120 bp, Artificial Sequence
  ENSG00000287223_13 (sequence is synthesized)
agagaaacaaagacgcagatagtgcagacatgctcacaatttgtttgcttgatacatttgctactttgaggcttatacttaatgtgagtctgtgaatgatttacaggtatactcatacac

SEQ ID NO: 873877 - DNA, 120 bp, Artificial Sequence
  ENSG00000287223_14 (sequence is synthesized)
tgagatgaagaactttattataaatctccttccttgtactgtaggatactgtgcatttttcaatgctgtaaacataaatagaaaagtgttttgtctgtgacaagatgtcagctggaaaac

SEQ ID NO: 873878 - DNA, 120 bp, Artificial Sequence
  ENSG00000287223_15 (sequence is synthesized)
cttttaaagatgcagagttttaaatttgagttctcattattatattgtcctgattcaaggggtaagcacaaaaatgttctatatttataaatcttatcccataaatcttttattataaga

SEQ ID NO: 873879 - DNA, 120 bp, Artificial Sequence
  ENSG00000287223_16 (sequence is synthesized)
ctcatataaaagtaatacatataaaaatagtgttaaacaaaaataagaaaataaaacccaactctatctccaatatagatcaccactaataacatttcagtacatattctctcattcttt

SEQ ID NO: 873880 - DNA, 120 bp, Artificial Sequence
  ENSG00000287223_17 (sequence is synthesized)
atacatactttattcaaaaatacaattatattgaacatattattttgttatatgcattttcatttagtgatatgaaaactattcagcatatactcataaaaattctccacctcatcattt

SEQ ID NO: 873881 - DNA, 120 bp, Artificial Sequence
  ENSG00000287223_18 (sequence is synthesized)
atttttcactgctgcttagcattttaatgtatggaaacactgtaatttacttatccaaacctccaattcaggtcatttggttgtttccaatatttttgctgtcataaaattagaaaaata

SEQ ID NO: 873882 - DNA, 120 bp, Artificial Sequence
  ENSG00000287223_19 (sequence is synthesized)
agtatccttgcagctaaagcaagtgacttattttccttaaaataaatccctaaaagtagaatcattgggttaaaaagtatgcaaaattctaaggcttttgacatcaaaactaccccctaa

SEQ ID NO: 873883 - DNA, 120 bp, Artificial Sequence
  ENSG00000287223_20 (sequence is synthesized)
aaatattgtgtcaatctaatctcccaacaatgaacggggtattttttaaatgtgatttcatgtgtacttataacttttatgcaggaaaagtttaaaattaagtggttgaggaaattaggg

SEQ ID NO: 873884 - DNA, 120 bp, Artificial Sequence
  ENSG00000287223_21 (sequence is synthesized)
tgcagaagaatcaagagcacacagcattaataccagaattataatcccactttttgtatttcttgttctcttataacagtgcttattgcatccactcaagtggcatttgaaaaaaggctg

SEQ ID NO: 873885 - DNA, 120 bp, Artificial Sequence
  ENSG00000287223_22 (sequence is synthesized)
gaagattccctgagtaaaattagggcttttattcaagcacatattgaaaacaaaagttaaatgggctgcaaaaactatgatgataataggatgggtcatgctttacgctgatctctgcaa

SEQ ID NO: 873886 - DNA, 120 bp, Artificial Sequence
  ENSG00000287223_23 (sequence is synthesized)
tttatttgccatcaggaggcaggaaaaggtcagttttgttctttttccaagaataaagtgtaattttcctgagaagatggtctcttttctaccttgccatttgttgttataatcacaaac

SEQ ID NO: 873887 - DNA, 120 bp, Artificial Sequence
  ENSG00000287223_24 (sequence is synthesized)
tatgaaactttgctttgtacccaaactgacattcatgaaattaatacttccagtttgattagctcaaatagagattaaaaatgtgtttttatatttcctcataaaacattagctcttctt

SEQ ID NO: 873888 - DNA, 120 bp, Artificial Sequence
  ENSG00000287223_25 (sequence is synthesized)
aaaatattttaaattacagattatctcactacatactttgaggcaggcttgaagaggttgatttctttctaaaaataagatcctaattctgatataatttgttgctctcgatctagttat

SEQ ID NO: 873889 - DNA, 120 bp, Artificial Sequence
  ENSG00000287223_26 (sequence is synthesized)
tttacgatctttaatttttccatgatgccactgtgaaagaaaaaaaaatatgcgcacacaaatacaaaaccagaacctgatgcaattcctcattgcctaggagtaccttaattctcctta

SEQ ID NO: 873890 - DNA, 120 bp, Artificial Sequence
  ENSG00000287223_27 (sequence is synthesized)
acctgatacctacctttcaatttttaagcttgctattctgaggtagattggttgcacaaatgacacaattgtcactgctcttctaaggccataactttgtccatcaagcttcccatgaaa

SEQ ID NO: 873891 - DNA, 60 bp, Artificial Sequence
  ENSG00000287223_28 (sequence is synthesized)
tcctccgtaactcatttcatgaggcgagcataatcctgataccaaagcctggaagagaca

SEQ ID NO: 873892 - DNA, 120 bp, Artificial Sequence
  ENSG00000287222_0 (sequence is synthesized)
ggggcgtgcgccgcgggactcgagtcgggcgtatctctccgcgtggccgacgcgggcgtgcgtagtacccttcgccgcccgtcgcccttgcggccactgctacgcttctcttctctgcct

SEQ ID NO: 873893 - DNA, 120 bp, Artificial Sequence
  ENSG00000287222_1 (sequence is synthesized)
tttttggagaaaacgctgtcgcgtgcgtcgtccagaggctctcccccaggaggcaggcgaaagagcggggccctcctgggctggaggagtctcgggtgatgaaaggcccgcgtgtttcag

SEQ ID NO: 873894 - DNA, 120 bp, Artificial Sequence
  ENSG00000287222_2 (sequence is synthesized)
gctgacgtcgtgagatgcgtcgtccccgcgtcgcgacatccctgggaccgggaggccccgttcaattggcagctttttctccttccagggaaccgatgaccctaggttggctgacatcag

SEQ ID NO: 873895 - DNA, 120 bp, Artificial Sequence
  ENSG00000287222_3 (sequence is synthesized)
tcgctagacccgcagcccgcaggccccgttagtccctgaactggctttcatggcccaaggtgtctgtcagtactgctgggaaagctgcctgtcctggacatttgccatctgctgcaccca

SEQ ID NO: 873896 - DNA, 120 bp, Artificial Sequence
  ENSG00000287222_4 (sequence is synthesized)
gtcccgagaccccaactcggtcatccgaagaagccacatctctggacagcccaggatcaccagacacctgagaaagaagaaaagggactcagaagaaacagagacgataaaggaagccga

SEQ ID NO: 873897 - DNA, 120 bp, Artificial Sequence
  ENSG00000287222_5 (sequence is synthesized)
agaaaaatgaaaactaaaatgccattctcagtcaataaaaaggaactgggggctatagagaaagaaacctcgggatgagaaagagctcttagaaataaaacatgaggggaaagtgagcaa

SEQ ID NO: 873898 - DNA, 120 bp, Artificial Sequence
  ENSG00000287222_6 (sequence is synthesized)
ttcaataggcttttaagatgaagtcttccagaatgtataatgacagaaccagatagctggaaaacagaatagcagtaacacaggtgggtgctcttagggctagcctggcacacaaggcct

SEQ ID NO: 873899 - DNA, 120 bp, Artificial Sequence
  ENSG00000287222_7 (sequence is synthesized)
ccacaatggagggggtggatgggaggtggggggctggtctgccaccaccaccaggggaagccacaggcaccaccctctggggacagcttcccttggcaataatgtgcacgcaggatgcat

SEQ ID NO: 873900 - DNA, 120 bp, Artificial Sequence
  ENSG00000287222_8 (sequence is synthesized)
ggtgcccaggactgttcttacacacattcattcatgggatcctcacaacccagtgctatgcaatggatacagctgttaccccatttttactgatgggcaacatcacaaggcagggagcag

SEQ ID NO: 873901 - DNA, 120 bp, Artificial Sequence
  ENSG00000287222_9 (sequence is synthesized)
cagtagaatggctccagagcctgtgttcttgccaccaccatgactgcatctcaaaagagaagtccaggtcaggcacagtggctcatgcctgccttcccagcacttcaggaggctgaggca

SEQ ID NO: 873902 - DNA, 120 bp, Artificial Sequence
  ENSG00000287222_10 (sequence is synthesized)
ctgaggcaggagtatcacttgggcccaggggttcaagaccagcttgggcaatatagtgaggccacgtctctacaaaaagtaattttaaaaaaccagctgggcatggtggcacacgcctgt

SEQ ID NO: 873903 - DNA, 74 bp, Artificial Sequence
  ENSG00000287222_11 (sequence is synthesized)
caacaaaaactcaacagaagtccaacatctaaataaattgtccagaaaataaggaaatgagagaaatcagcaga

SEQ ID NO: 873904 - DNA, 120 bp, Artificial Sequence
  ENSG00000287222_12 (sequence is synthesized)
aaattgtccagaaaataaggaaatgagagaaatcagcagagataaatcaagaaaatttcctagaaccaaacagtcatgttttctgaacaatgggtgaaagggaagttgtatatcaagaca

SEQ ID NO: 873905 - DNA, 120 bp, Artificial Sequence
  ENSG00000287222_13 (sequence is synthesized)
catcattgagaattacccaagtaatggggcaaagaaaaagaagagatcataggtaaagagtcagaattcaggaaggcacaagagttcttggaactagaagaaaatgacacaatacccttg

SEQ ID NO: 873906 - DNA, 120 bp, Artificial Sequence
  ENSG00000287222_14 (sequence is synthesized)
tacccttgaaatcctgggaataaatgattttcaaccaagccaagctttttgtagctagtcgcactgttaagcatatgtgaggttagcataaagactgtggggaaaagcaagagagatcag

SEQ ID NO: 873907 - DNA, 84 bp, Artificial Sequence
  ENSG00000287222_15 (sequence is synthesized)
attgttactgtgtctgtgtagaaagtagtagacataggagactccattttgttttgtactaaggaaaattcttctgccttgaga

SEQ ID NO: 873908 - DNA, 120 bp, Artificial Sequence
  ENSG00000277945_0 (sequence is synthesized)
aagtgaatgactactaaattagccatcacttcaatttcaaaccatattcagtagaaaattgatttatataatatgtaaaacaaagacatttataagaacacaatttcctatgcttggaac

SEQ ID NO: 873909 - DNA, 120 bp, Artificial Sequence
  ENSG00000277945_1 (sequence is synthesized)
tgcatgaccattgtgtaatgattctagtcattcctcagaactccaatctgagtgctcaaaatttgtccctgaatcagtttcatatagttacctgaataaaagaaatcagaagttaaagtt

SEQ ID NO: 873910 - DNA, 120 bp, Artificial Sequence
  ENSG00000265664_0 (sequence is synthesized)
cgagtccacccatgggctgtgagcaggtagctgaggcaaggatgcgctcgttatttccaagcacaacagctaccaggactacaggcgactgttccagggtggatcaaggagtctcaaaaa

SEQ ID NO: 873911 - DNA, 120 bp, Artificial Sequence
  ENSG00000265666_0 (sequence is synthesized)
agaagtgaaacaagagatgaaggaatgttgcttgaaagaaggaactctcaaagttcctcagccctaatctaacacaaattgcacttagggttactggggggagggtgcggccgggagggt

SEQ ID NO: 873912 - DNA, 120 bp, Artificial Sequence
  ENSG00000265666_1 (sequence is synthesized)
tcaattgtccagcaagggcaacacgggttaagtgaaaggtagagacaggacctccactacaccccgggactctcacccccgagtagtagtggaagccctaccgcccactcccacccccta

SEQ ID NO: 873913 - DNA, 120 bp, Artificial Sequence
  ENSG00000265666_2 (sequence is synthesized)
caacagcagactgagaggccggcaagaggtccgagctgggaagtcctgcgcgccgcccccgtcactcagccggcggcgccatccgagcagagcagctgggggagaggagacgtcccctcg

SEQ ID NO: 873914 - DNA, 120 bp, Artificial Sequence
  ENSG00000265666_3 (sequence is synthesized)
ccccgactggtgacccgggcagggggcgccccctgccctgaagtccccgcgtctaagtccgccggccgctccgccagtcccggtgaaaagcagggaagttgtgtgtgctgggaggggggg

SEQ ID NO: 873915 - DNA, 120 bp, Artificial Sequence
  ENSG00000265666_4 (sequence is synthesized)
tccgtcggctctcccagggaagcctggcggggcccgggaactcagcggcttcacctcgaggggactcccgtctagagtctcgtggcgtccgaggcagagtacagcggctccccaagtccg

SEQ ID NO: 873916 - DNA, 120 bp, Artificial Sequence
  ENSG00000265666_5 (sequence is synthesized)
caggccgggggcgggatcagcgcggggctgggggtcaacgagcacttcctcctcccagccggggatccggggcttctccagggattctccgtggcgaggattccgggtgggggtggggat

SEQ ID NO: 873917 - DNA, 120 bp, Artificial Sequence
  ENSG00000265666_6 (sequence is synthesized)
gttccgcccccgccaggccaggggcagctggcgactcgctcggtctctggtggtacgcgccacggcccccccaccccagctctgcgcgccccctcccctccgggcaccaccccctttcca

SEQ ID NO: 873918 - DNA, 120 bp, Artificial Sequence
  ENSG00000265666_7 (sequence is synthesized)
ggacaggccgggcctcatttgcctaatgcaatgcggctgaactctcgctgaactcgcctggcggcgcctcacctccgagtgacccacccaccgctgcccgtgacatcacccgctcgccag

SEQ ID NO: 873919 - DNA, 120 bp, Artificial Sequence
  ENSG00000265666_8 (sequence is synthesized)
gcccgccagccccctgcccggccgaaccgggccacctcccccggagacgcggagagcggcggcaggaggcgtagggccgggtcgcgcggggccaagtgtttggcacccgggtgtgacatt

SEQ ID NO: 873920 - DNA, 120 bp, Artificial Sequence
  ENSG00000265666_9 (sequence is synthesized)
acccgggtgtgacattgtgcagctcggacgctgtgtcggaatgagacaccggcttgtgtcattgtctgtgacatcatgtgtgactccggccgccggaacccgacgcggcagcgcgggtgc

SEQ ID NO: 873921 - DNA, 120 bp, Artificial Sequence
  ENSG00000265666_10 (sequence is synthesized)
tgttggcacaaacacaggcagagggggccctcctccccacgctctgcgtgcttccggcgagcaaagccccgcccaaggtgtctcctagctggggaaccagtaccggcccctggtgcactg

SEQ ID NO: 873922 - DNA, 120 bp, Artificial Sequence
  ENSG00000265666_11 (sequence is synthesized)
tccagctctggagagataaaaggaagagctggtgccttccagtggactacttcatcctagaagccctcgggatgcacgtttcactggaagaaaggcctagcttgggtaggtccctagaaa

SEQ ID NO: 873923 - DNA, 120 bp, Artificial Sequence
  ENSG00000265666_12 (sequence is synthesized)
gaggggatacccctggaggagggggtatcctattacccccactctctaaaaggaaggatggaaatgtacatgctacccaaggacattcttctagaagaagcctggctctttatatatgtt

SEQ ID NO: 873924 - DNA, 120 bp, Artificial Sequence
  ENSG00000265666_13 (sequence is synthesized)
gtcattttatcctcacagcaactccaagagatgttttacaaataaaacaggtctcagcaaggctatgtgggttgtccaagatcacattactaataataaagagtagagcaggtatttgaa

SEQ ID NO: 873925 - DNA, 120 bp, Artificial Sequence
  ENSG00000249899_0 (sequence is synthesized)
cctctgccaagtatttaagtggcgcttggtttattccaagtccccccgggaagaaacacagcgcttcgtcctcaaatcttcatggaatgctactatgagctgaatgggatgcctgagata

SEQ ID NO: 873926 - DNA, 120 bp, Artificial Sequence
  ENSG00000249899_1 (sequence is synthesized)
ctgcctctaggaagcaaagtggctcaagaggtacaaggcctgaaagaacctatccaaatatcagctctggttttcctcttctcctgccagcggtgttctaaaaccatagagattgagaag

SEQ ID NO: 873927 - DNA, 120 bp, Artificial Sequence
  ENSG00000249899_2 (sequence is synthesized)
actgatcagcttccacaggatgagaacgatgaccaagaaatatgctggcggcctctaagaaaatatcgtgttttgcgaaggacttctgggtcttcaacttgcattcgggaattaagactg

SEQ ID NO: 873928 - DNA, 120 bp, Artificial Sequence
  ENSG00000249899_3 (sequence is synthesized)
gacagcaaatgcaatccggtatcactaacacctaacactttgggttatttagtataatggttctcaaacattaggatgcatgagaattacctggaaggcttgtttaaccccatcctccga

SEQ ID NO: 873929 - DNA, 120 bp, Artificial Sequence
  ENSG00000249899_4 (sequence is synthesized)
gtttctgatttggtaggtttctggtggggccagagaatttgcctaacaagtttccaggtgatgctgatgcccttggccaggcagggaccacactttcagaaccactgggttaatagaaag

SEQ ID NO: 873930 - DNA, 120 bp, Artificial Sequence
  ENSG00000249899_5 (sequence is synthesized)
gcatccacataaaaatgtagttttctcctacctgtaaaactgtagtccaacttcatattttaccgggatagaaatgtttactacattatcagaaagggtttcaggaggttcttcgctgtc

SEQ ID NO: 873931 - DNA, 120 bp, Artificial Sequence
  ENSG00000249899_6 (sequence is synthesized)
actagaaaatacacggcacattcagacaaaccattaaaatcttgactatttaaagacatttctaagtgtttgaaagagaagcttatcctggcaactaaataaaagcatgtaagagtataa

SEQ ID NO: 873932 - DNA, 120 bp, Artificial Sequence
  ENSG00000249899_7 (sequence is synthesized)
tttttaatcatttttttaattggggtgaagaaggagatcagagatgattggtatggttgaaagttcccaagttgattctgatgtgcgactagacttgacaatcacactgatttatgtttt

SEQ ID NO: 873933 - DNA, 120 bp, Artificial Sequence
  ENSG00000249899_8 (sequence is synthesized)
tcaaaattctatgacaatattgataagaatccctcagtttaattgttaaaatacaaaggttactgggcttcccttagaaatatggatttaggggttccaacttggggtgcaggaatttct

SEQ ID NO: 873934 - DNA, 120 bp, Artificial Sequence
  ENSG00000249899_9 (sequence is synthesized)
ttttaaccacatatctgcccccaggtgatgcttatttatcacagatgaggacttagtaaagataagtgattagggtcacacagctgagagtaaatctaaaatcttttgttttcttcttta

SEQ ID NO: 873935 - DNA, 120 bp, Artificial Sequence
  ENSG00000249899_10 (sequence is synthesized)
atagtctttccatactaagtacttgatgatcatattgtttgttaaacactgatttattctcttgattttggttatcatttaaattatatattatgtaaacacatgtatatatgtgcatac

SEQ ID NO: 873936 - DNA, 120 bp, Artificial Sequence
  ENSG00000249899_11 (sequence is synthesized)
acacatatacatacttcctcgtattagaaaacacatacaaatgatataacgagtaatgaacactggctctggggccagagaatgagattgttcttggacactgatacactttggtcaaat

SEQ ID NO: 873937 - DNA, 120 bp, Artificial Sequence
  ENSG00000249899_12 (sequence is synthesized)
tacttatctgtctttgttttggtttcttcatctataaaatgggatatcaaatgagtaataaatgatgattaaattagtaataagtataaagtgcttaagattgtgcctaggacataggaa

SEQ ID NO: 873938 - DNA, 120 bp, Artificial Sequence
  ENSG00000249899_13 (sequence is synthesized)
atattcagtaagtgttagctttcattattattttacacatacccctccaccaactgaccaagcacctaacatattgtctcacagaatgggcataagagtactttttaatggctctgctta

SEQ ID NO: 873939 - DNA, 120 bp, Artificial Sequence
  ENSG00000249899_14 (sequence is synthesized)
ttcccaaatgtataaagtggctcataagcagcaggacagagaaagcagcatgctgccttggattataggtatttgtgtgactcagctcttagcatgaatggtccccttttctctcaccca

SEQ ID NO: 873940 - DNA, 120 bp, Artificial Sequence
  ENSG00000249899_15 (sequence is synthesized)
ttccacactgcagccttcctaaattcatctccataagcagcagctctgtacagatgactttacctctcaaaaactttactggcttttcaaggtctgttcaattaagaaataataccttga

SEQ ID NO: 873941 - DNA, 120 bp, Artificial Sequence
  ENSG00000249899_16 (sequence is synthesized)
ctgacattcagtacctagcgtaatatgatagaatgcacactccctgtttattttcattgctactttatgtattctttatatttcagctaaaattgataacctttttaatcaagctatata

SEQ ID NO: 873942 - DNA, 120 bp, Artificial Sequence
  ENSG00000249899_17 (sequence is synthesized)
ttttgcctgaaatgctccacctggtgctattcagtgacctctctgtgaaatgctatctacccttcaaggtctttctcaattataagttccttgataaagctttcttgggttcccattgcc

SEQ ID NO: 873943 - DNA, 74 bp, Artificial Sequence
  ENSG00000249899_18 (sequence is synthesized)
taggaacagctccagtctgcagctcctagtgagatcaacgccaaaggcgggtgacttctgcatttccaactgag

SEQ ID NO: 873944 - DNA, 120 bp, Artificial Sequence
  ENSG00000175170_0 (sequence is synthesized)
acccgccgccgccccagtccccgcagccgccgctccgcggtcatttttcttttctatctttttttttttaatagtcggaatctcactctgtcactcagtcgagtgcagtggcgggatctc

SEQ ID NO: 873945 - DNA, 120 bp, Artificial Sequence
  ENSG00000175170_1 (sequence is synthesized)
agctgactgcaaactctgccgcccaggttcaagtgattctcttgcctccgcctcccgagtacctggtactagagggattagtcagtgtcggggctaagaccagtcctggccagggcatca

SEQ ID NO: 873946 - DNA, 120 bp, Artificial Sequence
  ENSG00000175170_2 (sequence is synthesized)
acaggatagtctctggaggccgggattcacggagggtcgtccaggaggaagaaactgcaggtggagggccgggcaagcagcgcgggatcccaggttcaggcctgcacggacggtgtgcca

SEQ ID NO: 873947 - DNA, 120 bp, Artificial Sequence
  ENSG00000175170_3 (sequence is synthesized)
aaccttcccccaagctcccaatacaagcccaaattctggaacaagtcctttccaacacctccttcagagaagctccctggctccaggcagtgcttgctcccctcactgcagcaggaagcc

SEQ ID NO: 873948 - DNA, 120 bp, Artificial Sequence
  ENSG00000175170_4 (sequence is synthesized)
taacttgcgaactgcaggtgtgctccaggtggtcactggatgcaaggtattgacagatggatcccattgatacccccactgcataaccatgtaagcctatcatcccccacttgcacatga

SEQ ID NO: 873949 - DNA, 120 bp, Artificial Sequence
  ENSG00000175170_5 (sequence is synthesized)
ggaaacggaggtccacagggtggggaagggaagacataatttgtccttcaaatgcgataccggtgagatgtgagaggcagcatccctcataactcagcaaggcagtgggcacactaggac

SEQ ID NO: 873950 - DNA, 120 bp, Artificial Sequence
  ENSG00000175170_6 (sequence is synthesized)
aggagccctccatggcagtgcttgagtgtcggggctctgagtctccggcctgacctctccacgtggtcgacgggaacgtccccagatgccaggattcgcaaagggctgaccaggatggcg

SEQ ID NO: 873951 - DNA, 120 bp, Artificial Sequence
  ENSG00000175170_7 (sequence is synthesized)
aaaccttaggcagagtccggggaaagcagcacggcatcccagcctcaggcctgcccggacggtgttggttggggtaagattggggaagatgccaggtgatagaatccaccctgcctctga

SEQ ID NO: 873952 - DNA, 120 bp, Artificial Sequence
  ENSG00000175170_8 (sequence is synthesized)
gatggatcccatcgatacccccactgcaaaaccatagtgcagtgaatagaagacacttctctgcaccccaaaagctccatgctgattgtgagaaggaaatgctggatggaggggttcctg

SEQ ID NO: 873953 - DNA, 120 bp, Artificial Sequence
  ENSG00000175170_9 (sequence is synthesized)
gaactactgtgagggaaatggtgcgagaactttggatgtggaacgtggaggaggaggaacacgaagtggggatctgcacttggggtggtcagcactgcggatgcccagcaaagtcactgc

SEQ ID NO: 873954 - DNA, 120 bp, Artificial Sequence
  ENSG00000175170_10 (sequence is synthesized)
ctggtccacatcccggaggggtctctgcgcctcagtcggcatcgcagctgatggtgaaacttttggtgtggcagaagagtgtccacaaacttcggaagttgctagagaaaactgaaaact

SEQ ID NO: 873955 - DNA, 120 bp, Artificial Sequence
  ENSG00000175170_11 (sequence is synthesized)
actagttttgaaagcctcacttctgccaatggaagcacattccagcatgtcgccaacgcaatccactttccaccactttcacaaaaaacgttactgcacaattatactatcctaccctta

SEQ ID NO: 873956 - DNA, 120 bp, Artificial Sequence
  ENSG00000175170_12 (sequence is synthesized)
tcccacggttgtcttagaaaccagtctccgaggcttggcaaagcaggagccctccttggcagtgcttgggtgtcggggaaaccccaggcggagtccgggggaagcagcacggcatcccag

SEQ ID NO: 873957 - DNA, 120 bp, Artificial Sequence
  ENSG00000175170_13 (sequence is synthesized)
caggcggagtccgggggaagcagcacggcatcccagcctcaggcctgcccggacggtgatggttgggctacattgaggccgggtgcagtggctcacacctctcatcccagttctttggga

SEQ ID NO: 873958 - DNA, 89 bp, Artificial Sequence
  ENSG00000175170_14 (sequence is synthesized)
tcaaatatacaaagaattagccagagaagcagggaatctggaattttgggtgaaatgtctgtttccagaagctgaaaatgctctcaaat

SEQ ID NO: 873959 - DNA, 120 bp, Artificial Sequence
  ENSG00000175170_15 (sequence is synthesized)
ctcttccttttagttctttggaaggatgagcaaattattcaccctctctgagcctcagttttctcatccataaaatgatgacagttcaccaacctggcaggtcacaaggatgttatgaaa

SEQ ID NO: 873960 - DNA, 120 bp, Artificial Sequence
  ENSG00000175170_16 (sequence is synthesized)
gacctagatgaggaaaccccaggcagagtcctggggaagcagcacggcatccgagcctcaggcttgcctggacggtgttggttggggtaagattggggaagatgccaggtgatagaatcc

SEQ ID NO: 873961 - DNA, 120 bp, Artificial Sequence
  ENSG00000175170_17 (sequence is synthesized)
aatcttctgggggagcggaaagtcctgctcccgggccagggctggctggctggagccacttgtgcggcgcagccctggcggaggttcaggcggccccggtgtcgcaagcggctgtgagtg

SEQ ID NO: 873962 - DNA, 120 bp, Artificial Sequence
  ENSG00000175170_18 (sequence is synthesized)
ccaggaaggctgcagaccagggctgaccagcgggcagcatggtggccgcgatggaaggtgacggggttcgcagcgccaggggacccagcagagcccgagcccgggcatcccgcatctcca

SEQ ID NO: 873963 - DNA, 120 bp, Artificial Sequence
  ENSG00000175170_19 (sequence is synthesized)
gcagcatcgcaggtaggcctggtgctggtgaagtggcggccagtgcacaaggcctacgacccagtcccagaggccagcccattgtcagctaacttcaggaaccccgggccagctgaggcc

SEQ ID NO: 873964 - DNA, 120 bp, Artificial Sequence
  ENSG00000175170_20 (sequence is synthesized)
ccgggccccatgggcaagacaaagggcagagggtccgcaggcggggccgagtgcaggcagtgcaggcctggctccaccgccgcggagctcgcagggcgcagcaggcatcgggcagtgacc

SEQ ID NO: 873965 - DNA, 120 bp, Artificial Sequence
  ENSG00000175170_21 (sequence is synthesized)
agggcttccagaggaggctgtgcacccctgcaaaggctcctgccctgcgtccagcctatccgcggggactccacgtgcaccccctcctcattgtccttgtctagggccgcggcggcaagg

SEQ ID NO: 873966 - DNA, 120 bp, Artificial Sequence
  ENSG00000175170_22 (sequence is synthesized)
tccttgctcccatggcgtgactccagggtgcaggagcctgggctgagcaggtggagtagggtgagctccgccaagaacccagcgagagtggcgccccagggcggcacaggaggccgcatt

SEQ ID NO: 873967 - DNA, 120 bp, Artificial Sequence
  ENSG00000175170_23 (sequence is synthesized)
taacatgtcaatcatctgaaagattttatggcatcttttttttgacatcttataatatctataatgtttattatatcttgtgatataattattaacaccacttcagtgtgattattatga

SEQ ID NO: 873968 - DNA, 120 bp, Artificial Sequence
  ENSG00000175170_24 (sequence is synthesized)
gtagtgattgccactgttgccgtggatgggtccctgagactttgcgaagtaggagccctgtgtgatagtgcgtcagagtcgggcctgagagcagtcctggccagggctttaacaggatgg

SEQ ID NO: 873969 - DNA, 120 bp, Artificial Sequence
  ENSG00000175170_25 (sequence is synthesized)
tctccggagcctgggattctcggagggctgaccaccaggaagaaacctcagaaggtaagattggggaagatgccaggtgatagaatccaccctgcctctgacagcatccaatctggagca

SEQ ID NO: 873970 - DNA, 120 bp, Artificial Sequence
  ENSG00000175170_26 (sequence is synthesized)
ggcagtgcttgggtgtcggggctctgaggctccggcctgacctcttcacggggtcgacgggatcgtctccggatgccaggagtcccaaagggccgaccaggatgaggaaaccccaggcgg

SEQ ID NO: 873971 - DNA, 120 bp, Artificial Sequence
  ENSG00000175170_27 (sequence is synthesized)
tggcagtgcttgtgtgtcggagctctgaggctccggcctgacctctcctcggggtcgacgggaacgtctccggatgccaggactcgcaaagggctgacaagaatgaggaaatcccaggcg

SEQ ID NO: 873972 - DNA, 120 bp, Artificial Sequence
  ENSG00000175170_28 (sequence is synthesized)
gacctctcctcggggtcgacgggaaggtctccggatgccaggactcgcaaagggccgaccagaatgaggaaatcccaggcggagtccgggggaggcagcacggcatcccagcctcagggc

SEQ ID NO: 873973 - DNA, 85 bp, Artificial Sequence
  ENSG00000175170_29 (sequence is synthesized)
tacatagcagagatgaacaagcattagaaaattaaatgcacacaggtcatgtcagtgctatgtataatgtggtatactaagtata

SEQ ID NO: 873974 - DNA, 120 bp, Artificial Sequence
  ENSG00000175170_30 (sequence is synthesized)
ggttggggaccaagatgaacacactgcagccgaggacaagagccccataggagctctttgtccgacaggagagcagaggtcccacgtcagagaagatgcttgtatcttttcacggctctt

SEQ ID NO: 873975 - DNA, 120 bp, Artificial Sequence
  ENSG00000175170_31 (sequence is synthesized)
aagaggaagccgggaatgggagatggcaacaatccctgtcactggaacgctggcctctctggaaaagccacgcttttggaacccctccccttatgcccatggaggtggcacggtgctata

SEQ ID NO: 873976 - DNA, 120 bp, Artificial Sequence
  ENSG00000175170_32 (sequence is synthesized)
cgctgcctgggctccggcctctgctctctcctccctctcgctctgcctcccctgtttctcaggggcctggatgcctctcgctctcgccaaatgtcttcagcaaagatgacttcccagtcc

SEQ ID NO: 873977 - DNA, 120 bp, Artificial Sequence
  ENSG00000175170_33 (sequence is synthesized)
ggctccggcctgacctctccacggggtcgacgggaaggtttccggatgccaggagtcgcaaagggccgaccaggatgaggaaaccccaggcggagtcctggggaagcagcacggcatccc

SEQ ID NO: 873978 - DNA, 120 bp, Artificial Sequence
  ENSG00000175170_34 (sequence is synthesized)
cctggggaagcagcacggcatcccagcctcaggcctgccgggatggtgttggttgggttgagtctccccaaaagtcgtgccgccgtcagagatctcgaagacaggtaagattggggaaga

SEQ ID NO: 873979 - DNA, 120 bp, Artificial Sequence
  ENSG00000175170_35 (sequence is synthesized)
gtgatagtgcgtcagagtcgggcctgagagcagtcctggccagggctttaacaggatggtctccggagcctgggattctcggagggctgaccaccaggaagaaacctcagaagtttcttt

SEQ ID NO: 873980 - DNA, 120 bp, Artificial Sequence
  ENSG00000175170_36 (sequence is synthesized)
cggccccctgtagtgcaatttgtgtcagtctagggagagtggatttggagcccaaccaccattgaggaaaatccatctgacggacatgagcctcactcaggttctcatctacttccttgg

SEQ ID NO: 873981 - DNA, 120 bp, Artificial Sequence
  ENSG00000175170_37 (sequence is synthesized)
ggtctgccccgcctccctcagaagtttggaaccacatactgttctggaggggacctctcactgctgcagaacctgtcctccaggataccgacaagtgttcatctcggtcgtggctaatta

SEQ ID NO: 873982 - DNA, 120 bp, Artificial Sequence
  ENSG00000175170_38 (sequence is synthesized)
acttaccatatggtagtgaactcccttctggggccccaatattttgtttatttttaaaaaataaaattagtaccattgtttattttctgaatgtacagaaatatttgtctgattattatt

SEQ ID NO: 873983 - DNA, 120 bp, Artificial Sequence
  ENSG00000175170_39 (sequence is synthesized)
tacatgccctttgggaaaactttataaaataaaaaaatatgaaggagaatcttaccacacagagataatcactttaattatttttctattcatatttgcacatacaggtacatatgggat

SEQ ID NO: 873984 - DNA, 120 bp, Artificial Sequence
  ENSG00000175170_40 (sequence is synthesized)
ctatggttcctggctatggttcactggttcaacaatgttaggcccagtatctttgtgagtctattggaatttagctcacggctgtaagacggctactgcagctccaaccactacatgagt

SEQ ID NO: 873985 - DNA, 120 bp, Artificial Sequence
  ENSG00000175170_41 (sequence is synthesized)
ttacaaggccagcaaaagcagtcacttctgtattcttattagaaaagcaagaacttcagaggtgactcccagaggatttctctttaggtctggaaatctgtgtttagattggccagaacc

SEQ ID NO: 873986 - DNA, 120 bp, Artificial Sequence
  ENSG00000175170_42 (sequence is synthesized)
tgatctcatgaccatccctagctgtagagaatagcattgtcatgattgactttggatcaatcataatttattgactgagagtgcgcatgtggtcccctaaagaagatcaagaaaggaggg

SEQ ID NO: 873987 - DNA, 120 bp, Artificial Sequence
  ENSG00000175170_43 (sequence is synthesized)
aatttgcagtctgtactacagcatgcatactgttttataatctgctcttcctcttaattgcatatttccaacatctttccatactaagaaatatagattcagtcattcatttaacaacaa

SEQ ID NO: 873988 - DNA, 120 bp, Artificial Sequence
  ENSG00000175170_44 (sequence is synthesized)
attattgagagtgtactgtgttctaggaacgtaacttggcatggaggacacaataatgaacatagtatactccttgcctccatggagcttagcatctaatgagggatacagacattcatc

SEQ ID NO: 873989 - DNA, 120 bp, Artificial Sequence
  ENSG00000175170_45 (sequence is synthesized)
aaagaggttcacaaagaaatgtaaaattacgattgtaatttgtgctgaaaaggagggaggtgtgtggtgtgtgagagcagtgacaggatatttgactcaatcaggagggtctgtgttctg

SEQ ID NO: 873990 - DNA, 120 bp, Artificial Sequence
  ENSG00000175170_46 (sequence is synthesized)
aatggccagaagccagccccttgcctagctgtagcacaattattgctgtatgtagtccaatctcttattgctggacatttacattcttcccacatcttacctactatcatcgatgcaaca

SEQ ID NO: 873991 - DNA, 120 bp, Artificial Sequence
  ENSG00000175170_47 (sequence is synthesized)
cggggctctgaggctccggcctgacctctccacagggtcgacgggaacgtctctggatgccaggagacgcaaagggccgaccagaatgaggaattcccaggcggagtccaggggaggcag

SEQ ID NO: 873992 - DNA, 120 bp, Artificial Sequence; identical to SEQ ID NO: 835915
  ENSG00000175170_48 (sequence is synthesized)

SEQ ID NO: 873993 - DNA, 120 bp, Artificial Sequence; identical to SEQ ID NO: 835916
  ENSG00000175170_49 (sequence is synthesized)

SEQ ID NO: 873994 - DNA, 120 bp, Artificial Sequence; identical to SEQ ID NO: 835917
  ENSG00000175170_50 (sequence is synthesized)

SEQ ID NO: 873995 - DNA, 120 bp, Artificial Sequence
  ENSG00000231046_0 (sequence is synthesized)
aagggagcctgaagagctggtccttatacagctttctgaaatccctgagatctgtcaatgaatcgcgcatctttcactccacaagtatttgttgaacgtcattgtgatcatgctggctgc

SEQ ID NO: 873996 - DNA, 120 bp, Artificial Sequence
  ENSG00000231046_1 (sequence is synthesized)
ggttcttgactatcccctaaaattgtcagtcagtagaagctcactgagtatcatctgaatttaaatcaccattagctcccttctgatgaagcaggagttgactcagctgggctttcagct

SEQ ID NO: 873997 - DNA, 120 bp, Artificial Sequence
  ENSG00000231046_2 (sequence is synthesized)
ggacacggaaagcggaggtagatgaattgtcatgatcaagtgggtgtcatcaagtacttagaaaggtttcattttgttcctactgtctttccaacttactaataaaaatattgaaatcta

SEQ ID NO: 873998 - DNA, 120 bp, Artificial Sequence
  ENSG00000231040_0 (sequence is synthesized)
catagttccatgagaattttatgagaaggaaaaggatgttgtacatgggcagaaaggtgaaaattgtggccagaggcagattgtggtaaattacaaaattggctcataatcctttattcc

SEQ ID NO: 873999 - DNA, 120 bp, Artificial Sequence
  ENSG00000231040_1 (sequence is synthesized)
ttcttgcctccatgctctttgcaatgtgactttgccacttttctcattaagagatggattctgttctccattgccttctgtctggactggtcttgtaacttgttctggttaatacagagg

SEQ ID NO: 874000 - DNA, 120 bp, Artificial Sequence
  ENSG00000231040_2 (sequence is synthesized)
taaatgtgatgacacatcagaagcccaggcctcaagcaagctttcccacttgttctcttggaacccttcccagctatcagacactactggcaaagacattgaaaagaatcacactgctaa

SEQ ID NO: 874001 - DNA, 120 bp, Artificial Sequence
  ENSG00000231040_3 (sequence is synthesized)
accagtagcagcttttatcttcttctcagattgtatacatgcaggataaaagtgtttctaacacatagacttctatattccagcataaagatgtattaggcgcatttatacttttacatc

SEQ ID NO: 874002 - DNA, 120 bp, Artificial Sequence
  ENSG00000231040_4 (sequence is synthesized)
gaagcctgtttcaacatgaacggagcccaggcaagtgtccttgtcatcaatcgagagtgaaagttagctatacttaaaaaaaaaataggttttaaaaaatatcaaaataattagaaaaga

SEQ ID NO: 874003 - DNA, 120 bp, Artificial Sequence
  ENSG00000231040_5 (sequence is synthesized)
acagtaccatgttagatcaatgacttcatttatcacaatatattccatgttacagttacctctcaggaaaatgacattgatagagtcaactttcttgagaattaagcttctgtaactttt

SEQ ID NO: 874004 - DNA, 120 bp, Artificial Sequence
  ENSG00000231040_6 (sequence is synthesized)
atttaaaggtgtctcaagcttgtgcttcttagtattttatgatatgtctttagtttttgtaatttcactttgtcaaaacattacatttgtcattattcatactgaaagacaaggtatttt

SEQ ID NO: 874005 - DNA, 120 bp, Artificial Sequence
  ENSG00000231040_7 (sequence is synthesized)
gaagataaaaatctaccaaggatcatctaccatttgcttttgatataaaagatttataagaccatttagaccacaaaaacaaaccttcctaaggacatatctatacatcaacaaatatta

SEQ ID NO: 874006 - DNA, 120 bp, Artificial Sequence
  ENSG00000231040_8 (sequence is synthesized)
aaaattacatttctaggaaattaaaaacaatttagaaaggtgcttagttgaacagaaattagctacaaccaaaataatgattaatattataaccataatcatagaaaataacagttgatt

SEQ ID NO: 874007 - DNA, 120 bp, Artificial Sequence
  ENSG00000231040_9 (sequence is synthesized)
gccactttcaagaataaaagcaaattctgtgaatacagaactaaaatactaaaaataaacaaacaagcttgggagagattagtcatgcaaaatccaaccctagatatttgatggcaatta

SEQ ID NO: 874008 - DNA, 120 bp, Artificial Sequence
  ENSG00000231040_10 (sequence is synthesized)
tcttaattttttaccttataattgagatggtatttcactggcaaagcttaaaccaagtaatattcacaaaaatggaagaaattcataattaaagaaagtcattaagcaaaacagaaaaaa

SEQ ID NO: 874009 - DNA, 120 bp, Artificial Sequence
  ENSG00000231040_11 (sequence is synthesized)
gcctgtttcaacatgaacggagcccagatatttatgtaggccagtaattggagtgtatttccctgttcaatttcacattgtctataaaagggtttctcatgatcgatgactttctagtta

SEQ ID NO: 874010 - DNA, 120 bp, Artificial Sequence
  ENSG00000231040_12 (sequence is synthesized)
aattcagaagaaaacatcttgcagctactgccctattgccatggccacacatcactgccttctagacatgggaagttggtgacttaatcctcgttataccctgattttggacaaatttta

SEQ ID NO: 874011 - DNA, 120 bp, Artificial Sequence
  ENSG00000231040_13 (sequence is synthesized)
caagaagaataggacttctacttctctatgtctacatgcacctggaacagtgctaggtctatgcttacaaattgattggttcaggtcaccgccatgagcctcaggacagaaaattgccgg

SEQ ID NO: 874012 - DNA, 120 bp, Artificial Sequence
  ENSG00000231040_14 (sequence is synthesized)
tatgggcctttgaagcctcccatgttccagagaagccttttctagctgatctcccaccatgacatccttcccccacagctggtttgtctgttattccaccctctgacttcatccttcagg

SEQ ID NO: 874013 - DNA, 64 bp, Artificial Sequence
  ENSG00000231040_15 (sequence is synthesized)
gacctcgtgaaacctcagaaaccatttttataacctcaatacctaatagaaactggcacatggc

SEQ ID NO: 874014 - DNA, 120 bp, Artificial Sequence
  ENSG00000231040_16 (sequence is synthesized)
tttttataacctcaatacctaatagaaactggcacatggcccctgtgagctgtgactgcaagagtcagcacctaaattagatcaacactacaacatcaaaaagccagcttgatggcacag

SEQ ID NO: 874015 - DNA, 120 bp, Artificial Sequence
  ENSG00000231040_17 (sequence is synthesized)
cggggagtgaggaagactcggtggacaaatctgactggaaaacaagtaggcgttgcagatgaagacctggaaccatggtaggaagtgggacagggagcatttggacaagctgttcaagaa

SEQ ID NO: 874016 - DNA, 120 bp, Artificial Sequence
  ENSG00000231040_18 (sequence is synthesized)
ctgatcatgctcatgtgtatgggaaaacagatggaggaagagaaattcctgaagagcacaagactggtggggcaaggaacaagcctactgagatgagttgcagatttgaagatgggagaa

SEQ ID NO: 874017 - DNA, 120 bp, Artificial Sequence
  ENSG00000231040_19 (sequence is synthesized)
atggtttcgttgtctaccatgtaaaaactcatttatgcaagatgcttgatatctgaatttcaatttcttcattatcaaaatgaatattaaaaatactctacttcttagagttgtcaaaaa

SEQ ID NO: 874018 - DNA, 120 bp, Artificial Sequence
  ENSG00000231040_20 (sequence is synthesized)
caaatctgactggaaaacaagtaggcgttgcagatggtgagttcagcactgcctctgctgtagtgagctacgcccaacctagaaatgcatcttgctggcaatgtctctccaagagcctcc

SEQ ID NO: 874019 - DNA, 120 bp, Artificial Sequence
  ENSG00000231040_21 (sequence is synthesized)
ccttttgctgtcaggagcacaaggggcatgcagagaagttgagagctgagcattgcatgctactgagcagctgcactcagtggtgcagaggagggacaggaggcacccataagggaggaa

SEQ ID NO: 874020 - DNA, 120 bp, Artificial Sequence
  ENSG00000231040_22 (sequence is synthesized)
atgaatagggctgttttacttgctaaaaagactcaccttttgtctcctcctgagctgacatccttttcttgctactccaccattatattctctttaaacagtcatttttattacagttaa

SEQ ID NO: 874021 - DNA, 120 bp, Artificial Sequence
  ENSG00000231040_23 (sequence is synthesized)
cccttcccagctatcaggtaaataagcccaggctattgtgctggatgatgagaggtcactggaacactgatgagccataacagctgaggccattctagaataggcagctttagccaacca

SEQ ID NO: 874022 - DNA, 120 bp, Artificial Sequence
  ENSG00000231040_24 (sequence is synthesized)
ggcagctgactgcagatacaggcctgcatccagatgagtccagaaaagcaacctagatgaggaaaccaagtaatgaaaatgttgagtaactgcatctatgtatataaacaagtagccaaa

SEQ ID NO: 874023 - DNA, 120 bp, Artificial Sequence
  ENSG00000231040_25 (sequence is synthesized)
aatacctaatagaaactggcacatgggcaactttgcaaattaaatggttcacatatgaaggagcacagctgtagaaggaaaataaggaagagaaaataacttcggaaaattcccaggact

SEQ ID NO: 874024 - DNA, 120 bp, Artificial Sequence
  ENSG00000231040_26 (sequence is synthesized)
aatacctaatagaaactggcacatggactgtgtgcgaaatgttcaaacttgctcactgggttaaaaaggatggacagcttagagaaaaagaagaaaaaaaggaaactcggctgtgcgcag

SEQ ID NO: 874025 - DNA, 120 bp, Artificial Sequence
  ENSG00000231040_27 (sequence is synthesized)
tgcagatgattgccagctcaaaatatcaattctgttgatctgttttttcttctacgctcagaagacctggaaccatggtaggaagtgggacagggagcatttggacaagctgttcaagaa

SEQ ID NO: 874026 - DNA, 120 bp, Artificial Sequence
  ENSG00000231040_28 (sequence is synthesized)
ctatgataccttcatttacacactgcttttaaaatattctaagtatctgacgtatttgacaccaaaacctttttaaatgctattcttttgattttccaatacaattcaaacattatacaa

SEQ ID NO: 874027 - DNA, 120 bp, Artificial Sequence
  ENSG00000274414_0 (sequence is synthesized)
tgacgcaggaaggagccctctcaccatcatgtctcctcacctcctctggccgctaatattgctgaagtggctaaatgagtcccagtattaattatctcagccattttcagagtgatactg

SEQ ID NO: 874028 - DNA, 120 bp, Artificial Sequence
  ENSG00000274414_1 (sequence is synthesized)
agaagaaatgaaatggagatagggaagaaggaagccgctcctctctacaggatgccaaatcaatgcaggaggagattctgagaactactggacaacggccacaggggaacaggggattca

SEQ ID NO: 874029 - DNA, 120 bp, Artificial Sequence
  ENSG00000274414_2 (sequence is synthesized)
ttccatctcaaagcctcaccctacacattatctttattagctataaaagggaaaagggatttgcaatggagagttatggcagactccagcctcatgaagtgacacaacttagcattgcca

SEQ ID NO: 874030 - DNA, 120 bp, Artificial Sequence
  ENSG00000274414_3 (sequence is synthesized)
cccaggggacaaacccacactatgagtctgattcagtgcaccaagaaggacaaacatcacttactctgctataacataacgcagtatattatacactaacatatgtagtatattacatta

SEQ ID NO: 874031 - DNA, 120 bp, Artificial Sequence
  ENSG00000274414_4 (sequence is synthesized)
cataataacatagtacaggcttctaggacacagtttatagaagtgcagataatacttgaggcagtttcccaaacttgcaaataaaaactctccacagggcttgtgactagcacattccca

SEQ ID NO: 874032 - DNA, 86 bp, Artificial Sequence
  ENSG00000274414_5 (sequence is synthesized)
ataaaaactctccacagggcttgtgactagcacattcccaaagccccaaacccagaattccacctgcttagtgagcacctccagag

SEQ ID NO: 874033 - DNA, 66 bp, Artificial Sequence
  ENSG00000274414_6 (sequence is synthesized)
tcggccatctctagggcatatttttactgtgcaatgtgggaatctctgccatagggtgggctgcct

SEQ ID NO: 874034 - DNA, 120 bp, Artificial Sequence
  ENSG00000274414_7 (sequence is synthesized)
ctgtgcaatgtgggaatctctgccatagggtgggctgcctttctaacccagtggcccggttctagcaggacttccccagtatgtggatgggggcacagggactcttgggggggcctcaag

SEQ ID NO: 874035 - DNA, 120 bp, Artificial Sequence
  ENSG00000274414_8 (sequence is synthesized)
gagctgggacgagagtgggcctggtaccctgccccagccctcccctgacaggagttagtaagggacaggttagcatgctaaagagatagcaagctggtcacagcctagggccaccaccct

SEQ ID NO: 874036 - DNA, 120 bp, Artificial Sequence
  ENSG00000274414_9 (sequence is synthesized)
tctgtcttacaagtcagaaacatgtcctgactttgggggagagggtatatgttaaacgggcccaccctgggagctgtagtggtcactgtggagctgagcactgggctgcactcctcgctg

SEQ ID NO: 874037 - DNA, 120 bp, Artificial Sequence
  ENSG00000274414_10 (sequence is synthesized)
ccccagagtgaccaggtgggtggtttcatccaagaggcagggctcagaaggccaggctgagccaccgatatgcatgtctgcaccccaccacttcctgctcagtctgtatcaggcccggga

SEQ ID NO: 874038 - DNA, 120 bp, Artificial Sequence
  ENSG00000274414_11 (sequence is synthesized)
tgaaatcgtcacttagacgctcaggggtcctcccacccatctggccaacacaaacctgccagcatagcactgagtggaaggttccagtgcacccacaggcctggctgttaaaatgtccgg

SEQ ID NO: 874039 - DNA, 120 bp, Artificial Sequence
  ENSG00000274414_12 (sequence is synthesized)
cctctccagaggacaggttaagttcacactgagaaagcctggctctctccagctagcctgaattaaagtgagaaggatgagcacagcacctgtggaaatggcgctggaaagcaagtgtac

SEQ ID NO: 874040 - DNA, 120 bp, Artificial Sequence
  ENSG00000274414_13 (sequence is synthesized)
ctaggaactgcctctgggccaccgaagtgcgccggcccagtgttctcagacaacccaggaggagtcctccatctggccacttcccacccgttaggccccgaggggacaccaggttggtga

SEQ ID NO: 874041 - DNA, 120 bp, Artificial Sequence
  ENSG00000274414_14 (sequence is synthesized)
gacccggaccccaccagcaaaggacccttccttcattcatcacacactggctccatctgcactgcacctactgccagccaggcactgagcttcacatccgcacaaaacacaaagacctct

SEQ ID NO: 874042 - DNA, 120 bp, Artificial Sequence
  ENSG00000274414_15 (sequence is synthesized)
gatacggtttgggtctgtgttcccacctaaacctcgtggtgaattgtgattatgttgagttgttttggaggtagggcctggtgagaagtgactcgatgatggggtggatttctcatgaat

SEQ ID NO: 874043 - DNA, 120 bp, Artificial Sequence
  ENSG00000274414_16 (sequence is synthesized)
ggtttagcaccatctccttgatgctgttcttaagatagtgagttttcacgaaatctggttgtttaaaagtgtgcgccccaccccttgcttctgctctggccatgtgatctgcctgccttc

SEQ ID NO: 874044 - DNA, 120 bp, Artificial Sequence
  ENSG00000274414_17 (sequence is synthesized)
tgatctgcctgccttccccttcgccttccaccatgattgtaagattcctgaggcctccccagaggctgagcagatatcggtactacgcttgctatacagcctgcagaactatgagccaat

SEQ ID NO: 874045 - DNA, 120 bp, Artificial Sequence
  ENSG00000274415_0 (sequence is synthesized)
gaatggctgggtgaacagccaagggagaaagggaagggatggtttctatcattggattgaactgtaaaggagctgcagggtgacagatgttggcaggaattccagtagagtttgtgtgta

SEQ ID NO: 874046 - DNA, 120 bp, Artificial Sequence
  ENSG00000274415_1 (sequence is synthesized)
cagtgactccctagcagggctgacacctgcacaggctaggtgtacaccctagcagaaggaaaggttgcaacatcaccaaggtggggcatttgccagaggtacataccagggcatttgcca

SEQ ID NO: 874047 - DNA, 120 bp, Artificial Sequence
  ENSG00000274415_2 (sequence is synthesized)
ccctttttaaggctgagtagagggaggagaagccaagggcaacccaaggccatctcaccactactccgaggaatggtccatggagacaacagattcaagagcacatataatgcaagttcc

SEQ ID NO: 874048 - DNA, 120 bp, Artificial Sequence
  ENSG00000274415_3 (sequence is synthesized)
ttgattcatgctgtctattggctgggaactttgagctcttccttggaggagggagggtgatcaggttgtctgtgttttgttgggaggccatattattgctgaagggattgaagaattttc

SEQ ID NO: 874049 - DNA, 120 bp, Artificial Sequence
  ENSG00000263547_0 (sequence is synthesized)
atcatctgaccatgtacaacaaatgtaatgaaaacggtaaacctgaaccaaggcaaacccaacagtttaatttaaaaacttgaagatactaagtattcccttcaactggacattcagaaa

SEQ ID NO: 874050 - DNA, 120 bp, Artificial Sequence
  ENSG00000263547_1 (sequence is synthesized)
tttctggttctgctgaccctcagtctcctggaccctagaagaagaatcagacccatccttcagtctcatctctagaagcccagaataaaatgaaaaaggtatgaacgagaagagagaaat

SEQ ID NO: 874051 - DNA, 120 bp, Artificial Sequence
  ENSG00000263547_2 (sequence is synthesized)
cactgttgacaacacattttacctagcagtccaacattgtttatcagcataataaaatgtgccaatactcaccagcactctaaagtatgcactaataataaatagagatatagggcataa

SEQ ID NO: 874052 - DNA, 85 bp, Artificial Sequence
  ENSG00000263547_3 (sequence is synthesized)
gaaaacgaggggcccgcacatgccctgctcatctcaaaacttctcgagaagcaaatctaacttgcaggaactttgagaaaggcag

SEQ ID NO: 874053 - DNA, 120 bp, Artificial Sequence
  ENSG00000263547_4 (sequence is synthesized)
gagaagcaaatctaacttgcaggaactttgagaaaggcaggagaagcaaaaaagcaaaatgagattgttttcataacttaaagaggctgaaaatgatgaaactgggctgagatgtgttac

SEQ ID NO: 874054 - DNA, 120 bp, Artificial Sequence
  ENSG00000263547_5 (sequence is synthesized)
aggagcctacacagctagaaggatagattcgaggtcatgctttgagcaaaagccattaaaatacataaataacattgtatcacacttttgcctctcaagttgagactgcctctaaattga

SEQ ID NO: 874055 - DNA, 120 bp, Artificial Sequence
  ENSG00000263547_6 (sequence is synthesized)
gtgctgggattacaggatgagccactgagcccagctgactccaagcttttctaatgaggtttctgggccacagagtggagacagtccctatcctcaaaggatgctacagtgcattgtcaa

SEQ ID NO: 874056 - DNA, 120 bp, Artificial Sequence
  ENSG00000263547_7 (sequence is synthesized)
agaccaatgcgtcaaaatacttatggaagaaggtgcccaaaagttcgaagacagttatctacacgggaggtgtaagaaaatcaccttggaatacccatctcggaagaacaggtgtgaatg

SEQ ID NO: 874057 - DNA, 120 bp, Artificial Sequence
  ENSG00000263547_8 (sequence is synthesized)
cccttgaatcacttggagagcttctcttcgatgttaaattattgtagtaacaccaagctcaccacccagaatgatgcagtcagcctcccctggaaggaatgaaggtcgtagtctcctctc

SEQ ID NO: 874058 - DNA, 120 bp, Artificial Sequence
  ENSG00000263547_9 (sequence is synthesized)
catagatgtgtctcattttctatttaaaaaaaaaaatgtgaattcaggcactgcgtttgaaaagtttggcagcaaaacaaatgtccagtccatgtcctgggtcctaggggagggcaaaaa

SEQ ID NO: 874059 - DNA, 120 bp, Artificial Sequence
  ENSG00000263547_10 (sequence is synthesized)
ccctcctctcctggctgccttgtgcccaggcccagccagaggcctgaaatgtggccatgtatggcaacacggaccgtgaagcccggagatctgcagcatcaagccccatgcatgagcgaa

SEQ ID NO: 874060 - DNA, 120 bp, Artificial Sequence
  ENSG00000263547_11 (sequence is synthesized)
gagagcactgacagcagaggatagtccttcctctgagaaacacggttcttacagggttggggacaagaggcattctgcagctgggatcagcctcagcttggcaggagaggatcaagcacc

SEQ ID NO: 874061 - DNA, 120 bp, Artificial Sequence
  ENSG00000263547_12 (sequence is synthesized)
ctaggggactcagtgtggcaggaagaactcagagctccatcctgtggctgctcaggggctgaagcagaggcattgcctttggactgtccaatgccctgaggattttggatacggtgagtc

SEQ ID NO: 874062 - DNA, 120 bp, Artificial Sequence
  ENSG00000263547_13 (sequence is synthesized)
tttctgctaaagaggcatgtgaggtccttgggcaattgtttaaaataagaacaggtgaccatatttgcaccccaatatgaggaagagtttacaaaggcttccattatttccacaaaacta

SEQ ID NO: 874063 - DNA, 120 bp, Artificial Sequence
  ENSG00000263547_14 (sequence is synthesized)
cagaaacaggcctcgtgattcaggagactgaagggacctggtggacaagaataagagccaagtgaatcaaaggtttctttaagggaacaaacatcaggacagaatttcatgaagtggtaa

SEQ ID NO: 874064 - DNA, 120 bp, Artificial Sequence
  ENSG00000263547_15 (sequence is synthesized)
cacaactagaaaggagcacagaaaaaccagtgcatcccgcttttgtataatgaagaccctgtaaggggtaacaagactcagtcaaggtcaagtgaagcagatgggtacaaacgagcgcaa

SEQ ID NO: 874065 - DNA, 120 bp, Artificial Sequence
  ENSG00000263547_16 (sequence is synthesized)
tgcaagcaaatgaaagtgatgccgtgacctgactgccgtggttagaggacttcttatgctcaagcacaaagaacagaccgtaaggagcagctgtgatccagggaaccggataggaagatg

SEQ ID NO: 874066 - DNA, 120 bp, Artificial Sequence
  ENSG00000263547_17 (sequence is synthesized)
ttgcctgggccagaatgaccctacgaacagaaaaactgagatctacagaagtttatggaaaagtacccatgatcacactgctgatatgtggcaaacctgagctatagataccaggcttta

SEQ ID NO: 874067 - DNA, 120 bp, Artificial Sequence
  ENSG00000263547_18 (sequence is synthesized)
cagaagcagaatcaggttgtggttgcagaaaaaataagaacagcgaaagacgcgtggggcatcacatctccatcttgcaggaactggcagcgatggtccaggccaacgcctctcgaggtg

SEQ ID NO: 874068 - DNA, 120 bp, Artificial Sequence
  ENSG00000263547_19 (sequence is synthesized)
gcctcctcctcccatgtgagggaaggactcaccaggggcttccctgctggtagggctcagagacgttactgttatttaactccaaacccatcaccggcgcctgagatgcaggcttgtgtg

SEQ ID NO: 874069 - DNA, 120 bp, Artificial Sequence
  ENSG00000263547_20 (sequence is synthesized)
cggggcagatggccagctgtcagggaggacgtgagcacttcactttcaaggaccggttctgaccctggagcacgcagggtgcggcctggcgctgagtcccgtgttactcacctcaacgtg

SEQ ID NO: 874070 - DNA, 120 bp, Artificial Sequence
  ENSG00000263547_21 (sequence is synthesized)
ttttaacgctgtttcctccttcccatttgataacccacctcttcgacaaacgaccttcaatatttgagtggtaacagaaacggagccactgtggcaataaattgctcataagcttggaca

SEQ ID NO: 874071 - DNA, 120 bp, Artificial Sequence
  ENSG00000263547_22 (sequence is synthesized)
tccaaaatttcattttcaatctgaacctctcggatcggcacatccaacggaagcctggaagctcctctcagatgcctcccagtgcctttcacctgacgtgactaactcaaagctctcgac

SEQ ID NO: 874072 - DNA, 120 bp, Artificial Sequence
  ENSG00000263547_23 (sequence is synthesized)
gcttcaggtgtctccactctgatacttccaggcactgccgtctacacagaaacctggtggttatcccggaaactgccctcaccctctgtcctgggttgaatagggcccctcaaaacgtac

SEQ ID NO: 874073 - DNA, 120 bp, Artificial Sequence
  ENSG00000263547_24 (sequence is synthesized)
cttcacctagaacctcagaacacgatcttatctgaaaattggatccttgcagatgcgattaggatcaggccctaaattcaaggactggtgtccttgtaagaagaggagaggacatcctga

SEQ ID NO: 874074 - DNA, 120 bp, Artificial Sequence
  ENSG00000263547_25 (sequence is synthesized)
tccacacgaggaagaaccatgggacgatggaggcagagcgtggagggacgcagccaccagccaggagcacctgcagccacagggacctgtgagagaggcggggaaaggagaagtctccga

SEQ ID NO: 874075 - DNA, 120 bp, Artificial Sequence
  ENSG00000263547_26 (sequence is synthesized)
gaggccttggaaggagcaggccctgcccacaacttgactttggacttctggcctctggaactatgagaaactagattgccctttctccattgccgtggccaccatccaagcctccgtgaa

SEQ ID NO: 874076 - DNA, 120 bp, Artificial Sequence
  ENSG00000263547_27 (sequence is synthesized)
tcttgccaggacctgtcccacagctcgccgagggattccccacatttattcttgcctccacccaatctgatctctgcagagcagtgtgttcttgggaaaacacaaattggatgacgcaga

SEQ ID NO: 874077 - DNA, 120 bp, Artificial Sequence
  ENSG00000263547_28 (sequence is synthesized)
tccctcgtttgaatcattcggccgttttgcattactcttaggctaaaatccaagatcctcagcacggcccccaaggctctgctcgctccggcccctgcctgcctctccagcctcatctca

SEQ ID NO: 874078 - DNA, 120 bp, Artificial Sequence
  ENSG00000263547_29 (sequence is synthesized)
ccacccccgctttacttctcttttgtgaaactacaatcacgctgaccttctttccatttccacacggagccggactccaccctgccctggagtgtttgtttccactcttccctctgatgg

SEQ ID NO: 874079 - DNA, 120 bp, Artificial Sequence
  ENSG00000263547_30 (sequence is synthesized)
agacacttgtcccatttctcatcggagtgatctccccacccttcaagtccaggataattatcactccctcacggaggtacttcacctctcacatagataaaaatgacaatctctgttaca

SEQ ID NO: 874080 - DNA, 120 bp, Artificial Sequence
  ENSG00000152931_0 (sequence is synthesized)
aaacagcctccttcaaaatgcagcttgactgtgattcatggcacaaagctggaataaccctgccagttcttagaagctttaagattcatcgtcttgaacttgatacacatagtatagcac

SEQ ID NO: 874081 - DNA, 120 bp, Artificial Sequence
  ENSG00000152931_1 (sequence is synthesized)
cttaaaaacgaatcatctgctagttcagtattttctacttacaatcactccctcccagggcatgtaattaatttactgagcttaaaaaaaaaatatcaggattactcacacagtcttgaa

SEQ ID NO: 874082 - DNA, 120 bp, Artificial Sequence
  ENSG00000152931_2 (sequence is synthesized)
gatgcaatgtcagctatttaggacagaaacatccaaggccgtgtcagaactcaattacgactacatatgcattaaggcaggaactggcaggcctcagggtacgccaactataggactcgt

SEQ ID NO: 874083 - DNA, 120 bp, Artificial Sequence
  ENSG00000152931_3 (sequence is synthesized)
gcttctcgtacgctgggctataatctatgaaactgagctccagagccagccaatcacttagctcctcataacaagtctaactggctctggaaagctgaaagggctgcactggaacaacac

SEQ ID NO: 874084 - DNA, 120 bp, Artificial Sequence
  ENSG00000152931_4 (sequence is synthesized)
agatgagatattctacacattaatctacttatctggaatcactttgcctctaaaggccagagaaaaatcacagcttccttgtcggaggggaaaaggacaggtgatctggggaaaacgcag

SEQ ID NO: 874085 - DNA, 120 bp, Artificial Sequence
  ENSG00000152931_5 (sequence is synthesized)
ctacacctggagcaaggtctcttcccggcttggcaatctcagctgtgccggcgctacgggacccgagccgtcccagaaaccaaagggcaggcacggcagcaaacgcctgagtgctgctgc

SEQ ID NO: 874086 - DNA, 120 bp, Artificial Sequence
  ENSG00000152931_6 (sequence is synthesized)
cttcggtgactatatgagaatggaaacttctaaggaagccaggttgttagaattgttaccccctttactcagagataacatagattatccaggctgagatggaaaacaagccctttattg

SEQ ID NO: 874087 - DNA, 120 bp, Artificial Sequence
  ENSG00000152931_7 (sequence is synthesized)
aattttcaacacagactccctgcttctcatctccttaataaaatttcattaaaatccccttgaactcccatgttcaaatctccatttgttgacagacaaagccaacaatactctaaactg

SEQ ID NO: 874088 - DNA, 120 bp, Artificial Sequence
  ENSG00000152931_8 (sequence is synthesized)
aggcctgcaagtcatttcatttgtatttttgtccagaaatttcccataggaagacttcacctcctacaactccgaagaaaacccttactgtccaagaccgtcaccagcaaccatccgcag

SEQ ID NO: 874089 - DNA, 120 bp, Artificial Sequence
  ENSG00000152931_9 (sequence is synthesized)
tcattcaagtggaagctttcacagcttttgtacattctctgtgtcaatatacaactgagttacagactgtcccctggctccctgacccttacaaacactaaaagttttgtttgactcaac

SEQ ID NO: 874090 - DNA, 120 bp, Artificial Sequence
  ENSG00000152931_10 (sequence is synthesized)
atgatgagaactttctaaaagaccagcactgctcttcccctcctataatcataataatcatgataacctgaaacatgttactgggactcgacatttttctggggattgaaatctttagtc

SEQ ID NO: 874091 - DNA, 120 bp, Artificial Sequence
  ENSG00000152931_11 (sequence is synthesized)
cttggagctgtcacatagcaggggcaacctcacactgaaacaaaggaagtgatgtcccattattatccaccctgagccaccataatatgctgtttacatttattttcttcagcctgtgca

SEQ ID NO: 874092 - DNA, 120 bp, Artificial Sequence
  ENSG00000152931_12 (sequence is synthesized)
aaacaaagcaatggaaaaggaaactaaaaaatatacatactagtaccattatcttcttttgcctaaaattactaatgcaccacgtcagtctgcttccttcaggcatcattctcaattcat

SEQ ID NO: 874093 - DNA, 120 bp, Artificial Sequence
  ENSG00000152931_13 (sequence is synthesized)
caggacttgtattagcaggttctggctagagagactatctcctgtcatcacgatcaattaatgttttctggtgatcacatcaggccctatctaagaagctcatggtatacaagggtcacc

SEQ ID NO: 874094 - DNA, 120 bp, Artificial Sequence
  ENSG00000152931_14 (sequence is synthesized)
caaatagctgagtgcagtccttgctcatatttccttcatcttaaccccgcaaacaagaattaagatgatcccaataaaagaaaaattgctcaggaaactgaacctttttctgaaccaagc

SEQ ID NO: 874095 - DNA, 120 bp, Artificial Sequence
  ENSG00000152931_15 (sequence is synthesized)
actgtcagcaaatctcaggtattagagcaactatggttgattgaaaagtgtctcaaaatctgggccaagaatgattgctaggtccataagctaatttgtctggccttgccatttacgtaa

SEQ ID NO: 874096 - DNA, 120 bp, Artificial Sequence
  ENSG00000152931_16 (sequence is synthesized)
gccaaagaaagtcactcatgagtaaactatagaaaacgttcagacccatcctgttagtatgtcaaatcaactaagactggcagggtattaactccattccaggtgacatggataaagagc

SEQ ID NO: 874097 - DNA, 120 bp, Artificial Sequence
  ENSG00000152931_17 (sequence is synthesized)
cccattattttcacagtgccagcctctacctaaggaaaccctagaccttggaaccagtttcctggtagggaactgctgacagtttcaatgctgacagttggagccaatgcctcatagtgt

SEQ ID NO: 874098 - DNA, 120 bp, Artificial Sequence
  ENSG00000152931_18 (sequence is synthesized)
aaactgaaagaaaaatagttgctttttaaaatgtcagcaagaaggcctgcctcatcttaacaaagcaaaaaaaaatgctttaattcaaattaaaaatcatgatactagagatgggagtct

SEQ ID NO: 874099 - DNA, 120 bp, Artificial Sequence
  ENSG00000152931_19 (sequence is synthesized)
gtggtcactataaagataaagttcatgttcttggttcagataacaaaacactttatctggataaatggacctcaaaatttgctcttggcacatgggggaaattttttgttgtattttgtt

SEQ ID NO: 874100 - DNA, 120 bp, Artificial Sequence
  ENSG00000152931_20 (sequence is synthesized)
gttgttgttgttcttgttgttattgtttaaattaatcttcctaaggccatgaatatgaaatcatattaataatgcatgtgacaaaattctaaaatatattacacttaaaattagcataaa

SEQ ID NO: 874101 - DNA, 120 bp, Artificial Sequence
  ENSG00000152931_21 (sequence is synthesized)
atccatttatctgtggtcttgctctttgtctaagtttctcgaaagcattaggacaatgacatatacaaaaactggcaattacatttaataagaaaaatgtggggagtgcattcttaatat

SEQ ID NO: 874102 - DNA, 120 bp, Artificial Sequence
  ENSG00000152931_22 (sequence is synthesized)
ttgatgctaaaaccatatctttgctttaaacatgtaaagcagtataacatggtggttggtagaaactctggagtcaggccacctgggttcacatcccagctctgactcttaattgttaga

SEQ ID NO: 874103 - DNA, 120 bp, Artificial Sequence
  ENSG00000152931_23 (sequence is synthesized)
ccctgagcaagctacttaacagcattatgcctcagtttcctcctatataaaagggtgccacacacagtaactacctcctaggctggtgtgaagattaaatgggcaaatacatgcttagaa

SEQ ID NO: 874104 - DNA, 81 bp, Artificial Sequence
  ENSG00000152931_24 (sequence is synthesized)
ggctggtgtgaagattaaatgggcaaatacatgcttagaactgagcctattatatggtgactgctcattaaaagaaaattg

SEQ ID NO: 874105 - DNA, 120 bp, Artificial Sequence
  ENSG00000152931_25 (sequence is synthesized)
gacactcgtcattaacacctactcacaaccgattcccccacccactttggcctcaccaagatttggcaagcaggagaattaaatgtcactttgctaccatcctctgctgaacctccaaca

SEQ ID NO: 874106 - DNA, 120 bp, Artificial Sequence
  ENSG00000152931_26 (sequence is synthesized)
gaaaaacccatattgcccaagtacaaagcatgaaatactgctggcctaccctgacttttcagctattctccttgcatatagtaaatgactccccaggagacatcatcttaaagtctgaga

SEQ ID NO: 874107 - DNA, 120 bp, Artificial Sequence
  ENSG00000152931_27 (sequence is synthesized)
cacaaaaaaggacccaaagtcctatatgcttgaagaattgcatggcaatatatttagttaacattttctattttattagaaaaaacagacaattcaattgtcgatgtgatcgtttcaggc

SEQ ID NO: 874108 - DNA, 120 bp, Artificial Sequence
  ENSG00000152931_28 (sequence is synthesized)
ttcccagcctctcctttctgacatcatcctatatactacaacctccaccagaaaagcagtatggtactgggaaaaagagatctaaaggcagaacactagggcttcactctcagcactgtt

SEQ ID NO: 874109 - DNA, 120 bp, Artificial Sequence
  ENSG00000152931_29 (sequence is synthesized)
aactgagtgacttgactaagtcactgaaattcactgaaactgcagtttccccttctgtcaaagggggataacaatatcagcttcacagggtgctgtgaaggaagcaaatgagaaaatgaa

SEQ ID NO: 874110 - DNA, 120 bp, Artificial Sequence
  ENSG00000152931_30 (sequence is synthesized)
agtgagcatccttttaaattataaacagagaataagggagaggggagggggaaggggagaggaggaagaaaggaaacaatctgccctccctcaccccttcacactaggtaaaataaaatg

SEQ ID NO: 874111 - DNA, 120 bp, Artificial Sequence
  ENSG00000152931_31 (sequence is synthesized)
tttagacagaaaaacctaaagaaaaggatccaaataaaatattcttaggaactgtcaaagggagaagacattggaatctccaaatctggccaagagctcagcctaagcagcatgttttga

SEQ ID NO: 874112 - DNA, 120 bp, Artificial Sequence
  ENSG00000152931_32 (sequence is synthesized)
actcctgagtccttggaaccctgcactaaagctttgggactctgacctgcaggaaaaaaaaaaaaaaaatgcttccctcagttcattccctgtagtttaaaaacaagagcaactaaaggg

SEQ ID NO: 874113 - DNA, 120 bp, Artificial Sequence
  ENSG00000152931_33 (sequence is synthesized)
caagcttcgggggcaaggggagacaaacacctcagaccattaacttactttatccccattggaaatcaacttctggagaacatttcagctttgtatgctcttcttggtcccactcaaatg

SEQ ID NO: 874114 - DNA, 120 bp, Artificial Sequence
  ENSG00000152931_34 (sequence is synthesized)
ggaagttctgctcgaggccagaaatagaaaacaggaagtcaacagaactgattttcctaactgcccaaatgcaaatcaccacactccgttatggatgagaattagagtaaaatgtaaact

SEQ ID NO: 874115 - DNA, 120 bp, Artificial Sequence
  ENSG00000152931_35 (sequence is synthesized)
tctttttaaaaagaagttcacatgctaactgtgtacagaaaacatcctactccagggaagaaagaaagaaagaaagaaaggaaagatccatcagcttccttccttaataaaggaggattg

SEQ ID NO: 874116 - DNA, 120 bp, Artificial Sequence
  ENSG00000152931_36 (sequence is synthesized)
acagagctggactgacagtgaagtaaaggttaccgacggtgtgctcatcagaaccatgctgccactaaaaataatgaagtgtcccactttgatgcgacactattctccaagttggttcct

SEQ ID NO: 874117 - DNA, 120 bp, Artificial Sequence
  ENSG00000152931_37 (sequence is synthesized)
ctaaaggtgcttttcttcaagggaagcagatactaaagtgacaactttctcattaccattcagactattttcttagagtcccaggtttgaaactttcaagttgaaactctaagctgcacc

SEQ ID NO: 874118 - DNA, 120 bp, Artificial Sequence
  ENSG00000152931_38 (sequence is synthesized)
cactgcatacagacttcttagtcagtttctgtcacgtaccatcatatctaccttatttgcatcagtcataaattctgctcattcttctatcacagctcctctgacatttgccagacctca

SEQ ID NO: 874119 - DNA, 120 bp, Artificial Sequence
  ENSG00000152931_39 (sequence is synthesized)
ccatttcctcagccatttctggtctgaatcatcagccccccatgcctgctgcctgctctcttctataaacataccagatgaatctttccagcatgctgcttcccctgcccccaagtcagc

SEQ ID NO: 874120 - DNA, 120 bp, Artificial Sequence
  ENSG00000152931_40 (sequence is synthesized)
cacagttccctactacctattgatcacatctgagttgcctcagccagtggtcttgccatatctacctagcttaggctgagtgttataggagaaagtgcactagcccgggcaccagatgga

SEQ ID NO: 874121 - DNA, 120 bp, Artificial Sequence
  ENSG00000152931_41 (sequence is synthesized)
tcaggtaagactctagcttaggtaagctttatcacatcatatagtggctgtgtggattgaggaaaattatgaaacttctttgcacttcagttttctcatttgcagaatgaagataataac

SEQ ID NO: 874122 - DNA, 120 bp, Artificial Sequence
  ENSG00000152931_42 (sequence is synthesized)
acctacctatacagttactaaggattaaataggataatatgcacaaagtgaccctagtgagtttcagtaagaagaattaatgcttatgaagtgcttatcacattccagcttctgttctgt

SEQ ID NO: 874123 - DNA, 120 bp, Artificial Sequence
  ENSG00000152931_43 (sequence is synthesized)
gtgctgtgcatgtgtttatgcaggtattattattaacctcattttgcagaagaggaacttgaggcaagagagagcgtgtaaagtcacataacaaatccacagaagagctagcctttgaac

SEQ ID NO: 874124 - DNA, 120 bp, Artificial Sequence
  ENSG00000152931_44 (sequence is synthesized)
tccaacagcctgactccagtgcctgcatatgtaactccatgctctactgcctcccatttccctttccctccaactttcaccggctaacacagcccacaggtccacctcagtccttctcat

SEQ ID NO: 874125 - DNA, 120 bp, Artificial Sequence
  ENSG00000152931_45 (sequence is synthesized)
ccttccagtcttccctccacattccaactacctgtgacaaatgctatcctgcattttctctccaatcttacctgacatcttgaagggagcagttcagttacagcattctctccataccca

SEQ ID NO: 874126 - DNA, 120 bp, Artificial Sequence
  ENSG00000152931_46 (sequence is synthesized)
tctaacaaatagaccacatccccaaattccatcatgtccaaaaagaagcacggtatttccatcaacaccccagctgccatcaccaagccaactcgcctgacttccattcacttactagca

SEQ ID NO: 874127 - DNA, 120 bp, Artificial Sequence
  ENSG00000152931_47 (sequence is synthesized)
aacatttaccaagtatctgccatgttcattttgtcaatgagaatgacatgggacttgttcctctaggagatcacagtctaatgagatcaatgtttatatagaaaatgtaaataggttgtg

SEQ ID NO: 874128 - DNA, 120 bp, Artificial Sequence
  ENSG00000152931_48 (sequence is synthesized)
ataagtactaaatgcacgctgctaatggcatcatcacctctggctcttctcaatcctgcgtttcccatgttgtgtcatgcaacagagctgtcacactgcctcttcctcttcatctctggt

SEQ ID NO: 874129 - DNA, 120 bp, Artificial Sequence
  ENSG00000152931_49 (sequence is synthesized)
gccacctgtgatttacttgcacactaccttgtttctgaactattgcagcccctcccaacttatctcactgcctcattcacctgcctttcaaaactggcccacctcctgctgcccaataac

SEQ ID NO: 874130 - DNA, 78 bp, Artificial Sequence
  ENSG00000152931_50 (sequence is synthesized)
ctgcctttcaaaactggcccacctcctgctgcccaataacctgatgttgtcactctcatatttaaaacccataagtgc

SEQ ID NO: 874131 - DNA, 120 bp, Artificial Sequence
  ENSG00000152931_51 (sequence is synthesized)
tgagccgagattgcactactgcactccagactggtgacggagcgagacgctgtcaaaaaaacaaaacaaaacaaaaaacatatcaatgctgatgaaccaagtgcaaagccctgagcttgg

SEQ ID NO: 874132 - DNA, 120 bp, Artificial Sequence
  ENSG00000152931_52 (sequence is synthesized)
gtgcaaagccctgagcttggccaggcaacatagcctggaaacctgacttttaatccttactttgctctattcccccaacatacacacacttcatacaccacacctaaaagagacttccca

SEQ ID NO: 874133 - DNA, 120 bp, Artificial Sequence
  ENSG00000152931_53 (sequence is synthesized)
cagttttccaaaaatgactcacatttatatttcctgtttttccctttgcccaccctgccctctctccctctgccttcatttttttaattaacctctggaactcaggtgctcctgctccaa

SEQ ID NO: 874134 - DNA, 120 bp, Artificial Sequence
  ENSG00000152931_54 (sequence is synthesized)
ggtttaggtcaaaagttacctcctccatgaagctttctctcattctcccacaatgtgtgaaagccccattctcagatttgcttagttgtgcatttgtatattctaccttgcactacagtc

SEQ ID NO: 874135 - DNA, 120 bp, Artificial Sequence
  ENSG00000152931_55 (sequence is synthesized)
atttgtatatttatcttatggtttctgtgccttaggaaaggtacactgtcttaatcatctttgttcaatacagtgcctagcagagtgcctcaagtataatatgtgctcaataaataatag

SEQ ID NO: 874136 - DNA, 120 bp, Artificial Sequence
  ENSG00000152931_56 (sequence is synthesized)
atgcatttttccatgcatattttctactatatcgaagtggaaaatatatccatgtgatatagtgaaaaatatctcatgaagagagatacagtgaggaaaatatctcatgaagaccaaaaa

SEQ ID NO: 874137 - DNA, 120 bp, Artificial Sequence
  ENSG00000152931_57 (sequence is synthesized)
gcagaaatccaagttttttcttttcattactatcatcagtgattattaattttatgtgtcaacttggttgggcttagggatgctcagatagctggtaaaatattatttctggatgtgtct

SEQ ID NO: 874138 - DNA, 120 bp, Artificial Sequence
  ENSG00000152931_58 (sequence is synthesized)
ctcagggtgtttctgggggaaattagcatttgaatcagtagactaaataaagaaaatctgccctcacaaatgtgagccagcatcatccaatttattgacagtttagatacaacaataagg

SEQ ID NO: 874139 - DNA, 120 bp, Artificial Sequence
  ENSG00000152931_59 (sequence is synthesized)
cagaagaaggtgaactctctttccttgagctgggacatccatcttctcctgctctgacattggagtttctagttcttgggacttcagattctcccctgaagtttctcaggccttttggca

SEQ ID NO: 874140 - DNA, 120 bp, Artificial Sequence
  ENSG00000152931_60 (sequence is synthesized)
tcagactggaagttatgccattggctcccctggttctcagacctttggactcagactgaattataccactggctttcctggttctccagcttcaagatgacatattgtgagacttttcaa

SEQ ID NO: 874141 - DNA, 120 bp, Artificial Sequence
  ENSG00000152931_61 (sequence is synthesized)
cctccataattgcatgagccaatttccacaatatatctcctcttatgtatctatatatttcctattggttttgtttctctacagaatcctaatagatcatctaattgtttatctaacaag

SEQ ID NO: 874142 - DNA, 120 bp, Artificial Sequence
  ENSG00000152931_62 (sequence is synthesized)
tattttcctccctagacaatatgttgggcactagggacacaaaaataaaaacacagacatctgcactcaataaacttacattcaatatcagagagattggcacagaatacaaataaaatg

SEQ ID NO: 874143 - DNA, 120 bp, Artificial Sequence
  ENSG00000152931_63 (sequence is synthesized)
agatacatgcaaaataatatgaattgcaaaattacggcaattcaccaccaactaggtgtgtgaccgtgggaaaatcacactgtgagctaaatattagcaagtttaaaatgcaaaatcaga

SEQ ID NO: 874144 - DNA, 120 bp, Artificial Sequence
  ENSG00000152931_64 (sequence is synthesized)
ggcagtctatgaattggactttgctaatggcctcctttgctgatggatggcacattggtgttagaaagtgcttatttttgcaaaggtccattattgatgctttaattctaaggaaattat

SEQ ID NO: 874145 - DNA, 120 bp, Artificial Sequence
  ENSG00000152931_65 (sequence is synthesized)
gtaggcagaaactaaagaaaggttaaaaaaacagcagctaaaattgatacttagacaataaaaaactaattataagtgatttatcagcaccactagataactacattggtgaaatttaag

SEQ ID NO: 874146 - DNA, 120 bp, Artificial Sequence
  ENSG00000152931_66 (sequence is synthesized)
gccatgaaatgcaggacaagcctcgtaggaagcaaggtcccagtggatgagatgctgtcctctgggctcctaaccttccaccactagtattcaccatatctgattggaaatgtgtgcatg

SEQ ID NO: 874147 - DNA, 120 bp, Artificial Sequence
  ENSG00000152931_67 (sequence is synthesized)
tgagtcggcctcccctctatgatgtgagtagggacctatttttgctcatctctgtatcctctacacacgatgcttggcacacagcaagtattcaataaatgtttatgaatgaagcaatca

SEQ ID NO: 874148 - DNA, 120 bp, Artificial Sequence
  ENSG00000152931_68 (sequence is synthesized)
ctgccttccaggagtttcacaaaaaagatgggatgaacacagggacgggtaaattgaagcaaaaagcagacaagttctatgggatttgctggcattgatttcccaggatggcaaagtgct

SEQ ID NO: 874149 - DNA, 120 bp, Artificial Sequence
  ENSG00000152931_69 (sequence is synthesized)
aagaactaaacctttaaagctaacaaaatgtactgatgtctttgcaaagtatccaagaccaacaagaaagtaatttcccacctcaccctaccaccacccagaaaaggagcacagagatgg

SEQ ID NO: 874150 - DNA, 120 bp, Artificial Sequence
  ENSG00000152931_70 (sequence is synthesized)
agaaactgtgatgatgcagctccctcaagtatcacatgaagatagtggaaagagcctcctgaggtaaatatgccatgtagacagaaacaagcaatggctcaacagcaatgtatgaggtcc

SEQ ID NO: 874151 - DNA, 120 bp, Artificial Sequence
  ENSG00000152931_71 (sequence is synthesized)
aaggaccaggaccaaagggaaaaacagccatctcaccagacacctgcctacgaccagatgcgtcatctccaatattagctaactccctggaacctggactcaaggtgtgaaataaaggtt

SEQ ID NO: 874152 - DNA, 120 bp, Artificial Sequence
  ENSG00000152931_72 (sequence is synthesized)
aatgggaaaccgcaggagtcaaaaggagggggcaggattattgaggattcaggctgttgagaaatgaaagtttggatcactccccagataaagaaccttgaccatttaagggcaatggaa

SEQ ID NO: 874153 - DNA, 120 bp, Artificial Sequence
  ENSG00000152931_73 (sequence is synthesized)
atacagaataggcagtagaagaaggaagccatagataccaactatggcctctcaatcaattacaaaactgagaattctgacagttttgtgtatttcctctttgcatgtgatgtatatgtg

SEQ ID NO: 874154 - DNA, 120 bp, Artificial Sequence
  ENSG00000152931_74 (sequence is synthesized)
tgtatttgtatatattaaccattttcctttttctctcttcattattttatgaaagttgttgaatataaactctacaatttagcctttaggtaagagaatattcagtgggactttgatttg

SEQ ID NO: 874155 - DNA, 120 bp, Artificial Sequence
  ENSG00000152931_75 (sequence is synthesized)
aggagtatttaagacagccagatgagactacgataactgttggaactgtgtgtctcctcatttggggaaaggggtgagaactctgcatttctctgaagaacagagttgactttgtgttat

SEQ ID NO: 874156 - DNA, 120 bp, Artificial Sequence
  ENSG00000152931_76 (sequence is synthesized)
acagagttcaaatatatatataaaatggtgcatgtggaagctaagaagccaaaggagttcaccaagacagttatcaatatattgcctctccgctccaaatccacccttctttgccctgtt

SEQ ID NO: 874157 - DNA, 120 bp, Artificial Sequence
  ENSG00000152931_77 (sequence is synthesized)
ccacgatactaatctggctcctcggtcagccagtgcaatgtcatctgttgctggtagagtgtaggggagacactacaaggtatagtaaaggggtcagatgcggtgtctcatgcctgtaat

SEQ ID NO: 874158 - DNA, 120 bp, Artificial Sequence
  ENSG00000152931_78 (sequence is synthesized)
aaaaaataaataaataaaataaaataaaacaaggtatagcaaataaaggagcattccttcttgattcttcctggttcttgttacctgtggccgccaccagtggtgtatgggagagtcacc

SEQ ID NO: 874159 - DNA, 120 bp, Artificial Sequence
  ENSG00000152931_79 (sequence is synthesized)
ctacagtgagttccaccagcacctagtgagggcttcctactgagttttattgtcacccgagcaggcaatttccttgccagcagtatgcaggagacccaatggtgaccaccttccagtggg

SEQ ID NO: 874160 - DNA, 120 bp, Artificial Sequence
  ENSG00000152931_80 (sequence is synthesized)
tttttccagcaccctagaaggcacttttttgaccacagtgctgatccactggcacccaacagccagtaccctactcaccaggcctggcctgtggcacctcaaagaacttttctatcctgc

SEQ ID NO: 874161 - DNA, 120 bp, Artificial Sequence
  ENSG00000152931_81 (sequence is synthesized)
gggccacagcaccaccctctccaacaaggtctgaatctcagccttcaggtgtgaaagacccttccatgtttgttcttttcttgggtatcctccctcagtcctagaagtagcagctcttcc

SEQ ID NO: 874162 - DNA, 120 bp, Artificial Sequence
  ENSG00000152931_82 (sequence is synthesized)
ctatgtttgctatttctgtgttatttagcatacaatttaccccttttgtagtttatcacattttgccagttaataattctttatagtaaatgttccctcttcaaattactatctctcacc

SEQ ID NO: 874163 - DNA, 120 bp, Artificial Sequence
  ENSG00000152931_83 (sequence is synthesized)
aaacactgacttctatatcctcatcagacactgagtgacacaacctccttcagaaaagaatccctttcaccctgcccttcatgatgaacactctcaacaaattaggtatagcaggaacat

SEQ ID NO: 874164 - DNA, 120 bp, Artificial Sequence
  ENSG00000152931_84 (sequence is synthesized)
accttgacataataaaggccatatatgacgagcccacagctaacatcatactgaatggggaataactgaaagcctttcctctaagaactagaataagacaaggacacctactctaagcac

SEQ ID NO: 874165 - DNA, 120 bp, Artificial Sequence
  ENSG00000152931_85 (sequence is synthesized)
tcttattcggcattatactggaagtcctagccagactttctctttccggaaagagaaagaaatgaaaggcatccaaactggaaaacaggatgccagccagttgtggtggctcaagcctgt

SEQ ID NO: 874166 - DNA, 69 bp, Artificial Sequence
  ENSG00000152931_86 (sequence is synthesized)
tgcttgaacccaggagttcaaatccagactagacaacatgatgaaaccctgtctctatgaaaaatacaa

SEQ ID NO: 874167 - DNA, 120 bp, Artificial Sequence
  ENSG00000152931_87 (sequence is synthesized)
ccctttcactatgaaggaccctcaccagatggtggcaccatgctctcggacttcccagcctccagaactaaaacaatatggcccagttcctggcttttgaagaactagagaaaatcatca

SEQ ID NO: 874168 - DNA, 120 bp, Artificial Sequence
  ENSG00000152931_88 (sequence is synthesized)
tcattggtgcctccaaggctctttggttggttctgcaatcataggaacccttacctggtctcctgagacattctcctctctccacaccatagtacaacaccacccacacacctgatggca

SEQ ID NO: 874169 - DNA, 120 bp, Artificial Sequence
  ENSG00000215692_0 (sequence is synthesized)
agtccacgttgggagcctgcagcgcttccgggtccgtgacgaccccgccgggcacgatgcgctcaaaggcggccaggtcctgcttagacaccgtggagaacggcaagcgccgcacggggt

SEQ ID NO: 874170 - DNA, 120 bp, Artificial Sequence
  ENSG00000215692_1 (sequence is synthesized)
caacagccacgcgggccacgccagaggccgacggggcagcatcgccgccgggacggagacctcgggctcctccttggtggggggccggtactcagggcccggaggggaagggcagggagc

SEQ ID NO: 874171 - DNA, 120 bp, Artificial Sequence
  ENSG00000215692_2 (sequence is synthesized)
cgctggctgcgcgcctggaagtggccaagggcaccgactggctgacggcgcccgagatcgcgccccgccaccccgacccgcggctgaaccgcagaccgggaccctcagcccagcgctccg

SEQ ID NO: 874172 - DNA, 120 bp, Artificial Sequence
  ENSG00000248440_0 (sequence is synthesized)
cttatttttctcctagaccttttcattgagatttgctttactcatcttcatctatgtttatatgtgtacttcaattttgtctcattgtttaaaacaacatttaccagaatgtgcttctgt

SEQ ID NO: 874173 - DNA, 120 bp, Artificial Sequence
  ENSG00000248440_1 (sequence is synthesized)
cattatctacatgttctattctttggggatttctttttatgagtatcatctctgaataatcaggaaaaaatcccaccaatttgaagatgccacctaggaaacagaaattctacgagtggg

SEQ ID NO: 874174 - DNA, 120 bp, Artificial Sequence
  ENSG00000248440_2 (sequence is synthesized)
tggaaagtattgagatataaccggcaataaattatcatatatcttgaacattgtgaagccattgaaatggtagtaagaataacatttaatgataaggagaagtatttatattaattgaaa

SEQ ID NO: 874175 - DNA, 120 bp, Artificial Sequence
  ENSG00000248441_0 (sequence is synthesized)
gctcccttcgccgcgcctcgcgtgctagcggtgcccttgtgagccactgcgttctccaaggccagaacgggacagttgacgatggtcgtacttctccatgttctgagaccagtttaaaca

SEQ ID NO: 874176 - DNA, 120 bp, Artificial Sequence
  ENSG00000248441_1 (sequence is synthesized)
aaaacaaaaaccagacaacaaccttgcaagggaaagaattcagagtaaataaacagtctttttctgggaagtaaaatatttccctaagatggagaaattgagatgagagctcatccacaa

SEQ ID NO: 874177 - DNA, 120 bp, Artificial Sequence
  ENSG00000248441_2 (sequence is synthesized)
gattacccatcaatgagcaccaatagcaaccaaatccactagaagactgggagcttttaagtcaagaaacttacatcagtatcatcattccaagaagcggtatccaagctgttttatcga

SEQ ID NO: 874178 - DNA, 120 bp, Artificial Sequence
  ENSG00000248441_3 (sequence is synthesized)
tgatcagagtctacaccttaagaaataagactctgagaatttatagaaacaaacattagaaggcaggaatgtggagagaagaaagctacctgacaagggaatctcaggatacaaggaaaa

SEQ ID NO: 874179 - DNA, 120 bp, Artificial Sequence
  ENSG00000248441_4 (sequence is synthesized)
caccaaggatgtgagaatgtcttcgctgcattattatttttcagcattgcctctgctgacttcatgggaggaatggtgtttcttcttctctcccatgtcatggaagacactcctgatggc

SEQ ID NO: 874180 - DNA, 120 bp, Artificial Sequence
  ENSG00000248441_5 (sequence is synthesized)
atgtctgtaggtctgtaggaaagaataatcacctcagtagcttagtgtgtgtatgtgtgtgtgtgtgtctgacacactgtaggtacataataaagatttgaaaatatgagttttttttaa

SEQ ID NO: 874181 - DNA, 120 bp, Artificial Sequence
  ENSG00000248441_6 (sequence is synthesized)
agatggtgctgtgagtggggagtgagtcaaaaactccgctggggtgtacaaaagtctactcaaatgtccacagcatctgtgggggatggagaatagttggaggatctttctccagaatcc

SEQ ID NO: 874182 - DNA, 120 bp, Artificial Sequence
  ENSG00000248441_7 (sequence is synthesized)
ttctgttctgtagtacaagtattactcattatagactagcacgaaaaatcaagtgaaatgcgaacttaagagtttaaaaagaataaatggtgcttttctggcctattagtaataaattaa

SEQ ID NO: 874183 - DNA, 120 bp, Artificial Sequence
  ENSG00000248441_8 (sequence is synthesized)
tttaatttgtaagtaatgaatgctaatctacattgtattaattgggcttaaccagagagtttttgtttacatacattaggcaaacaaacaataggaatgaggatttttaataaagaagga

SEQ ID NO: 874184 - DNA, 120 bp, Artificial Sequence
  ENSG00000248441_9 (sequence is synthesized)
acacacacacacacacacacaccaagtaagagaatactaaaagatcagagaaaatgtaattatacttatcaaaatgttttaatgcagtggcctattagtttcagaatataaaatttattt

SEQ ID NO: 874185 - DNA, 120 bp, Artificial Sequence
  ENSG00000248441_10 (sequence is synthesized)
aatgcagtggcctattagtttcagaatataaaatttatttgatttgttgagcaacttggagcttattttttaatcctttcagataataggaacttgaaacatacttggctgtgtataaga

SEQ ID NO: 874186 - DNA, 120 bp, Artificial Sequence
  ENSG00000248441_11 (sequence is synthesized)
tcccaatgtggactaacaggcgttttcttctggtctgattaacatttaggaaaaaatagattcctgaaaatagcctattgtgtaattatgtgtctgattggaacagcaaaatgtctttgt

SEQ ID NO: 874187 - DNA, 120 bp, Artificial Sequence
  ENSG00000248441_12 (sequence is synthesized)
taaacatctttttaaaaaccaattttaccatttccttccaaacatttgttaatttaattgtgttaacccttgcatccacattattggtcatgtggctggattgattaagaacagacaggg

SEQ ID NO: 874188 - DNA, 120 bp, Artificial Sequence
  ENSG00000248441_13 (sequence is synthesized)
atatagatttccacctacagaaactcttttcaaggggttaatcagctggtaacttgagttacaaatatattggggaaaatggtacttttggtaagatttctcacagtgtattcttcagct

SEQ ID NO: 874189 - DNA, 120 bp, Artificial Sequence
  ENSG00000248441_14 (sequence is synthesized)
atttttgaaaattatacccacaagttacatcacatctgtaataaactctgcacttcaagctgcagaaccttccaagatattctgtggagtttgttgtattttccccatttctatatttaa

SEQ ID NO: 874190 - DNA, 120 bp, Artificial Sequence
  ENSG00000248441_15 (sequence is synthesized)
aacaaatttcctacccatccaccccctccttgaattcagggaaacacaaataactcataagctttgcactgaaatgagtttgttttgctttcatgcctagtattgcttttgaaattgttc

SEQ ID NO: 874191 - DNA, 120 bp, Artificial Sequence
  ENSG00000248441_16 (sequence is synthesized)
agcagtaaagaaaagaaaaagctgctggtattagctttaaacaaccgccacaaacatattgtcttcctatttattctaggttttctttcagccaaaatcagacttgcagagttattctag

SEQ ID NO: 874192 - DNA, 120 bp, Artificial Sequence
  ENSG00000248441_17 (sequence is synthesized)
agcagttggatgacatacaaaatcacaaccaccaaaatatacactatatctttataatgggttttatgtactcacagatacacacacacactatgtatatattaaacaaaaatatgaaat

SEQ ID NO: 874193 - DNA, 120 bp, Artificial Sequence
  ENSG00000248441_18 (sequence is synthesized)
tgatgtccagttgaagattggtgattccagaatagctcgcattgccccagttgacttgccacacagcttctttcaggacttgaaaatgtcctagccacccccatcttacctcctacttcc

SEQ ID NO: 874194 - DNA, 120 bp, Artificial Sequence
  ENSG00000248441_19 (sequence is synthesized)
aatgccttttaagatagaaaacaaaaaacaaaacaacaaaaaaacaccagccacccttgtgggttagataatcctacatcaaggtgaattcttgataaccagttctgttcttccttatgt

SEQ ID NO: 874195 - DNA, 120 bp, Artificial Sequence
  ENSG00000248441_20 (sequence is synthesized)
cttgtaaacatgctaattagaaggagcttgtgtttgaagatcaagggaggaagaattctgaagccagggctagccttaggggacataactccttccagtcacttcctgaattttttggta

SEQ ID NO: 874196 - DNA, 120 bp, Artificial Sequence
  ENSG00000248441_21 (sequence is synthesized)
cctggcttttgagagtcctccaaagtgagaatttcatgacatgtaacctctcaacacctgcattttaaaaaattgtccaaaataccgcagataccacagaaaagtccaaaacttaagttt

SEQ ID NO: 874197 - DNA, 120 bp, Artificial Sequence
  ENSG00000248441_22 (sequence is synthesized)
ttccctccactcagagcatcttagcaacatactaaccataagactctaagcgctcttaccctcaatgcaattctcactgaatatcctgtcaggagaactctacctctcttccatgttatt

SEQ ID NO: 874198 - DNA, 120 bp, Artificial Sequence
  ENSG00000248441_23 (sequence is synthesized)
aaggttattgttctttgcaaggtgtacacaacacaaatatatttcttggtgaatgaactcactctcaaagactgctgtccttggggatatagccaacatgccatatccacaacataggtc

SEQ ID NO: 874199 - DNA, 120 bp, Artificial Sequence
  ENSG00000248441_24 (sequence is synthesized)
ttctttacagtcctgttgaaacatgtaagatcagctactaagtccctgcatctcagacaggaacttaatagagtacatttaaaaaaaaaattcagaagtaattaaaacaaattgcataca

SEQ ID NO: 874200 - DNA, 120 bp, Artificial Sequence
  ENSG00000248441_25 (sequence is synthesized)
agccacctgtttagaaagttcataaattttatgcaattatttatctctttattttttctgaaatcaagagcagaatgtatccaagtgaaactaaaagagcgaggtcaaggggaaacaaca

SEQ ID NO: 874201 - DNA, 120 bp, Artificial Sequence
  ENSG00000248441_26 (sequence is synthesized)
cagggcttgtggagtcataaatatgtattaaagcagcagagttaattttgtcccaagttccatattggccaggaaaaaagaaacaagatcagcagagttaacagctctcaacctgaatat

SEQ ID NO: 874202 - DNA, 120 bp, Artificial Sequence
  ENSG00000248441_27 (sequence is synthesized)
gcctcagaatttctaggaggacttaagtaatgagattcctgggtttctacatggaccaactcaatcaaactcttcaggagacagctgctgttgttagactgtgtctcccaaaattcttgt

SEQ ID NO: 874203 - DNA, 120 bp, Artificial Sequence
  ENSG00000248441_28 (sequence is synthesized)
gttggaaacttagttcccaatgtaatgatactggcaggtgtggcctagtggggggtgtttagatcatgagggcttcagcctcatgaatggattaatgttgatatctcaggagtgagtttc

SEQ ID NO: 874204 - DNA, 120 bp, Artificial Sequence
  ENSG00000248441_29 (sequence is synthesized)
ctcttgctctctgtagccctctctcttgccacatgatgacttccaccaggttatgactcaacaggaaggccctcacaagatgtggaacctcaatcttagacttctcagcctccagaagtg

SEQ ID NO: 874205 - DNA, 80 bp, Artificial Sequence
  ENSG00000248441_30 (sequence is synthesized)
tccctcggcggcccccgcggctcggacccgggccggcagacaggccatccatcatccgccctcctcccgcggagcgccgc

SEQ ID NO: 874206 - DNA, 120 bp, Artificial Sequence
  ENSG00000248441_31 (sequence is synthesized)
catgatatcacaagaaaaaaatatgaagccagtgactaaccctgaagggacagagaagaatgtactgcctgacaaagaattcaacatttctattttaaagaagatccttgaggaatcacc

SEQ ID NO: 874207 - DNA, 120 bp, Artificial Sequence
  ENSG00000248441_32 (sequence is synthesized)
taactggcctgagatggtaacttgttgtggttttgattttcatttctataatgaccagtgatgatgagctttttcccatatgtttgtgggctgcataatgtcttcttttgagaactgtct

SEQ ID NO: 874208 - DNA, 63 bp, Artificial Sequence
  ENSG00000248441_33 (sequence is synthesized)
tgtttgtgggctgcataatgtcttcttttgagaactgtctcttcatatccttcgcccactttc

SEQ ID NO: 874209 - DNA, 120 bp, Artificial Sequence
  ENSG00000248441_34 (sequence is synthesized)
ctcccattctgttcaggtcttgtccccatttttaatcccaggcttttcttgctattgagtttttaaatataatttggatattaactctttatcacatatatacaatgtataagaaatatg

SEQ ID NO: 874210 - DNA, 120 bp, Artificial Sequence
  ENSG00000248441_35 (sequence is synthesized)
cagatatttcatatcattatgtagattgtctattttctctgttgactttcttttgctgtgcagagtcttttttgtttgatgcaatttcatttgtctatttttgcttttcttggctatgct

SEQ ID NO: 874211 - DNA, 120 bp, Artificial Sequence
  ENSG00000248441_36 (sequence is synthesized)
tttgaggacttattttaaaaattatctataaaaagatgtcttcactctaatgtttattgcaggagtattaacaattgccaagaaatggaatcaatggataaatgaataatgaaatatggc

SEQ ID NO: 874212 - DNA, 120 bp, Artificial Sequence
  ENSG00000248441_37 (sequence is synthesized)
atgagtccctacagccacaataaattgaattctgccaaaaatcttaataagcttggaagaagaccttcagctcctgatgagaacccagccagaaacaagatgagaacccagaaacaagat

SEQ ID NO: 874213 - DNA, 120 bp, Artificial Sequence
  ENSG00000248441_38 (sequence is synthesized)
tttcatcttatttcaacctgagcagagaacccagaggagccctggccagatttttggtctacaggattgagaagacacctgcctgagggtcttatagctaatggactgcagaagacttga

SEQ ID NO: 874214 - DNA, 120 bp, Artificial Sequence
  ENSG00000248441_39 (sequence is synthesized)
gcacaaaacagactagtacacaatatgtgtgtgctttttacatcagatgaatctcatggtcagttaagtctggaaatcacttgtctaaatgagttgcgtttggtttttcctaagaaatat

SEQ ID NO: 874215 - DNA, 120 bp, Artificial Sequence
  ENSG00000248441_40 (sequence is synthesized)
gctgtcagttcctcaagagaagcaaaatataccagcccttatatttcctttaagaagactcacctaatttaggtcatatatctcaaagtgttatggggcaagatatattcaacactgtat

SEQ ID NO: 874216 - DNA, 120 bp, Artificial Sequence
  ENSG00000248441_41 (sequence is synthesized)
taatatatattcaaatatattactaagcaaaaatatatttacatgtttatatcaatgatgcaattaataaatgttttcacatcctgtgtctcaatttatccttacataaaacaagtgagt

SEQ ID NO: 874217 - DNA, 120 bp, Artificial Sequence
  ENSG00000248441_42 (sequence is synthesized)
aaacaagtgagttacttattctttaacttctctaggcaaatttcaaatattttctgaatataactacagaatgcttggtttgtgtctctatgaaaggtcttaacacactcctgcaatgaa

SEQ ID NO: 874218 - DNA, 120 bp, Artificial Sequence
  ENSG00000248441_43 (sequence is synthesized)
ttatatgcatatggctctcccatactgggaatgcctagaggagagaaactgtcttcttaccatatttgtatctatggttcatgcctgctccacatagacccctaggtttcactagagaga

SEQ ID NO: 874219 - DNA, 120 bp, Artificial Sequence
  ENSG00000248441_44 (sequence is synthesized)
tctcaagacagtaggtttgaagtaagagaatgggaggatttagaggcatctcgactatactgatatactctgcaatcagcttggcatctgggaaatgttttgctgtctgcttcatctcca

SEQ ID NO: 874220 - DNA, 120 bp, Artificial Sequence
  ENSG00000248441_45 (sequence is synthesized)
gtgccttgaacagtacatgtttctctggagcccctgcaaggtttgttgaaggagggcatacatcaggtattccataatttagcaacattccataatgtggctgctagtaaatggttggtt

SEQ ID NO: 874221 - DNA, 120 bp, Artificial Sequence
  ENSG00000248441_46 (sequence is synthesized)
caggatttgaacccaggtcctctgtgtcatgttctaaatgttgggagaataaatccctcccttgtctcagtgaagatttctaagctgccctgggttgttgtgtataggtgtttagcttat

SEQ ID NO: 874222 - DNA, 120 bp, Artificial Sequence
  ENSG00000248441_47 (sequence is synthesized)
cattttcatttctcctttggatatcaagcctgaacaatgattctcaaagatatgtattaaattcaataaggatttactactactgctcacctattaagtgcgaggaacagttgcacttag

SEQ ID NO: 874223 - DNA, 120 bp, Artificial Sequence
  ENSG00000248441_48 (sequence is synthesized)
agttgcacttagtaggaataaagaggtagctggcacaaactattctgcctgttttttgtttttgtttttcgtttgtttgcttgtttgttttttcgacagagtcttgctctgtcgccaggc

SEQ ID NO: 874224 - DNA, 120 bp, Artificial Sequence
  ENSG00000248441_49 (sequence is synthesized)
ctattctgcctgtttgttgactgcagtcatagtatgttcttgctcctccctgagctacttttgctttgaataaaaccatggtgtcatggaaagaacaaaaagctccagggtagggcacat

SEQ ID NO: 874225 - DNA, 120 bp, Artificial Sequence
  ENSG00000248441_50 (sequence is synthesized)
gttttcaaacttattacaagagggagcctggatgagagtatcttaatataccttttagagctgatgtgtccttctctccttgagatccaattaaatttactttctgtgagttacatgata

SEQ ID NO: 874226 - DNA, 120 bp, Artificial Sequence
  ENSG00000248441_51 (sequence is synthesized)
gaaagtgttacattgtacattttagcaatttcagcttattcagatcaaacaaaaaaaattagttgatttgactatctacagtttatctctgccaccaaagtaaatagcatggacttgaag

SEQ ID NO: 874227 - DNA, 120 bp, Artificial Sequence
  ENSG00000248441_52 (sequence is synthesized)
gtgccatcccaactattgccctgacattccatcacctgcattttccagaaatcaggtgaacgatatttttcagtcttgctgcatttcacctctggagtgtgtagacccagtcttaatgtg

SEQ ID NO: 874228 - DNA, 120 bp, Artificial Sequence
  ENSG00000248441_53 (sequence is synthesized)
tggagtgtgtagacccagtcttaatgtgcctaaaccaaatgagatgtgttatcccttccaatggaactaagcactttaagtaactaaggaattggagagagagagagagagagagagaga

SEQ ID NO: 874229 - DNA, 120 bp, Artificial Sequence
  ENSG00000248441_54 (sequence is synthesized)
aaataaggtagtcgagttgtgtttcaaaccacttctataattgggagctaaacaaatttgtggagaaagtacttggtcaactgtataatttcttctactattaactatccaaaacaaaca

SEQ ID NO: 874230 - DNA, 120 bp, Artificial Sequence
  ENSG00000248441_55 (sequence is synthesized)
attaattaaaaactaaacacagataatgaagactatctattttctaaaactgtgaactttggaaaggggcgtgctttatggatatctgtaagtccatatttggacaactatcagtttaac

SEQ ID NO: 874231 - DNA, 120 bp, Artificial Sequence
  ENSG00000248441_56 (sequence is synthesized)
ttttagtaatctaaaatgctcaacttaaacttcatttcccacttctgccaaaaccagaagaatcaaaaatacagtgaaggggcatgagatttccagctcacatttccaatctccagaggt

SEQ ID NO: 874232 - DNA, 120 bp, Artificial Sequence
  ENSG00000248441_57 (sequence is synthesized)
ttgaaaaacttcatctatctatttgaatgccatggttgtgatccaaactgaatttgaactttagatacttaagagtgacccatcactgtttaaaagtccaaagtggccacagagaaccct

SEQ ID NO: 874233 - DNA, 120 bp, Artificial Sequence
  ENSG00000248441_58 (sequence is synthesized)
acggaccattacttcattgtttattcttgtaaattataaatatttttaaaaattccaaattatgaagttcgaaggggatattttatatctctcagccactgtcattttcttcctcccttc

SEQ ID NO: 874234 - DNA, 120 bp, Artificial Sequence
  ENSG00000248441_59 (sequence is synthesized)
cttgggtgttggccatgtatctatgagtccagttggtaaaacaatcagtagcattgacaggatgatgtactctggtccgaaactacatttctcagctttttcagttctcaggagacagcg

SEQ ID NO: 874235 - DNA, 120 bp, Artificial Sequence
  ENSG00000248441_60 (sequence is synthesized)
gaaaatgtacttagcaaactctattataaaggtccatgttgttccaaatatttagttgtacttaaagtaaaatcatgacttcagatgccaagtgaaataaagcataattttcacactgta

SEQ ID NO: 874236 - DNA, 120 bp, Artificial Sequence
  ENSG00000248441_61 (sequence is synthesized)
tatgccaagagataactgctttattggaggcctagtggggaactgaaactcccactcctgcttagcaggaatgagaagccccctttcagaggtcaacagaagctgagttaagaaacctga

SEQ ID NO: 874237 - DNA, 120 bp, Artificial Sequence
  ENSG00000248441_62 (sequence is synthesized)
gaaatgtccatatttcagtggaaaattactcatcatacaaaaacaagaaagaactaaaactaagtgagaaaagataataaatatatgccaacatcaagatgacacaaatgttagaattat

SEQ ID NO: 874238 - DNA, 120 bp, Artificial Sequence
  ENSG00000248441_63 (sequence is synthesized)
ctggcaaagcttgtaaagcagccatcataaaaatactccaatgaacaattaaaacattcttgtagctaatgaaaatttatttggaaagcttcaacaaagaaataggaagtcataaccaaa

SEQ ID NO: 874239 - DNA, 120 bp, Artificial Sequence
  ENSG00000248441_64 (sequence is synthesized)
aatagaagataaaagagtcaaatggaaaattttgaactgaagaatacaataaccaatataaaaaactcaatgcatgggcagaatggaggagacagaggaaatattggtgaactggaggaa

SEQ ID NO: 874240 - DNA, 120 bp, Artificial Sequence
  ENSG00000248441_65 (sequence is synthesized)
acaatataaattgaccatctatacaacagagagaagatagagtgaaaaaaagatgaaaggaacctcaaagaccttcgagattatagcaaaaaaaaccaaaataaaacaaaaccaaaaacc

SEQ ID NO: 874241 - DNA, 120 bp, Artificial Sequence
  ENSG00000248441_66 (sequence is synthesized)
aacaaacagacagacaaaaaattaacctttgcattccctgagtcctagaagaccggaagatggcagacctgaaaaacattctaagaaataatggctgaaatgtgtttaaatttagccaaa

SEQ ID NO: 874242 - DNA, 120 bp, Artificial Sequence
  ENSG00000248441_67 (sequence is synthesized)
gacataaatatacagatttaagaaactgagtgaatcccaaataggataaactcacagaaattcatagcaagacactcatagtcaaacttttgagaactgaagacaaaaaagaaaaacaaa

SEQ ID NO: 874243 - DNA, 80 bp, Artificial Sequence
  ENSG00000248441_68 (sequence is synthesized)
aggtcagtaaacttcaagaagaaacagaggaacaacctagaaatttattagagatatttaacagaaaaattaatttaaca

SEQ ID NO: 874244 - DNA, 120 bp, Artificial Sequence
  ENSG00000248441_69 (sequence is synthesized)
agcattaacagcagaattgatctatcaaaataaagaacctgaatgcaaagacaggttaggttatttgaaaatacacatacaaggaagaataaagaaaaaataatgaaaaggaataaagaa

SEQ ID NO: 874245 - DNA, 120 bp, Artificial Sequence
  ENSG00000248441_70 (sequence is synthesized)
taatgggaaaggacaagaaaagccccagcgaaagactactctgtctctagccaaaggacaaggaaaggggcaaccaagcaagacagaaaaacatttagataataaccactctattctagc

SEQ ID NO: 874246 - DNA, 120 bp, Artificial Sequence
  ENSG00000248441_71 (sequence is synthesized)
caaattccacaaaaactaattagatggtgtcagaggaggctgagtaggaaggagggactttacccctgccccctaatcctgtgatatcagtggaagccatgtggagagcagcagcaaggc

SEQ ID NO: 874247 - DNA, 120 bp, Artificial Sequence
  ENSG00000248441_72 (sequence is synthesized)
acttccatccctcacatgttgggaagtatagtggaccctcgaacaacacaggtttgaacatcacaggtccacctaggtgcagattttgttaaacaaaaatgtagcaacttcctagcatgt

SEQ ID NO: 874248 - DNA, 120 bp, Artificial Sequence
  ENSG00000248441_73 (sequence is synthesized)
acaatagtaaagaaaaacagccaaagcccctgctgtcctgaaagatgcaggcaatggaagaggtattagtttagggacccacacaaataagtaaatttgcatatatgctaagggtcataa

SEQ ID NO: 874249 - DNA, 120 bp, Artificial Sequence
  ENSG00000248441_74 (sequence is synthesized)
aggggtggcatgtgagcatgtgagaatatagaatagacacatctgcttggctaagggcagtcagaaaacactttcttcagaaatgaatgatttatttaaaatcttcataattaattaggc

SEQ ID NO: 874250 - DNA, 120 bp, Artificial Sequence
  ENSG00000248441_75 (sequence is synthesized)
agagtaggccaaaagttatctaagtacagagaatgtacctgtgcagtttattttattgacttgaaaattaatttccttcataggaatgtaaatctctgtttaccacaagccctctgtctc

SEQ ID NO: 874251 - DNA, 120 bp, Artificial Sequence
  ENSG00000248441_76 (sequence is synthesized)
gatgcatcttcaagttaactagtacctgtctgttcttctacattgtacattagataactcaccaactcctcagaagactgaagcctcagcaggtgttggcactgtcacatgttagcattc

SEQ ID NO: 874252 - DNA, 120 bp, Artificial Sequence
  ENSG00000248441_77 (sequence is synthesized)
ctgatctacattttgatgagtcccaaattagcggagtttgttgctgtgaagttagttttcttagttaaccatagcatatccccagtttaagatgcataaacggcatcatggctcacttgt

SEQ ID NO: 874253 - DNA, 120 bp, Artificial Sequence
  ENSG00000248441_78 (sequence is synthesized)
gaagtgactgttcaagtcttttcccatttattaaattagatgagtctgttactttctaatttatttgagagatattcaaatggcagactatatgaaaagatccaaaatagcctcagtctt

SEQ ID NO: 874254 - DNA, 120 bp, Artificial Sequence
  ENSG00000248441_79 (sequence is synthesized)
aagaagtaagcagttgcaggatactcatgttgtggagaccttaatcaactgaattggttatgtttctagctataggatcactcagagggagggcagttaggccttatggtttgacacact

SEQ ID NO: 874255 - DNA, 120 bp, Artificial Sequence
  ENSG00000248441_80 (sequence is synthesized)
cagaagttatgtgtagggacacttgagatccatgtgcacagcctctcccatgagtaaatgtcaatcaggaaatgtaaaaaacatcaaaccactaaaattattttttagatactccatagc

SEQ ID NO: 874256 - DNA, 120 bp, Artificial Sequence
  ENSG00000248441_81 (sequence is synthesized)
cactattaaatatttttttaaaaataaaactatttgcagtgtttctaggaaatgtccatatggttgccaatggggaaaaatggcaaccccctttgtgtaggtagaattctatgatgaacc

SEQ ID NO: 874257 - DNA, 120 bp, Artificial Sequence
  ENSG00000248441_82 (sequence is synthesized)
cccaaatcctcattttctggtgtatgtgctcattataatcttctcccaattgattgggagtagaaacagtgaatatgatagaatataatttcagtgattatgtttccttataaagcaaaa

SEQ ID NO: 874258 - DNA, 120 bp, Artificial Sequence
  ENSG00000248441_83 (sequence is synthesized)
cttctgctttgggagaggcttcaggaagcatccaatcttggtgaaagttgaaaggggagtgaagtgcctcacatgatgggagcaggagcaagagagactaaggggtaggtgctgcacact

SEQ ID NO: 874259 - DNA, 120 bp, Artificial Sequence
  ENSG00000248441_84 (sequence is synthesized)
gagaactcactcactatcatgagaacagctccaggaccatggtgccaaaccattcacaagaaatccactcataggatagaaccacctgccaccaggccccacctccaacattggggacca

SEQ ID NO: 874260 - DNA, 120 bp, Artificial Sequence
  ENSG00000248441_85 (sequence is synthesized)
acctccaacattggggaccacaatttgacatgaaatttgatggggacacagacccaaaccatatcaaggagggaaggagttgggtaagggttgataaactacctgtgggtaatacgctca

SEQ ID NO: 874261 - DNA, 120 bp, Artificial Sequence
  ENSG00000248441_86 (sequence is synthesized)
ttacctgggtgatgggatctgtactccaaacccaatatgcccatgtaacaaaacttacacgtaccctcatatctaaaataaacattgaaattattttaaaaaagaaattatgttaaatgt

SEQ ID NO: 874262 - DNA, 120 bp, Artificial Sequence
  ENSG00000248441_87 (sequence is synthesized)
tatcaaatgctttatttgtttacagattttttcttttaatatcttactgtggtaatatattaagtgttaatgtgtggtaacatggtaacatattaaaaaatacattacagtaacggtaac

SEQ ID NO: 874263 - DNA, 120 bp, Artificial Sequence
  ENSG00000248441_88 (sequence is synthesized)
atgtgaaaaatggccaatctgtctatcctctgggttccctcaacaacgcggcctcatgaagtacctgctgccatattgacctcagtacacacacagaagagccaagggaattgcttcttt

SEQ ID NO: 874264 - DNA, 120 bp, Artificial Sequence
  ENSG00000248441_89 (sequence is synthesized)
tgatacatgcatgctaatagaaaaaaaactactgatgcctggaaccacctggatgaatctctaaagaattatggagagtgacaaaaataattttaaaatgttacatagtatattgtttta

SEQ ID NO: 874265 - DNA, 120 bp, Artificial Sequence
  ENSG00000248441_90 (sequence is synthesized)
tttatataacaacatgattgaaataacaagatcatagaaatggagactcattaggggttaaggagggggaaggataagaaggaagagggagtggccataaaaggcagcacgaagtatccc

SEQ ID NO: 874266 - DNA, 120 bp, Artificial Sequence
  ENSG00000248441_91 (sequence is synthesized)
tgtgccgatagaaatatttcttatcttgacagtagcaatgtcaatatcctgtttgttacactacagttttgcaagatgttagcattggaaggaactgggtaaaagatcactctgcgttct

SEQ ID NO: 874267 - DNA, 120 bp, Artificial Sequence
  ENSG00000248441_92 (sequence is synthesized)
ctcttacaactgcaaataaatccacaattatcctaaaatagaaagtttaatttacaaaaacatttctgcaagccttgtaactcagtggctacataactctggacttagacccaaagaatt

SEQ ID NO: 874268 - DNA, 120 bp, Artificial Sequence
  ENSG00000248441_93 (sequence is synthesized)
ttgactgtcactttaatctcatgtaaccctggacaagtattcagccagtctgagcctactttcttgtcagttaaatgggcataatgatagctaccctacttattaatatttcaccaactg

SEQ ID NO: 874269 - DNA, 120 bp, Artificial Sequence
  ENSG00000248441_94 (sequence is synthesized)
cactcatcattgtgggaaagtctatttttcatcttaacacacaaacagacaataacaaaatttgtgatttggataatctggatctgatgttcatgctcaaaatggaggcaattcgtaata

SEQ ID NO: 874270 - DNA, 120 bp, Artificial Sequence
  ENSG00000248441_95 (sequence is synthesized)
ctggtctgaagcatttagtcattcactgagcagatacgttaggagcaacaggcatgggctgtgtttttctaggcactgtgaacacagcagtcaacgaagtcaaaaacctgtgctcttaag

SEQ ID NO: 874271 - DNA, 120 bp, Artificial Sequence
  ENSG00000248441_96 (sequence is synthesized)
ggacatgaattgccaaatggaaacactaagtttttctatttatgacctaaagctagtcaaatatctccagaagtaaggtagctgagtgaagtggttcataatctttccatgggagccaaa

SEQ ID NO: 874272 - DNA, 120 bp, Artificial Sequence
  ENSG00000248441_97 (sequence is synthesized)
tcctcggtgctgtgactcttttagataaatgatagtaaaaatgaatcaaaagttaattagcttgcacctcaataatccagtctccatcactgatggtcatcgtggaatctgcgtacagag

SEQ ID NO: 874273 - DNA, 120 bp, Artificial Sequence
  ENSG00000248441_98 (sequence is synthesized)
gcagctgtatacagatgacagagacagctctaacacgtgacacatttaagcacacagaggcggaaggacataaagttcctggttgatttccctttggtgtttgtggggaaatatcaaggt

SEQ ID NO: 874274 - DNA, 120 bp, Artificial Sequence
  ENSG00000248441_99 (sequence is synthesized)
cataaaaagtcagtttctaataatccctccagtcctccattccattccctaatttgtatgcaatggcatttaacattttgactttgcttaaaataaaatgtgtgtttgttttaaaataaa

SEQ ID NO: 874275 - DNA, 120 bp, Artificial Sequence
  ENSG00000248441_100 (sequence is synthesized)
cccttcgccgcgcctcgcgtgctagcggtgcccttgtgagccactgcgttctccaaggccagaacgggacagcaaaaaagacagaagattaaaggatctgaaattcattcaacgataaaa

SEQ ID NO: 874276 - DNA, 120 bp, Artificial Sequence
  ENSG00000248441_101 (sequence is synthesized)
gtgcttaaaacattctatcttggagagatttacattttaattggtagcaagcttgaaaagaaaagaatgaagatcttggatacttctaatcatcaaggaaagggtacaaatcaaactgct

SEQ ID NO: 874277 - DNA, 78 bp, Artificial Sequence
  ENSG00000248443_0 (sequence is synthesized)
gcccacctcagcctgtatcttgcccattatcaaactatttcttgctgccatattcttttctagtatttgacatcttga

SEQ ID NO: 874278 - DNA, 120 bp, Artificial Sequence
  ENSG00000248443_1 (sequence is synthesized)
ttcttgctgccatattcttttctagtatttgacatcttgattttcagaacctggtcaatcttaccataaaaacctagctgccatttcacacctctgctctgactggctcaaggcctgctc

SEQ ID NO: 874279 - DNA, 120 bp, Artificial Sequence
  ENSG00000248443_2 (sequence is synthesized)
tggggtaaattgtaatgcgagaagagaaaatcaagttacaatacctacattgcagattttcagtgaggcttaaaaggcatgaaaaattccctaatgttagtaaatactcaagaaatgctg

SEQ ID NO: 874280 - DNA, 120 bp, Artificial Sequence
  ENSG00000248443_3 (sequence is synthesized)
gttaatatttctacttctggtcaattgctttccaagtcgaaacagctgataaaattctatacattatacattatgttattcatattatgaaaatgttaagtctttcatttcacaatatta

SEQ ID NO: 874281 - DNA, 120 bp, Artificial Sequence
  ENSG00000248443_4 (sequence is synthesized)
ttagccaagagaataaaggtttgtagtgacttaaagatcttgaaaagcgacatactgttttgtttaagagggaggaaaaagtccacatagaaggtgattaaaaaatacccacattgatca

SEQ ID NO: 874282 - DNA, 120 bp, Artificial Sequence
  ENSG00000242407_0 (sequence is synthesized)
cctttacatacccgccagacacctccaggaagtgagcgcccgctgccttcgttctcccaactggagcaaactctgtggcggcgacgatggcggccgtcaggtcggtggtgatgaatagag

SEQ ID NO: 874283 - DNA, 120 bp, Artificial Sequence
  ENSG00000242407_1 (sequence is synthesized)
aggatttctctgcagcgcgacgctcccctctcccgaaaggttggctccacggtcccgccggccgcgcaggtctggctgaactgcttggggtcgcccggctcctctcgattttatgaaaat

SEQ ID NO: 874284 - DNA, 120 bp, Artificial Sequence
  ENSG00000242407_2 (sequence is synthesized)
ccgtctgcattttctctcctctgtcttaggcttggtatcttcttttctttttatatttgtgtttttctcaccgcctttgcttccttccatttcagttatcttgctttttgtgtgttcttt

SEQ ID NO: 874285 - DNA, 120 bp, Artificial Sequence
  ENSG00000242407_3 (sequence is synthesized)
cttgatttctttctttccttttcttgttattgctcactctctggctccgccacccaccccttgctctatcttcattttccctttagtacttttctccctatctttcatctcacttacact

SEQ ID NO: 874286 - DNA, 120 bp, Artificial Sequence
  ENSG00000235790_0 (sequence is synthesized)
ggccaggcggttgccctgacaacggggaaccgaccgactcttcccggtagggagaggcgatggcggaattactcctctaatgtcaaggtattctaatcacagaattactggagcatcaag

SEQ ID NO: 874287 - DNA, 120 bp, Artificial Sequence
  ENSG00000235790_1 (sequence is synthesized)
aagtgcctgcatgcttggaagggcttccaggcagatgaacacacctcagcaccgggtggcattttcccagggtgcaacccggaccggctctgggtcacactgacaagcctctccgactcc

SEQ ID NO: 874288 - DNA, 120 bp, Artificial Sequence
  ENSG00000235790_2 (sequence is synthesized)
tacatagaaggaatgtttactgaaaaaaatgaagaggggtcagggcaaggcgaggagcaagaagcacccccaaggaaacagagaagaccagtacaactgtacctctttgccagctgcacc

SEQ ID NO: 874289 - DNA, 120 bp, Artificial Sequence
  ENSG00000235790_3 (sequence is synthesized)
atccgtaccagtctcctggggtggaagtgtccagcacagagactgccacactgcaagacgaaggggctggacacacggaagagagaggcggaaccctgcaccccctcaacctcagcccta

SEQ ID NO: 874290 - DNA, 120 bp, Artificial Sequence
  ENSG00000235790_4 (sequence is synthesized)
ctgagtctccaatggggccacgcttctgagtgcacctccccgtgtcatctgtaatgtgagggggaaccaggcttgatatggcattcccaatccagggcctctggaccccttgagatgcat

SEQ ID NO: 874291 - DNA, 120 bp, Artificial Sequence
  ENSG00000235790_5 (sequence is synthesized)
gtcggccgacggaagtgacgatgggggcggtgggcggatgcctacccgagagaccaggggagctaagtgattgatggagcttccggaagtcttggcggctgtaccagcgctaatgttcct

SEQ ID NO: 874292 - DNA, 120 bp, Artificial Sequence
  ENSG00000235790_6 (sequence is synthesized)
ataaatgtggttgactggcctgtcgttatttggagtttgacacagctgtgtcatagaagaaacagaaagaaaaggggtctctgctgctctggattcatgcctctccgactccccaggctg

SEQ ID NO: 874293 - DNA, 120 bp, Artificial Sequence
  ENSG00000235790_7 (sequence is synthesized)
ggactcagaaaggcaaaacagcttgctcaagggctcacaactatttaggtggtagagctaagatatgaacctacctctgacaccaaagtgcacttcaacaccctactatcacccaacaaa

SEQ ID NO: 874294 - DNA, 120 bp, Artificial Sequence
  ENSG00000235790_8 (sequence is synthesized)
gaattctggccacagaatcaccttgctgcggtattcctgactgaatcaagatacgctggggaagaggcatctgaagatagcccgggttctgacctcggccctgctgcctaactgcctggt

SEQ ID NO: 874295 - DNA, 120 bp, Artificial Sequence
  ENSG00000235790_9 (sequence is synthesized)
agagacgtaggcatgaagaacagggcacaagatcccgaggagcaaagggtcatcagctgcccccatccagcagaatctcacagcaccactggctgaccacagtgcacccctcctgagctg

SEQ ID NO: 874296 - DNA, 120 bp, Artificial Sequence
  ENSG00000235790_10 (sequence is synthesized)
aagtgttcctgttctctctgcagcctctccgactccccaggctgggttgggtgctcctccctctcatcccacagcgctatgtctcatgtcttctggaaaacttgccaatccctagtgaca

SEQ ID NO: 874297 - DNA, 120 bp, Artificial Sequence
  ENSG00000235790_11 (sequence is synthesized)
ggtgggcggatgcctacccgagagaccaggggagctaagtgattgatggagcttccggaagtcttggcggctgtaccagcgctaatgttcctccttttcctgaggtggagtgggccgaag

SEQ ID NO: 874298 - DNA, 120 bp, Artificial Sequence
  ENSG00000235790_12 (sequence is synthesized)
agctaagtgattgatggagcttccggaagtcttggcggctgtaccagcgctaatgttcctccttttcctgaggtggagtgggccgaagaggtattctaatcacagaattactggagcatc

SEQ ID NO: 874299 - DNA, 120 bp, Artificial Sequence
  ENSG00000235790_13 (sequence is synthesized)
ccaatccctagtgtaagtgtgactggtctattgtgagcacctattgttcagggacctctgtttacctgaggccaggacaagggcctggaatgtgagcaggagcaagggagtgctcgggaa

SEQ ID NO: 874300 - DNA, 120 bp, Artificial Sequence
  ENSG00000235790_14 (sequence is synthesized)
gctgcaacaaaatgccagtatcttcgcttttctctggagtcccatcagctcagtgccgtcacactgatcaaaggcactgcctggcagtcatctatgttagtgatgagtaaagtagacagg

SEQ ID NO: 874301 - DNA, 120 bp, Artificial Sequence
  ENSG00000235790_15 (sequence is synthesized)
cccagagccccaacagctcccagcccccgtctacaagagctttacaagggaagaacagaccgtgcctgccttgctgtgtgcttggatcctggcaccttgcacactccctggctctgaatc

SEQ ID NO: 874302 - DNA, 120 bp, Artificial Sequence
  ENSG00000235790_16 (sequence is synthesized)
tatgttaaacgtttgctgaatgaacacatgaacagcctgagccggccccctccctgagaccagcaaggcagcctctcttctggtggctgctggggaagaggactctgattgctaggtggc

SEQ ID NO: 874303 - DNA, 120 bp, Artificial Sequence
  ENSG00000235790_17 (sequence is synthesized)
acaagggcctggaatgtgagcaggagcaagggagtgctcgggaaatggaaacaatgaatgaatcaatcagtcaatcagtggcacgttccagagccatagcctctgttctattcatctcca

SEQ ID NO: 874304 - DNA, 120 bp, Artificial Sequence
  ENSG00000235790_18 (sequence is synthesized)
gcggggagaaagagcagggggacgtcgggcctgcgcctggcaccgccgctacctggattcgcgggcccctcacacactcacctgccggtattctaatcacagaattactggagcatcaag

SEQ ID NO: 874305 - DNA, 120 bp, Artificial Sequence
  ENSG00000234943_0 (sequence is synthesized)
tgtgcagtgcgatagagtttatcagagtttatccatttcccacagagttgtcattagagtcagaactcatgatctcgacaacccaaccttcatgaaattgttcaaaaactttatttttca

SEQ ID NO: 874306 - DNA, 120 bp, Artificial Sequence
  ENSG00000234943_1 (sequence is synthesized)
tgagtcctcaaaacacaggggaaataaattggtagtttagaaatagtagcaatgcatcatactcaagcaggttagcaatagaatagtaggcttgttaaataaagcattcagctagtatct

SEQ ID NO: 874307 - DNA, 120 bp, Artificial Sequence
  ENSG00000234943_2 (sequence is synthesized)
aaagcattcagctagtatctatcacttagtggggtctctgggtacctttgcttatttaacttcatccttccttaaatgaaagtttactccgttttatatatacccagtaatgggattgct

SEQ ID NO: 874308 - DNA, 120 bp, Artificial Sequence
  ENSG00000259551_0 (sequence is synthesized)
cccgcctggggaaccggggcctctcccgggcaggctcgcctttgtcccgggactctgggcgcctcctctccgccctcgccctgccccgtgaggccgccactgggcgcctcaccgtgatgt

SEQ ID NO: 874309 - DNA, 120 bp, Artificial Sequence
  ENSG00000259551_1 (sequence is synthesized)
cgtgatgttgcagtggagcgtgagctgcggcggcggctcctggttcttgtggaagatagaggccaacaacttcagcttggccttgaaccctcacacggacattttactctcacctctggc

SEQ ID NO: 874310 - DNA, 120 bp, Artificial Sequence
  ENSG00000259551_2 (sequence is synthesized)
tggctggagtgagcaattcaacttgtggaggaatgagaagtgacagtgttgagacaagcaacataaaaccccagggtaaggtagaaatcactgaaagtcaggcaaaggaactggcgtcca

SEQ ID NO: 874311 - DNA, 120 bp, Artificial Sequence
  ENSG00000259551_3 (sequence is synthesized)
gtaatgagtcaggctttgccagcctctggccctacagatggctctttgcagaggaaaaaattaagccaggcccgagggcacagatcctaagggaatgctggcagctctaggctgtctatg

SEQ ID NO: 874312 - DNA, 120 bp, Artificial Sequence
  ENSG00000259553_0 (sequence is synthesized)
agtccagttttgtgaagtgcctagaatagtcaaaattcacagagacagaagcagtggtcgccaggaatggggaagcaaggcggagttgggcagctcgtgttcaatgggtagagtttcagg

SEQ ID NO: 874313 - DNA, 120 bp, Artificial Sequence
  ENSG00000259553_1 (sequence is synthesized)
ctggggtgatggaagggtgctggaaatgagtggtagtgatggcggcacaacagtgtgaatctacttaatcccactgaactgtatgctgaaaaatggtttagacggtgaattttaggttat

SEQ ID NO: 874314 - DNA, 120 bp, Artificial Sequence
  ENSG00000259553_2 (sequence is synthesized)
gtatgttttaccacaatttttaaaaagctagtgaaaagctggtaaaaagaaagaaaagaggcttttttaaaaagttaaatatataaaaagagcatcatcagtccaaagtccagcagttgt

SEQ ID NO: 874315 - DNA, 120 bp, Artificial Sequence
  ENSG00000259553_3 (sequence is synthesized)
ccctcctggaatccgttggcttgcctccggcatttttggcccttgccttttagggttgccagattaaaagacaggatgcccagctagtttgaattttagataaacaacgaataatttcgt

SEQ ID NO: 874316 - DNA, 120 bp, Artificial Sequence
  ENSG00000259553_4 (sequence is synthesized)
ttgctgcctctggccaccctactctcttcctaacactctctccctctcccagttttgtccgccttccctgcctcctcttctgggggagttagatcgagttgtaacaagaacatgccactg

SEQ ID NO: 874317 - DNA, 120 bp, Artificial Sequence
  ENSG00000259553_5 (sequence is synthesized)
tctcgctggctgcagcgtgtggtccccttaccagagtgaggatgcgaagagaaggtggctgtctgcaaaccaggaagagagccctcaccaggaacccgtccagctgccaccttgaacttg

SEQ ID NO: 874318 - DNA, 120 bp, Artificial Sequence
  ENSG00000259553_6 (sequence is synthesized)
gacttccaagcctccagaactgtgagggataaatgtatgattttaaagtcgcccagtgtgtggtattttgttttgactaatacaacctgaaaacattttcccctcactccacctgagcaa

SEQ ID NO: 874319 - DNA, 120 bp, Artificial Sequence
  ENSG00000259553_7 (sequence is synthesized)
tatctgagtggcttaaggtactcaggacacaacaaaggagaaatgtcccatgcacaaggtgcacccatgcctgggtaaagcagcctggcacagagggaagcacacaggctcagggctctg

SEQ ID NO: 874320 - DNA, 120 bp, Artificial Sequence
  ENSG00000259553_8 (sequence is synthesized)
ctattcattctttgtgtgaccctgggcaagccatgaatggagcttcagtcaccccatttgtaatgggatttaattgtgcttgccctgcctccttttgagggctgtagagaaaagatgtca

SEQ ID NO: 874321 - DNA, 120 bp, Artificial Sequence
  ENSG00000259553_9 (sequence is synthesized)
gtgcacacggctcccatccgttgtcttccgagcgtcaggccgcccctacccgtgctttctgctctgcagaccctcttcctagacctccgtcctttgtcccatcgctgccttcccctcaag

SEQ ID NO: 874322 - DNA, 120 bp, Artificial Sequence
  ENSG00000259553_10 (sequence is synthesized)
tttgtcccatcgctgccttcccctcaagctcagggccaagctgtccgccaacctcggctcctccgggcagccctcgcccggggtgcgccccggggcaggacccccagcccacgcccaggg

SEQ ID NO: 874323 - DNA, 120 bp, Artificial Sequence
  ENSG00000259553_11 (sequence is synthesized)
cagacgcaaaactacagatatcgtatgagtccagttttgtgaagtgcctagaatagtcaaaattcacagagacagaagcagtggtcgccaggaatggggaagcaaggcggagttgggcag

SEQ ID NO: 874324 - DNA, 120 bp, Artificial Sequence
  ENSG00000259554_0 (sequence is synthesized)
aagatgctcagcaaaagaagggaagcttgagatttgagagaaaagggaaggtttgtagtatcaaacttccatcctcacccccctactgaaacttgcctgtaaagctactttttaaaaagc

SEQ ID NO: 874325 - DNA, 120 bp, Artificial Sequence
  ENSG00000259554_1 (sequence is synthesized)
cttgaaaagaagaggagggaaaagccctgaaagaagctttcatgtctgccaaaatggactgttcatctcagcctcctggaccattcatatcaatcaggaagtttgatggtccactctttc

SEQ ID NO: 874326 - DNA, 120 bp, Artificial Sequence
  ENSG00000259554_2 (sequence is synthesized)
acaaacgaacctatggatgtgttctacccacctgcactgaagctgcagtttagatttactggggaaggtgagaatggatgaaaatgaagaagattacatatgctggatgcagttgactga

SEQ ID NO: 874327 - DNA, 120 bp, Artificial Sequence
  ENSG00000259554_3 (sequence is synthesized)
gagtaggaaaatagacaaaggaactgttaacagaatcattgatatccaaccctggaaatgatggcagtggtggtccagtgggaagaaacaacactaacagattttgtatttggaaatagg

SEQ ID NO: 874328 - DNA, 120 bp, Artificial Sequence
  ENSG00000256137_0 (sequence is synthesized)
tggaaatcggatctagatccagctggccacaggtcctcaatgagattaagcttggtgctggggattaccagtgaataaagcacgctgccagggcctttcctgagtgactgatgctgtgag

SEQ ID NO: 874329 - DNA, 120 bp, Artificial Sequence
  ENSG00000256137_1 (sequence is synthesized)
aggtgccaacttaagtcagcgcttctgagagcggatcaagtgaagttgtatctaccatgaccaaaatctcatctccaggatcacttggtcttggaactctgagccagcatattagaaatc

SEQ ID NO: 874330 - DNA, 120 bp, Artificial Sequence
  ENSG00000256137_2 (sequence is synthesized)
cagctgtttttctgggagaccatgtaagagactctgagactacatggagaggaagaggaaccaggtgagctgtcttccagcctctcctgtcaggcaaccagacacttgggtaagactgtc

SEQ ID NO: 874331 - DNA, 120 bp, Artificial Sequence
  ENSG00000250910_0 (sequence is synthesized)
agtaactggcatttggttatggggtggctgtttttctacgtggaccaagcagggtcccagttcaagtttctgctgcctatctgataatcttgaggtatttatgaaggactcctttgaaag

SEQ ID NO: 874332 - DNA, 120 bp, Artificial Sequence
  ENSG00000250910_1 (sequence is synthesized)
ttctctactgagtttccttaaggaattggaatattttctacaggaattaggagtgtgacttcaggaatggcttattccaagttgtaaaactatcccctgtcgtgaagagtttctctcttg

SEQ ID NO: 874333 - DNA, 80 bp, Artificial Sequence
  ENSG00000250910_2 (sequence is synthesized)
gttgtaaaactatcccctgtcgtgaagagtttctctcttgacacctaggctggaatgcaatggcgcaatctcagctgact

SEQ ID NO: 874334 - DNA, 71 bp, Artificial Sequence
  ENSG00000250910_3 (sequence is synthesized)
aggcttcccaaagtgctggaactataagcgagaccaatttgttgaattggacagctggaagcaaggaaggg

SEQ ID NO: 874335 - DNA, 120 bp, Artificial Sequence
  ENSG00000250910_4 (sequence is synthesized)
gaccaatttgttgaattggacagctggaagcaaggaagggaaaaagtatttcaccgaaaaggcagaagactggcatcaattgcaagctgtggaatcaagacaactttggctgagtcccat

SEQ ID NO: 874336 - DNA, 120 bp, Artificial Sequence
  ENSG00000250910_5 (sequence is synthesized)
tttatataggactaaaggagagtgcagtcctcaaaggcaataatatttatgagaacaaagaagactgtggagaaattttaggcagtagaagagagcagaaaggccaagaggatcagggtt

SEQ ID NO: 874337 - DNA, 120 bp, Artificial Sequence
  ENSG00000250910_6 (sequence is synthesized)
gctctattccagaagcagtctggagcacaaagaatccctaatcactgacattaagaaagaagaaaaatattcctaggacgatcctggagagcaaaggtcatcagcagtcacttgactttc

SEQ ID NO: 874338 - DNA, 120 bp, Artificial Sequence
  ENSG00000250910_7 (sequence is synthesized)
cttggatttctcaactgcagtagtcacatggtctgctgaaaatgaattctctttattttcatctgatttcaaggaattatggttttcagtgatttcttcatttggatctattttgagaca

SEQ ID NO: 874339 - DNA, 120 bp, Artificial Sequence
  ENSG00000250910_8 (sequence is synthesized)
gagtaatagcattaaaacccccttctgaattaataaggtaacatgggcttaaaatcactcaattcactattggattctttggagctgttaatctgttcagtgaaaagaacaagaactttg

SEQ ID NO: 874340 - DNA, 120 bp, Artificial Sequence
  ENSG00000250910_9 (sequence is synthesized)
gaaacgcaaagtgtgacaagccaatggagtattttatgggtgcaaaggaaattatatgtcaaaagcaatggagagaaaacatttgagaaaatggaagaagtgctgagacactggagtcta

SEQ ID NO: 874341 - DNA, 120 bp, Artificial Sequence
  ENSG00000250910_10 (sequence is synthesized)
ccctgaaagataaagcttcacctgaggagatctgcaaattagtagctttttgccagaaggcattctccagtctatgcagctcaagtaatagaaggctacagccttggtggaatgacttga

SEQ ID NO: 874342 - DNA, 120 bp, Artificial Sequence
  ENSG00000250910_11 (sequence is synthesized)
gggaacaggggactgagtctaggaccatcagatcagccaataagtatgtggaaaatagcagaggacagtgaccacaaaatctgcatatgaaattcaccaaaaacctttaccacctctatt

SEQ ID NO: 874343 - DNA, 120 bp, Artificial Sequence
  ENSG00000250910_12 (sequence is synthesized)
caatgatgactcatctgagatgagcaagttggtccagtcagaccaaacaaaagacattctataatcaggggagaagtcttctctatatctctcttatatgagcaaatttaatgacctcca

SEQ ID NO: 874344 - DNA, 120 bp, Artificial Sequence
  ENSG00000250910_13 (sequence is synthesized)
tgcagaggtcttgacagaacttggcagtctctgaggctacagagaagtgtgaaaaagagcatagagatttcagaaggaggcagattcagtcagacgtactgaatcccgtttgatctcaac

SEQ ID NO: 874345 - DNA, 120 bp, Artificial Sequence
  ENSG00000250910_14 (sequence is synthesized)
tcaggcacactccagatggacggagcaggaaaacccttagtgaaacctgcctctgcaggttgatggcttgggaggaaaggcattatggaaaatgattagtttatggaaaaaataaataaa

SEQ ID NO: 874346 - DNA, 120 bp, Artificial Sequence
  ENSG00000250910_15 (sequence is synthesized)
caagactggtcagaaagactgtgaaagaagaactataaagggagatgaatccaagcagatatttagacatatcaagcctaataatggaagtgtggcactggaatcacgagactgaccaat

SEQ ID NO: 874347 - DNA, 120 bp, Artificial Sequence
  ENSG00000250910_16 (sequence is synthesized)
agagaaaacacagggaagaaggccacatgggatgaaggcagagaagggaatgatgcagctacaagccagctacaagccaaggaatgccatggactgctggcaaccactagaaagaagctg

SEQ ID NO: 874348 - DNA, 120 bp, Artificial Sequence
  ENSG00000250910_17 (sequence is synthesized)
gaagaggcaaggaaggattcttccgtgatgccttcagaggaaaatggccctgcaaacaccttgatcttggacttctgacctccagaactaagagaatacatttctgttgttttaagttaa

SEQ ID NO: 874349 - DNA, 120 bp, Artificial Sequence
  ENSG00000250910_18 (sequence is synthesized)
cactgaccttgggcatttgttgctgaaacgcaaagtgtgacaagccaatggagagacaggatctcactttttttgcccactactgggctcaagcgatcctcctgcctccatctccccaag

SEQ ID NO: 874350 - DNA, 120 bp, Artificial Sequence
  ENSG00000250910_19 (sequence is synthesized)
gggattacagccatgagccaccatgcccggccccagctcgcaactttctgtgtgacctcagataggaggttcttcaactgacagctacacatccacccctgctactttcttcattgcctc

SEQ ID NO: 874351 - DNA, 120 bp, Artificial Sequence
  ENSG00000250910_20 (sequence is synthesized)
cctccacagtttctataaggaaaaggcaaaatcttcatacctgcagaattagcgccacatagatgctgccaaagggttttctgcctgtgccctctggagaggtgacatcacatcccccac

SEQ ID NO: 874352 - DNA, 120 bp, Artificial Sequence
  ENSG00000250910_21 (sequence is synthesized)
ggtaaatgtggggatgcagtattgaacagcacactggagtttttgtccagaagtttgactttagaagataagaaataactgagcgtattacaagcaggagttagaggaagagactcagta

SEQ ID NO: 874353 - DNA, 120 bp, Artificial Sequence
  ENSG00000250910_22 (sequence is synthesized)
aagtgctccaagaaacaggctcaagctctggcataagaagattcagttttgcatttatagaattgcttctactattctgattttaccacattttggaatgggatcaccaactttcagttc

SEQ ID NO: 874354 - DNA, 120 bp, Artificial Sequence
  ENSG00000250910_23 (sequence is synthesized)
taccaacgtccaccttgcagctaaacctgaatctttactgtgaaaagtcttaattctgttggtttcattatgaccatttttttggaatttgttttgaggtaacatgggcttaaaatcact

SEQ ID NO: 874355 - DNA, 120 bp, Artificial Sequence
  ENSG00000250910_24 (sequence is synthesized)
agaatctggctgccttcagccaaatctttgactgaagctatgcaagccccctggccttccaagaagtattcagtccaggtttaagtccttcagcatctgacattctcctggcaactgtaa

SEQ ID NO: 874356 - DNA, 120 bp, Artificial Sequence
  ENSG00000250910_25 (sequence is synthesized)
cgcaaagtgtgacaagccaatggagagaaagaagagacacagacatgcagagaaaacacagggaagaaggccacatgggatgaaggcagagaagggaatgatgcagctacaagccagcta

SEQ ID NO: 874357 - DNA, 120 bp, Artificial Sequence
  ENSG00000250910_26 (sequence is synthesized)
agtaactggcatttggttatggggtggctgtttttctacgtggaccaagcagggtcccagttcaagtttctgctgcctatctgataatcttgagtgatgctagaatgtaagctgcatgtg

SEQ ID NO: 874358 - DNA, 120 bp, Artificial Sequence
  ENSG00000250910_27 (sequence is synthesized)
gaagtaagctatatagcaaatcaggcattgcccagttacctgggaattacattcaggcaaagcagaaatacctgaagctagttgcttatacaaccaaatattgagaagtaaagatatttt

SEQ ID NO: 874359 - DNA, 120 bp, Artificial Sequence
  ENSG00000250910_28 (sequence is synthesized)
catctagaacaatcctaaaaatcactcttgtttctaaaaggccaaaggtagtgggcaggtatacaaagaaagggatatttatgagagagggcctgacatttaatctatttatgtaagtga

SEQ ID NO: 874360 - DNA, 120 bp, Artificial Sequence
  ENSG00000250910_29 (sequence is synthesized)
catcaatacatattgtcaagcctggatatgacataattaatcattaatacaacctaattgcagaagttctttttaaaaatagagttatgtctcagaataaagaaagatccctagctccaa

SEQ ID NO: 874361 - DNA, 120 bp, Artificial Sequence
  ENSG00000250910_30 (sequence is synthesized)
ctgctctcatgatagtgaaggagttcccatgatatctgatggttttaaaagtggcagtttcccctgcatgctctctctctcttcggccacctgtgaagaagatgcttgcttctccttcac

SEQ ID NO: 874362 - DNA, 120 bp, Artificial Sequence
  ENSG00000250910_31 (sequence is synthesized)
ggagacctcagaggatcctgtaaaagcatagaagctagaaactgaaaagaattaagcagaaatttcagctgatatccactgcaggagaaacaggattgggaatttgtgtccagccatgat

SEQ ID NO: 874363 - DNA, 120 bp, Artificial Sequence
  ENSG00000250910_32 (sequence is synthesized)
gggcaccctagggccttccttggaaactgtactgccctcaatgctctggcaacatggtcctgtgatgagagtgcagcccaagcaatttacaaaacaccttccgggttgctctttcattgt

SEQ ID NO: 874364 - DNA, 120 bp, Artificial Sequence
  ENSG00000250910_33 (sequence is synthesized)
cctggtgaagagtacagtcctgatccatgtctcctgattcacaacctttgtgttctctcccacactttatttgttaaaatatggacaggctgagaagaataaaaatttcccaaatcttta

SEQ ID NO: 874365 - DNA, 62 bp, Artificial Sequence
  ENSG00000250910_34 (sequence is synthesized)
tattcagtccaggtttaagtccttcagcatctgacattctcctggcaactgtaattgaatca

SEQ ID NO: 874366 - DNA, 120 bp, Artificial Sequence
  ENSG00000250910_35 (sequence is synthesized)
agattacgtattgaggaaccatattcattcagataaagccacagacacgaattctcatggaagcctatcaaacataaacagaaagactctgggattataacatggaaatagtgaatttct

SEQ ID NO: 874367 - DNA, 120 bp, Artificial Sequence
  ENSG00000250910_36 (sequence is synthesized)
agtaactggcatttggttatggggtggctgtttttctacgtggaccaagcagggtcccagttcaagtttctgctgcctatctgataatcttgagattaatgacaaaggctttgagtcaac

SEQ ID NO: 874368 - DNA, 120 bp, Artificial Sequence
  ENSG00000250910_37 (sequence is synthesized)
aaacctgtggataattaacctgggcagccttcccagagagagccatcctgcctgcgaatgatcaaagtattcagtccaggtttaagtccttcagcatctgacattctcctggcaactgta

SEQ ID NO: 874369 - DNA, 120 bp, Artificial Sequence
  ENSG00000250910_38 (sequence is synthesized)
ttgctgaaacgcaaagtgtgacaagccaatggaggccaagatttgattttgatagctcttcctacaattatcctttgaaggaaagcataaagaagacagagaaagaagagacacagacat

SEQ ID NO: 874370 - DNA, 120 bp, Artificial Sequence
  ENSG00000250910_39 (sequence is synthesized)
gcttttttctcagcttctaattgtatgccattcggcgttggaagggaagaaggtgcagaatgtaactccaattcttcactgagggcagtttctttatcttctagtccatccttctcctcc

SEQ ID NO: 874371 - DNA, 120 bp, Artificial Sequence
  ENSG00000250910_40 (sequence is synthesized)
atgtgacttttctttttcaacatactccttggccgaggtgatggtttaaagtgatcatctgtgtcaaggctgttgttttctgctgaaaaataaaatgcttaaagtgtgtgtataaaaaaa

SEQ ID NO: 874372 - DNA, 120 bp, Artificial Sequence
  ENSG00000250910_41 (sequence is synthesized)
attaataaggcatttgttgctgaaacgcaaagtgtgacaagccaatggagataaaaaagcataaattcaagaacacaattcaacagtttagtggtagtgctaacctcaggatcaaggttt

SEQ ID NO: 874373 - DNA, 120 bp, Artificial Sequence
  ENSG00000250910_42 (sequence is synthesized)
cagtaactggcatttggttatggggtggctgtttttctacgtggaccaagcagggtcccagttcaagtttctgctgcctatctgataatcttgagtttctacaggaattaggagtgtgac

SEQ ID NO: 874374 - DNA, 81 bp, Artificial Sequence
  ENSG00000260158_0 (sequence is synthesized)
ggacaacaagacactagatcagcagttggtggaaaccctttgaggttaagaccccacaatcacatgaggatggagtggctc

SEQ ID NO: 874375 - DNA, 72 bp, Artificial Sequence
  ENSG00000260158_1 (sequence is synthesized)
ctacaaggacttttccacctatctttggtggaaaccctttgaggttaagaccccacaatcagttcctggcaa

SEQ ID NO: 874376 - DNA, 64 bp, Artificial Sequence
  ENSG00000260158_2 (sequence is synthesized)
atgtcctcgccacccgctccacaaatcctgcccaagatgctgtcatctatatgatctcagtatt

SEQ ID NO: 874377 - DNA, 67 bp, Artificial Sequence
  ENSG00000260158_3 (sequence is synthesized)
gcagttgaagagctagcaagatccagtctctatcaaaagttaaaaaaaaaaaagtgttcctatttct

SEQ ID NO: 874378 - DNA, 120 bp, Artificial Sequence
  ENSG00000236088_0 (sequence is synthesized)
tccgaaaggagagcgtggtgtctggaggtgatcggaagggactggctggagtgtggcgggctgacaggtctgaggcctgaaggacttccgggaaccgcaaagcacggtgtgcctccgctg

SEQ ID NO: 874379 - DNA, 120 bp, Artificial Sequence
  ENSG00000236088_1 (sequence is synthesized)
tcctgaagaaaaagccgcgcgcggacgactggccggcccgcgcttgcagctcccagaagttgacaggcatcctccggtgaccggtgtgagtatggcatcaggatgatttgactgcaagca

SEQ ID NO: 874380 - DNA, 120 bp, Artificial Sequence
  ENSG00000236088_2 (sequence is synthesized)
acagaaaaatcaaacaaaaatggcctaagccaagaagagaaatgattatttcacattccaagaagtttgggagtcgagtggttaaacggctaattaatctagagctcaacagtatcaccc

SEQ ID NO: 874381 - DNA, 120 bp, Artificial Sequence
  ENSG00000236088_3 (sequence is synthesized)
aggacccattttcactatggtggctaaagctctgcacccttcaggcttgcaccatggcagcagcagtgacagtaaagacacccttacaccacaatgctccatgaccagggagagggtctc

SEQ ID NO: 874382 - DNA, 120 bp, Artificial Sequence
  ENSG00000236088_4 (sequence is synthesized)
ctctctcctgcccctttctggaggctccaccgaagatttctcttcacattccgtttctcattcctgaagcagttgctggcaacagggatggacttaccgcaatgggtacagagcaactaa

SEQ ID NO: 874383 - DNA, 120 bp, Artificial Sequence
  ENSG00000236088_5 (sequence is synthesized)
gattcaccactagtgaaccatttagggatggccacgtgactcagttctggtcaccaaggtggtggaagagaagttctcttgaggggcatctgggaaagattcttctgcctgataaaacag

SEQ ID NO: 874384 - DNA, 120 bp, Artificial Sequence
  ENSG00000236088_6 (sequence is synthesized)
ggcatctgggaaagattcttctgcctgataaaacaggaggcagcactttatggcttctcttgggcatatccaaattgctaccatcactactcgtattagtccattttcacgctgctgata

SEQ ID NO: 874385 - DNA, 63 bp, Artificial Sequence
  ENSG00000236088_7 (sequence is synthesized)
tggcaaagagaaagcttgtacagggagactcccgttttgaaaaccatcagatcttgtgagact

SEQ ID NO: 874386 - DNA, 120 bp, Artificial Sequence
  ENSG00000236088_8 (sequence is synthesized)
ggagactcccgttttgaaaaccatcagatcttgtgagactcattcactattacaagaacagtgcaggaaagatgcacccctgtacttcaatcacctcccagcaggttcctcccacgacat

SEQ ID NO: 874387 - DNA, 120 bp, Artificial Sequence
  ENSG00000236088_9 (sequence is synthesized)
tggttggggacacagccaaaccatatcactactcttgtgctttggggccattatgaagtaaaacaagcattatttgaacacaagaactgcaataccaccacagtagatctgataactgtt

SEQ ID NO: 874388 - DNA, 120 bp, Artificial Sequence
  ENSG00000236088_10 (sequence is synthesized)
accaccacagtagatctgataactgttggctactaagtgactaaggggcaggtgaagtatacagcttggatgcgatggacaaagaggaagatctacctcccagctgggatggagcaggac

SEQ ID NO: 874389 - DNA, 120 bp, Artificial Sequence
  ENSG00000236088_11 (sequence is synthesized)
gatgcaagatttcatcacactactcagaaaggcatgcagtttaaagctcgtaaattatttcaggaattttccatttaatattttcaggctgtggctgaccgtgagtaacaaacccaggaa

SEQ ID NO: 874390 - DNA, 120 bp, Artificial Sequence
  ENSG00000236088_12 (sequence is synthesized)
agcgaaactgcagaacagtggatgggagaaagggtgaattactgtatattcatgagggatattagtccatagtttcttttttcccttttaacaaatttttgggttttgtatatagtttgt

SEQ ID NO: 874391 - DNA, 120 bp, Artificial Sequence
  ENSG00000236088_13 (sequence is synthesized)
ctggttttggtatcagggtaatactagcttcataaaatgaattggaaagcgtttcttctgttttcctaaaaagattatatggaattagcattcattctttaaacacttggtagaaatctt

SEQ ID NO: 874392 - DNA, 120 bp, Artificial Sequence
  ENSG00000236088_14 (sequence is synthesized)
aagtaaaaccatctgagctcggagatttttttgtgtgtgttataaaattacatattcagtttccttaatatttataagatcattttaattatctgtgtttttcagtgaaacgggtcaatt

SEQ ID NO: 874393 - DNA, 120 bp, Artificial Sequence
  ENSG00000236088_15 (sequence is synthesized)
ttctgtatgttgtcaaattaatatttgtagaattgtattagtattcttcattatccttttgatgtctgcagaatctgtaatggtatccctgttttatttctgatattaatttgtgccatt

SEQ ID NO: 874394 - DNA, 120 bp, Artificial Sequence
  ENSG00000236088_16 (sequence is synthesized)
atgtctttttttctttgttgatcttgtcagaagtttgtcaattttatcaatttgttccaagaaccagctcattgatttggtttcagtttcattgatttctacttttatctttattatttc

SEQ ID NO: 874395 - DNA, 120 bp, Artificial Sequence
  ENSG00000236088_17 (sequence is synthesized)
cttctttttcttgcttttggtatattttgtgcttctttttctaggttctagaggtggaagcatacgttattgatttgagacctttcctcttttctaatgtgagcattttagttacattta

SEQ ID NO: 874396 - DNA, 120 bp, Artificial Sequence
  ENSG00000236088_18 (sequence is synthesized)
gttccctcctaggactactttaattggattattgagaggtgttgaagtctccaactgtatttgtggatttatttatttttcctttcagttctattagttttagcttcacattattttgca

SEQ ID NO: 874397 - DNA, 120 bp, Artificial Sequence
  ENSG00000236088_19 (sequence is synthesized)
gctctgatgtttaaaggtgcatgaacatttaggctcactatgtctcagtgaattgacccttttatcattacgtaatattcctctcagtctctggtcattttctttgtgctgaaatatact

SEQ ID NO: 874398 - DNA, 120 bp, Artificial Sequence
  ENSG00000236088_20 (sequence is synthesized)
ttatctgataatataatgactgttccctgtagattaatattttcaggatgtatcatttttatttttttattttcaacctgcctgtaatcattatatttgcagtgaattttttctagacac

SEQ ID NO: 874399 - DNA, 77 bp, Artificial Sequence
  ENSG00000236088_21 (sequence is synthesized)
tttcacaaatagattttttttcttactgtaaatcttagcaagctcagcatacgaatttttttttccttaaattgaaa

SEQ ID NO: 874400 - DNA, 120 bp, Artificial Sequence
  ENSG00000236088_22 (sequence is synthesized)
agtcctttggaaaacacttggccatccaatatataaacaaatctggtactcctgtcaggaaagagatctgcattgtaagaaaaatgagaagaattccttcaggaagaagaaaaatgatac

SEQ ID NO: 874401 - DNA, 120 bp, Artificial Sequence
  ENSG00000236088_23 (sequence is synthesized)
aagaattccttcaggaagaagaaaaatgataccagatggatatgtggatccacataaaggaacgaagagcacaggaaatagtaactatactgtcttgctctgtcacccaggctggagtgt

SEQ ID NO: 874402 - DNA, 120 bp, Artificial Sequence
  ENSG00000236088_24 (sequence is synthesized)
ttggatccaggtttccttcgtcagtccaggcaggactgtgcggttggaaaagggacggatgctggtcctggaaggggcgtcgttatctagaagctcccaacctaagtgggtgactcatag

SEQ ID NO: 874403 - DNA, 120 bp, Artificial Sequence
  ENSG00000236088_25 (sequence is synthesized)
ggagggcaaggagagaaggacacagcaagcaacttacatgtaaaacaagacgtgtgggttattatggaagaaattcacaaccaaacttggggttagcccgtattgttttccaagaactct

SEQ ID NO: 874404 - DNA, 120 bp, Artificial Sequence
  ENSG00000236088_26 (sequence is synthesized)
atgtggacagtgacaaaaaacagacctaagaactagcagactgggcaaagctttttcacataacaacaacaaaaaaagcaattcctcaggaaaaaatggtcaatgggtcattgtgtgtag

SEQ ID NO: 874405 - DNA, 120 bp, Artificial Sequence
  ENSG00000236088_27 (sequence is synthesized)
acaaaactacaagttctgctccagactctggggaaaccatgctgccatcttcaagctgtggccattctgtaatacagactacgctaaatcacatgttgtcatcaaggcagaatattttgt

SEQ ID NO: 874406 - DNA, 120 bp, Artificial Sequence
  ENSG00000236088_28 (sequence is synthesized)
gattcaccactagcctattcttgaatttttattctttcatatgcatttaagaatcatcttgtcaagttcttcgaaaaaccctactgaaatttttattgaaattgtattgaatttatatgt

SEQ ID NO: 874407 - DNA, 120 bp, Artificial Sequence
  ENSG00000236088_29 (sequence is synthesized)
ttgaggcttgggagacttgcaaacatcttcaccatggtgagcataatttggaacacaggattttggagacagagttcagcctcaatatctccatcttcttcctatgccactgaacttgga

SEQ ID NO: 874408 - DNA, 120 bp, Artificial Sequence
  ENSG00000236088_30 (sequence is synthesized)
gattacaagcgtgagcgaccgtgcccagccaaagtggtcatattattattttaaaattttatttttagttgttatggatatacagtaggtttatatatttagggggcacatgagatgttt

SEQ ID NO: 874409 - DNA, 120 bp, Artificial Sequence
  ENSG00000236088_31 (sequence is synthesized)
taataatcacatcatggagaatggggtatccatccttttaagaatttaccgtttgttacaaataatcaaattatactcttttagttattttttaatgcacaattaagtaattatcaacta

SEQ ID NO: 874410 - DNA, 120 bp, Artificial Sequence
  ENSG00000236088_32 (sequence is synthesized)
gcacaattaagtaattatcaactacaatcaccctgttgttatcaaatagtaggtcttctttattcttcctatttttctacatagtgttattattaataatacctaatatatgttgaatat

SEQ ID NO: 874411 - DNA, 120 bp, Artificial Sequence
  ENSG00000236088_33 (sequence is synthesized)
tatgttccagacattctgctaacggttttacaagattatttcatctattactcacaaaaaaactatacaaaaataattactattgttttatcaccattttacaagtaagtaaactgggta

SEQ ID NO: 874412 - DNA, 120 bp, Artificial Sequence
  ENSG00000236088_34 (sequence is synthesized)
aaaattatacgatttgcccaaggtcacagaacttttgggttttggagccaggattaagcaccagtcaaatgttcccagagcccacaccactaacgatcaagctatgcactcatttctttg

SEQ ID NO: 874413 - DNA, 120 bp, Artificial Sequence
  ENSG00000236088_35 (sequence is synthesized)
tcttctgcttttttcactgtcaccactgcctcctcctaaatactaactcttgtcccctgacctgacatggcactgtgttgctgaagcctggaagcagagatagcattttctgcaagctat

SEQ ID NO: 874414 - DNA, 120 bp, Artificial Sequence
  ENSG00000236088_36 (sequence is synthesized)
gagtgatgctatatttaaaatgaccagtctcctggaatgccagtctctccctgccaacacaaacacatagtcttctactttcagctttccaatgtcttctgaggcagagcattgaatcac

SEQ ID NO: 874415 - DNA, 120 bp, Artificial Sequence
  ENSG00000236088_37 (sequence is synthesized)
ttctctttcttcttttttaaatttttatttgaatcacttctctagaggaaggctagagggctcctcattcacaagtctacaattcttattcattttgctgactaatatgaagcggactct

SEQ ID NO: 874416 - DNA, 120 bp, Artificial Sequence
  ENSG00000236088_38 (sequence is synthesized)
gttccccattcttataagacgggccagttaattctctttccagggcctctcacattcttctgtgtgaggataaggtaggacagaatttgttccccttattttattaagtattggtagaag

SEQ ID NO: 874417 - DNA, 64 bp, Artificial Sequence
  ENSG00000236088_39 (sequence is synthesized)
cagaatttgttccccttattttattaagtattggtagaagtggtcaaacaaatgaacatttcca

SEQ ID NO: 874418 - DNA, 120 bp, Artificial Sequence
  ENSG00000236088_40 (sequence is synthesized)
cctgaccttgtgatccgcctgcctcgtcctcccaaagttctggcattataggtattagccaccatgcccagccccaaactatcttatctccaagacactcaatcctttttttttttccat

SEQ ID NO: 874419 - DNA, 120 bp, Artificial Sequence
  ENSG00000236088_41 (sequence is synthesized)
ttttttttccattagtgactcgtgatacagaagactcactccttttacaaaaagataggaaaatgtgcatttgtgcttgcatgcattctttagtcaaaggaatcccctctgcccccaccc

SEQ ID NO: 874420 - DNA, 120 bp, Artificial Sequence
  ENSG00000236088_42 (sequence is synthesized)
agccaacattttttttactctggttttgaaactaatattgcattttctacttttttttctttttaataacaaacatttaaatttataaatatatcccttttatgtgagattcaaacaata

SEQ ID NO: 874421 - DNA, 120 bp, Artificial Sequence
  ENSG00000236088_43 (sequence is synthesized)
tctctgtcactatctcaatcattttcccagtagtcattgctgttaacaggttggatcatggttctcagtccctttgctgtgcacagttacacatacgggtatatattacatctttaaaaa

SEQ ID NO: 874422 - DNA, 120 bp, Artificial Sequence
  ENSG00000236088_44 (sequence is synthesized)
acacagttagggccctagtatgcatattgtcctatagtttgctttgttcatctgaaaatatgtcttggtgatttttccatttcatattccttttcaaagctccataatattttatagcaa

SEQ ID NO: 874423 - DNA, 120 bp, Artificial Sequence
  ENSG00000236088_45 (sequence is synthesized)
agatatagaatgctctatttcaagactaccctattgatggacttttcttgtggtctattttgtgctattttcaacaattttttaataagtaatcttatacacaaagatatatagggtata

SEQ ID NO: 874424 - DNA, 120 bp, Artificial Sequence
  ENSG00000236088_46 (sequence is synthesized)
aaatttctaatttattttcagttttgacagatactataaattgccttcaggaaagtttcatctgtttatagttcaagtaacagcatagaggagactctgaatccttcaatgatcacatca

SEQ ID NO: 874425 - DNA, 120 bp, Artificial Sequence
  ENSG00000236088_47 (sequence is synthesized)
cttgattttatataatttgaaacatttttgctaatctgacagaaattcttcttgtatttttcagaaaacttataataaggtcttcattctgcattcatttccgtagcatgaaacctgtga

SEQ ID NO: 874426 - DNA, 120 bp, Artificial Sequence
  ENSG00000236088_48 (sequence is synthesized)
ccagactccctcagttcataccatggctctgccacttatttgctgcatgatcccaggcacgttgctttactttgctgtggtttagttcctcccctctgaacatggtggcaataatgatac

SEQ ID NO: 874427 - DNA, 120 bp, Artificial Sequence
  ENSG00000236088_49 (sequence is synthesized)
tttactcctagggtggttgtgaggacaaaattggttaacctgtgtaaaacacttagagctacatcttgcacattgtaaagatatgtacatacttgttttattactattctctatattttt

SEQ ID NO: 874428 - DNA, 120 bp, Artificial Sequence
  ENSG00000236088_50 (sequence is synthesized)
tattttcctgaatacaaaaaatggttttggtatgttgtttttctatttggccattttgttgagttatcttatttattataatagttttttttaaaatgacttctcttagatttccttggt

SEQ ID NO: 874429 - DNA, 120 bp, Artificial Sequence
  ENSG00000236088_51 (sequence is synthesized)
agagaattgtaaaaattagacagttgagcagttgaggccatcctttgcaatagttaaaactctttttttttttttttgtcttattacattggctaatatctctcgtggcaatgataatgg

SEQ ID NO: 874430 - DNA, 120 bp, Artificial Sequence
  ENSG00000236088_52 (sequence is synthesized)
aaatccttgtcttgttcctaagtagtaagacttcctctgatatttcaccattaagcaagatgtttgctgtaggatttggtaactatgctttagaagatgaagatattttattgtgataaa

SEQ ID NO: 874431 - DNA, 120 bp, Artificial Sequence
  ENSG00000236088_53 (sequence is synthesized)
atgatattattaaagtatttttttaatgagaaagcatgatgaattttattaaatgttctctttggcatcttttaagtttagcatatattttttctcttttaatcagcctatgtggtgaat

SEQ ID NO: 874432 - DNA, 120 bp, Artificial Sequence
  ENSG00000236088_54 (sequence is synthesized)
tcacagttttgattagtgcctttgcccatgtggacaatattttatgatcaggttttaagagtaatccatccatggctgcttggctgcctggaacttaaaacaacgacaacaacaatgtcc

SEQ ID NO: 874433 - DNA, 120 bp, Artificial Sequence
  ENSG00000236088_55 (sequence is synthesized)
tgtctgccacaagtgaaatatctcatcagagaaaactgagtaggtaatacatgattctgtgttttctctgttttctgcctttgctttttccatttggtaagactcacctgtgttcctctt

SEQ ID NO: 874434 - DNA, 120 bp, Artificial Sequence
  ENSG00000236088_56 (sequence is synthesized)
tgtggctctttctccttgataatacaaccctggtttagttcagatacaggtggcaataggccagaatttgtcctaggagacaaattcgtgatgagcctcgcaaagtcatgacaatcccaa

SEQ ID NO: 874435 - DNA, 120 bp, Artificial Sequence
  ENSG00000236088_57 (sequence is synthesized)
ccgcacagatgccctgcagttccacctctgcatggtagccaaagagagtcctctaaatgaagcaatctctttgagcctctcagcatccccgcacttccagcatcactcaacccagaaaca

SEQ ID NO: 874436 - DNA, 120 bp, Artificial Sequence
  ENSG00000236088_58 (sequence is synthesized)
gaaaggaaaaatttcaattgcacaagaagaaaatatgctgaaatagactacagaatatttagatcttggccactgagtgaaaatatgctggaatagactacagaatgtttagacccacca

SEQ ID NO: 874437 - DNA, 120 bp, Artificial Sequence
  ENSG00000236088_59 (sequence is synthesized)
cacctgcctaacctattttccttggtcttttcacactctgtgatttaatatttatttcaattccctgattcaaaccaaccatgtgtccagagtgactttgtaaacccagtccgggctgaa

SEQ ID NO: 874438 - DNA, 120 bp, Artificial Sequence
  ENSG00000236088_60 (sequence is synthesized)
ctgaggctgaaactccaagtccctctgggcttttaaggtttacagatctcaggagtgaacattttcttaccaagtcactgctctcaaaacaaaccctggaatggaagcttcattatcttg

SEQ ID NO: 874439 - DNA, 120 bp, Artificial Sequence
  ENSG00000236088_61 (sequence is synthesized)
tggccatcagtccacgtttcttccccttctgccctgttgagtttatgtgtgttttatctccctcccgagagggactatactttgttggtgttaaagtgatcacgctggagagtttatata

SEQ ID NO: 874440 - DNA, 120 bp, Artificial Sequence
  ENSG00000236088_62 (sequence is synthesized)
ttctctcattttcaaaaaaatctatctttgattcctaaatgcctacattcacagcactttacagctgaaagtggctgaggttggggcattcgctggaacatcttgagagagtgaaactga

SEQ ID NO: 874441 - DNA, 120 bp, Artificial Sequence
  ENSG00000236088_63 (sequence is synthesized)
agcttcagaaaggcgaagcgacttacccaagaccaagtggctattccgttttgagagtagtaccttttcccagtaacggggctacaggaatgtgccaccatgccctgctaatttttattt

SEQ ID NO: 874442 - DNA, 120 bp, Artificial Sequence
  ENSG00000236088_64 (sequence is synthesized)
ttattttttttttggtagagatgaggcttcatcatgttgcccaggctggtctcaaaatctcgggctcaagtgatccacccatctaggcctcccaaaatgaaaactttttatatagtgaaa

SEQ ID NO: 874443 - DNA, 120 bp, Artificial Sequence
  ENSG00000236088_65 (sequence is synthesized)
caaaatgaaaactttttatatagtgaaaaattagtccgggcacaatggctcacacctgcaatcccagcactttgagaagcagaggtgggtgcatcagttgaggccaggagttcaagacca

SEQ ID NO: 874444 - DNA, 78 bp, Artificial Sequence
  ENSG00000236088_66 (sequence is synthesized)
accagcctggccaacatggtgaaacccatatctcctaaatatacaaaaattagtcagtcatggtggtgcacccctgtc

SEQ ID NO: 874445 - DNA, 120 bp, Artificial Sequence
  ENSG00000236088_67 (sequence is synthesized)
cacaggagggccaaacaagcagtcagaagaagcctgagtcttgtgggtgttgttgagcagctgaacaaaccctaggatggcttccttccagacttcttaggattgcgaacaatgaagctc

SEQ ID NO: 874446 - DNA, 120 bp, Artificial Sequence
  ENSG00000236088_68 (sequence is synthesized)
tattgtttaagcaaggtatcgatggctattttcacttgccactgaaagcaccaggacagagaatcgtctttctaggaatacagccacaaaagccttcattatggtatatgcacataaaga

SEQ ID NO: 874447 - DNA, 120 bp, Artificial Sequence
  ENSG00000236088_69 (sequence is synthesized)
atataaaagtttcctttatgtttctctttaaaatatagctgaagtctgcctcaggcaaaaagacaaacagaaaacataaatgcatacataattcaagaacaataaatatttattttaaaa

SEQ ID NO: 874448 - DNA, 120 bp, Artificial Sequence
  ENSG00000236088_70 (sequence is synthesized)
tgaataaatgttctgcaggatattgtaatagttttctcagggaatatatttttctaatacttatatcaactaacagtatttctgtggcatctccaggtcctctgtgtttaagtcctccct

SEQ ID NO: 874449 - DNA, 120 bp, Artificial Sequence
  ENSG00000236088_71 (sequence is synthesized)
agaaactgcatttctctcctttttcctgctactttggatctcaaatgtgcctaaaaagaaatacttttaacttctctggtttttcttttttcaaatattaacttgtaacttgcagttgta

SEQ ID NO: 874450 - DNA, 120 bp, Artificial Sequence
  ENSG00000236088_72 (sequence is synthesized)
acatggttgttgctagctagctgtcaagtatttgtccaaaaatgtgttcctagaataccttcatcttacagtcactcaatccataatagagtttaaacatttttccataatatttcacag

SEQ ID NO: 874451 - DNA, 120 bp, Artificial Sequence
  ENSG00000236088_73 (sequence is synthesized)
aatattcatgtttttacataaaaaacacttttaatatatgaactatctgcaacacacagcaaaatcccagttatatgacatcaatagccatatactaaaatacacctaacaatattcata

SEQ ID NO: 874452 - DNA, 120 bp, Artificial Sequence
  ENSG00000236088_74 (sequence is synthesized)
ttaaactcaaatttaatatatgttaatatgtaggcatatttacttatacataaagctgtagatttctctctatccttcccccgtacttcccagaggtaaccattgtattgatgatgatgt

SEQ ID NO: 874453 - DNA, 120 bp, Artificial Sequence
  ENSG00000236088_75 (sequence is synthesized)
tgatgacagcaacaatgatgatgataatgatggtaataaaaaccgcaaatttgctgtatgccaggcagtattctaagcactttacatacattaactccttaaatgtccaccgcagacata

SEQ ID NO: 874454 - DNA, 120 bp, Artificial Sequence
  ENSG00000236088_76 (sequence is synthesized)
tgacatagatactattattatccttcattttatagatgagaggttgagaaaaaaattggttaagcagcttgtccaaggccacacagctggtgtgccaggattccaacacaggcaatctgg

SEQ ID NO: 874455 - DNA, 120 bp, Artificial Sequence
  ENSG00000236088_77 (sequence is synthesized)
ccctggagccctttgccgtatcccattgctatatggatattgctgtgtatcattatatactttctctaaacatgtatgcaaccataaaaagctatacataggatttctctcctttttaaa

SEQ ID NO: 874456 - DNA, 120 bp, Artificial Sequence
  ENSG00000236088_78 (sequence is synthesized)
aagtatataatcttataacatttatggggtctttttccagttattttgctattatgaaaaatgttgcaatgaatagtcttgaatatacatccttgtgcatttactctctggtaaacatct

SEQ ID NO: 874457 - DNA, 120 bp, Artificial Sequence
  ENSG00000236088_79 (sequence is synthesized)
agaagccaaatttctgcttggtagattactcatattaacattttttttttagttattccaaaattgctcttcaaagtaattgtaccaatttgcagttctgccagcactgtataagttttc

SEQ ID NO: 874458 - DNA, 120 bp, Artificial Sequence
  ENSG00000236088_80 (sequence is synthesized)
catttctcgctaactccatcaattctttgtatcattgagttcgctgatttttgctaatctgactgatgtgaggtggtatttcattattctcatttgcactcttctttgattgctagagag

SEQ ID NO: 874459 - DNA, 120 bp, Artificial Sequence
  ENSG00000236088_81 (sequence is synthesized)
ttctatgacattctgctgaataaagtgagttacataggttgtaaacaccttcccatggtagctattgaccttctttttgttgtcatcttgatacatggaagtatttagtttaatgtagtt

SEQ ID NO: 874460 - DNA, 120 bp, Artificial Sequence
  ENSG00000236088_82 (sequence is synthesized)
acattctcaatactttcttttctcaatatggtttatgcttttagcattataagtaatatggcagtactcagatgtcatcaagatattcttctatatattctttttaaatttagcttttca

SEQ ID NO: 874461 - DNA, 120 bp, Artificial Sequence
  ENSG00000236088_83 (sequence is synthesized)
catttaggcaactttgagtatgctatgaagtagtacccaattttaccgtctttcatataaatacttgaatctatctttttctatatggtgatgtctcagcatcatttaatgaagactctc

SEQ ID NO: 874462 - DNA, 120 bp, Artificial Sequence
  ENSG00000236088_84 (sequence is synthesized)
attctttgcccagtgatttgtgatgttatctctgtcatattccacatttacatatctaagtggttttattcgtacgctctctattccctgtggcaatatcacattgtttagtatagtttt

SEQ ID NO: 874463 - DNA, 120 bp, Artificial Sequence
  ENSG00000236088_85 (sequence is synthesized)
gcctgataaaacaggaggtaagcaagggttctgctcccccatttgtttctgcctttgaacgtggctgtgggaagacatgatgcttagtgttgctgcagctatctcatgaccttgggcaaa

SEQ ID NO: 874464 - DNA, 120 bp, Artificial Sequence
  ENSG00000236081_0 (sequence is synthesized)
acaggaagcgtgtaggaagcgtggcgcctcagccacaatcgtaatcacctttaatctcttgctcaaaataacccaaagtcaagctgaccctcggtctatcttgaggccctcggctgcccc

SEQ ID NO: 874465 - DNA, 120 bp, Artificial Sequence
  ENSG00000236081_1 (sequence is synthesized)
cgacttgaagattctcccccgttgcgtctaagtggctgctccaagttcccgtccccgctggcatctccctgcctcaccatccgccacattcctacaccaaaagttgacgccgcattctgg

SEQ ID NO: 874466 - DNA, 120 bp, Artificial Sequence
  ENSG00000236081_2 (sequence is synthesized)
ccagcagcatctaatccacctgcagaagcatctggaatcactccactcccaccacgaccgcccaaacccacctccagcggggacgacgcccaaggtaccacctggtctcctggcacccac

SEQ ID NO: 874467 - DNA, 120 bp, Artificial Sequence
  ENSG00000236081_3 (sequence is synthesized)
aatccattctccctccacagccagagggagcctcgctaaccaccaaggcggtcctgcggccccgcgcagccctgagggcgtccagtcctccacgcgtggaggagaatccggcctccagac

SEQ ID NO: 874468 - DNA, 120 bp, Artificial Sequence
  ENSG00000236081_4 (sequence is synthesized)
acaatctccagggcccactggatgggcctccgctccttctcactcccagtcctctggtgcatgcccccttcctggctgaagaacctgcaccagccgcccctccgcctgggaagctccctc

SEQ ID NO: 874469 - DNA, 120 bp, Artificial Sequence
  ENSG00000236081_5 (sequence is synthesized)
atgttctgcttggttatttacttttaattcatgttggagctcctcctgccactgcaagagcaggagctgtgtgtcctggtcactgctgtggcatcccagggccggcgcggtgcccagcag

SEQ ID NO: 874470 - DNA, 120 bp, Artificial Sequence
  ENSG00000236081_6 (sequence is synthesized)
ccaggactggacagactcgggccacgctgcgcacgggctgggatgcgctggctctgcttcctcttccgttgaatgggagtaaagaccactcctcccagggagcttgtggtttctcacaaa

SEQ ID NO: 874471 - DNA, 120 bp, Artificial Sequence
  ENSG00000260151_0 (sequence is synthesized)
ctaacgaggaacactaaatattgtttcctgtgtgcataagtcacttgcagatctagaagaaggagtttgcccaattttaaattagaggcaaagtacttttcttagatctgcaatttacat

SEQ ID NO: 874472 - DNA, 120 bp, Artificial Sequence
  ENSG00000260151_1 (sequence is synthesized)
ctctaatttaaattgcccaattttaaatagaggatttttttgttgatttgagtgaattctctgtaaaatgaagatttttaaatctgctatatatacacacatgcacatacatgtgtagta

SEQ ID NO: 874473 - DNA, 120 bp, Artificial Sequence
  ENSG00000260151_2 (sequence is synthesized)
aatattttacaagtatgctgccttttattttttctcaaatgcagggtaatttttgttttgctaaattaaccttcacaatgcttatttctgagagtcttagaaaggttttgtcaacataaa

SEQ ID NO: 874474 - DNA, 120 bp, Artificial Sequence
  ENSG00000260151_3 (sequence is synthesized)
aatgtatctgtgtaaataggcatttatattttcttctgattttttttcattttgtatattaaaaatttttaatctatattccatcaggaacttatttcttttatgtactgtaactttggc

SEQ ID NO: 874475 - DNA, 120 bp, Artificial Sequence
  ENSG00000260151_4 (sequence is synthesized)
atttttttctagagatcatcaaacccaagagagtctagattttctcctgttattttccagaagttttatagttttgtatttgacatttaggtccgtgattcattttgacttaatttttgt

SEQ ID NO: 874476 - DNA, 120 bp, Artificial Sequence
  ENSG00000260151_5 (sequence is synthesized)
acctttgtttcatcatgttgcctttactttttcatcaaagattaattaaatatatcgatgtgtcgctatttctaaactctctgtcttgtttcattaacctgtctattctttcatcaatat

SEQ ID NO: 874477 - DNA, 120 bp, Artificial Sequence
  ENSG00000260151_6 (sequence is synthesized)
gatactgccttgattaccgtagccttacagtaagtcttgaagttgagtagtgcctgtctgtcctccagctttgttctccttcaatattgtgttagctattcaaggtctttttcttcccca

SEQ ID NO: 874478 - DNA, 120 bp, Artificial Sequence
  ENSG00000260151_7 (sequence is synthesized)
tataagctttagaattactttttctatatccataaaataatttgcttccattttgattagaagtgcattgaatctgtacattggtaagaaatgacatcctgatgatactgagttattcta

SEQ ID NO: 874479 - DNA, 120 bp, Artificial Sequence
  ENSG00000260151_8 (sequence is synthesized)
ttcatgaatatgatgtatcttctccatctcttcagttctttttttatttccatcatcacatatggacagtttatgaaattacataactccctctaccttgaccaaaggacagtgatgaat

SEQ ID NO: 874480 - DNA, 120 bp, Artificial Sequence
  ENSG00000260151_9 (sequence is synthesized)
tcctcgttctgcagccaacaagtcacctctgagggccatgtgtctaaacatagacaggagggacacctgttgcttcagccaacacctgctggcatgtgctgaggatgctggtgctgctgg

SEQ ID NO: 874481 - DNA, 120 bp, Artificial Sequence
  ENSG00000260151_10 (sequence is synthesized)
ctttcccagccctgcccccggggctgctttgggtgtgtgcctcttgactttagtgagaatgtactttttcatccctaccatgggtgaaaagttttcacaaataaaaactttttaaaataa

SEQ ID NO: 874482 - DNA, 120 bp, Artificial Sequence
  ENSG00000260156_0 (sequence is synthesized)
aatagctacaaaatggaaataacccaaaggccctgcagtggagacaaggagaaatggaacgtggcacatccacaccagggaatattatttggtaataaaaagaaatgaagtacctgctac

SEQ ID NO: 874483 - DNA, 120 bp, Artificial Sequence
  ENSG00000260156_1 (sequence is synthesized)
acgtggatgaaccttgaaaacacctgccgagaagccagccacaaagtccacatcctgtatgatgactccattaacagcccgaggtggtggggtctcacccactccctggtgtctctcgcc

SEQ ID NO: 874484 - DNA, 120 bp, Artificial Sequence
  ENSG00000260156_2 (sequence is synthesized)
atgctgcccatcccacccaggtctgtctgcacagggggacagaggcacacacctctgggcggccaacactggtggccacgtgcagcaggggaggaaagtgaggagaaagtgtgatccagc

SEQ ID NO: 874485 - DNA, 120 bp, Artificial Sequence
  ENSG00000260156_3 (sequence is synthesized)
ggggcggctggggccaggccagcactcggcaagatccctgtgccatggggacaaactgattcatgctgggtatccggcaggtacctacttccctgtcagaacagaggcctggaaaaagcc

SEQ ID NO: 874486 - DNA, 120 bp, Artificial Sequence
  ENSG00000255390_0 (sequence is synthesized)
ctccatccccctacccccaataaataaagtctcagctccatctcagggtgctggtgcagggcagggatccctcactgaggagaacccagggctgctacctccttcatatttctccccaca

SEQ ID NO: 874487 - DNA, 120 bp, Artificial Sequence
  ENSG00000255390_1 (sequence is synthesized)
ttggacctggtcacaggtcagtgagcaacagggcttctgtggtcctagtactctgagggggctggggagttcagggtggagagctggggcctggtggtggcctccccgtagccagtcata

SEQ ID NO: 874488 - DNA, 120 bp, Artificial Sequence
  ENSG00000255390_2 (sequence is synthesized)
gtccgaggctgcccagggcaggctcagagtggggcctgcgttggggacactgtgcgcatcccaggtcggggcccagcctgggccacagctagatgtgcagctccgtgtcatcaggtggct

SEQ ID NO: 874489 - DNA, 120 bp, Artificial Sequence
  ENSG00000255390_3 (sequence is synthesized)
tgagaagctgggggacatggcagctgaggacagggagccttcatggctgatgggggagcggtgagaagctggtgggaagatggcccgggctgcagctgtgtttgctggcttggggggcac

SEQ ID NO: 874490 - DNA, 120 bp, Artificial Sequence
  ENSG00000255390_4 (sequence is synthesized)
agacttggctcctgggtgggccacgcttcatccttgagccgagcgatctctgtgaagacactggccagtggttggaactgagggcaccagctcagcaggtagtcccagttatagctgcca

SEQ ID NO: 874491 - DNA, 120 bp, Artificial Sequence
  ENSG00000255390_5 (sequence is synthesized)
cggagctcctcctcgccggccacaatggctgtcagcgcacctgccacacatggcttgccatctgctgggaagccatagtccccagtgggtgcagggctcaggccacagccccccaggaag

SEQ ID NO: 874492 - DNA, 120 bp, Artificial Sequence
  ENSG00000234826_0 (sequence is synthesized)
ccgggaagtggaagctgacttttctgaaggcagaggggcttgggaacacagcactgctccctaatctccctcacaaccatgtctttgtaatgagtaatcaggaacatcgcactcagccaa

SEQ ID NO: 874493 - DNA, 120 bp, Artificial Sequence
  ENSG00000234826_1 (sequence is synthesized)
aaaactggcacataaagcaacctactgaaaatatttaaagcctcttataaaagaggctgaagggagcactctagtgccatttttgcccttctgtgccttctgccatgtgaagatgaagtg

SEQ ID NO: 874494 - DNA, 120 bp, Artificial Sequence
  ENSG00000234826_2 (sequence is synthesized)
ttcaagctgacaccttagaagcagggagggggggcctcaccagatgccaaccctgacagagccttcatcttggactttccagcatccagaactgtgaaaaataaatgtctattatttatg

SEQ ID NO: 874495 - DNA, 120 bp, Artificial Sequence
  ENSG00000226877_0 (sequence is synthesized)
acttgcaaactaaggggaatgagcttccttctgaatgtttatgaaggagaggccactgtgaggatagacagtgaagtgcaactacagcccgcaaatgaaaatgaataatattaatccagc

SEQ ID NO: 874496 - DNA, 120 bp, Artificial Sequence
  ENSG00000226877_1 (sequence is synthesized)
gtcgcaatgatagttccaaggcggaaatttgacgtaattcttttcgacacagttttacaggtctggatgcccattttaattcttctgaaagcatgcctcctccttctggcttcaggactc

SEQ ID NO: 874497 - DNA, 120 bp, Artificial Sequence
  ENSG00000226877_2 (sequence is synthesized)
catctccagcctcttgatctaaaaataatccccaaaccaaaaaattagatactatttcctcaaaattaggtattttaatcaaaacatcttaacataaatacattattatcacccaatatg

SEQ ID NO: 874498 - DNA, 120 bp, Artificial Sequence
  ENSG00000226877_3 (sequence is synthesized)
gggcaggctcgcgccgggcgggggtcgcggtcggcccacaggctgggcactaacgggtcccggggcgccggggcggaccgcggaggtcgtagtggactaattttacaggcgaagttaagt

SEQ ID NO: 874499 - DNA, 120 bp, Artificial Sequence
  ENSG00000226877_4 (sequence is synthesized)
gacttacccaaaacctcacagctaataaacggcagagccggcacccagctgtactggcttccaattctgttagcttaccagcgcatcacattatctccataaatccccatgattcaacta

SEQ ID NO: 874500 - DNA, 120 bp, Artificial Sequence
  ENSG00000226877_5 (sequence is synthesized)
atattagacgccccacagctggaccctggacacggtgactctgattcaattatgcagatgaccacaaacctctggggttggcagagccacaagaaagaaggtgcctggatgaaggagagc

SEQ ID NO: 874501 - DNA, 120 bp, Artificial Sequence
  ENSG00000226877_6 (sequence is synthesized)
tacccactgacctggacacccaattatgtcataggtgctgtgatctagagacaaaatgttccttacactggcagatacttgcaaactaaggggaatgagcttccttctgaatgtttatga

SEQ ID NO: 874502 - DNA, 120 bp, Artificial Sequence
  ENSG00000226877_7 (sequence is synthesized)
ctattggaatcctggatcattgtgggaaatgaaaggaactggtttttagcaaggagaccaagaaactctactccctaggggctagcaatgagagaaaggaagccttaagtctttgagcac

SEQ ID NO: 874503 - DNA, 120 bp, Artificial Sequence
  ENSG00000226877_8 (sequence is synthesized)
agggtgacagtttgggtcctatgtgagatgatcaaatccacagcaacagaggaaaggacaaaaggaaaagatacttcgatggaatcagcagccattgatccaatgccaactccaagactg

SEQ ID NO: 874504 - DNA, 120 bp, Artificial Sequence
  ENSG00000226877_9 (sequence is synthesized)
acatggacactaataagttagaaataaaggttttgtaatatgggaaagaggactgaactagaaaatagactcataaataatcagcctaggagtgatattgctgtgagataaaagaagaaa

SEQ ID NO: 874505 - DNA, 120 bp, Artificial Sequence
  ENSG00000226877_10 (sequence is synthesized)
acaaaggtcagaatcttggaaaacaccctctttagagtctcgctactcaaaacgtggtcagtggcccagcagcactgacatgaggatgttagttagaaactcagaatctcaggctccacc

SEQ ID NO: 874506 - DNA, 120 bp, Artificial Sequence
  ENSG00000226877_11 (sequence is synthesized)
ccagacctgctgaaccagcatcttcaacttaacaagaacccgaagagatttgtgtcacatcaaaaagtttgagaagctctgatctaggtgagccaagccagcaaagaaaggggatggagc

SEQ ID NO: 874507 - DNA, 120 bp, Artificial Sequence
  ENSG00000226877_12 (sequence is synthesized)
agaaaatgggaggagaatagggtaacgcagaatcatcaagacaaggtaaattggagtttcacaaaaacagggctggaaggagtgttgctcaacaatatccaaaaccacagaggttgaaaa

SEQ ID NO: 874508 - DNA, 120 bp, Artificial Sequence
  ENSG00000226877_13 (sequence is synthesized)
agtctagggatccatcccatcttccccagttcccacgtgtatgggacatgtcgagataagtagatagattggacagtgggagaaagtagttctcttccagttgcttctattttctcagca

SEQ ID NO: 874509 - DNA, 120 bp, Artificial Sequence
  ENSG00000226877_14 (sequence is synthesized)
aagtgaggagcaagatcattttggcagactgctaattgtccatcacaatttagtctccctttctccctgaaaacacagactgcttttctcagcctctctttcagttgcatatggtcaagt

SEQ ID NO: 874510 - DNA, 120 bp, Artificial Sequence
  ENSG00000226877_15 (sequence is synthesized)
gttccttggtggatggatctgtggtttattaagctttgtttcttttagcatttagcactcagcatgaagacctagcacacagaagtttattgaataaattaaatttgtcaggattaataa

SEQ ID NO: 874511 - DNA, 120 bp, Artificial Sequence
  ENSG00000226877_16 (sequence is synthesized)
cattgatccaatgccaactccaagactggaacgtcgcaatgatagttccaaggcggaaatttgacgtaattcttttcgacacagttttacaggtgtgacaccatgaagtcgtcccacatt

SEQ ID NO: 874512 - DNA, 120 bp, Artificial Sequence
  ENSG00000226877_17 (sequence is synthesized)
tctgttttattctcattacctaacatatgcccactggggggtgctaaagaactatgaattggaggtctggatgcccattttaattcttctgaaagcatgcctcctccttctggcttcagg

SEQ ID NO: 874513 - DNA, 120 bp, Artificial Sequence
  ENSG00000226877_18 (sequence is synthesized)
ggtactccctggaaacataagagtgctttgggcacctctggtgcctttccatgcctgccttctctgctgttcttgctactagtgaattctaaatcatggccaagtgatgccagcactgga

SEQ ID NO: 874514 - DNA, 120 bp, Artificial Sequence
  ENSG00000226876_0 (sequence is synthesized)
cttagttactagaatgtttttctcaactatgaatctgacttcactccctttcttgaaaacctcctgtagttcctgttgtgtacgggataaaggtgcttaccatggggctgcgcaggtgga

SEQ ID NO: 874515 - DNA, 120 bp, Artificial Sequence
  ENSG00000226876_1 (sequence is synthesized)
aagcagcccagtcttactatgaggatgtccgtttgccatctgggaacaaggaggaagaagcagagacctgggcaagacctcagagaataaattatctcaatggctacttacatggtccag

SEQ ID NO: 874516 - DNA, 120 bp, Artificial Sequence
  ENSG00000226876_2 (sequence is synthesized)
cttttgctttgccttaacactctacttctggatatccttgctcaaaaagaagtctactcaagacagggaggttcctgtggacagaaacatctgcttcctgcttatcctgtatctcagcat

SEQ ID NO: 874517 - DNA, 120 bp, Artificial Sequence
  ENSG00000226876_3 (sequence is synthesized)
ctgaatggtcatgactggaacacaggcagacttcagaaataaatacataaatatctcatactcctcgaatcttttagaaaaagagtgtgggtaacaataaacatatctgctgagaaatga

SEQ ID NO: 874518 - DNA, 120 bp, Artificial Sequence
  ENSG00000226876_4 (sequence is synthesized)
gaatgtttttctcaactatgaatctgacttcactccctttcttgaaaacctcctgtagttcctgttgtgtacgggataaagactgtgagcccctggagttcagggaccatttcttaatca

SEQ ID NO: 874519 - DNA, 120 bp, Artificial Sequence
  ENSG00000226876_5 (sequence is synthesized)
tattccagaacctatcacaatgaatgacacgaagaatatatttgataaaaatctgatgaatgaaccactctaaaatgcaactctaataaagaaaattactgcctattcagttggaactgt

SEQ ID NO: 874520 - DNA, 120 bp, Artificial Sequence
  ENSG00000226876_6 (sequence is synthesized)
accatgttacaaacgtaaaattatgtatagtctgataaagaaatactataatagccttggaaacagctcacatacaattttttttataaatggattcattaccatataactggaccagct

SEQ ID NO: 874521 - DNA, 120 bp, Artificial Sequence
  ENSG00000226871_0 (sequence is synthesized)
cagcagcaacatggggcagggcaagatggggagcctgggcagcgatgtaccttgactttgtggaagcgcagcctttgggtgagccggatcagctcttcagtctgcttcatgcgccccacc

SEQ ID NO: 874522 - DNA, 120 bp, Artificial Sequence
  ENSG00000226871_1 (sequence is synthesized)
tcagcgctgcaacgctcgatgatctagcttccccactgcccaccttgctgacagcacccagggccttctgggcattctcctgacggctggacccctcttctgtctggcgcaggatattct

SEQ ID NO: 874523 - DNA, 120 bp, Artificial Sequence
  ENSG00000226871_2 (sequence is synthesized)
ggccacagctcagaggaccctgtctgtttcagccagtttcaacaaggctgacagacctcatcactcaccatctgcagaaccctgagcaagtcctgttacctctctgagcctcagcttccc

SEQ ID NO: 874524 - DNA, 120 bp, Artificial Sequence
  ENSG00000226871_3 (sequence is synthesized)
tatctgtaaaatggggctaatacccacctagcatatcaatagcattgttttgaggattcaagaaggcaatatatgtaaagtgcttagcatagttcttggcacatattaaatgttgaaaag

SEQ ID NO: 874525 - DNA, 120 bp, Artificial Sequence
  ENSG00000236556_0 (sequence is synthesized)
ccactcaccagcaatgctatactaggcttcagtgtcttatgaagaatggtagtacttcacagagattaaggacctttcatgaagaatgctccctaagcctatttctaccatttatctgga

SEQ ID NO: 874526 - DNA, 120 bp, Artificial Sequence
  ENSG00000236556_1 (sequence is synthesized)
cctgggaacattaatttgcctgctgttggctagccaatctaccatccccggaattaaagccagagactaacagaaaattgagactcaatttgggactttttgacaaggaaattaatgaaa

SEQ ID NO: 874527 - DNA, 120 bp, Artificial Sequence
  ENSG00000226872_0 (sequence is synthesized)
agtgaagttgcggatgctgtggctgaacatagagtccaggtagccactccaggcacgggccacggcggcgccaccgatgatgtattcgaggagaacattccagccgatgaggaaggccca

SEQ ID NO: 874528 - DNA, 89 bp, Artificial Sequence
  ENSG00000226872_1 (sequence is synthesized)
tgtattcgaggagaacattccagccgatgaggaaggcccacagctcgcccatggatacgtaggtgaacagagtctcaactcggttcact

SEQ ID NO: 874529 - DNA, 120 bp, Artificial Sequence
  ENSG00000226872_2 (sequence is synthesized)
cagcctcccaagtagctgggactataggctgtaactaccatgcctggcgtcaaccagaatattacgacagcctgctgcttctagtactgaagatccaggggagagctgggccctgcacct

SEQ ID NO: 874530 - DNA, 120 bp, Artificial Sequence
  ENSG00000226872_3 (sequence is synthesized)
ggccctgcacctgccaggatggagaggagccttcggaaatgcagtttctctggcctggtttctcaacccatccctttttctaccagaaacctcctacacatccctgaaagtcctgttcag

SEQ ID NO: 874531 - DNA, 120 bp, Artificial Sequence
  ENSG00000226872_4 (sequence is synthesized)
gtgccactcctctgtgaagcccttcctgagaacctgcagccacctttggcatcacatgcttctctctcgcacacactggctgcatggcgggtgttcaagctgtcagtggggaaaggactt

SEQ ID NO: 874532 - DNA, 120 bp, Artificial Sequence
  ENSG00000236559_0 (sequence is synthesized)
tcacaaaggtgaattcacttgctcaagatccaacacacacaaaatggaggtggttcaaacccaggtgtgtctgactgcagagcctgtgttcttcccagtagagatgtggatgcagcacaa

SEQ ID NO: 874533 - DNA, 120 bp, Artificial Sequence
  ENSG00000236559_1 (sequence is synthesized)
ctgagacttagtcagaagacctcagttcacccaaggtatctgctatgcccaaggcctctgctcagtgctgaggaaacaagcatggacaagatgtggcctccaccctgaggagctcctaaa

SEQ ID NO: 874534 - DNA, 120 bp, Artificial Sequence
  ENSG00000236559_2 (sequence is synthesized)
tctaggacagagtaaatctgttagaaatgtcttctctgcacataatttaagctctaccaactgttaacttcttttcatttatccaagttttgccaggtaccacaccaataaaaaaagact

SEQ ID NO: 874535 - DNA, 120 bp, Artificial Sequence
  ENSG00000263305_0 (sequence is synthesized)
gtaacacacaatacagacttcaaaaaaccagagcttttgctggggatatatgctccttccaaaggcgattgattgtgtgcaatattctgagaagtaattcctccaaaggtggatattgag

SEQ ID NO: 874536 - DNA, 120 bp, Artificial Sequence
  ENSG00000263305_1 (sequence is synthesized)
ggagaaacagaaaaatccaagacaatcccttgtggaagaaaattctccaacccaaaactcaaccgaactcaaagggctgaacagcgcgtcaattaagacctgtcaaatataatcacacga

SEQ ID NO: 874537 - DNA, 120 bp, Artificial Sequence
  ENSG00000263305_2 (sequence is synthesized)
atttaggcctcaaggaattccaaagtagtgtattaggtatagtaaatatatatgtaattagaaatgtttagagaaattagagagatgtgttttttttaaaagatttggcctataaaacag

SEQ ID NO: 874538 - DNA, 120 bp, Artificial Sequence
  ENSG00000263305_3 (sequence is synthesized)
ttaacaattccagtaaagaagaaaacagaaattcaatgtttgatatacatacataaaaataaatttcaggaaaagtccgtgtgataacagaatccaaattatataaaagatagaaatctc

SEQ ID NO: 874539 - DNA, 120 bp, Artificial Sequence
  ENSG00000233621_0 (sequence is synthesized)
ggccgctgcgcgccggacggggcccaagcgggggtcggagcctcaaggctgcggcggcgacgagctccgagcgggacactgaacggcccgtatgcgcaagataagcacggactgaatcag

SEQ ID NO: 874540 - DNA, 120 bp, Artificial Sequence
  ENSG00000233621_1 (sequence is synthesized)
gtacacgcacctgccggggacgcactgaccgaggtgcggacggcggtaccaggacaggtaaagccgcgaacactcggacctaagaacttgacaggtacaccctgcctgatgaagctacgt

SEQ ID NO: 874541 - DNA, 120 bp, Artificial Sequence
  ENSG00000233621_2 (sequence is synthesized)
acaccctgcctgatgaagctacgtacggccaggtgcgcatcgagtgaatcagagacgaagtttcgccatgttgcccaggctgatctcaagctcttgggctcaagcaatccacctgccttg

SEQ ID NO: 874542 - DNA, 120 bp, Artificial Sequence
  ENSG00000233621_3 (sequence is synthesized)
gggtgagaacctacttcttcataaagagaatttggagggagctttttgttctgcggggacaacatctggatttgaatacatccatgctcaaaaggagatttctcataatggacccaactg

SEQ ID NO: 874543 - DNA, 120 bp, Artificial Sequence
  ENSG00000233621_4 (sequence is synthesized)
aaagcactcagagtacaaggaccggtgagctttcaaaaggagacacttcgggagactcgccaggggccctcgtatccccggcagcgcgagttttggaggtcagtggagggctctcgcatc

SEQ ID NO: 874544 - DNA, 120 bp, Artificial Sequence
  ENSG00000233621_5 (sequence is synthesized)
aattcatttaaaaacatttgcggtttcagaagccttctttttattatgaagctgccaaggagatcttagaatgaaaggcatttttagagatgagaaagaaggaagccaggccaaggctgg

SEQ ID NO: 874545 - DNA, 120 bp, Artificial Sequence
  ENSG00000233621_6 (sequence is synthesized)
gccggctctcagccgtgggtctgtaaaggtgacacgtgggacatggccacctgcagaccctgcaggcggctgggcagaggcacccacagggacctgggtttgaatccctgctctgccagt

SEQ ID NO: 874546 - DNA, 120 bp, Artificial Sequence
  ENSG00000233621_7 (sequence is synthesized)
catttccacagcgatcttgggggaagttgtgtaacctctgggccctgcgacgccctttcctggagcctggagctggaacgaagccccttggagccctgacatcagaggtgacgttagtct

SEQ ID NO: 874547 - DNA, 120 bp, Artificial Sequence
  ENSG00000233621_8 (sequence is synthesized)
tcgcaggcaatgactcggcggaatgtgatgccactccctaacccgtgtccggactggcagagtgtgtgccgcctcccaccaggtggtctggctgctttgatggatctcctaacttctctg

SEQ ID NO: 874548 - DNA, 120 bp, Artificial Sequence
  ENSG00000233621_9 (sequence is synthesized)
caccccagagccctcagtgctggccagaccttcactcactcctgggtgacaaccccgttctcagatagtgggtcccacaggctggcctgtggcgccccctgctggtgactgcagggagaa

SEQ ID NO: 874549 - DNA, 120 bp, Artificial Sequence
  ENSG00000233621_10 (sequence is synthesized)
ggatgccctaagccaaaggaagtccttcctggggtctaatctctaccttttgcatgatgaggcagctgaggtggctcgctttctcctccaccccagaaaataaagtcatatggagtccaa

SEQ ID NO: 874550 - DNA, 120 bp, Artificial Sequence
  ENSG00000233621_11 (sequence is synthesized)
caggttagagctgggcaaagaggaagctgctcaggattggaaggtgggagagaagcatcagccatcactctctgaggtcgccacagtcagatggagtgacagatgaagagatgcctggtg

SEQ ID NO: 874551 - DNA, 120 bp, Artificial Sequence
  ENSG00000233621_12 (sequence is synthesized)
ggtcccagcttgtcctcgttcttctccctttgcctccagctcttctccctggctacctaccctgttggccaatggcggctcatgctcatcaccaggcatgtggctgcagacacacggagg

SEQ ID NO: 874552 - DNA, 120 bp, Artificial Sequence
  ENSG00000233621_13 (sequence is synthesized)
tgggagccatgcagaggcaccggctcttcacaaccctctctgccagcacccgtttcagggtcctcctttgatgttgggtgtgcttggcttctccaagtgacaggttagtgcctcccctgg

SEQ ID NO: 874553 - DNA, 120 bp, Artificial Sequence
  ENSG00000233621_14 (sequence is synthesized)
gcctccatctgatcttctggacctttgcttccgcagcttccctcaattatgcaaattctaggtctgattcctagaataaatactggatctcaaagcactcacaggattctgctcccctgg

SEQ ID NO: 874554 - DNA, 120 bp, Artificial Sequence
  ENSG00000233621_15 (sequence is synthesized)
ctgaactctggtggaaatgatgtcatgtgacttcgaaactaggccttaagagtccttgcagttttccctgtcctgaggccacatcatgctgtgaaaaaacccaacttagcagaggctgag

SEQ ID NO: 874555 - DNA, 120 bp, Artificial Sequence
  ENSG00000233621_16 (sequence is synthesized)
tagacattttttttaggctgagaaaatatttttctattaattggttgatctgtcattatattccattgcatagtcagtgataatatactaagtaaagtttagtgtaaccatattagaata

SEQ ID NO: 874556 - DNA, 120 bp, Artificial Sequence
  ENSG00000233621_17 (sequence is synthesized)
atctaaatttgaagatatttattagctttattaacttatacaaaataaaattcactgcttttttatcgtggtaaaatatagacaacatacaattaaccatttcagctacttttaggtgtg

SEQ ID NO: 874557 - DNA, 120 bp, Artificial Sequence
  ENSG00000233621_18 (sequence is synthesized)
caggtcagtggcattaggtacagtcacattgttgtataaacatcatcactatccacctccagaactttttcatcattccagacagaaactctgtagccattacacaacaattccccattc

SEQ ID NO: 874558 - DNA, 120 bp, Artificial Sequence
  ENSG00000233621_19 (sequence is synthesized)
ccccaccccttagtgtaggtttttttttccccatttttttttgagaaagggtctcactctctcacctaggctggagtgcagtggcaggatcatgctcactgtaacctccaactcctgggt

SEQ ID NO: 874559 - DNA, 120 bp, Artificial Sequence
  ENSG00000233621_20 (sequence is synthesized)
agcctcctgagtagctaggactacagacgtgtgccaccaagcctagctttttattttattttttgtagagatgggaaggaggctggctatgttgcccaggtgccctcagtgtagttttag

SEQ ID NO: 874560 - DNA, 120 bp, Artificial Sequence
  ENSG00000233621_21 (sequence is synthesized)
tgccctcagtgtagttttaggccactaaattttggggtacgttgttacacagccgtagataactgaacattcatacttggtgaggtcatatgctctaattttctagtttaaaaaatagtt

SEQ ID NO: 874561 - DNA, 120 bp, Artificial Sequence
  ENSG00000233621_22 (sequence is synthesized)
tctcaggcaaaactatggagatggtaaaaagatttgtgtttgccaggggttcttggggtaagggtgggaaggtatgagtaggtagagcatagaagatctttagggcagtgaaaatgctct

SEQ ID NO: 874562 - DNA, 120 bp, Artificial Sequence
  ENSG00000233621_23 (sequence is synthesized)
gtatgatactataatggggatacccagagagaaccatgatgcaaactatggactgtggactctgggtggtgatgatgtttcattgtaggttcatcaatggtaacaaattcttttatacca

SEQ ID NO: 874563 - DNA, 120 bp, Artificial Sequence
  ENSG00000224658_0 (sequence is synthesized)
gcacacaccccctacctccctgcctacattccacccagcctgactgctctggaaggaagaatccctgcaaggtgagtgttattatatccatttgtggaccaggactgcggctcagaagct

SEQ ID NO: 874564 - DNA, 120 bp, Artificial Sequence
  ENSG00000224658_1 (sequence is synthesized)
gtctgacttcgaaggacagaatgacacatggtacaagctttctgtcttactgccacacgtcagtgtcctgggagatgaaccagatgcagctccctgatgaatgtgggaataaaaatttat

SEQ ID NO: 874565 - DNA, 120 bp, Artificial Sequence
  ENSG00000224655_0 (sequence is synthesized)
ggtgacagagcaagacactgtctcaaaagaaaaaaaaaaagaatttgtgttcgtaatacttttaaattttctttttttgaaaagtaaggtttttttttttttgtccgcttggccagtcca

SEQ ID NO: 874566 - DNA, 120 bp, Artificial Sequence
  ENSG00000224655_1 (sequence is synthesized)
ccgcttggccagtccaaaggtccttttcattgtcattgggtgggccagtttttctcctcccatcttctatgatgcatgtatgttttgggtcaatgatcctctggtgatctcttttcctta

SEQ ID NO: 874567 - DNA, 120 bp, Artificial Sequence
  ENSG00000224655_2 (sequence is synthesized)
ctcttttccttaggtttaatgtaacttttcctcttgcatgccagtttcatgttttctcacagaagtactgggaaaggatcttcatatttaactttatttatttatttatttatttttgag

SEQ ID NO: 874568 - DNA, 120 bp, Artificial Sequence
  ENSG00000224655_3 (sequence is synthesized)
atacatgccaaaagaaatttgaggaacaaattcagccctgagacaggtcacggaaacagccctccagtcttcctcaagaaatgtagactgaatcagcatttacccacccctggaaaaacg

SEQ ID NO: 874569 - DNA, 120 bp, Artificial Sequence
  ENSG00000224655_4 (sequence is synthesized)
caggagctgcgcattcctgggatctcagcagggcttttgggaagagcagaactgggctggagtcacggtttctgggctgactctagattttccccggcttttgccacctgtgatggctgg

SEQ ID NO: 874570 - DNA, 120 bp, Artificial Sequence
  ENSG00000224655_5 (sequence is synthesized)
cacctgttcgtcatttctgtggcttcccagggagtcttactcttctgcttcaagctgctgggtttgactctgagcagtttctgtgcagccacaaagattcttatgtgagacacactgctg

SEQ ID NO: 874571 - DNA, 120 bp, Artificial Sequence
  ENSG00000224655_6 (sequence is synthesized)
cttcagagtgctccaacccatctcccctgattaaacactaaccagggctgccacagcaaagtggctcaaatgggtgacgtcaacaacagatttactttctcatagttctggaggcaggtg

SEQ ID NO: 874572 - DNA, 120 bp, Artificial Sequence
  ENSG00000224655_7 (sequence is synthesized)
tctaggatcaaggtggtggcaaggctattccttctgttgcctccctccttgccttgtggatgaccgtcttctccgcgtctttccaagatctctcctctgtgcatgtcagtgtccttgctt

SEQ ID NO: 874573 - DNA, 120 bp, Artificial Sequence
  ENSG00000224655_8 (sequence is synthesized)
cctcttcttatgaagacaccggtcatgttggaatgcaacagaagagagtgcacggcttctgaggttgcagcttttgggagaagccatctaccattgatgacagacatgccgtgtggaaac

SEQ ID NO: 874574 - DNA, 120 bp, Artificial Sequence
  ENSG00000224655_9 (sequence is synthesized)
caaaccagccatgtggagaggctacctggacagaggcacagggccagcagcagctgtggagacagacatgtgagcaaagaaatcatctttgatgtacagccaagttgagccttcagatga

SEQ ID NO: 874575 - DNA, 120 bp, Artificial Sequence
  ENSG00000224655_10 (sequence is synthesized)
ctccgatttcagccacctttggactgcaaccacatgaaagactctaaatagaagcctcccagctgatcccggttaacccacagtgctgaaggggataataataaattgttgttttaagcc

SEQ ID NO: 874576 - DNA, 120 bp, Artificial Sequence
  ENSG00000224655_11 (sequence is synthesized)
actcagggtgagagggagattctgaagctttgtgtttcttgctagctagtcaaaggtgactaattcatgtgtgattctgaagctgcggagagtgggaagccatccccagggaaatgtaaa

SEQ ID NO: 874577 - DNA, 120 bp, Artificial Sequence
  ENSG00000224655_12 (sequence is synthesized)
ggtgggctgtccagcacacagcttggtgagcaggatttgagatactcaccccactttctggtgatacagaccccctactcccagtgacacaagatggttggacccacggctgatttactg

SEQ ID NO: 874578 - DNA, 120 bp, Artificial Sequence
  ENSG00000224655_13 (sequence is synthesized)
ctttactcccattctttatggggccagctttaatgagcacccaagcagaaatgcctttgactcctgcactgtgaataactgttattaataaaagggcaagctgcttgccatggaaccttg

SEQ ID NO: 874579 - DNA, 120 bp, Artificial Sequence
  ENSG00000224655_14 (sequence is synthesized)
gaatgtgccactgatttccttttggggttctgaccgataataatgcacgttcattgacaaccacaccaccacccattgactatccaatgtgagaggaggccccgaagcaaaaccagtaag

SEQ ID NO: 874580 - DNA, 120 bp, Artificial Sequence
  ENSG00000224655_15 (sequence is synthesized)
aggaatgcattccgataagctaacagatgtttactgcatgaaccaggtgcagctgctcttccatcgttattggcatgctctactatgagtccgtaggtcaggtgctggggaatggatgga

SEQ ID NO: 874581 - DNA, 120 bp, Artificial Sequence
  ENSG00000224655_16 (sequence is synthesized)
agattctgaagctttgtgtttcttgctagctagtcaaaggtgactaattcatgtgcccgtgtgacaggagctacaaatatgttccatgaggtcctgagttgaccagcttctttcaagacg

SEQ ID NO: 874582 - DNA, 120 bp, Artificial Sequence
  ENSG00000224655_17 (sequence is synthesized)
taggtcagggcagtcacatagaagtatcatggtgaccttggggatggtgacagtggctaaaagacgttgagagagacagtgcaagagaggaaagcatcttcaccctggaccctaatatgg

SEQ ID NO: 874583 - DNA, 120 bp, Artificial Sequence
  ENSG00000224655_18 (sequence is synthesized)
agacacctttgactagctagcaagaaagataaaacttaaaatctccctctcttctgtcgaatgtgggcggaacacagtgattctgaagctgcggagagtgggaagccatccccagggaaa

SEQ ID NO: 874584 - DNA, 120 bp, Artificial Sequence
  ENSG00000224655_19 (sequence is synthesized)
cttgcttcctcttcttatgaagacaccggtcatgttgggagaacactgggggccacgggctttgggcatcttagaagcctcaatagaagaagcacgatctcagctcactgcagcctctgc

SEQ ID NO: 874585 - DNA, 120 bp, Artificial Sequence
  ENSG00000224655_20 (sequence is synthesized)
cacaaaatccatgccctccggaagcttcaaatggagggagataaatgccagtgtccttagcttgtgaagattggatgatggccggggccctcagaccccttggcccctccttaactgcag

SEQ ID NO: 874586 - DNA, 120 bp, Artificial Sequence
  ENSG00000224655_21 (sequence is synthesized)
gagtcttcctggccttgaatgtcctcttctcagcatccaggaatgtccagacattcatccaacaaccagtctgggctaatgagtcaggcatggtgcctggtgtgtagttagcactcaaca

SEQ ID NO: 874587 - DNA, 120 bp, Artificial Sequence
  ENSG00000224655_22 (sequence is synthesized)
catagaccttaattgagttaacaaataggagatgatgatgggagctattgctaggtaacatgcacatatttatcatgcatttgcttattcatcaatttaaaggaaagtttgttttctttc

SEQ ID NO: 874588 - DNA, 120 bp, Artificial Sequence
  ENSG00000224655_23 (sequence is synthesized)
cagcagagtcgagtttcaatgggagcaggatggagaagaggttgagaaagtcctgttgcataggggctgtgcatgtgtgtgtgtatctttgtggagtgaagaaggtgtggccttgatatc

SEQ ID NO: 874589 - DNA, 120 bp, Artificial Sequence
  ENSG00000224655_24 (sequence is synthesized)
cagaggttcccccatatggcatccatggggcttcttggattccgccgttgtatttcagaagctcatcagttgaagaagctgtacaaagctagttctgagatgtggctttttgtgggctgg

SEQ ID NO: 874590 - DNA, 120 bp, Artificial Sequence
  ENSG00000224652_0 (sequence is synthesized)
gattcctccacccagaagcccttaaaatgcagctttgttttaagccttcttgaagatttgggctagatctagaaaagaacctcaccacggaggatgtgcaaagtacaacacgtgaccccg

SEQ ID NO: 874591 - DNA, 120 bp, Artificial Sequence
  ENSG00000224652_1 (sequence is synthesized)
gagacggaagctcttctctacctccgtaaagatgatctctgatgaacagacatgatcatgcctggagaacagggatggacagtcccgcttctgaaagaccctgtctggctgatgattcat

SEQ ID NO: 874592 - DNA, 120 bp, Artificial Sequence
  ENSG00000224652_2 (sequence is synthesized)
ggtgcgccgggcagaccccaggccaagagaccccacccacagtacctgagtgctcagctgggaaccagaccagacctcaaaacagaccagccccccagcattgacctggatgcctgccac

SEQ ID NO: 874593 - DNA, 120 bp, Artificial Sequence
  ENSG00000224652_3 (sequence is synthesized)
agcctcctccctggtctccggcctcccacctctgctcctcggtctcctctacccagccagtaactgcagagagcactaaagcacagtcctggcatctcacccccttaaccctggccacgg

SEQ ID NO: 874594 - DNA, 120 bp, Artificial Sequence
  ENSG00000224652_4 (sequence is synthesized)
taaagcaccaacacctgaggacagcagttcgctggactccacgctgaacgtgccatgctccattgccccgtgagtaactccatgctcttgccggtttcacacggcctctcagagctggag

SEQ ID NO: 874595 - DNA, 120 bp, Artificial Sequence
  ENSG00000224652_5 (sequence is synthesized)
cctttgttcaggagccctgggcagctttcaggaagctcttgggctcatcagcttcctctggctgaagccgccccagtggaatcatggggatttcttactttgaaggtggggccacccgca

SEQ ID NO: 874596 - DNA, 120 bp, Artificial Sequence
  ENSG00000224652_6 (sequence is synthesized)
gactgtaaccggctggttcaagatcaaggacttccccaggccacctgcctcagaggcaagaaaggctcagctgagtcccagacactcctcgctgtggcccctccttcctccctgctgggc

SEQ ID NO: 874597 - DNA, 120 bp, Artificial Sequence
  ENSG00000224652_7 (sequence is synthesized)
aggcccccctcaattctgtttgccagcagggcctagtaacactgaaagacgaaaagggaaataaaataaacacaattaataggctaaaggttactgaataaagtggcagcagtaaataaa

SEQ ID NO: 874598 - DNA, 120 bp, Artificial Sequence
  ENSG00000224652_8 (sequence is synthesized)
tgtgcaaatacaaagacatgaagacatgaaacccctgctctaaatgaccactcaccaagagcaaggcctgggctggaggcagggagcacctccctaaggagcactccctctttcccggag

SEQ ID NO: 874599 - DNA, 120 bp, Artificial Sequence
  ENSG00000224652_9 (sequence is synthesized)
tgagtcctccttctagatggaattcagtccgggttcctcttgagccacagtccctgttggggcctatctcagtggactcaagatcctgaacttcttccagattgctgactacacatttga

SEQ ID NO: 874600 - DNA, 120 bp, Artificial Sequence
  ENSG00000224652_10 (sequence is synthesized)
gtcacccagagattaaaagaaaaaacaaataatttcccagtgatcaggagtaaatcagctggggcagggttggtgctatgaatgaccacactgatttgtacacttcactgatttgtagtg

SEQ ID NO: 874601 - DNA, 120 bp, Artificial Sequence
  ENSG00000224652_11 (sequence is synthesized)
tttgctatttccgtcgtgtaaatactgccaacatggacaatcttcagttgctaatggtttactaactggcttgtaaatgaattcattcagtattcaagaaaatggcactacatttagaaa

SEQ ID NO: 874602 - DNA, 120 bp, Artificial Sequence
  ENSG00000224652_12 (sequence is synthesized)
gtgcagccaacgggcctcgctgagctgccctgggccgctccctccattcacacagttggccctccctctccctgcctcccttcgcctaccccacgaactacttcatccctctgggccggc

SEQ ID NO: 874603 - DNA, 120 bp, Artificial Sequence
  ENSG00000224652_13 (sequence is synthesized)
gggcgggcctgagccgagggagagcccatggccatcagggtgctggaatgcatgtcacactgcattacgtgcattacgatccacgctgcaatgacagcccagagcgtggagaacccagag

SEQ ID NO: 874604 - DNA, 120 bp, Artificial Sequence
  ENSG00000224652_14 (sequence is synthesized)
agggtggggagatggaatcccggcgagccagcgctggcagggaccacggggagcagctggtccagccgccggttttccaagagagaagactaagaagtgagtcacttgcccacagccaca

SEQ ID NO: 874605 - DNA, 120 bp, Artificial Sequence
  ENSG00000224652_15 (sequence is synthesized)
gagagaaggagggcaacgaggccggcaggtcagcagcgagcagttagttcaaggccttgagggcttccactaactttgaagggcgaggatgggcggagctctggaggccgccgggaccag

SEQ ID NO: 874606 - DNA, 120 bp, Artificial Sequence
  ENSG00000224652_16 (sequence is synthesized)
gggtgccaacagcaactgcagctctggcccaagccaggtgtgggctgacctagccagggagcggggaagtgaaaggaatgggtcccttcccactcagagggcggagcccccacttctggt

SEQ ID NO: 874607 - DNA, 120 bp, Artificial Sequence
  ENSG00000253561_0 (sequence is synthesized)
ctgctggctatcctgggtctgtgagaacattgactgaggtcccaggtgacaatggcttgctatgcccagctggcggatggtgagaagaggcctcattgaaaccacctatcgcatccagga

SEQ ID NO: 874608 - DNA, 120 bp, Artificial Sequence
  ENSG00000253561_1 (sequence is synthesized)
tctttaccgcaggacctctgagccacagagtggggtggatcataatgactgctgtgtgggaaaagtatagcagagggagactggaggcagagaaagcaggaaagacactcctgccatcat

SEQ ID NO: 874609 - DNA, 120 bp, Artificial Sequence
  ENSG00000253561_2 (sequence is synthesized)
cttagcctgctacagacaccacccctcttggtggggctgaagatcctagagtgtagatgctgggtacttactccatagaagtctccatatatcagcattagaagaacaattgatttgccc

SEQ ID NO: 874610 - DNA, 120 bp, Artificial Sequence
  ENSG00000253561_3 (sequence is synthesized)
agagaaaattggtcatgctgccaagtccagattctgatatgtctgtcttcaaagccattttcttgaaagccatttgtatactgctgtgttttcctatttaatacatatttttatgattga

SEQ ID NO: 874611 - DNA, 120 bp, Artificial Sequence
  ENSG00000197308_0 (sequence is synthesized)
gagaagtccccgcgtcagaaacgctgcggatgccaggtcttgaaaatgctgacttctgaggctaagaattatttcaaagacaaaaagaaaagactggagcagccggcggagctcgggtgg

SEQ ID NO: 874612 - DNA, 120 bp, Artificial Sequence
  ENSG00000197308_1 (sequence is synthesized)
aggaaagcgaggaggcgaccaggaggatgccgccgccgccgccgcagggcccggggcttctgcagggcgcaaggcctccctcaccagggtaaggggctggcgatcaacctggacgcctgg

SEQ ID NO: 874613 - DNA, 120 bp, Artificial Sequence
  ENSG00000197308_2 (sequence is synthesized)
gcggcgtgcgggtcggcagcagccggcttggcctatccgaaaccccaggcctggaagcggctgctttaggcgtcaagttgagcggggtatgtgtgtcctcttgggaaaaaggcagaagaa

SEQ ID NO: 874614 - DNA, 120 bp, Artificial Sequence
  ENSG00000197308_3 (sequence is synthesized)
agaagcggagccgagccgagccgccgagtccctccccccggagccccggagccccggcgcctgcctgggcggtcccggccgcgcagacagaaaagaagccgggaatctgcggggctgggg

SEQ ID NO: 874615 - DNA, 120 bp, Artificial Sequence
  ENSG00000197308_4 (sequence is synthesized)
ggcggggagcgacaccaaaggccagaaactgcagcacggcccgaggccctggcgagctgggcctgggggaggagaagtcccttcccattccagctcgatcaatcttgctgggctgcgatc

SEQ ID NO: 874616 - DNA, 120 bp, Artificial Sequence
  ENSG00000197308_5 (sequence is synthesized)
gctgcagccgctggcccgaaaatgctgctcgggcgagcaggggtcaggcgggaaaagaagactccaaatccactctctgctcgcccccagggcaatgctgccaggagagggagtgggttc

SEQ ID NO: 874617 - DNA, 120 bp, Artificial Sequence
  ENSG00000197308_6 (sequence is synthesized)
ccccgcaggctatcccaccgatggggctgagagcttaatttggggttttatttgaattggagacattgttccctcttcgctcctctaccccataaaattccctacaaatgcaaaaattcg

SEQ ID NO: 874618 - DNA, 120 bp, Artificial Sequence
  ENSG00000197308_7 (sequence is synthesized)
agatagaagaagccgtccctgaaagtaagttctgaaggattcctttcatgcggtgaaggaacaacaacaatattcaacttcaccttgttgctgtctaacattcaccggaaacctctccat

SEQ ID NO: 874619 - DNA, 120 bp, Artificial Sequence
  ENSG00000197308_8 (sequence is synthesized)
aattttggatggggaagtagggattattcgtttaaattcaatcgcgagcaccaagtcggactggccggggatggagaagggcaacccccacctttagaaaaataaaagatctcgaaggcc

SEQ ID NO: 874620 - DNA, 120 bp, Artificial Sequence
  ENSG00000197308_9 (sequence is synthesized)
tggtgtgtgagggtcgtcgtgttttaaaacactatccctgtagaaagattagtgaaatgtattggaagaagtagtggaaacgtgaatcttcctggtctcgcgtttggatcttctttggag

SEQ ID NO: 874621 - DNA, 120 bp, Artificial Sequence
  ENSG00000197308_10 (sequence is synthesized)
tcctcaccttcttaaatctgatgtttgtttgaaatcagggctgaatttccatatataggacagaaagaaagaaccccaattttttaaagaaagctccccccccccccgccacgtttctcc

SEQ ID NO: 874622 - DNA, 120 bp, Artificial Sequence
  ENSG00000197308_11 (sequence is synthesized)
tgagcccacttggtctcccgttattaggcggcccagttaagaggcatcgattttcctttcattctctgaccactcgtctctcctgggccagccaggctgcccgcatcttctcctgctcac

SEQ ID NO: 874623 - DNA, 120 bp, Artificial Sequence
  ENSG00000197308_12 (sequence is synthesized)
aggatacaagctgaaagaaaaaatgaaaaatgcttctccgcgcgtcaatcgaggggtggatgcgccacgcagcgtgagcccagctcacagccacgcgtaagaccaaaagctgccatgggt

SEQ ID NO: 874624 - DNA, 120 bp, Artificial Sequence
  ENSG00000197308_13 (sequence is synthesized)
agtccctcccacccgccctcccaggggcgaagagaccctgtcccagtggaagtggggaaacccagtcgggtacagaaagcagaggccatggcgcagagcggaggcgcggctttctggggc

SEQ ID NO: 874625 - DNA, 120 bp, Artificial Sequence
  ENSG00000197308_14 (sequence is synthesized)
tcagccctagggctacagacccagggcgcggagatgctcgcggccgggccacccaccagagccaggcaaccggcgcttccaggcgagctccgcggggccgaggtgccgggagaagcggcc

SEQ ID NO: 874626 - DNA, 120 bp, Artificial Sequence
  ENSG00000197308_15 (sequence is synthesized)
ccgggcgcccgcgcgctgcccgacctgggtaacaggcaaagcggagccccggggtcgaagtcctaaagttactaatcccgcggagggggagagagcgtgcctcgggccgcccggggcggt

SEQ ID NO: 874627 - DNA, 120 bp, Artificial Sequence
  ENSG00000197308_16 (sequence is synthesized)
tcttcgctcctctaccccataaaattccctacaaatgcaaaaattcgagatagaagaagccgtccctgaaattgctgtctaacattcaccggaaacctctccataaacaaggagaaacga

SEQ ID NO: 874628 - DNA, 120 bp, Artificial Sequence
  ENSG00000197301_0 (sequence is synthesized)
actgggaggtaaaactccacagagccatgccagcgactgaccgcccagggacaggagatggagacgttcagctgcaaaggctacggaggaacccccgcaattggaatctctccatgcctt

SEQ ID NO: 874629 - DNA, 120 bp, Artificial Sequence
  ENSG00000197301_1 (sequence is synthesized)
ctgcagcatggaaacatactccgggacctaccggggctctctcgggccacctctgagtgcaagggaaaagagtgcagttcaaggaagggaatgtgtctgtcatcccaccacttgcgcgca

SEQ ID NO: 874630 - DNA, 120 bp, Artificial Sequence
  ENSG00000197301_2 (sequence is synthesized)
aggccagttccgggatcagcaggcttccttcaccagcacgggctcttcattagcaaccactgggagggaatgtgtgcggagtcatgtcaagatgggaaggcacatgttcctatcttgaca

SEQ ID NO: 874631 - DNA, 120 bp, Artificial Sequence
  ENSG00000197301_3 (sequence is synthesized)
gcagcagaaagaaaaatggcagcagaaggaaaacagcagcagaaagaaaaatttgactcagatgggttgagagggcaatggcaagcaatcttggtacatgtcagctgcatctcagacaga

SEQ ID NO: 874632 - DNA, 72 bp, Artificial Sequence
  ENSG00000197301_4 (sequence is synthesized)
atgtcatggctcactgaaggctagacatgccaggctcaagcattttcccacctcagcctcccgagtagctgg

SEQ ID NO: 874633 - DNA, 74 bp, Artificial Sequence
  ENSG00000197301_5 (sequence is synthesized)
ctgggactataggtgtgtgccaccacacacctggctaatttttaattttttttttttttttagagatggggcat

SEQ ID NO: 874634 - DNA, 120 bp, Artificial Sequence
  ENSG00000197301_6 (sequence is synthesized)
ccaaaatgctgggactacaagagtaagccactgcacacggcctaaatgcatttttgactgatgatattttcaacttccaatgagtgtatcaggacataaccccatggcaagttgagaagc

SEQ ID NO: 874635 - DNA, 120 bp, Artificial Sequence
  ENSG00000197301_7 (sequence is synthesized)
atctgcaatgcgtgtttaccctcctacaaggatgagacagcccacttctgactagggcagtaaggagctaattcataaaaggtgctgtctaaactggactttgaagattaaagaagattt

SEQ ID NO: 874636 - DNA, 120 bp, Artificial Sequence
  ENSG00000197301_8 (sequence is synthesized)
taagcagctgaaaatggaagaaggaaattgcaggtaaaagtgaaggtgagaaagtgttcgtcctgttcatggaataggatgtttactcttagttatttccatattggaaatagagctttc

SEQ ID NO: 874637 - DNA, 120 bp, Artificial Sequence
  ENSG00000197301_9 (sequence is synthesized)
ggctacatgtatataagaaaaatggtattatttaaccacaaatgaagacccagttagcagtttctgagcaaagcaatgacatgctggagtaatgacagaggaagaacaatctggaagtgg

SEQ ID NO: 874638 - DNA, 120 bp, Artificial Sequence
  ENSG00000197301_10 (sequence is synthesized)
cctcaggacacacatgtaacaagagcaggggagagacaaagtgtgcattggaaaacaggcagactgtaggtagggtgatcatacaacttactctccaaattaggacactttggggagtga

SEQ ID NO: 874639 - DNA, 120 bp, Artificial Sequence
  ENSG00000197301_11 (sequence is synthesized)
aaggggtgctattgatagttacactacttggaggctataagtgaatttggtagaggaaggaaagtagtgggacaggaacctgatgacctagcaggacaggaaatcttaggttgattccta

SEQ ID NO: 874640 - DNA, 120 bp, Artificial Sequence
  ENSG00000197301_12 (sequence is synthesized)
tttcttccagtgcagaactgtgtcttgtaattgtttcagtccctcaccaagtctggcttatagccagtgctcaataaacatggagtcaccaactgatgacagataaacacgatccctagg

SEQ ID NO: 874641 - DNA, 120 bp, Artificial Sequence
  ENSG00000197301_13 (sequence is synthesized)
cgtcatgcctgggagatgctgtctacatttctccaaaaggtcaagggtggcaatatcccagaactgtcaagattttcccttttatgacttttaagagtgtttcttcaaaaaccttgttag

SEQ ID NO: 874642 - DNA, 120 bp, Artificial Sequence
  ENSG00000197301_14 (sequence is synthesized)
caatctacataaaaataatgcaacagtccagttgattagaataaaaagtagaaatactgtacaagaagggctgccttttaaaaataatcagaaagaagcacagtgagcgagatttagact

SEQ ID NO: 874643 - DNA, 120 bp, Artificial Sequence
  ENSG00000197301_15 (sequence is synthesized)
ctttggctttatttttaggaggttttttgtggttttatgttaaagcattcaccattactgcaatatttaatatacatttttttaaacccctggaatgtcaaataactaggctgtgcataa

SEQ ID NO: 874644 - DNA, 120 bp, Artificial Sequence
  ENSG00000197301_16 (sequence is synthesized)
ctctctcatgaattcaatatgtaaaggtacaaatataaggtacccattaaacaaaaacagagaaaaatcaaagaagcacagcaaaattgttacagagtggtttttttaatttttcatttc

SEQ ID NO: 874645 - DNA, 120 bp, Artificial Sequence
  ENSG00000197301_17 (sequence is synthesized)
ttgcaacacttcattctaaaagaaaaattatcacaggattgaaaaacaaacttgttttccctttagatcatacataaaacttgactattatttgaagttgataacagaaactggtgtttc

SEQ ID NO: 874646 - DNA, 120 bp, Artificial Sequence
  ENSG00000197301_18 (sequence is synthesized)
caaagatgtcactgaatacaatacttttaggaattgctgaatcaaattttcttttcttttttttttttgtaaatgagaaaggtagagagaactgtaaaatcagtcacaaaacatatggaa

SEQ ID NO: 874647 - DNA, 120 bp, Artificial Sequence
  ENSG00000197301_19 (sequence is synthesized)
ctcaaattagtacacaccattggaaactgcatcaacccataaaaataactcatatgcctattatgtttttccattttaagcttataatagcagtaacgacctcagcaaaagacatttcct

SEQ ID NO: 874648 - DNA, 120 bp, Artificial Sequence
  ENSG00000197301_20 (sequence is synthesized)
tagaattaatggctggctgggaggcagagccaagggccactggttcctcccagctggtcattaatcctcaggaaatgcctgcacctccatcattattgctaaagcaccattatagaaagt

SEQ ID NO: 874649 - DNA, 120 bp, Artificial Sequence
  ENSG00000197301_21 (sequence is synthesized)
tctcacagttccaatatatggaaatttgaggccattttgcaagcccatggtattcatgtgagttaataggccaccactgagcacagaggatgtaattatcaaaacgacagaagggaaaat

SEQ ID NO: 874650 - DNA, 120 bp, Artificial Sequence
  ENSG00000197301_22 (sequence is synthesized)
attgttctcctaggtctgtaagattataggaaatggggactagccttatgggaagaggtatatttgaagctaaaagacattaatttaaagggaggtttggaatcacatatataaaagtca

SEQ ID NO: 874651 - DNA, 120 bp, Artificial Sequence
  ENSG00000197301_23 (sequence is synthesized)
gtaaaagacagagcaatccattcccatgacttcgtttaaaactatttttttaaggtgcaaataaaggttatttggaaatttcctcccaaattgataaatgaatattaaagagaatgcagt

SEQ ID NO: 874652 - DNA, 120 bp, Artificial Sequence
  ENSG00000197301_24 (sequence is synthesized)
caggaagactgtttatacacacaaattattatattcaaccagtgaagtctgggggaatgaatacatttgacagtgctgaatgagaatgggatttctttcttttaaattttggtttaaaaa

SEQ ID NO: 874653 - DNA, 120 bp, Artificial Sequence
  ENSG00000197301_25 (sequence is synthesized)
ttgaatacacaccattaaatattatagagcaaacattttattctagactttattactgctaaaacaaacaaaaaccctaaagttctgtctttttgtcttagctaggggcttaacacatca

SEQ ID NO: 874654 - DNA, 120 bp, Artificial Sequence
  ENSG00000197301_26 (sequence is synthesized)
aacaagcattaataaaactgaaggccaaaatgataacaaatacagtgctggtgctctgtgacacagtttcagttctctgcaaaagcttttgctagcttccaggctaaattgaaaataaaa

SEQ ID NO: 874655 - DNA, 120 bp, Artificial Sequence
  ENSG00000197301_27 (sequence is synthesized)
attaggtgttttcaggtctattcattccttccttaaaataaactaagcccaacaaatgtcttcaaaagagggaattaatccaaaaatcacaccaaaagcagtctataaatcttttgaatg

SEQ ID NO: 874656 - DNA, 120 bp, Artificial Sequence
  ENSG00000197301_28 (sequence is synthesized)
tgttattgtaacaaactacaaatgttggatatgatgctttacacttaatgaaattcactgcagtttctcattatgcattacaaataccagcctggttctaacaggtttaaagttataaag

SEQ ID NO: 874657 - DNA, 120 bp, Artificial Sequence
  ENSG00000197301_29 (sequence is synthesized)
aactgttatgggttgaattgtgtcccctaaaaagatatagtgaagccctaacccaccttgtctctatgaatgtgactttatttggaaataaggtcttggcagatataatcaaggtaggat

SEQ ID NO: 874658 - DNA, 120 bp, Artificial Sequence
  ENSG00000197301_30 (sequence is synthesized)
gaagtcagtggggtgggccctaatcaaatatggctggtgtccttataagaggaaaagagacacagacacacaggaactgctgttaccaccatgtggcaaccaaggcagagaatggagcaa

SEQ ID NO: 874659 - DNA, 120 bp, Artificial Sequence
  ENSG00000197301_31 (sequence is synthesized)
tgcatctaaaagccaaggagcatcaaggatcaccaacagcaccagaagtgaagggaaagagatggaacagattcttccctagagccttcagggagagcacggccctgccaacaccatgat

SEQ ID NO: 874660 - DNA, 120 bp, Artificial Sequence
  ENSG00000197301_32 (sequence is synthesized)
gtcagacttccagtttccagactgtgaaagagcaaatttctgttgtggtaaagcacccaagtttgtggcactttgttatggcagccctgaagaaactaacacaggacctgaaggaagaga

SEQ ID NO: 874661 - DNA, 120 bp, Artificial Sequence
  ENSG00000197301_33 (sequence is synthesized)
tttatcagaactgtggtcaacattcccaatggaaatccaaggaagatcgggtgaggcaagaggaagcggctcgctacagggaaaagcaatggactagaagtcaggaaacctggctcttgt

SEQ ID NO: 874662 - DNA, 120 bp, Artificial Sequence
  ENSG00000197301_34 (sequence is synthesized)
cagagctaacaaggttgtgtggccttgaactggacacaattgctctgggttttcattttgtcacctgtagaatataagaggatttaactatataatctctacaccaagtctagctttata

SEQ ID NO: 874663 - DNA, 120 bp, Artificial Sequence
  ENSG00000197301_35 (sequence is synthesized)
gatgggaagaccaaggaccacacagaccaacattttaatactttcaaattcactgttctggcattgcttggacctcagggacagaaagcaggacacaggaaacagaactgcagtcttcca

SEQ ID NO: 874664 - DNA, 120 bp, Artificial Sequence
  ENSG00000197301_36 (sequence is synthesized)
tttgcctcaagccatgcttactgcagcaatgtggccacatttattttggttgagtaaggcccaaaggagtttgctatggaagcaacagcagcatatgctgatattctataattattttct

SEQ ID NO: 874665 - DNA, 120 bp, Artificial Sequence
  ENSG00000197301_37 (sequence is synthesized)
ttcaaatataactttttctgcacttccaagattgtcaaaaatgtctacagctgattcaaaagcatgatttttgtttaaataagataatagttaccaccaaaaataaagaatatcacttgt

SEQ ID NO: 874666 - DNA, 120 bp, Artificial Sequence
  ENSG00000197301_38 (sequence is synthesized)
tcataactggatctttccattacttggtagcacacaggaggatttgttggagtggttttttgttttgttttgttctgctactattaagcaagattgcttcataatcctttaagggttttt

SEQ ID NO: 874667 - DNA, 120 bp, Artificial Sequence
  ENSG00000197301_39 (sequence is synthesized)
tttagccaagtcttatttacatatcctggccagcaagcacgtgattaacccaaggatgttggagggaaggcagatgctacatctgaaaaaaatctgattatgtttcattctggagataca

SEQ ID NO: 874668 - DNA, 120 bp, Artificial Sequence
  ENSG00000197301_40 (sequence is synthesized)
aacagccgagctgtcaaaaggacaacagtctcttgggccaacatgacaccaaactctcaaactctggagaccctcagagacaaggaggaggagctgctgagttcaaacaagaacaatgaa

SEQ ID NO: 874669 - DNA, 120 bp, Artificial Sequence
  ENSG00000197301_41 (sequence is synthesized)
ttcctcaagcccaagcaagaatgtgacaaggtgtcaacaaagccaaccaggaaggtgatgtatggcccataaatcacttcacaaaccagggctgcaaagaaagcacccagcaacccagag

SEQ ID NO: 874670 - DNA, 120 bp, Artificial Sequence
  ENSG00000197301_42 (sequence is synthesized)
ttctactcctaaaccttcacaccccccacatccaccctcctccagcacctcactgactgctcacctgtcactcctccactgaccaattggcctactcatggggtgataaatgagatctat

SEQ ID NO: 874671 - DNA, 120 bp, Artificial Sequence
  ENSG00000197301_43 (sequence is synthesized)
gaaactgtaaaggataaattcttactcttattcccaacaagctggtgtcaacaataatgcatacaaggaagaaaacataattgaaaaattagtacaaatttgcttctgttttattgtcca

SEQ ID NO: 874672 - DNA, 120 bp, Artificial Sequence
  ENSG00000197301_44 (sequence is synthesized)
ctcattcagcagatgtttatccagtgtgtgcaaagtgcaatagtaggctatagagagataaaaaacaaaatctcactaactgtgggccattaattggcatacctcaaactgccctatatt

SEQ ID NO: 874673 - DNA, 120 bp, Artificial Sequence
  ENSG00000197301_45 (sequence is synthesized)
gttacctaccttttttggtgtctgatttttgaattccataaggacagcgaccatatgttaaacctccatgtgtgcctgctcttttcagtcatctaataaatgattctgccattattgtta

SEQ ID NO: 874674 - DNA, 120 bp, Artificial Sequence
  ENSG00000197301_46 (sequence is synthesized)
cagcccgcaagacctcgccgcctgcccagctctgtcattgactaaggttgcttttgtcagtacagccgccaggggtttccacgctcattcccctccggacaaggtggacagctttggtga

SEQ ID NO: 874675 - DNA, 120 bp, Artificial Sequence
  ENSG00000197301_47 (sequence is synthesized)
cttggctcactccaaactccgcctcctgagttcaagctgctcgctggaattacaggtgcccgccaccacagctgtctaatttcttggtttttgtttttgtttttgagatggagtttcgct

SEQ ID NO: 874676 - DNA, 120 bp, Artificial Sequence
  ENSG00000224342_0 (sequence is synthesized)
aaaatgccaaagccaaccctgaatgttacatcttacattgcaaggggtcatacaaaatggataaaagagggacctggtagattgtgagttatgggcgtgtgacccaggagacaatttgct

SEQ ID NO: 874677 - DNA, 120 bp, Artificial Sequence
  ENSG00000224342_1 (sequence is synthesized)
gcttccttctaactcaggtgatctattgcttaacaaaaattcacctaccatcatgataaagaacattatcatcctcatagagaatggtggccattctttgaacaatctgcctttaactta

SEQ ID NO: 874678 - DNA, 120 bp, Artificial Sequence
  ENSG00000224342_2 (sequence is synthesized)
aaatatttgaggttcagaatacatcttttcttaaatacccaagggaaacaacttcactgccatgaacaccaaagaactgtagattgtgccaaagatcttcctgaggtcccagcctctgaa

SEQ ID NO: 874679 - DNA, 120 bp, Artificial Sequence
  ENSG00000224342_3 (sequence is synthesized)
tggcggcagccctttgcgaactaccagcttgctctcttgccacaatgtcacacggaggtttccaggatcctcactagagcttatgacagtggatctgatgacgcaaaataagagatctct

SEQ ID NO: 874680 - DNA, 120 bp, Artificial Sequence
  ENSG00000246877_0 (sequence is synthesized)
ctttctgttcctggctccctttcgcccgcaggtcgcccaagtccagccccacgacgcagtgccgactccccgccgtgcccccagcccggcccgggttgcggagccctgctcctgggcctc

SEQ ID NO: 874681 - DNA, 120 bp, Artificial Sequence
  ENSG00000246877_1 (sequence is synthesized)
tgcctgctgcgtccaccctgggggaagcgcccgtcgtaccctccacaccgggggcttcccctgaccccttaggccctccccctgcaggtgccctcgcgcccctcccggggtccccaggga

SEQ ID NO: 874682 - DNA, 120 bp, Artificial Sequence
  ENSG00000246877_2 (sequence is synthesized)
aacgtgcttccaatcttccaggaaaaattgaaggctccggatgagaaaaagcaaacaaaggacagtgggaccatgggcgtccccacccccaccacccgcaggccccacactcaaaccagc

SEQ ID NO: 874683 - DNA, 120 bp, Artificial Sequence
  ENSG00000246877_3 (sequence is synthesized)
gcccgtgcccacgcccatgcagccgtcctccgccaggccccaagaacggctgttactttgggggccgaggcacaagggaggccccattcatcttccctggagtcggcatccctttgattg

SEQ ID NO: 874684 - DNA, 120 bp, Artificial Sequence
  ENSG00000246877_4 (sequence is synthesized)
cggggccacctctcatctgaacatcttcacccccccccaatattccttctgaaccctccatcctccttctccccttctcttgggaccataaacctaccccaagagtgagtcctagctcca

SEQ ID NO: 874685 - DNA, 120 bp, Artificial Sequence
  ENSG00000246877_5 (sequence is synthesized)
gggccagctcccaatcctgcctctgtctggtggcagctggggccaggctgaaggtctgtcctagactgagccataaaggcaaaaataatacttactcctaatagaagtaaagcacttcac

SEQ ID NO: 874686 - DNA, 120 bp, Artificial Sequence
  ENSG00000246877_6 (sequence is synthesized)
cctagatgagccctggtcctggtcacacacagaacctagacctttatttagagatggaccattaatttgtcatgtgggctaggcatggtggctcaaacctgtaatcccactttgggaggc

SEQ ID NO: 874687 - DNA, 120 bp, Artificial Sequence
  ENSG00000246877_7 (sequence is synthesized)
ccaagcaggaggatcacttgaggccatgagttcgagaccagcctaggcaacataacaagaccacgtctctacaaaaagatttaaaaattaaccaggtttggtggcatgtgcctgtagtcc

SEQ ID NO: 874688 - DNA, 120 bp, Artificial Sequence
  ENSG00000246877_8 (sequence is synthesized)
gcactccagcctgggcaacggagcaagatcctgtcacaaaaaaaaattatcacgtggccgaagttatttccaggctccgagcgccagcttcctcatctttccaacagagggccttcacct

SEQ ID NO: 874689 - DNA, 120 bp, Artificial Sequence
  ENSG00000246877_9 (sequence is synthesized)
ttcctcatctttccaacagagggccttcacctgggctaagtgttaaatcagaaagcccctattcagaggttggcctgcagttccctgacctggtaacactggggagcattggctgctgtc

SEQ ID NO: 874690 - DNA, 120 bp, Artificial Sequence
  ENSG00000246877_10 (sequence is synthesized)
acctgccagctcccacccccacccaacacttacacaccaagcatcactaatttttgcagctgccatgataaatggcactgttggcaaaatgacatctttctaatctgccacaagacagac

SEQ ID NO: 874691 - DNA, 120 bp, Artificial Sequence
  ENSG00000246877_11 (sequence is synthesized)
gggtccccgagctcccacagcctcccaagagccagcccaggccatccttgttgagaggatgggcagatgcaaagcccagggcctgggggcgggtgggatggagaggagacctcagggccc

SEQ ID NO: 874692 - DNA, 120 bp, Artificial Sequence
  ENSG00000246877_12 (sequence is synthesized)
agaatcaaggacatccctagtggggtttaccacaggctcttttctaaatatttagttgtatgtgtgcttttaaaaatattccaaagaatattatatgctctgttcctttctgaccaaagt

SEQ ID NO: 874693 - DNA, 120 bp, Artificial Sequence
  ENSG00000246877_13 (sequence is synthesized)
gccttgacctcctgggctcaagcgatccccccacctcagccacctgagtagctgggtctataggcgccagctaccatgcctggctaatctttgtattttattttgtagacacggggtctc

SEQ ID NO: 874694 - DNA, 85 bp, Artificial Sequence
  ENSG00000246877_14 (sequence is synthesized)
tgttgttgcttgccttgctctcccaaaatgctgggatttcaggcttgggccactgcacccagcctcaattttcactttaaattaa

SEQ ID NO: 874695 - DNA, 120 bp, Artificial Sequence
  ENSG00000246877_15 (sequence is synthesized)
tgggccactgcacccagcctcaattttcactttaaattaaaacctggatattgttcaggtttataaggatgaaccattagacactggttctgaggcggtgctctcttcctgtcaccctct

SEQ ID NO: 874696 - DNA, 120 bp, Artificial Sequence
  ENSG00000246877_16 (sequence is synthesized)
gctctgcggaacagtctgcctctgcctgagccattaggtctgggggctttctcacccccctcctccctcccactccctccatggctcccaccctcccacccagcctctttgctgacctca

SEQ ID NO: 874697 - DNA, 120 bp, Artificial Sequence
  ENSG00000246877_17 (sequence is synthesized)
gccgcatcccctccatgcctcacactggcctgggactgccaggttcctgtgtccaggagtagaggtgaattggggctctggatgccaagaacagaggaaggacaaatgccagccccagag

SEQ ID NO: 874698 - DNA, 120 bp, Artificial Sequence
  ENSG00000246877_18 (sequence is synthesized)
accctcacctcctcaagaccaacaggagctggcgcctgtccgcccagcagcagcaaagccagagcgggtgccagccagggtgggtaggcacaggcctgggcttgaagattgagacagcgc

SEQ ID NO: 874699 - DNA, 120 bp, Artificial Sequence
  ENSG00000246877_19 (sequence is synthesized)
tgccccctcctggctaattcacggctgctcctctgacaggcactgccaggctaagctgttgaggttggggacatagtgagtgaccccaaaaacagcatgtgacaagctgaccttccctgc

SEQ ID NO: 874700 - DNA, 120 bp, Artificial Sequence
  ENSG00000246877_20 (sequence is synthesized)
agtctgcccagctgggagctgcctcccactctgcccatcctgtccgagcttctcccaaagcatcttccggccctcacaccttcagggcaaagcccgaggcccctcccggctgcccacaat

SEQ ID NO: 874701 - DNA, 120 bp, Artificial Sequence
  ENSG00000246877_21 (sequence is synthesized)
gtggccccgggtagcagcctcgccccctgcaccccaggcccctgctgctctgtgcctccccagttccctgtcactgcacctgcatgctttgctctcaccttgacctccaccttcgccctc

SEQ ID NO: 874702 - DNA, 120 bp, Artificial Sequence
  ENSG00000246877_22 (sequence is synthesized)
cccagcagtctcctcttgtcctcttaggtccctccccgaggaaactcctctcccaactcccaaccagagggactccgctcctctgcctgcaccccgacctgccctgcccctgtctcgggg

SEQ ID NO: 874703 - DNA, 120 bp, Artificial Sequence
  ENSG00000246877_23 (sequence is synthesized)
actgcacactgtcagcacagtcccacagttctggaacttgggagaacctagacctcttccaagcctaccctgtgcactgtctaaagggcaatcctgagcccagagaggggcaggagctgc

SEQ ID NO: 874704 - DNA, 120 bp, Artificial Sequence
  ENSG00000246877_24 (sequence is synthesized)
acaaggccacacagcctgtaatggcagttaggactggaatgcagctctcccgagtctctgcctggggctccttggaggacagacacatggcttccccacctggtgaaccagaatggaact

SEQ ID NO: 874705 - DNA, 120 bp, Artificial Sequence
  ENSG00000246877_25 (sequence is synthesized)
cttcaaggacagggactgtatcattccttccagtgtccccagcccctcacccagagcaggacccacaggaagcaactgtgaacagaaaaggaaaaaacaaatacatgaaaatgtatctct

SEQ ID NO: 874706 - DNA, 120 bp, Artificial Sequence
  ENSG00000246876_0 (sequence is synthesized)
agattgagcctcttgaaacatttgctcttggaattctccctctcaggaaactaacagcctgctatgaagcccaagccacaaagagaggccaaggggaaataaacagagtgtgattatatg

SEQ ID NO: 874707 - DNA, 120 bp, Artificial Sequence
  ENSG00000246876_1 (sequence is synthesized)
caaaacctacaagaatgaggacctccaaactcagtgtacagagtgattttctgctgaaacaattggaaaataaaagagacatcagtgtgtgaatgacgactttctgttgctgacttggaa

SEQ ID NO: 874708 - DNA, 120 bp, Artificial Sequence
  ENSG00000246876_2 (sequence is synthesized)
gacagaggaattgggtcatgagccgaggaaggtgggcagcttctaaaaggcggaaaagtggctgaagtgagaggaagcgaggatatggctgacattctccaagaagcagtgacttcagaa

SEQ ID NO: 874709 - DNA, 120 bp, Artificial Sequence
  ENSG00000246876_3 (sequence is synthesized)
aactcagaagaagaaaattaggtgaatacaaaactgctgccaaacttagaaacttggttaaatatcctgcagaaaatatcatgggcttttcagagtccagttaaatatctacagattata

SEQ ID NO: 874710 - DNA, 120 bp, Artificial Sequence
  ENSG00000246876_4 (sequence is synthesized)
tttccagtttcatacctggggcattaactctattcattttactagctttagtgaattttacttctggagcataacattgcattgaaaatgtgtcctctaacctatgatatttatgtatcg

SEQ ID NO: 874711 - DNA, 120 bp, Artificial Sequence
  ENSG00000246876_5 (sequence is synthesized)
tttaatatgaaatttatgaggttccatttctgatttccaaatggatgcaaattagaacacaggatatttacattctttcatttctaacccacatacataaagtttgactttaaaatgcca

SEQ ID NO: 874712 - DNA, 120 bp, Artificial Sequence
  ENSG00000246876_6 (sequence is synthesized)
tggctctggcagagaatcactcctgagtacaactttctggcggaagctctaatacaagatgtatacagaaaattacattaaatacctgtctccagcctgcttcatgtatttctgcaatga

SEQ ID NO: 874713 - DNA, 120 bp, Artificial Sequence
  ENSG00000246876_7 (sequence is synthesized)
ctaaagatgcatgttcagttttggaggaatcttgggcaaccttcagaaaagaagagcggcattgaattaaatggactataaaaggaaatctttcagctgaagtattctgacagcagcata

SEQ ID NO: 874714 - DNA, 120 bp, Artificial Sequence
  ENSG00000246876_8 (sequence is synthesized)
ttcttgccaaccaggtcgttccaaatgtgtatctgaccattattttaaattagaagatataccactgtcaaaccatatcagccaagaataaaaagtgacataataatgttaaaggaaaaa

SEQ ID NO: 874715 - DNA, 120 bp, Artificial Sequence
  ENSG00000246876_9 (sequence is synthesized)
tttaaaagatggttttgtaactgaagaattgaaaggatttctttatgaactagcatcatcttaagacaaaggataaggaccctgaagacagcattatagtgaatcccagaggtgctctcc

SEQ ID NO: 874716 - DNA, 120 bp, Artificial Sequence
  ENSG00000246876_10 (sequence is synthesized)
aaaatggtgctaatacagccaagaatacaggtatgaggaaggatgtggaagggtaccttacaggagaaagcaccacttatccaccaagatggcagaggccttcttttctgacccgtggta

SEQ ID NO: 874717 - DNA, 120 bp, Artificial Sequence
  ENSG00000246876_11 (sequence is synthesized)
caaaaagaaaacattataaggagagacaataggcaaaaaagagcacacgagaagaaacatagaatgaaagaaaagagagggtcaaagagaagaaaaataagatcacatgaaggtgataat

SEQ ID NO: 874718 - DNA, 120 bp, Artificial Sequence
  ENSG00000246876_12 (sequence is synthesized)
acaattttatatagaacacggcaatttgcaatccacaagctgatctaatatttaatgtttaagaaatccaggctgtgtaaataaattttggaaatgagaactctccaagagcagactcaa

SEQ ID NO: 874719 - DNA, 120 bp, Artificial Sequence
  ENSG00000246876_13 (sequence is synthesized)
ggtgatctgggctggatcttactccttccatgtctcaggtggccccaggaggacaacattgtcaaataaagtttagcctaaagctgactccttacttattttaagttcagcctaaagatt

SEQ ID NO: 874720 - DNA, 120 bp, Artificial Sequence
  ENSG00000246876_14 (sequence is synthesized)
tatagcctaaacggaagtataaacaggctacaatctactcttgtgccaatcactgagttttggccaatcgattgcggtcaacagttcaaatcatgtttgaataagacaaatgccgagctg

SEQ ID NO: 874721 - DNA, 120 bp, Artificial Sequence
  ENSG00000246876_15 (sequence is synthesized)
ttaccaatctggctgtttctgtacctcacttctgttttgtgtatgtcactttattttttctgtccataaatcctcttccaccacgcagctgcgctgcagtctctgagcctactctggctc

SEQ ID NO: 874722 - DNA, 120 bp, Artificial Sequence
  ENSG00000246876_16 (sequence is synthesized)
tggaggcggcccgataggcgaattgttctttgctcaattaaattcttaaatgtaatacggctgaagtttttcctttaacagtatacaactgtgaagtggttttatcaggcatcataggtg

SEQ ID NO: 874723 - DNA, 120 bp, Artificial Sequence
  ENSG00000246876_17 (sequence is synthesized)
gagaaatagtagaccagaagtgcaagaggcatatgcaacaccattccctgctgtaccagtattatccagtgacaccttatctggttattaaccaaagctgctttggcataattccagtgg

SEQ ID NO: 874724 - DNA, 120 bp, Artificial Sequence
  ENSG00000246876_18 (sequence is synthesized)
ctagagtgtgtacttctgatatgcaaagacataccatgtcagtttacaactgtattgtattttgttctgttttcccttatgatgattcactggctgtgaagcttttaaaaaattgtgtga

SEQ ID NO: 874725 - DNA, 120 bp, Artificial Sequence
  ENSG00000246876_19 (sequence is synthesized)
ctcagtgtacagagtgattttctgctgaaacaattggacacatacaagtttttgttgttttcctgagagccaaggaatagataagctacataaatgacggcatattggatggtgacagcg

SEQ ID NO: 874726 - DNA, 120 bp, Artificial Sequence
  ENSG00000246876_20 (sequence is synthesized)
tgtttcatagaagctctaggtatttatacgtccattgtgtctctggcacactctgaattccagtttttaatctaatattgggcaggaattggctataaaaatacaatgccattgaggaca

SEQ ID NO: 874727 - DNA, 120 bp, Artificial Sequence
  ENSG00000246876_21 (sequence is synthesized)
tgggaagagattgcctgggaaggaagccaactctgtggaaagcataagaaataaccaaagaaagtgagaggaatatcctcatgacactatttgaatccctaaacccagcctaagtgaggt

SEQ ID NO: 874728 - DNA, 120 bp, Artificial Sequence
  ENSG00000246876_22 (sequence is synthesized)
ttactccttggacaaccctccttctccaaccagttatatgaggataaatgcccctttggtcctgtagcttgagtacatttctgtcactcgcaacttgcaaatttgtgaccaacatacctg

SEQ ID NO: 874729 - DNA, 120 bp, Artificial Sequence
  ENSG00000246876_23 (sequence is synthesized)
cacgcatgcacacacacacacacacatttaacatttgccgtattggacatacaggatggcacatcttatctggacagtgttgaagtgaacttttaaaatgaagtaaattttgttgaatcg

SEQ ID NO: 874730 - DNA, 120 bp, Artificial Sequence
  ENSG00000246876_24 (sequence is synthesized)
aagatggcacatcttatctggacagtgttgaagtgaacttttaaaatgaagtaaattttgttgaatcgtagcctgagacaatgaaggggtaatttaggggaagaacccctacctctaagt

SEQ ID NO: 874731 - DNA, 120 bp, Artificial Sequence
  ENSG00000246876_25 (sequence is synthesized)
tgccttttttgaccacatgctggaagctgggtgtcggttacaagctgactgtaaaaaacggcaggaaggagaggggcttcttctcagccttacctttaggaaatcaaaaaaaaaccaaaa

SEQ ID NO: 874732 - DNA, 120 bp, Artificial Sequence
  ENSG00000246876_26 (sequence is synthesized)
ctgaatcctcacttagcggaggggaacaaagaactcagattctaaggacaaggcagaatccattaggtatagggcagaagctaaaaaaaaggagaggactctgattaaaacataaaaccc

SEQ ID NO: 874733 - DNA, 80 bp, Artificial Sequence
  ENSG00000246876_27 (sequence is synthesized)
aaagtctgtttgaaactcagaagaagaaaattaggtacgtgaaaggtctctataatgaggattacaaaacacatctcatg

SEQ ID NO: 874734 - DNA, 120 bp, Artificial Sequence
  ENSG00000246876_28 (sequence is synthesized)
atgcaatcctattcctatcaaactaccaaaaaatgtttagtttctatgtagtcaacattgttactgtgttattttaacaatttggtctttttcccccttaccaaaagaaacatactgaag

SEQ ID NO: 874735 - DNA, 120 bp, Artificial Sequence
  ENSG00000246876_29 (sequence is synthesized)
aacttttgacaagatacaaaacaaaaacacctttgtctgaaatatatatagcaagtggcaattcttctagaaatatttgtcttttatatgtggcattgtttatttaaagaaatttaaaac

SEQ ID NO: 874736 - DNA, 120 bp, Artificial Sequence
  ENSG00000246876_30 (sequence is synthesized)
tgtggcattgtttatttaaagaaatttaaaacttttatatagacagctttattagtatttttcttgataatttaagaaacgcttatcctctactcaaatcttttaaaatattttcttaca

SEQ ID NO: 874737 - DNA, 120 bp, Artificial Sequence
  ENSG00000246876_31 (sequence is synthesized)
taatatgcatagaattttttaatttatggtgtgaattagaagacacaatttacatcaaatacattttgcaacactgctttttctagtttaaattgccataattattaaccattaagccca

SEQ ID NO: 874738 - DNA, 120 bp, Artificial Sequence
  ENSG00000246876_32 (sequence is synthesized)
aacctacaagaatgaggacctccaaactcagtgtacagagtgattttctgctgaaacaattggcttttaaaaaattgtgtgactgaccagcagcagtggctcacatctgtaatcccagca

SEQ ID NO: 874739 - DNA, 120 bp, Artificial Sequence
  ENSG00000238010_0 (sequence is synthesized)
ctggcgtcccagagcaagctggaggctcccacctcttcgggcagttcccccaagctaagcttcctgctttcctgacacctctggggaaaaggagttgagagagactccagaagcacttcc

SEQ ID NO: 874740 - DNA, 120 bp, Artificial Sequence
  ENSG00000238010_1 (sequence is synthesized)
tccaagacgagtacaccgagtttctccacgaggcacagagctgagtaggcaacctggcacgggggcatgtggaaggagctgtgggaaacagccttgggccttctggggaggtctgtgcag

SEQ ID NO: 874741 - DNA, 120 bp, Artificial Sequence
  ENSG00000238010_2 (sequence is synthesized)
gctcctctggcctgtaggccccgagttctggtctggaaggtcccctttcctggagcacaggggagcctgaagtccaggcctctgagatgatagtcataattaaagctgctgttgactgaa

SEQ ID NO: 874742 - DNA, 120 bp, Artificial Sequence
  ENSG00000238012_0 (sequence is synthesized)
agagtatccggtaggtgcaaaacatcagccaggcacttggtgcccaaagcctttgattacaccccagctggacatctagagcctggacgtcagcttggggaaaaccacttcttatgcaga

SEQ ID NO: 874743 - DNA, 120 bp, Artificial Sequence
  ENSG00000238012_1 (sequence is synthesized)
aagtaaagcccagcaaaggccaccagttctagaggctggaagtccaagatcaaagtgccagcaacaggccttgggagggcctgcctcctggttcatagatggccatcgtctccctatgtc

SEQ ID NO: 874744 - DNA, 120 bp, Artificial Sequence
  ENSG00000238012_2 (sequence is synthesized)
tactctgcggagcccagcttcctactgcagtaaactctcacatggccaagaagtttctcagagctctcccagagccagcataggggctgcttacaaaaagcccttggaagctgcttcact

SEQ ID NO: 874745 - DNA, 120 bp, Artificial Sequence
  ENSG00000238012_3 (sequence is synthesized)
gtggaatccactcccgctccttgctactgcctacaggacaagcagccctccttttttgtcctgccactgtctggctgccctctaaccctctactaattaaagccaccatttgctatttgt

SEQ ID NO: 874746 - DNA, 120 bp, Artificial Sequence
  ENSG00000261818_0 (sequence is synthesized)
ccctccacccttatcactcagtacccacctgaccctacttatcttccagaggcaatcactgttctggattctctcaccacgaggaagtcaattcatgagagactgctccacaaagcttgc

SEQ ID NO: 874747 - DNA, 120 bp, Artificial Sequence
  ENSG00000261818_1 (sequence is synthesized)
caagctggcccgcttgaaggatggtaggccatgcagaagaaaaccaaggcacccagaaggacatcctgccaactgcgagatgtttgagtgagaccattctgtcagccagtcaccagccag

SEQ ID NO: 874748 - DNA, 120 bp, Artificial Sequence
  ENSG00000261818_2 (sequence is synthesized)
ccaaccagctaatgacagatgcatgcataggctccagagagatcagctgagttgtcccagactacaagaaccagccaacccgcagaattacaagaacaataaaaggttgttttcttaagc

SEQ ID NO: 874749 - DNA, 120 bp, Artificial Sequence
  ENSG00000238018_0 (sequence is synthesized)
ctggatgctctggttttctcccacccctcaaagaggtgcatgttcagttcaccggcatgtctacatggtcctggtgtgagtgtggggtgtgtgtgagtgtgccctgcgatgtgacagtgt

SEQ ID NO: 874750 - DNA, 120 bp, Artificial Sequence
  ENSG00000238018_1 (sequence is synthesized)
cctgttcagggctggttcttactttaagccctgagctgctggaatgagctacagcaaccggagactggagactccggcaacctagagaactgttattattgacgtcagcccaagaagaat

SEQ ID NO: 874751 - DNA, 120 bp, Artificial Sequence
  ENSG00000238018_2 (sequence is synthesized)
gcaatgtccaggaagctaccaaaggaataaaactacatgagcacatacttctcttccaattcaagagtggcccgccttatcccttcacaggctgacttcccatcttactgtggcagcctc

SEQ ID NO: 874752 - DNA, 120 bp, Artificial Sequence
  ENSG00000238018_3 (sequence is synthesized)
gcttgaggctttcttattgtgggcctcccactcgtgtttccgattgaggaagccttccatctgggccgaaggtgtctcctgggttctggctgggacagcggagaggccattcagctaact

SEQ ID NO: 874753 - DNA, 120 bp, Artificial Sequence
  ENSG00000238018_4 (sequence is synthesized)
ccgtgagccatgggggtgaccacatacgctctacctgactcgcacatgtggctgtgtataaatgcctggcacagatcgaggcagtacagtaaaaccattgcacacccacaaagccagctg

SEQ ID NO: 874754 - DNA, 120 bp, Artificial Sequence
  ENSG00000238018_5 (sequence is synthesized)
gacatcaaggacattagaaggaaaccatctctgtcaccagcttttatttctaaggaaaaggatttttgtgaaaacattttcaattcctgctggtggcctgatagataccatcctaaaagc

SEQ ID NO: 874755 - DNA, 120 bp, Artificial Sequence
  ENSG00000238018_6 (sequence is synthesized)
ttcctttatcagagaattccacaaaaagtcttgagaaaatgaacaatgaatcagaagattaatccaagatgtacagtggagtttgtctacagagacactgacatgacttctgaagccagg

SEQ ID NO: 874756 - DNA, 120 bp, Artificial Sequence
  ENSG00000238018_7 (sequence is synthesized)
tcttttcacttttaaaggagagttgcaggaggggaaatagacaaaaaacaaaaccctgagtcaaaataatgtgagtggactttaaaggtgacaaatcttctctagtgtgagattcggaaa

SEQ ID NO: 874757 - DNA, 120 bp, Artificial Sequence
  ENSG00000238018_8 (sequence is synthesized)
cttctggtgaggaggaagtatgagtttggtctggaaggcctgagccaggtgtgagtccagagagacatggggttagtatgtagagaaaccaggataaaaaaaaatttagtgctgcaggtt

SEQ ID NO: 874758 - DNA, 120 bp, Artificial Sequence
  ENSG00000238019_0 (sequence is synthesized)
tggaggccttcaaaaccccagtggacagagtaggagcttaagattgccaatctacagaagctacatcagaatttcaccttggcccagctcacctgtaactcataccagccccaggaacag

SEQ ID NO: 874759 - DNA, 120 bp, Artificial Sequence
  ENSG00000280425_0 (sequence is synthesized)
ctgcctggtgggaggaaaaggaaagagagctggcaggcagaggcctggaactctcaacccctctccgggaaatgcctcagacatatttcagcctctggtgtctgggcagtcggggattta

SEQ ID NO: 874760 - DNA, 120 bp, Artificial Sequence
  ENSG00000280425_1 (sequence is synthesized)
tgggccagccatctcccacgatgatctcggtggtgctgaactgtgtgtcacccccagctggcactgtggctgccctcccagtggggaggcctcctgcagcctgggccacatctggagcct

SEQ ID NO: 874761 - DNA, 120 bp, Artificial Sequence
  ENSG00000280425_2 (sequence is synthesized)
cgcccagtgtggagaaactgaggcccacagagacatggggccatgccagctagtggaggcatagccaatggagctgggctctccagggctgtgctaacagagccacagctctcccacccc

SEQ ID NO: 874762 - DNA, 120 bp, Artificial Sequence
  ENSG00000280425_3 (sequence is synthesized)
agcttgcatgtggagcccactaaggcccgaaggggctggcctgcccaagttcacggctctgccgcaagcttgctgcagatcaccatctcctccattcctggccccaactccccttgcata

SEQ ID NO: 874763 - DNA, 120 bp, Artificial Sequence
  ENSG00000280425_4 (sequence is synthesized)
tggagcaaggaaagatcttttgaatgctgaacgggcctgagacaccttcctgaaggaaagctgtccttggatccaggcattgtgaccttgttacttcatttggccttcatgaccacctgt

SEQ ID NO: 874764 - DNA, 120 bp, Artificial Sequence
  ENSG00000280425_5 (sequence is synthesized)
ctagggccttcatcaacctcttttacagatgagccctcttggatgataagtaaatggcagcatttggatgtgaccctggtctctctgagcttagctctggactcccctccctcgtgcccc

SEQ ID NO: 874765 - DNA, 120 bp, Artificial Sequence
  ENSG00000280425_6 (sequence is synthesized)
tctcaaacaagcaagaagaaggcaggagagtaagttctaatcctggctgtgccactgactccctatgtggtcacaatgaagtcttttccctctcagcacctctgttgctatacctgcaca

SEQ ID NO: 874766 - DNA, 120 bp, Artificial Sequence
  ENSG00000280425_7 (sequence is synthesized)
acgaggagctttgcttggccaggaagagggcacaataggtacagagtgcaggtatttctgggcccatagacaaggaagggtgggaggaggggagcaatggtggaccctcttggttgacaa

SEQ ID NO: 874767 - DNA, 120 bp, Artificial Sequence
  ENSG00000280425_8 (sequence is synthesized)
atctaaacaataatatggagcctgagaaagccaaataccagctccccagcttcctctgcagccaggcatggccatctgactgagttcaaactgatgggacattttgtaaaagtcttatga

SEQ ID NO: 874768 - DNA, 120 bp, Artificial Sequence
  ENSG00000280425_9 (sequence is synthesized)
gaggttctagagatgcttttgctttcttgataaagagccatttgcagctggcacttcccctgtcccctccagtcttgaacatggatgcgatgcctggagctatggcagccatcttgcagc

SEQ ID NO: 874769 - DNA, 120 bp, Artificial Sequence
  ENSG00000280425_10 (sequence is synthesized)
tgtgaggctcagagagtcccagagataacatttggaacagtgttgagcccctggaccaatacagcagctgcctagctccaggcttcctgttgagtgaggaaaaacaagcaccatgttttc

SEQ ID NO: 874770 - DNA, 120 bp, Artificial Sequence
  ENSG00000280425_11 (sequence is synthesized)
aatgagtagttctgaatgatacaagcagggctggtagacatccccacagttataccaatttttttgccataaacaatattaccatattttgtctatttcccctggatacaggggaccaat

SEQ ID NO: 874771 - DNA, 120 bp, Artificial Sequence
  ENSG00000280425_12 (sequence is synthesized)
aacaacacaagaggggccaggggcccagggggaaggaaccagatggggaggggtgaggactcacgaagttagaagctggggaaggaggctctgcaatagtggaaacaagcgggagccgta

SEQ ID NO: 874772 - DNA, 120 bp, Artificial Sequence
  ENSG00000280425_13 (sequence is synthesized)
ccgtccagtcttaggggtcccgagagtgggcaagggtgtagccaatggagaaggagctggagaagaccattcatggggggggcaggacaaactggtgggatggaggaaggagactgcaaa

SEQ ID NO: 874773 - DNA, 120 bp, Artificial Sequence
  ENSG00000280425_14 (sequence is synthesized)
gactgaggctgcaaagcctccccttcgccctcagtggacccactcccacagcccagctgacctccgatgtaggccacagagaagcccctgcgggtggtgctgcggtctgtgtgcagcaga

SEQ ID NO: 874774 - DNA, 120 bp, Artificial Sequence
  ENSG00000280425_15 (sequence is synthesized)
agcagaagctggttgtggcttgaggtcacgggtggtggcaggtggtgtccacaccaattccccagcaggggtgcctcctcgctggccccatcgaaggccgccagatggtcaaagtcacag

SEQ ID NO: 874775 - DNA, 120 bp, Artificial Sequence
  ENSG00000280425_16 (sequence is synthesized)
gtcttggtcaggctgttgggctcctccaggtccaggtccaggaagaacaccttgacctggtagcccgggggcaggcggatggtccagtggcagcggatgttgttggggtaggagctgggg

SEQ ID NO: 874776 - DNA, 120 bp, Artificial Sequence
  ENSG00000280425_17 (sequence is synthesized)
tactgtgggctggagaagttgccccgcatggccatgtatacctcctggcattctcctggatgggggatggggaggtggaaggagcaacagtgaggggagaggagaagtcactctctgcag

SEQ ID NO: 874777 - DNA, 120 bp, Artificial Sequence
  ENSG00000280425_18 (sequence is synthesized)
ttacagcttaggcagcaggtgccacagtggtccaaaaaccaccagcaggttgtgggcaccatggctagcacaccagacaattgatcccaactatctgaaagttgggatgcttgatcccaa

SEQ ID NO: 874778 - DNA, 120 bp, Artificial Sequence
  ENSG00000280425_19 (sequence is synthesized)
agcttgttttaaactgcaactagctgaaagctgggacttgcattccagttgacagtccccttcacaggtgtaggccctgttaggaattcaataataatacacaatacctgtcctcagagt

SEQ ID NO: 874779 - DNA, 120 bp, Artificial Sequence
  ENSG00000280425_20 (sequence is synthesized)
ttccccttttctcactgccccatttggtatgtactatgagcataccaaacactctctgccctccaggcctttgcacatgctgttcctcctgcttggaatgcccttcccttctgcttccgt

SEQ ID NO: 874780 - DNA, 120 bp, Artificial Sequence
  ENSG00000280425_21 (sequence is synthesized)
ctaactccttcagggtactgctcaattctcttctccacgaagtcatccatgattcttactgatggatagcacagatcataatggcttgcgctgtctgtttccttataatctctctaacta

SEQ ID NO: 874781 - DNA, 120 bp, Artificial Sequence
  ENSG00000280425_22 (sequence is synthesized)
gactgtaaagttcccacgacttcatccattcatttgtacgaaaattgagtacctactatgtgccaggtacaaagataagcccataagggactcagtcagacaggggagattgacatgcaa

SEQ ID NO: 874782 - DNA, 120 bp, Artificial Sequence
  ENSG00000280425_23 (sequence is synthesized)
accacacacagaagtgacaaatgttagatcatagtgtaaaaaacttatataaggagttgaaaaaaggattaattctggtaaaacagtaagtcttcgcagaggtgacatgcttatgtcttg

SEQ ID NO: 874783 - DNA, 120 bp, Artificial Sequence
  ENSG00000280425_24 (sequence is synthesized)
gcataggccaagggtatgctagagcattccaggcagagagagtgcagaaagctcaaggctgcggggggcagaaaggtgtgacccctgcaagtgtaatggggagacaggagcccagtaggc

SEQ ID NO: 874784 - DNA, 120 bp, Artificial Sequence
  ENSG00000280425_25 (sequence is synthesized)
acaggaggattcagggtggagcgccagcccctcctacctgagaagtagtaggccttgaagccacggcctccgatgttgaagtcggacttgaagaccacctgcagttcgtggcccagagac

SEQ ID NO: 874785 - DNA, 120 bp, Artificial Sequence
  ENSG00000280425_26 (sequence is synthesized)
acgagggtggggggcctggtgctgccacagtagtggtgcccacgggtggggccaggccccccaagcacagccacgtagtcataggtgcactcttcattgccctccacctggaagtccacg

SEQ ID NO: 874786 - DNA, 120 bp, Artificial Sequence
  ENSG00000280425_27 (sequence is synthesized)
aacaccagcttgacgtgggcagggccagcggcccggatcacccagtggcactccatgctgttcgggtagttgttgggatactcaggactggtgaggacccctgacaggccagtcaggacg

SEQ ID NO: 874787 - DNA, 120 bp, Artificial Sequence
  ENSG00000280425_28 (sequence is synthesized)
ccgccacacacatctgcaagggagcccacttgagctgacctttctttctccttgtggctcccagtttcctcccttgggaacaagacactccaacatgctgcccccacaggtatctcatta

SEQ ID NO: 874788 - DNA, 120 bp, Artificial Sequence
  ENSG00000280425_29 (sequence is synthesized)
gggcctcattaccatccagcaagcacctgctacccaagtagcaagtgtagcacgtgctcaggcccagcatttggcacctatgctgcctgttcaaatcctcagagtagccgcacaaggact

SEQ ID NO: 874789 - DNA, 120 bp, Artificial Sequence
  ENSG00000280425_30 (sequence is synthesized)
gtgctgcagtttctctgattttataattaagaaaagggaggcaaagacaagttcagtagcttacttgagtttgagttcacccaggcagaccttgagataaggatttgagtgcaaggagtt

SEQ ID NO: 874790 - DNA, 120 bp, Artificial Sequence
  ENSG00000280425_31 (sequence is synthesized)
tacttgggagatccaggggcccccaggtggggagggagggagaggacagagaaggggaggtgtgttcaagtcagctgctgaccttggggggaactctggggacggggtaaagcacatact

SEQ ID NO: 874791 - DNA, 120 bp, Artificial Sequence
  ENSG00000280425_32 (sequence is synthesized)
tcagagttctgtcaatctaggagcaagggagctgcggcatttacatgccaactccccagagtgcaggcagagggctgctgtgggctgggagtgccctactgagacttcagaaaaaagccc

SEQ ID NO: 874792 - DNA, 120 bp, Artificial Sequence
  ENSG00000280425_33 (sequence is synthesized)
tccagcatagaactgtggaggttggcagaagcacatcgacgtggcagggcccagggaatgtggtcagggccctgagagcaggtcacccgactggtaactgggaaagtgggatttgaaccc

SEQ ID NO: 874793 - DNA, 120 bp, Artificial Sequence
  ENSG00000280425_34 (sequence is synthesized)
aggaagactaactatggatcctgtgcacttgacccttgtgaccttcactgtccactcctacgaggccagtggggcacagaggctgaggtgcctgagctcaggaatgtgatcaaacctccc

SEQ ID NO: 874794 - DNA, 120 bp, Artificial Sequence
  ENSG00000280425_35 (sequence is synthesized)
taatggatgaggaaaccaagacttagagagaggacctgatgaagtagagcttggtttgacatctgaagacaagtagtctcccatctctgccttttattagctgtgtgactctagggaagt

SEQ ID NO: 874795 - DNA, 120 bp, Artificial Sequence
  ENSG00000280425_36 (sequence is synthesized)
aacccagcctctctgagcctcattggaacattagaaatcataagactgaaccagcttgatccactgggctcagacttgagcacagtctgaaaatatgctgctggaaactctcaggaagcc

SEQ ID NO: 874796 - DNA, 120 bp, Artificial Sequence
  ENSG00000280425_37 (sequence is synthesized)
agcttggccagtacaactacacggcaagtgtgggtgaatgctgcgacttgctggaggtcaccagcagggaggacatacgtgggatgtgtttcctgagactccagcatctcgccctatggc

SEQ ID NO: 874797 - DNA, 120 bp, Artificial Sequence
  ENSG00000280425_38 (sequence is synthesized)
acggctgtgtgaccagggctctggatggggcatctaaggacttggcgtcttttcccagtgctggcccagccatgtaactttaggaaggccctctcagggactcagattttgtgaaatgag

SEQ ID NO: 874798 - DNA, 120 bp, Artificial Sequence
  ENSG00000280425_39 (sequence is synthesized)
agggcaggtttagatagcctgtgagatcccttccaacactaacaaccttcgcggagacttcccaactgtgccctggggctccccagcagccccctggagcacctgctggcacctggtgca

SEQ ID NO: 874799 - DNA, 120 bp, Artificial Sequence
  ENSG00000280425_40 (sequence is synthesized)
aatttcattcttatgctgtatttcaagctctcttttaatgtaatgaaaagatagcacccacagactttaatatctttaacaagatattaaaatttaaatattctacatttaaaaatttaa

SEQ ID NO: 874800 - DNA, 120 bp, Artificial Sequence
  ENSG00000261532_0 (sequence is synthesized)
tgggtttgagagtttaatctgtgctctggcgcccacagtgctgcagcccctcatgggccagagacaggatgcacggggactcccagcccctacccggcaagagaggcatcactgaggctg

SEQ ID NO: 874801 - DNA, 120 bp, Artificial Sequence
  ENSG00000261532_1 (sequence is synthesized)
catctgccatgcgctcctggtgtgactgcaccctgtcaggcctgtgaaaggtcagcagagccaaggagcaggcaggagaggctggagccccgcccagaaccttggcgagctggtggccct

SEQ ID NO: 874802 - DNA, 120 bp, Artificial Sequence
  ENSG00000261532_2 (sequence is synthesized)
acaggaagagactggatgctttgtaaaggacttcctgttcttggggacataactctcgtcccctcccagagccctggatgactgacaggcattccttggccaacacatgcttgagccgcg

SEQ ID NO: 874803 - DNA, 120 bp, Artificial Sequence
  ENSG00000261532_3 (sequence is synthesized)
ctgctggctgcagggcacctggatgacaggcattccttggccaacacatgcttcagccgcgctgccggctgcagggcacagaggctccttcagtggaattttgcctacgacacagagcac

SEQ ID NO: 874804 - DNA, 64 bp, Artificial Sequence
  ENSG00000261535_0 (sequence is synthesized)
tatccctgagattccaggcatgagccatcagacccagctggcaatgtatcctttcttctttgct

SEQ ID NO: 874805 - DNA, 120 bp, Artificial Sequence
  ENSG00000261535_1 (sequence is synthesized)
ccatcagacccagctggcaatgtatcctttcttctttgctcctaagttattcaatttttttacgctgttacttccacttggtccatttgaaaattacctgttggtttcgcttcacactgc

SEQ ID NO: 874806 - DNA, 120 bp, Artificial Sequence
  ENSG00000261535_2 (sequence is synthesized)
caatatcttcctctgtttccctgagtgcctttgtggtgctttgtctttgtggcccagctgtcctgcctcatatcacacccactgttggggtctgggtgtgtctttcagaagcactgccct

SEQ ID NO: 874807 - DNA, 120 bp, Artificial Sequence
  ENSG00000261535_3 (sequence is synthesized)
ggaggacagagaagccagccctgctgcgtgtctctcaagcgaattgaaggagaaaaacacacggtaggcattcaatgcctttctgccgaacataggaaggaagggaaggggatggccccc

SEQ ID NO: 874808 - DNA, 120 bp, Artificial Sequence
  ENSG00000261535_4 (sequence is synthesized)
atctctgagatgccttgccgatgactcctccctgctgcttggcaaccaggaaaaccctctggccaggtagcttacttagccttgactcttccgggagcagcagcaacaggaggacaccgt

SEQ ID NO: 874809 - DNA, 120 bp, Artificial Sequence
  ENSG00000261535_5 (sequence is synthesized)
ctccctgggtgcagctccctgatcttgggagtgcggagctgaaaagctggaggcgtggctgcctgggggtgctggcccgcccctggctgctttcatccactcctcacttgcgacctggtg

SEQ ID NO: 874810 - DNA, 120 bp, Artificial Sequence
  ENSG00000286868_0 (sequence is synthesized)
ttcatgcaacagcagggactcagctgtggtcccggaacctgggtatctctgtgctcttggggacctggtccacccatggctgcccatagaccaatcagcatgcactttctcctttctgag

SEQ ID NO: 874811 - DNA, 120 bp, Artificial Sequence
  ENSG00000286868_1 (sequence is synthesized)
cccataacatccccggactcagccagactcaccatctgcgggaaggagctccccactttgggtctcctcagttcttccagatgagtgtcctgcagaaaggagatacccactctaggtctc

SEQ ID NO: 874812 - DNA, 120 bp, Artificial Sequence
  ENSG00000286868_2 (sequence is synthesized)
ctcactgcagagacctggatacttaacaggacgacctgactgtggaaaggagttacccactttgggtctcctgagagctgttctgtccctcaccgaagctcctctgtgccttgctcaccc

SEQ ID NO: 874813 - DNA, 120 bp, Artificial Sequence
  ENSG00000286868_3 (sequence is synthesized)
agtggtaaacaagcagggctgaaacacaccactctgcttgccatgttgtggatgacaagaaggagagaatagctgcagcccttcgggaggccaggcacagggactccccaagccagggtt

SEQ ID NO: 874814 - DNA, 120 bp, Artificial Sequence
  ENSG00000286868_4 (sequence is synthesized)
gtgacaccctctttgggctctgcaattacttgtgtctccaagcttctaggttccactacgttcccctagtccagatgcgagtgcccacagtgaaagccgcatgcagtacatctggtccag

SEQ ID NO: 874815 - DNA, 120 bp, Artificial Sequence
  ENSG00000286868_5 (sequence is synthesized)
ccacagccttgcatggagctggcatctgtgctggggcctgtagctgcccgccccaccacagcaaccagtgtgcctggctgtgcatagtggctgaacccgcgcttactcatgcacacttcc

SEQ ID NO: 874816 - DNA, 120 bp, Artificial Sequence
  ENSG00000286869_0 (sequence is synthesized)
gaggcggcgccagctgctcgactgcgacccctggcggccgctggaggcactctctgcggagcttcaaaatcgaatgggccgctggacacgaagtcgagggagtattaaaaaaaaacaaca

SEQ ID NO: 874817 - DNA, 120 bp, Artificial Sequence
  ENSG00000286869_1 (sequence is synthesized)
aaaaacgggaataacaaactgtatgttttagaccaaaggatttagctggaagaaggagggaggagcgaggcttggggaggttgacatacacagctctgcttctcattatggaactcactt

SEQ ID NO: 874818 - DNA, 120 bp, Artificial Sequence
  ENSG00000286869_2 (sequence is synthesized)
cacagcagtgggctaatgctcatgaaattcagtggtcttaccatgttctccactatcctgaagcagctagcttgacagaacagtggaatgcccttttgaggatgtaattacagtgccagc

SEQ ID NO: 874819 - DNA, 120 bp, Artificial Sequence
  ENSG00000286869_3 (sequence is synthesized)
ctcatcagatgttttcaaggaacagttgcagactcattgccacaaagtgtacgtcttcactaatttagtgcctagaatatttttggaagcacctcaggtttttcttcaagatgatggcca

SEQ ID NO: 874820 - DNA, 120 bp, Artificial Sequence
  ENSG00000286869_4 (sequence is synthesized)
tcaagaacaccaaacatgcttcaagggctcagaacaagcctgccttagtcaaagcatatgtttttagtatgttcaatgctaatgacaaatcctgagcctctggaggggttcccacccccc

SEQ ID NO: 874821 - DNA, 120 bp, Artificial Sequence
  ENSG00000286869_5 (sequence is synthesized)
tacaaccctatccttatcgtaggaatgccaggagaattcatctttggggcgaagactgtcattttatttgtgaaacacttgagtgggacttgtggttatgcagatgtaagactcagtgtc

SEQ ID NO: 874822 - DNA, 120 bp, Artificial Sequence
  ENSG00000286869_6 (sequence is synthesized)
caatctagggggagggattaataccataaagacctctgacttctaaacagcaaaatgaaagagttgtaggccttgggggcagagactgtcatgctatttacttgtttttggcttccttga

SEQ ID NO: 874823 - DNA, 120 bp, Artificial Sequence
  ENSG00000286869_7 (sequence is synthesized)
gactctaggagttgtgattcaagacgtggggaataatgggagacaagaatgcatggactatggaagagtatggctccagcaagatggcagagactaaggagggagacaaccctgggagac

SEQ ID NO: 874824 - DNA, 120 bp, Artificial Sequence
  ENSG00000286869_8 (sequence is synthesized)
tatacttttttataacctaagaaatgcatgtgttcagtaaaaaatttcctaacccttacaacctgtcactaataacgaactttattaagtacttacaacatagcaagcattcttcaaagt

SEQ ID NO: 874825 - DNA, 120 bp, Artificial Sequence
  ENSG00000286869_9 (sequence is synthesized)
gctctatgtattttaatgaattaacttctctgctttctattgcttttcctttatctctacctcccattattcattctcatttatcttttccattgtctttcccactttctcctctctcac

SEQ ID NO: 874826 - DNA, 120 bp, Artificial Sequence
  ENSG00000286869_10 (sequence is synthesized)
tccctccatttttttccctctacctctctgtcactcattctcacgggctcaatctcacataaaaattaactcgcagaatgagttaacttatttaatcttcatggcaacccagggaaaaaa

SEQ ID NO: 874827 - DNA, 120 bp, Artificial Sequence
  ENSG00000286869_11 (sequence is synthesized)
gtattattatcagcctcatttcactgaggtaaaaaaactgagtaaaaaactgaggtacaggaggtcatacaagtaacttaaggtcatacaactagtaagattcagagcctggatttgaac

SEQ ID NO: 874828 - DNA, 120 bp, Artificial Sequence
  ENSG00000286869_12 (sequence is synthesized)
tcaagaagtttgactgcaaagcttataatcttaaccattgctactctccatatctttgtgattgcattggctttggaaataaagggaagatctacaatgacatcttaagatggagcggac

SEQ ID NO: 874829 - DNA, 120 bp, Artificial Sequence
  ENSG00000286869_13 (sequence is synthesized)
cagaaattgtggtgcactgtggagaggcaaggtgagcccagcaggagaaacctgggataatctgcagtaagcccttggcaatgatttcaggagaatatacgcacttcctggggatgccta

SEQ ID NO: 874830 - DNA, 120 bp, Artificial Sequence
  ENSG00000286869_14 (sequence is synthesized)
gaagccatcgagaagtagcctagagttcccacagtatcataggacagagatttttaaggagaaatttgcatatgaaaaagaatgggttctgcttctgtgaaatgtgataatatatgcacg

SEQ ID NO: 874831 - DNA, 120 bp, Artificial Sequence
  ENSG00000286869_15 (sequence is synthesized)
gtgattttcactatgcttggatgctcagtaattggtcactatatatgttaagtcttcctgcccttttctgatactctttctaacatcccttgaagggcagtccaaattttcactcaatta

SEQ ID NO: 874832 - DNA, 120 bp, Artificial Sequence
  ENSG00000286869_16 (sequence is synthesized)
ccatcattcagctaacattcactgtctgttacttgcaggtcagcaagttgactctatggcacaagcttccccttttctggcaatgttacttctgagccatgtttgcagcctcctaagatg

SEQ ID NO: 874833 - DNA, 120 bp, Artificial Sequence
  ENSG00000286860_0 (sequence is synthesized)
aacacaggctcctgggaaaaagcatcagtggaaaattcagctgcagccaagaagctcgaaggaaatttctactttcttttttctccccatactctaaggctctcggctattccagatgga

SEQ ID NO: 874834 - DNA, 120 bp, Artificial Sequence
  ENSG00000286860_1 (sequence is synthesized)
gaaaacaaactcctgtccgatttacctacccagtcacagatggtcatcttggaacagaaagtgaatagcaggaggagccagtgaagaagacacagaaaacaatagaggaattgccttccc

SEQ ID NO: 874835 - DNA, 120 bp, Artificial Sequence
  ENSG00000286860_2 (sequence is synthesized)
aacagatgagaacataaaagtctacagcacagatacttaagcaaggagttcacagagaaatttcagatatttgaactggatttccaaggaagcatttctttgatttctttcttatatgtt

SEQ ID NO: 874836 - DNA, 120 bp, Artificial Sequence
  ENSG00000286860_3 (sequence is synthesized)
aaagattatttatgtggggtgaaaacaacaaaacagcatcaataataaaaattaaccaggttcaattttattatgaagaaatagttttacacctaacatggatagagatggatatgatag

SEQ ID NO: 874837 - DNA, 120 bp, Artificial Sequence
  ENSG00000286860_4 (sequence is synthesized)
gaatacactattgttaccatgctatgatgtctaaaacattttttgatataaataatctccttacttatattgatattattctttgtttacatcaagcctgattacacagggcaatgtcaa

SEQ ID NO: 874838 - DNA, 120 bp, Artificial Sequence
  ENSG00000286860_5 (sequence is synthesized)
ggaaaaacaaatacaatgagtcttatgcaacctttggttaatctgcattgacaaacatgttggaacaccaaaggttcaatatggcctgttgaccaagattcttgcaaatcaaaacatgaa

SEQ ID NO: 874839 - DNA, 120 bp, Artificial Sequence
  ENSG00000286860_6 (sequence is synthesized)
ctgaaactcacacacatgactgatgggaatgtaaaaatagtatgtgcactttggaagatagtttggaagtttattaaaaattgaaaatataccaagtctatgacccatccattcaactct

SEQ ID NO: 874840 - DNA, 120 bp, Artificial Sequence
  ENSG00000286860_7 (sequence is synthesized)
taggaatttacttcaaaaaaatgaaagccagtgtccatgcaaagacttgtacgtgaatgttcatagcagttttttataatagcccaaaactggaaacaacccaaatgtccatcagtaaat

SEQ ID NO: 874841 - DNA, 120 bp, Artificial Sequence
  ENSG00000286860_8 (sequence is synthesized)
gaatggataaacaaattgtgttgttcaagcatactatagcaggggtctccaacacccaagctatggactggtaccacacagcaaatacccaagtcaggaattgggccacacaacaggagg

SEQ ID NO: 874842 - DNA, 120 bp, Artificial Sequence
  ENSG00000286860_9 (sequence is synthesized)
tgaacagcagttgagcgcacatcactgcctgagctccgcctcccatcatttcagccggggcattacattctcataggagcacgagccctattgcagactgcacatgcaagggatccaggt

SEQ ID NO: 874843 - DNA, 120 bp, Artificial Sequence
  ENSG00000286860_10 (sequence is synthesized)
tgcacactcaatatgataatctaaggcctgatgaaaccaccactgccaccaccaccccctactcctgtctgtggaaaaattgtctgccacgaaaccagtccttggtgccaaaaaggttgg

SEQ ID NO: 874844 - DNA, 120 bp, Artificial Sequence
  ENSG00000286860_11 (sequence is synthesized)
agactgctgcagtgtagaatgctacacagcaatacacagaaatgacttattgaaacccacaacaacgtggatgaatctcaaaatagctatgctgagtgaaaaaagccagaaaaaaaaaaa

SEQ ID NO: 874845 - DNA, 120 bp, Artificial Sequence
  ENSG00000286861_0 (sequence is synthesized)
attacaggcatgagccactgcacccagtgtactgtacagatcttgaatggacaattcctggatgtttctactttcacctccatgtttatctcagcactctccttaaatcacatcaaccat

SEQ ID NO: 874846 - DNA, 120 bp, Artificial Sequence
  ENSG00000286861_1 (sequence is synthesized)
tcaaccattaggttcttactagatgtaagacaccagggtatgcctggtgttttataatattaggtgtacaattataaaagatttataatctttataaatttatattttggtaattgcact

SEQ ID NO: 874847 - DNA, 120 bp, Artificial Sequence
  ENSG00000286861_2 (sequence is synthesized)
ctaaggaatagtcatataaaaggccccaaactggagttaaataatattaactaacgtttcagaactatttgccaagcactttcattcaatcctcataggaccaagaagaaatacagggaa

SEQ ID NO: 874848 - DNA, 120 bp, Artificial Sequence
  ENSG00000286861_3 (sequence is synthesized)
attaaagtgctcaatccagtggataagtcacagaactttgggactacccaagtccaatcatgcaaaccaggatgtagactcagataaacgtgacagaaaacagtactcacttgtattaga

SEQ ID NO: 874849 - DNA, 120 bp, Artificial Sequence
  ENSG00000286861_4 (sequence is synthesized)
aaaaagctgcacaaagcctaaaaaggaacctaaagagaatttggcaatcttacagtaacgttcccaggaagagagactgaatttcatagaaggatttcagtcgctaattcaggccaccac

SEQ ID NO: 874850 - DNA, 120 bp, Artificial Sequence
  ENSG00000286861_5 (sequence is synthesized)
tctgctctcattacaggtgctagaagggttactaacttctgtcgggggttcatcagattaattcccaacctgggtagtggattctgtccacattgtccaactccatttactccgatgcca

SEQ ID NO: 874851 - DNA, 120 bp, Artificial Sequence
  ENSG00000286861_6 (sequence is synthesized)
tctcaccaaacagcattctggctattcagttggtttcccacatgccttaatatgggcaaaagcttctagacagtggacactggaaggactactgcttaacataattatgcacgggcattt

SEQ ID NO: 874852 - DNA, 120 bp, Artificial Sequence
  ENSG00000286861_7 (sequence is synthesized)
tggttgatccagcatggttagcatgagtctgggtctgaaagcctgatgagctatgcactcagcaaccttgtgtttctgcatccacaaagctaagggccagcctcctctaaagggatttat

SEQ ID NO: 874853 - DNA, 120 bp, Artificial Sequence
  ENSG00000286861_8 (sequence is synthesized)
accttgagaggccctgcctgagtggcctaccttcctgctcccaactctgttttttcttttttccccctagaatattcaggaagaacgaactcaactctataatttgcacagtttcagtgc

SEQ ID NO: 874854 - DNA, 82 bp, Artificial Sequence
  ENSG00000286861_9 (sequence is synthesized)
aagaacgaactcaactctataatttgcacagtttcagtgccagatgaggctttattctgttgtccatgctgccagactggaa

SEQ ID NO: 874855 - DNA, 89 bp, Artificial Sequence
  ENSG00000286861_10 (sequence is synthesized)
ctgcctcagcctcctgaatagctaggactatgtccccccactgtggagattgggactcgctaagttgcccaggctggtctcaaactcct

SEQ ID NO: 874856 - DNA, 120 bp, Artificial Sequence
  ENSG00000286861_11 (sequence is synthesized)
ttacaggcatgagccaccccacccagccctgctttttgaagaatgaatgatagtccattatatgtatgtaccacattttggttgtccattcatccatcaatggacacttgggttgcttcc

SEQ ID NO: 874857 - DNA, 120 bp, Artificial Sequence
  ENSG00000286861_12 (sequence is synthesized)
tcaatggacacttgggttgcttccaccttttggctattgttaatactgctgtgaacatgggtacacaactacttcaagatcctgctttcagtccttttgggtacatacccagaagtggaa

SEQ ID NO: 874858 - DNA, 120 bp, Artificial Sequence
  ENSG00000286861_13 (sequence is synthesized)
aaatcatatagtaattctatttttaatttttagaggagttgccataccgttttccatagcagctccattttatgttcctaccaacagtgtaaaagagtttcaatttctccacatcttcat

SEQ ID NO: 874859 - DNA, 120 bp, Artificial Sequence
  ENSG00000286861_14 (sequence is synthesized)
caacacttcttattttctgttttgatagtagccatcctaatggctgaggtggtcaaaatttgctttttacaaattatgaaaatgggataatagcaaatgcctagcacagtgtctagaaga

SEQ ID NO: 874860 - DNA, 120 bp, Artificial Sequence
  ENSG00000286861_15 (sequence is synthesized)
tggtaaatgttaagtatcaaaaaacttttgataagaggtattaagttaaataagaggtattaagttaaaatctttgctgtcataaatgggaaatatacggctacattgaaatttgccaaa

SEQ ID NO: 874861 - DNA, 120 bp, Artificial Sequence
  ENSG00000286861_16 (sequence is synthesized)
tcccaatagtgtctattatagatttccctctatgcaggcacatcactaagtttttactaaggcattagcaaattactgattatgtattcacctcctaaaaggaatctgcagccgagcaca

SEQ ID NO: 874862 - DNA, 120 bp, Artificial Sequence
  ENSG00000286861_17 (sequence is synthesized)
gtggtgcacatctgtaatcccagctatcctgaaggctgaggcaggaggcttgcttgagcccagaagtttgaggcagtagtgtactatgattatgtctgtgaatagcccccacactccagc

SEQ ID NO: 874863 - DNA, 120 bp, Artificial Sequence
  ENSG00000286861_18 (sequence is synthesized)
ctgggcaacatagtgagacctatctataaaataaaagaatctgcaatataaaggaggcccagaaaatgaaaagcttgaacccaaagaaataggtcactattagtgacattccaggtgaga

SEQ ID NO: 874864 - DNA, 120 bp, Artificial Sequence
  ENSG00000286861_19 (sequence is synthesized)
ttggagagggccctaaagtgatgccacttatcagctcatgcctcagctcctattcctctgctacaggtggcccatcccccaagggcactgtggcacagatgaggtccaaagcaggtttgg

SEQ ID NO: 874865 - DNA, 120 bp, Artificial Sequence
  ENSG00000286861_20 (sequence is synthesized)
tctttgctagatctctaaaggaaatataaagccaatttgctagacatttactcttccaaatacatatcagagtgactttagaagtcaaagaacccagaactttaataaccttaaacaaac

SEQ ID NO: 874866 - DNA, 120 bp, Artificial Sequence
  ENSG00000286861_21 (sequence is synthesized)
aagctcattccaataatttagcttccagtcacatatgcagaccctaggcaaagacttttttgtgggaaatgggacaggtgctgtactttcatttcttccttgctgtggaaatagactctt

SEQ ID NO: 874867 - DNA, 90 bp, Artificial Sequence
  ENSG00000286861_22 (sequence is synthesized)
ctgtactttcatttcttccttgctgtggaaatagactcttaaaaaatgtagagatggggtcttgctacattgtccaggctgatcttatgg

SEQ ID NO: 874868 - DNA, 120 bp, Artificial Sequence
  ENSG00000286861_23 (sequence is synthesized)
cttgctaagtgtttaatagaagagtgtgaatggcagaggcagaaggtttggtggatcatacagccttacagtctcttcagaaacatcactgatatttgctgttgagtcaacctagcaacc

SEQ ID NO: 874869 - DNA, 120 bp, Artificial Sequence
  ENSG00000286861_24 (sequence is synthesized)
aattcttgtcccaaagatatgacactgttcaaaaggcacctcagagatgccagtttcatctcttttcaatgcccaaaactagagcttgaaaagatggatatctatcaacagacatgattt

SEQ ID NO: 874870 - DNA, 120 bp, Artificial Sequence
  ENSG00000286861_25 (sequence is synthesized)
gtaatgtgtctttactgtatatttcataaaatataaacacataaaacttacataagtataacagatagttgtaaacaccctataattactacccaagtcacaaaacagatcaatattagc

SEQ ID NO: 874871 - DNA, 120 bp, Artificial Sequence
  ENSG00000286862_0 (sequence is synthesized)
attcacattctgaaacctctcctgttccatagagacagagttcagctcagccctctgcagttggtgttcaacagcaaacaagaatgctccaaagtttaggagaagatggaagaattgggg

SEQ ID NO: 874872 - DNA, 120 bp, Artificial Sequence
  ENSG00000286862_1 (sequence is synthesized)
agtaggagacagcagcagagacatcctggaaaggttggaaaggactggctagagaattgcaatcatcatggatgactgaggtggacatgcctaaagttatggagaaaaatacttagaaga

SEQ ID NO: 874873 - DNA, 120 bp, Artificial Sequence
  ENSG00000286862_2 (sequence is synthesized)
tcaccaaaatgatgacattattcacattaacacataatggctctgtgtgttattatcagacaacctatctctactgaaagtgatgctcattgataaaaactaaattagtaagccagcata

SEQ ID NO: 874874 - DNA, 120 bp, Artificial Sequence
  ENSG00000286862_3 (sequence is synthesized)
ctagtttgtgtttcaagcaagctttataaaacttttatttggtcaaagctagtataaatgttcttatccaagtcaaagaattttggaattacaaataaaaatccctaccttaagtaaaaa

SEQ ID NO: 874875 - DNA, 120 bp, Artificial Sequence
  ENSG00000286862_4 (sequence is synthesized)
tgtttaattgaattagttttatttaaatatttattgctagcaattttataggaatgattctcaggcatgtacaattgcattaaatcaccataccaaagttagttttctgtcatatttaaa

SEQ ID NO: 874876 - DNA, 120 bp, Artificial Sequence
  ENSG00000286863_0 (sequence is synthesized)
gtgttcaatagctcactgtgattgttgagaagtcaacacagggacaaggaaatctcagatggttgtctacagttacaagggggatttttggactgatttgtgatttttctgggaatgcaa

SEQ ID NO: 874877 - DNA, 120 bp, Artificial Sequence
  ENSG00000286863_1 (sequence is synthesized)
ctcaagttagaagaggccattatctgaaagaagaagaagcaccagctgatgtgttggttattttagggcgacatttgcagttgcttgggcaatatcatgagcctcacctcatgcaggtct

SEQ ID NO: 874878 - DNA, 120 bp, Artificial Sequence
  ENSG00000286863_2 (sequence is synthesized)
gggtcccagacccaaagactgctcctccatactcagagataccagcactaacagagcagctcctcttcttcagtacagatgcttctcaacttacaatgaggttatacccttataaacaca

SEQ ID NO: 874879 - DNA, 120 bp, Artificial Sequence
  ENSG00000286863_3 (sequence is synthesized)
tgagcctgaaatgagaattgcaaccctggctgacacctccatttcagtctgacatgaccttaacagaggacccagataacctgtactacacacctgacctatgaaaactgtgagatcata

SEQ ID NO: 874880 - DNA, 120 bp, Artificial Sequence
  ENSG00000286863_4 (sequence is synthesized)
aatatgtgttgttttaggccactatttttgtgataatttattacacagtggtagaaaactaatggaaggataaacataatttaaaaggcagggcaactaatatacttcaaacccttgtca

SEQ ID NO: 874881 - DNA, 120 bp, Artificial Sequence
  ENSG00000286863_5 (sequence is synthesized)
ataacttagctacctttcatctaatttatgtatgtcccacctatagattgttccaagttactgtcacagtgtctggttccataagcttccagtttatataaaatgccatgaagaatactg

SEQ ID NO: 874882 - DNA, 120 bp, Artificial Sequence
  ENSG00000286863_6 (sequence is synthesized)
acaattatgcaaactaagggggaaagagaggcaccttagaatgaaggctctccttactgtcgtaagcgctagagggattctttgctagaaaagtctccgtgtcagggctggggtgaagag

SEQ ID NO: 874883 - DNA, 120 bp, Artificial Sequence
  ENSG00000286863_7 (sequence is synthesized)
agctgaggggcgctttgccttccctcaccggtgcgttttacctctcgaggcaccgtaagtttgaagtcctccaagttgtggtcggcgccatcatgacgccggcgactaacacatattgtt

SEQ ID NO: 874884 - DNA, 120 bp, Artificial Sequence
  ENSG00000286863_8 (sequence is synthesized)
taattgagtctactttactacttggttcacctttgccttatgagttccttagaaggagaaaacactctgtatttttgaacagatgcttcattatgggagggacatggatgaagctggaaa

SEQ ID NO: 874885 - DNA, 120 bp, Artificial Sequence
  ENSG00000286863_9 (sequence is synthesized)
taaaaaaaattactgtgcaaaaattttataaagaatgtataaatgtccatatatgattcttgttcctatattctaaaatttaggatagattttaccctacagttaagaaaagtcctctga

SEQ ID NO: 874886 - DNA, 120 bp, Artificial Sequence
  ENSG00000286863_10 (sequence is synthesized)
agcctcccacaccaaattataattaattacacaacttgacctttgttttttgagaaggatccagattttataatttactttgtaagctttgaagcttgaagtggttactatctaatattt

SEQ ID NO: 874887 - DNA, 120 bp, Artificial Sequence
  ENSG00000286863_11 (sequence is synthesized)
gcattgctggaggaagaaaggggataagacagaatttacattaatgcttctactatttttgggggggaaaacaaagcagaagaaaactgaaacaaagtgattagagggttagaagacaaa

SEQ ID NO: 874888 - DNA, 120 bp, Artificial Sequence
  ENSG00000286863_12 (sequence is synthesized)
gaaggtaaaggtagtaagtgataagaaagaagttttgaataagatttgtcaatatttttagttttcaaggtggtcaaaatgataaggagttctgaaaggacatttgattattaatgcctt

SEQ ID NO: 874889 - DNA, 120 bp, Artificial Sequence
  ENSG00000286863_13 (sequence is synthesized)
aaaacttatctcatggacctagtcacatgaaactgggtaaaatttgttcatgtagaaatgaataaatgtaatccgtcctaattacaataattcgtaaacaaggagaggaatgcaaaagga

SEQ ID NO: 874890 - DNA, 120 bp, Artificial Sequence
  ENSG00000286863_14 (sequence is synthesized)
tgacttaggcagggtgtgaatagcactgcaaagcaggagagagaagttgagctttcaaagtgacagtctggttacagactgattgaagacgtgtatgtccaagcatgtacataatgggct

SEQ ID NO: 874891 - DNA, 120 bp, Artificial Sequence
  ENSG00000286863_15 (sequence is synthesized)
tggggaaagaaaaggaatgagaatggaaaaaggaacacagcgcttgtgttcatattgatttctttctttttatgtgcattattgccaaagcatgagaaaaaacctataattcaggtaatc

SEQ ID NO: 874892 - DNA, 120 bp, Artificial Sequence
  ENSG00000286863_16 (sequence is synthesized)
tggctctatcttaatgtgagaaataaaataaaatttgtgtcaataggtatgggattgcaaatttaagtctaatgaatatatatttaaataagcccaggaaaaaatgctcaagatcactaa

SEQ ID NO: 874893 - DNA, 120 bp, Artificial Sequence
  ENSG00000286863_17 (sequence is synthesized)
cacttagacttcacgacatacctgttagaatagagaaaaccgccgggcacggtggcttacgcctggcctgtaatcccaacactttgagaagccaaggcgggtggatcacttgacgtcagg

SEQ ID NO: 874894 - DNA, 120 bp, Artificial Sequence
  ENSG00000286863_18 (sequence is synthesized)
cctgggctgtgcactctgcggagcccacaggagctggaaacagaaacactacttgctgctgctaggtcagaaacagaaaactggaaatatctcagatacagcttggctgaagcaatagag

SEQ ID NO: 874895 - DNA, 120 bp, Artificial Sequence
  ENSG00000286863_19 (sequence is synthesized)
aaaaaaattcctatgaagtagagagagagaaaagagaggtgttttgtcagttggtaatgtatatatggtgttttgttgtgtcattttctaagtttctgaattctgagaacttagaaactt

SEQ ID NO: 874896 - DNA, 120 bp, Artificial Sequence
  ENSG00000286863_20 (sequence is synthesized)
atttacaataacctgtttttcatcttcaagtggatttgtaaaaatgatgtaacaaaaaaaagtccagtttgttatattcctcaatcatcaccaatattttatgctcccaaagaaaatggg

SEQ ID NO: 874897 - DNA, 120 bp, Artificial Sequence
  ENSG00000286863_21 (sequence is synthesized)
aaaatgtctttttccattactagatgtatatccagtgcccaccatgactagggaaaaagagaactggttatatatgtatatgtatttggtgaattgaaacaaattattctgatgtgtgaa

SEQ ID NO: 874898 - DNA, 120 bp, Artificial Sequence
  ENSG00000286863_22 (sequence is synthesized)
tttttgtctaaatataaaatattcctataatggcaaaattcctgggacaaatttagtcattttcctgtacatagatattaatagaaattatatatttataaaaacagataaattcctcgg

SEQ ID NO: 874899 - DNA, 120 bp, Artificial Sequence
  ENSG00000286863_23 (sequence is synthesized)
ttcctcggtaagtttaattcaactttataatattagatgttaaattatagaacacatgaaaaagctttttctatgaaattagataatgttaagatgacttgggaatattgtcatttcaga

SEQ ID NO: 874900 - DNA, 120 bp, Artificial Sequence
  ENSG00000286863_24 (sequence is synthesized)
gtttctttatacttgatagatttcctcaaatacgaaagtaatatttctttgccacaagttaccctttcccttcagaaaaaaatagaaaacaaatatgtatctacttatttcatatacata

SEQ ID NO: 874901 - DNA, 120 bp, Artificial Sequence
  ENSG00000286863_25 (sequence is synthesized)
tatacttatgtgctacaaaaatgtcacttacatgtacatacatctctatgttttaggactttctcagttcacctaaggatggggtccttgtcacatggccatgaaagattagtctcacag

SEQ ID NO: 874902 - DNA, 120 bp, Artificial Sequence
  ENSG00000286863_26 (sequence is synthesized)
acactttgaagggtgagaaaaatggaatttattgggggaaaaggaaaaaaaagggaaacaggaactctcagcaaagcaagagtcctgctagttggttttcccacctcatagcttgaatcc

SEQ ID NO: 874903 - DNA, 120 bp, Artificial Sequence
  ENSG00000286863_27 (sequence is synthesized)
cagatactacactggatcaggagaggccaggctctccctccccaaccctcccccgacaaagggtgcaaactttcatggctccaccccattctccaagtacacaggctggttggacattct

SEQ ID NO: 874904 - DNA, 120 bp, Artificial Sequence
  ENSG00000286863_28 (sequence is synthesized)
ccagtgacccccttatacttggctgtctcatctacatgtaaactttataattaaacctctataatttactcgagattataatgttttcacctctgcactgtgagtactataagactagag

SEQ ID NO: 874905 - DNA, 120 bp, Artificial Sequence
  ENSG00000286863_29 (sequence is synthesized)
attactacactaattattcttgttcttaaatagtaagataattactgaagcaatattctattcaaaatgaaaattggatccacccccagcacacttaaattaggtgtctttttctttcat

SEQ ID NO: 874906 - DNA, 120 bp, Artificial Sequence
  ENSG00000286863_30 (sequence is synthesized)
atgtggttattctgcctatgctccaattctaaatgtattcctgtacaaacggtagttctattagatactgattctgctggtttcacctggccaaacagacacaaattagcggaggacaat

SEQ ID NO: 874907 - DNA, 120 bp, Artificial Sequence
  ENSG00000286863_31 (sequence is synthesized)
aaaaatagcatcagttaagttgaaagtcattaacacttattcaaaatattggatgaaattaaaccacaaaggcaattaatgttttggtgaaaaaaatgtttttttaaaaatttaagagat

SEQ ID NO: 874908 - DNA, 120 bp, Artificial Sequence
  ENSG00000286863_32 (sequence is synthesized)
tatttttctgtactaggggacaattcaaacaatcccaggctgaaatgaatactacctacttagggccccattgtatgctgaatacatttcaataaaacacctttaacattttatttcaac

SEQ ID NO: 874909 - DNA, 120 bp, Artificial Sequence
  ENSG00000286863_33 (sequence is synthesized)
tcattttgcttatgtctccatctgtccttgaggatagcattacatattacttttttggtatcactagtttcagaaaaatcgtggcacacagaacccattcaacaagtttgttgcattaat

SEQ ID NO: 874910 - DNA, 120 bp, Artificial Sequence
  ENSG00000286863_34 (sequence is synthesized)
aaattaatctgtgttttaaatgtaagttacttgtttctgtcccacacaagttagcacatgattatatgaggctttttaattaatcaacataatcaatattgtcatccaaaaagatgaatc

SEQ ID NO: 874911 - DNA, 120 bp, Artificial Sequence
  ENSG00000286863_35 (sequence is synthesized)
ccaaaatctcagtggggattctcagtgaagaatcctacactcatgcacacacatatgtattatatgcttaagctaccgtctcattgtattgaacacccctctgccacgtctttcagtaaa

SEQ ID NO: 874912 - DNA, 120 bp, Artificial Sequence
  ENSG00000286863_36 (sequence is synthesized)
gccatttaaggtatttggtcccaagggaagagagagacaaagaagagccacaggggctcctaaactgcctttaattacttcagttcatgtttcattgggaagtaccaatcatagaatgtc

SEQ ID NO: 874913 - DNA, 120 bp, Artificial Sequence
  ENSG00000286863_37 (sequence is synthesized)
aatctcactgcaagggaggttaggaattatagagcactgaagtaatattcagtgaccacacattttctctggcacagtctttttctataatggtttcagaaatgtctttgcagagagatt

SEQ ID NO: 874914 - DNA, 120 bp, Artificial Sequence
  ENSG00000286863_38 (sequence is synthesized)
acaagcatcaagggcaaaatacagcacctcattttatatatttcttagtataagagaatagtaagagatatgtggtaggtactcaacttgctgatattttgaaatttattttttggaaag

SEQ ID NO: 874915 - DNA, 120 bp, Artificial Sequence
  ENSG00000286863_39 (sequence is synthesized)
tgttattcattttccaaactgtagtggtcactagataaatatctacttgtgtttatctttcctgaaaaaaataagctgggatattagaagtttcaaaatggttgatattataacaactat

SEQ ID NO: 874916 - DNA, 120 bp, Artificial Sequence
  ENSG00000286863_40 (sequence is synthesized)
ggtgtttcttgaggagaagggaggggttgttaagatgtggttaagatgtgtgcacataatcatctgaagtgattttccaaatgtaagtgctagggttctgaaagtaattcgtttgaggtg

SEQ ID NO: 874917 - DNA, 120 bp, Artificial Sequence
  ENSG00000286863_41 (sequence is synthesized)
tgccacaggagaatcttttcctgaagaaaagttctaactattgctcaaacaacttttgtctaagaataactagtaagcctagtacattttgcagaattaaactgcttcatagtttgggaa

SEQ ID NO: 874918 - DNA, 120 bp, Artificial Sequence
  ENSG00000286863_42 (sequence is synthesized)
ttgcattgacagaactaccaagcttttggaacacagaaaatcatggaaagaaatacaactctcatcaacttatttatgtgaaaggctatttttgatatattttttatgcttcaggtgaat

SEQ ID NO: 874919 - DNA, 120 bp, Artificial Sequence
  ENSG00000286863_43 (sequence is synthesized)
tataattttgctgtctctatttggatatttaacaatgaaacaactgtattactgtgttcactctttcaggacatttctgagaagcaacattgatttattttccacataatgtttaggatt

SEQ ID NO: 874920 - DNA, 120 bp, Artificial Sequence
  ENSG00000286863_44 (sequence is synthesized)
atgtgccagagaatatgagctgagttcattcctggacatagaactttaacatgtatgccagactctcttttggttagttatgaacatattaagttgcaatgaatgtgatgaaggaaataa

SEQ ID NO: 874921 - DNA, 120 bp, Artificial Sequence
  ENSG00000286863_45 (sequence is synthesized)
tgaatgccacctttagatcttgctcacaaaccaaccaaccagcaaacacacccaggcttcttgagtcatggatttggagagattctcaccaaaaatgcttgcattgttctcgtatgtgaa

SEQ ID NO: 874922 - DNA, 120 bp, Artificial Sequence
  ENSG00000286863_46 (sequence is synthesized)
gcattgttctcgtatgtgaataagaaggtaacttttatggtctcatgtccttaagactttgaattattttgctatcattaatattagttattatcttaactaatttattatttttatatt

SEQ ID NO: 874923 - DNA, 120 bp, Artificial Sequence
  ENSG00000286863_47 (sequence is synthesized)
agaaacagaaaactggtatgtctcatctaccttatcaaatcgaagaacagtgggacgattttggttgtagattgtactctgtattaactatccaaataagacatttccttgggttgtcat

SEQ ID NO: 874924 - DNA, 120 bp, Artificial Sequence
  ENSG00000286864_0 (sequence is synthesized)
ctgctactggagtcaccaggttcacggaacagctccaacagcaccctgtgctcagccacatggcacctctcctgggttctgcccattctgcgcggcctctgctctgctcaaatggctact

SEQ ID NO: 874925 - DNA, 120 bp, Artificial Sequence
  ENSG00000286864_1 (sequence is synthesized)
taccttgaagagcttcccctctaggctctacctgccagctgaatgccacaattcacattcgagctggtgtggtcaaacgcagcacactggagtacatctgaatgaaggagctcatgttaa

SEQ ID NO: 874926 - DNA, 120 bp, Artificial Sequence
  ENSG00000286864_2 (sequence is synthesized)
ctgctgcttttcacgtcaataacacagctacccaaacaaaaatccgtcaaacagacaccgaaagagaaaagtagagctgaatccacacacacaagattgcatgctacaaaatctgcggtt

SEQ ID NO: 874927 - DNA, 120 bp, Artificial Sequence
  ENSG00000286864_3 (sequence is synthesized)
tctgaagagaatgtgaaagatttaaatggaaaccaaccaacttctcctccctggatgatgacaaagtagagaatctgctgtcaccgctgtagctggaattctgagcaccaaagaagaaaa

SEQ ID NO: 874928 - DNA, 120 bp, Artificial Sequence
  ENSG00000286864_4 (sequence is synthesized)
cacgtttaagtgacaagcacttccttacgactccaaaagcacccccatcccattcaaaaggcgaacatggaacagcacaaccgagccaacactaggagcccaggaacgctagtttatcta

SEQ ID NO: 874929 - DNA, 120 bp, Artificial Sequence
  ENSG00000286864_5 (sequence is synthesized)
aagacgcgaggcacaaacagtacagcagagattcttaacaactggagattctaagctgtattttcaccttcagtgtttgtgtcttggtgatgccaggggtgtatctagtactgcttttca

SEQ ID NO: 874930 - DNA, 120 bp, Artificial Sequence
  ENSG00000286864_6 (sequence is synthesized)
tcaatctttcttcagcccagcccgcctgcgggctatagctcagccctggggtgccagaaaggtgggtggagtgtgacagcctgctgccacccgtccactggagagcccttatccacagag

SEQ ID NO: 874931 - DNA, 120 bp, Artificial Sequence
  ENSG00000286864_7 (sequence is synthesized)
gtccactggagagcccttatccacagagtgcaaatgccctgaaggccatctttacgtgtcttgagtatacatttttaaaatgtcgcatccagccgggtgccatggctcatgcctgtaatc

SEQ ID NO: 874932 - DNA, 71 bp, Artificial Sequence
  ENSG00000286864_8 (sequence is synthesized)
gggcacgagactttgtctcaaaaaataaataattaaagtgcatgcaatgctaaataggtaaataggaatga

SEQ ID NO: 874933 - DNA, 120 bp, Artificial Sequence
  ENSG00000286864_9 (sequence is synthesized)
attaaagtgcatgcaatgctaaataggtaaataggaatgagcaagtaaaaacaacttgatcagctggtttcagaaagctaaagacggctttggtcggggagagggaagaaggtctgggtg

SEQ ID NO: 874934 - DNA, 120 bp, Artificial Sequence
  ENSG00000286864_10 (sequence is synthesized)
gggtcactcatttgaagcccaaaagtataatttaagcatacacatgatatcttaatataacataattaagataaatgaaaagaaatactattttacacaattaggaatattactaaaaga

SEQ ID NO: 874935 - DNA, 120 bp, Artificial Sequence
  ENSG00000286864_11 (sequence is synthesized)
aaaaaatgaagcatgagaacaggaaatttttagaccatttcacacagaatggacctgtgggatatcgtgaagcttaatggaaatgtatccagtgtaaccttctaaaatccccaatgacct

SEQ ID NO: 874936 - DNA, 120 bp, Artificial Sequence
  ENSG00000286865_0 (sequence is synthesized)
gggacagcagtggtacccacgtggctcactgcaccatccctatcaatggagttaaattcccagaacctccttggtggtcagcttctgatggtctcaaacacttaacaaatattcccatac

SEQ ID NO: 874937 - DNA, 120 bp, Artificial Sequence
  ENSG00000286865_1 (sequence is synthesized)
cgcctacctcatttaagatgctgtgctaaataatgtttccacagtgcaaggaggaacctccagaaagttctctgtggctaaagcatgcctttgaaatgcaagacacacaaagcttcattt

SEQ ID NO: 874938 - DNA, 120 bp, Artificial Sequence
  ENSG00000286865_2 (sequence is synthesized)
caagatacgggtttgggaaagaccctggagtacctgctgtccacaccgtccctcaactcaccccttccctggacagattctacctggcatgctttgcccccaaagctctccctcttccca

SEQ ID NO: 874939 - DNA, 120 bp, Artificial Sequence
  ENSG00000286865_3 (sequence is synthesized)
gagtgatgcacagatcagaaccaccaacggcagaaggtctgggaagcctgaggagtggtaagactggaaacgtgcaaagttattcacagacgctggaatcttgagctcttcaatgcctaa

SEQ ID NO: 874940 - DNA, 120 bp, Artificial Sequence
  ENSG00000286865_4 (sequence is synthesized)
cgaacagttatgtaacctgcaggagctgaattcttggtgacggagccagcaagatccttcctggggaaaacaatttacttgatacacagtgtttagaatgaaaaaaaaaaaaaaaagaaa

SEQ ID NO: 874941 - DNA, 120 bp, Artificial Sequence
  ENSG00000286866_0 (sequence is synthesized)
gtgactttcctgtctctgatgttccgggtcagctccagcactggagaaggctgcgagggagacaggggaggagagggtccttcaaggacagaggaaggatcagaatctcaatctgcagca

SEQ ID NO: 874942 - DNA, 120 bp, Artificial Sequence
  ENSG00000286866_1 (sequence is synthesized)
aacacctctctccattccctgacttgtggtcattgggccctgcctggtccaagcagccaggcagtgctcaagacagcagcacggagcagcagatccctgggttggcaataggagccttga

SEQ ID NO: 874943 - DNA, 120 bp, Artificial Sequence
  ENSG00000286866_2 (sequence is synthesized)
agagtggccgcagggatccagggatggagaggcctcccaggcatgggtgcaccgccctgcagaggccctaaggatgtgtactcagtggaagctggagtcaggaccagatctgatgctgaa

SEQ ID NO: 874944 - DNA, 120 bp, Artificial Sequence
  ENSG00000286866_3 (sequence is synthesized)
agtacctgtgagccaaatagctcggaatgactaaggggtgagggagatgctctctcttgaagagccactgcttctgcattcaacaaaggtgaaaaggaacccttttgggaactgtcactc

SEQ ID NO: 874945 - DNA, 120 bp, Artificial Sequence
  ENSG00000286866_4 (sequence is synthesized)
agaaaagtcagaactcctatccaggacttgagtgcaggagaaggggagccccatggacttctttgtgtcacccgcggcataaacggcttaatgtggatgtactttaaggaaagggaggaa

SEQ ID NO: 874946 - DNA, 120 bp, Artificial Sequence
  ENSG00000286866_5 (sequence is synthesized)
tcgggcacgcagtgttgcagtattttctgaaaggctttgctcgctctcttcagtacttttcctcttctcacagcctggagcctgcagagaaatagccctggttccccctagtggcagaag

SEQ ID NO: 874947 - DNA, 120 bp, Artificial Sequence
  ENSG00000286866_6 (sequence is synthesized)
ctcatagcgccgacctgggacacttcccacgatcgtggtaattagccagtagtttagttacaaccacactctcattaactaacagcgggagaagagactgtccctgtttccttggagacc

SEQ ID NO: 874948 - DNA, 120 bp, Artificial Sequence
  ENSG00000286866_7 (sequence is synthesized)
tagcagcgcgtgcttctattgcattgactgttcctgtaagctcaaaagcccccaggttgttatcgcatagtgtttactgcattggatggagaccaagacctggtaacactgtgttccccg

SEQ ID NO: 874949 - DNA, 120 bp, Artificial Sequence
  ENSG00000286866_8 (sequence is synthesized)
ccggtgcttctcaaagtgtggtccttgacctatgcatcagcatcacctgggagctggatagaaatgcaaattctcaggcctcttacgcctactgagtccataactcgggggttcagagcc

SEQ ID NO: 874950 - DNA, 120 bp, Artificial Sequence
  ENSG00000286866_9 (sequence is synthesized)
caggaatctgcattttgacaagttctccagctgattctgatccacaatgaagaatgaggactgacctagacaaagcatgccctggtattttgttcctattaataaccagaaacagctggg

SEQ ID NO: 874951 - DNA, 120 bp, Artificial Sequence
  ENSG00000286867_0 (sequence is synthesized)
gatttctggcgtgagcagagagcactttggggaagtaagaaaggcccccgatcatgggtgctggacattttctggaagaaggatgaagagggagggagtggctggagccgtgctctgggt

SEQ ID NO: 874952 - DNA, 120 bp, Artificial Sequence
  ENSG00000286867_1 (sequence is synthesized)
cacatggacattcgtgatgccctcgctgtaggtgcccgaggtgctgagtccagggccttccagtgccagcttcaagcgatggccctgccacatgcctctgtgtgagctcacacaggtcac

SEQ ID NO: 874953 - DNA, 120 bp, Artificial Sequence
  ENSG00000286867_2 (sequence is synthesized)
tttcctctctgagcctcaagagttatgataaaccagagaaacccaacctcccaggagaggttcccttcctcctggcatctctggcttaagacctgcagccctggaagcaggcatcggatt

SEQ ID NO: 874954 - DNA, 120 bp, Artificial Sequence
  ENSG00000286867_3 (sequence is synthesized)
ggctgggccctgctctcacccctgccatgtggtagaccaggcagtggcagagtcaggttggagcccaccctggtctttgtcgtgtgaaagggcagtgagagggaggcaagggggatcgcc

SEQ ID NO: 874955 - DNA, 120 bp, Artificial Sequence
  ENSG00000286867_4 (sequence is synthesized)
ctcctgccaagactctacccatcaggaaattccccaaaaaggatgcttctcaggatggaggcaggggctggagacccaccaatatcacacatgtgcaatctaggctgtttgattttaaag

SEQ ID NO: 874956 - DNA, 90 bp, Artificial Sequence
  ENSG00000286867_5 (sequence is synthesized)
attttccgctggagggcagtggtgcatttcatggctcactgcagcctccacctctgaggttctagtgattctcctgtctcagcctctcga

SEQ ID NO: 874957 - DNA, 68 bp, Artificial Sequence
  ENSG00000286867_6 (sequence is synthesized)
acaggtgcacaccaccacacccggctaaattttgcatttttactggtgatccatgcacctcagcctcc

SEQ ID NO: 874958 - DNA, 120 bp, Artificial Sequence
  ENSG00000286867_7 (sequence is synthesized)
ctcccaaagtgctgagattacaggcatgacccaccgcgcccagcctaaaagtcactttttcatcactttttcatccactgatgtcagcttaggctgacatcaatgtggtgaggtgcagag

SEQ ID NO: 874959 - DNA, 120 bp, Artificial Sequence
  ENSG00000286867_8 (sequence is synthesized)
caatgtggtgaggtgcagagggtatgggccaggggctttaaggcttaggtcttccagggggtggccaggggttcttgctttggcccttcccaagatttccatctgtgaaatgtgtctgtt

SEQ ID NO: 874960 - DNA, 120 bp, Artificial Sequence
  ENSG00000286867_9 (sequence is synthesized)
ataggcgtgagccaccacacccagcctatttatttatttgtttagagacagggtctcactctatggcccaggctagagtacagttgcacgatcatagctcactgcagcctcagactcctg

SEQ ID NO: 874961 - DNA, 88 bp, Artificial Sequence
  ENSG00000286867_10 (sequence is synthesized)
acaacgtgctataccacctggtgttctggccacgtccctacccccaacactgggcttcaggttccttggccctggacagaggcccagt

SEQ ID NO: 874962 - DNA, 120 bp, Artificial Sequence
  ENSG00000286867_11 (sequence is synthesized)
actgggcttcaggttccttggccctggacagaggcccagtgaataagaagagagggacaaggccagcagcaggcctgccaccaaggagccggacagtgcccacctttctcctggaatgtt

SEQ ID NO: 874963 - DNA, 120 bp, Artificial Sequence
  ENSG00000286867_12 (sequence is synthesized)
agacccaggggagatggtgctgaggctggtttcttccccaaactgccttctcctttccatctgcaaaatgggaataagacacctgtcatcagccattgcgatgccaccgggatctcacgg

SEQ ID NO: 874964 - DNA, 120 bp, Artificial Sequence
  ENSG00000286867_13 (sequence is synthesized)
catggctctgagagtcattgaaaaaggcaccaagctcagcaaaggtgttattactattattattgaccataaaatacttgacaaatgattgcagagtctgccagagaagagtctgcctgt

SEQ ID NO: 874965 - DNA, 120 bp, Artificial Sequence
  ENSG00000286867_14 (sequence is synthesized)
ctggggagagattttagggctgctttaagagtcttttggaagcacaaaccccagcagagggagccggctccatggaagccttcaggagcagagaggcccggggctgggaagtctttgatt

SEQ ID NO: 874966 - DNA, 120 bp, Artificial Sequence
  ENSG00000286867_15 (sequence is synthesized)
accttacatctgtttttatggaaacttctgggagcagccgaggggaaacggaactgtaaacagcacagccggcgtggcctccccaccagattgttaatggggaatcgcccgcgtggctcc

SEQ ID NO: 874967 - DNA, 120 bp, Artificial Sequence
  ENSG00000286867_16 (sequence is synthesized)
cctcgctggcgagggtttggcccctggtctgtggcaggagtgattaaaggatatgagcacgcagagagcaaacccagccacagaagacgaatcagggttttatgcccctcggttctgcgc

SEQ ID NO: 874968 - DNA, 120 bp, Artificial Sequence
  ENSG00000266248_0 (sequence is synthesized)
ccagagcctggctggggcgcgcctactcccgctccccgcaggcatcctttccgcagccggggccccggcgggactgggaacgactcgggcgcggcgctgctgctgcggcgacccttcgcc

SEQ ID NO: 874969 - DNA, 120 bp, Artificial Sequence
  ENSG00000266248_1 (sequence is synthesized)
ccttcgccgctcgcctctccctacccctccgggcccaggctgcacagcgggattgctggagaccgcgaagcttcccggttcgttctctttcttcttcttctcggtggcggccccagcaaa

SEQ ID NO: 874970 - DNA, 120 bp, Artificial Sequence
  ENSG00000266248_2 (sequence is synthesized)
agggcatgcagcagcagaggcggcaggacacttggaccaacaaaagatattttcttctcagtcatgcatgcaaatatatggaagatcttagaaaattgtggaaagtggggcatactgaac

SEQ ID NO: 874971 - DNA, 120 bp, Artificial Sequence
  ENSG00000266248_3 (sequence is synthesized)
aaaatcactgccatcagagagaatgaagtgatgcaagatcaggatgtgtcaggaagcccaggcgtgtgtcgccacgttgatctctgtgtgaaataggacggactcagtacctgcagctag

SEQ ID NO: 874972 - DNA, 120 bp, Artificial Sequence
  ENSG00000204603_0 (sequence is synthesized)
ctcctgagcagccatgcacgtggcgtttactcccaatgggcgatgggattttcatcagcttttatgttcagaaggcagggcacacctggaagctgttgtcgagggatggcctgattgagc

SEQ ID NO: 874973 - DNA, 120 bp, Artificial Sequence
  ENSG00000204603_1 (sequence is synthesized)
tcgtgaggccctgggcgtgcgggtgtggaatatcctgctccaatcaaagccatgtcacctgcgttgtccagtgaaacgtcagcggacaggcgctgcccgggctccagggagctcctcact

SEQ ID NO: 874974 - DNA, 120 bp, Artificial Sequence
  ENSG00000204603_2 (sequence is synthesized)
gaggctcactccctgtgcctctgccatcagcacagggggacatgcctggctgcctgtgggaccagggaggacgcgcggtgcgggagcagagccagccacactgccgctgctgcactgttc

SEQ ID NO: 874975 - DNA, 120 bp, Artificial Sequence
  ENSG00000204603_3 (sequence is synthesized)
atctgagtggcgcaagaacttgtcagtgcctttaatctgagggatgagtcttcaggagagtttgttgtcaggatttaacacttactcttggaaaagcagtaatgtgtgctggaaatgaac

SEQ ID NO: 874976 - DNA, 120 bp, Artificial Sequence
  ENSG00000204603_4 (sequence is synthesized)
cgggcagaccctgctcccatctccatctgcctcaatctcagtgccctccactccccaccagcagcgcctgttaccaagtcactgcacaacaaccacaaatggagagtggaggagcatcac

SEQ ID NO: 874977 - DNA, 120 bp, Artificial Sequence
  ENSG00000204603_5 (sequence is synthesized)
tttccaccccgggatcatgacgagggctctgtaacttcaacaaatgcgcagaagacgcctggcctcgagcttgtgcagcacctccggagcctgccttcccttgtcacccacggcaccatg

SEQ ID NO: 874978 - DNA, 120 bp, Artificial Sequence
  ENSG00000204603_6 (sequence is synthesized)
actttggagggtctcagctcagtcctccctccagaggggctgtcagtgctgggcagaaaatcacccttcaacgaccgggcccagctgcgctctgtcagagagcagagaaagcaggcctcc

SEQ ID NO: 874979 - DNA, 120 bp, Artificial Sequence
  ENSG00000204603_7 (sequence is synthesized)
gggaggttctcactccaccaaggagacgtctccacccagcgctcatcctgagcaagggcactgggaggaagaaatgcaattttaaaacctgtgctgcgaatgatgacttctgctgcttcc

SEQ ID NO: 874980 - DNA, 120 bp, Artificial Sequence
  ENSG00000204603_8 (sequence is synthesized)
gtctctggagagctctgggcacttaacatccttccacccacatgcccgagtctgtgcagaaacctcacccacgcggaggagactgcatttcccagtagcagattcaagtcctgaacttcc

SEQ ID NO: 874981 - DNA, 120 bp, Artificial Sequence
  ENSG00000204603_9 (sequence is synthesized)
tgagactcaactatcaggaaaaacatgaagaattcagtccatgccctcaaatgcacccatgtggctcccaaacggcaaatctcagcaatgagattctcagctaggaaagtccacactgaa

SEQ ID NO: 874982 - DNA, 120 bp, Artificial Sequence
  ENSG00000204603_10 (sequence is synthesized)
ctcatgcagaggacaaagtacataggcctggggttcttggcacctgagatctctgagcagttttctgaattttcctatttcctgttgaagacataggaacacgtggcacagaggcacaga

SEQ ID NO: 874983 - DNA, 120 bp, Artificial Sequence
  ENSG00000204603_11 (sequence is synthesized)
gacctggaaaccaacaggtgacctcagggaggtttgtgaagcaccctgatgagaagacagttgggcagacgtggctggctattccccaagtccattttccctcctgggaccagagctgac

SEQ ID NO: 874984 - DNA, 120 bp, Artificial Sequence
  ENSG00000204603_12 (sequence is synthesized)
tccatttctcaatctgccttgcagtgagcatagtcagttccaacgtcgcacggtgggactctggacagggtcctccctctccatcttcccctcgctgggacccagcacggcacaggaggg

SEQ ID NO: 874985 - DNA, 120 bp, Artificial Sequence
  ENSG00000204603_13 (sequence is synthesized)
gcggccaacaccatttagacatcagaactgtccagagtgttctgccctctgtcttaagtcacgaccccggattccccaggcagccacacacagcggtctacaccgggagaaagtcgccgt

SEQ ID NO: 874986 - DNA, 120 bp, Artificial Sequence
  ENSG00000204603_14 (sequence is synthesized)
gagaaccgtggcaccgcaggaggctgtgcgtgtttgcttttgttgatctgtttaactgcagcccgatttatgtttctggatcctggaattgagttgacactatcggtagtatgaaagtga

SEQ ID NO: 874987 - DNA, 120 bp, Artificial Sequence
  ENSG00000204603_15 (sequence is synthesized)
cagacaccaggatgaagtcactcttgtcagacccagaggaaacagggtcaggaggcctgggggaggggaggacgctgctgcgtgtctgagatcagagctgtttccaaggactttctgaag

SEQ ID NO: 874988 - DNA, 120 bp, Artificial Sequence
  ENSG00000204603_16 (sequence is synthesized)
ccccacaagaaggccctctgcgtccgtcgcgcatctccggcctggcggggcttgcgtggctcacacgtacacgcatttctacggccagggttatctatcaccagacattcttgaggactg

SEQ ID NO: 874989 - DNA, 120 bp, Artificial Sequence
  ENSG00000204603_17 (sequence is synthesized)
cagtgattctgatcagatgctctcaaaagaccacttcccagtgacaacacctccttcaagaaaccgacagcattctggctgtgggtccctggaaccagtgaactgtgtcagagcagctca

SEQ ID NO: 874990 - DNA, 120 bp, Artificial Sequence
  ENSG00000204603_18 (sequence is synthesized)
ggcgaacttctcccctgtgccaatgaaagctttttcttaccctacctcactggaggcacctgttacttgccacagtgcatttgggattctcatcctctttttctatccccaaataaattc

SEQ ID NO: 874991 - DNA, 120 bp, Artificial Sequence
  ENSG00000204603_19 (sequence is synthesized)
acacgcaagcgtgcggctgtgagtgctgggaggggtggcccatggccctggcagccccaggcccacaccctactgtgttctgggggagatgagatgattttcctgaaatattctttctct

SEQ ID NO: 874992 - DNA, 120 bp, Artificial Sequence
  ENSG00000204603_20 (sequence is synthesized)
gaaatggatgggcagggatctgagagcacctgctatcgggtgagtcctgctttactcatgtcagagatttagactaaaacaaacacaaaatgcaacaaagacctaagtgtaagagctaaa

SEQ ID NO: 874993 - DNA, 120 bp, Artificial Sequence
  ENSG00000204603_21 (sequence is synthesized)
ccagagctgactccatttctcaatctgccttgcagtgagcatagtcaggtgtacaggctcactcaaccctcgtaagagccagaaaaggggccggatgcggtggctcacccctgtaatccc

SEQ ID NO: 874994 - DNA, 120 bp, Artificial Sequence
  ENSG00000204603_22 (sequence is synthesized)
ccagcctgggcaacatagtgaggccccatctctattaaaattggttttaaaaaagagccagaagtggcaggtgctgttctcatccccacttcacagacgaggaacctgagggtccgagac

SEQ ID NO: 874995 - DNA, 120 bp, Artificial Sequence
  ENSG00000204603_23 (sequence is synthesized)
cttcacagacgaggaacctgagggtccgagacacaggaagctgcttgatcctccagccaggatgaggctgagggagagcccaggccaacccgctcttggagtttggactttcaaccgcga

SEQ ID NO: 874996 - DNA, 120 bp, Artificial Sequence
  ENSG00000204603_24 (sequence is synthesized)
attttccacaaccgtatggaaatgttcgtccaggggttctggaaacactcagtccccatggtctgtcttctgttttcctatttttggtaagcattaaaaacaaaacaaaacaaaacaaaa

SEQ ID NO: 874997 - DNA, 120 bp, Artificial Sequence
  ENSG00000204603_25 (sequence is synthesized)
gtagatacgcatgtgagcgctggtgggagacgccaggctgggatttccgctcgatctgggaatgagcaatgcaacctaatgacacccggagctcctgaatcacctggggaagatgaagag

SEQ ID NO: 874998 - DNA, 120 bp, Artificial Sequence
  ENSG00000204603_26 (sequence is synthesized)
agacactctctggtgggaacgtctcctagaaacaaggcctaagatggggcgaccacagccccacagctgtgtccagatgcagggagcactcgcctgtgctgtgagggacggccggtgtca

SEQ ID NO: 874999 - DNA, 120 bp, Artificial Sequence
  ENSG00000204603_27 (sequence is synthesized)
tcgttggagcttcctaagactcccagaggctgatgcacctcccagacccgcctccgcccggctccctgggccctgctccaggggcttcattgctccctgccccgggtcacccctcggctc

SEQ ID NO: 875000 - DNA, 120 bp, Artificial Sequence
  ENSG00000204603_28 (sequence is synthesized)
cacatacaaccacaggaaaaaaaatacataaattgaatttcatcaaaatttaaaacttttgtgcattaaagttcatgatcaaaaaagcgagaagaaaacccagagaatgagtgaaatatt

SEQ ID NO: 875001 - DNA, 120 bp, Artificial Sequence
  ENSG00000204603_29 (sequence is synthesized)
tgcaaatcatacatctgggacaagtatccagaatatataaaaattcttagaactcaacaatataaagaaaaataaccaaattaaacagtaggcaaaggattcgaagagacctttgtccaa

SEQ ID NO: 875002 - DNA, 120 bp, Artificial Sequence
  ENSG00000204603_30 (sequence is synthesized)
agaagatacacaaatgaccaatgagtacgtgaaaagatactcagcagctactcattatggaagtaccactttccactcatgctgagggctataataaaaaacaaaacagaaatgacaagt

SEQ ID NO: 875003 - DNA, 120 bp, Artificial Sequence
  ENSG00000204603_31 (sequence is synthesized)
gcagtgaagatgtggagaaactggatttctcatagattgctggtgggaaagtaacatggtgcaaccaatgtagaaacagtttggcagttccttaaaaaattaaacagagctaccatctga

SEQ ID NO: 875004 - DNA, 120 bp, Artificial Sequence
  ENSG00000204603_32 (sequence is synthesized)
ccatttctcaatctgccttgcagtgagcatagtcaggagcccacccctgttggacgcagatgaagatgccaaggggagcctggctgaccatggagccatcatggagggaggcagagctga

SEQ ID NO: 875005 - DNA, 120 bp, Artificial Sequence
  ENSG00000225012_0 (sequence is synthesized)
caagaagaccctcaccagatgcagcccctctatgttggacttcccagcctccggaagttagaaatgtgctacaaccactcaaggtctgcaaacagattcctatttagatgttgttgagag

SEQ ID NO: 875006 - DNA, 120 bp, Artificial Sequence
  ENSG00000225012_1 (sequence is synthesized)
gccatacttacactgccattttgtagtcatttgtcctacagctaaagattaatttataatcagatacgtgaaatctgatatgtgcattaagcttgattatacctgactgtgtcttcacga

SEQ ID NO: 875007 - DNA, 120 bp, Artificial Sequence
  ENSG00000225012_2 (sequence is synthesized)
cttgattcccagtggcattctcaacagcagtcataaacaatggtaattcaatgtatatttatattcaactgatatattaattggaatatattaaaaatacgtatatttatattcagaata

SEQ ID NO: 875008 - DNA, 120 bp, Artificial Sequence
  ENSG00000267260_0 (sequence is synthesized)
agccccgaacggtagaaccgatgggaaatgtagtccagggcagaaaagcggtcaacccagccacgatgcgagccaaaggattcttggctccaagcctggtcctggctgttagtttggaac

SEQ ID NO: 875009 - DNA, 120 bp, Artificial Sequence
  ENSG00000267260_1 (sequence is synthesized)
tcatgcacccagatgctaactcgccctcagaatgcagaggggatgaaacactgaccggacaattcaatctgtatatgggagataaactggaggggaagacgaatggcaggagggtgaaga

SEQ ID NO: 875010 - DNA, 120 bp, Artificial Sequence
  ENSG00000267260_2 (sequence is synthesized)
ggaaactgaattactgtgcaaacacccgccactcaaatccgggtggttactgcagagtgaataacgataggtactatttcgtgtaaggcaaagtcctttgaaagggctcctagagcgtca

SEQ ID NO: 875011 - DNA, 120 bp, Artificial Sequence
  ENSG00000267260_3 (sequence is synthesized)
aggcctccacctgatgaatgaatgagtcaggcaggcccagctccacttcacggatgggaaaactgaggtacgaggcctcgctgaaagatgcgaggcagagcggagaaccagaagcaccac

SEQ ID NO: 875012 - DNA, 120 bp, Artificial Sequence
  ENSG00000267260_4 (sequence is synthesized)
ttctctcaggctgatgctctaatctcggctccccccgcccctacaatggcgtagacggcctccgccgcccgactcacacacaccctcccccgggaacggcaagtctcctcgggttccaag

SEQ ID NO: 875013 - DNA, 120 bp, Artificial Sequence
  ENSG00000267260_5 (sequence is synthesized)
gacagggtcaaaagacaagaggcccgaggcgctcccgccgtgatttgcagccagataccgttgggagcgcagccagagagcgttgggagcgtgcgtacctccagcccaacatggcggcgg

SEQ ID NO: 875014 - DNA, 120 bp, Artificial Sequence
  ENSG00000267260_6 (sequence is synthesized)
cagcggccgcccccgaccccaagccctccctcagggcccgaggcttctcctcagggccttccggtgggcgggaagacagcgcaaccccgccaggcctttctcgtcgctgcgcctgctcgc

SEQ ID NO: 875015 - DNA, 120 bp, Artificial Sequence
  ENSG00000267260_7 (sequence is synthesized)
atacgagagccaggcggcgcggcggcgggacctgtactgagcaagaaagaagatttcaaagtaatttattgttatgagatccgtgcttttatcttgtctcagactcccaatgataggcac

SEQ ID NO: 875016 - DNA, 120 bp, Artificial Sequence
  ENSG00000267260_8 (sequence is synthesized)
atactctcctctgtacatttaatgaaactactaaaatatttcgatttaaatcttccacctatttgttttctgtgtatcctacctgttcccgaccttgacattttcaaagaatacaggtta

SEQ ID NO: 875017 - DNA, 120 bp, Artificial Sequence
  ENSG00000267260_9 (sequence is synthesized)
cttattttgttttttggtggtggtgagtttttttggggttttgttttttggtttttggttttatttttggagacagggctttgctgtatcgcccaggctggaatacagtggcgcgatgat

SEQ ID NO: 875018 - DNA, 82 bp, Artificial Sequence
  ENSG00000267260_10 (sequence is synthesized)
gcgccaccacgcccgggtaattttttattttttgtagagatggggtgttctatgttgcccagtgtggtctcaaactcttggg

SEQ ID NO: 875019 - DNA, 120 bp, Artificial Sequence
  ENSG00000267260_11 (sequence is synthesized)
gggtaattttttattttttgtagagatggggtgttctatgttgcccagtgtggtctcaaactcttgggctcaagagatcctcccacttctgctgcccaaagtgctaggattacaggcatg

SEQ ID NO: 875020 - DNA, 120 bp, Artificial Sequence
  ENSG00000267260_12 (sequence is synthesized)
agagtgttctttaatttggatgtacctcatcttttatgtatctttgggaggaataccacataactcatgtggtttatcccatcgagagacacacagtgtcaatgtgttccattcttggtg

SEQ ID NO: 875021 - DNA, 120 bp, Artificial Sequence
  ENSG00000267260_13 (sequence is synthesized)
atgttaacttttattacttagtgaaaataattctaagagatttcaccactgtagagtgaataaatgaatatgtgggattcatcaatgaataagtaaaaggatgccaactggcaaaagaac

SEQ ID NO: 875022 - DNA, 76 bp, Artificial Sequence
  ENSG00000267260_14 (sequence is synthesized)
tgagtgtgatggcaccactgccctccagcctgggtgacaaagcaagaccccgtctcagaaaaaattaaataaataa

SEQ ID NO: 875023 - DNA, 120 bp, Artificial Sequence
  ENSG00000267260_15 (sequence is synthesized)
gtgagtccagggctcagtctgcattgcgcggaaaatgaaggtgaaggtggaggtgggacctgatggtctcgtcccggatagggttgaagaagtgggagaaaaggaatcaaaatcgtggat

SEQ ID NO: 875024 - DNA, 120 bp, Artificial Sequence
  ENSG00000286288_0 (sequence is synthesized)
gagtcagctgctattgtccaacctggagtgtagggtggactgtagtccttctgtgatctcataatccaccagcagacccctcctgtgtacccctctgtgtactcctgctgtgtacctgga

SEQ ID NO: 875025 - DNA, 120 bp, Artificial Sequence
  ENSG00000286288_1 (sequence is synthesized)
gacccccaggtctccaggggtcaaaccacaccccacaggcaccttggaagaagaaatccacaggaggaaaaaaagaagatttgctgagcacctactatgcatcagacgctgtgttctagg

SEQ ID NO: 875026 - DNA, 120 bp, Artificial Sequence
  ENSG00000286288_2 (sequence is synthesized)
tgacacgaaacagcaaactccccacaacagcctcctcaacgctgcctcccacagtgcttggacaaaataattacagcaagatgcgggcactgagctgactccttatgtaggacatcccag

SEQ ID NO: 875027 - DNA, 120 bp, Artificial Sequence
  ENSG00000286288_3 (sequence is synthesized)
tgcagatgtgccccacctaagtgctgacagcctaaaagtccaccattaaagccattcttcgggtttaaggcattgatcttcaccatcatctcccattattatatctgcttgctctcatgg

SEQ ID NO: 875028 - DNA, 120 bp, Artificial Sequence
  ENSG00000286288_4 (sequence is synthesized)
agacaggggtcactggggccagtccacctgtagtggctgaagtcttcatctcctgcagcagagaagtttgttgggactatgtaaaatatcaaaagagggtttctttaacccttaaatctc

SEQ ID NO: 875029 - DNA, 120 bp, Artificial Sequence
  ENSG00000286288_5 (sequence is synthesized)
caccttggaagaagaaatccacaggaggaaaaaaagaaaaaattctcaaactacaggaagtggagagaacagtacagtgaccctacacgcttgttaccagcctcacctgtcacccacatg

SEQ ID NO: 875030 - DNA, 120 bp, Artificial Sequence
  ENSG00000286288_6 (sequence is synthesized)
aacacccagagggtggctgctgggggcgtgagaactgggtaggggtgcctccaggaagtcctcttatgtgtgcttctttgttcatttgacaaggatttgctgagcacctactatgcatca

SEQ ID NO: 875031 - DNA, 120 bp, Artificial Sequence
  ENSG00000286288_7 (sequence is synthesized)
actccaggcctaacctctaggaggactggcagtttctgctatggcctctgggagccatgagctgccatgaaaaaggtcaaactactctgctggagacacccacctggagaagccctggga

SEQ ID NO: 875032 - DNA, 120 bp, Artificial Sequence
  ENSG00000286288_8 (sequence is synthesized)
ttccatggagaggcagacggacccagctgagctcagtgttccagccatccccacgaaagcaccaggaacctgagtgaaaccatctcgatcctccagcatagcacaatcagcagctgaaga

SEQ ID NO: 875033 - DNA, 120 bp, Artificial Sequence
  ENSG00000286288_9 (sequence is synthesized)
tcactgagtgactctagtcggcgctccatggatcactgaaggatcacccagctgagccctgcgcaaatttctgactcacaaaactgtagacgatacaatggttgttgtttgggggcagtt

SEQ ID NO: 875034 - DNA, 120 bp, Artificial Sequence
  ENSG00000286288_10 (sequence is synthesized)
tgttatgctgtagcaataaatagccagaagagaccaagaggcagaagttgtttgctgaaaataatgcaaaaattataccagcccttgcccagctacctccggatttcttgctacatgaaa

SEQ ID NO: 875035 - DNA, 120 bp, Artificial Sequence
  ENSG00000286288_11 (sequence is synthesized)
aaaaaaaaaaaaatccctatttgtttaagcctcgttgacaccttgggctattgctcagtcctcagttttccatttgttaaatggagcattagctcctgtcttactacttcccaaaggtgc

SEQ ID NO: 875036 - DNA, 120 bp, Artificial Sequence
  ENSG00000286288_12 (sequence is synthesized)
ctgagagggtagagtaagaatgaagaagagaaggcctttttcatgtaatataaacagtgcttatgttcccaaagatcagcgagtgacatgctcaaacagttataatatatttaatgtggt

SEQ ID NO: 875037 - DNA, 120 bp, Artificial Sequence
  ENSG00000286288_13 (sequence is synthesized)
cataatgggagtgaacttgtcatgaaccaattgcaatggattttggaatcagacacgttagggcttgaggctctcagctctgctagacaaacttctaacttgacaaataggccagtcatt

SEQ ID NO: 875038 - DNA, 120 bp, Artificial Sequence
  ENSG00000286288_14 (sequence is synthesized)
aaatctctccaagccttagttccctcatcaataaagcacagacgatgtgatttccctccgttgagtctgtgtgaggattaaattaaatgagattcatccatctatttgataaatattgaa

SEQ ID NO: 875039 - DNA, 120 bp, Artificial Sequence
  ENSG00000286288_15 (sequence is synthesized)
tatctcctagggtctaggccaaacacactcttgatattggtggaggctggtgtccactcacccttaaatctaaatatttaaaaattataaatcagaccaataccttctcttaaatgttct

SEQ ID NO: 875040 - DNA, 120 bp, Artificial Sequence
  ENSG00000286288_16 (sequence is synthesized)
gagagccagccccattccctggtcgctcatttcccagcctataaactgccaccttcccttctcatccccagctccatcctgtaccgtgcacacctcacctgcatgtgtgtagacatccca

SEQ ID NO: 875041 - DNA, 120 bp, Artificial Sequence
  ENSG00000286288_17 (sequence is synthesized)
ggctgcaggtccaatctccatccacaccctatcctctgcagtgccccttggctacaccctgggcttagtgttctgcctccagacaatagaccaggaagaggcctggcagcaggcttggga

SEQ ID NO: 875042 - DNA, 120 bp, Artificial Sequence
  ENSG00000286288_18 (sequence is synthesized)
cttttaggtagggagctcaggaatcctaggaatctgtagtattctagacaaggagcaaagacttggatgggtatatccccttggcactgcagactctctagcctgtggggatgtacgcag

SEQ ID NO: 875043 - DNA, 120 bp, Artificial Sequence
  ENSG00000286288_19 (sequence is synthesized)
ctggaggctggccagggcagagccccgcttgcctgggtccaaggatgggctggtcagcctgtgctaggtgctgcaggtacatgagtagatgaagcagataccacccctgcttctcctact

SEQ ID NO: 875044 - DNA, 120 bp, Artificial Sequence
  ENSG00000286288_20 (sequence is synthesized)
caaaggtgaagacacatccctgaagtcagggcctcagtcttagccctatctataagatgagggcttacctgatctgacatcaggtaatgttggagacttggtgtacgtcctcaggaatgt

SEQ ID NO: 875045 - DNA, 120 bp, Artificial Sequence
  ENSG00000286288_21 (sequence is synthesized)
cctagaagccaggaggtcagatgaggaggggcaagcttaaggcctaagcaatcaacttcctccttgaacctaaggctggcaaggcaggaagggcacccaccctctggtccaactccatcc

SEQ ID NO: 875046 - DNA, 120 bp, Artificial Sequence
  ENSG00000286288_22 (sequence is synthesized)
acgcaactccttcagtggccataacaacacaacttcccatcacacctagaataaaagtccagctccttgccgagacctgcaaagcctgctacccccagctgctgaccatctccagtctcc

SEQ ID NO: 875047 - DNA, 120 bp, Artificial Sequence
  ENSG00000286288_23 (sequence is synthesized)
ttactactgctcactgagttccatccttatgttcatgaaaccccacatctactctcccacctcaaggcctttgcccttgctgttttctctgctggacacgcccagctctttgcatggcta

SEQ ID NO: 875048 - DNA, 120 bp, Artificial Sequence
  ENSG00000286288_24 (sequence is synthesized)
gttcctctcactgtgcaggcctcagcttactctcttgcacagagacgtccattgacatccttttaggagcagctcctgtctagccccagctctctcttgggcgtgtcaccactttacatc

SEQ ID NO: 875049 - DNA, 120 bp, Artificial Sequence
  ENSG00000286288_25 (sequence is synthesized)
cttcctagtacagccaaaactggtgtaatggagtgtgcaaaagcttccacttggggctggactggctgggtcgaaacccaggctgggcccaatattctcaagtgccgagcctacctactg

SEQ ID NO: 875050 - DNA, 120 bp, Artificial Sequence
  ENSG00000286288_26 (sequence is synthesized)
cgcacttgaggctattgttcaacctggttccccacatatcgtgcaacctgttgtttctccacctatcgtgcaacctgtttctccacatattgttcaacttcctatttcccttcaatagat

SEQ ID NO: 875051 - DNA, 120 bp, Artificial Sequence
  ENSG00000286288_27 (sequence is synthesized)
tattcaaccagcattttcctatctgtacaagggagtgaggattacatgacctaatgtgcatatagcatagagcagagcctggcataagcgctgcattggtgtttgctacgatattaacac

SEQ ID NO: 875052 - DNA, 120 bp, Artificial Sequence
  ENSG00000286288_28 (sequence is synthesized)
gacagtagatccttggtgggaacacagagctccagctctcagcccgggacaagctttgacaggagagccagctactgggacacaagtccttttgtgtgaagggaaaaaaaaaaatagttc

SEQ ID NO: 875053 - DNA, 120 bp, Artificial Sequence
  ENSG00000286288_29 (sequence is synthesized)
taattaaaaagaaatccccacctatttggactaattcctccatgactagcttctccttagttctcctgttttcggacagggcctgaggccgatttcccctgaataggatcaaagaagatt

SEQ ID NO: 875054 - DNA, 120 bp, Artificial Sequence
  ENSG00000286288_30 (sequence is synthesized)
cacggacggagctgtggagttagtagctgggcatgaggctggagtgcaggggagacgcctggcccggagtcaccccagatggcaaactccccacaacagcctcctcaacgctgcctccca

SEQ ID NO: 875055 - DNA, 120 bp, Artificial Sequence
  ENSG00000286288_31 (sequence is synthesized)
agaatcagccgtttctccagggagcccggttcctttcactggagaatgttcttagaaacagatctggatggtgggtttgcatgttgctattggggacccactaccagggggcagagctag

SEQ ID NO: 875056 - DNA, 120 bp, Artificial Sequence
  ENSG00000286288_32 (sequence is synthesized)
agaaggtccttccctagacgtagctaacatcccagtgtgggagatgacacgaaacaaactagatactgctcctggaggcctgggtgtgaccgtgacgtagactctggagccacaggatag

SEQ ID NO: 875057 - DNA, 82 bp, Artificial Sequence
  ENSG00000286288_33 (sequence is synthesized)
actgtttagtggtctcttcacatggatgcacgtgacatttggtgccatgactctgatcgggggacctcccttgggagatcaa

SEQ ID NO: 875058 - DNA, 83 bp, Artificial Sequence
  ENSG00000286288_34 (sequence is synthesized)
ttccttttctggtagagacagaggagatgcgttttatccatgaacccaaaactccggcaccagtcacaggcgggatgcctgcc

SEQ ID NO: 875059 - DNA, 120 bp, Artificial Sequence
  ENSG00000286288_35 (sequence is synthesized)
tattcacccacgtttcagaggtgtctgatcaccgcagggacgcctgccttgatccttcaccttagtggcaagtaccactttgctggggcacaaataccccccaccccttctctccatgtc

SEQ ID NO: 875060 - DNA, 74 bp, Artificial Sequence
  ENSG00000286288_36 (sequence is synthesized)
ggcttgcctccttcactatgggcaaccagacttaaaacctcttcagctcacacctgacctaaaacctaaacacc

SEQ ID NO: 875061 - DNA, 90 bp, Artificial Sequence
  ENSG00000286288_37 (sequence is synthesized)
taaacaccttattttcttctgcaatgctgtttgactccaaaacaaactcgacgatggttccaaatagccagaaaacggcactttcaattt

SEQ ID NO: 875062 - DNA, 88 bp, Artificial Sequence
  ENSG00000286288_38 (sequence is synthesized)
tcaatcttcctttcctactgacccatgtgacctctcccctcctccccagactgctcctcttcaggtcgctccccgccaagctaaatca

SEQ ID NO: 875063 - DNA, 120 bp, Artificial Sequence
  ENSG00000286288_39 (sequence is synthesized)
acccatgtgacctctcccctcctccccagactgctcctcttcaggtcgctccccgccaagctaaatcaggctccgattcttccttggcctctgctcctccaccctataatccttctatca

SEQ ID NO: 875064 - DNA, 120 bp, Artificial Sequence
  ENSG00000286288_40 (sequence is synthesized)
ccctgtgcacacctggttcagcttacagtttcattctgagactagccctcccccacctgcccaacaatttcctcttagagcggtggctggaactgaaggcatagtcagggtacatgtgcc

SEQ ID NO: 875065 - DNA, 78 bp, Artificial Sequence
  ENSG00000286288_41 (sequence is synthesized)
ttaacctggagtgactgaaatgtcatcctaacttctaccctatccccagatgaatgggaaagagttttttctccagcc

SEQ ID NO: 875066 - DNA, 120 bp, Artificial Sequence
  ENSG00000286288_42 (sequence is synthesized)
ctgaaatgtcatcctaacttctaccctatccccagatgaatgggaaagagttttttctccagcccaatctcacgctgataactgccggcttcaagagccagacctccaggaaggcattag

SEQ ID NO: 875067 - DNA, 120 bp, Artificial Sequence
  ENSG00000286288_43 (sequence is synthesized)
atggaactatcaggcagattccccaggtatagctaggcaagattatataatttcctgcctagttgaagggtgtaaaaaggcagcttacaaagctgttaaagaactgttaaagaacaaagc

SEQ ID NO: 875068 - DNA, 120 bp, Artificial Sequence
  ENSG00000286288_44 (sequence is synthesized)
aacaaagcttaaagaaactacccaaagtaaacatgaaaaccccgcccagttcatggctggtttggcagcaaccgtgagatgctttacaacgctagaccctgaaaggtcagaaggccgtct

SEQ ID NO: 875069 - DNA, 80 bp, Artificial Sequence
  ENSG00000286288_45 (sequence is synthesized)
tttatcacccagtcagctcctgacattaaaaaaaacttcaaaaattagaatccggccctcaaaccccacaaaaggagagt

SEQ ID NO: 875070 - DNA, 120 bp, Artificial Sequence
  ENSG00000286288_46 (sequence is synthesized)
tgtgagagaaaccccagccacatctccaatacacaagaacttcaaaacacctaaatccacagtggtcaggcattccttcaggacctcctcccccaggatcttgctttaagtgccagaaat

SEQ ID NO: 875071 - DNA, 76 bp, Artificial Sequence
  ENSG00000286288_47 (sequence is synthesized)
ccccatctgtgtgggacttcactggaaatcggactgtccaactcaccaggcagccactcccagagcccctggaact

SEQ ID NO: 875072 - DNA, 120 bp, Artificial Sequence
  ENSG00000286288_48 (sequence is synthesized)
tattgacggccaggcttctaaacctctttaaaactccccaactctgatgccaacttgaagaacagtttttatgcacttcttttaagttatccctacctgcccagctcccttattaggttg

SEQ ID NO: 875073 - DNA, 77 bp, Artificial Sequence
  ENSG00000286288_49 (sequence is synthesized)
gcacttcttttaagttatccctacctgcccagctcccttattaggttgagacattttaactaaattatctccctttt

SEQ ID NO: 875074 - DNA, 65 bp, Artificial Sequence
  ENSG00000286288_50 (sequence is synthesized)
ccttcacatcctccccttgtatctccccatcttaatccaccattttgggacacctctactccctc

SEQ ID NO: 875075 - DNA, 89 bp, Artificial Sequence
  ENSG00000286288_51 (sequence is synthesized)
acctaatcacccttacctgatcaatgccagtatcccatcccacagcatgctttaaaaggattaaaccctggtatcactttcctgtccct

SEQ ID NO: 875076 - DNA, 89 bp, Artificial Sequence
  ENSG00000286288_52 (sequence is synthesized)
cagatactctcctatcctcaatacatccctccgcaacccattattctgttctggatctccaacatgctttctttactattcctttgtac

SEQ ID NO: 875077 - DNA, 120 bp, Artificial Sequence
  ENSG00000286288_53 (sequence is synthesized)
tctggatctccaacatgctttctttactattcctttgtacctttcagcccagcctctcttcactttcacttggattgaccctgacactcatcaggctcagcaaattacctgggctatact

SEQ ID NO: 875078 - DNA, 85 bp, Artificial Sequence
  ENSG00000286288_54 (sequence is synthesized)
ctgacactcatcaggctcagcaaattacctgggctatactactgcaaggcttcatggacagcccccattacttcagtcaagtcca

SEQ ID NO: 875079 - DNA, 90 bp, Artificial Sequence
  ENSG00000286288_55 (sequence is synthesized)
accactcatctttccgttccttaaaaacagccctagaagctgctctcacactagctctccttaactcatcccaacccttttcattacaca

SEQ ID NO: 875080 - DNA, 120 bp, Artificial Sequence
  ENSG00000286288_56 (sequence is synthesized)
ccaacccttttcattacacacagccgaagtacagggctgtgcggttgaaattcttacacaagagccaggaccacgccctgtagccttcctatccaaactacttgacctcactgttttaga

SEQ ID NO: 875081 - DNA, 90 bp, Artificial Sequence
  ENSG00000286288_57 (sequence is synthesized)
tactccatttctctatattttcttctttcctgttcttcaccctgatcacacttggtttattgatgtcagttccaccaggcctaatcgcca

SEQ ID NO: 875082 - DNA, 75 bp, Artificial Sequence
  ENSG00000286288_58 (sequence is synthesized)
atgttgctatagtatcttccacatctatcattgaggctcctgctctgccccctccactacctctcagcaagccaa

SEQ ID NO: 875083 - DNA, 71 bp, Artificial Sequence
  ENSG00000286288_59 (sequence is synthesized)
cttgcaaaaggagtacatgtcaatttatatgggcagaaagaggtttcctcactacgtaagggtcctccatc

SEQ ID NO: 875084 - DNA, 71 bp, Artificial Sequence
  ENSG00000286288_60 (sequence is synthesized)
tgccttccatatcctgcaccaccatgctattatatgggcagaaagaggtttcctcactacgccactttact

SEQ ID NO: 875085 - DNA, 120 bp, Artificial Sequence
  ENSG00000286288_61 (sequence is synthesized)
tcaaaaggcatcagatcccatcactcagggcaacacttatgccgataaggtagctaaagaagcagctagtgttccaacttcagtccttcacagccagtttttctcctcatcagtaactcc

SEQ ID NO: 875086 - DNA, 120 bp, Artificial Sequence
  ENSG00000286288_62 (sequence is synthesized)
tgtgacttccagaaaatgtcttaaaagggaaggtaaacaccttcctccaccagtcctccacactttctggaatttgagacatgatgactacatctcaagcagctcggaccatgtgataat

SEQ ID NO: 875087 - DNA, 120 bp, Artificial Sequence
  ENSG00000286289_0 (sequence is synthesized)
gaacaacaaaagaacaaactcaaacgaaactgcttaacaatcctacagtgcagacctggcaggaagaaaaagtggatgaggaagaccctttggacatcgtcaaaagaggcattgttagca

SEQ ID NO: 875088 - DNA, 120 bp, Artificial Sequence
  ENSG00000286289_1 (sequence is synthesized)
aatgacggggggccagtcctgaaagcctgtgaggctgtgagcaactctcccacctgctcttctctgtctgtcctactcctcatgacaatgactcttatcctggagggcctgcagtagcgt

SEQ ID NO: 875089 - DNA, 120 bp, Artificial Sequence
  ENSG00000286289_2 (sequence is synthesized)
ttgacacacgtacctcatttaattctcacaagagttctatgaaacaggctaggatttggcaaaccattgtcagctacctgtttttgtaaatatagttttattggaacataaccaccacaa

SEQ ID NO: 875090 - DNA, 120 bp, Artificial Sequence
  ENSG00000286289_3 (sequence is synthesized)
tttatttacatattgtctatagctgcttttactctacaatggcagagttgagtagttgtgacaaaagctctaggccctgaaaagtgcaaaatatttattttactatgtggccctttacag

SEQ ID NO: 875091 - DNA, 120 bp, Artificial Sequence
  ENSG00000286289_4 (sequence is synthesized)
caaaggtgtgttgacccctcagataaatgggacattgctcccactttacatatgaggcacagaaaagctaagcgcattgactgagatcatttgggttataaattatagtgtcagagatgt

SEQ ID NO: 875092 - DNA, 120 bp, Artificial Sequence
  ENSG00000286289_5 (sequence is synthesized)
ctcggacccagagacaactgttccctatgcttttctcctccctaccttatagcatctcctactctttcacattcatttgttcctactaaatgtgtcagccaaaaagaacacattcatttg

SEQ ID NO: 875093 - DNA, 120 bp, Artificial Sequence
  ENSG00000286289_6 (sequence is synthesized)
cactgaacaagacgtctcaggttgaccatcacacagaagtcaacaggaggttctggagacttgcagaaagtgatcatccagcatatcctctcctctcctctcctagcccctaaggactga

SEQ ID NO: 875094 - DNA, 120 bp, Artificial Sequence
  ENSG00000286289_7 (sequence is synthesized)
ttcgtagtctgcccagagtttataagagagacagtcatccaacatgaatagagatggcctgagcaggcatgggctctttgaaattcggagagatcagctcaaagatacactgggaagaac

SEQ ID NO: 875095 - DNA, 120 bp, Artificial Sequence
  ENSG00000286289_8 (sequence is synthesized)
caggttgccccaagcaaaaggcaacaactgcccttggttgagcaagattccttgggaagcttattggaggccccacctctaaggacaggcccacatttgccttgtctgccattcttccct

SEQ ID NO: 875096 - DNA, 120 bp, Artificial Sequence
  ENSG00000286289_9 (sequence is synthesized)
tactgatgtattctgaccctgtcttggcttgatttatctttgatgtctttgatgttgctcatgaccatgctgccttcttcctgggagttcccatctggtcctggtttctgcttctcttgc

SEQ ID NO: 875097 - DNA, 120 bp, Artificial Sequence
  ENSG00000286289_10 (sequence is synthesized)
cttagctcatactcaaaccctgtgggtaacagcccacgtgcaacagtggtctgcagctcctgagggctgttgaaaagattgcttcattcaatgccataaaaatatccaagaatacagcaa

SEQ ID NO: 875098 - DNA, 120 bp, Artificial Sequence
  ENSG00000286289_11 (sequence is synthesized)
ttgttatagaaattatggtaaatctgcacaatgaaatattatgcagccactaaaacggacatcaattcagatttctaaatgacacaatgtagcagagacagggccaggttcatgggtgtg

SEQ ID NO: 875099 - DNA, 120 bp, Artificial Sequence
  ENSG00000286289_12 (sequence is synthesized)
ggtcctacacagtcatacagggctccacacttacaagggccctacacttggtttaatgctccatggctgccaccttgaaattctgaatagttttataacaagagtcctccacatttacat

SEQ ID NO: 875100 - DNA, 120 bp, Artificial Sequence
  ENSG00000286289_13 (sequence is synthesized)
ttcacattgagcctataaattgttagctagtcctgagcagagatgactctgagtgcccattttctcctgtcttttagtaatagaacctcctccctttgcttcatacatacaccctgacta

SEQ ID NO: 875101 - DNA, 120 bp, Artificial Sequence
  ENSG00000286289_14 (sequence is synthesized)
gtgtttccacgctggaattccttcccagtatttcttgagaattttttatgtttctccaaatctcgaaagaaaaatcagtcaagaaattgggaaaaagtattgtaattatcctgcaggaat

SEQ ID NO: 875102 - DNA, 120 bp, Artificial Sequence
  ENSG00000286289_15 (sequence is synthesized)
gatcaacataaagacatcactggtttgaatccatcaatgtcaaatgaaaagcaagagcaggaaaggctggcaggtggaagagcatatagcacataggagagcacataggtcaagagctga

SEQ ID NO: 875103 - DNA, 120 bp, Artificial Sequence
  ENSG00000286289_16 (sequence is synthesized)
tcagtcaatcttgcttgtagccattgtcctgttctaagtgtgtgttcttggccctgactgatgctaatggcaagtcattcttggaaataaaataagcagtattaggtttatatgtatgta

SEQ ID NO: 875104 - DNA, 120 bp, Artificial Sequence
  ENSG00000286289_17 (sequence is synthesized)
tactttattcaaatcctgctagtgatgttctaggaaataacaaatttgggaagcaaaatacgcccttaattggcaatttcaatgtgtgattctgtgtagtgctttaaccttgctaggaga

SEQ ID NO: 875105 - DNA, 120 bp, Artificial Sequence
  ENSG00000286289_18 (sequence is synthesized)
tctgaatgtcacattctttgaatattacccaaaaatgttcactggtattttctaatgtttgattttttttttatctcaggctatagttgtttataaatttgctaaatgtaatatttctta

SEQ ID NO: 875106 - DNA, 120 bp, Artificial Sequence
  ENSG00000286289_19 (sequence is synthesized)
tttattaaaccaatttcttttagatatccacagtaatgactaaagagtataaaaattgctggaagtcttttattttcttcttgttacttagttttcattttgtaattataaacttaactc

SEQ ID NO: 875107 - DNA, 120 bp, Artificial Sequence
  ENSG00000286289_20 (sequence is synthesized)
tgcgatccagctagacatggaagaggataaggaaaatatggaacccaaaggactgtgcaaagattataggatgctgtgagcaaatggggtggaagcatgctttcctgagctatagaagga

SEQ ID NO: 875108 - DNA, 120 bp, Artificial Sequence
  ENSG00000286289_21 (sequence is synthesized)
acgatctggtggttcagataaaacaatcaaatttattagagttgtccacagtcagcagctgtgatcttcttgctggtcttaccattcctggacccagagcgttccagggcttccacaata

SEQ ID NO: 875109 - DNA, 120 bp, Artificial Sequence
  ENSG00000286289_22 (sequence is synthesized)
ctcatgccatctttcaccttgccaaagaccacatgctgtcatccatcctctgtcttggcagtacagaagaaaaactgggaaccatttgtggtgggtccagcatttgccgtggacaagacg

SEQ ID NO: 875110 - DNA, 120 bp, Artificial Sequence
  ENSG00000286289_23 (sequence is synthesized)
ccaggagctgtatgcttaggatgaagttctcatcatcaaattccttgctgtagagggacttgccaccagtgccattatggtgtgtgaagtcaccaccctgacacacaccccggaataatt

SEQ ID NO: 875111 - DNA, 120 bp, Artificial Sequence
  ENSG00000286289_24 (sequence is synthesized)
ctgtaaaagcagggacatttatcaccaaatactttctctccagtgttcagagcacaaaaattttcttccatctttagaactttgtctgcaaatagcttgaaggagatgcagcccaaggac

SEQ ID NO: 875112 - DNA, 120 bp, Artificial Sequence
  ENSG00000286289_25 (sequence is synthesized)
tcactatcaattgcaatgttgaagaacacagtggggttggccatggctggtggcagggagttctgggcagcagcgatgtctgcaaatggaagtcttttcagaataacacgagtttatctt

SEQ ID NO: 875113 - DNA, 120 bp, Artificial Sequence
  ENSG00000286289_26 (sequence is synthesized)
tataacaaacctatacatgtatccctgaacctaaaataaaagttttttttttaaaaggataacttattatttcagaaatttctaagaattcccaggaattccaacttctcatttgtatat

SEQ ID NO: 875114 - DNA, 120 bp, Artificial Sequence
  ENSG00000286289_27 (sequence is synthesized)
cctgatgaatatccactgggtatttggaaatgccaatttctgacatatgattgcttagctagagactgcatttccagcctcctttgcaggtaactatagccaggttctaagttttggcca

SEQ ID NO: 875115 - DNA, 120 bp, Artificial Sequence
  ENSG00000286289_28 (sequence is synthesized)
atgagatgttagcagaagtgaaatgtgtgccttctggattttatttttatgagaaatttgcctgtcttctattctttttccctcttctctctggctcggaaatgatgaaaagtacaggac

SEQ ID NO: 875116 - DNA, 120 bp, Artificial Sequence
  ENSG00000286289_29 (sequence is synthesized)
tcactgggaccaaaattcagaaattacatgttaaggaagagagggctgctcctctagcctgttctccttatgaccttgtggaacggaattgcctacctgccctggactatcctaagattg

SEQ ID NO: 875117 - DNA, 80 bp, Artificial Sequence
  ENSG00000271614_0 (sequence is synthesized)
agcggcacacagggcgcgccgcgctcgctcggcacgggcagctcagccggcctcacgccgccgtccgcaacagcagccgc

SEQ ID NO: 875118 - DNA, 120 bp, Artificial Sequence
  ENSG00000271614_1 (sequence is synthesized)
gggcccgcgggcaccggagagcggacggccgagcacgagggggctgcgcgcagctccgggcagggaccccgtctgcaccgggtggcctgcaagattgccggggtaggcagggggaggaga

SEQ ID NO: 875119 - DNA, 120 bp, Artificial Sequence
  ENSG00000271614_2 (sequence is synthesized)
agggggaggagaacgctcacccgttccggtctggcgctcccttttctccacacccacacgcctcccgctccacgctggcggcgcagctgctcccgctgccacagccgccaccgccgccga

SEQ ID NO: 875120 - DNA, 120 bp, Artificial Sequence
  ENSG00000271614_3 (sequence is synthesized)
cttggctgagcgcggtcacgtgacgcgatccgcggggagcctgggggcgggcgagtgcgcgcgcgcgcgcgcggaggaaccgcggctcggaccgggactgggagctgagcggcactggga

SEQ ID NO: 875121 - DNA, 120 bp, Artificial Sequence
  ENSG00000271614_4 (sequence is synthesized)
actgggagctgagcggcactgggagggcgtttaaggggaggacccggcgagcgcgccctcggctggcgagcgcgcgcctggcgattagaacttgccgcgcggtcgggaaagggtggccgg

SEQ ID NO: 875122 - DNA, 120 bp, Artificial Sequence
  ENSG00000271614_5 (sequence is synthesized)
agtgaggggcggaggtggggacttgcgcctccgcacgcccctccctttcttccttcccctgagcgccttggcttgccgctgcccccgccccctccagcgcgccccttccctcctgccgca

SEQ ID NO: 875123 - DNA, 120 bp, Artificial Sequence
  ENSG00000271614_6 (sequence is synthesized)
gcctgcgattggctgagaggctctgacgtccgtgtttccatgacgtgttggtgcaggagggagcggcgggggaggagggggtggccaggcgcgcggggaggtgactccgtcagtcacagc

SEQ ID NO: 875124 - DNA, 120 bp, Artificial Sequence
  ENSG00000271614_7 (sequence is synthesized)
tgctgtttcggcgcggggccgggccgctgccgcgacgtgtggaggcaggagagcgatgattgccgcaggagaagtgcgggcgcccttcacctggggcccctcccgaaccgcccccgggcc

SEQ ID NO: 875125 - DNA, 120 bp, Artificial Sequence
  ENSG00000271614_8 (sequence is synthesized)
catgcccctccagggcccaggagcgagccagcgggagggcgagggcgagcgctcctggcgaggacagattaaggcgaacccccagtcagcggacatttgagcggctcctcgccgcgtctc

SEQ ID NO: 875126 - DNA, 120 bp, Artificial Sequence
  ENSG00000271614_9 (sequence is synthesized)
tgcccccactccaaaccggactcgacgcctgtcccgggccgtgacgcacgcaccggaggaaaaagtgcttctcggctcgctccctctttggggaagagagctcactccccatgcgggcgc

SEQ ID NO: 875127 - DNA, 120 bp, Artificial Sequence
  ENSG00000271614_10 (sequence is synthesized)
gggacactccatctctgttcctgccggtcgggtccgcaaacaccggggatcccagctgcggcgcccaaagggttaacgcaggcgttcggccagtgcaaaccggcctcgcaggatccgcgc

SEQ ID NO: 875128 - DNA, 120 bp, Artificial Sequence
  ENSG00000271614_11 (sequence is synthesized)
ttaaaatccgggtgttttcattttgggtttgtttcttctactatgccaagctggtggctctcttttaattctcttgtaacatctcaaccctgcacccatctttcctgaggggaaaaggaa

SEQ ID NO: 875129 - DNA, 120 bp, Artificial Sequence
  ENSG00000271614_12 (sequence is synthesized)
acgggataacttgcggtatttcgatgctcaaaggtaaccggcggctctgctccaaccttcaagagattttgcaagttgaaaaaaaaaaaaaaaccatccttcgtaacatctacttaaaaa

SEQ ID NO: 875130 - DNA, 120 bp, Artificial Sequence
  ENSG00000271614_13 (sequence is synthesized)
aaaaaaagcaagttttccttcttgtacacgcatatacacagtaaagatgtgtatcttacctaagataccgcgcttcatcttcatctaatctttatttgaactcaccgtcgccactggccc

SEQ ID NO: 875131 - DNA, 120 bp, Artificial Sequence
  ENSG00000271614_14 (sequence is synthesized)
agagaccttgtcagtgttattttcagtatcagttaatcagaacaaaaagataagttctgcaatcttctttctcttaattccagaactggaaaattaatatttatatagcctcctcaaaag

SEQ ID NO: 875132 - DNA, 120 bp, Artificial Sequence
  ENSG00000271614_15 (sequence is synthesized)
cacgatctgatgatagcatttgttttaaaatattttaaaagattagacacaaaatgtgtaaaagacgtttaaaagtgaataaatataaatcaatgctgttgcaaataatttttttatcag

SEQ ID NO: 875133 - DNA, 120 bp, Artificial Sequence
  ENSG00000271614_16 (sequence is synthesized)
tttatgtatctcactaggcttgacattaccagccttctgagctgtgcccttgatgtgtaagataaacgaacattgaacagaatgatagcatttttcctctcttcagtcactgatggagaa

SEQ ID NO: 875134 - DNA, 120 bp, Artificial Sequence
  ENSG00000271614_17 (sequence is synthesized)
ttggttaatgtggtacaataaatagcccttcctgacactatttcaaatctttttaacagaagaataacctaaatttcacctaataaatttcaatattatttccccctaaaatatctttca

SEQ ID NO: 875135 - DNA, 120 bp, Artificial Sequence
  ENSG00000271614_18 (sequence is synthesized)
aaacgactcagagacatttaagaatcactggcttttttccaacttttcctccaaggaagttacaatacaatgttgaattatgtattctactttaatcaagaatttgacattaaagtaata

SEQ ID NO: 875136 - DNA, 120 bp, Artificial Sequence
  ENSG00000271614_19 (sequence is synthesized)
tgtgaatcattgctatagtacactagcaaaatgggtaataaactagaatctgttcactttgtgggtttgttccagttccagattataaaatgaatgctcttaaagtgttgtggtcatgaa

SEQ ID NO: 875137 - DNA, 120 bp, Artificial Sequence
  ENSG00000271614_20 (sequence is synthesized)
acaattattgagcatctttatttaagaacacgattcaattaagttttcatttatatcgataaatctataaatgaaacatacggaatatatatattcatgtatatccataaatgaaaacgt

SEQ ID NO: 875138 - DNA, 120 bp, Artificial Sequence
  ENSG00000271614_21 (sequence is synthesized)
gtgtgtgtgtgtatcccggaacatatttgtatgcattttaatgaaatgtgagtcatatgcaatgacaaacttttactgtcatagtcaagaaaattgtactgtagtttggtttttatattt

SEQ ID NO: 875139 - DNA, 120 bp, Artificial Sequence
  ENSG00000271614_22 (sequence is synthesized)
ttattcttcaaataggaaataaagggtgaaagcaatatagaaataactgttcacattacattaagaaattcaatttttttctcccacaggcttagtactaaagcatccctcacacatatt

SEQ ID NO: 875140 - DNA, 120 bp, Artificial Sequence
  ENSG00000271614_23 (sequence is synthesized)
tttcaatgtaaaaatcaagaaaatattgcattgcttactgtttccttgaaaaaaaattgaactatctgaaatcaaagatgccactgtatgtaacagtattctcttaatcttagacctaac

SEQ ID NO: 875141 - DNA, 120 bp, Artificial Sequence
  ENSG00000271614_24 (sequence is synthesized)
ttatcccatgtgtttaactgatctagagatgtatctttgcataaggaacaatataataatacaatttactggggaaataatattttaaagttcttttaatatgcattttagctacaatgc

SEQ ID NO: 875142 - DNA, 85 bp, Artificial Sequence
  ENSG00000271614_25 (sequence is synthesized)
tattttaaagttcttttaatatgcattttagctacaatgcaaaacttataaaagtatttaaatccagtcagggagactgaggcgg

SEQ ID NO: 875143 - DNA, 120 bp, Artificial Sequence
  ENSG00000271614_26 (sequence is synthesized)
gcactccagcctggcgacagagtgagtctcagtctcaaaaacaaaacgaaacaaaacaaaacaaaaaagtatttaaaccccatgacaagttaccatatgagatgttaacattgaagagtg

SEQ ID NO: 875144 - DNA, 120 bp, Artificial Sequence
  ENSG00000271614_27 (sequence is synthesized)
ccatatgagatgttaacattgaagagtggctgcagattcaaaataatatatttggtatttttaaggtatgctctttttcatagagtaaatctaaacaactgagatatttgctgaaaagtt

SEQ ID NO: 875145 - DNA, 120 bp, Artificial Sequence
  ENSG00000271614_28 (sequence is synthesized)
gatcgattcaagagatataacacatgaagacagttttctaaaatcctcaatgtaattaagtgtaaagagaaacaaagaactttattctgtcacatgcatctagcaataggacaaaataaa

SEQ ID NO: 875146 - DNA, 120 bp, Artificial Sequence
  ENSG00000286284_0 (sequence is synthesized)
ctgtgtggaaactgggatttgaactgggaaggtgggaagcaatctagcaggggcctctgggcttgcggagagtccctgttttcccttttttctttttcacccaataaaaccttgcttttc

SEQ ID NO: 875147 - DNA, 120 bp, Artificial Sequence
  ENSG00000286284_1 (sequence is synthesized)
tcacccctcaaaccatctgtgaacccagactttctaggccatggaacaaggaccccatctttatctgaactaaggaaaagtcctgcaccattttggcgcgcaacgtgggggttcgagaag

SEQ ID NO: 875148 - DNA, 120 bp, Artificial Sequence
  ENSG00000286284_2 (sequence is synthesized)
cggacagaccagaaagcagcagcttcccgccgcctgccgccctcacctctgtgccaggacctggacgcatggcccaagtgtcccacacacaggcggctggctggttcccagccacatacc

SEQ ID NO: 875149 - DNA, 120 bp, Artificial Sequence
  ENSG00000286284_3 (sequence is synthesized)
tccgcagccttctgcttccctggccaaggattttaactctattggacaataattaagcttaaacttttctcccagatggaggaacagttgcataagaataatcttccccaggcattttta

SEQ ID NO: 875150 - DNA, 120 bp, Artificial Sequence
  ENSG00000286284_4 (sequence is synthesized)
aactgttttttcatccccttctctaccccatcagcagttaacttttaaagttcttttttttttagaagacatttttctaagccaggccccccaactatctctgtttatattctctgcaaa

SEQ ID NO: 875151 - DNA, 120 bp, Artificial Sequence
  ENSG00000286284_5 (sequence is synthesized)
gctttgtttagcaatcctgctttagggaataagttcctttctggtttgatatctacatgttttcctagccctgtctcttatagaaccccacctgggaactgggttttttcctgcctgtct

SEQ ID NO: 875152 - DNA, 120 bp, Artificial Sequence
  ENSG00000286284_6 (sequence is synthesized)
gtgtctgtgtaatgtctgtaaaaacagctctaattaatttggcttaaagaaagacaagcgcttggatcgaatattttttgaagggaagataaaagctgtggtacctttcagttcatgtga

SEQ ID NO: 875153 - DNA, 120 bp, Artificial Sequence
  ENSG00000286284_7 (sequence is synthesized)
ctttaatctttgagaaataaaaagagccttaaagactattggtaaaatgcaggtatcattacaatgtaaataggtgactaaattatacaggcagttgcaagatttgctaaatgttttaag

SEQ ID NO: 875154 - DNA, 120 bp, Artificial Sequence
  ENSG00000286284_8 (sequence is synthesized)
gttataaactgctttctgcgtcttgagaactatttgacttgccggcttcacagttgtcaaggcctggggatatatggaactgtccacacccttaattatgctgaaaaatgtcaaaccttg

SEQ ID NO: 875155 - DNA, 120 bp, Artificial Sequence
  ENSG00000286284_9 (sequence is synthesized)
gctacacttagcacacaattaaagcaacttaccaggtttcaccttaaagttaaaaatcgctaggagttattattatgacatgtaattgaaactaccggaaataaatgatgttcaatcttc

SEQ ID NO: 875156 - DNA, 120 bp, Artificial Sequence
  ENSG00000286285_0 (sequence is synthesized)
aggaaaaaatggacactaagagaaagaagaaagcagaggcaagaggctccaggcttcactaattcctagcgagtagatttaatataagaacatcactgttcatttataggtttttttttc

SEQ ID NO: 875157 - DNA, 120 bp, Artificial Sequence
  ENSG00000286285_1 (sequence is synthesized)
ccaagacaaagaatatctcttgatactattaaatatagatgtctggactgaattgagcttacacgacaattgcagtcaagattctgcaactcagaacgggcaaaccagtctgaatcaatt

SEQ ID NO: 875158 - DNA, 120 bp, Artificial Sequence
  ENSG00000286285_2 (sequence is synthesized)
taccctgtgatcctgtctgctgggaagcattgaaatagtaaggaagtctgatgtgcctgcaggttaatccagctgtctgggtcacctaagcatcaagggtggaaagggagactggaagtg

SEQ ID NO: 875159 - DNA, 120 bp, Artificial Sequence
  ENSG00000286285_3 (sequence is synthesized)
caagtctgaaaggagaaaaaagaaggtgaaaccagtctgcaggagaaatgactgggaatttagaaggagtgggcacccacaagagaagagaagacacgaagtgagaaaaggctgctgctt

SEQ ID NO: 875160 - DNA, 120 bp, Artificial Sequence
  ENSG00000286285_4 (sequence is synthesized)
gccaaggcacttttaagaacgggacatcttatcacttttcagttgtttgagcttcttgctccccagactttcagctaaaattgtggctgttttgttggcggaaatcagtgaaaagaaaat

SEQ ID NO: 875161 - DNA, 120 bp, Artificial Sequence
  ENSG00000286285_5 (sequence is synthesized)
gagttctgtgtctagttcagtttacagcagaggcaagacgatgcctgaagcaggtggcaaggagtgaaaggggagtgtgcatggaagcagcaggtcagagccagagtttatcatgaaagt

SEQ ID NO: 875162 - DNA, 120 bp, Artificial Sequence
  ENSG00000286285_6 (sequence is synthesized)
ctgagccctcgcaaacatggttcatgcacaacccataaaatttcatcaaactctcagtctcaaaaatttgtgtaggaagagcctgacatgaatgctgcaaatacatgattattattccta

SEQ ID NO: 875163 - DNA, 120 bp, Artificial Sequence
  ENSG00000286285_7 (sequence is synthesized)
tgctgcaaatacatgattattattcctagacatatctaagggcatctaaaattataaaatttatagtgatattgcttaaattacatttttgaatatctcactcatacatgtattacctat

SEQ ID NO: 875164 - DNA, 120 bp, Artificial Sequence
  ENSG00000286285_8 (sequence is synthesized)
tgattttttttaaattttattcttttgttttaagtttagatgtggatgcattttctaaaaactacaagattacccaaacagaaccgattgaatttcaaggttaggaagtttttctaataa

SEQ ID NO: 875165 - DNA, 120 bp, Artificial Sequence
  ENSG00000286285_9 (sequence is synthesized)
taatttatggtccaagtataatgtgatgaagtgtgcttgtaggtaccaacctgagactatatttggcaagagttgaataaaatatgggggaaatgatttctagccttgttagaaatgccc

SEQ ID NO: 875166 - DNA, 120 bp, Artificial Sequence
  ENSG00000286285_10 (sequence is synthesized)
tcagaatgcattgttatttctaaagaatgctgcattgtatatatgcagatatttttcagccaaatcgctgaatttgtagagatttcatatcacataagatttgtttccaatgcattttct

SEQ ID NO: 875167 - DNA, 120 bp, Artificial Sequence
  ENSG00000286285_11 (sequence is synthesized)
tctgaaactataagaagactagcttctctcttaatttctaagaaaaatgttataaacctttattatgatggtacaatttatgaaacaatgtaaattttacattttcacttttgagagtta

SEQ ID NO: 875168 - DNA, 120 bp, Artificial Sequence
  ENSG00000286285_12 (sequence is synthesized)
tttttccccaagcctctgccttttttgagtatttgcaaagctctgcaaatgacaggcgcatccacaatgcaaagaataatcttcctttggggctgttcctggggtagtgattagtagcgt

SEQ ID NO: 875169 - DNA, 120 bp, Artificial Sequence
  ENSG00000286285_13 (sequence is synthesized)
cttcactgaatatttaacttcctcaaaactgcttatctgtgctgtggatcagtgcaagatctgggtgagctgttgctactttacataattaagtttctcttgccaaaaaaagagaaagta

SEQ ID NO: 875170 - DNA, 120 bp, Artificial Sequence
  ENSG00000286285_14 (sequence is synthesized)
acaaaatatgaagcaaaagaagccgaaagttggacttttaaaacattctcccttcatgttattttctcattgaaaataacctgaaacaaaagcaaaatatttgagatttaggagggagtt

SEQ ID NO: 875171 - DNA, 120 bp, Artificial Sequence
  ENSG00000286285_15 (sequence is synthesized)
tatgcagatcagtcaggttgacagctcacattttcttgcaaaactcttaggaattttcctccgcaaatccctccgcagtcagtgataagtactaaatgccacaaagaaaacaatttccca

SEQ ID NO: 875172 - DNA, 120 bp, Artificial Sequence
  ENSG00000286285_16 (sequence is synthesized)
tactgaaatgatagataattcaagcttctcatgtcactttaaattagtaaaaaatcactgcacaggatttgtgcttaatcccattttttatatgtagaaaataggccccagaattaggtt

SEQ ID NO: 875173 - DNA, 120 bp, Artificial Sequence
  ENSG00000286285_17 (sequence is synthesized)
gacgtgtacttttaatgtgtagataggacatctactcactttctaggcatgtgtggatgaaaaagactttgcttgcttagttgcacgtcattcttagttccttctcttttgagtgtgcta

SEQ ID NO: 875174 - DNA, 120 bp, Artificial Sequence
  ENSG00000286285_18 (sequence is synthesized)
gcgtacccaatggaatcccctcccctgtatttattgaacgctataatgtatgggggtgtcttttcctggttagtgtaataggaaaaattgcatttgcttatctattgcaaatgaaaatca

SEQ ID NO: 875175 - DNA, 120 bp, Artificial Sequence
  ENSG00000286285_19 (sequence is synthesized)
tctggggaatataaaaagcattttcaattctgctaccattatttcagaagcaatcaaatgcagaggaatgaaagtcaaacacggagaaaaatgctgatggattgggcaatgtgcatggct

SEQ ID NO: 875176 - DNA, 120 bp, Artificial Sequence
  ENSG00000286285_20 (sequence is synthesized)
ctctgggaccatcattatttcagtattcaagaggaaaatgcacatttgaaagatggtaaattccatcacatacaatcaatcattcatctcctctagcaacaataattgtggaggagatag

SEQ ID NO: 875177 - DNA, 120 bp, Artificial Sequence
  ENSG00000286285_21 (sequence is synthesized)
tgttcagacattaactaggtagtcatccctgcttgtttgttagtttgtttcaaggcatactaaatcttatgcaacgttatgtggacatctcagatgattttcagatattggtacttagta

SEQ ID NO: 875178 - DNA, 120 bp, Artificial Sequence
  ENSG00000286285_22 (sequence is synthesized)
ccaatcacctgcaaataatgaggtcaaagtaaacactgcaacctcaaagggcaagatgcttagcattgtctttcatctaaaacattttgtcctttcattccagattttaaaaataggtta

SEQ ID NO: 875179 - DNA, 120 bp, Artificial Sequence
  ENSG00000286285_23 (sequence is synthesized)
tctgcctgcattttatgcatttttctatctttataatctgaaggtgattttattaatacagtaaatcttggtcaagtgatactttaggaagatgctttttctgggtaaactaaaagcctg

SEQ ID NO: 875180 - DNA, 120 bp, Artificial Sequence
  ENSG00000286285_24 (sequence is synthesized)
acgtggctcttcctgatgttcttaaatattttattagcaatgtctctcctcaccccttgcctattcatagtctctttcagtttaatgatataaagcaggtggtagggttgtcaaaactgg

SEQ ID NO: 875181 - DNA, 120 bp, Artificial Sequence
  ENSG00000286285_25 (sequence is synthesized)
gtttccattagaaacaatctctgggaatgtggtgtattttctcccttatttttctcattattagatatctcaggctcaaaggcccatatggcagtttggagaaagatatgtcctgttcaa

SEQ ID NO: 875182 - DNA, 120 bp, Artificial Sequence
  ENSG00000286285_26 (sequence is synthesized)
aaccaatgttctgagagtttgagagccgtgaaatcagatatcatagtttttacactttttcaaagctttcaattgtgaattctggatttctctttttctttcgaactctgaaaaaagccc

SEQ ID NO: 875183 - DNA, 120 bp, Artificial Sequence
  ENSG00000286285_27 (sequence is synthesized)
aatctctaacagcacctcccctcccacccccttctggtactggctgtagcagtacttaggaagggaagagtgtcttacaggaggtggagacacatttatacaccagtcttcatgcttggg

SEQ ID NO: 875184 - DNA, 120 bp, Artificial Sequence
  ENSG00000286285_28 (sequence is synthesized)
aaaaagcgatttagtcactgttaacttctttaattattgatggttcagaaaatgttatctttcttatcttttatttgtaacacttttccctaaataaaagtgaggctggatattcaaatt

SEQ ID NO: 875185 - DNA, 120 bp, Artificial Sequence
  ENSG00000286285_29 (sequence is synthesized)
attatttagtgcaagaaactaaaaatagctttccctctttttagattttttttgacaacagagatgatacattatatgtgtatattttaccttaataaaaagacttaaaaaaaaagaaaa

SEQ ID NO: 875186 - DNA, 120 bp, Artificial Sequence
  ENSG00000286285_30 (sequence is synthesized)
ttaaagagaaaaatagaaagaaaggtaggaaaggcatagaaggggatatgacactttagaatctcctagcttagaatgtgacagaaggagagtgttagtaaaactgaggaggctgggtgc

SEQ ID NO: 875187 - DNA, 89 bp, Artificial Sequence
  ENSG00000286285_31 (sequence is synthesized)
agagtgttagtaaaactgaggatagcaatttgggaggacgaggtgggctgatcacttgaggtgaggagtttaagaccagcctggctaac

SEQ ID NO: 875188 - DNA, 120 bp, Artificial Sequence
  ENSG00000286285_32 (sequence is synthesized)
gagtagatttaatataagaacatcactgttcatttataggttttttttgtgtgtaattatgctaatgcatgtacagtaaccttttaaatttcagtttcctaatgttggttgttatgctca

SEQ ID NO: 875189 - DNA, 120 bp, Artificial Sequence
  ENSG00000286286_0 (sequence is synthesized)
gctccctcccgagacgaaatcagaggaaaacgcctctagtttctaagaagcacacagggagccacttctttaccgctagctcctgcaggatctgtgggatcctgcaggtgctggtttgcc

SEQ ID NO: 875190 - DNA, 120 bp, Artificial Sequence
  ENSG00000286286_1 (sequence is synthesized)
tcctgagccctgtcctaaggacactctgcacatcgcctcctggcagaatgctctgttgcactaaatgcaccaactctggaggtccacaatggtattgcaccatgagagaagaatatcgga

SEQ ID NO: 875191 - DNA, 120 bp, Artificial Sequence
  ENSG00000286286_2 (sequence is synthesized)
gcaaagctgggaaatggacacaccagggggagcgaatgtaatgttacaatccgagaaaattagaaaggagaagaaaaagcaaatcccaatcctaaaccatcttgagaacatttgctagtt

SEQ ID NO: 875192 - DNA, 120 bp, Artificial Sequence
  ENSG00000286286_3 (sequence is synthesized)
tattcctttaccccatggcaacagttacataaagtgattatgtccttgctttaaaaaagtgctattcctcttctttcaaaattatatttaaacttcaatatttaccttaatagttcactt

SEQ ID NO: 875193 - DNA, 120 bp, Artificial Sequence
  ENSG00000286286_4 (sequence is synthesized)
cacatccctgcaacacaatttaaaaaacaaaagaaaaataaatttcttgcagaagtaaaaacacaacatattccatttatttcccacacactaaaatcttgtcctctctcagtagaaaca

SEQ ID NO: 875194 - DNA, 120 bp, Artificial Sequence
  ENSG00000286286_5 (sequence is synthesized)
acaagcaatatttttctgtgtaaaagggagtggagagttttccagtcttctctgtttctccccagacagatgggctttcacattcaagagacactggagctgccataaccttgagtggac

SEQ ID NO: 875195 - DNA, 120 bp, Artificial Sequence
  ENSG00000286286_6 (sequence is synthesized)
atgagcttggccagattgcactgtccaaatgccaggacccagggccccggggaggtctctggtgcatgcggcagtgctcttggaggatcttgatcactccagcgcattccttgcagcaat

SEQ ID NO: 875196 - DNA, 120 bp, Artificial Sequence
  ENSG00000286286_7 (sequence is synthesized)
ctgcacttggaacagcgtttgatatggaaggaaacactagtataatatcaagttgtgtataattgcaaaacttgctgtctcggatgtgaaataaattcggctaatttgttggtaggagct

SEQ ID NO: 875197 - DNA, 120 bp, Artificial Sequence
  ENSG00000286286_8 (sequence is synthesized)
atcatagtatttttttggtatcaatgtcactggagactatatccctgaataagtgccaggcactggctctgaactaactaaatgctttgcatgtgttatttcattaaatcctcacaataa

SEQ ID NO: 875198 - DNA, 120 bp, Artificial Sequence
  ENSG00000286280_0 (sequence is synthesized)
agtgccaacgacctcacagacacaggttgtggatagcagcagacatggaggtggaggctgggcggccagtgatgctgtgagtcagttctgcaggctgtacgggaagcacggcaccagtat

SEQ ID NO: 875199 - DNA, 120 bp, Artificial Sequence
  ENSG00000286280_1 (sequence is synthesized)
ctgcttctggtgaggactcaggagcttaaaatcatggtggaagcagggagagcaagcatgtcacaaggtgagagaggaagcaagagagaagtggagaggtcccagactctttctaacaac

SEQ ID NO: 875200 - DNA, 120 bp, Artificial Sequence
  ENSG00000286280_2 (sequence is synthesized)
cagatctcacatgaattccttactgctgggagggcagcaaactatgcatgaatgatccatcccatgacccaaacacctcccagtaggccccaccttcaacattgggaatcacatttcaac

SEQ ID NO: 875201 - DNA, 120 bp, Artificial Sequence
  ENSG00000286280_3 (sequence is synthesized)
tggaggggacaaacatccaaactatatcagatgggaaccgtcagggcagttgagcaaagacgtgacaggatttggcttccattatgaaagcattgctagggacactgggtggagaattag

SEQ ID NO: 875202 - DNA, 120 bp, Artificial Sequence
  ENSG00000286280_4 (sequence is synthesized)
agaattagaccacagaggggtcagaaagcaggaggaaaatcaggaactccccaccccccgccatattcagatgatgattctcagctcacaaatgtgcctccaaaatctgatggcaccatg

SEQ ID NO: 875203 - DNA, 120 bp, Artificial Sequence
  ENSG00000286280_5 (sequence is synthesized)
accctctcctggatcctcgggtgacttcgctctgcctttaaatggaacatatacacgggcagccacgagatcctgcacgttctgcaccagcctccctctgcattgccttgctaccatgga

SEQ ID NO: 875204 - DNA, 120 bp, Artificial Sequence
  ENSG00000286280_6 (sequence is synthesized)
tttgccttctgttctctctctctcttacttggtgattccacccgagaccgtgtttctggtacttacctggcccgtgtgcatttccctgatgcctgcgatgttctcctccacttctttatc

SEQ ID NO: 875205 - DNA, 120 bp, Artificial Sequence
  ENSG00000286280_7 (sequence is synthesized)
tcttcaaccttctgtttctcagggaagccactcctgcctctcgcagaccagcctgggtagggcttcgtacagcctagggttccccccctactttggtcatactgctcacttttgggagta

SEQ ID NO: 875206 - DNA, 120 bp, Artificial Sequence
  ENSG00000286280_8 (sequence is synthesized)
cctgctctttttggtctctttctttgggctccagtcaccaaggccaggtcaacttctctcttgttcacccgtcagcacttaagccaagtgcacaatcccaaaaacctgatggcaccacga

SEQ ID NO: 875207 - DNA, 120 bp, Artificial Sequence
  ENSG00000286280_9 (sequence is synthesized)
ccgtccggaatatctggacccttgacaaggaatactttgtgaggtgaacagaatacttgccaacatcacacagctactaagcgggcagatcaaggatcaaactcctgcttccaacttctt

SEQ ID NO: 875208 - DNA, 120 bp, Artificial Sequence
  ENSG00000286280_10 (sequence is synthesized)
cctggcccctggaccttaactcaaggctcagtttagcctcagctggtgacagctggtgagtaagacattcagtttttctgggtctcggttttcccaactattaaatgacagggttggatg

SEQ ID NO: 875209 - DNA, 120 bp, Artificial Sequence
  ENSG00000286280_11 (sequence is synthesized)
ctgagttcatttccagggctccaggatctgcaaaggctcccccagtccatctgaccacaagaattacccaggcctggggacacttgtaagaatactcacctgaacctgcagaatcacagc

SEQ ID NO: 875210 - DNA, 120 bp, Artificial Sequence
  ENSG00000286280_12 (sequence is synthesized)
tccagaagatgaacctgggattctcattctgtttatttgtttgtttattcaagggtcccaggtgaatcttatcaccaaataagttttggaaatacatttctaagggactccttcccaaag

SEQ ID NO: 875211 - DNA, 120 bp, Artificial Sequence
  ENSG00000286280_13 (sequence is synthesized)
gagcttcccagaacagaaaggtcaaagaggaggcaaaaacatgattgtagtggctatttcagcacagcaacagttccttctcaaatgtctcctctctattataaaaagaaactttgcatc

SEQ ID NO: 875212 - DNA, 120 bp, Artificial Sequence
  ENSG00000286281_0 (sequence is synthesized)
ggtggaaagggagagagatagagagctagagagagaggagagaaagagagaccgatccacggaccctattaacagggtgaaatctgcctaaactaggaagccagaggagtaagaccctga

SEQ ID NO: 875213 - DNA, 120 bp, Artificial Sequence
  ENSG00000286281_1 (sequence is synthesized)
tggaaaccacgcttgcctgtcggtcctgattttgccccagtccttcaatacgcctctcacggatctgtacgctaataattgatcctaaagaggcaggcagacaccccgacagcgacacct

SEQ ID NO: 875214 - DNA, 120 bp, Artificial Sequence
  ENSG00000286281_2 (sequence is synthesized)
cgtctctcttctgggcgtccggctgagcttgcctcactgcagaagcaaccgatagcttccctttgcgctggtggaagacacaagccagcagcccttcggaggggcctccccgcacgcgcc

SEQ ID NO: 875215 - DNA, 120 bp, Artificial Sequence
  ENSG00000286281_3 (sequence is synthesized)
tcttgggatcctgacttgcttaggaagaggagggcacggggagcctcctgctctgcagctgtccccaggatgcccttaattcccgggacaggagagataagctcgtctgacctcagttga

SEQ ID NO: 875216 - DNA, 120 bp, Artificial Sequence
  ENSG00000286281_4 (sequence is synthesized)
cctcgccgcaggcgccaggcgtcctcatttactgcgaggcattggggagtctacttttctctctgctccctgggatttttttccttacgtcacttttttccttgttggcttgtagctggt

SEQ ID NO: 875217 - DNA, 120 bp, Artificial Sequence
  ENSG00000286281_5 (sequence is synthesized)
ctgatgtccccttactgctatctaaaccgcccccctctactccctgctcccacctaggcacgcgtttgccactctccatttttcctttaaagaaaacgttctgagagccctttgaaccca

SEQ ID NO: 875218 - DNA, 120 bp, Artificial Sequence
  ENSG00000286281_6 (sequence is synthesized)
gctgaccctgggaaagggcaggtccgtggatgtgaaggcaagtccagcaactggggctgcacttacctacatgtgaaaaggaaagagaaacacaccttgcctgcccattgtctacaccac

SEQ ID NO: 875219 - DNA, 120 bp, Artificial Sequence
  ENSG00000286281_7 (sequence is synthesized)
gaagcccggattccattccctggtagtcaggcctttcacactgggctgccctccaggtaatatccaaagatgcccccagcctactccagcccctaacaggacactcaaagggactctgtg

SEQ ID NO: 875220 - DNA, 120 bp, Artificial Sequence
  ENSG00000286281_8 (sequence is synthesized)
ttcgtgactgctggaatttctgctgagaccccaacacagaacaatatatgggtcaaacaactcccacccccattctcaagtgaggtatagaccctctctggggtgttgttaagggaccga

SEQ ID NO: 875221 - DNA, 120 bp, Artificial Sequence
  ENSG00000286281_9 (sequence is synthesized)
caccagcctcgccttggggtgatacgataggaggctaaggatgcaggagaggccagcagtgggtctttctttttagagaggtgtctatatgttttgcttctccacctacctcaagataaa

SEQ ID NO: 875222 - DNA, 120 bp, Artificial Sequence
  ENSG00000286281_10 (sequence is synthesized)
tgacttgggctccagagaactccctgaagagctttaggtgtctcctggagtttgggaggtgtaaggacagatgcaacctgcaaagcagacggctgtttgcagtggcgagagaaggaggta

SEQ ID NO: 875223 - DNA, 120 bp, Artificial Sequence
  ENSG00000286281_11 (sequence is synthesized)
tttggagccacctcttcttccaagagccagtgagttatacatgcactaagtctccctagaggcagggtggacccacatccccccacaggggcgaggtgagcagcacatgccaggacctga

SEQ ID NO: 875224 - DNA, 120 bp, Artificial Sequence
  ENSG00000286281_12 (sequence is synthesized)
gaaaagcatccgcagaagagccagcatgtgcacatctgccactcccaagggcaccaaccccaaatgcagctgaatcctccttgaagagctttgttctttgggccctgagaaacctgctat

SEQ ID NO: 875225 - DNA, 120 bp, Artificial Sequence
  ENSG00000286281_13 (sequence is synthesized)
ggcctgaatgttgatgtccccccagaatttgtttgtgaacgctaatacccaatatgacagtattaagaggtgggacttctggaaagcgatgaagtcatgaaggtggagccctcatgaatg

SEQ ID NO: 875226 - DNA, 120 bp, Artificial Sequence
  ENSG00000286281_14 (sequence is synthesized)
agattagtgcttttataaaagagatcgaaggaagctgccttgcctcttccaccatgagagaacctgtggaaggtgccatctgtgaagaacaggccctcctcagacactgaatctgctagc

SEQ ID NO: 875227 - DNA, 120 bp, Artificial Sequence
  ENSG00000286281_15 (sequence is synthesized)
accttgaccttggactttccagcctccagaatcacccagtgattggagaaggtgggggatccaggaagcaggaacaaacactgactgggtccccgtcccagccacatgcttccagaccta

SEQ ID NO: 875228 - DNA, 120 bp, Artificial Sequence
  ENSG00000286281_16 (sequence is synthesized)
agccagcctccaggtgttggaaggaggagagaagtactgatttgaatgaggtggtcacgtttctcagtttgattggactatattttgtaatagttgaaaaatgagacagtttatgagatt

SEQ ID NO: 875229 - DNA, 120 bp, Artificial Sequence
  ENSG00000286281_17 (sequence is synthesized)
aaccaggaaagccggtcaatgagatttcattctgccataggggataatataaaaatacggataatagcaaacattgacatcacatttagtgtcttacatctcttaacttattaattaggt

SEQ ID NO: 875230 - DNA, 120 bp, Artificial Sequence
  ENSG00000286281_18 (sequence is synthesized)
ttgtgtgcttcaccaactcttataattcccattgcataattgaggaggctgaaggccagagaggttaagaaattcatcaaggtccacaactggtaaatggcaaaactgggatttgaatcc

SEQ ID NO: 875231 - DNA, 120 bp, Artificial Sequence
  ENSG00000286281_19 (sequence is synthesized)
aggcttcagtgtctagttgtggaattgaaatgcttccccatcgctgaatccttatttccattcttaaccaaacctcgcctgacttcaagccctaactccaacctccccagctcagaagca

SEQ ID NO: 875232 - DNA, 120 bp, Artificial Sequence
  ENSG00000286281_20 (sequence is synthesized)
tccttggctgtgtcagctgaaggagcctcccctactgtcctgtgctttcaggggcgcagtcgtggctgcagagtggccgtcctcttagacagtgggggcatcttttgtggaatcatgttc

SEQ ID NO: 875233 - DNA, 120 bp, Artificial Sequence
  ENSG00000286281_21 (sequence is synthesized)
agaacctgcagcacatctgttaaatatgttcgatcctggaaactgctcttttgatggtggataggatgtttggagccatccagacaccacttggagtccagtgaaaaagccagcaatcaa

SEQ ID NO: 875234 - DNA, 120 bp, Artificial Sequence
  ENSG00000286281_22 (sequence is synthesized)
gctttgagaaaccatttttggtaaaatgaaataggatgcactctaactgaatgagactgcttttcttctatggcttaaaagatggaactaaatgtaattcccaaaaaaagtcccccaaaa

SEQ ID NO: 875235 - DNA, 120 bp, Artificial Sequence
  ENSG00000286281_23 (sequence is synthesized)
agtgtgtcttggcagccttactggaaagcatgtattccaagggatctatgcagggtaaaactcatttgcaagtatctgttctttttatttttaatcgatttttctaatcatgctcatcat

SEQ ID NO: 875236 - DNA, 120 bp, Artificial Sequence
  ENSG00000286282_0 (sequence is synthesized)
gctggggtccgcgctgcgatcacagtagaggccactgctctcgtcgcatggctccagatctgagcagctctcgccacgctggcgggcacacaccagacagcatgagcagccgtccagcac

SEQ ID NO: 875237 - DNA, 120 bp, Artificial Sequence
  ENSG00000286282_1 (sequence is synthesized)
cgcgcgcaccccgggggcgcaggtcggcggcgtcgcagggcaccggcccgggcactggggagggcagcgctgagtcgcagcgacctgaaggcaggcgagacaaggagaaaccactcagct

SEQ ID NO: 875238 - DNA, 120 bp, Artificial Sequence
  ENSG00000286282_2 (sequence is synthesized)
gggacagaagacgcagtgagcccgagtgcctggacatcagcatcagatcaatttggaatttcatgcaaataaaacacaccaacttaatgggatgtgaaagagttggcttcaaaataaatc

SEQ ID NO: 875239 - DNA, 120 bp, Artificial Sequence
  ENSG00000286282_3 (sequence is synthesized)
cttgttgaaaggcactggaattacatttgaaatggaagtgaaacaaagttgaattttatggcactggcttacaggctctgtcttgcactgtttacagattgacccaaataaagtgaagaa

SEQ ID NO: 875240 - DNA, 120 bp, Artificial Sequence
  ENSG00000286282_4 (sequence is synthesized)
gaccagaatcaggacccatcctggcatatacctttcacctgataacatctgttggttcctatgtatttaatatatgtattttcatgtttatttctttatttttattaacttttccaataa

SEQ ID NO: 875241 - DNA, 120 bp, Artificial Sequence
  ENSG00000286282_5 (sequence is synthesized)
gatttctcccccaaaatactaatgtcaattaacatttaaatatagaactgtaagtttaaatatagaactgtgttgggctagacacaatatgatttcctaattattaccaacctgtttcat

SEQ ID NO: 875242 - DNA, 120 bp, Artificial Sequence
  ENSG00000286282_6 (sequence is synthesized)
ttaatttgtagaatcccttgcagtttttaaataactctctacaatctcatttcttcctgttatcaatccagtactgataaagtagtatccctaaactatagttgaaaacattgtaattca

SEQ ID NO: 875243 - DNA, 120 bp, Artificial Sequence
  ENSG00000286282_7 (sequence is synthesized)
gaaaagtgaagagactcatccaatgcatatatttgaaagcaacatagctgatttcagggttttctagatcttatttcctggctggcttggtgtaggtggtagtaaataacatatgtggtt

SEQ ID NO: 875244 - DNA, 120 bp, Artificial Sequence
  ENSG00000286282_8 (sequence is synthesized)
ttggtactgcagattttaatctatggtgatccacattctgttccagagacaccatgcattactatggtctccaggctgttggcgatcataacactagggggcaccattttgacttccttc

SEQ ID NO: 875245 - DNA, 120 bp, Artificial Sequence
  ENSG00000286282_9 (sequence is synthesized)
ttacattagcctttagggccttcatattttcgtattgaaggttgatgatgaaatcatggggaattttatttcatcttgttcagacaagatttttgcaagaggctttacttatgaaaggga

SEQ ID NO: 875246 - DNA, 120 bp, Artificial Sequence
  ENSG00000286282_10 (sequence is synthesized)
gatgatgctttctttccactagtgaagatgtgtagaaaattaattcctacagagttctaattcctatgactaatatcaagaaatgagtattgtagagtaggacacattcttagggactgt

SEQ ID NO: 875247 - DNA, 120 bp, Artificial Sequence
  ENSG00000286282_11 (sequence is synthesized)
catgctcatttaactcttaaacagctggattcctttctctttttctcctcacccttacagggatatgggcagagggccccttgtgtgactttagaaggaggttttgagggtaagagaagg

SEQ ID NO: 875248 - DNA, 120 bp, Artificial Sequence
  ENSG00000286282_12 (sequence is synthesized)
atttctctgtcatcaaagatagctactctggtattgtggcttagccgcagcaactatgcagaaccaaaccattagcacccagctctcaaagagatgttgcattttgggatgtttgtatat

SEQ ID NO: 875249 - DNA, 120 bp, Artificial Sequence
  ENSG00000286282_13 (sequence is synthesized)
gcagaggttacaaactacttgatgtatgaattgatttttgctgcataacaattaatcaattattttcatactcatgggtctgcaggttgactattttcatactcacggttctgcaggttt

SEQ ID NO: 875250 - DNA, 120 bp, Artificial Sequence
  ENSG00000286282_14 (sequence is synthesized)
tctgattaagaggagaagctctatgataagccagagaagaaaagcaagaatctaagaacaaggtgctacttggtatctgctctctgggtctatgtaatttggagttcctagcagagtgcg

SEQ ID NO: 875251 - DNA, 120 bp, Artificial Sequence
  ENSG00000286282_15 (sequence is synthesized)
taatgcatttagagagaggtatttgtcttttcaaaataggatcctggacctaatgggcactgcttgaattcaataccagaatatgattctaaatatcagtaaagtttaagatcatataca

SEQ ID NO: 875252 - DNA, 120 bp, Artificial Sequence
  ENSG00000286282_16 (sequence is synthesized)
tgcaatacttcacaaggtttctgggtagggattttatgaagagatgacttaattattttttgagtattcctgactcaatactcaataaagatagtgctatgctgtttacacgcacgtgca

SEQ ID NO: 875253 - DNA, 120 bp, Artificial Sequence
  ENSG00000286282_17 (sequence is synthesized)
taagtaataaactcagtgtcacattcctctcacagcctgctgatgactataattaataactgtttttttaccttgaaatttgatgagagcagattttaattgttctcaccacacacacat

SEQ ID NO: 875254 - DNA, 120 bp, Artificial Sequence
  ENSG00000286282_18 (sequence is synthesized)
gcccacatgcatgcacacacacaaataactgtgagtgatgctgaatgtgttaactaattggattgtggtcatcactatacaatgtatacttatatcaaatcatcatgttttatacctcga

SEQ ID NO: 875255 - DNA, 120 bp, Artificial Sequence
  ENSG00000286282_19 (sequence is synthesized)
acatacacattttttgtcaattatatctcattaaagctggaaaaatgtatttctgataggtcgaggaaaaaaaagcaattcttaagaaaaaaaaaacagaggcaagtagatgatcacctc

SEQ ID NO: 875256 - DNA, 120 bp, Artificial Sequence
  ENSG00000286282_20 (sequence is synthesized)
ctgaggttatcaatgactgtacattgatgtctagttttgatgtttataattctaccaagtgaatatgttctgcattcttagactttcacatcgaggtttctctagggattggaaggagct

SEQ ID NO: 875257 - DNA, 120 bp, Artificial Sequence
  ENSG00000286282_21 (sequence is synthesized)
ccataaagattaactgtgtaacgacattcagcatccccagaagcagcatcctactgcttaataacctcatttccaatagtgtgttgtctccaagtgcatgagcacatgcacaaatacata

SEQ ID NO: 875258 - DNA, 120 bp, Artificial Sequence
  ENSG00000286282_22 (sequence is synthesized)
acacacatgatggaaccatataatctccatgttgcaagggactctaaagagacttgtagttcaggaagacttgcccagtaataagtattcttcacatcatctctaactcttcataatatt

SEQ ID NO: 875259 - DNA, 120 bp, Artificial Sequence
  ENSG00000286282_23 (sequence is synthesized)
ggattctactagaaaaatacacaggaagaaaaatctaactatatcttgtggttgccaatttcatttatgcttatcccaattgttaagaactttctgttttcatcgtatggagcaggattt

SEQ ID NO: 875260 - DNA, 120 bp, Artificial Sequence
  ENSG00000286282_24 (sequence is synthesized)
catctccccacagacacctctctggggtcctaattaaaccttcttggattaaaatcagctataacaatctcagtttttgtagttatctccacactgcattgtggattctggtgacaaaac

SEQ ID NO: 875261 - DNA, 120 bp, Artificial Sequence
  ENSG00000286282_25 (sequence is synthesized)
atttgttcagggtctgcatgcttttaacttacctgtctatccttttagttctctccttaactaaactggaaacaccaataggcctccagggtagaatatgaagccctaagcaattaacag

SEQ ID NO: 875262 - DNA, 120 bp, Artificial Sequence
  ENSG00000286282_26 (sequence is synthesized)
atgtggagggttataggaacactgagaattgctatgattggtgtgtggggagtcatagccagggcttgtagcccagagacagatgattttgatttcccacctctctttgatgcccttgtt

SEQ ID NO: 875263 - DNA, 120 bp, Artificial Sequence
  ENSG00000286282_27 (sequence is synthesized)
gacagatgatgtgaaactagctcccctgagtgtagtttgtctgaatttactggatttgcaggtgtttggcttcatcccactaatgtataatgatacaaatggtctctaaggcttactcag

SEQ ID NO: 875264 - DNA, 120 bp, Artificial Sequence
  ENSG00000286282_28 (sequence is synthesized)
aggcttactcagtgcagaaagatctcatgtatcatagaaaaccagaatattagagtgagaagtaactttaaagatgatctagtcttaccccgattttattttttattttattttttttct

SEQ ID NO: 875265 - DNA, 120 bp, Artificial Sequence
  ENSG00000286282_29 (sequence is synthesized)
tcaaatatcgagtgtcctgttaattatatttcctagtggttcaatgatacttcgtcttgatgtcctcttgagtattttcccctttatcacccatctctctccattctccctttcccatga

SEQ ID NO: 875266 - DNA, 120 bp, Artificial Sequence
  ENSG00000286282_30 (sequence is synthesized)
ttgggtactcactctatgtctttaaagatgtatgattctttgaaaaaattatgtcattattttatgcttacatgtgtttttaatttgcataagtacaggtactttatatctcattatttg

SEQ ID NO: 875267 - DNA, 120 bp, Artificial Sequence
  ENSG00000286282_31 (sequence is synthesized)
tagttcttttcccatcaacattatgttttgtgtgtttgtatcctgtgttgcttctgacagctgcttagtaaaacactgaacacactccccgttttctgcctacccatccattcatagatg

SEQ ID NO: 875268 - DNA, 120 bp, Artificial Sequence
  ENSG00000286282_32 (sequence is synthesized)
catacctagattgtcataaactccccacttccatacataatgccccgatgaacattgttagctatgcatccttatagatctatgaacagttgtttctgggatacatattaaagagggggt

SEQ ID NO: 875269 - DNA, 120 bp, Artificial Sequence
  ENSG00000286282_33 (sequence is synthesized)
ttctaggatttactaatgtttgatttcattaaatacttcaaagtgctttctggaatgactgcaagtctatacttctaactgcaggtgcattacctttttcccatattcatgccaaatgta

SEQ ID NO: 875270 - DNA, 120 bp, Artificial Sequence
  ENSG00000286282_34 (sequence is synthesized)
gcattactctcttcctaatttttgccaacataatgggtataaagtgtataaagtgttatagtttaatgttagtctgagattttttattacttgtattttaggcatcttatatgcttggtg

SEQ ID NO: 875271 - DNA, 120 bp, Artificial Sequence
  ENSG00000286282_35 (sequence is synthesized)
ttttgacattaacactatggttttttttaaacataatatatttatcacactcaggaaatttgacattggggttatgttgttacatgcatttcatattcacgtttcttataacaataagaa

SEQ ID NO: 875272 - DNA, 120 bp, Artificial Sequence
  ENSG00000286282_36 (sequence is synthesized)
caataacaaaataataaaaatagtgtccttaatattgtttttgttaaacccactatccaattaaagatcatacattgcagttattctcatatctctttcctttcctttaaagattgtccc

SEQ ID NO: 875273 - DNA, 120 bp, Artificial Sequence
  ENSG00000286282_37 (sequence is synthesized)
caagcacttaaaaaaattttatgggtacatagaagatgtgtatatttatggggtacattagttcttctttaaatgtttggtaaaattcagtagcgaagctatcaggtcgtgggcttttct

SEQ ID NO: 875274 - DNA, 120 bp, Artificial Sequence
  ENSG00000286282_38 (sequence is synthesized)
gtgctggaagactctttattactgcatctatctcattacttgttattagtctgttcgggttttggatttctctgcttaatttcagtgttctctcttacaagttctattctagcagtgatt

SEQ ID NO: 875275 - DNA, 120 bp, Artificial Sequence
  ENSG00000286282_39 (sequence is synthesized)
gttcataattttggtttttctttctggaagaggcaagtgttggatgcctccttttctatggtaggttttttatatttagcctctatcaaattaagaatgtctttttctattcttagtttt

SEQ ID NO: 875276 - DNA, 120 bp, Artificial Sequence
  ENSG00000286283_0 (sequence is synthesized)
gtcagtaatgatgtttttaaaaacctcaatgtttagcattgaggtgagatatttaagtaataaaactgatggctcagtgatcagagcatcaacagctctctgccggcaaatcctggtgct

SEQ ID NO: 875277 - DNA, 120 bp, Artificial Sequence
  ENSG00000286283_1 (sequence is synthesized)
ctttattgctgtggtcctgttccagccccatagcaggagattgctaatgatctgggcttgggatatacacctgtgtccctccagggtcgtggttctcttcttttaatctgtttccttccc

SEQ ID NO: 875278 - DNA, 120 bp, Artificial Sequence
  ENSG00000286283_2 (sequence is synthesized)
ctgtgctttagtgtgacaggatttgctgctttccctcaacttgcttaaggctcttgccctctgtaggggagaaggctttaggagggggtctgtgtcgtgccagcaaagactgcccctgtg

SEQ ID NO: 875279 - DNA, 120 bp, Artificial Sequence
  ENSG00000286283_3 (sequence is synthesized)
ccatgacagctccatcaggaagcctcctctcttctcatctgctgctcccaatctttctcctgagcaccagaaattaccttgagaagaagcctgaaaaggtgcatggtgtccagaagcatc

SEQ ID NO: 875280 - DNA, 120 bp, Artificial Sequence
  ENSG00000283423_0 (sequence is synthesized)
tggatacatctatgctatttttttaaagatttgagaaaagcaacacaattttttaaaaagaaaagaggatgttgaggaacagtggggaagaaaattgggaagtaggactatgaagatatc

SEQ ID NO: 875281 - DNA, 120 bp, Artificial Sequence
  ENSG00000283423_1 (sequence is synthesized)
ttggcatttttcttcttctggaaagacaagcgaacaaacaaaagagcaggttttatgttaagacaccttttctattgtcctcaaagttgcttgatggttttttgcagcttctatcagaat

SEQ ID NO: 875282 - DNA, 120 bp, Artificial Sequence
  ENSG00000283423_2 (sequence is synthesized)
cctcaggtgagaagatgtctgtttcttggaaaatctgattgaggggaagctgcagtggaatttgcttttgtcctcctgacggttcacagactcccacttcagcagccttgggcttctcca

SEQ ID NO: 875283 - DNA, 120 bp, Artificial Sequence
  ENSG00000283423_3 (sequence is synthesized)
ccccggcagcttttcattgctttgttcagcactgattaatttagtttcggagaaaaagccccaattgtatatgtgtacacatagaattttattgaagcaagtaaataaatccatcaaata

SEQ ID NO: 875284 - DNA, 120 bp, Artificial Sequence
  ENSG00000250438_0 (sequence is synthesized)
tgtatttcacattctgttgcgaataccctgcagttttttcaaagttatgtcataatcgcaattcacaaagctatgtttctgtaggctccatattatttgtacatgtgtgaaagatctttg

SEQ ID NO: 875285 - DNA, 120 bp, Artificial Sequence
  ENSG00000250438_1 (sequence is synthesized)
ataaatagtgaaggagaaaagctcacttaaagtagttttgtaagttggaaaagcataaaccattaataagtggttactagttaatttttatttttcctgactctaaaagacctatttaga

SEQ ID NO: 875286 - DNA, 120 bp, Artificial Sequence
  ENSG00000228564_0 (sequence is synthesized)
gaagcgttggaacctatcacttagcctagcatctaggtgatgtgattctcctctcttgcctggttcctgcccactggagagattgtgacccattgctgagcccagggccaaggtgatgtc

SEQ ID NO: 875287 - DNA, 120 bp, Artificial Sequence
  ENSG00000228564_1 (sequence is synthesized)
actctcctgccttggctgtgcccatgggggccactgtgacacctgtctaggctaataacttaagtgaagcgagtctcctttcctgcctaagctctgcctacaggggggattttgatatat

SEQ ID NO: 875288 - DNA, 120 bp, Artificial Sequence
  ENSG00000228564_2 (sequence is synthesized)
atgatgaatcttttactgggagtcaagatatgtgcaggatggtgaaacttatcactggacctttccacagtgttattgtcacatatacctttgtccaacatgtgagtgatttgactctgc

SEQ ID NO: 875289 - DNA, 120 bp, Artificial Sequence
  ENSG00000228564_3 (sequence is synthesized)
atacctttgtccaacatgtgagtgatttgactctgcagactgggtccagttcacaaacaaaattgtgccatatacctgggccaagaacctaatagatggagtcttgctctgttgcccagg

SEQ ID NO: 875290 - DNA, 120 bp, Artificial Sequence
  ENSG00000228564_4 (sequence is synthesized)
agggactgtgacatatcactgggcctataacctaggtaatgtgactctccttttcttcctgtgttctgtcccagtgaagattatgacaaatttctgggccagtcaggtggtttggtgact

SEQ ID NO: 875291 - DNA, 120 bp, Artificial Sequence
  ENSG00000228564_5 (sequence is synthesized)
aatttctgggccagtcaggtggtttggtgactctcaaaccatgattcagcagacctgtgaggctgtgagttccctatcagaacacaatctgcagatggagtcttgctctgttgcccaggc

SEQ ID NO: 875292 - DNA, 120 bp, Artificial Sequence
  ENSG00000228564_6 (sequence is synthesized)
cctcccaagtagttgggactacaggtgctgccttcaggagggattatgacatatgcctggaccaaacacctggatgacgtgacactcctgcatgagccttgccctaaggggatattttta

SEQ ID NO: 875293 - DNA, 120 bp, Artificial Sequence
  ENSG00000228564_7 (sequence is synthesized)
gacactcctgcatgagccttgccctaaggggatatttttacatgttggtgaactcagcatctaggtgatgtgactctactcttctgcctgggccctgcccacagagggcattggaacatt

SEQ ID NO: 875294 - DNA, 120 bp, Artificial Sequence
  ENSG00000228564_8 (sequence is synthesized)
tcacttggctcagcaccaagaagatgttactctcctacctggacctctcccacaggggacacctagatgatatgatttttcttcctggttcctgcccagacttcaaattgtgatgtatat

SEQ ID NO: 875295 - DNA, 120 bp, Artificial Sequence
  ENSG00000228564_9 (sequence is synthesized)
ctgggcccaaaacacaggtaaggtaataactctcatagctagaccaagacaatagagagattttgacttttgtagctaggcttagaacaatgggtacatattcctggcccagctcccagg

SEQ ID NO: 875296 - DNA, 120 bp, Artificial Sequence
  ENSG00000228564_10 (sequence is synthesized)
tgatatgaccctcctacctagttagtgctcacaggtgtgattgttacctatgtttggactcagttcattgtgagcattgtgatcactcatacctggacctagccacaaaaaaatatgttg

SEQ ID NO: 875297 - DNA, 120 bp, Artificial Sequence
  ENSG00000228564_11 (sequence is synthesized)
actcttatacctcaaaataggagactcaacccacaagaggtgttgactcttacaccttttgctggaaaatgtccaggattgtgaatttctgctattgattgggtccaggtatgagtttca

SEQ ID NO: 875298 - DNA, 120 bp, Artificial Sequence
  ENSG00000228564_12 (sequence is synthesized)
ttgctgtgcctgagctgagttcaaaataagtcactatctcacctgtggctgcatctacatatgacagtcacaattccaagtctggattgcatttgtgtatgagacttaggacctcaccag

SEQ ID NO: 875299 - DNA, 120 bp, Artificial Sequence
  ENSG00000228564_13 (sequence is synthesized)
taagcactgtctatgtgtgagggtgacaattctatcagctggaagtgcatatgagagtcacaatgtcacctttgttcttggtcctgttatgacattgtatcacttgaaggctttatccag

SEQ ID NO: 875300 - DNA, 120 bp, Artificial Sequence
  ENSG00000228564_14 (sequence is synthesized)
acccaggaccttgcctgttgccctaagcctagatatcagagtcaaaatctgttctcttagctggatccaggtatgagagtcaacatctcaccagtgagctgtgaccatgtatatgtcaca

SEQ ID NO: 875301 - DNA, 120 bp, Artificial Sequence
  ENSG00000228564_15 (sequence is synthesized)
atttcacctgtgggcaggaaccagacatgagagtcatatcacttgggtgctgggtaagtgatacattacaattcttactttgggcagggtccaggcaacagaggagagacacatcaccta

SEQ ID NO: 875302 - DNA, 120 bp, Artificial Sequence
  ENSG00000228564_16 (sequence is synthesized)
gtgaaaatcctctctgagagcagggcccattcaggagagtcatatcacctagctgcttggccaagtgaaatatcacaatgcaccctttgcacagggccaatacaggacagttacatcacc

SEQ ID NO: 875303 - DNA, 120 bp, Artificial Sequence
  ENSG00000228564_17 (sequence is synthesized)
agggagctgggtccagctatatgtcacaattccttttgtggaaagtgtccaggcagaaaagcagagtcacatcacctagccagtgggcccagagagatgccacaatgccatttgtaggct

SEQ ID NO: 875304 - DNA, 120 bp, Artificial Sequence
  ENSG00000228564_18 (sequence is synthesized)
gggccctgggagaagaataacatcacccagttctgggcccagcaatatgttgtgatcccaactggaaaaagtttccagacaagagaggagaatcacatcatcatgatgataagccaagag

SEQ ID NO: 875305 - DNA, 120 bp, Artificial Sequence
  ENSG00000228564_19 (sequence is synthesized)
atttcacaatccccccctctgcacatgtcccaggcagaagacctgaattacctttttacttaggccagtaatgtcacagtgcttcctcagggcagggcacaaacaagataggacagtcac

SEQ ID NO: 875306 - DNA, 120 bp, Artificial Sequence
  ENSG00000228564_20 (sequence is synthesized)
atcattaagtgctagacttaatgctagatatgtcataaccttacttgtgggcaggatccaggaaggagagatttatgtcacctaggtgctcagtaaagagatatattacaattacaattc

SEQ ID NO: 875307 - DNA, 120 bp, Artificial Sequence
  ENSG00000228564_21 (sequence is synthesized)
ctttgagggaagtggccaggcaaaatagtcacatcacctaggtgcttggcccaggtataagtcacaagatatctgtgtgttgagcccagaaggactatcaaattacgaagtttctacgta

SEQ ID NO: 875308 - DNA, 120 bp, Artificial Sequence
  ENSG00000228564_22 (sequence is synthesized)
gaagtgcatgtcacagacacctgcaggaaggcccaggaatgagactcccaattccacacattttcccactccaagtgtaagagtcaacaactcctgagacttaggcccaagtacatgagt

SEQ ID NO: 875309 - DNA, 120 bp, Artificial Sequence
  ENSG00000228564_23 (sequence is synthesized)
cacaatctcaacagtggattgcatcctgccatgagagccccaatcccttctctaagctgtgttccagtagaggagtcacaacatcaatggtgtgctgaatcctggttggagagttcccac

SEQ ID NO: 875310 - DNA, 120 bp, Artificial Sequence
  ENSG00000228564_24 (sequence is synthesized)
ttcacctgtggactggatctgtatatgagagtctcaattccagctctcaactgcccctgggtgtgagattcaggacctcaattgtgagctgtgtacacatggacatgtaacaatttctac

SEQ ID NO: 875311 - DNA, 120 bp, Artificial Sequence
  ENSG00000228564_25 (sequence is synthesized)
ttttggctgtgtgttcatacaagactcaatctcatctgtgttctcggccctgttatgacactctttgtaccacccatgggatttattcaatacgcatgggtgtcataatcctctgtgatc

SEQ ID NO: 875312 - DNA, 120 bp, Artificial Sequence
  ENSG00000228564_26 (sequence is synthesized)
ttcatacaagtagaagacccaggaccttacccatggccctaggcctatctatgagaattgacatttttcctcacatttttaattttaacaaataagttattctcctgtcagttcagattc

SEQ ID NO: 875313 - DNA, 120 bp, Artificial Sequence
  ENSG00000228564_27 (sequence is synthesized)
atcaggacattgaatcatattcagaagaattaaaactgaaagactaataggtttgttaaagcaatgcaggttgtcatactaataaaccctaaaatttcaaaggcttagcaaaataataca

SEQ ID NO: 875314 - DNA, 120 bp, Artificial Sequence
  ENSG00000228564_28 (sequence is synthesized)
ctcatgtgcctgggccctgccttcagaaagatagtgacattacactgcacccagcacctaagaggtgtgattctcttcttctacatggggcctgcccacagcaagacttgtgacatatca

SEQ ID NO: 875315 - DNA, 120 bp, Artificial Sequence
  ENSG00000250436_0 (sequence is synthesized)
ttatggttgctcagtttcttcagaaagcaactcatggagaagtacaaaccacagttagaaagttgagagatttcaatgagaagcacaggacctttaagtcacatggttaccttcagaatg

SEQ ID NO: 875316 - DNA, 120 bp, Artificial Sequence
  ENSG00000250436_1 (sequence is synthesized)
ttgagccagcttataaactacccctgctctaaacaggctatcctatccagcaaggtcactcaatcctgtgaacagccagtgccattccaaggggaaggcatattaactcagaaaatgctg

SEQ ID NO: 875317 - DNA, 120 bp, Artificial Sequence
  ENSG00000250436_2 (sequence is synthesized)
acacacctgacctttcatccctgccactcagcagttctacagaagaccaatttgtatgcaaacaattcacttacaagccagaattcctacaagcataatacagtttttctgtaaactctt

SEQ ID NO: 875318 - DNA, 120 bp, Artificial Sequence
  ENSG00000250436_3 (sequence is synthesized)
atgaaacagctgtttagtcatgttgccaagaagaaaagaagacagaatgcctctagataaagaaatgctattcctatgtcaacttgctatgcaaagtgtggactgtggaccagcagcatg

SEQ ID NO: 875319 - DNA, 120 bp, Artificial Sequence
  ENSG00000250436_4 (sequence is synthesized)
tgtgtcgcctggcagcttgttgcaaatgcagaatctgaagctctcatctagacctactaaacagacttcactttaacaatataaccgggcaagtcatatagtcattaaaatttgagaagt

SEQ ID NO: 875320 - DNA, 120 bp, Artificial Sequence
  ENSG00000250436_5 (sequence is synthesized)
cctggcctcaagtcttggcatcctggcctcctgcattggcaccctaaagtgccgggattacaggcatgagtcatcatgcccagcccatatatgctttcatgtaatcttaactaccaccca

SEQ ID NO: 875321 - DNA, 120 bp, Artificial Sequence
  ENSG00000250436_6 (sequence is synthesized)
atatagtagaacttatttaaattttattgccagagaaacagaaactcagagaacttaagttattttcccaagaccatagtaagtaccagagctagaagttgaactcagaatagctgtttc

SEQ ID NO: 875322 - DNA, 120 bp, Artificial Sequence
  ENSG00000250436_7 (sequence is synthesized)
tgaaaccttttcttattttaatatagtaaatgataatggtttgtttatttaacaactgctaagctctttgggagctattattataggaaaaatgacactgttatcaatagagaacatatg

SEQ ID NO: 875323 - DNA, 120 bp, Artificial Sequence
  ENSG00000250437_0 (sequence is synthesized)
ggtgaggctgcagagtgaggaggagctagatcgtagggtcttcctaaattaatgtaagcattttggattttattctaaaatccacagctacattaatgcagctgctcttcaagagaatgg

SEQ ID NO: 875324 - DNA, 120 bp, Artificial Sequence
  ENSG00000250437_1 (sequence is synthesized)
agatgacatttgtagacacatgctggactaaaagggaacctgttgccttgaaggaaagaagccagtcctagcagcattcatcacctgctaactgaagagctattggacccttggttaacc

SEQ ID NO: 875325 - DNA, 120 bp, Artificial Sequence
  ENSG00000250437_2 (sequence is synthesized)
agcagtgacaaccaggcactacatcgaggggactgagtgaacctctgagacttcctggcttctagtgagactccagattcccagatgtggtggctaaggggaaaaactccttttgcttga

SEQ ID NO: 875326 - DNA, 120 bp, Artificial Sequence
  ENSG00000228561_0 (sequence is synthesized)
atacaaccttagagataatgaagtctattgcacagaaagaaactggaatcaggctgtttattgactgcagagaagtagcgtctcttgaatggttaatggcaattgttaattagattgctt

SEQ ID NO: 875327 - DNA, 120 bp, Artificial Sequence
  ENSG00000228561_1 (sequence is synthesized)
ttcctacactgccctgtgtggtggtggatggcatacgtggtaatctgagtgtggtaagcatgaaaagcacagaatgtgtgaaagcagcaacaaacttcacatccatcaaattcttaacat

SEQ ID NO: 875328 - DNA, 120 bp, Artificial Sequence
  ENSG00000228561_2 (sequence is synthesized)
agcagcatctcatcgctgtccttgggtgtagcctcccttttgtgaggttcactccctcagctggaggatgaaccacagtgctgctgcagacctagctgatgtcacagttgttcaaaaggt

SEQ ID NO: 875329 - DNA, 120 bp, Artificial Sequence
  ENSG00000228561_3 (sequence is synthesized)
tcctcttgaagaatgaaatccttgggctgccattaggaactgcatgcagttaagccgtataacctctctgatttttagtttctccatctattttataaaataaaacattgaactaaatta

SEQ ID NO: 875330 - DNA, 120 bp, Artificial Sequence
  ENSG00000250431_0 (sequence is synthesized)
ctgaaagacaacaagttaaaaattgatggagtttgaacatcttgctgcttttttattggtttactttttttacaaagtcgataaagacaacataataaaataaacaaaacaataagcaac

SEQ ID NO: 875331 - DNA, 120 bp, Artificial Sequence
  ENSG00000228563_0 (sequence is synthesized)
acaggagagaaggccatgtgaagacggaggcagagatcagagtgatgcagctataagccacggaacaccaagggttgccggccaccatcagaagctaaaaagagcagctggaaacgtctg

SEQ ID NO: 875332 - DNA, 120 bp, Artificial Sequence
  ENSG00000228563_1 (sequence is synthesized)
gtggaattaccatccctcccctaaccaagcacagtagagtccctccttcccagggaccctccaagtgctgagtgatgccttctcttctcccattcccgctctgcctctggtgggcagcag

SEQ ID NO: 875333 - DNA, 120 bp, Artificial Sequence
  ENSG00000228563_2 (sequence is synthesized)
tggagccacaggactcatgtaaaggaagtcatcattctgctatcccacttagtcttctaagtaaaatacgtcccaaagcattacacgtcaagcctgaagatggaaagtttggggaaaaaa

SEQ ID NO: 875334 - DNA, 120 bp, Artificial Sequence
  ENSG00000228563_3 (sequence is synthesized)
acatgacattgagtacaagtagaggtcactaaaaccaacaaatcaaccagtattgcagattatccaattagcaaagataaatactaaaacccattggagacacttctgcttccagtcaag

SEQ ID NO: 875335 - DNA, 120 bp, Artificial Sequence
  ENSG00000228563_4 (sequence is synthesized)
gaggaataacaggaattggatttatcctccaggctagaaaaaaaaaaggtaagttatatgaaataattatttacaaaacactggatattaggcaatgaaaaacagtgagtggcaagaaaa

SEQ ID NO: 875336 - DNA, 120 bp, Artificial Sequence
  ENSG00000250433_0 (sequence is synthesized)
cagctgctgtctgtcagggccctgggcacagattcagagctgcagaggcacagcctgcctgttgtcggttgtaagtgcccatgtacagagtgagtttaatatttgagcaggccaggaagc

SEQ ID NO: 875337 - DNA, 120 bp, Artificial Sequence
  ENSG00000250433_1 (sequence is synthesized)
acctgtcttaaatttggcaattaggaaagggaatatttctcctcatgtgttccctctctgaacacaataaactgcacaaagactaagcagatcgcttgcctccaaataggaattgtcttc

SEQ ID NO: 875338 - DNA, 120 bp, Artificial Sequence
  ENSG00000250433_2 (sequence is synthesized)
aaagagagtcattttaggatgggggtgaggtcccatcctatgggttctaacacctcctgcaaaagcctctgagcttctcaaggtaagtataagggatatgatagccattcaacaattagt

SEQ ID NO: 875339 - DNA, 120 bp, Artificial Sequence
  ENSG00000250433_3 (sequence is synthesized)
atgtattggcagatcaactgactgactgaatgaatgaacaaatgattgcattaagagctagcgaccctggaaatgattcctgtagaaaaggagaatatgagggtccagcttggaaactgg

SEQ ID NO: 875340 - DNA, 120 bp, Artificial Sequence
  ENSG00000250433_4 (sequence is synthesized)
gagggcgttcctggggataaggccatgtctgtgccaaatccttggaattctagcaaactcagcagtgccgtctgtccaagaaaaagagttgagaagtccctggcagacacagagggtttt

SEQ ID NO: 875341 - DNA, 120 bp, Artificial Sequence
  ENSG00000250433_5 (sequence is synthesized)
ggttagaagatgagggccccatggggagaaggaaggagggtacaagtcatcagatatgagtgagtccccataagactctagctagggaggggccaatgcatgttgcacaggtctcctcac

SEQ ID NO: 875342 - DNA, 120 bp, Artificial Sequence
  ENSG00000250433_6 (sequence is synthesized)
cagtctgtggcttccatgcacattctggggatagcagcacctatttggatttccactgaaaggtagtggctttgaagtgagttggctcaggggaaatttcagctctatccacttacttgg

SEQ ID NO: 875343 - DNA, 120 bp, Artificial Sequence
  ENSG00000250433_7 (sequence is synthesized)
gattggaacttggggcaagtttcttaaacttgctgagtgtagtttcttcatctataagatgggtagaaaatctatcttgcaggaagaatcgattatttattaaataggtatttattggta

SEQ ID NO: 875344 - DNA, 120 bp, Artificial Sequence
  ENSG00000250433_8 (sequence is synthesized)
tgaggtcacacattatgttaggtgctgaatatagaaagtaaaaatagacatagctctttcccttaggtgacagacagaaaattaaacactcacgtaaataaatgtaacattatgtctata

SEQ ID NO: 875345 - DNA, 120 bp, Artificial Sequence
  ENSG00000250433_9 (sequence is synthesized)
agacatcctatgagtagaggtacaaggtgtcatacaagcccataatagaggaattttacctagttttggagatcagaaagtgatggtgaaggaaaggacgaggatgaatgtcacagcatt

SEQ ID NO: 875346 - DNA, 120 bp, Artificial Sequence
  ENSG00000250433_10 (sequence is synthesized)
caaggcagacagaacaagcaaaggcagcaccctgtggcacagaagcgaggggtgggtttgtgatataggggtagagggcaggtgccttctcctacccctgctcctgtcagcacaccggtg

SEQ ID NO: 875347 - DNA, 120 bp, Artificial Sequence
  ENSG00000250433_11 (sequence is synthesized)
tatacatagcacagttccatgttgaggctgtggaacccgacccctcaggttcaaattctgatttgatcacgtcctgactgcgtgatctcaggagagttagttacatttcctgtctgtgcc

SEQ ID NO: 875348 - DNA, 120 bp, Artificial Sequence
  ENSG00000250433_12 (sequence is synthesized)
tcaaacagaaatgataacactagtaactaccttgaggggttgtgatgattgagttaatacatgtaaaacgcttagaacactggcttacctcataagtgctaaaaggagtaggtgttactc

SEQ ID NO: 875349 - DNA, 120 bp, Artificial Sequence
  ENSG00000250433_13 (sequence is synthesized)
ctgacattccttccttaactcatggccctcagttataatacttacatggttctcggcatgagccctcttccctccctctgcccagtccaggaagaggctcaacccccgatgttcctcatc

SEQ ID NO: 875350 - DNA, 120 bp, Artificial Sequence
  ENSG00000250433_14 (sequence is synthesized)
accccatctggaccagtgtgactgcaccagcctgtagcattctctgtccatcccggtccctcacatattcaagacacacatgtaattttacattttccagtagccatattagaaaagtaa

SEQ ID NO: 875351 - DNA, 120 bp, Artificial Sequence
  ENSG00000250433_15 (sequence is synthesized)
aaagaaacaggtgaatttaatactgtactttagtccaatatagccatttatcatttcaacatgtaattaatattaaaaattattacattttacattctgtttttgtactctttccaatcc

SEQ ID NO: 875352 - DNA, 120 bp, Artificial Sequence
  ENSG00000250433_16 (sequence is synthesized)
atcatgattttaccctagcagcacacttcaatttggactagccacatttcaagtgcttgacagtcacaggtgactaatggctctcctatgggttatagcccagctcttgactctttgatc

SEQ ID NO: 875353 - DNA, 120 bp, Artificial Sequence
  ENSG00000250433_17 (sequence is synthesized)
cacaaggataagaaccacatccacttccacatctccaggtatgaggcagataaatagcagagagtgattacacaaaactcttctcaccacggattccggcatttgtgggcagctgcagaa

SEQ ID NO: 875354 - DNA, 120 bp, Artificial Sequence
  ENSG00000250433_18 (sequence is synthesized)
gagtaggtgggaggatctcccagattatgaggccagtttttctgtggctcagagactgccagtgactcgctcaagataaaacagcttgttagtggcagggatggagcccagaaatcctgt

SEQ ID NO: 875355 - DNA, 120 bp, Artificial Sequence
  ENSG00000250433_19 (sequence is synthesized)
ttcctgtcctcaggagtgtgtgttcgaaagaagttcttggcaaaggtgagaataaatcataggctctttgaagaggactccagtgtattaaacaaataggttgctgagatgcagttaact

SEQ ID NO: 875356 - DNA, 120 bp, Artificial Sequence
  ENSG00000250433_20 (sequence is synthesized)
actcagtaatgtagttgaagaaaattaatttttcattctgccactcagaatatcgaggctggccatctgtaaacacagcctgtctctaggagaacagaggtggaatcctccttgcaagtt

SEQ ID NO: 875357 - DNA, 120 bp, Artificial Sequence
  ENSG00000250433_21 (sequence is synthesized)
taaaaaaataacagagtaatctcagtggatgtcttaagagaaacataattataatttagttgacatatctcatatctcagtgatggtaaataaaccttccctaaataattcaattataaa

SEQ ID NO: 875358 - DNA, 120 bp, Artificial Sequence
  ENSG00000286136_0 (sequence is synthesized)
gaaggcatgtgccagatgctggattacatcagaatgagcaagaaaaatacagcatctgtccaggtggaacttacagtctggtgaatacacacaaataggtaaattctctttgctgtagga

SEQ ID NO: 875359 - DNA, 120 bp, Artificial Sequence
  ENSG00000286136_1 (sequence is synthesized)
gcaacacctaaacccagatttgaggttcccaggtggtactggatgctgctgatccaatgaccacattttaagaaccactgctttagaccaggccctaagtagggccagatagggggaaat

SEQ ID NO: 875360 - DNA, 120 bp, Artificial Sequence
  ENSG00000286136_2 (sequence is synthesized)
agtttcaaagcagcatgatgccaccgctcgactgaaggccaaggagctgcctttgggtaatggatggcacctcctcttcataaagtccatttcttcagatgcctcctgtggtggatgaac

SEQ ID NO: 875361 - DNA, 120 bp, Artificial Sequence
  ENSG00000286136_3 (sequence is synthesized)
ctttgcatatgtcattaagtgcttatgttgtcaactgctccatctcagaaaaaaagttttctcttgacagtggagtgtgagcacacagagcactcaaggtctaaccaggttaataggtag

SEQ ID NO: 875362 - DNA, 120 bp, Artificial Sequence
  ENSG00000286136_4 (sequence is synthesized)
gaacagctataaatcagagtccccagcactgtctgcactattttaactgagatgataggaaaataggtaacaagtttaaccccccatggcaactgctgtactgatatcttcacatacact

SEQ ID NO: 875363 - DNA, 120 bp, Artificial Sequence
  ENSG00000286136_5 (sequence is synthesized)
ccagaaagagctgactaagtcaacaagggaaggtaccatgctgggtgctttatacatatgacttccagcgctgacaacgatccattctggtagatattattgtctccttgtaatagggcc

SEQ ID NO: 875364 - DNA, 120 bp, Artificial Sequence
  ENSG00000286136_6 (sequence is synthesized)
cagctgggattgaactgaagtgtgtctagctctaaaacccttgtactttcaactgggtcatcatacacttatcctatgttctaattcattattaaaagtcaatctttcctatggataatg

SEQ ID NO: 875365 - DNA, 120 bp, Artificial Sequence
  ENSG00000286136_7 (sequence is synthesized)
gttactttgagaggtgggggtagtgaccagaaagggatgtaaagggggttgctggtaatgttgttttttcatttggatactacttagatgagcgtgtaccctttgggaaagcccactgag

SEQ ID NO: 875366 - DNA, 120 bp, Artificial Sequence
  ENSG00000286136_8 (sequence is synthesized)
ttgtacacttaggatttgtgcactttatgtatgtttgtaagaaatatttcaataggaaacattttaaagctagtttttcttttgaaggtgtaagctttttacttacttgtctccaaaatc

SEQ ID NO: 875367 - DNA, 120 bp, Artificial Sequence
  ENSG00000286136_9 (sequence is synthesized)
taactctttatgtgcctgtatgttgcagtggaaaaagtgagctcatgatcattttgcttatttacaatggataaatgagatccaaatacacagaatcaagggaaggagttgcttcttcta

SEQ ID NO: 875368 - DNA, 82 bp, Artificial Sequence
  ENSG00000286134_0 (sequence is synthesized)
tggagttttgaactcttggacttacaccagcggcttgccacatggtctcaggccttcaactacagactgaaggataccctgt

SEQ ID NO: 875369 - DNA, 120 bp, Artificial Sequence
  ENSG00000286134_1 (sequence is synthesized)
tttgaactcttggacttacaccagcggcttgccacatggtctcaggccttcaactacagactgaaggataccctgttggcttccctacttttgcggttttgggactcagactggcttcct

SEQ ID NO: 875370 - DNA, 120 bp, Artificial Sequence
  ENSG00000286134_2 (sequence is synthesized)
caccttgtgatcattcaatggatggatgcatcttgattagttcatgtagtgaaagaagaaattccatcagaacttgaggaaatgttccaatgagcaaatacttttaatttctctacctgt

SEQ ID NO: 875371 - DNA, 120 bp, Artificial Sequence
  ENSG00000286134_3 (sequence is synthesized)
ctacagaacaagatattgtttatttcaagattcctgtcaagatctattttcttctcaaatatgctctaccggagtaatcttatggttcctgtctgctccgtctgctataacagaatgtcc

SEQ ID NO: 875372 - DNA, 120 bp, Artificial Sequence
  ENSG00000286134_4 (sequence is synthesized)
taaactgagtggtttaaaagacatttattttttacaattctgatgtctggagaccaaaatgccagctgatttgttcctgcagtcttttagaagcaataatggcactaataattaagtcaa

SEQ ID NO: 875373 - DNA, 120 bp, Artificial Sequence
  ENSG00000286134_5 (sequence is synthesized)
taagaacatttggcacagtgattgggaacactgcagtttgcctcgatcactcatactactaccgcttatttgtagggtggaaaacctgaaaagactgtaggctactactccaatcctaaa

SEQ ID NO: 875374 - DNA, 120 bp, Artificial Sequence
  ENSG00000286134_6 (sequence is synthesized)
gcagggacgtcattcagaaagaatcatgcgactgcttctgccccaaactcagaaccattgcttagagattttgcccagggtgaaatgcaggaaaaacaaacaaacaaacaaacaaataaa

SEQ ID NO: 875375 - DNA, 120 bp, Artificial Sequence
  ENSG00000286134_7 (sequence is synthesized)
tacttggaatggtatttaccaggtgtccacaaggcttgcttcctcacgacctgcacacatttaactagcatactgccgtcagaggaaggcctttccaataaaatctgattaaaataaaaa

SEQ ID NO: 875376 - DNA, 120 bp, Artificial Sequence
  ENSG00000286134_8 (sequence is synthesized)
tcattacacactcatcctgtttctaatttattatttcacagagcactagttagcatctaatatactattttccttgtttttcattttgtgtatttacaattatttcctggaaaatgtaag

SEQ ID NO: 875377 - DNA, 120 bp, Artificial Sequence
  ENSG00000286134_9 (sequence is synthesized)
ctttgtgaaattaggagatgggggttcttttgttcaatgctatctacctgacacttacaatagtgcatcgcacatgataacagttcaaaattatttcttaaatgattggattgccttagg

SEQ ID NO: 875378 - DNA, 120 bp, Artificial Sequence
  ENSG00000286134_10 (sequence is synthesized)
atttttctagttctataaattttacttgtacagtaaagggataacccagtgagcttggtgggctcaaacgttgaatattccaaacatagtgctggccccttacttgttccagggagataa

SEQ ID NO: 875379 - DNA, 120 bp, Artificial Sequence
  ENSG00000286134_11 (sequence is synthesized)
cctctgagcccttggaatattctgcctataagaatgtctttgtatccttgagaatctgggccataccagatagttcatgccaataatgtaacttttagtgtacagctgtttttgtgtacc

SEQ ID NO: 875380 - DNA, 120 bp, Artificial Sequence
  ENSG00000286134_12 (sequence is synthesized)
gccactctgtatcagtttgacctctgatgggatggagccaaatagagcagtttggttatgtgggtgcctcatgcctacaagactgactgccaataaaaaccctgtcctcaaaactcagct

SEQ ID NO: 875381 - DNA, 120 bp, Artificial Sequence
  ENSG00000286134_13 (sequence is synthesized)
gggcttctctgtttgccaacacttacgtgtcaccatacgtcattgcttggagaattaaatggtgcctgtttgatgccactagggaagaataattgagggcttgtacctggtttctcctaa

SEQ ID NO: 875382 - DNA, 120 bp, Artificial Sequence
  ENSG00000286134_14 (sequence is synthesized)
attctataggataaattgtgcactatatacctttttcctttgctgatttgctgataaaatcagcaaaggaaagggtataaaaaatgtaagccacaggttttcacatatgaaatagatatg

SEQ ID NO: 875383 - DNA, 120 bp, Artificial Sequence
  ENSG00000286134_15 (sequence is synthesized)
tacataggcactagaaagattatataatctaagttccagatagcaaatacaaaatgttctgctcaacatcagtctgttccagtctgttcaaaagccaggtagccgttagacctttcagac

SEQ ID NO: 875384 - DNA, 120 bp, Artificial Sequence
  ENSG00000286134_16 (sequence is synthesized)
agctttcagacatgtctaaaaaccctctcagtaatgcttacatttaaattatttttaggcacattaacttttgatcacaaacaaagcataattaagcacttattgtttttaataatattc

SEQ ID NO: 875385 - DNA, 120 bp, Artificial Sequence
  ENSG00000286134_17 (sequence is synthesized)
aatttagatagcactgcagatactctaattttctgtcatttcaagatatctatgtaaatttagttaattaaaaaataattttaatgcctcttgatttgcattataatttctaaattagct

SEQ ID NO: 875386 - DNA, 120 bp, Artificial Sequence
  ENSG00000286134_18 (sequence is synthesized)
atcagcttctttcaaactcttactattgttgatattttgatcgcttcctatgaatcgtgaatattttaatgacatctaaaatgtgactcctggccgggcacagtggttcacgcctataat

SEQ ID NO: 875387 - DNA, 66 bp, Artificial Sequence
  ENSG00000286134_19 (sequence is synthesized)
gtggttcacgcctataatcccagcaccttggtaggtcaaggcgagaggatcatttgaggttagtaa

SEQ ID NO: 875388 - DNA, 74 bp, Artificial Sequence
  ENSG00000286134_20 (sequence is synthesized)
gtctctactaaaaatagtaaaaattagctgggcgtggtggagaatgcctgtaatttgagctatatgggatactc

SEQ ID NO: 875389 - DNA, 120 bp, Artificial Sequence
  ENSG00000286134_21 (sequence is synthesized)
agactccacctcaaaataaatacataaataaaataaaataaaatggtgtctcctttccagttttcaatttactttgccaagatctatcataggaattgttgcctatggcatctacagcct

SEQ ID NO: 875390 - DNA, 120 bp, Artificial Sequence
  ENSG00000286134_22 (sequence is synthesized)
tatgaaatgtatttcttaagttataagacttaaaagttgaaattaccccttaattcataggctgcaggatggatgctgtgttatcaggcatagaaacaatagtaatctacttgtacatct

SEQ ID NO: 875391 - DNA, 120 bp, Artificial Sequence
  ENSG00000286134_23 (sequence is synthesized)
ccattagggatcttgggtgaccagatgcattgccaatgaacaataatattttcaaatgaatctttttttcttattagatctcaaaggtgggcttaaaatattcagtaaaccgtgctgcaa

SEQ ID NO: 875392 - DNA, 120 bp, Artificial Sequence
  ENSG00000286133_0 (sequence is synthesized)
acagcactgagtctgtttccagaaagtgggcaagcagggctgagaatttgccttgggctacttgcctcccaggcggaggtggtgagcggagattgcgccatcgcactccagcctgggcaa

SEQ ID NO: 875393 - DNA, 120 bp, Artificial Sequence
  ENSG00000286133_1 (sequence is synthesized)
caagagcaaaactccatctcaataataaaaaaaaagatactaaggctttagttcttccccggcctgtggagtctgcttgctggattcatgcccttccccccaagcagagttctggccagg

SEQ ID NO: 875394 - DNA, 120 bp, Artificial Sequence
  ENSG00000286133_2 (sequence is synthesized)
aggcttctgaacaggttcaaattgttacaaagatcagctggagagttccttctccctgtggcgttttccctgcacctctggccaccctccggaaggatccctatggtgccaggcaggaat

SEQ ID NO: 875395 - DNA, 120 bp, Artificial Sequence
  ENSG00000286133_3 (sequence is synthesized)
gacctgcttggggacccagtgagctcacagggcctttcccacttcttcctctacctgtgtatttcacttggctctctacatcgactcagctccagccatgtgaagtgcctcactccctgt

SEQ ID NO: 875396 - DNA, 120 bp, Artificial Sequence
  ENSG00000286133_4 (sequence is synthesized)
ccctagaagctgatgccaccatgtttcctgtacaacctgcagaatggtgattagaacacagacacatacagaaggaagaccatgtgaggatgccaacagaaggtagccatctgcaagcca

SEQ ID NO: 875397 - DNA, 120 bp, Artificial Sequence
  ENSG00000286133_5 (sequence is synthesized)
cctgctgacaccttgatcttggacttctagcccctagaactttgagaaaattattttctgttgttaaataccatccagtctgtgatattttgttatggtagccctagaaatctagtcatg

SEQ ID NO: 875398 - DNA, 120 bp, Artificial Sequence
  ENSG00000286133_6 (sequence is synthesized)
ttatggtagccctagaaatctagtcatggaaaaacatagtaatacttttatccagacaggaaatgcagaaaggacattttcttttcttgaaatgtgtgtatgtatgtgcgtgtagccagt

SEQ ID NO: 875399 - DNA, 120 bp, Artificial Sequence
  ENSG00000286133_7 (sequence is synthesized)
aattaaaatgaaataaaaatacgaaggcaatgaattaatattttaaccacgtcaatgtgtattttgagaaaataaaaaggatggagagttgcataaagaaatgcttccaaaaagagaaaa

SEQ ID NO: 875400 - DNA, 74 bp, Artificial Sequence
  ENSG00000226091_0 (sequence is synthesized)
tggaaaccacatcttgttttccccctggattgtaaactccctgatgtctgggtcatctcagctcatgagctgag

SEQ ID NO: 875401 - DNA, 120 bp, Artificial Sequence
  ENSG00000226091_1 (sequence is synthesized)
aactccctgatgtctgggtcatctcagctcatgagctgagctttcagtgggtgctcagtggaacaggtgctgaatggagtcaggctttagggaggccagcgtgtgttggaaggaaaatac

SEQ ID NO: 875402 - DNA, 120 bp, Artificial Sequence
  ENSG00000226091_2 (sequence is synthesized)
ttcgttcttttgcatcagggtgtctcaaactcctgcccttaaaacacctgcaagagaatcatctaggtggcttgctcgctctgcatgcagaccctttagaatcagagtcagaatacctgg

SEQ ID NO: 875403 - DNA, 120 bp, Artificial Sequence
  ENSG00000226091_3 (sequence is synthesized)
ggctggagccacaaaatgaaatgacatttcaacaagtttgtcatcacgtaagagagaatagataacttcactcttctctgcaacgaatcccaaaagtatataattgagctgactgcaagg

SEQ ID NO: 875404 - DNA, 120 bp, Artificial Sequence
  ENSG00000226091_4 (sequence is synthesized)
tacttgacacgcaagagactccacaaatgggattcagcctctggaaagtggtggtagttccagatttatgtggatgttactttgtttttccctataaaatatattatttaaactatcaaa

SEQ ID NO: 875405 - DNA, 120 bp, Artificial Sequence
  ENSG00000226091_5 (sequence is synthesized)
ggaggaggacgacgtccctcccgaagagaagaggctgcggctcttgctggaggggggaagcgcacagccccaggactgcgaggacgggcaggacgcgccgcggtcggccaggaaggagac

SEQ ID NO: 875406 - DNA, 84 bp, Artificial Sequence
  ENSG00000226091_6 (sequence is synthesized)
cgagaccagcctggccaacatggcggaactgtctctactgaaaatacagaaattagccaggtgtgatggcacacacctgtaatc

SEQ ID NO: 875407 - DNA, 76 bp, Artificial Sequence
  ENSG00000226091_7 (sequence is synthesized)
agcagtgatttctttgaggaggagatccgtttcttcactcacaggtcatgtctgagtggatcaagaagaacagagg

SEQ ID NO: 875408 - DNA, 120 bp, Artificial Sequence
  ENSG00000226091_8 (sequence is synthesized)
gttccttggagtggctcccaggctgtgatcttgtggtcgggtggcaaggggttgctttattcggtgatggctagaggatgttttagcaggtaaatcgggatctcaggagcccctgagtgc

SEQ ID NO: 875409 - DNA, 72 bp, Artificial Sequence
  ENSG00000226091_9 (sequence is synthesized)
ggtaaatcgggatctggggatgtgggggcgtggagggtggggggtattgatttcctgccaatatcagaagtt

SEQ ID NO: 875410 - DNA, 90 bp, Artificial Sequence
  ENSG00000226091_10 (sequence is synthesized)
agctcctcctggagggagagaaaagtgtctcctaggtacttggttatcaacctcaaccacttgctgagccttccccaagaccaggcatct

SEQ ID NO: 875411 - DNA, 75 bp, Artificial Sequence
  ENSG00000226091_11 (sequence is synthesized)
gggttgaaaccagatcaggaaggttattttccttcttgctgaggagaaacctggtttctcagctttgccacagtc

SEQ ID NO: 875412 - DNA, 120 bp, Artificial Sequence
  ENSG00000226091_12 (sequence is synthesized)
ttgctgaggagaaacctggtttctcagctttgccacagtcacaacacttggggtgagaccattcatggtggtggtgggggcatcctgtgtattgtaggatggctagcaccatccctggtc

SEQ ID NO: 875413 - DNA, 120 bp, Artificial Sequence
  ENSG00000226091_13 (sequence is synthesized)
tccatcctctaggtgccattctatcctcccagctgtggctaccccagatgtctccagatggtctcaaatgctgtggggcaagggagtgctggactacacaggctgaagctctctctgccg

SEQ ID NO: 875414 - DNA, 120 bp, Artificial Sequence
  ENSG00000226091_14 (sequence is synthesized)
agatatagatatttccctggtgacgatctttcaagctgacatgaagacatggccacccactggaacgtcgtgtgtctgccgtggcgctcttgtaatttgtgaggcaggctcctgaggaat

SEQ ID NO: 875415 - DNA, 76 bp, Artificial Sequence
  ENSG00000226091_15 (sequence is synthesized)
gtggcgctcttgtaatttgtgaggcaggctcctgaggaatgcagtgcaactcaagagacaggaaggaaatgagttg

SEQ ID NO: 875416 - DNA, 120 bp, Artificial Sequence
  ENSG00000226091_16 (sequence is synthesized)
caggcaggagacagcgactgcttggtccggggcaggtgagcgcagcgcaggccagggccctacctgtccacggtgcgcgcgagcggccagcagagggcgccagaggaccacgagcggccc

SEQ ID NO: 875417 - DNA, 80 bp, Artificial Sequence
  ENSG00000226091_17 (sequence is synthesized)
cacgagcggcccgcggaggagtccgcgccggccccgatgcccagctccgcgccgcgcggacccaccgagcccgcgctcag

SEQ ID NO: 875418 - DNA, 120 bp, Artificial Sequence
  ENSG00000226091_18 (sequence is synthesized)
tcttgtaatttgtgaggcaggctcctgaggaatgcagtgctgctttctgtcttgttatcacatttccttggaggagagcccagccttggtggagagccctgctctggctttgtccctcgg

SEQ ID NO: 875419 - DNA, 67 bp, Artificial Sequence
  ENSG00000226091_19 (sequence is synthesized)
tccctcggcatgagatggcagaggatggtgctgctgggagaccctcacgtctgcacactgggggctg

SEQ ID NO: 875420 - DNA, 65 bp, Artificial Sequence
  ENSG00000226091_20 (sequence is synthesized)
cgatgcccagctccgcgccgcgcaggctccttcttcttccgcaagtgtaggcagagcccccggag

SEQ ID NO: 875421 - DNA, 90 bp, Artificial Sequence
  ENSG00000226091_21 (sequence is synthesized)
gcgcaggctccttcttcttccgcaagtgtaggcagagcccccggagccatggccagcccttcccgcagctccgaagccactggcaagccc

SEQ ID NO: 875422 - DNA, 120 bp, Artificial Sequence
  ENSG00000226091_22 (sequence is synthesized)
gacgtccctcccgaagagaagaggctgcggctcttgctggaggggggaagcgcacagccccaggacggcgaggacggggaggacgcgccgcggccgggcagggtggagaccggcacccag

SEQ ID NO: 875423 - DNA, 63 bp, Artificial Sequence
  ENSG00000226091_23 (sequence is synthesized)
tctccacgagttttgagcagcctcggttttcctaccacctccaaatcatgggcgtcccttctc

SEQ ID NO: 875424 - DNA, 120 bp, Artificial Sequence
  ENSG00000226091_24 (sequence is synthesized)
aatccttcttagaaattcctaaggctcaatgctgtgtggaagattctgagaaagaaaatagtttccgatctttgggattcccgagatggtccaatctgcaaaaagttcattgccatttcc

SEQ ID NO: 875425 - DNA, 120 bp, Artificial Sequence
  ENSG00000226091_25 (sequence is synthesized)
atcaaggacactgagaacaagagtcttatctggattggatcctgggaattgagaagcttcagcagggcttccgctgggactaggatcagggtgtggacacccccaacctggaccgtctgg

SEQ ID NO: 875426 - DNA, 120 bp, Artificial Sequence
  ENSG00000226091_26 (sequence is synthesized)
ccggggagggcatcaaggccaattacccatgcagccccctgtcacaatgacctccccatcccacttcactaccatcccagaactctgtacttactgctccgtcactggtaatgacaatga

SEQ ID NO: 875427 - DNA, 120 bp, Artificial Sequence
  ENSG00000226091_27 (sequence is synthesized)
gaggaccagttagaataagttatgctgcagaaactaaagaaatctcgtcaaacaagtggtatgtaatagaaagtcttagggcagccgtgtatattttctcccccaatgactcaattgaaa

SEQ ID NO: 875428 - DNA, 120 bp, Artificial Sequence
  ENSG00000226091_28 (sequence is synthesized)
gaaaatgagaagctgttaccgccatgttccgggcagaagctatcaaaagtataagccatgatattataatttgatgatttttcacccttcaaatggatatggcccaggggtgaaaagtgg

SEQ ID NO: 875429 - DNA, 120 bp, Artificial Sequence
  ENSG00000226091_29 (sequence is synthesized)
tgatggtcaagagttataaaaatgaggtcgtctctgttcaacatttctcctttcttgaaaggatactcaaagtcatgctcagggcctctaatggccagaaataaagttcctcccagttcc

SEQ ID NO: 875430 - DNA, 120 bp, Artificial Sequence
  ENSG00000226091_30 (sequence is synthesized)
agttcctcccagttccagagcacctcaggacaaccccaaaaccagagcaactgcttattgccatgtagactatgtactgtgcaattcctggggtggcattttcataaatatgtgggtggc

SEQ ID NO: 875431 - DNA, 120 bp, Artificial Sequence
  ENSG00000226091_31 (sequence is synthesized)
gccccctggaggtatgcaatgcacaacttgcacaaatggtaagtcatcgtaacccaaagtccacaaagaagaggtaaacaaaattcccatcgatgttgccatcagtcatgagtctgcctt

SEQ ID NO: 875432 - DNA, 90 bp, Artificial Sequence
  ENSG00000226091_32 (sequence is synthesized)
aaattcccatcgatgttgccatcagtcatgagtctgccttttcttcatgggacagtagcaaaaccaatttggccaagtgtgcttggatga

SEQ ID NO: 875433 - DNA, 120 bp, Artificial Sequence
  ENSG00000226091_33 (sequence is synthesized)
ttagtgggagttgtcggggcattgtaggatgcttagcagcatcgctggcctctacccattagctgccagtagcaccacctcctccagccgcaaccaccaaaattgtctccagacatggcc

SEQ ID NO: 875434 - DNA, 120 bp, Artificial Sequence
  ENSG00000226091_34 (sequence is synthesized)
acatgttctctggggggcaaaatcactcccggttgagaagccctgaagtaaagacataatacgcagatcacatgtaagtaagacagcctaagggccacacaggggatgctgtacccatga

SEQ ID NO: 875435 - DNA, 120 bp, Artificial Sequence
  ENSG00000226091_35 (sequence is synthesized)
caaagacagagtcttaaagaggttaaagaggtggagaaagagaaaagaaatgaagtcccagctgccgagagaaacagatgctgactagatgttgttgacagtcatctttaaactgagtta

SEQ ID NO: 875436 - DNA, 120 bp, Artificial Sequence
  ENSG00000226091_36 (sequence is synthesized)
aaagatgctgagaagccatcagctcccatcctgctctccagggacaacgctgctgaaaaaggcctggagatcaacaaagccccaaacacaggtgcactgagtaaagaaaccagagattga

SEQ ID NO: 875437 - DNA, 120 bp, Artificial Sequence
  ENSG00000226091_37 (sequence is synthesized)
gacaaaaaagacattccctcaaagactactcatttccaagaggggagaaaaagtggagtcatgaaaaacagttgaggctgggtagagtgactcgcacctgtaatcccagcactttgggat

SEQ ID NO: 875438 - DNA, 86 bp, Artificial Sequence
  ENSG00000226091_38 (sequence is synthesized)
aaaaatagcaagaccttgcctctagaaaaagggaaaaaattagccaggtgtggtgatacatgcctgtggtctcagctacttgggag

SEQ ID NO: 875439 - DNA, 120 bp, Artificial Sequence
  ENSG00000286138_0 (sequence is synthesized)
ggaagctgagagcgggctgactgtggtccagtcctacttcgattcagtgtgaactgacactctgatctgaagacgctcaggcctttgtcatttcagcaccccagatgctattttccattc

SEQ ID NO: 875440 - DNA, 120 bp, Artificial Sequence
  ENSG00000286138_1 (sequence is synthesized)
catttcagcaccccagatgctattttccattcgaagaatgccgccaccaggtggcggtattttaacatggccatgcaatccggagccagaggcttgctctgtcacccaggctagagtgca

SEQ ID NO: 875441 - DNA, 90 bp, Artificial Sequence
  ENSG00000286138_2 (sequence is synthesized)
aggtctttttgcattactaacctgtgatatgggtttatgggacttcattatttcaaagggaggcagcttggccccggagagcatgcattc

SEQ ID NO: 875442 - DNA, 120 bp, Artificial Sequence
  ENSG00000286138_3 (sequence is synthesized)
tttcaaagggaggcagcttggccccggagagcatgcattcctggcttctgcgatggatagacttgtgttctccatctcaggagctccccctcaaggtgggggtaagagatgagggcttcc

SEQ ID NO: 875443 - DNA, 72 bp, Artificial Sequence
  ENSG00000286138_4 (sequence is synthesized)
ttgctaagaataaggtctgggctagaaatatggattcttagttgtggttgaaagtacggagactgaggcggg

SEQ ID NO: 875444 - DNA, 81 bp, Artificial Sequence
  ENSG00000286138_5 (sequence is synthesized)
tccgacctcttctttacaacaaatacaaaacattagcttggcgtggtagcatgtgcttgtagtcccagctactcaggaggc

SEQ ID NO: 875445 - DNA, 120 bp, Artificial Sequence
  ENSG00000286138_6 (sequence is synthesized)
taaggctgtagtgagccgtgatcgtgccactacactacactacactacactacactacctgggcaacagagagagaccttgtgtcaaaaaaaaagaagaagaaagaaagagagagagaga

SEQ ID NO: 875446 - DNA, 120 bp, Artificial Sequence
  ENSG00000286138_7 (sequence is synthesized)
aaggaaagaaagaaaactacagcattggacactcagaggcagtgtgtcatataagcatgtcaaagacccaaagataaagtggagatagaagactcctttaagccaggatccgtggctcag

SEQ ID NO: 875447 - DNA, 85 bp, Artificial Sequence
  ENSG00000205559_0 (sequence is synthesized)
aaaaaaaaaaaaaaaaaaagaaaactgattctggctgggggcagtgggtcacgcttttaatccctgcactttgggaagccgaagt

SEQ ID NO: 875448 - DNA, 89 bp, Artificial Sequence
  ENSG00000205559_1 (sequence is synthesized)
agcaagaacctgtctttacaaaaattaaaggttccagctactctggatgctgaggtgagagaatcacttaagcccaggaggtcaaggct

SEQ ID NO: 875449 - DNA, 120 bp, Artificial Sequence
  ENSG00000205559_2 (sequence is synthesized)
acgccactgcactccagcctgagcaacacagcaagactgtctgaacagcaacaacaaacacaccaaaaaaactagtttacttcggaaaagggactgtctaggtctttgaagggctgatac

SEQ ID NO: 875450 - DNA, 120 bp, Artificial Sequence
  ENSG00000205559_3 (sequence is synthesized)
gaaaagggactgtctaggtctttgaagggctgatacaggatctgagctgacactgtttccaggagccctgaagcatcatggccctctcattagggtgcaggcttatggaaatcagatgat

SEQ ID NO: 875451 - DNA, 120 bp, Artificial Sequence
  ENSG00000205559_4 (sequence is synthesized)
aagcagaattcccaacccgagtcctgtggttacttctctggtctcaatgcatacttgggatgtttttacctagcagagggcggagcgtatacattgatcccaggcctttggtaccatatg

SEQ ID NO: 875452 - DNA, 120 bp, Artificial Sequence
  ENSG00000205559_5 (sequence is synthesized)
taaggaagcgcaaagtagaaacctttgaaactcctcaccctactgaaacctttccaagatagtaagtcagaaacaatgctgcattccaggtgtaattgcagaggtatttcgccctcaaag

SEQ ID NO: 875453 - DNA, 120 bp, Artificial Sequence
  ENSG00000205559_6 (sequence is synthesized)
acttataaagcagtggttaccgtttcatcccttcaattaacctgaatggctcctgctaaatcttggtggattcaagtaaatgatgatgccctgcacaaacttagccaagtcgtgtccccg

SEQ ID NO: 875454 - DNA, 120 bp, Artificial Sequence
  ENSG00000205559_7 (sequence is synthesized)
atcacacagctgtgctaggtgtggtatctttactggaaccgataaatgcacctctggctcttgataatgcaattattgacttggtgaacattcttttcaattgccagtggtaaagaggat

SEQ ID NO: 875455 - DNA, 120 bp, Artificial Sequence
  ENSG00000205559_8 (sequence is synthesized)
cttgctgtctgaactctcctgttctctgtcacaatagtccttaggtagcttatcatctatattccatataacattgatgatgtcatactagttggacatggtgaagaaggccgtgcatgt

SEQ ID NO: 875456 - DNA, 120 bp, Artificial Sequence
  ENSG00000205559_9 (sequence is synthesized)
cagaggatgagcgagaagccctcagaagttctggagcctgccatatcagtgacattctcaggggtgcagcgtttgagggcaagccagggacaagttattgcatcctgcatccttacaagg

SEQ ID NO: 875457 - DNA, 120 bp, Artificial Sequence
  ENSG00000205559_10 (sequence is synthesized)
aagaaagaggcacagcattgaggcacctctgtgttttggagtcagcatgcaccgcgctagaggatacctctctgacccctttattgggtaacgggaaaactgccagctttgagtggggcc

SEQ ID NO: 875458 - DNA, 120 bp, Artificial Sequence
  ENSG00000205559_11 (sequence is synthesized)
cagagaaaaagagggctctgctaaagatttggattgggagatgggcttccctgctgcatagatccaatgggttaccggggggcttatttggggtaggaaggaccctatatggcatctctg

SEQ ID NO: 875459 - DNA, 120 bp, Artificial Sequence
  ENSG00000205559_12 (sequence is synthesized)
gcaaactccaacggaagagttgcagtacactgtcctagagttcttggacaagaccatgccttctgcagcagagaactactcgccaagtgagagcagtatcaggcacactaccagacccag

SEQ ID NO: 875460 - DNA, 120 bp, Artificial Sequence
  ENSG00000205559_13 (sequence is synthesized)
aggagttggtgaacagcaggatggatgggatgtcagtcagctgtgcccctggctacccctgtgcttgaacagtggactgtgagtggcggcgtcatgcagaaggagcacagggtcccaggc

SEQ ID NO: 875461 - DNA, 120 bp, Artificial Sequence
  ENSG00000205559_14 (sequence is synthesized)
cagcatcactatccaggagcttcaggcatgctccgtgtaccaacatgggatcacgaatcacatcgcctcaggccaagaaagccattttatagcgaaagagccttaggatctgctggatta

SEQ ID NO: 875462 - DNA, 120 bp, Artificial Sequence
  ENSG00000205559_15 (sequence is synthesized)
gagcctgtttcccaggtaggaacgcttccacgagggcactcctgctggttgcaggaaggatacctctgctgagcctgaatctgcaaagaccaccaggttactctcagctcctcatactgg

SEQ ID NO: 875463 - DNA, 120 bp, Artificial Sequence
  ENSG00000205559_16 (sequence is synthesized)
tcctcatactggtggaccagcaggccacaaaggaggggatacttgatcctgataaacggccttctctgacaccatggcggccccctgagcctgtgccgagattgtgccactgcactccag

SEQ ID NO: 875464 - DNA, 120 bp, Artificial Sequence
  ENSG00000205559_17 (sequence is synthesized)
aggaggggatacttgatcctgataaacggtgaggaggtagcgtggctgctgcgtaacggggcaagcaggcattgatctggcacttagaggattcatctaggtctgtcttggtgcttccat

SEQ ID NO: 875465 - DNA, 120 bp, Artificial Sequence
  ENSG00000205559_18 (sequence is synthesized)
gccaagtaatgacaatgaaaaggtcttttcagcagccatagcccctaagggctcagatgcctcagggtgaaggtctgggcagcgtcaccaggcaagccatggagacaagctggaatgctg

SEQ ID NO: 875466 - DNA, 120 bp, Artificial Sequence
  ENSG00000205559_19 (sequence is synthesized)
gtgagggtgaggccaaggaggaggtggctgctgaatatctgttacttgggagaagctgtggcagtggggattgtatttgttctgctaagcctcttgtattaaggctttcataggagttgt

SEQ ID NO: 875467 - DNA, 120 bp, Artificial Sequence
  ENSG00000205559_20 (sequence is synthesized)
aactagcctttactttgaagaatcgtgacagagtagactcaatattgtagctgactagatctgagaggggcaggagatggtgtcttggctgatgccctcagcccacctttaactgcagtg

SEQ ID NO: 875468 - DNA, 120 bp, Artificial Sequence
  ENSG00000205559_21 (sequence is synthesized)
ctgcagtggacacagagctgcatctctgctgtgtgtctttgcacttcctgctccaggccttctctgacaccatggcggccccctgagcctgtgccgagattgtgccactgcactccagcc

SEQ ID NO: 875469 - DNA, 120 bp, Artificial Sequence
  ENSG00000205559_22 (sequence is synthesized)
accaatggtctctctctgggcggggctgctgttggacggcctgggccaatccgaggcgccggaggccaatcagttggcggagcggcgcgtgcgcgggcgaggaactgcccgggcgcggta

SEQ ID NO: 875470 - DNA, 120 bp, Artificial Sequence
  ENSG00000205559_23 (sequence is synthesized)
gcgtacgggaagaccggagaggagctgcgtctctgccccgtgggagccggcggggcggcggggcggcggctgcagctgcagctccggcgcgagggctcccttgccgggccctcttccccg

SEQ ID NO: 875471 - DNA, 120 bp, Artificial Sequence
  ENSG00000205559_24 (sequence is synthesized)
aagtgaagactcgcagcttgccgcagccccctcctcggcctgcgcacctcccattgagggcgtcctgatttaaacgcgtgcctcctgcatttctgcttctgccccaggctagagcggcga

SEQ ID NO: 875472 - DNA, 120 bp, Artificial Sequence
  ENSG00000205559_25 (sequence is synthesized)
ccaggaacgctggacccacagagatctgtggcaatgtctgtcgaaccatggtgttctttggggcatctgactagagtattgtttgataaccagaaagaaatcaaaaattggtgatcacaa

SEQ ID NO: 875473 - DNA, 120 bp, Artificial Sequence
  ENSG00000205559_26 (sequence is synthesized)
ttggttcctctcaggaaggatcttacaataccagcatctgagcatataccaagaaatattcctccaatccttccctaaagggacctagagccactttaaaaagtaactggtccgggcgtg

SEQ ID NO: 875474 - DNA, 85 bp, Artificial Sequence
  ENSG00000205559_27 (sequence is synthesized)
aattagccgggtttggtggcttgtgacaatcccttgaacccaggccttgttgccgcgagccactgcactccagcctgagcgacag

SEQ ID NO: 875475 - DNA, 120 bp, Artificial Sequence
  ENSG00000205559_28 (sequence is synthesized)
cagcgcgcgtccgtcctgagcgtgggtgaggcctggaggaggcgcgcgcgctaggcagggccgcacagcgcgggcagagtgcgggatgcgggcacccggtgggcctagaaccaattacag

SEQ ID NO: 875476 - DNA, 120 bp, Artificial Sequence
  ENSG00000205559_29 (sequence is synthesized)
agtggacattgaggaaagagcgaggttcagtggactggaggtttgtggtggtttcatgacacgtggactggagatttgcagtggttttatgacacatggactggaggtttgtggtggttt

SEQ ID NO: 875477 - DNA, 120 bp, Artificial Sequence
  ENSG00000205559_30 (sequence is synthesized)
catgacacatggactgcagatttgcagtggttttatgacacagctcctaagttctttgacactcttcccatggaggggtagggtctgtgacccccctcttgaagctgggtaggcttgcaa

SEQ ID NO: 875478 - DNA, 120 bp, Artificial Sequence
  ENSG00000205559_31 (sequence is synthesized)
ctgctttggccaatagtcacagcagcagtgatgctgtaggacttacaaggttagaccagaaaagggcatgccctccaaggatccttactctgatgggaaccagccatcatgtagaaactc

SEQ ID NO: 875479 - DNA, 120 bp, Artificial Sequence
  ENSG00000254431_0 (sequence is synthesized)
agcgcacccatgagggatggagcaaggtagagttaggaagctgaatcctaggttcctgtattagtccgttctcgtgctgctaataaagacacatccaagactgggtaatatttaaaggaa

SEQ ID NO: 875480 - DNA, 120 bp, Artificial Sequence
  ENSG00000254431_1 (sequence is synthesized)
cacagttccacgtggctggagaggccttacaatcatggaggaagacgaaggaagaaaaaaaggacgtcttacatggcggcaggcaagagagatgagaaccaagcgaaaggggcttcccct

SEQ ID NO: 875481 - DNA, 81 bp, Artificial Sequence
  ENSG00000254431_2 (sequence is synthesized)
ctcatgagacttattcactaccatgagaaaagtagggaggacaccgcccccatgattcagttatctcccactggggccctc

SEQ ID NO: 875482 - DNA, 120 bp, Artificial Sequence
  ENSG00000254431_3 (sequence is synthesized)
tggggacacagccaaaccatataagttccaatgctccctggtaccagctaagactctgctgtatgtgaagacatttcgcagaattcagacggagatcatgatcaaatagcacctacacaa

SEQ ID NO: 875483 - DNA, 120 bp, Artificial Sequence
  ENSG00000254431_4 (sequence is synthesized)
gaattcagacggagatcatgatcaaatagcacctacacaatgaaagattccctagatgttacaacctcacaggatggcaaagttcaacaaacataaatttcaacaaaaatactagaacac

SEQ ID NO: 875484 - DNA, 120 bp, Artificial Sequence
  ENSG00000254431_5 (sequence is synthesized)
acacaggttgaattaatataatgtaatcagaaaaatggctagaacacaataaggatccaatatgttacttattttgtataggtatttattaaaatcaacattatatacttctgtaattat

SEQ ID NO: 875485 - DNA, 120 bp, Artificial Sequence
  ENSG00000254432_0 (sequence is synthesized)
actggcacctggtcaggaactcggagcccatctctggggtcactaacaggctgactggaaggaggcagctcaggcctcactgtcacacactgatctggaggtctctctggttacaaaatg

SEQ ID NO: 875486 - DNA, 120 bp, Artificial Sequence
  ENSG00000254432_1 (sequence is synthesized)
tctgtctgggccaggtgtactgcttacaacagaatctacaaggacaacaactcaccgtgtttttcaattcagatttttaagttatgaattcaaatctactaaataaatatcagaaacaaa

SEQ ID NO: 875487 - DNA, 120 bp, Artificial Sequence
  ENSG00000254433_0 (sequence is synthesized)
gtacaaattactgtattagtcagggttgtagcaggaaacagatggcacaaccaaaagtaatgatcaaagagggtgtaggcaagaataacaaaaatctatggagatggtgcagcagcttag

SEQ ID NO: 875488 - DNA, 120 bp, Artificial Sequence
  ENSG00000254433_1 (sequence is synthesized)
gctaagcaagagcaagatctttctacttctaaaatgaaaaggcagggaaaagttgttcctgaacccatgagatgtatatatggagaaggctatgtcagaagctgtgatgctgaggaacac

SEQ ID NO: 875489 - DNA, 120 bp, Artificial Sequence
  ENSG00000254433_2 (sequence is synthesized)
agctatttccaagccactgcagggcaggaagggagtgtgaagctgagatttaaaaacagaaggacgagtaacctgggtcagaacatcttcagataacagatccatcgggtttcctaagag

SEQ ID NO: 875490 - DNA, 120 bp, Artificial Sequence
  ENSG00000254433_3 (sequence is synthesized)
gacagaaaaggtcatttgaaggtgaaggcaaaaattggagtgatgcaactgcaagccaaggactgctaggaatgagcagaaactaggaagaagcaaggaaggattctttcttagaacctt

SEQ ID NO: 875491 - DNA, 120 bp, Artificial Sequence
  ENSG00000254433_4 (sequence is synthesized)
cagagagaccatggccctgctgacaccttaacttccagccttccagaacttacagaagagctttcggtcactttaagacaccatgtttgaggtactttgttaagcagcctgaagaaacta

SEQ ID NO: 875492 - DNA, 120 bp, Artificial Sequence
  ENSG00000254433_5 (sequence is synthesized)
atatacacatggatacaatttaaattatacataagcacacacattcgcgtacccttcggagttttaattctatgtccctgcagtcaaatgttcaaatgctggtccatcacttcttagcta

SEQ ID NO: 875493 - DNA, 120 bp, Artificial Sequence
  ENSG00000254433_6 (sequence is synthesized)
catgactttgtaccatttcgtattggaatttcttctgtgaagcaaaaacagtcccaaaatgaaggatcttcaggtgtcatgggaacggcagatgacattaaatcattaaagttgagaata

SEQ ID NO: 875494 - DNA, 120 bp, Artificial Sequence
  ENSG00000254433_7 (sequence is synthesized)
gtaaattgcctctgggttggtttggaatcatcctgagatggaacctaaaagacaaaagcagattaccttattgttatattgcatgttaatcttatgatcaatttcataatcatgaaaata

SEQ ID NO: 875495 - DNA, 120 bp, Artificial Sequence
  ENSG00000254433_8 (sequence is synthesized)
agtaagaccaacttacatttcagtagtattaaatgacaacataggattcctagaacattgtttgtatttcttatattagtgttgccaatacaacaaatcaaaaaaaaatgaaatagaaaa

SEQ ID NO: 875496 - DNA, 120 bp, Artificial Sequence
  ENSG00000254434_0 (sequence is synthesized)
tttaggtaacagagcatctgtaacaacactgaggtgcacttgtcaattgcaggatcatatgtaggaggtgttcagcaagaacttgtgctccttcttggatgatgatgtgttgatgaccag

SEQ ID NO: 875497 - DNA, 120 bp, Artificial Sequence
  ENSG00000254434_1 (sequence is synthesized)
gtgatgatgtgatgacctcagagtcttttgaggagccagattatattgtaatttaagttctccaacaaaaatatagccgtgaagcattggggaagagaaggaagagattaaatagccctg

SEQ ID NO: 875498 - DNA, 120 bp, Artificial Sequence
  ENSG00000254434_2 (sequence is synthesized)
agaaagactaccatccacatgaagccaaaaacgcaaaaaaaaactatgtggcatgtttaggaaatatccaaaaagaaaaatgagatggaaggagaaatattagctggggagcattgcaag

SEQ ID NO: 875499 - DNA, 120 bp, Artificial Sequence
  ENSG00000254434_3 (sequence is synthesized)
ctatgttagggaagttggaattaatcctaagagcaataagaaaacactacattgttttcagcagaggggcgacaccatcggattttcatttttagaaaaatttctttctcattcacttac

SEQ ID NO: 875500 - DNA, 120 bp, Artificial Sequence
  ENSG00000259618_0 (sequence is synthesized)
aaaaaacaagtagcagatactcgttaattcgattcttcaataatgtcagagagcacctatttagttagtcactctgcaggcaccagtgattcaacagcaatctacacaaaagagttcctg

SEQ ID NO: 875501 - DNA, 120 bp, Artificial Sequence
  ENSG00000259618_1 (sequence is synthesized)
gagtgtgggctttcatgattataccaaattcttctgccacttcacctttatgccccaacaaatttgacctgtgcaaataaaagttgttacaaaagacaataaaggaaatttaaaagttaa

SEQ ID NO: 875502 - DNA, 120 bp, Artificial Sequence
  ENSG00000254438_0 (sequence is synthesized)
gaggaaggaagggcatctgatctagcctggggctcagagaaggatccctgaagagaggccttggactaataaaagttgtgtaggagttatccaaggcaacaaggagtagaggaggagggt

SEQ ID NO: 875503 - DNA, 120 bp, Artificial Sequence
  ENSG00000254438_1 (sequence is synthesized)
atttaagacaatgagaaaaatgaataaagacatggaaatgcaaaacatcttggaaacctctccttgttgaggatgcagacagatccatcccactgccgagctctggctaccctttccagg

SEQ ID NO: 875504 - DNA, 120 bp, Artificial Sequence
  ENSG00000254438_2 (sequence is synthesized)
actcacctcttggatgagatgatgtcctcgtgctgcccttctgccgacccttccctgcaatcggccctgacctctcagaatgcagcttgccccagactgatatagctcatccctcattgg

SEQ ID NO: 875505 - DNA, 120 bp, Artificial Sequence
  ENSG00000254438_3 (sequence is synthesized)
gtgcatctgtgcccagctaccctggttctgatgaagtaaataggacacatatgtcaccgtggagcctcatgagtctctttagataaagataaatttggaaaattgcaaaactctccagag

SEQ ID NO: 875506 - DNA, 120 bp, Artificial Sequence
  ENSG00000254438_4 (sequence is synthesized)
acaataccttcctaatgatttctgccttctttgacacctcattgcactgattaatggtcattcaaattgatcacctggcatagctcactgtcaaaataaaaaaggacatattttaaaaag

SEQ ID NO: 875507 - DNA, 120 bp, Artificial Sequence
  ENSG00000259616_0 (sequence is synthesized)
cagcaagatggctttgaaacgctttcacaacgaaggtgtgctccactgggcaccacaacatacggttcagacgtttaaagcctgtctcagcccaatttcctctccatttgctccctgggt

SEQ ID NO: 875508 - DNA, 120 bp, Artificial Sequence
  ENSG00000259616_1 (sequence is synthesized)
aaggtatccccccttcagtgcaggcagaactggcgacttgcttctaatcaacaaaatatggcaaagtggtggagtctagaagtctgagatcagggcaccagcctggccgagttctgatgg

SEQ ID NO: 875509 - DNA, 63 bp, Artificial Sequence
  ENSG00000259616_2 (sequence is synthesized)
agtctgagatcagggcaccagcctggccgagttctgatggatctacctcccaggttcaagtga

SEQ ID NO: 875510 - DNA, 120 bp, Artificial Sequence
  ENSG00000259616_3 (sequence is synthesized)
ctgggattgcaggcgtgagccaccgtgcctggccgaccactgatcttttcactgtatccacagtgttgccttttccagaatgtcatagaatttgaatcatactatatgttgccctttcag

SEQ ID NO: 875511 - DNA, 120 bp, Artificial Sequence
  ENSG00000259616_4 (sequence is synthesized)
atgagtttctttcacttactaatattcatttgtttcctccatgtcttttggcttgataattcatttctttttatcactgaataatattccattgtctgatgtaccacagtttatttacgc

SEQ ID NO: 875512 - DNA, 120 bp, Artificial Sequence
  ENSG00000259616_5 (sequence is synthesized)
atttacctactgaaggatatcaggacatcttagttgcctctgagtttttggcaattatgaataaaactgctatagaaagatgtgtgcaggtttttctgtggatatagttttcaactcctt

SEQ ID NO: 875513 - DNA, 120 bp, Artificial Sequence
  ENSG00000259616_6 (sequence is synthesized)
tgggtaactccaaggagtgtggtcgctggatcatatagtaagagtatgtgtagttttgtaacaaatagccaaatgttctccaaagtggcattagcattttgctttcccaccagcaaggaa

SEQ ID NO: 875514 - DNA, 120 bp, Artificial Sequence
  ENSG00000259616_7 (sequence is synthesized)
attgtaataaatgtgtggtgttatctcattgttgttttaatttgcatttgcctgatgacatacaatgtggaacatctttttattgaagctaatgttttaagcctggcaatttagtctctt

SEQ ID NO: 875515 - DNA, 120 bp, Artificial Sequence
  ENSG00000259616_8 (sequence is synthesized)
ctcttcctgtaaccctgagccactgagcacagctttctccagaagcacctgtgagtcactatacaccactgctatctcctgaatgctggaggcactggagtgggccctttcaactttcat

SEQ ID NO: 875516 - DNA, 120 bp, Artificial Sequence
  ENSG00000259616_9 (sequence is synthesized)
tttcttattacctagagaacttggcattggtagatgcccaaaaaatgtatgtgagatgcctgcacattaaaagactggctgaaaacttaagcagtatactggtttagatcattcatcgct

SEQ ID NO: 875517 - DNA, 120 bp, Artificial Sequence
  ENSG00000259616_10 (sequence is synthesized)
gtcggcaagagtaaaaagctatgtagcagcattctgaagtaataagcaacaggcatgttatttcagtttccagatcaagtgctgctctcaaaattgcaaattgacttctggccagagccc

SEQ ID NO: 875518 - DNA, 120 bp, Artificial Sequence
  ENSG00000259616_11 (sequence is synthesized)
tcttggaagtttcctcattttgcaagtgcagctctttcccctgcttgacaggggaatgtactgagcactcccagatgggcctttcccaagcaggaaccaatgggcccaaatgaatcaagt

SEQ ID NO: 875519 - DNA, 120 bp, Artificial Sequence
  ENSG00000259616_12 (sequence is synthesized)
tgaaggagagtgagcagagtcagcagtgagagaaagacttagctgcaaggtcaaaatccgtctgaaaacagacacgatggaagacagacagttcctcctggatcatcgtataaagaaaag

SEQ ID NO: 875520 - DNA, 120 bp, Artificial Sequence
  ENSG00000259616_13 (sequence is synthesized)
ggatggatcaagacagggattgctgatgcatatctgctcgctgtttgactacaaaatactctcatgattgattctgtgtctgccacccaagatcagtctcaaggaaatgctgacaaaacc

SEQ ID NO: 875521 - DNA, 120 bp, Artificial Sequence
  ENSG00000259616_14 (sequence is synthesized)
ctggcacccagagtcacagagctcagtttccagccctagcaccacccttgataacttgagtgaccttggactcctggtctctgcctcagtttccaaattaaatgagtgtggtgaaaactt

SEQ ID NO: 875522 - DNA, 120 bp, Artificial Sequence
  ENSG00000278254_0 (sequence is synthesized)
ggatttttccttttgggagcccctctctctcacacagggagagagctgttctcctttctctttcttcttcctattaaacctccacgcctaaactcagtcctcttgggtgtctatgtcctt

SEQ ID NO: 875523 - DNA, 120 bp, Artificial Sequence
  ENSG00000278254_1 (sequence is synthesized)
aattttcttagcgagagactacaaacccggggtatttaccccagacaactaccccgcttcatattgggaatctcagccaggatcccaagaaaacacttgtctcttctttgatgctgactc

SEQ ID NO: 875524 - DNA, 120 bp, Artificial Sequence
  ENSG00000278254_2 (sequence is synthesized)
aaaggtctgatcccctgcctggaagctaaccttggatagattcccagaattgtctcttctactcccacaaccaacctttttcaaagacttcagaagactggatcaacatttttgcctatg

SEQ ID NO: 875525 - DNA, 120 bp, Artificial Sequence
  ENSG00000278254_3 (sequence is synthesized)
gattttacagcctttcttctaaacccagactcgcttagctatgtattctttaatgggccaagagtgctacaacttccactctgctctactagcagccacgggcttggatttctaccaata

SEQ ID NO: 875526 - DNA, 120 bp, Artificial Sequence
  ENSG00000278254_4 (sequence is synthesized)
attaaatttattaaatgtaatagcctttagcaagcaccaagtttagttagctaaagcttaaaagaaaagaatagcctacataatatccacagccagactatagtggaaatatgtgatccc

SEQ ID NO: 875527 - DNA, 120 bp, Artificial Sequence
  ENSG00000278254_5 (sequence is synthesized)
tagactcagcttctggtgtcccagtcattttatgctaaggaattaggttgaatatgtgcagagcacctcagctcaggcaagccaataagctctagggtccctttagcctttaataacaag

SEQ ID NO: 875528 - DNA, 120 bp, Artificial Sequence
  ENSG00000278254_6 (sequence is synthesized)
ataatcacatagcccttccaatatatatgactgggagtccatgacgagcttccatctacaaatgcagttgtgtgtcatcaaagctggtttttccttatttaataaacaatgttgacagtg

SEQ ID NO: 875529 - DNA, 120 bp, Artificial Sequence
  ENSG00000278254_7 (sequence is synthesized)
ggacaccagctctgggactcaaaaaatggtaaagagacctccagaatcaatgaatcactttcagagaaaagaaaagaaaaactttaaaaacacaaagaaaaaaaataccacattttcccc

SEQ ID NO: 875530 - DNA, 120 bp, Artificial Sequence
  ENSG00000278254_8 (sequence is synthesized)
aaatttcacgtcataaccaactagaagtgcaaacgtaagtgatgctggaaacaagactctggcaagaagggccttctgagcaaggtcagcatctcctcccaacagctctttctcccaaca

SEQ ID NO: 875531 - DNA, 120 bp, Artificial Sequence
  ENSG00000278254_9 (sequence is synthesized)
atgccaggggatctttcaaaattgccactgctgctgctaagctccagaagagaggtttctgaacttcaatgtctttatcatagctcactctctgggttctcagatagatatatatatatc

SEQ ID NO: 875532 - DNA, 120 bp, Artificial Sequence
  ENSG00000278254_10 (sequence is synthesized)
agggttgtcttcatctgaatgaagctggaaactctgcctgacagcatgcttataatgctcctggatgcccttggtcggcagctgcagcggcaaatgtctgtagagctgtagcagcctcca

SEQ ID NO: 875533 - DNA, 120 bp, Artificial Sequence
  ENSG00000278254_11 (sequence is synthesized)
gaccagctctgtccctggtggtagcaggatcatctgcaagatcgtctgcgcctgcttcgtgaaaccacctgctatgtctatatttgagtcatccataaaaatgcttaatcagattagagc

SEQ ID NO: 875534 - DNA, 120 bp, Artificial Sequence
  ENSG00000278254_12 (sequence is synthesized)
taagtaccccacagggcatgggcaggaacaagttcaaacatctataaaaagcacttgattgtactgttatccagtacttctcaatcttctctacaaaaccttgctctgtgcttttctgaa

SEQ ID NO: 875535 - DNA, 120 bp, Artificial Sequence
  ENSG00000278254_13 (sequence is synthesized)
acacaagaacatcatatgcagcttccccctgcctccacgggggacatcagccctggacactgccacaccaattagtgtatttaaatttttaactcatttgggtaaatagtaataagcatg

SEQ ID NO: 875536 - DNA, 120 bp, Artificial Sequence
  ENSG00000278254_14 (sequence is synthesized)
caaagtagctgtaccattttgcattcccagcagcaacgaataagaactcctgttgccctacatccttgcgagcattccatgttgtcacggttctgggtttttggccattctaataggcac

SEQ ID NO: 875537 - DNA, 120 bp, Artificial Sequence
  ENSG00000278254_15 (sequence is synthesized)
gtagtgatatttcattgtttgttttaatttggatttctctgatgatatatggtgtagagcaatttttcctatgcttattttacatctctctatcttttttggtgaagtgtctgttaaggt

SEQ ID NO: 875538 - DNA, 120 bp, Artificial Sequence
  ENSG00000278254_16 (sequence is synthesized)
gtttggcccgtattttaatagggatgttttcgtattgttgagatttaggtgatctttgtatattttgggtaattgtcctttaccaggtatatcttctgtaaatattttcttcccgtctat

SEQ ID NO: 875539 - DNA, 120 bp, Artificial Sequence
  ENSG00000278254_17 (sequence is synthesized)
gccttatcttttcattctcttgacagtttcttttacagagcataattttttaattttaacgaagtctaattcatcatggatcttgcctttggtgttatttctaaaacttcatcacaatac

SEQ ID NO: 875540 - DNA, 120 bp, Artificial Sequence
  ENSG00000278254_18 (sequence is synthesized)
caaaaattttctctgcttatcatctaggaattttattttgcattttatatttaggtctgttattaattttgacttactatttttgaagggtgtaaatgtcttgtgtgctgccatctatta

SEQ ID NO: 875541 - DNA, 120 bp, Artificial Sequence
  ENSG00000278254_19 (sequence is synthesized)
tctcatacattctgatctgttttacattaaatcttctgtatctctctttctgaaatttgagtcaaagttccaggaggtgttatatttatctttaattccttcttcaccatcagacccctg

SEQ ID NO: 875542 - DNA, 120 bp, Artificial Sequence
  ENSG00000278254_20 (sequence is synthesized)
cttccacccttgcccaacccccacatcgtctaatattatttttcataactgaactgtattttgggtacaggctctgacaagtgcttacttatgctacattatttaattataacaagaatt

SEQ ID NO: 875543 - DNA, 120 bp, Artificial Sequence
  ENSG00000278254_21 (sequence is synthesized)
ctattttttttagatattattatccctggggcaaatagagtcctaaagtggccccaatgatcctctctccctagtactattatcctgaataattcattttcctttaatgtgggtggaaac

SEQ ID NO: 875544 - DNA, 120 bp, Artificial Sequence
  ENSG00000278254_22 (sequence is synthesized)
tatggcttgcttctacggatagaatatggcaaaagtgaaaggattttgcagatgtaattaaggtctcagatcaatcaaatagaagattatcctgagaagacctgacctaagtgaaatctc

SEQ ID NO: 875545 - DNA, 120 bp, Artificial Sequence
  ENSG00000278254_23 (sequence is synthesized)
cagccagatcatcagaagaggaaacacggaatacttgatatcttcctaaggaacattatgcctgctaaaccatcggtgagtgttgcattcctcagcaccttctacctggtattcccaacc

SEQ ID NO: 875546 - DNA, 120 bp, Artificial Sequence
  ENSG00000278254_24 (sequence is synthesized)
ctcatcagaagagaaagaatctgggtactcattctctgttgcaaccccatcatccagcaattaattttacttcaagtcttcaagcattcttcagacctagtgtgctttctgctatgtatg

SEQ ID NO: 875547 - DNA, 120 bp, Artificial Sequence
  ENSG00000278255_0 (sequence is synthesized)
gttacagctcccatttcccgacggcctgagcagggacctggcacctaagttatctttaacttcccaaacaagtctgaaataaggacacttaggctcagaatgaggcccaaggtcacaccg

SEQ ID NO: 875548 - DNA, 120 bp, Artificial Sequence
  ENSG00000278255_1 (sequence is synthesized)
ttactccacccttgagatggaaccatctctgtcaagaaataaggattaaaccaaatcaagtacaaatgaaaacccagactgcaagccatcatagaaagtaagattcaatgtgtgtatgta

SEQ ID NO: 875549 - DNA, 120 bp, Artificial Sequence
  ENSG00000278255_2 (sequence is synthesized)
tttgcatgattaagcacatgcagagaaagaatacatctagatatcaagtggtaattttgaaattttctcctttatacatttctgtttttctcaaatattaaaatagatgattcttattaa

SEQ ID NO: 875550 - DNA, 120 bp, Artificial Sequence
  ENSG00000259611_0 (sequence is synthesized)
gggtggggccaggtaagaataaaagcaggctgccccaggtagtggtggcaacgcgctagggtcacttttgagatcaagaaagctttgttcttttgctgtttataataaaacctgttgctg

SEQ ID NO: 875551 - DNA, 120 bp, Artificial Sequence
  ENSG00000259611_1 (sequence is synthesized)
ctcgctcttttgggttctgactgcgtttatgagctgtaacacttaccacaaaggtgtgtaggttcactcctgaagcctgtgagaccacgaatccaccgggaggaacgaacaactccagat

SEQ ID NO: 875552 - DNA, 120 bp, Artificial Sequence
  ENSG00000259611_2 (sequence is synthesized)
gtggtgccttaagagctataacactcactgtgaaggtctgcagctttgctcctgagctagctagaccacgaacccaccagcaggaaaaaactccgaacacatttgagcatcagaaggaac

SEQ ID NO: 875553 - DNA, 71 bp, Artificial Sequence
  ENSG00000259611_3 (sequence is synthesized)
tgcgacagtcaggaatactagcagggactttctggacattcggctcggagttggttagttgttcaggatgg

SEQ ID NO: 875554 - DNA, 120 bp, Artificial Sequence
  ENSG00000259611_4 (sequence is synthesized)
ctggacattcggctcggagttggttagttgttcaggatggttcaaaggttttggcagagttcaaagactgggaagcaaagttcagccatgttgggcctttgggctcatagatgagcaagg

SEQ ID NO: 875555 - DNA, 120 bp, Artificial Sequence
  ENSG00000259611_5 (sequence is synthesized)
gtaccccaatatgagggctcagcaaattctggaacttatcagttctgaagacctttagaggagaaggagacaagtaaaaggtatgtagtcctggagggcgctgcttaatgaaccagaagt

SEQ ID NO: 875556 - DNA, 120 bp, Artificial Sequence
  ENSG00000259611_6 (sequence is synthesized)
cctgcctcttaagtacctcaccagctcaaatgtgtgcatgtcaccttggcgtgaatcggagcaggcgctggtggataccgtttggaggcatgccagcaaggagctccttgtgtagcctgc

SEQ ID NO: 875557 - DNA, 120 bp, Artificial Sequence
  ENSG00000259611_7 (sequence is synthesized)
ctctggagcctcaagttcaacttccatagggccaaaaggggagtcgggctgggcagaagctcctgagaaccaaagcaaatggtctgagagtctgagagtgtagtggaggtaacgtgttcg

SEQ ID NO: 875558 - DNA, 120 bp, Artificial Sequence
  ENSG00000259611_8 (sequence is synthesized)
tacagtggcccagagtcagggatatagagtggcgactacttggcagaactggagcttgctcagatgaaaagataaattgtactggttaaacgaagatcaagtgcagggtctggactttgt

SEQ ID NO: 875559 - DNA, 120 bp, Artificial Sequence
  ENSG00000259611_9 (sequence is synthesized)
ttctatctttcatgtggactctataagcacctacacacagcattctagaaacactgctcccatccctcctgtctcatgtcatcctcccaattccgggagttggggggcatactctttccc

SEQ ID NO: 875560 - DNA, 120 bp, Artificial Sequence
  ENSG00000259611_10 (sequence is synthesized)
tgtgtcatgtgagaaattcctttctcatgggaagcaggtggcattcctggactctccttggcctggccgttggtaagcacaggaattcaaggtgtctgaatctcttgtcaaaggtgggct

SEQ ID NO: 875561 - DNA, 120 bp, Artificial Sequence
  ENSG00000259611_11 (sequence is synthesized)
tctcttgtcaaaggtgggctgtaaggctccagaagaggaggacagaaagtgcctgcagagctcctgcctgaggcctttggatgggccctgctggcttgccgtgtgtgtgtgtgtgtgtgt

SEQ ID NO: 875562 - DNA, 120 bp, Artificial Sequence
  ENSG00000259611_12 (sequence is synthesized)
ggtgtcgtgcttatttgccccaaatgaggcaagagagcagtgatcaggtgtctccccagcatctagtttcatgaagacaatagaagtgggtcggatcaggcctgctgccatgcttggctt

SEQ ID NO: 875563 - DNA, 120 bp, Artificial Sequence
  ENSG00000259611_13 (sequence is synthesized)
gcccatgtctcctaggattggctgcctggtggccatccctttgccatccccttgactgccctgtgaatgatgtccactctgagaccccaggccactcagaaaaactgaagattctcaagt

SEQ ID NO: 875564 - DNA, 120 bp, Artificial Sequence
  ENSG00000259611_14 (sequence is synthesized)
tcaggtgcagttagggggcaggtcctggtggtgggggagctttgatgttctgcagttggaggatcctctttcagaatagtaatgcaatttgtgaattaataaaattaggtatgcaagagg

SEQ ID NO: 875565 - DNA, 120 bp, Artificial Sequence
  ENSG00000259611_15 (sequence is synthesized)
atatgtagaaaagaaaaatcacaagctacacaatttttaagttgacaaaactacgaacatcacaaaataatatgatattttaaattaattatctgcctggaatactctgtcatttttttt

SEQ ID NO: 875566 - DNA, 120 bp, Artificial Sequence
  ENSG00000259611_16 (sequence is synthesized)
tgatcttttgcctgcatcgtctttgatagcagtgtttttgatattgctttttatagagagactcaagataatggagtctactctgttgtggttaattaaacattttttggtgttattcat

SEQ ID NO: 875567 - DNA, 120 bp, Artificial Sequence
  ENSG00000259611_17 (sequence is synthesized)
aacggtgtcttctccccacaaatgaaagagaaatagtaaattctcctgcgggtggcgaatcaggagggaaggtggagcccacaatctttgcaaactctctggggagccaggggttggtag

SEQ ID NO: 875568 - DNA, 120 bp, Artificial Sequence
  ENSG00000259611_18 (sequence is synthesized)
ctgggaagacttgggtggtgaccctgggggaggggaaggggccggggagcggggaatgggggcagcccctggggaggaatgggagagggaggaggacgccaggggcacagggacagcctc

SEQ ID NO: 875569 - DNA, 120 bp, Artificial Sequence
  ENSG00000259611_19 (sequence is synthesized)
gagaaatagtaaattctcctgcgggtggcgaatcaggagggaaggtggagcccacaatctttgcaaactctctggggagccaggggttttggcagagttcaaagactgggaagcaaagtt

SEQ ID NO: 875570 - DNA, 120 bp, Artificial Sequence
  ENSG00000259611_20 (sequence is synthesized)
ggcccctaagagccgcaggggggtggggaggtgccaggctgctgaggcctttgggttcctaggctgctggcattttaaaaccaccactgtattccacctccccttggataacacgcagaa

SEQ ID NO: 875571 - DNA, 120 bp, Artificial Sequence
  ENSG00000259611_21 (sequence is synthesized)
acaggccaagaagaaattacctgctgttggttatttctatttcaaatgaatactagctgaacatttactaaatgacattgtcaggtttcagcaaaagcggcctgtaatagttgggttttg

SEQ ID NO: 875572 - DNA, 120 bp, Artificial Sequence
  ENSG00000259611_22 (sequence is synthesized)
gggccgccctcgttcctcccggagcgcagcgacagctcctccccgcgtctcgggtttcaatggctgggcctgcccgaaagctctgggcccccgcgtcccaattttttctttatttttgaa

SEQ ID NO: 875573 - DNA, 120 bp, Artificial Sequence
  ENSG00000259611_23 (sequence is synthesized)
ggataatattgctggacatagaattctttgttgacattggtcagctctttgaatatgtcatccagtatcttctggcctccgtggtttatggttttggcagagttcaaagactgggaagca

SEQ ID NO: 875574 - DNA, 120 bp, Artificial Sequence
  ENSG00000259611_24 (sequence is synthesized)
ggtgactgccctcagcagtccttctgggcggcagacacaggttgtcagtttgccaacaccctgctctcatgagaaacagtttgctgcttactcacgtggcctccagtggttttggcagag

SEQ ID NO: 875575 - DNA, 120 bp, Artificial Sequence
  ENSG00000259611_25 (sequence is synthesized)
ggagaaggagacaagtaaaagggttggccttgcgtattggcaatgaaacaggctatttttgacattgagttgtccagcattctctaaggtatgtagtcctggagggcgctgcttaatgaa

SEQ ID NO: 875576 - DNA, 120 bp, Artificial Sequence
  ENSG00000280997_0 (sequence is synthesized)
ccgaggtgatcaggtggactttcctggatgttctgggtcttgacctgattgctgaaaaatgaatacaaattcagagaagaagaaagctagtatgagactaccaaatgatcatcagacatt

SEQ ID NO: 875577 - DNA, 120 bp, Artificial Sequence
  ENSG00000280997_1 (sequence is synthesized)
tcttgaacaccaattaaattgctaggtatgctaaagtttgcaaaactggtatagacaccaagagggaggtatcaacagagactccccaagagctaagaggaaaccaccttggactggaag

SEQ ID NO: 875578 - DNA, 120 bp, Artificial Sequence
  ENSG00000280997_2 (sequence is synthesized)
tcaagagccaaaattctagactctactctgtaattaactacctatttgaatttggaaaaatcaccatcaactttcccagcctcgttctctgcatctgggaaatgaaggcgtcgtccaaat

SEQ ID NO: 875579 - DNA, 120 bp, Artificial Sequence
  ENSG00000280997_3 (sequence is synthesized)
gattacaagcttcttttcctgctcttattgcatgattccacttccacagccctccagcattttttagcagctgcatcgctccatagagcctgcagagggcactagactgggaattagaaa

SEQ ID NO: 875580 - DNA, 120 bp, Artificial Sequence
  ENSG00000280997_4 (sequence is synthesized)
acctgatttcccttccagctccacctctgaccaattgcctgaccctggtcaaattgcttaacctcttcctatctcagctccctatccataaaacagagggacgaataaactctcctccta

SEQ ID NO: 875581 - DNA, 120 bp, Artificial Sequence
  ENSG00000280997_5 (sequence is synthesized)
ccactaagaggtgtagccagagttaataccctcatcgtcctttgagctcagcagatgaaaggcactgagaaaagtacaaagaatttttatgtgctattgactttattttattttatgtgg

SEQ ID NO: 875582 - DNA, 120 bp, Artificial Sequence
  ENSG00000280997_6 (sequence is synthesized)
gggagggagccggccccagctggaaagctgctttctctgaatcaaagggcaggaacccagcaagtttctcaggattggggccttagactgggctgtgtatacagacagtgccagccaacc

SEQ ID NO: 875583 - DNA, 120 bp, Artificial Sequence
  ENSG00000280997_7 (sequence is synthesized)
tttgtcccacaactgttctcgtttctcaactgcccaggtaatatgtttgggcctgtaggaagagtcaaatagttaataagggaagggtttggcatgccctacgtaagttctaccagcaag

SEQ ID NO: 875584 - DNA, 120 bp, Artificial Sequence
  ENSG00000280997_8 (sequence is synthesized)
tcccaacaagaaggcattctgtgtctcctgattcctgacctacccccaaaatgtacaaatgtacaaggaatgagcccactttcccagcaggctgtaataccagtttggcctatatcaatg

SEQ ID NO: 875585 - DNA, 120 bp, Artificial Sequence
  ENSG00000280997_9 (sequence is synthesized)
cattggtgagctgtgttttgtttatggttttatgccatctattttcccatggatattatgttttctaaagagcccttaagtttacgtcagcttttaaagctaccagcagcaccatttcag

SEQ ID NO: 875586 - DNA, 120 bp, Artificial Sequence
  ENSG00000280997_10 (sequence is synthesized)
ttcatattaagcccttaatatggtatgaataggagagctattagactaaagagccataatcatccctgaggaaaacatccatcaccaacatttatgtggtccctgaacttctaaaaggtg

SEQ ID NO: 875587 - DNA, 120 bp, Artificial Sequence
  ENSG00000280997_11 (sequence is synthesized)
tcatctctctggggtgtatctggtgagagctttctctgggagatgccaaaaagccaatgcattagatgaagcttagaagggcattttctaaccattacaaattgcctagtctagcatctc

SEQ ID NO: 875588 - DNA, 120 bp, Artificial Sequence
  ENSG00000280997_12 (sequence is synthesized)
aatttcatctacgtgaagagccttaattaaatttgttggggtttgatcctttatccccagatgtggcgctgacagagattgcttacataaataatgtgtgctccaagtgcttgccaggct

SEQ ID NO: 875589 - DNA, 120 bp, Artificial Sequence
  ENSG00000280997_13 (sequence is synthesized)
cctggctcagctgggacagctgtagctttttgaatgtcattcccaagatatcctgcaggtgttcagcttcccctgttctactctgggaagagagccgtgggcaacatcagcccagaagac

SEQ ID NO: 875590 - DNA, 120 bp, Artificial Sequence
  ENSG00000286982_0 (sequence is synthesized)
gctggcagagagtgacgctgcccgacgactcccggccgccgagtatcctctccggggtggtggagaggctgggagactttagcttttagtgttcagtgtgtagacctgatgcagagaccg

SEQ ID NO: 875591 - DNA, 120 bp, Artificial Sequence
  ENSG00000286982_1 (sequence is synthesized)
ggaggggtgcctgcagaaagaaagcgggaagccccacatccacagctgattgacagtgagaatgagacggctgaaaagaagaggcaccattccacatcaaatgaatgatggagagagaag

SEQ ID NO: 875592 - DNA, 120 bp, Artificial Sequence
  ENSG00000286982_2 (sequence is synthesized)
cgtcactgtctagataactcccctaatggtccaaaataacccctgcaatcggatggacaaataggaacttgaatataatgtcaagaaatctgaggtttcccttctcctgaatatctggat

SEQ ID NO: 875593 - DNA, 120 bp, Artificial Sequence
  ENSG00000286982_3 (sequence is synthesized)
aaacatgtctcccattctctaccccagaatcagaccctgagacagagattagggtgcaagtttagtagggggcgtattggactctctggggctccctgggatcccctatactggaaggta

SEQ ID NO: 875594 - DNA, 120 bp, Artificial Sequence
  ENSG00000286982_4 (sequence is synthesized)
tatccatcctccagctgtgagtattggccgccaacacttcacagttgacctctgttctggagaattgcctttggccaaatgggcactgcctcagcttggagattatatgctaccatacca

SEQ ID NO: 875595 - DNA, 120 bp, Artificial Sequence
  ENSG00000286982_5 (sequence is synthesized)
cttcagggaaagcctcagaaaatgtctaactgaagtagggattccaaaggctggcccccttacctgaaggggacactaactctttgttacaatctgtgctctggaagttccctcagggga

SEQ ID NO: 875596 - DNA, 120 bp, Artificial Sequence
  ENSG00000286982_6 (sequence is synthesized)
acagccctgtctcctcttccctgaggacactattccactaaatcacgtgaacgagacccttgtctcaggctctgcttatagggacctcgctgtgacaggaggtgagggaaacataggtag

SEQ ID NO: 875597 - DNA, 120 bp, Artificial Sequence
  ENSG00000286982_7 (sequence is synthesized)
gtgagtggggaagtgagataaggaagaagacaataaaggtatgttattaagacagtcaccaccggaggtgactggaaattaatcctgtggcaaaactggaggccgatgtagaacacagac

SEQ ID NO: 875598 - DNA, 120 bp, Artificial Sequence
  ENSG00000286982_8 (sequence is synthesized)
ctctgaattatcccatccaatgggctggggtatttatacaccagttctcaccagacattggtcaaaagctgccagactacatcaaccccgcagcactccagcctgcccaaggtggacagg

SEQ ID NO: 875599 - DNA, 120 bp, Artificial Sequence
  ENSG00000286982_9 (sequence is synthesized)
gaagccctcctaggtttcagagaaagcccttgggctccaaagctggcagttggaagtcagataactgagactgaagaggggaggtaatatgggcagggtatatgaattctcaattctagc

SEQ ID NO: 875600 - DNA, 120 bp, Artificial Sequence
  ENSG00000286982_10 (sequence is synthesized)
cccaaatttctgtctgtttaatgagttcaatgcatggacctctaaaacatctctattcgatgccatactgacccaaatgggcttgaaccccgctctgttcacacacacactctctcacac

SEQ ID NO: 875601 - DNA, 120 bp, Artificial Sequence
  ENSG00000286982_11 (sequence is synthesized)
agcatttatatataagttggcttcacctagggctcaggtgattgagatatttactttgctgagatacatatatcttcaaagataacattgcacgtttctattcctaaaagtctttcagct

SEQ ID NO: 875602 - DNA, 120 bp, Artificial Sequence
  ENSG00000229214_0 (sequence is synthesized)
agacgcatcgactgctctccttgtgcccctgctgacattcccaagagatcaatatcctgtaaaagcctgaagattgcttcctttaaatgagtcttattcggaaaaacttaagatttgatc

SEQ ID NO: 875603 - DNA, 120 bp, Artificial Sequence
  ENSG00000229214_1 (sequence is synthesized)
atagatctattttaagaagtgccaagttaactgacatcgatgccatcgtatctggagtccctaggaaatccagggggggacaatgaaccgtaggaagactcggactcgggtctgcctgta

SEQ ID NO: 875604 - DNA, 120 bp, Artificial Sequence
  ENSG00000229214_2 (sequence is synthesized)
gcactcggagcctgcaaggcaacacagttattgagttctattaaaattacttggtgtggctataaaccaaaccacacccctgtagccaatgcgaagagcttcccgtaaaagccgtgcggt

SEQ ID NO: 875605 - DNA, 120 bp, Artificial Sequence
  ENSG00000229214_3 (sequence is synthesized)
gggaaggcctctcgctgtctcctctgcgcggcaggcagacatggacgacaccgaggcgtgaattcagcctgcacctcctaaagatgagctgttgagggcgatggccacagcaagtccgca

SEQ ID NO: 875606 - DNA, 120 bp, Artificial Sequence
  ENSG00000229214_4 (sequence is synthesized)
ccaagtgctctttaaacatgagtgtttctttaaacaaagaaccttcccggcattgaggtctgattaatgatgccccggcacctcctccctcactcagggatcacttccctgcggcgcgtt

SEQ ID NO: 875607 - DNA, 120 bp, Artificial Sequence
  ENSG00000229214_5 (sequence is synthesized)
cccagacgcaggcttccctcacggaggcgggaagatttcaggcgctgtctgttcttgtcttttgtcagcacggacaaggatggagaccccactggtcaggcgagccccgcggtccctgtt

SEQ ID NO: 875608 - DNA, 120 bp, Artificial Sequence
  ENSG00000229214_6 (sequence is synthesized)
cctcacttcaccacctggggaagcctgatccccatcgattcgcaaaggaacaaggaaagaacacgttttacctggatggatggtccccctcacggtggccttggaacccgcttcagcggg

SEQ ID NO: 875609 - DNA, 120 bp, Artificial Sequence
  ENSG00000229214_7 (sequence is synthesized)
agaggcagcgcctcactcacggctccccctggccgctgctttaccagggagcgccaccccgtgccccgccagaggaagtgcaggcgccagcacagcacgggccgaaagccacactgtggg

SEQ ID NO: 875610 - DNA, 120 bp, Artificial Sequence
  ENSG00000229214_8 (sequence is synthesized)
acccgcagcgcagctccaagaaatccaaagtccattcacaagaggagcttctccgccaaatcgttgaaaaataaaacgagaaatgagtcgccaccggtatccgctttagtcagccgtacg

SEQ ID NO: 875611 - DNA, 120 bp, Artificial Sequence
  ENSG00000229214_9 (sequence is synthesized)
aaaacgcaacccggtcagctgcacttctgctgccagccctcctccagtcaagcaccggcctcgagaagggcaaagggcaggtaggagttccgacgcatgcggccacggggcggagtcaca

SEQ ID NO: 875612 - DNA, 120 bp, Artificial Sequence
  ENSG00000229214_10 (sequence is synthesized)
aacctgaagttatcctaagctcgagccccagagtgaggactcggggtcaggcatccgattccccatcagctcctttactaaagctgtgcagagaatccgaggctatgagtgggggtgggg

SEQ ID NO: 875613 - DNA, 120 bp, Artificial Sequence
  ENSG00000229214_11 (sequence is synthesized)
gaaagatgtacaggatgctttggtttcactcctgagatacgagaacgtcctctgaacacacatgcagatagctggacttctagacagaggaaatccaaatcgtttctttcctcccagcat

SEQ ID NO: 875614 - DNA, 120 bp, Artificial Sequence
  ENSG00000229214_12 (sequence is synthesized)
aagggaacggtccggtaagagctggtgtttatcgatgctacgtgccagaatggggctgagcacggcgcctcactgtatcctaacgtctaatgaggcagggaatgtcactgtcacactctg

SEQ ID NO: 875615 - DNA, 120 bp, Artificial Sequence
  ENSG00000229214_13 (sequence is synthesized)
cagacgaggaagccatgctgtcagcaggtacacatcttgccacaaaaccagtaacctgtggcactgagatcgcacaccggtcgtccactgccaagtccgtggcctccttctctggggttt

SEQ ID NO: 875616 - DNA, 120 bp, Artificial Sequence
  ENSG00000229214_14 (sequence is synthesized)
gcctgcctcttgatggcggccatgcctctgtcctctcgcaggggctggctcttccagtggtcactactttttggttgcaagcagcagagattccctggagggcttgttgaaagcactcac

SEQ ID NO: 875617 - DNA, 120 bp, Artificial Sequence
  ENSG00000229214_15 (sequence is synthesized)
atcaacggagcctcagaaagggagctgaggccatgcacggccctgcagtttctcctcaggctttggtttgcatccctggcctgactttccctcaacaagtcctgctatctccacaaggcg

SEQ ID NO: 875618 - DNA, 120 bp, Artificial Sequence
  ENSG00000229214_16 (sequence is synthesized)
gccagcccagccctgtcctcaccttccagccccagctgagcagcccctccccacatcatcttcagctgctgcccaggctccgcagagcaggtgtccaccgcccatccagccattgtgttt

SEQ ID NO: 875619 - DNA, 120 bp, Artificial Sequence
  ENSG00000229214_17 (sequence is synthesized)
agagggcagagcgacctgccgggaccttgacaacacctggccccacccacacgtcctgcaatattcactgaggaatgcacagcagcacatatgtgcctcatgtgtcctgctgtgatgcag

SEQ ID NO: 875620 - DNA, 120 bp, Artificial Sequence
  ENSG00000229214_18 (sequence is synthesized)
cgagtggcacacagcattattgtgtcaatcatgtgtcttgatgtgatgcactggttcagacagtatcatggatgcagtgtttctttaaaactgtcaaatttgaggaaacaatctaacaaa

SEQ ID NO: 875621 - DNA, 120 bp, Artificial Sequence
  ENSG00000229214_19 (sequence is synthesized)
agccaattgatgaacattctgtaaaggtgacataaatacttcaaaaatgtctctgacacagaaagaaaaaaaacaaaaagggagctattccagattttaaaaataaaagatatagtaact

SEQ ID NO: 875622 - DNA, 120 bp, Artificial Sequence
  ENSG00000229214_20 (sequence is synthesized)
agtggaaggaggtccactctcctgctgttgccacctcctggttgagcagcaccttgtccagaaccgcctcgtcttcattctcattgtctttatttctggttttctgctgtgccgcattta

SEQ ID NO: 875623 - DNA, 120 bp, Artificial Sequence
  ENSG00000229214_21 (sequence is synthesized)
tcccatgcatatatgacagcctttaagaaacatcagagagtaacagagacggaggtgccgagaatcagcaaatggagaagccctgggctctgttccccagtgctgttgtgttaaaggatt

SEQ ID NO: 875624 - DNA, 120 bp, Artificial Sequence
  ENSG00000229214_22 (sequence is synthesized)
ttgttattgtcagtggtggtttgccctttttgaaaaatggaagcatcaaagttttaaacttatgctatcattaaaataacaacaacattcattgtctgaaacaaaaattaactgtgaagt

SEQ ID NO: 875625 - DNA, 120 bp, Artificial Sequence
  ENSG00000229214_23 (sequence is synthesized)
gagaatttgagaagtctcagccagaacacagtgctgaccttcatctgcgttttgtagccaccacgtccaatccatcacctgctggttgtagcggcagagagaaggatgcaacccctgtcc

SEQ ID NO: 875626 - DNA, 120 bp, Artificial Sequence
  ENSG00000229214_24 (sequence is synthesized)
tgctgttgttttatggctgatgattcatgaagacagaaaaaatgccctcattttggcagctttcatttgatcattctttcccaccttccccagcctctgggagatgtgtttattgccagc

SEQ ID NO: 875627 - DNA, 120 bp, Artificial Sequence
  ENSG00000229214_25 (sequence is synthesized)
ttcactgcagaggagacaaataagtaacccagatgttggtgtttgtggtgcctttgcagacacctccatgacacgtcatatcatacactgcatattggatgtaacgtgagcaatttatga

SEQ ID NO: 875628 - DNA, 120 bp, Artificial Sequence
  ENSG00000229214_26 (sequence is synthesized)
gtccagacgcatcgactgctctccttgtgcccctgctgacattcccaagagatcaatatcctgtaaaagcctgaagattgcttcctttaaatgcttactaattacagattctgcaaaact

SEQ ID NO: 875629 - DNA, 120 bp, Artificial Sequence
  ENSG00000229214_27 (sequence is synthesized)
atttcataagccagttctgtggaacccctttctggccatttcctgaagcaactttctttcctaatcatccccataacatgaaggccaggttctgcaagtaaagggtggtgaggcaattct

SEQ ID NO: 875630 - DNA, 120 bp, Artificial Sequence
  ENSG00000229214_28 (sequence is synthesized)
ggaatcatctaagtggcaagcccaggggggtgggtttcagagaacacatagaggaaagtggaggctcgggaggtgtggaaatactgacctgatggaattaaccatcttcccgggagcaag

SEQ ID NO: 875631 - DNA, 120 bp, Artificial Sequence
  ENSG00000229214_29 (sequence is synthesized)
ccatggagggtgctgtggagcttgctgcaggttctgctggataggaaattgtgtctcatccacctgctgtctgcttctgtcctgtcttagcccagcagagctgttttaacacagacattt

SEQ ID NO: 875632 - DNA, 120 bp, Artificial Sequence
  ENSG00000229214_30 (sequence is synthesized)
gcagcctgcccagtactctcctggaaccaataagtcgccagttaggaaaaagatcagcactgaccaaacacagagatgttggaaacctgcattaatccccagtagaggcagaggctctga

SEQ ID NO: 875633 - DNA, 120 bp, Artificial Sequence
  ENSG00000229214_31 (sequence is synthesized)
atgctgaagccacagctacgacttggccacactctgcacatggccccagacattcagatttctgcaccctcagggtggcttgcaggctccagagccggggttcgggccctgctgaccaca

SEQ ID NO: 875634 - DNA, 120 bp, Artificial Sequence
  ENSG00000229214_32 (sequence is synthesized)
gccagctgtcccctgcagcctcagaccagggccaaattcctggtgtgcttccctcctgcacccactcaacagctctgtggcctttgcaagcacctgcctgacagggctatggcaatgtgt

SEQ ID NO: 875635 - DNA, 120 bp, Artificial Sequence
  ENSG00000229214_33 (sequence is synthesized)
ggagtcagacaatggtgccaagtcgggagcggacttacggtgagacagtgtagataaagcctggggcccagctccccagcagcacctgctcctgcactgtggccaccgtggcaacgtagc

SEQ ID NO: 875636 - DNA, 120 bp, Artificial Sequence
  ENSG00000229214_34 (sequence is synthesized)
tgcttctatttccttgagctccattgccatcttttcccaggcggggccccttcaccccctgcacctgccaccatccgcccttgccccttactcctgagcctcctttcagtcctgctcttg

SEQ ID NO: 875637 - DNA, 120 bp, Artificial Sequence
  ENSG00000229214_35 (sequence is synthesized)
gaagggaaagaacccctggcttggggagcctgcctggtcctggggtggccgcctgccaaggccctggcatctcccatcctgaggctcctgccctgcctctgagctctccctctcactccc

SEQ ID NO: 875638 - DNA, 120 bp, Artificial Sequence
  ENSG00000229214_36 (sequence is synthesized)
gtccccttggcctctcccggctggggccttgctgtctgtcacccctgaacggagctgatgctgacaccccagaacagcagggacctggaactgttccagtcacctgcttcaagcagcacc

SEQ ID NO: 875639 - DNA, 120 bp, Artificial Sequence
  ENSG00000229214_37 (sequence is synthesized)
ttgaggacagaccttcacctgcacttggagcatttagttgaactgcagttttgataataatgtaactgtgtgcaaacactagagcaagtgactgtggtgtggaagggcgaatactcggga

SEQ ID NO: 875640 - DNA, 120 bp, Artificial Sequence
  ENSG00000287429_0 (sequence is synthesized)
cagcctccctgaggattcgacttttacaccaaatgaaatggggatcgtaagagtgacactctttgtcttaaggacccctgtgctcctgtgctgagaagaatgtaggggcagatgtggagg

SEQ ID NO: 875641 - DNA, 120 bp, Artificial Sequence
  ENSG00000287429_1 (sequence is synthesized)
agaatgtaggggcagatgtggaggcagggaggctgttgctgtcacacaggcccaaggctgtggaggctcacaccagggtggtagaggaggatgggtctcgctctgctgcccaggctggag

SEQ ID NO: 875642 - DNA, 120 bp, Artificial Sequence
  ENSG00000287429_2 (sequence is synthesized)
aacgtctgcctccgagttcaagcagtcctcccgctgggactacaggtgtgcaacaccacacccagctaattttgtttattttttgtagagatagggtttcatcatgttgcccaggctggt

SEQ ID NO: 875643 - DNA, 78 bp, Artificial Sequence
  ENSG00000287429_3 (sequence is synthesized)
ggctccagtgtgagtcactgcacccagcctgaatcattttttaaagagcatgtgtccattaaaaattattttaatgaa

SEQ ID NO: 875644 - DNA, 84 bp, Artificial Sequence
  ENSG00000287428_0 (sequence is synthesized)
aagcaattgaggtttcctctctcagcctcccgagtagctgggaccacatgcatgcaccaccacacccagctatttttttgtatt

SEQ ID NO: 875645 - DNA, 63 bp, Artificial Sequence
  ENSG00000287428_1 (sequence is synthesized)
gaggtttcctctctcagcctcccgagtagctgggaccacatgcatgcatcttgaactcctgag

SEQ ID NO: 875646 - DNA, 120 bp, Artificial Sequence
  ENSG00000287428_2 (sequence is synthesized)
caggtgtgagccactgcgcctggccaagagagttctttttctaaacagactcgctccatggagctgttccccaagtccctccttctcggcgccctcagacacacactctcttagtgtcca

SEQ ID NO: 875647 - DNA, 120 bp, Artificial Sequence
  ENSG00000287428_3 (sequence is synthesized)
tccagaacagagccacacgagccctcagcatccttcaaacccgttcttcctccagatgctgccgaggtcaggcctgaggccggcgcgtggagtggcctcggcaccctgtgtcctcagctt

SEQ ID NO: 875648 - DNA, 120 bp, Artificial Sequence
  ENSG00000287428_4 (sequence is synthesized)
ggcaactcagagaaacatgttagaggtgctaacattggatacatgtgagcacaaagctggcaactctcaaagagggaggaagacaagggtcgaaaacaatctgttgctatgttcactatt

SEQ ID NO: 875649 - DNA, 120 bp, Artificial Sequence
  ENSG00000287428_5 (sequence is synthesized)
tactcgtgtaaaaaagctgcacgtggactcgctgaatcccaaacaaaaattaacaatccaagtatggactaatacagagagagaaaggaagaaagtgaagaagagcaaacgtatatctgc

SEQ ID NO: 875650 - DNA, 120 bp, Artificial Sequence
  ENSG00000287428_6 (sequence is synthesized)
agcggtttttctgcatggctaaggtgaggctgggctccgtggctgttcaggcgattttgctgcctagaaggggatttggagaggtaagaagcctgcaagacaggaggcagcaagaatagg

SEQ ID NO: 875651 - DNA, 120 bp, Artificial Sequence
  ENSG00000287428_7 (sequence is synthesized)
acgtgggcgggggacacctaccacacaaaaggctcatgtggtcttgatagtcgtgaatatcttggatgctcatgccgagctgttgagtgagattccttatgccattctccacactggaag

SEQ ID NO: 875652 - DNA, 120 bp, Artificial Sequence
  ENSG00000287428_8 (sequence is synthesized)
ttctccacactggaaggctgaagactaaagaggtcatttgagctattaggggcacctgactctcccatcaaactgtcattcctctagaccaggggcagtggctcacccctgtaatctcag

SEQ ID NO: 875653 - DNA, 80 bp, Artificial Sequence
  ENSG00000287428_9 (sequence is synthesized)
accagtcccatctttttgagaggctgaggtgggagcatggaatgggcctggcaggttgaggctgcagtgagctgtgattg

SEQ ID NO: 875654 - DNA, 120 bp, Artificial Sequence
  ENSG00000287423_0 (sequence is synthesized)
aaagggaacctgactgcagagagaacgtattgttgattactgtcagccctgcagaagtttacacacagaagccttgcctggtggtggagggcagagtgacccagcactgccttgcagggg

SEQ ID NO: 875655 - DNA, 120 bp, Artificial Sequence
  ENSG00000287423_1 (sequence is synthesized)
accaggccctgggcctcctgaaggttcactgaaaaatcaactcacaaaaggctgattaagaggataaaagatacctaactcatagaaatgacctgtaatcatggcctgggttaggaacaa

SEQ ID NO: 875656 - DNA, 120 bp, Artificial Sequence
  ENSG00000287423_2 (sequence is synthesized)
ggatttggaggaagaaagtgccttcaaatcaccctgcaaatagtgttgtctactcagccacaggaagacaagccctggggatgcattcagcaggcagcaggtcccgcgggttctacagct

SEQ ID NO: 875657 - DNA, 120 bp, Artificial Sequence
  ENSG00000287423_3 (sequence is synthesized)
tcaaattacttggagcaaatgaggcttttcagctttgcttgctcaatgccaagctccacactttagaaggggatccttgtatacctgactcaccacccgaaggaaatgtcttcagagatg

SEQ ID NO: 875658 - DNA, 120 bp, Artificial Sequence
  ENSG00000287423_4 (sequence is synthesized)
ttcactgccccaggtagggcccatgctccacgtaaggccatccgctccaggtgtaatcgtgccaggctccattgcccaatatgtggcaagtcaatacatggagacacaaagaattgtagc

SEQ ID NO: 875659 - DNA, 120 bp, Artificial Sequence
  ENSG00000287423_5 (sequence is synthesized)
agagaaagaagtttaatcatcagggattcaaacaaggaggcagcatttccttactttcaagaagcttgatgtctaacctggcctcttcaccatggataaaacacacacaaaacgagaact

SEQ ID NO: 875660 - DNA, 120 bp, Artificial Sequence
  ENSG00000287423_6 (sequence is synthesized)
cagtagaacagtggcaaccctactgatttttaaaggatgcggatttcaacaaagaatctaccctgttcttccgtagaagagcccagtgggtggaatgatgcccctcactcaaggtgaggg

SEQ ID NO: 875661 - DNA, 120 bp, Artificial Sequence
  ENSG00000287423_7 (sequence is synthesized)
cagagcttgcaagagaactgatcattaagtcctgaaaaaggcagtgagaacttacaagggcatggtacgttttgtaagatctcacagaagacccaggtcactgaaaactggaagatgcat

SEQ ID NO: 875662 - DNA, 120 bp, Artificial Sequence
  ENSG00000287423_8 (sequence is synthesized)
actaattaagatgcatcatgggtagaggggaaattaaagaaccagaaaagaaacaattactgttttagagacataagtgtctgcattcaaataccaactctaccatttatcatttgtact

SEQ ID NO: 875663 - DNA, 120 bp, Artificial Sequence
  ENSG00000287423_9 (sequence is synthesized)
aactttggatgactttgagaatttttttttgtctcaggattcttatttttaaaaatgcagaggctatttggtatcagcatcataatgggatgcaaaatgaaacagaataataattataaa

SEQ ID NO: 875664 - DNA, 120 bp, Artificial Sequence
  ENSG00000287423_10 (sequence is synthesized)
aaagtttaggacaatttatgaagaacttgcatgtacttcttctcatgtgggatgctgttgcaatatatccttttttttaaggtagattgatcaattcaaagcataaaataaactgataaa

SEQ ID NO: 875665 - DNA, 120 bp, Artificial Sequence
  ENSG00000287423_11 (sequence is synthesized)
agtggatggtacgggcacaactgtagataatcactaacttgcaaacaacaatctggaaagaagaggtgttttgtccaccttgcacacgttataagtttcctctaatctggcaactttatt

SEQ ID NO: 875666 - DNA, 120 bp, Artificial Sequence
  ENSG00000287423_12 (sequence is synthesized)
atccccaacatctatggaataagtcaaattcacgtattacatagactcagagaatctcaaagggcatagaatgcatccaaggatgccaatctaactcatgcaaccatatgttgatgatct

SEQ ID NO: 875667 - DNA, 120 bp, Artificial Sequence
  ENSG00000287423_13 (sequence is synthesized)
gggggaggaaagcttataagcattgcaaattgctaccaggctattgcagcttcaacggcaatgtggagacttattcttcccacatttttgttccctaaagcagagtatatttcaaacttt

SEQ ID NO: 875668 - DNA, 120 bp, Artificial Sequence
  ENSG00000287423_14 (sequence is synthesized)
tgaatctttcatttccatttctctaccacaagaagatataaagccgctcagacacttgccggttaaagtacttgagctccaggataaatacttaggaatagagccagtcagatttgtctc

SEQ ID NO: 875669 - DNA, 120 bp, Artificial Sequence
  ENSG00000287423_15 (sequence is synthesized)
ccagcttttgtcccttttctcttctagtgaggaaattgcacctcattagctttgtgactttagaaagccacttcacctttctaaatctcagtttcttcaattgcaaagtagtaatgatat

SEQ ID NO: 875670 - DNA, 120 bp, Artificial Sequence
  ENSG00000287423_16 (sequence is synthesized)
ttaaaacacatcactgctattagggttgcacagagtaacccttagcttttaaatcacttccagagtgcctggtgcataaatagaagccataactcttattataccctttgctcttcacac

SEQ ID NO: 875671 - DNA, 120 bp, Artificial Sequence
  ENSG00000287422_0 (sequence is synthesized)
gcatcagctacaaacaggcagcaaggagccagagcactggaattcaactacaaagttcaggggacaagctcaagatgctgattcagttatccaacatcttcatcaacctttccaagcccg

SEQ ID NO: 875672 - DNA, 120 bp, Artificial Sequence
  ENSG00000287422_1 (sequence is synthesized)
tgtcatctgcagactgaatcagaatcagcttccaactatagtctcatcgaaatcactgactctttgctcatactacttattttcccttcatgactggctacttctcttcctcttcatctc

SEQ ID NO: 875673 - DNA, 120 bp, Artificial Sequence
  ENSG00000287422_2 (sequence is synthesized)
catgactggctacttctcttcctcttcatctctccaaatggtatttattctttaaaatccacctcgttcattccctttttttgtctgtttttgagacagagtttcgcttttgtcacccag

SEQ ID NO: 875674 - DNA, 66 bp, Artificial Sequence
  ENSG00000287422_3 (sequence is synthesized)
tctcggctcagtgcaactctgccctgcccacccaccacgtccggctaattttttatttttagtaga

SEQ ID NO: 875675 - DNA, 89 bp, Artificial Sequence
  ENSG00000287422_4 (sequence is synthesized)
gatccacccgcgcctggcctcatttattctttaaataagagaaacaacttcaaaacaggttgattaagtgctataacaggtaagcacag

SEQ ID NO: 875676 - DNA, 120 bp, Artificial Sequence
  ENSG00000287422_5 (sequence is synthesized)
tcaaaacaggttgattaagtgctataacaggtaagcacagagtgctcatgaacataagaggttaagcctacctgggtagggacaggaaatatgggggacttaatgaagtttcaaggagga

SEQ ID NO: 875677 - DNA, 120 bp, Artificial Sequence
  ENSG00000287422_6 (sequence is synthesized)
gtgactctatctaaccttaaaagatgagtataagccagaaagagaagggaaggaataaagttgctacataaagttatagctaatgcaaattcatggagacaagaaaaagcttatgttcaa

SEQ ID NO: 875678 - DNA, 120 bp, Artificial Sequence
  ENSG00000287422_7 (sequence is synthesized)
agaactgcacataattaggaatagctgaaagacaactaggtagtggcgagataggatggtatgggccaaatcaagacctttcatgacaagcttaaggaacccgaactttatcctataggt

SEQ ID NO: 875679 - DNA, 120 bp, Artificial Sequence
  ENSG00000287422_8 (sequence is synthesized)
ttaaattggagaatgacatgctcagatttgtgtttaagaaaaattttggctgccttttctgacaactccagttctcaacagtctctgtgtcctccaaatatctatgttacttactgggct

SEQ ID NO: 875680 - DNA, 120 bp, Artificial Sequence
  ENSG00000287422_9 (sequence is synthesized)
aatcactcaatcagcacttatataattatatagtgttctgaacttttaatatgcttattcttatattaccagggagatcattaactccttgaagagaacatgatttacttttttgtattt

SEQ ID NO: 875681 - DNA, 120 bp, Artificial Sequence
  ENSG00000287422_10 (sequence is synthesized)
cccacaacttgcaacacctaaagttctacatagtaagaactaaaacataaaaccaccggagagcgttctcaattggccaagtatgattagaagattggtaaaagaaacacacaaaatgaa

SEQ ID NO: 875682 - DNA, 120 bp, Artificial Sequence
  ENSG00000287422_11 (sequence is synthesized)
gattggtaaaagaaacacacaaaatgaaatcagaactgagttacctacaagaatccagttcaatatctaaaaacctcaaaaccatgccaggcaaggtggcttatgcctgtaatcctagca

SEQ ID NO: 875683 - DNA, 120 bp, Artificial Sequence
  ENSG00000287422_12 (sequence is synthesized)
ttgagcctgggagtttgaggctgcagcaagctatcattgtgccactgcactctagcagggacaacagactgagaccctgcctgaaaaaacaaaatcacaacacgccagtatcacttgtgt

SEQ ID NO: 875684 - DNA, 120 bp, Artificial Sequence
  ENSG00000287422_13 (sequence is synthesized)
gctgagataagaaggcagggtggaaaaatcagagctaactaaagttgtgtccattacattttcacacgatatcaggcccactgtgcttcactatattcattaccttcatagccaaaaaca

SEQ ID NO: 875685 - DNA, 89 bp, Artificial Sequence
  ENSG00000287422_14 (sequence is synthesized)
agtgataaaagctatgtatgtttgctgtaataggtcaaacaacacacagatgaaaaaggaaaaagttaacagattttcttttaaactag

SEQ ID NO: 875686 - DNA, 120 bp, Artificial Sequence
  ENSG00000287422_15 (sequence is synthesized)
atgaaaaaggaaaaagttaacagattttcttttaaactagtaagtatttaaaggaggtggaattcattcggtttccttttagtccactgcctcatttcatttagacctgaatatgtgagt

SEQ ID NO: 875687 - DNA, 120 bp, Artificial Sequence
  ENSG00000287421_0 (sequence is synthesized)
agtggagagtggagactctcattgtggagagtggtttggaagtcctaatgcctgttactgacagggtgggcaagtgaaaaacctcacaagaaagaacacattctctctgaagaaagaaaa

SEQ ID NO: 875688 - DNA, 120 bp, Artificial Sequence
  ENSG00000287421_1 (sequence is synthesized)
taaaagcaagtaggagaaccacagtttcctattagacaagaagtgacaggttaccgtaatccagatgtccttgaagttagaagcacttaggaaaacttttgctttgagtgcattgtatag

SEQ ID NO: 875689 - DNA, 120 bp, Artificial Sequence
  ENSG00000287421_2 (sequence is synthesized)
ttgtataggaccacattaacaggtctgctggagtttgctggggatccaccccagactctgtttgtctgcatatcgccagtggaggctacagaatagcaaagattgctgcctgctccttcc

SEQ ID NO: 875690 - DNA, 120 bp, Artificial Sequence
  ENSG00000287421_3 (sequence is synthesized)
tctggaagcttcgtcccagagggggacctgccagatgccagctggagctgttttgtataaggtgtctgtcgacctctgctgggaggtgtctccttgtcaggaggcacgggggtcagggac

SEQ ID NO: 875691 - DNA, 77 bp, Artificial Sequence
  ENSG00000287421_4 (sequence is synthesized)
ttctgctgaagctgtgcccacaccccaaacttttgcctttttaagaattagttatctgatagatttttttaacaatt

SEQ ID NO: 875692 - DNA, 120 bp, Artificial Sequence
  ENSG00000287421_5 (sequence is synthesized)
caaacttttgcctttttaagaattagttatctgatagatttttttaacaattgttttatatttttattatttacataacaactgtattgagatatgagttacgtaccatataattcacca

SEQ ID NO: 875693 - DNA, 120 bp, Artificial Sequence
  ENSG00000287421_6 (sequence is synthesized)
tggttttaatgagaacacatggacacatggagggaacaacacacactggggcctgtagggtggtagggtggggggatggagagcatcaggataaatagctaatgcatgctgggattaata

SEQ ID NO: 875694 - DNA, 120 bp, Artificial Sequence
  ENSG00000287421_7 (sequence is synthesized)
cctaggtgataggttgataggtgcaggaaaccatggcacttgtttacctatgtagcaagcctgcacatcctgcacatgtaacctggaacttaaaataaaattaaaattaaaaaaaataaa

SEQ ID NO: 875695 - DNA, 120 bp, Artificial Sequence
  ENSG00000287427_0 (sequence is synthesized)
gccacctgcttcagacgccccatgggctggcgactcttctggtctttagtgctgacacccacaggcctggctcacagtgggtgctgggtcagggctggtggagaacaatagtgctgagcc

SEQ ID NO: 875696 - DNA, 120 bp, Artificial Sequence
  ENSG00000287427_1 (sequence is synthesized)
aggacccgcccatgtgttagagaaaggcagcagcttggaaacctgtaggtgggtcttccatccactaagtcaccaagaactaggagcctgcagccagttgagaggattcttgaggtgctc

SEQ ID NO: 875697 - DNA, 120 bp, Artificial Sequence
  ENSG00000287427_2 (sequence is synthesized)
tgcccccagctggggccctgagcccccacgagccttccgcctggggcatctgatgactcacgtgcaccacagcacagcagcccagtgggctgggagttgggagctggaagatgaaagcca

SEQ ID NO: 875698 - DNA, 120 bp, Artificial Sequence
  ENSG00000287427_3 (sequence is synthesized)
cccactcttatctgcctccgaggagtcgcaatcaagagggaggatgcccccataagaaatgcagattctgtgaccttcagaggcagctggagaaagaaaagatggaggagatcacggccc

SEQ ID NO: 875699 - DNA, 120 bp, Artificial Sequence
  ENSG00000287427_4 (sequence is synthesized)
agcaattccagcctggggcgggcgcgggctcaatgatatccttcaggtcctaatccccgagtgtggctgtgtgtgacccgagtcccttctgcctgccaggagtgaggccacctgaggtcg

SEQ ID NO: 875700 - DNA, 120 bp, Artificial Sequence
  ENSG00000287427_5 (sequence is synthesized)
cagaaaggactggggaggagacaggcgcagggtgatccggatcccatatttaattgatggtaaggaggcctcctcacttctccctgagcctgacaaacatggctaacctcctttggagaa

SEQ ID NO: 875701 - DNA, 120 bp, Artificial Sequence
  ENSG00000287427_6 (sequence is synthesized)
agttctgtgaataatgtgtctgccgcaggctggcgaagtacagtgttctccagaaatccagtggtctgcaccatcagtgtcctgggctcgctgcctctggagactcccacgcccccagcc

SEQ ID NO: 875702 - DNA, 120 bp, Artificial Sequence
  ENSG00000287427_7 (sequence is synthesized)
aaagccggaaccctcccctgaagcctctgccatggcctgtcctgccttggggaggtggagaccctcggcgtgctggtgtcccacctcactgtgcctctcagcttctttgtttctgcccaa

SEQ ID NO: 875703 - DNA, 120 bp, Artificial Sequence
  ENSG00000287427_8 (sequence is synthesized)
ctggtccagattggggtctctctcggttcatttatccaggatcttttggcaaaaagagaaagaccaaggattatcccctttcaggagagctcagcctgctttttcgggctcttcaaggcc

SEQ ID NO: 875704 - DNA, 120 bp, Artificial Sequence
  ENSG00000287427_9 (sequence is synthesized)
catccattcatgcacggagaaataacacgaatgctggtgtggaaatgatgcccggatacctttccaaaggctccatagcccactcttccagtatccatcctggtcatgcaggcgctgacc

SEQ ID NO: 875705 - DNA, 120 bp, Artificial Sequence
  ENSG00000287427_10 (sequence is synthesized)
cacatgtttctggattaggaaggaaagcaaaggccaggaggcggaggctgacccctttatcttctgataaacccgagagcagaacagcctcaacaaggacgattacagcagggaaatggc

SEQ ID NO: 875706 - DNA, 120 bp, Artificial Sequence
  ENSG00000287427_11 (sequence is synthesized)
attcctggccagtggacaagcacctcctttaacctacagctcagagcctcactttgacttgcctcctgtggggtgctggtcagtaggggctgaattctggggtgctaggcatccctccac

SEQ ID NO: 875707 - DNA, 120 bp, Artificial Sequence
  ENSG00000287427_12 (sequence is synthesized)
catgcaggccccacaaaagcagccgaggagggagagtgctaggaagcagacagccacacagaccactgggctccatcaggcctctcactgcaggaagcacaggccagcaaggccagagtt

SEQ ID NO: 875708 - DNA, 120 bp, Artificial Sequence
  ENSG00000287427_13 (sequence is synthesized)
aatttctcagaataattgctaataatacaaatcaacctttctgggcactgagtacacaccaggccctgtgctaagcgcttctaacctaagcgtcacctcattgcctgctaataccctctc

SEQ ID NO: 875709 - DNA, 120 bp, Artificial Sequence
  ENSG00000287427_14 (sequence is synthesized)
taggaaatagggactactataagtcctgcccacagacatgaaaaccacagctgtgggttgaccctctctgcgtctgtatctaatactgcacctgttttctatgaaatcaggacaatatga

SEQ ID NO: 875710 - DNA, 120 bp, Artificial Sequence
  ENSG00000287427_15 (sequence is synthesized)
ttcatagggcaaaatgattatttgttacacatggagaaaaacaaaagctcaaagtatgttttctgaaggagaaacaaaatccagacattttccaagcttcaagtgtgaatatacttacat

SEQ ID NO: 875711 - DNA, 120 bp, Artificial Sequence
  ENSG00000287426_0 (sequence is synthesized)
ggcagctgcgtttgggtccccttcgatggtgttggggttttgttgtttcgctctttgcaataaattttgctgttgctcaccttttaggtccacactacctttatgagctttaacactcac

SEQ ID NO: 875712 - DNA, 120 bp, Artificial Sequence
  ENSG00000287426_1 (sequence is synthesized)
tcacagtgaaggtctgcaggttcactcctgtaaaccagcgagaccaggaagccaccacaagaaacaactctggagccgccacctttaagagccataacactcactgtgaaggtctgtggc

SEQ ID NO: 875713 - DNA, 120 bp, Artificial Sequence
  ENSG00000287426_2 (sequence is synthesized)
ctcctgaagtcagcgacaccacgaacccacagggaggagcaaacaactccagacgcaccacttttaagaggtgtaacactccctgcgaaggtctgtggcttcactcctgaggtcggcgaa

SEQ ID NO: 875714 - DNA, 120 bp, Artificial Sequence
  ENSG00000287426_3 (sequence is synthesized)
actacgaacccgctgggaggaaggaacaacgcggatgcgccacctttaagagctgtaacactccctgcgaaggtccgcggcctcactcatcaagtcgtgcatagaccacgaactctctag

SEQ ID NO: 875715 - DNA, 120 bp, Artificial Sequence
  ENSG00000287426_4 (sequence is synthesized)
aaagaaaaaacttcggacacacctgaacatttgaaggaacaaactccggacacaccatgtttaagaactataatgccgtgaaggtccgcggcaggaccgggaccaggaactcttcagagg

SEQ ID NO: 875716 - DNA, 120 bp, Artificial Sequence
  ENSG00000287426_5 (sequence is synthesized)
ttaaggctccctctcagtcctgccggttttttctcagttgactgcattactttactgtgtttcaacactcctggcacatgcatgaaaggccctaagatgagttctggtggcatagaactc

SEQ ID NO: 875717 - DNA, 120 bp, Artificial Sequence
  ENSG00000287426_6 (sequence is synthesized)
cttgggagaacagaaaaggcaccacagatcccattttgggagaaatctctgttttcatcatggaacccctggaattaaagatggaagacattgtgattttgaccttgttggatgctgcac

SEQ ID NO: 875718 - DNA, 120 bp, Artificial Sequence
  ENSG00000287426_7 (sequence is synthesized)
ctgaaggtggaggaagaggaagagccttgggggctaccattctggctggagaagcggcacgaggctccctcttgtggatgcagcaaggactgttaaaaaactcccaaagcagggactttc

SEQ ID NO: 875719 - DNA, 120 bp, Artificial Sequence
  ENSG00000287426_8 (sequence is synthesized)
aggcccacatgcacttagcctcctcttcccacctcctgttcctctccgtgtctaatgttccactgccatcgctgccaggaagttctgcagagaagagtgaagaagaaccgtgtgatccta

SEQ ID NO: 875720 - DNA, 120 bp, Artificial Sequence
  ENSG00000287426_9 (sequence is synthesized)
aacatgttctctgaagatattatcaacccaccattggccttatttactggaatgtttttataaccttcatttgacacctcttcccatcatttaaaataaatctggtgcttccctgaataa

SEQ ID NO: 875721 - DNA, 120 bp, Artificial Sequence
  ENSG00000287425_0 (sequence is synthesized)
ggggttcgcgccttctcccccggtggagcggcctggcgtttagggaccaggacactaaaggccccggcggggcgggagcacccagcgtgacctcacgctcctacacacagacaagcaaac

SEQ ID NO: 875722 - DNA, 120 bp, Artificial Sequence
  ENSG00000287425_1 (sequence is synthesized)
gggccggcccccgcacgtgacaaggcagagccgggcccaggccagctgcctgtccagccctgggatgagaaaaggcgtcaggagatggaccgggcctggttcgcctttaattggctgacc

SEQ ID NO: 875723 - DNA, 120 bp, Artificial Sequence
  ENSG00000287425_2 (sequence is synthesized)
cgtcctgtgggggtaactgacgcgtgaacagccaacaattgggccctctggccgggacaaacacgtgcgtttggggagtagaagaaggctggtattaacctccattttacaatgaggaaa

SEQ ID NO: 875724 - DNA, 120 bp, Artificial Sequence
  ENSG00000287425_3 (sequence is synthesized)
cggagtcccaaagacgttcagtcatcttcctgatattcacacacttacaccctggtcaggccggcgccatatgtgttttcaccagcagaagggactgccagggaacagctgaggggacca

SEQ ID NO: 875725 - DNA, 120 bp, Artificial Sequence
  ENSG00000287425_4 (sequence is synthesized)
gagctgggatgggcctggataattatagcggaaagaaaaacacgccgagcgcatggtcctggcagaagcagcgtggaaacagaagtcaaggcagattatttctgccatgaggagatcttg

SEQ ID NO: 875726 - DNA, 120 bp, Artificial Sequence
  ENSG00000287425_5 (sequence is synthesized)
ccatgaggagatcttgccatgtaggaaaaaagaaagaaagagaggaaagaaagacagagagagagagaggaaagacagaaagacaagaaagaaagagaaagaaagaaaagaaaaaaaaaa

SEQ ID NO: 875727 - DNA, 120 bp, Artificial Sequence
  ENSG00000287425_6 (sequence is synthesized)
ttttgtggcactgtgagtctccctccgccaggttctctagcttttgcgctgagctctgtctggctgtgcattccggagaggctcggcaaatttgctgtgagattgctgagcaacagcaga

SEQ ID NO: 875728 - DNA, 120 bp, Artificial Sequence
  ENSG00000287425_7 (sequence is synthesized)
acagatgcaaaggcctgcagaccaaaaattgtccccctggctgtccaaacagggaagaatctggattccagaaactatatacttattatccttggcaaaagagactgttaaaagtgtgga

SEQ ID NO: 875729 - DNA, 120 bp, Artificial Sequence
  ENSG00000287425_8 (sequence is synthesized)
gtgtttagggtttaaactatttttattatttatttatttaacttattttttgagacagggtctctttttgttgcccaggctggaatgcaggtggctgggtctcagctcactgcagtcttg

SEQ ID NO: 875730 - DNA, 120 bp, Artificial Sequence
  ENSG00000287425_9 (sequence is synthesized)
acctcctgggacaagcagtcctacttctgcctccctagtagctgggaccacagggatgagccactaagcctggctaatttatttattctttgtagtgacaggtctccctatgttgtccag

SEQ ID NO: 875731 - DNA, 89 bp, Artificial Sequence
  ENSG00000287425_10 (sequence is synthesized)
cggactctcacagtactggaaagaaattctcttaaattctttcagggtgggggcagatctgagcaatcctatagacatacaaacgctgc

SEQ ID NO: 875732 - DNA, 120 bp, Artificial Sequence
  ENSG00000287425_11 (sequence is synthesized)
ggggcagatctgagcaatcctatagacatacaaacgctgcacccttggatttttagcagcttgctcaagtcataagatgtcctgtggacaaactggagaatgtatgggtacagataaatg

SEQ ID NO: 875733 - DNA, 63 bp, Artificial Sequence
  ENSG00000287425_12 (sequence is synthesized)
cctgtggacaaactggagaatgtatgggtacagataaatgtattttgaaaacttgtagccagg

SEQ ID NO: 875734 - DNA, 83 bp, Artificial Sequence
  ENSG00000287425_13 (sequence is synthesized)
cttgtttcacatctatttcattgaattgtgtgtacacgcacacacacacacgtttatttgtaaatattttgtatgtgccaata

SEQ ID NO: 875735 - DNA, 120 bp, Artificial Sequence
  ENSG00000287425_14 (sequence is synthesized)
acacacacgtttatttgtaaatattttgtatgtgccaataaccaaattgacaaagtttcatatattttgttgtataattttaacatcatcccaggaaacaatccactgtgcttacagttt

SEQ ID NO: 875736 - DNA, 120 bp, Artificial Sequence
  ENSG00000287425_15 (sequence is synthesized)
tggaacttctaaatctttaaatacaaactgtatttgaaacactgaaaatgaaaaaaagacacaagaatgaaagagaaaactgaaaacattaggtaattaaaaccaacatgagaaaaactt

SEQ ID NO: 875737 - DNA, 120 bp, Artificial Sequence
  ENSG00000287424_0 (sequence is synthesized)
agatgctccaaaggaagaaaggtagagaagcctgagctggaggaaaacacagtcgtgcaatgttttaggaccccagacctgcaagggagaagctgaagctctggagataagaaggccaaa

SEQ ID NO: 875738 - DNA, 120 bp, Artificial Sequence
  ENSG00000287424_1 (sequence is synthesized)
atgagtcctatggagtatttgcacagccagtttcttctggaagcttcaagagagagtctgttccttgccttttccagcttctagaggcagccgacactccttggctcatggccacataac

SEQ ID NO: 875739 - DNA, 120 bp, Artificial Sequence
  ENSG00000287424_2 (sequence is synthesized)
tctgacctgtgtctattgtcacatcactgactcttctgacctcctaccaggacccttgtgattacattgggcctgcttggataacccaggatagcttctccatcttaaggttgttaatca

SEQ ID NO: 875740 - DNA, 120 bp, Artificial Sequence
  ENSG00000287424_3 (sequence is synthesized)
catctgcagaatgcctgttgccatataagttaacatattcacaggttctaggaagaaggacatggacatcttccaggaagcattattctgtctaccacagcagttctttcaactgtatgt

SEQ ID NO: 875741 - DNA, 120 bp, Artificial Sequence
  ENSG00000287424_4 (sequence is synthesized)
ttcccagaccattcatccttccctgcacaaagtcaagttcatcaacgttcttactgaaatgtgatgttgtttatcacgaatatatataaagcaaagactctctaatcctgtactttgcat

SEQ ID NO: 875742 - DNA, 120 bp, Artificial Sequence
  ENSG00000287424_5 (sequence is synthesized)
ctggcatttcaaaatgaagtctaaaagtgtacaatttctactcctatgcaagtttcctcttcttagatttgacctcctattctggactatgaaggtatgtaaaagtctctttttttgtga

SEQ ID NO: 875743 - DNA, 120 bp, Artificial Sequence
  ENSG00000287424_6 (sequence is synthesized)
tccaacctattatttagctgaatggactattaagagcactgtgctagtgtgagaaatgcttctggtctttacttttaccattcattagctcctgtacaagaggagatgtataatattgtt

SEQ ID NO: 875744 - DNA, 120 bp, Artificial Sequence
  ENSG00000287424_7 (sequence is synthesized)
caatcactggaaatctattaggattatggaattaaagtctttagcaaacttaagtatcatgctaattttagtttatgcataccaaatgttagcaactatcaacaatgcacttcagtttta

SEQ ID NO: 875745 - DNA, 120 bp, Artificial Sequence
  ENSG00000287424_8 (sequence is synthesized)
ttgagtgacctccaatgatacaagaacatagaagtggtccaagaacattcagaccacccacatgtaggaatgaaggaaaggacttgcatgttaagatccattttgagcctccacggatga

SEQ ID NO: 875746 - DNA, 120 bp, Artificial Sequence
  ENSG00000287424_9 (sequence is synthesized)
gcctcacaactcactggtcagccttgaagtatgttttgggagatgtcacttagcatctacttcaatctattcatttgcatgttttgaatctgcttgacttgtcatggagtccacgttttt

SEQ ID NO: 875747 - DNA, 120 bp, Artificial Sequence
  ENSG00000287424_10 (sequence is synthesized)
tatttcattcaaaatggtatcataagactctccttgcttccttccacttctctaagtggaaagggttgttcttagttcgtgtatgtatctgaaaggcaactggaattgttgaagagaaag

SEQ ID NO: 875748 - DNA, 120 bp, Artificial Sequence
  ENSG00000287424_11 (sequence is synthesized)
agaagacctaacctgggcaccctaggaacctactgacatctataacaccactgtgtgctccctgcctgtccgtcttagtagatccgatgaatgccctaaattctgaatatttactatctc

SEQ ID NO: 875749 - DNA, 120 bp, Artificial Sequence
  ENSG00000287424_12 (sequence is synthesized)
aaccactatctctaaaaaattatggtaatgacttacacaatagacattattccataaatgttctaatgatgccaagtatctgaacagattgtacaacagcagatttctgctgcagtcaat

SEQ ID NO: 875750 - DNA, 120 bp, Artificial Sequence
  ENSG00000287424_13 (sequence is synthesized)
caacttacctatctgtctacatgtatctatgccaccatttctccataaatcacagtctagtccatgttacttcctaaatgagcattgcctcaacataagccttggttagaatgcttttca

SEQ ID NO: 875751 - DNA, 120 bp, Artificial Sequence
  ENSG00000287424_14 (sequence is synthesized)
ttgttggtcttggaggtatataggtgaaccacttatcctgagcctacagattcatttaatgacattcgctcgttgtatagatttaaataggcttggaaatctcaggaaaattagcagcct

SEQ ID NO: 875752 - DNA, 120 bp, Artificial Sequence
  ENSG00000287424_15 (sequence is synthesized)
ttggaaatctcaggaaaattagcagcctctataagctaaggtggattttactgtccagagaacacatctaaatatggcaagggctagactatgtgtgtgtgtgtgtgtgtatgtgtgtgt

SEQ ID NO: 875753 - DNA, 120 bp, Artificial Sequence
  ENSG00000287424_16 (sequence is synthesized)
aaaagatatacataaaatatttcatacatatataaaatatttcaaagtccagactattttgtttagacttccttatttcagaagaggaaattgatacaaaggaaagcaaagaagacagat

SEQ ID NO: 875754 - DNA, 120 bp, Artificial Sequence
  ENSG00000287424_17 (sequence is synthesized)
ttttcttggccccttcaccgctgatgataaaattccataaggaaggagggtgtcaagggttcccactgccctcttttgcttccttgctcttcccttgaaataaatctcaacataccaccg

SEQ ID NO: 875755 - DNA, 120 bp, Artificial Sequence
  ENSG00000287424_18 (sequence is synthesized)
tgatctttgcaattaaattactttacccaaagcagatgttcgctaggagcattttccttctgcagcatggagagtcatagtttctctgctcatttgtcttgttaactcatatctgagaga

SEQ ID NO: 875756 - DNA, 120 bp, Artificial Sequence
  ENSG00000287424_19 (sequence is synthesized)
acacatggaagtggcatggtcagaaagaaattggatacacagagagaaagtttaatttttgcttgtaatactatgctaaattattaaactgaaagtcatataaaatagctaaaagactaa

SEQ ID NO: 875757 - DNA, 120 bp, Artificial Sequence
  ENSG00000287424_20 (sequence is synthesized)
aaaagacataaatcagccaccacctatgtattttatttcattacttttttttgttctagtatttttcccagtttgaatattgaaacaaaattaattggtttcacttttaaagcaatgtta

SEQ ID NO: 875758 - DNA, 120 bp, Artificial Sequence
  ENSG00000287424_21 (sequence is synthesized)
ttatagacatgtatttaacattctgaaaaaatattttatatatcaaaatatgtatttttaaggcagctcttaatttaatccaggcagcgaaatctactttcctgtacagcttaatggttt

SEQ ID NO: 875759 - DNA, 120 bp, Artificial Sequence
  ENSG00000287424_22 (sequence is synthesized)
aatggttttagtccattttaactttcattaaaattctcagaaatctttctattaggttttaaaaatgtttttctttttagattttaaggagccaaattgtgacctaaaatataataatat

SEQ ID NO: 875760 - DNA, 120 bp, Artificial Sequence
  ENSG00000287424_23 (sequence is synthesized)
agcatgagagttatatagaaaaactaataatatacataaccttaacatattgtcaagtttgggatatctgaaattaatatactttgttcttaatattttgagagaaatattgtttgaata

SEQ ID NO: 875761 - DNA, 120 bp, Artificial Sequence
  ENSG00000287424_24 (sequence is synthesized)
agagaaatattgtttgaatatgtacatgcaaaaatatgcctcagtcatttagttttatgtagaaatttaaactaaaggcaatacataataaaaatataaaaaaatttaagaacttacata

SEQ ID NO: 875762 - DNA, 120 bp, Artificial Sequence
  ENSG00000287424_25 (sequence is synthesized)
aaggccatcttacattcctatgcaacttccattaattgaagagagagcagcctatattttgattcaaacaccactgaaagttttatgagtcccttggacttactaatggtgaaaatagct

SEQ ID NO: 875763 - DNA, 120 bp, Artificial Sequence
  ENSG00000287424_26 (sequence is synthesized)
ttatttttcctttgaatcacttccaagttactgttaactaatatatacattttaaagttattgatttttatgacaaagactttctccatctggaaaataaactatacattactgtcatat

SEQ ID NO: 875764 - DNA, 120 bp, Artificial Sequence
  ENSG00000287424_27 (sequence is synthesized)
tcaaggacaaatgtacaggatttgagttttgcaaagcaataacatatgggattttcagagggctttggcacaggggttggaagagaagaggaaggagtttacctaagtgtgggaacaatg

SEQ ID NO: 875765 - DNA, 120 bp, Artificial Sequence
  ENSG00000287424_28 (sequence is synthesized)
tacaaggtcacacgtgatccgctttaagatggactcctgtgtccaaaccaatttttaatactactctatgcacatgatgcactagagaagaaaaagaatcaactgtctaatgccccgtga

SEQ ID NO: 875766 - DNA, 120 bp, Artificial Sequence
  ENSG00000287424_29 (sequence is synthesized)
gtgtagaggaacctcaacacacctcagagagaggttggaaccgaatagtctattctttggagagcttactctataattcttttccttacttattgacaaaagtttatttgcttttttaaa

SEQ ID NO: 875767 - DNA, 120 bp, Artificial Sequence
  ENSG00000287424_30 (sequence is synthesized)
aatgtatctaacattagccttcaagtgatttttccttagaagtttaaggttttcatcaaaatacgtatgtttttctggacagatggagactccatagagagaaattgaagtaactgagaa

SEQ ID NO: 875768 - DNA, 120 bp, Artificial Sequence
  ENSG00000287424_31 (sequence is synthesized)
aacaacacattgccagttgctgtgttctaaactagactctcatttaaggctgtatatgcatactggatagtgggatttgaatgtgtatcagtcaaaagtggaatgttctgcaatgatacc

SEQ ID NO: 875769 - DNA, 120 bp, Artificial Sequence
  ENSG00000287424_32 (sequence is synthesized)
tatatttttactactacagaagatgttgaatggtataatgtgcacagtgctggaatagagagcaggagtcctagggaggagttttagctttgccattacctagatgtataatcttgtaaa

SEQ ID NO: 875770 - DNA, 120 bp, Artificial Sequence
  ENSG00000287424_33 (sequence is synthesized)
agtgattggacctttgcaggcctcagttccctcatttataaaatgaagaacacagactagattatttctaatgtctttcccaactccaagaattaaggccccctcattccactgtgattc

SEQ ID NO: 875771 - DNA, 120 bp, Artificial Sequence
  ENSG00000287424_34 (sequence is synthesized)
tttttcttaattaattaatttatttttattttattataagtaccgggatacatgtgcagaatatgcaggtttcttacataggtatacatgcaccaaggtggtttgctgcacctatcaacc

SEQ ID NO: 875772 - DNA, 64 bp, Artificial Sequence
  ENSG00000287424_35 (sequence is synthesized)
cttccagcttcacacgtgtccctgcaaaagacatgatcctattcttttttctggctgcatagta

SEQ ID NO: 875773 - DNA, 80 bp, Artificial Sequence
  ENSG00000287424_36 (sequence is synthesized)
attcttttttgctttatctagtcgatcattgatgggcatttgggttagttctaagtgtttgctattgtgaatagtgctgc

SEQ ID NO: 875774 - DNA, 89 bp, Artificial Sequence
  ENSG00000287424_37 (sequence is synthesized)
tttatagtagaatgacttataatcctttgaatatatacccagtaatgggattgctggcagagccagaattgacaaatgggatccaaata

SEQ ID NO: 875775 - DNA, 120 bp, Artificial Sequence
  ENSG00000287424_38 (sequence is synthesized)
gttctagatccttgaggaaagccagaattgacaaatgggatccaaataaactaaggagcttctgcatagcaaaagaaactagcatcagggtaaacaggcaacctatagaatgggagaaaa

SEQ ID NO: 875776 - DNA, 89 bp, Artificial Sequence
  ENSG00000287424_39 (sequence is synthesized)
atttcagaagaagacattcatgcggccaataaacatatgaaaaaaaagttcagcatcactagtcattagagaaatgcaaatcaaaacca

SEQ ID NO: 875777 - DNA, 120 bp, Artificial Sequence
  ENSG00000287424_40 (sequence is synthesized)
ttaataaaaagtcaggaaacaacagatgccggcgaggctgtgaagaaataggaatgctttttacactgttggtggagtgtaaattagtccactgtgattcttaaagataggctataaaat

SEQ ID NO: 875778 - DNA, 120 bp, Artificial Sequence
  ENSG00000287424_41 (sequence is synthesized)
tgttttataatccattacacaatggttttgaaatagggaatggattgaccagcaactatcctcattttttatgtggaagcttgtttggtaattacttcccaaatatctttctcagatgat

SEQ ID NO: 875779 - DNA, 120 bp, Artificial Sequence
  ENSG00000287424_42 (sequence is synthesized)
gctctctttatatggtgaaaaataaaattatagtaccttaatacaggaatttatttggcgcatccaactatttttatgttgcatatttaagaatctattagatcgtcaatactctgaata

SEQ ID NO: 875780 - DNA, 120 bp, Artificial Sequence
  ENSG00000287424_43 (sequence is synthesized)
ctctgaattattaaaggaaacagtatttttaagggagagtctgataaagattttgaagagagagaaaaaaagagatttgaaaaagtatagaaaattggagaaaacatttgataaagcaca

SEQ ID NO: 875781 - DNA, 120 bp, Artificial Sequence
  ENSG00000287424_44 (sequence is synthesized)
aaccgtatttgagaaaaccaggcccacaaataagatctgattatcctaccacctgcttctttaatcctcagggtaaagacttcacagggctccatgactttactggatgccctatgtctt

SEQ ID NO: 875782 - DNA, 120 bp, Artificial Sequence
  ENSG00000287424_45 (sequence is synthesized)
tatttatcttttgccttactacaaacttactatggaagattgaaattcatgagactagtggtacaaagacaggatttatcccaaggcaaagcaattttggatgtatatgtttgtttgaac

SEQ ID NO: 875783 - DNA, 120 bp, Artificial Sequence
  ENSG00000287424_46 (sequence is synthesized)
cctgacacttatttgtattgaaatctttttgactatgttaagatggactactgtctttccaagcttcgccataatcatttgttgggcctagctgatagttgctaataaaaccttcacaag

SEQ ID NO: 875784 - DNA, 120 bp, Artificial Sequence
  ENSG00000287424_47 (sequence is synthesized)
atctctatctcccaattcggtaaaaacagtctcaccttgtttatttatggttttagttgtctaataaaattcagtttcctgtcatgtattgaagcataattctataaagaaattatctgc

SEQ ID NO: 875785 - DNA, 120 bp, Artificial Sequence
  ENSG00000287424_48 (sequence is synthesized)
aataagatatgctcttacaaatgtattacatacgatttttgaaaattatttattcacttgattatatcaaaacttcagagagagcttaagaacacataatcgggttatgagagctctttg

SEQ ID NO: 875786 - DNA, 120 bp, Artificial Sequence
  ENSG00000287424_49 (sequence is synthesized)
aatatatttcatgctttcataaattgtctatttttcccctttcaaaactcaaaatggaagggaggatttatctgcaagataaataagaatacactgtagtatagaaagttatacctgtac

SEQ ID NO: 875787 - DNA, 120 bp, Artificial Sequence
  ENSG00000287424_50 (sequence is synthesized)
aaaatgcatcagaagtgtccatgactaacagctttatttcttctctctttgtctcaagtatttttctcaggtattctttcatgtttttgtcttcgtgtgaccaaacactacaagttttgt

SEQ ID NO: 875788 - DNA, 120 bp, Artificial Sequence
  ENSG00000287424_51 (sequence is synthesized)
tgaggatttgtaaatattccccacccctgataaactctgataatttgtttttcccatactattcgaaacatacttctgcaatgccaaatttgtacagaaaaccttttaacaatacaacaa

SEQ ID NO: 875789 - DNA, 120 bp, Artificial Sequence
  ENSG00000287424_52 (sequence is synthesized)
aatcaattgtaagagaggtaaatgagatgttttaatgggtttatattaaatcagaatgaaatttattttcacaaaaggatccttatgtacaattagtttctttcacagtgtattccatag

SEQ ID NO: 875790 - DNA, 120 bp, Artificial Sequence
  ENSG00000287424_53 (sequence is synthesized)
tcttatgaaaacatatcagcaataaaaaacttctaaaaatttctatcaggaatgttttttcatggacaataaatataacttaaggcactttacgtcatatgcttttccagagggtttggt

SEQ ID NO: 875791 - DNA, 120 bp, Artificial Sequence
  ENSG00000287424_54 (sequence is synthesized)
tcaacacacacttgagaattatattcaaaatattttcatccagacattgccagccagaatgtgcccaattagaactgatggccagtgaaggcgccaggccctcgttcttcagtgagtgga

SEQ ID NO: 875792 - DNA, 120 bp, Artificial Sequence
  ENSG00000287424_55 (sequence is synthesized)
tcttgggaggtgggataatgagggagggactgagcagtgagggcagggctgctggtggtggggagttgttttccaacttcttttaaattacaataatttaacaactattcggctaacaac

SEQ ID NO: 875793 - DNA, 120 bp, Artificial Sequence
  ENSG00000287424_56 (sequence is synthesized)
aatgtagctggaccatgcattcttcaccctatactaattgagtacctttcaatattattcatatagtacacacaatggaaatttttaaagttgggtattttgtttattaatccaacaaat

SEQ ID NO: 875794 - DNA, 120 bp, Artificial Sequence
  ENSG00000287424_57 (sequence is synthesized)
atttattgagacctactaggtgctaggcaccacaccagacccagaagaaaagaagactaacagggcaaccctctgcagaaggaatcacactcataggagaactcttatatagtgtatatt

SEQ ID NO: 875795 - DNA, 120 bp, Artificial Sequence
  ENSG00000287424_58 (sequence is synthesized)
agataattttctacccaactttcttctgctcatactttgtttatattactctgcatttgattggaataaaaagaggactgatccaacacagtcaatcttctctatttaaaataaagccag

SEQ ID NO: 875796 - DNA, 120 bp, Artificial Sequence
  ENSG00000287424_59 (sequence is synthesized)
ttaaactcatttgcataactagaaaaattgatttttcaagtctactacattgattccagacagatctgctgagttttagaaagtgtgacccatagtccttagattcttgttctgttgtct

SEQ ID NO: 875797 - DNA, 120 bp, Artificial Sequence
  ENSG00000287424_60 (sequence is synthesized)
ctgtcctatggaagggcattctcctttaaaaaattcagctttttttgctgatgctctgtaggctgccttctaatgaggatggtgtgggctgggttcaggttgtaggataagttgcagaaa

SEQ ID NO: 875798 - DNA, 120 bp, Artificial Sequence
  ENSG00000287424_61 (sequence is synthesized)
gccctaatgatctgtctggagcaaatcttagcaccttgggaaaaatgtgtggccctttaaatttatgaaaaattcttctctgggagggagtgggagtggggaggtggaatagagtagaga

SEQ ID NO: 875799 - DNA, 120 bp, Artificial Sequence
  ENSG00000287424_62 (sequence is synthesized)
aacaaagatagccatctacttggagaaaggaagacatttgaaggaatctgaattgcaatcaatgaaaaagcgtctgaacttatctgaaatatacattttaaaatcataaagataaattac

SEQ ID NO: 875800 - DNA, 120 bp, Artificial Sequence
  ENSG00000287424_63 (sequence is synthesized)
tgacttgctaggggctctggggcctttggccacaaactgaaagctgcactattggcttccctacttttgaggttctgggactcagactggcttcccagctcctcagcttgcagatgccta

SEQ ID NO: 875801 - DNA, 120 bp, Artificial Sequence
  ENSG00000287424_64 (sequence is synthesized)
ttgtgggacttcacattgtgatcatgtgagtcaattctcctaataagttcccctttatatattcatctattctattcgttctgttcctttagagaaccctgactcatacagcggctcaaa

SEQ ID NO: 875802 - DNA, 120 bp, Artificial Sequence
  ENSG00000287424_65 (sequence is synthesized)
ggaatctcagtaaatctgagaaagaaaaaccacctcaccaggccctctatttaaggctggtagccactggtgaaagtgatcattaaacacttggaatgtagctggtccaaatagaaatat

SEQ ID NO: 875803 - DNA, 120 bp, Artificial Sequence
  ENSG00000287424_66 (sequence is synthesized)
gctgtaagtatatgaatttcaaatatttagtacaaaaacatgtaagatgttacatgaataagttttatattgattacatgttgaaatgatcatgctttggatgtatttggataaataaat

SEQ ID NO: 875804 - DNA, 120 bp, Artificial Sequence
  ENSG00000287424_67 (sequence is synthesized)
gcataacagatgctccaaaggaagaaaggtagagaagcctgagctggaggaaaacacagtcgtgcaatgttttaggaccccagacctgcaagggagaagctgaagatcaatgaaacaaga

SEQ ID NO: 875805 - DNA, 120 bp, Artificial Sequence
  ENSG00000287424_68 (sequence is synthesized)
acaaagaggagaatcaggaagtcagcagtatgtctcctttattcccccatgctttagagtgagaagaaataccagaatctggaaccaggaagtgagtcctctagggatgaggaggtattc

SEQ ID NO: 875806 - DNA, 120 bp, Artificial Sequence
  ENSG00000287424_69 (sequence is synthesized)
agctggatggccttttaaaacatttcctccagagtcttctgcctgattaaaaacagttttcgtcctagaagcctctctttgattttataaactgacatgatctctgttatacatgcatgc

SEQ ID NO: 875807 - DNA, 120 bp, Artificial Sequence
  ENSG00000287424_70 (sequence is synthesized)
tgctctagtccttcaataagcccatctcacattttcaccatgtcatatgtaggtactttttctgccatgttaacaacatcttctttttcttcattaatatgattaccttgattcagagcc

SEQ ID NO: 875808 - DNA, 120 bp, Artificial Sequence
  ENSG00000287424_71 (sequence is synthesized)
attttggctactttactatccatcaatgaatgagtaactagaacctcatttcttccagtttactgacagactctcaagggatattttttgcacttgtaaggaggtcaaacatcttttttc

SEQ ID NO: 875809 - DNA, 120 bp, Artificial Sequence
  ENSG00000287424_72 (sequence is synthesized)
tcacttgacttaaggaattcttcaaagtcattaccttgtgcctcctcatctctgaacacagttacaatcactctgtgccaagcattggcaaaagcatgtgtggcatccttcatgctaaac

SEQ ID NO: 875810 - DNA, 120 bp, Artificial Sequence
  ENSG00000287424_73 (sequence is synthesized)
ttctcttgaaaaccttacacacccaggcctctgttcactgctgctaccatgctggtcaagaaagtgttttatatttaccctttcttattctaagaatattctggtcacatggctgagtta

SEQ ID NO: 875811 - DNA, 120 bp, Artificial Sequence
  ENSG00000287424_74 (sequence is synthesized)
aaggattaacagaatcttgcagttggcatccggtccagcttccctgcagtgagcatgtaccactggtacaaaatgtttatgaaaccaatcagaaaagagatctctggtgatctatacctt

SEQ ID NO: 875812 - DNA, 120 bp, Artificial Sequence
  ENSG00000287424_75 (sequence is synthesized)
tttgttagcataataatgaactggtaaaaaaaattcactccctgaaaagagcaaagacgcaaacttttgcctatcacagcaagttcacacttacgcatgcctgctgcattagcacatccc

SEQ ID NO: 875813 - DNA, 120 bp, Artificial Sequence
  ENSG00000287424_76 (sequence is synthesized)
agcatagttattctgtccttggaatccttcattcctgtaggagctgtctcatcagctgtagttagtgtctttctggagtgataacaccaaaatagtaatgttttatcagcattatagact

SEQ ID NO: 875814 - DNA, 120 bp, Artificial Sequence
  ENSG00000287424_77 (sequence is synthesized)
tgttctggtgccagattttcatcagtgatgatcttagtgaactcatcaatgaatttctccgttgcttcatgatcaacagatgctttatcaccacaaatttttaaaaatttaatgctgtgt

SEQ ID NO: 875815 - DNA, 120 bp, Artificial Sequence
  ENSG00000287424_78 (sequence is synthesized)
tttttctcaaatttttgtaaccagcctgttaacatattcacagttcctttcaattttcagtttatcatgatagatcttcatttgtttcatgatcaacacaccattaagtgatgtatgttc

SEQ ID NO: 875816 - DNA, 120 bp, Artificial Sequence
  ENSG00000287424_79 (sequence is synthesized)
actgagacactatcagatgcactctgccccagcctacagcatatagaatctgtatatattttgataaatttatacctaagtatttttggtgttattgtaagttttaattactcattgtca

SEQ ID NO: 875817 - DNA, 120 bp, Artificial Sequence
  ENSG00000287424_80 (sequence is synthesized)
ttatattgaaacataatttatttttgtatagtgaccatgcaatcctgcaaccttcctaaactcacttattacttacaggaggttttttttttatttttgtagatttcttagaattacata

SEQ ID NO: 875818 - DNA, 120 bp, Artificial Sequence
  ENSG00000287424_81 (sequence is synthesized)
gataattacatagtatatgtacatagagataatgctacttctctcttttcaatttgtatgctgcctatttctttttcttatattgtttcactgcctaggactttcactacaatactaaat

SEQ ID NO: 875819 - DNA, 120 bp, Artificial Sequence
  ENSG00000232885_0 (sequence is synthesized)
agaggaaacagagaggaactaacatgcagaggacagagagaggaactaacgtgcagaggacagagagagaattaatagtgctaatcgtgcaaatggcttttgcctcttttctctaatccc

SEQ ID NO: 875820 - DNA, 120 bp, Artificial Sequence
  ENSG00000232885_1 (sequence is synthesized)
tcctttttgccccaacaatggaggaatcaggaccagagaagaggggttcatttgtggaatagccccttctctgtggcattgatatggcatgccaattttgtcatataatgaggttccaca

SEQ ID NO: 875821 - DNA, 120 bp, Artificial Sequence
  ENSG00000232885_2 (sequence is synthesized)
caagcatggttctgtttctcagcattctgactgtttctgcacctatgccacactgaataaccaaagctcaagagttaagtcatctggtttaacagttctggaggctgggaagtgcaagac

SEQ ID NO: 875822 - DNA, 120 bp, Artificial Sequence
  ENSG00000232885_3 (sequence is synthesized)
caagatatgaacagattcattatctggttcaaagccaggagcagtggcaaagcacctgttgtcccagctacttgagaggctggagctggaagatcacttaaggccaagagttcaagacca

SEQ ID NO: 875823 - DNA, 120 bp, Artificial Sequence
  ENSG00000232885_4 (sequence is synthesized)
aggttcagtcagatttcagaaactgagagtagacactctaggatttgattgcattgacttgcttaatgttcatttttggcttggatcatgaatatagtctttggataaagggttactttc

SEQ ID NO: 875824 - DNA, 120 bp, Artificial Sequence
  ENSG00000232885_5 (sequence is synthesized)
cccaatttgacttgttttcatcattgtataccatgactgtttccttgaaaataaactacataattaccattttcatacaactttactatggaaatgtgtaatatgtaactatttcctgat

SEQ ID NO: 875825 - DNA, 120 bp, Artificial Sequence
  ENSG00000232885_6 (sequence is synthesized)
tgtgtccttaattaataatccagaattccatctctactcaaacaacatcaaatactaaggcagtattaattttagtaaaatatttaaacatacatcttagtttgctataaaaagtgaaca

SEQ ID NO: 875826 - DNA, 120 bp, Artificial Sequence
  ENSG00000232885_7 (sequence is synthesized)
cttagctacgtgctcattttcatatatatgttttttttgttcataggtacagataccctgcatatttttggcctcatatgaagaaagaaatgtttttgaaagtttacgtgtgtgcattta

SEQ ID NO: 875827 - DNA, 120 bp, Artificial Sequence
  ENSG00000232885_8 (sequence is synthesized)
tcatcataaatacatttaattcattgtaaagacatagcaagataatcagctgtctgataattataaggtgttgattagaaaataggtacttactttaaataaaattgttatattaaacta

SEQ ID NO: 875828 - DNA, 120 bp, Artificial Sequence
  ENSG00000257167_0 (sequence is synthesized)
accgccaaacgcccgcctttgtagccccggccccgcgtccttaccctgccgacggctgctcggctccggcccgcggcggcggccccagagccgaggaccggggtgggctcgcgctcttcg

SEQ ID NO: 875829 - DNA, 120 bp, Artificial Sequence
  ENSG00000257167_1 (sequence is synthesized)
gggtgggctcgcgctcttcgtcactggagaagtccgggggccccttgctgttggtgccggcggggagcggcggccggttgcgagccgtgaggtgctgcaggaccgaggggtcttccagga

SEQ ID NO: 875830 - DNA, 120 bp, Artificial Sequence
  ENSG00000257167_2 (sequence is synthesized)
actccggcatctcggggatctgcgaagccccctccccacagcctttgccgccgccgctcacgccggcgcgcttgctcctggccggggaccgcgctgccgcctccgagcctcacggctcct

SEQ ID NO: 875831 - DNA, 120 bp, Artificial Sequence
  ENSG00000257167_3 (sequence is synthesized)
ggagcggaacaaaaactcgcggacacaaagccaagccagacccggacacaaaagaccccagagccgaactacgaaccaactgcggccaagctggaagctcgcaccaaccccagcccacac

SEQ ID NO: 875832 - DNA, 120 bp, Artificial Sequence
  ENSG00000257167_4 (sequence is synthesized)
actacaggcaggaggcgagcagcctgcttcgcccacgccccaagaacgcgcgccgccattggcgggcgacgggaggaagcgcggcggtgattggcgagacggctcgcgcgggttccatta

SEQ ID NO: 875833 - DNA, 120 bp, Artificial Sequence
  ENSG00000257167_5 (sequence is synthesized)
gccgccgcgctgagcgagaggagacgccgataagggacaggtcgtactgcttttgtgcgccgtttcctctccctcccccagcttgagaagcagctttcgtctctggggtcgatcgcctac

SEQ ID NO: 875834 - DNA, 120 bp, Artificial Sequence
  ENSG00000257167_6 (sequence is synthesized)
cggcgtcgactgcgtgcaaaacaaccgccgccaacgcaactccacacctcccagacccacacgtcaaagaacgcgaaccccgcggccccaacttctggcctctccgctccggcgcctgca

SEQ ID NO: 875835 - DNA, 120 bp, Artificial Sequence
  ENSG00000257167_7 (sequence is synthesized)
tgagcgagaggaggtagaaacgcagtttaaaaggcgctggggcgggagccgaggctcccggcccgcttctgttttcgttttctccacccttccccttagacgccgataagggacaggtcg

SEQ ID NO: 875836 - DNA, 120 bp, Artificial Sequence
  ENSG00000257167_8 (sequence is synthesized)
tactgcttttgtgcgccgtttcctctccctcccccagcttgagaagcagctttcgtctctggggtcgatcgcctacgaacgcgccgaattccacgccagtgtgaggacccttggctgggc

SEQ ID NO: 875837 - DNA, 120 bp, Artificial Sequence
  ENSG00000257167_9 (sequence is synthesized)
ctttcttcctcccgggacactgaagctccaagagtagccgcagccttgccttccccaaacgctagccctgaaggggaagaaaagaagcgaggcttgtctgcaggcactcatattccttga

SEQ ID NO: 875838 - DNA, 120 bp, Artificial Sequence
  ENSG00000257167_10 (sequence is synthesized)
tttgatttactttgggagggggagggcggggagttacccctctcctcgcgaacgcttcttttgttccagaaacccaggggaagccagacctctacaatcgggcacttaaattacccttga

SEQ ID NO: 875839 - DNA, 120 bp, Artificial Sequence
  ENSG00000257167_11 (sequence is synthesized)
atttgtgacaaaagtgtactataccattcacttcttagtgtcatagttggggcatgtctaaattgtttaatttgaacagtgcgttcagacgcaagacaaattcgcgcttgcatttttgtt

SEQ ID NO: 875840 - DNA, 120 bp, Artificial Sequence
  ENSG00000257167_12 (sequence is synthesized)
gaaaccgtctctggctttggatcccaccacccgcaagaatcctaaacctaacgtttgataacaaaacgaaggagaacccttgggaaccccctcaatggtcaatttaaaataacagatggt

SEQ ID NO: 875841 - DNA, 120 bp, Artificial Sequence
  ENSG00000257167_13 (sequence is synthesized)
gtttgcctggaaattagtatcactgatgacaaatatttgtatttctgatgaatatgtatgtttaaagatgctttctttctagaaaggaaaggagaccttggatgtagggtgtgttaatca

SEQ ID NO: 875842 - DNA, 120 bp, Artificial Sequence
  ENSG00000257167_14 (sequence is synthesized)
tttccccagaatctgagctccaaactatgttttagaaactggttaaattttttttaaatgtttgcctgctttctacattgctaggttagaatacatttaaaacaaacgccttcactaaaa

SEQ ID NO: 875843 - DNA, 120 bp, Artificial Sequence
  ENSG00000257167_15 (sequence is synthesized)
atgtttcctatgatttaagcgacttacttttattcaaattgcgatattatttcttttagtgataattattttcctagaggtaactaattcctttataaaaatctcagtattcacatacat

SEQ ID NO: 875844 - DNA, 120 bp, Artificial Sequence
  ENSG00000257167_16 (sequence is synthesized)
ttaagcaatggtattaagctcaataatgcaaattaaaaatcaggttttaattagcaagttgttaggtaggtttttatgatcccttgtaaaagttgcttggttttttgtcctcacagcttc

SEQ ID NO: 875845 - DNA, 120 bp, Artificial Sequence
  ENSG00000257167_17 (sequence is synthesized)
cctggacacataggcaaatgtttttatcttcagaaggggaactgagctgagaggcaaaggaccatgactttgcaatgactggtaacccagtacgtataatgcaagaactgcattctagat

SEQ ID NO: 875846 - DNA, 120 bp, Artificial Sequence
  ENSG00000257167_18 (sequence is synthesized)
acgcctgaaattaatgtttcctgggcaaaaacattttcattatcttttttttaatccctggacattagctacaggtggttacttgcagatttactgctgtagagctccaaaattgagatt

SEQ ID NO: 875847 - DNA, 120 bp, Artificial Sequence
  ENSG00000257167_19 (sequence is synthesized)
acacttttcagattctgcgtaccctaaggctaagaggttgggctattgagtttgggtggtctctttggtcctgattgctacttccaaaccatttctgctcttttctgcttcaaaaatatt

SEQ ID NO: 875848 - DNA, 120 bp, Artificial Sequence
  ENSG00000257167_20 (sequence is synthesized)
tgaagttcatatcttctggctaaatcactttctactctccttcctgccatcatccacgagcctcctggtcactttccagaaattatagagctgcttgccgtaggttttcctcaccatccc

SEQ ID NO: 875849 - DNA, 120 bp, Artificial Sequence
  ENSG00000257167_21 (sequence is synthesized)
tcttgtctacattctatctgaattcagcatgcttgtaggtgacccatgcaacaccaacacttggcctcttagacctctgacctcttcatctccaacaatttgttcctctcttgcgtctta

SEQ ID NO: 875850 - DNA, 120 bp, Artificial Sequence
  ENSG00000257167_22 (sequence is synthesized)
accacttcggtatcagtcagattctgaaccttgtcatcagttgaaatctcagtttcaagcttcccaattgtcaatcactagcctttttttcccagctaatttatggtactctcacttacc

SEQ ID NO: 875851 - DNA, 120 bp, Artificial Sequence
  ENSG00000257167_23 (sequence is synthesized)
taattaagacctccacgctattaaccccaacacttaaaaaaactcaactcttctgcttctgccatcatgtaataattttgcaactcacctgacttaaattccctgatcagtccttttcat

SEQ ID NO: 875852 - DNA, 120 bp, Artificial Sequence
  ENSG00000257167_24 (sequence is synthesized)
cactcttttacaaacattttcaactctctgatctcaatgtctccttttttgcttgaaagaatctcagccttgcttggactaaaccatgctccagctgaactttctcattgcttacatcca

SEQ ID NO: 875853 - DNA, 120 bp, Artificial Sequence
  ENSG00000257167_25 (sequence is synthesized)
aacagcaaaagctgctggagaaaagtcagtcatataacaagctaactggttttaattcatgacctcagtcctctcaggagcactcaacactggctggcaatgctattccagtctctgggt

SEQ ID NO: 875854 - DNA, 120 bp, Artificial Sequence
  ENSG00000257167_26 (sequence is synthesized)
taaccattcatacgttcacatctcctcaaatttcacatcctttttccctacctctcatttttagctggtgaccttgcctcaacttcaaaaaataaaaaccacctatgaggaatgcttcaa

SEQ ID NO: 875855 - DNA, 89 bp, Artificial Sequence
  ENSG00000257165_0 (sequence is synthesized)
attttcatcaactgcaaacttggatgctggatcttcctactagagctcactgattgcccagggttgaggtacaagaattatgaaggatt

SEQ ID NO: 875856 - DNA, 120 bp, Artificial Sequence
  ENSG00000257165_1 (sequence is synthesized)
attttcatcaactgcaaacttggatgctggatcttcctactagagctcactgattgcccagggttgaggtacaagaattatgaagatggcaaagtggatgctaagaacaattagtggatg

SEQ ID NO: 875857 - DNA, 120 bp, Artificial Sequence
  ENSG00000257165_2 (sequence is synthesized)
ctaagaaaattagtgattcatcaaagtcaaaccaacagaacatgacagcaaatgacaggattggaactcagtcctggaactcgggttgattgattgcaggaaaagtgctctaaatgatga

SEQ ID NO: 875858 - DNA, 120 bp, Artificial Sequence
  ENSG00000257165_3 (sequence is synthesized)
aagctaatgtcttaataaagccaatatagtcaggtgtattgcaagtgtcagaaaaattctgatacaaagtaagtgctcaataaatatttacttaatgaaataatcaactggagataaagg

SEQ ID NO: 875859 - DNA, 120 bp, Artificial Sequence
  ENSG00000257165_4 (sequence is synthesized)
cagtggaagaaaatcagaaatggcttaatatatgaggcaatgcctggaagataaataagaattttgacaagaagggatgatcttcctaactcatctagctcatttcagatgattactttt

SEQ ID NO: 875860 - DNA, 120 bp, Artificial Sequence
  ENSG00000257164_0 (sequence is synthesized)
aacattccttcagcagagccacactcttaaagattataaatgttgtcttcaaataattgaatatttgaaggtttgctggccaatgcaggactgattataagtaatgatgacacatctgta

SEQ ID NO: 875861 - DNA, 120 bp, Artificial Sequence
  ENSG00000257164_1 (sequence is synthesized)
acttctaaatgggaaggtcttcgaatgggattgaaaagacaaagtgatgaaaaaataattgtgataatacatactgttccaggttttaaacacatacagagggaaaatgaggtgaagaca

SEQ ID NO: 875862 - DNA, 120 bp, Artificial Sequence
  ENSG00000257164_2 (sequence is synthesized)
agaatggagaggacctagcaaagccggggttacacatcaaaatggaacagaagaaagcttaatttcaactcaagaaactggagaattggccaggcgcagtggttcatgcctataatccca

SEQ ID NO: 875863 - DNA, 120 bp, Artificial Sequence
  ENSG00000257164_3 (sequence is synthesized)
gccaagggcaaataagcagattgatctcaggaaccagaggttgcatggatggctggtccaattgatccgcctgtcctaatggatcattgtgtaacagggaggaaaaacaggaaacttgat

SEQ ID NO: 875864 - DNA, 70 bp, Artificial Sequence
  ENSG00000257164_4 (sequence is synthesized)
gatcttcctatttcagcctcccaaatagctgggaccacaagcatgtaccaccatgcccagaatgaatgtg

SEQ ID NO: 875865 - DNA, 120 bp, Artificial Sequence
  ENSG00000257164_5 (sequence is synthesized)
gggaccacaagcatgtaccaccatgcccagaatgaatgtgggcaggaaggatcctgaaatatctacttagctgcatttccaatgctaggtcatacatggcaatacaacttctgccttgtt

SEQ ID NO: 875866 - DNA, 120 bp, Artificial Sequence
  ENSG00000261745_0 (sequence is synthesized)
agtttagcagaattgtaaagtgaatacttgtgtaaacactatctggaccaagaaataggatctactggcactgcagaagttccccttactgtggatttcaatcccatccacaaccctctc

SEQ ID NO: 875867 - DNA, 120 bp, Artificial Sequence
  ENSG00000261745_1 (sequence is synthesized)
cctgtatcccaaaggtgatcactagactggctctttacatttttactacctttgtatgtatccctaaactatagtttcgtgtggtctttttggggagcctaacaaatagaatcatatggt

SEQ ID NO: 875868 - DNA, 120 bp, Artificial Sequence
  ENSG00000261745_2 (sequence is synthesized)
tgtaatgtacatatagaagaatccacagctcatagcatagagctcaattgtcataagaacacaccagtctagctatcatctagttagtgtacatttttttatgatcttgccttttctgct

SEQ ID NO: 875869 - DNA, 120 bp, Artificial Sequence
  ENSG00000261745_3 (sequence is synthesized)
caacattgtatccataagagggtagctgtaatttgttattttcattgctgtaatacatttctttattctcactctaaatgaaatgaaagagctaaataaacagtaactgtctgaaggaaa

SEQ ID NO: 875870 - DNA, 120 bp, Artificial Sequence
  ENSG00000284196_0 (sequence is synthesized)
agtgtgctcctctggaagccctctgactaccagccgcttgtctcttcttccgcagttgagaaatagacggtccacagcggacaacttagaatggaataagggagatgtgtttgaggcact

SEQ ID NO: 875871 - DNA, 120 bp, Artificial Sequence
  ENSG00000284196_1 (sequence is synthesized)
accattggaagatgtgctggggagaagcccagcccagcaacatgcggcaggaccacatctcggcagagctgccacaaacagagtgaatgcagagccatcaagagccaagttctacaagag

SEQ ID NO: 875872 - DNA, 120 bp, Artificial Sequence
  ENSG00000284196_2 (sequence is synthesized)
ataaatcagctgagactaccactagacatctgcaagcagaagattaggagagtaaatttgcgagacacatatgcatatgacccagaaaccaagttgcgtgaaactaccatggtttgtgcc

SEQ ID NO: 875873 - DNA, 120 bp, Artificial Sequence
  ENSG00000284196_3 (sequence is synthesized)
tcgataggttgaacaaggacatggtgagaagacagccatctgcaagccagaaagagcgctaaccagaacgcaaccatgtggataccccgatctcatagtcccagcctccaaaactgtacg

SEQ ID NO: 875874 - DNA, 120 bp, Artificial Sequence
  ENSG00000284196_4 (sequence is synthesized)
ttcagcaatgcttcaggcattgtggccaaatgatgatatgaatgagactggattctccagtaggaaatggacttggcctcaaggtgagagccagaagttgaagtggacacagtgctaaaa

SEQ ID NO: 875875 - DNA, 120 bp, Artificial Sequence
  ENSG00000284196_5 (sequence is synthesized)
agtggtaatgctcagctggatggaggtgggcctctcccagatggcaacttgtttatcaaagcatgaaaaccaagaaggtgataaagaaagtctgctagcaagacataagtcacaatcttt

SEQ ID NO: 875876 - DNA, 120 bp, Artificial Sequence
  ENSG00000284196_6 (sequence is synthesized)
tgtaatctatttatgaaagtgacatcccatcatcttgaccacaatctattgattagaaacaagtacagctcaccctcaacaagaggagataatatccaggtgtgaattgcacaagactaa

SEQ ID NO: 875877 - DNA, 120 bp, Artificial Sequence
  ENSG00000284196_7 (sequence is synthesized)
tccagtggaaaaactatattcgacccaaggatctgtatccacacagtttgacaataatttacttctttctggaagcgatgagcacagtgtaattcctgagaaattttaataatgatattt

SEQ ID NO: 875878 - DNA, 120 bp, Artificial Sequence
  ENSG00000284196_8 (sequence is synthesized)
agatggctgtttcgctgcatcaatgtgtgactttcaatagatgatcgaagatggctgtttggcactgtgtctgaattaagccagaaggaaggaggaagaagatgaagaaaaggcatgcct

SEQ ID NO: 875879 - DNA, 120 bp, Artificial Sequence
  ENSG00000284196_9 (sequence is synthesized)
ctaccccttaggaccacgtctctgaagctgtatacaacatttctgctctcatataattgggcagaacttagtcatagagctacatgtagttgcaagggaagctatatgcactaatgtgct

SEQ ID NO: 875880 - DNA, 120 bp, Artificial Sequence
  ENSG00000284196_10 (sequence is synthesized)
tagttaaacattgggattctcttactaaggtacataaggagaacatatatttggagaggcaactatccatctctgccacaagatctgaaacaattattgtgagactataaacatagaaaa

SEQ ID NO: 875881 - DNA, 120 bp, Artificial Sequence
  ENSG00000284196_11 (sequence is synthesized)
aagctccagagatcagggggaagtcagaaattatttgggattccagtgaatggaatgttgaccataaatgagaaatgatgcttgggataattcctagcgagcattggcttttagagttgg

SEQ ID NO: 875882 - DNA, 120 bp, Artificial Sequence
  ENSG00000284196_12 (sequence is synthesized)
gattgaagtcaaccagctataaagagcaagactgggtggggtactttgaaatgtcatatcattgtgtatggcttttgtggtagttactgcttctttttagaataattctcataactaggt

SEQ ID NO: 875883 - DNA, 120 bp, Artificial Sequence
  ENSG00000284196_13 (sequence is synthesized)
agaaagctcacctttgaaacttctgcatgcctaataaaatgcttcactcacacccagttgttttactcaagcgagtagttttatggtaactgcatttggggtaacagtcttacagaagag

SEQ ID NO: 875884 - DNA, 120 bp, Artificial Sequence
  ENSG00000284196_14 (sequence is synthesized)
ttaacacaatgggcagattccaggtgtgctgtcatttggaggaggcaaatccatacagacaagaagtagattagtggttgcctagagctggaggagggtagggataaggaatggattact

SEQ ID NO: 875885 - DNA, 120 bp, Artificial Sequence
  ENSG00000284196_15 (sequence is synthesized)
actgggactgggtttctttttggggtgatgaaaattttctaaaattgattgtggtgatggttgcctaactctgtgaatagcaatgaattgtgctattgtacactttaggtaaatggtatg

SEQ ID NO: 875886 - DNA, 120 bp, Artificial Sequence
  ENSG00000284196_16 (sequence is synthesized)
tctgtttgggagtgtctgtttctggcagccaaactcagttctagctgacacaaacagcatctctccctactctagtttcagtgaagatttcatggactagggaagggcaaagaggggcga

SEQ ID NO: 875887 - DNA, 120 bp, Artificial Sequence
  ENSG00000284196_17 (sequence is synthesized)
aagagagcattgaagtaaattacaactgggtgcttttgagaaaggaccttgaactctgtccctacagctggctgaatcccaggaggaacctctagaaaccccaaggtaaacatggggatg

SEQ ID NO: 875888 - DNA, 120 bp, Artificial Sequence
  ENSG00000284196_18 (sequence is synthesized)
caggtaaacatgagggaagctcttgctgggtttctttgtaccccagtgaatcagagattattttgtcaatgctatatgtttaacttacaggaatgctcaaagttaaacataacaggagat

SEQ ID NO: 875889 - DNA, 120 bp, Artificial Sequence
  ENSG00000284196_19 (sequence is synthesized)
aaaatgaggatcattagtcttgtaaatttttcctcaagttcaaggtgaaaacacatcctgtgacatttgtggaggacagttttcattgtagcttaagtactttgcatttctccaagtgaa

SEQ ID NO: 875890 - DNA, 120 bp, Artificial Sequence
  ENSG00000284196_20 (sequence is synthesized)
ttggttgacacctgctaaatatgaaaagtttatctgtaagcactgggtcctatgaaacactaaatcccaaggaaaaaagtgggaatgccatcaattttctccctttacagattaagaaaa

SEQ ID NO: 875891 - DNA, 120 bp, Artificial Sequence
  ENSG00000284196_21 (sequence is synthesized)
tagataatttcaaggggcagtttgctagggtaccacatgggaaatttaaggtgaagtcaattagtagtgccacatgctgtatatctcattctgaacgtgtccctgtaagagttaaatcta

SEQ ID NO: 875892 - DNA, 120 bp, Artificial Sequence
  ENSG00000284196_22 (sequence is synthesized)
tctggagccacatactgaaaacccgatcacaacagctgctctctgagccccttctgcagaaaagaaagaaaataagttttaattaaattgtattaattggtttagctgatctggaaatag

SEQ ID NO: 875893 - DNA, 120 bp, Artificial Sequence
  ENSG00000284196_23 (sequence is synthesized)
agtaagggttctactctaattttgtttttttggctgaagtccacttgtctttgacatgagaataaaggaatgaagcaataaaatgcctagaaatgccctggtagagacttttaaactgtc

SEQ ID NO: 875894 - DNA, 120 bp, Artificial Sequence
  ENSG00000284196_24 (sequence is synthesized)
caaggttaaaaagcgctgctatctctgagatgaacttaaaattctgctgccaactctgagaagtcagaagtgcaagcaagaaaagaagaatgtgattaaaaaccctgcttccttaaagct

SEQ ID NO: 875895 - DNA, 120 bp, Artificial Sequence
  ENSG00000284196_25 (sequence is synthesized)
ctgcaaagctgcaaagaaaagccaggcattcttcccataatagtgagcacttgttagagagaaaaggagaaggttgtgaaagcatcagggtataatgaccttatttcaggccactcagcg

SEQ ID NO: 875896 - DNA, 120 bp, Artificial Sequence
  ENSG00000284196_26 (sequence is synthesized)
taagttttcgtatataaggtaactgaaatttctaagtgtagcttaacagtttgatgttacgatgtgcaaaatacattttgttttacttaaaaacatatttgattccaccttccatgcctg

SEQ ID NO: 875897 - DNA, 120 bp, Artificial Sequence
  ENSG00000284196_27 (sequence is synthesized)
tattgcagcatttttaaccagttattaaaaatagaaattattttaaaagacataatgctaatacaacacacttgtatttttttgcttccatgtataaggtaaagtttaaatatagtcacg

SEQ ID NO: 875898 - DNA, 120 bp, Artificial Sequence
  ENSG00000284196_28 (sequence is synthesized)
atcacctgaaaccattcattaaatggcaaaattctgtgacacagagaggatactctataaagaatggcttaaattttgttctctagaaaacatgcagttaaaatttcttgtgaaaagaaa

SEQ ID NO: 875899 - DNA, 120 bp, Artificial Sequence
  ENSG00000284196_29 (sequence is synthesized)
tgcatatgggataacaagcttgctataggctgaatgtatatgtctccccaaaatacaagtgttaaagtcctgaaatccccaatgtgatgttatttggagacggggcctttgggaggtaat

SEQ ID NO: 875900 - DNA, 120 bp, Artificial Sequence
  ENSG00000284196_30 (sequence is synthesized)
ggagggggaatgagagaaaaatcaaatttctacgaagagatgtcagcagtaaatttaatgcagctgccacaaacagagtgaatgcagagccatcaagaggccctatccggagagtttcca

SEQ ID NO: 875901 - DNA, 120 bp, Artificial Sequence
  ENSG00000284196_31 (sequence is synthesized)
ggaagaagtagctctataaatttcctcacaacctcaatcaacatttgagttgagattcacaattaaaattggagtcaaaggattgaatctggaaaagccatttaactatatgggctgtat

SEQ ID NO: 875902 - DNA, 120 bp, Artificial Sequence
  ENSG00000284196_32 (sequence is synthesized)
ttttaaaaatttgcccaatgagaggagatttaatgattttcaaaatccctctgtacttgatattttgtgaattaaattttccataagccaaatgtcagataaatcactttccacttcatc

SEQ ID NO: 875903 - DNA, 120 bp, Artificial Sequence
  ENSG00000284196_33 (sequence is synthesized)
tactggagacattacccccattaggctccattctcataattatcttacttctactggattttctcctcagcctggtaaagattttcaaacctttactatcttaatgaaaaacaagacaaa

SEQ ID NO: 875904 - DNA, 120 bp, Artificial Sequence
  ENSG00000284196_34 (sequence is synthesized)
taatattcttcgaaaagcctcaacatgcactcaagtgttttctttttttttggctatcactttatatttcatcttcccttttagtcaagcctctgagtagaatagtcatttagtcagcta

SEQ ID NO: 875905 - DNA, 120 bp, Artificial Sequence
  ENSG00000284196_35 (sequence is synthesized)
tccctggcagcccctggtaaacaagtcagcaatgcctagtgggcctatttggactttggaggcaacatattcttcatttgactgtgttattccagcccatttactgagtgacccaaaagg

SEQ ID NO: 875906 - DNA, 120 bp, Artificial Sequence
  ENSG00000284196_36 (sequence is synthesized)
ggcagatagggatgctgtttggagcctctggcaggcccccataggtgaatcacagcagaagcctctaggattttggaacaagaccctgccatcttctgcagataacagctctccttttga

SEQ ID NO: 875907 - DNA, 120 bp, Artificial Sequence
  ENSG00000284196_37 (sequence is synthesized)
tcttggcctgttactgggctttggtggagactgaacgtttgactatgggtcatcaagtcaccatgagacctgaaccgcctatcatgaactgagtgctttctgaaccatctagccataaag

SEQ ID NO: 875908 - DNA, 120 bp, Artificial Sequence
  ENSG00000284196_38 (sequence is synthesized)
gcattccatcatcaaatggaagtggcatatacatgatcgggctcgagcaggtcctgaaggtgcaagtaagttacatgaggaagtgactcgaatgcttatggtctccactactgccacctt

SEQ ID NO: 875909 - DNA, 77 bp, Artificial Sequence
  ENSG00000284196_39 (sequence is synthesized)
cctgaaggtgcaagtaagttacatgaggaagtgactcgaatgcttatggtctccactactgccaccttgccttctct

SEQ ID NO: 875910 - DNA, 69 bp, Artificial Sequence
  ENSG00000284196_40 (sequence is synthesized)
cagttgacagaggaggagaagactaggacctggttcacagatggttctgcatgatatgcaagcaccacc

SEQ ID NO: 875911 - DNA, 76 bp, Artificial Sequence
  ENSG00000284196_41 (sequence is synthesized)
gaaatggccagatgtgtgattatatattgattcatgtgctgaattggaaaattgatgacaaagaaatttggggaag

SEQ ID NO: 875912 - DNA, 73 bp, Artificial Sequence
  ENSG00000284196_42 (sequence is synthesized)
gtcaaaaactgtgaagatatttgtatctcttgtgagtgttcaccaacgggtgacctcagcagaggaggatttt

SEQ ID NO: 875913 - DNA, 120 bp, Artificial Sequence
  ENSG00000284196_43 (sequence is synthesized)
ttttaataatcaagtggataggatgactcgttctgtggacatcactcagcctctttccccagccaacccgtcattgcccaatgggcccacgaacaaagtcaccatggtggcagggatgga

SEQ ID NO: 875914 - DNA, 84 bp, Artificial Sequence
  ENSG00000284196_44 (sequence is synthesized)
ttgagtgcccaattcgccagtagcagagaccaacactgggaccttgatatggcaccattcctcgggtgatcagccagctacctg

SEQ ID NO: 875915 - DNA, 120 bp, Artificial Sequence
  ENSG00000284196_45 (sequence is synthesized)
tgatatggcaccattcctcgggtgatcagccagctacctggtggcaagtggattatattggacctcttgcatcatggaaaaggcaaagatttgtcctcactagaatagacacctactcca

SEQ ID NO: 875916 - DNA, 120 bp, Artificial Sequence
  ENSG00000284196_46 (sequence is synthesized)
tataggtctgcctatcctgcactctatgcttttgccaagactaccatccatggactcacagcatgccttatccgccaccatggtattccacatagcattgcttctgaccaaggaactcac

SEQ ID NO: 875917 - DNA, 120 bp, Artificial Sequence
  ENSG00000284196_47 (sequence is synthesized)
tggtattccacatagcattgcttctgaccaaggaactcacttcatagccaaaacaggtgtggcaatgggctcatgcttatggaaatcactggtcttaccatgttctccatcatcctgaag

SEQ ID NO: 875918 - DNA, 67 bp, Artificial Sequence
  ENSG00000284196_48 (sequence is synthesized)
gtccaatatatggtactgttgctctcacagccaggattcacaggtccaaaaatcaaggggtggaagt

SEQ ID NO: 875919 - DNA, 62 bp, Artificial Sequence
  ENSG00000284196_49 (sequence is synthesized)
gctctgaatcagcgtccaatatatggtactgttgctctcacagccaggattcacaggtccaa

SEQ ID NO: 875920 - DNA, 120 bp, Artificial Sequence
  ENSG00000284196_50 (sequence is synthesized)
gcaaaatttttgcttcctattcctgtgacattatgttctgctggcctagaagttttagttccagagggaggaacgctaccactgggaggcataatgattccattaaactggaagttaaga

SEQ ID NO: 875921 - DNA, 120 bp, Artificial Sequence
  ENSG00000284196_51 (sequence is synthesized)
aacaggctaagaaggagttacagtgttggctggggtgattgacccagactagcaagatgaaatcagtctactagtttacaatggaggcaaggaagagtatgcatagaatacagcagatcc

SEQ ID NO: 875922 - DNA, 61 bp, Artificial Sequence
  ENSG00000284196_52 (sequence is synthesized)
atggaggcaaggaagagtatgcatagaatacagcagatccattagggtgtctgttagtatt

SEQ ID NO: 875923 - DNA, 120 bp, Artificial Sequence
  ENSG00000284196_53 (sequence is synthesized)
tccaccaggaaaaaaaccaagacctgctgaggtgcttgctgaaagcaaagggaatccagaatgggtagtggaagaaggtagtcatcaataccagctatgagcatgtgagcagctgcagaa

SEQ ID NO: 875924 - DNA, 78 bp, Artificial Sequence
  ENSG00000284196_54 (sequence is synthesized)
gagaaaatatcttcattttatttccttttcctttatttcatgacataagatttattgatttcatgtcagcatgtaagt

SEQ ID NO: 875925 - DNA, 78 bp, Artificial Sequence
  ENSG00000284196_55 (sequence is synthesized)
atatcttcattttatttccttttcctttatttcatgacataagatttattgatttcatgtcagcatttggtgcgtttc

SEQ ID NO: 875926 - DNA, 68 bp, Artificial Sequence
  ENSG00000284196_56 (sequence is synthesized)
cccataatctggtgagcaccacctaattagctgccagtgaatataaggcagacagaaaaacttgaaaa

SEQ ID NO: 875927 - DNA, 81 bp, Artificial Sequence
  ENSG00000284196_57 (sequence is synthesized)
aaggcagactcacccataatctggtgagcaccacctaattagctgccagtgaatataaggcagacagaaaaacttgaaaaa

SEQ ID NO: 875928 - DNA, 120 bp, Artificial Sequence
  ENSG00000284196_58 (sequence is synthesized)
gaacttggactggctctccttgctcttcaagcttatagacagcctattgtgggaccctgtgattgtagtctcacactgttgcctgggttggagtgcagtggtgtgacgtctgctcactgc

SEQ ID NO: 875929 - DNA, 120 bp, Artificial Sequence
  ENSG00000284196_59 (sequence is synthesized)
tgaacaaggtacgttattctctttccaaaatagaggacagcttagaagagatagttttagattgataccttctgcctttcccacacctcttctacaaaaagtccctgctgaaatagggag

SEQ ID NO: 875930 - DNA, 120 bp, Artificial Sequence
  ENSG00000284196_60 (sequence is synthesized)
cccagggagtgactggttgtgcaatggtgagcaaaacgaagcatctgcctttaactcagtgagaggatgacaataaataatcatcaaacacatcattgcaaaataggaagtgaaataaaa

SEQ ID NO: 875931 - DNA, 120 bp, Artificial Sequence
  ENSG00000284196_61 (sequence is synthesized)
agaagagcatgatgaaatagagaataacatggggttgtgtatggatggaataattaaagaaggcaaggggatcctaatgaatgagaagaagacaaaaatcctggaagggaaagagctttc

SEQ ID NO: 875932 - DNA, 120 bp, Artificial Sequence
  ENSG00000284196_62 (sequence is synthesized)
ttgcggaaggaagactatatgcaaagacctcaggaaaatgagaaactgaaagatgggccctgtgactagcatgaagtgggtgaaggagaaatgatgtgaaattaaattgaagaagtcagc

SEQ ID NO: 875933 - DNA, 120 bp, Artificial Sequence
  ENSG00000284196_63 (sequence is synthesized)
aggaattagacctcctacagccatgctggccaagatgcagaggccacttcattccttgtgccatgagaagcttaacctaagagagaagtgcccagaggtggtcttgactttctaccaatg

SEQ ID NO: 875934 - DNA, 120 bp, Artificial Sequence
  ENSG00000284196_64 (sequence is synthesized)
tgactttctaccaatgatccagatctgaagattattttagtatcacatttctattatttcacagaaattgagtataaattaaattgtaatctttaagaagtatataactatcatatctct

SEQ ID NO: 875935 - DNA, 120 bp, Artificial Sequence
  ENSG00000284196_65 (sequence is synthesized)
ctgaataatatgataaatttggacttgcaaaaaaagcatttaatatctcctataaaacaatgccctactaagtgctgaagataaaacttaaatagagtactctaaatcactgctctgttt

SEQ ID NO: 875936 - DNA, 120 bp, Artificial Sequence
  ENSG00000284196_66 (sequence is synthesized)
actggacttactgaaacatttgtaggaatacccttgctaggtaaaacatgtatctgcaatttgatagcattatttgcattgctgtcattttgactacgtatcatcttgttttttctgctt

SEQ ID NO: 875937 - DNA, 120 bp, Artificial Sequence
  ENSG00000284196_67 (sequence is synthesized)
ttagatgttcttaagggcacagtaaatagagctccctagcagcttttctttcctatttgatcctcacaaaaaccatactttggctgagtaaatattgtctcctttttatagatgaagagg

SEQ ID NO: 875938 - DNA, 120 bp, Artificial Sequence
  ENSG00000284196_68 (sequence is synthesized)
tacaagctaacctcactgagcttcagatttctaacctagaaaacggaggcaatgatacttaccctgccaacatctcatacctactcagataaaagaaaataaaataatggatgggacagt

SEQ ID NO: 875939 - DNA, 120 bp, Artificial Sequence
  ENSG00000284196_69 (sequence is synthesized)
gcctgaagaaatagatacatcatgaaagataagctaggattatttcatcataaaataggacacttctgtatcataaacattataatacagatgtataaaaagagtgcatatgatccatat

SEQ ID NO: 875940 - DNA, 120 bp, Artificial Sequence
  ENSG00000284196_70 (sequence is synthesized)
cacatcttcattttgttctaagccctcatggtaatgaactttgagatgaaagaagacctaaatctgtcactacagagtggctcaatctcttacattttaaaacatctccttttaggttaa

SEQ ID NO: 875941 - DNA, 120 bp, Artificial Sequence
  ENSG00000284196_71 (sequence is synthesized)
ttcctaccatttttggcaaagggtaagtcaatgtaaagttgaaattcctcattaagctatctcacctgagtgaaagatttcctagaaaatatgtgtgtacaagaagacacttatatatcc

SEQ ID NO: 875942 - DNA, 120 bp, Artificial Sequence
  ENSG00000284196_72 (sequence is synthesized)
ttatggtattgtggcaggaccccaggggttaaaccagccccatgctcctctctggctcccattggctcttggctgaggtaaactcactttacctgtgttcatgttggtcgctatcatctc

SEQ ID NO: 875943 - DNA, 120 bp, Artificial Sequence
  ENSG00000284196_73 (sequence is synthesized)
tgcatctgcttgtgaagttttacaactagtatcatgctaatttcttccctcagtccagccatagtccagcagttcacatcctgcacctcagcccaacctcatttctctcttcagatcatc

SEQ ID NO: 875944 - DNA, 120 bp, Artificial Sequence
  ENSG00000284196_74 (sequence is synthesized)
taagcttcacccctgggctccgtctgaaccctgaccaagtctgccctctcttccacttctggtaggggttctttgctcccttcactactgcagccccattacaaacctgctgactctcaa

SEQ ID NO: 875945 - DNA, 120 bp, Artificial Sequence
  ENSG00000284196_75 (sequence is synthesized)
ccttcggtatcactggggacatgtgagaaattctgaatctcttcagtgctatcaacaggtgtgagagaactgaaggaaaggaagaggaatactttcttccctgcctctccctcacgctat

SEQ ID NO: 875946 - DNA, 120 bp, Artificial Sequence
  ENSG00000284196_76 (sequence is synthesized)
ccagtttctacacttgctgcgtccgcttcttgtaacaaagggtgctccaccaggctacctccaaccagaatcccaaactggaaataggacacaactccattctgtccctgcttttgaatt

SEQ ID NO: 875947 - DNA, 120 bp, Artificial Sequence
  ENSG00000284196_77 (sequence is synthesized)
tacaactaacctgtcctttttattctacatctgttcctcaccttgggtttcaatgaaaaaatgggagaagagcaatggtaccttgtggcttctatctctctctgtttccttctctcaact

SEQ ID NO: 875948 - DNA, 120 bp, Artificial Sequence
  ENSG00000284196_78 (sequence is synthesized)
cttgttctttttcctgaaactgctgtgaacttctttacataatattttccttcttttctacttcttttcatgtggtgaatagtggagtggcatactccaattatcttgaccaataaaggg

SEQ ID NO: 875949 - DNA, 120 bp, Artificial Sequence
  ENSG00000255458_0 (sequence is synthesized)
gaggactgtgaagcaatcggggcgaggccgggtgtctgttcaactctcccgcgtatcgtctgtttcttcggcggcggacagtgttctgtaatgtgtctcccgttgcccgagctaaaggtt

SEQ ID NO: 875950 - DNA, 120 bp, Artificial Sequence
  ENSG00000255458_1 (sequence is synthesized)
ttcctcgacggagtctttagaataccgtggtagaggaaggcagtctccacaccactgtgctcgaacagctctatgaagaggcctatgtggagaggagaaaaagcctccaccaacagccag

SEQ ID NO: 875951 - DNA, 83 bp, Artificial Sequence
  ENSG00000255458_2 (sequence is synthesized)
gcctatgtggagaggagaaaaagcctccaccaacagccagcaccaacttgccagccatatatgaactctcgctatgttgcctc

SEQ ID NO: 875952 - DNA, 77 bp, Artificial Sequence
  ENSG00000255458_3 (sequence is synthesized)
gagctgtgattacagacgtgtgccacaatacccggctaagttttgtatttttattattattttatttatgtgtttat

SEQ ID NO: 875953 - DNA, 76 bp, Artificial Sequence
  ENSG00000255458_4 (sequence is synthesized)
aaagagctgtgattacagacgtgtgccacaatacccggctaagttttgtatttttattattattttatttatgtgg

SEQ ID NO: 875954 - DNA, 85 bp, Artificial Sequence
  ENSG00000255458_5 (sequence is synthesized)
ctgtctgccttggcctcccaaggcagggagctcaaaatgttttaaatgtttctataccaccatctgtgtcaaagagcaaatggtc

SEQ ID NO: 875955 - DNA, 120 bp, Artificial Sequence
  ENSG00000255458_6 (sequence is synthesized)
atgtttctataccaccatctgtgtcaaagagcaaatggtctctctgcagctggaacaacaaaaactcaaatggtccacacagtggttcatacctataagtcaccaaacctaaactaagtt

SEQ ID NO: 875956 - DNA, 120 bp, Artificial Sequence
  ENSG00000255458_7 (sequence is synthesized)
gttatctgaccttctggaaatgagaagagatagataactgccagtttcccaaacaggccagtttaaatcttcctgtaagcatgataaggaagttccctctgatttaatccttacacacga

SEQ ID NO: 875957 - DNA, 120 bp, Artificial Sequence
  ENSG00000255458_8 (sequence is synthesized)
gatttaatccttacacacgaaaaagtagccttaaataacctgatattaactcatcagttttatttttatttatttatttttttttgagacaatgtcttgctctgtcacccaggctggagt

SEQ ID NO: 875958 - DNA, 120 bp, Artificial Sequence
  ENSG00000255458_9 (sequence is synthesized)
aggtgtgagccaccgcgcctggccactcatcagttatttttctatcattttgtctttctgtccccactttacaagaaaagtgactttgaaaggactaataacattattcgttttttgctt

SEQ ID NO: 875959 - DNA, 120 bp, Artificial Sequence
  ENSG00000255458_10 (sequence is synthesized)
tattcgttttttgcttctgctttcttcagcccttctctgtctgtaaagccagcttcttttgcacagctcactgcaacacttatttttatttgtatttttattttttgagacaatgtctca

SEQ ID NO: 875960 - DNA, 120 bp, Artificial Sequence
  ENSG00000255458_11 (sequence is synthesized)
ctctgtcacccgggctggagagtggagagtactaatgcagtcttggcccactgcaccttcaccctcctcaactcaagcaatcttcctgcctcaacttccctggcagccaggactacaggc

SEQ ID NO: 875961 - DNA, 86 bp, Artificial Sequence
  ENSG00000255458_12 (sequence is synthesized)
tcttcctgcctcaacttccctggcagccaggactacaggcttgcaccactatacccagctaatttttaaaagggccagactggtct

SEQ ID NO: 875962 - DNA, 120 bp, Artificial Sequence
  ENSG00000255458_13 (sequence is synthesized)
caaagtgctgggatagaataagtgtgccggggccaccatgcccaggccaccacacctggcccacttattctattttatggaatgaagtgttacccaattctggctttttttgagacaggg

SEQ ID NO: 875963 - DNA, 120 bp, Artificial Sequence
  ENSG00000255458_14 (sequence is synthesized)
tttttttgagacagggtcgtgcaccgttgctcaggcgggaatgcagtggcacgatcttggaacactccaacctccacctccaaggctcaagccatcttcccacctcagcctcccgagtag

SEQ ID NO: 875964 - DNA, 70 bp, Artificial Sequence
  ENSG00000255458_15 (sequence is synthesized)
aagcacatgtccagcctttttttttttttgagacaaattctggctctgtcacccagactggagtgcagtg

SEQ ID NO: 875965 - DNA, 89 bp, Artificial Sequence
  ENSG00000255458_16 (sequence is synthesized)
tccacctccgaggctcaagcaattctctcaccctcaccaccacgcctggttaacttttgtgttttttgtagagatggggttttgccatg

SEQ ID NO: 875966 - DNA, 69 bp, Artificial Sequence
  ENSG00000255458_17 (sequence is synthesized)
ttgtagagatggggttttgccatgtttcctatgctggtctggaactcatgaactcaacagattgtcagc

SEQ ID NO: 875967 - DNA, 120 bp, Artificial Sequence
  ENSG00000255458_18 (sequence is synthesized)
tttagtaacactaatatgtgatggcaatttcaggaaagtcaatgttctgagcaagaagaacaaggaacagaaggtataatgataacagatgagagaggaaaaagcagactcaatcaactc

SEQ ID NO: 875968 - DNA, 120 bp, Artificial Sequence
  ENSG00000255458_19 (sequence is synthesized)
ctacttttccatcatttttccgttacagagaattatcctcaaattagaaggagtaggacctacatggtaaagaaaaaatttacgtgcaaggcagatgaggaagtaagagagcatccagcc

SEQ ID NO: 875969 - DNA, 120 bp, Artificial Sequence
  ENSG00000255458_20 (sequence is synthesized)
ccttcacacaacttcattctctgtcttaccgaaagaatgtgaaatgtggtggtagctttactggggacaggagaggtgccagaagtttgaagatggactaatctccttgttttctaaaag

SEQ ID NO: 875970 - DNA, 120 bp, Artificial Sequence
  ENSG00000255458_21 (sequence is synthesized)
aagaacctataagtctctgagcacatttttctttggcaaaattctggaatggataattagacaaatggtttgtgaatctttagaaaagtggcaaaaacaaggcacagcataaattcacta

SEQ ID NO: 875971 - DNA, 120 bp, Artificial Sequence
  ENSG00000255458_22 (sequence is synthesized)
aactctcccgcgtatcgtctgtttcttcggcggcggacagtgttctgtaatgtgtctcccgttgcccgagctaaaggttttcctcgacggagtctttagaataccgtggtagaggtagac

SEQ ID NO: 875972 - DNA, 120 bp, Artificial Sequence
  ENSG00000255458_23 (sequence is synthesized)
gcggttacaaattgatgtctgttgagacagtctacccctgtaaagtgtttttggttactcaggcccggatggaaattggagatggggattacaaaaatacatcaaatgtggctgttattg

SEQ ID NO: 875973 - DNA, 90 bp, Artificial Sequence
  ENSG00000255458_24 (sequence is synthesized)
ttgattccctttaccttaacatttttgcaccggaaacgaccaaaattaagttcaacaggaatattaataaaaggaatatgtagtcgggct

SEQ ID NO: 875974 - DNA, 120 bp, Artificial Sequence
  ENSG00000255458_25 (sequence is synthesized)
gaggactgtgaagcaatcggggcgaggccgggtgtctgttcaactctcccgcgtatcgtctgtttcttcggcggcggacagtgttctgtaatgtgtctcccgttgcccgagctaaaggca

SEQ ID NO: 875975 - DNA, 77 bp, Artificial Sequence
  ENSG00000255458_26 (sequence is synthesized)
ctcaaagcacctgtcataaaaatattaacttgtaataaaagtgtttagtaacactaatatgtgatggcaatttcagg

SEQ ID NO: 875976 - DNA, 120 bp, Artificial Sequence
  ENSG00000255458_27 (sequence is synthesized)
caattccagttccaccactccaaaagtgacacttggacaccaaattctctgagaccctcctgtaatgcaaatttagtggagctactttggggttagctctctctcccccagggccttcct

SEQ ID NO: 875977 - DNA, 120 bp, Artificial Sequence
  ENSG00000255451_0 (sequence is synthesized)
cctaatgaatgcagctgtcacagagctggagcttgggtgtcctgggacatgttgatggtgccttgcttcctctggagaactaaaccctcccttggaaggacatgatggaaactcaacagc

SEQ ID NO: 875978 - DNA, 120 bp, Artificial Sequence
  ENSG00000255451_1 (sequence is synthesized)
cgacttgacagtcaggaactgcagagtctcctgtgaatgatttatgattacgtcagcgatgagactctggaattgcatcttgtgattgacttgaaggctggctccaatactagctcctat

SEQ ID NO: 875979 - DNA, 120 bp, Artificial Sequence
  ENSG00000255451_2 (sequence is synthesized)
ccgagcctgcaatttgcagttcctagaatgtgactaggatgagctgtgaaagtgtcagttttttctaccagggcaccaggactcagggcgccttgactttccctaaacagtgacctcctg

SEQ ID NO: 875980 - DNA, 120 bp, Artificial Sequence
  ENSG00000255451_3 (sequence is synthesized)
ggactgagatgacactcaacccgtgttttccagaatgatggttgacgctttggctgtgtctcttctccgaatttatctaacatgcctgggattagagtcatggaagtcgttccaggaata

SEQ ID NO: 875981 - DNA, 120 bp, Artificial Sequence
  ENSG00000255455_0 (sequence is synthesized)
ttagcaatctggagaggactgaggcaagagcttgtattgaaacacaagcaagctccacgtatggttttggacatggaagaaagagtactgttggggtggaatgacctaagtttttaatag

SEQ ID NO: 875982 - DNA, 120 bp, Artificial Sequence
  ENSG00000255455_1 (sequence is synthesized)
gattaggatttctgtggatttttcccaagtgatagaagttttcttcatctagcagggagcctcacccaattgcttctctatgttcatttctgaaactcctttgttaaaactaaatagcaa

SEQ ID NO: 875983 - DNA, 120 bp, Artificial Sequence
  ENSG00000255455_2 (sequence is synthesized)
cagagaagaaactttcttcaaaaaactcttcatatctgtcatttctcctattcttatggaacttcacaattgctttttctttattcctttttttttttctatatcagctcatcagtcttt

SEQ ID NO: 875984 - DNA, 120 bp, Artificial Sequence
  ENSG00000255455_3 (sequence is synthesized)
gtgggtgacttggctaccccactaatctaattgcctttttgatagttaaatcaatatggacatcaacttaaggctatatgtgaaccttaaatgcatgatattccctatacttgattccac

SEQ ID NO: 875985 - DNA, 120 bp, Artificial Sequence
  ENSG00000255455_4 (sequence is synthesized)
aattgatattctgtgaggaaagttggccagatattcccttctgtgaagtcagaataactaccgaccctaagaataaacattttgaccaattctttatatgttgcaaactattcacacaac

SEQ ID NO: 875986 - DNA, 120 bp, Artificial Sequence
  ENSG00000255455_5 (sequence is synthesized)
tagaaagtttagccattcacatctcttcccctgattttaagtcccagattctgagactcagaaagtttagtgacttgttgagctttctgtggaaaatctgttgtaaaaacagttcagaca

SEQ ID NO: 875987 - DNA, 120 bp, Artificial Sequence
  ENSG00000255455_6 (sequence is synthesized)
ttggaaaatataaaatagcccctagagatcccaataaagcttcctctccccaaatccctctacaagtttatcctcgaaaaactttctgaaaactgatgagaaaatactgagtaattaatg

SEQ ID NO: 875988 - DNA, 120 bp, Artificial Sequence
  ENSG00000255455_7 (sequence is synthesized)
ctcaaatgggaaagatgacatgtaaaagcaaaaacctgttaatggcatctgttcatatagttccatgtgcctttttacttaactgcactgataggcaatgtaatgaagaagtttcctttt

SEQ ID NO: 875989 - DNA, 120 bp, Artificial Sequence
  ENSG00000255455_8 (sequence is synthesized)
aaaacgtaaaatgtaattaaacagagtttatcttaaattggctggacccgcacagcttgactgagacatacacagctgtcttcattttgaagcacctacactagtcaagcttctttctaa

SEQ ID NO: 875990 - DNA, 120 bp, Artificial Sequence
  ENSG00000255455_9 (sequence is synthesized)
cccgcccttagggtttgcctgttggtctgtcttccctactgggctgttaatcccttggaggcagattgtcttgtttcccagagtttttccagcatataccatggcagacaattttcacct

SEQ ID NO: 875991 - DNA, 120 bp, Artificial Sequence
  ENSG00000255455_10 (sequence is synthesized)
tatctattctaactcgtaagcctcagctagtgcctccatcctcgggtgcatagcccagtgacaggcatgtaacagactttgcctacaagcagttgctgatccataaatgacgttggcaac

SEQ ID NO: 875992 - DNA, 120 bp, Artificial Sequence
  ENSG00000255455_11 (sequence is synthesized)
cttcttgtggcagtgagtaacatatttctttcctcctgataggcttggaatcctcatccccatctggcaattttctttccatctttcctacactcacaatggagcccacacgcctcacaa

SEQ ID NO: 875993 - DNA, 120 bp, Artificial Sequence
  ENSG00000255455_12 (sequence is synthesized)
cccccttgactaaaccagatgacagcaagaatgcctagttccaagtgagcaagggtgaagccttaggcccttgtctcctccagacctcctctctgctctaagagtatactgggcatgggg

SEQ ID NO: 875994 - DNA, 120 bp, Artificial Sequence
  ENSG00000255455_13 (sequence is synthesized)
tgtggtcggggggttgggggcggaggagtacttaacctcaaactgagaaaaagggtgtcctgagcaagtttcatagcgtagcagcttccatttgaaatgtgaagctttgaaggcctgttg

SEQ ID NO: 875995 - DNA, 120 bp, Artificial Sequence
  ENSG00000255455_14 (sequence is synthesized)
ctacagtaaccagctagctcctgactccaatgcctgtctaatctaaggtggaaatgtcccagaaacagaccccaggctggcagctcttaactatgacccatctcataagcacatatccag

SEQ ID NO: 875996 - DNA, 120 bp, Artificial Sequence
  ENSG00000255455_15 (sequence is synthesized)
ctgtagcctcttggttgctggggtgaaggggcctctgtatcgccacaggaaaaaaaatctgataaattacgggctcaagaagggtgttgcttttttttccactaacagactttgcaaccc

SEQ ID NO: 875997 - DNA, 120 bp, Artificial Sequence
  ENSG00000255455_16 (sequence is synthesized)
ttgtgtgtataatgctgagctaaagtgggaaggagcagtaacaccaaaggaggctaattctcttcctgtcagtaggagagagtgtctgcccccagtgtgtgaaaagggaaggcatgagaa

SEQ ID NO: 875998 - DNA, 120 bp, Artificial Sequence
  ENSG00000255455_17 (sequence is synthesized)
gtgaaaaatcagccttctggaagcaccttcttaccacgagaaaacaggtgattcttactatctttgagactcatccagattgtgtctgtttaactcttcaggcaatatgaaggcagagaa

SEQ ID NO: 875999 - DNA, 120 bp, Artificial Sequence
  ENSG00000255455_18 (sequence is synthesized)
gccatttcagagaagagattttttaaaaaatcatttcgttctttggcattgtcacaggattatgatgtgggttctcataaaaatttcactccccccaaagccacccaaaggaaaggcagt

SEQ ID NO: 876000 - DNA, 120 bp, Artificial Sequence
  ENSG00000255455_19 (sequence is synthesized)
gaaatggggaggaacacacatttgcctggcatcgcaagagctgccttgtagtcatgggttccagtgatcttggaccgatctcttcacttccctggacctcagtttcttccatacaaagaa

SEQ ID NO: 876001 - DNA, 120 bp, Artificial Sequence
  ENSG00000255455_20 (sequence is synthesized)
gttgaactggatcatagaaaagatgctgtccagcttggtaatatcagatagggagcagaagctgtctcttagcacatggccagattccggaacaacgatgatggtctccatgtttgtcct

SEQ ID NO: 876002 - DNA, 120 bp, Artificial Sequence
  ENSG00000255455_21 (sequence is synthesized)
aaaaatgcatctcatctcagtagagattttcttccacctcatttgggtctcaatttaaggaaggaagaaaggaaagaaacccggggattctcttcttgaaaggaatatacttcactttct

SEQ ID NO: 876003 - DNA, 120 bp, Artificial Sequence
  ENSG00000255455_22 (sequence is synthesized)
ctaggcttctaggataaaaacttcctatccttcatttttcctctttaaacctgccaaaatcaagttgagtaaagataccatacagatatgaaaaagaagccacatccttaaattttcatg

SEQ ID NO: 876004 - DNA, 120 bp, Artificial Sequence
  ENSG00000255455_23 (sequence is synthesized)
gagtccaagagcctgctcaccgccagttagcttttcccaggatggtggtggcactgatcatctaggttgcacttttatgttcatgtcccagagcgtttcccatcagccatctcatttcat

SEQ ID NO: 876005 - DNA, 120 bp, Artificial Sequence
  ENSG00000255455_24 (sequence is synthesized)
cttttcatcattcctctgaggaaaagacttcacacatgtataggactttctatatcacaaagtatttcatatccaatgtcttatttagatcttgacaatcactgtttaaggtaatttggc

SEQ ID NO: 876006 - DNA, 120 bp, Artificial Sequence
  ENSG00000255455_25 (sequence is synthesized)
aagttattaatactcatgtcctcattttactgaagaggaaactgaaatgcagagagcttgtcttttgcccaggatcactcacccagtttattgggaggcagcagcacggggattaagaac

SEQ ID NO: 876007 - DNA, 120 bp, Artificial Sequence
  ENSG00000255455_26 (sequence is synthesized)
atgggttatgccgacaaccaaccaggcagaattccagctctgtcagtagttagctgtctggccttaggaaagggatttcacacctctgtggcttagtttccttgtccattaaatgctcat

SEQ ID NO: 876008 - DNA, 120 bp, Artificial Sequence
  ENSG00000255455_27 (sequence is synthesized)
aagaatagagctttcctcacagagattgggtgggcacgggagctaaatgagctcatacgtttaagaacaacctctagcacacagtgcataataaatgtcattattattagcaaagccagg

SEQ ID NO: 876009 - DNA, 120 bp, Artificial Sequence
  ENSG00000255455_28 (sequence is synthesized)
acctgggtcttccagcttctagctcagtggcatttctgctgccccacaccaggactatccttcgtatacaggtatgaacctaaagccttcagtgtttcaatgaaaagttcacccaaggtc

SEQ ID NO: 876010 - DNA, 120 bp, Artificial Sequence
  ENSG00000255455_29 (sequence is synthesized)
tttctgttcagtaagtctagagctaagggctcctggcactctgttcagtcctttcgctggtaaaccacgctgccctccgttgctctgggcagaatgtcaaaccttcttatgtttttaaaa

SEQ ID NO: 876011 - DNA, 120 bp, Artificial Sequence
  ENSG00000255455_30 (sequence is synthesized)
tttataaatcaagcactcttatttaatattactgacagcccgaaggcagacgctcccactctcctggggaagagggtcttctaatctgccatcttaaggaggtaaaagggcttgattggg

SEQ ID NO: 876012 - DNA, 120 bp, Artificial Sequence
  ENSG00000255455_31 (sequence is synthesized)
taactcattgcaatgggcacgtatttattactgtctcccggccttttctcatgctgtttgtctgctggaattaccactagtgccaggccatttgaatatttgaccatttgtcttagaatt

SEQ ID NO: 876013 - DNA, 120 bp, Artificial Sequence
  ENSG00000255455_32 (sequence is synthesized)
ctctgaatacaaatgtttttcatacctttactatgtactttttaagaatgaagactatgttgcatgttggtttgtactctctcctgcacataaaaaatgcttagtaaatagatacacaaa

SEQ ID NO: 876014 - DNA, 120 bp, Artificial Sequence
  ENSG00000255456_0 (sequence is synthesized)
ttataatgagataaagttatatagctttatttttaaaagtggcatatgtgtttacatgtatatagttgtctagaaaattactggaagtctaaagccaaatattaaaagagattaactggc

SEQ ID NO: 876015 - DNA, 120 bp, Artificial Sequence
  ENSG00000255456_1 (sequence is synthesized)
ggaagccaaggagtgagccaccgtgcccggcctcagggctgattctcagccagcagtggccacaacaggacttccttccatgacgtttctcacactgctggaagtgcaatcagctcagcc

SEQ ID NO: 876016 - DNA, 120 bp, Artificial Sequence
  ENSG00000255456_2 (sequence is synthesized)
ctctgcccagaatcactcccggctctgggctacaccttggtgacgggctcctctctcctctgccccacagggtgtgccgaggacacccccagtgtcttccagtcttatccctcccatggc

SEQ ID NO: 876017 - DNA, 120 bp, Artificial Sequence
  ENSG00000243107_0 (sequence is synthesized)
gctttttatttcatttattgagttcttccattccaggattatgtacttttgttatcttatatgtcttaagtcacactgagtttctttaatgtcattttgatttttttgttaggcatttca

SEQ ID NO: 876018 - DNA, 120 bp, Artificial Sequence
  ENSG00000243107_1 (sequence is synthesized)
aaatttggggggagcatctgttactgaagaattattgttttcctttgaaggtgtcatgttttcttgcttttcaatgttttttgtatcgttatatttatatctgtacatctgatgtcactt

SEQ ID NO: 876019 - DNA, 120 bp, Artificial Sequence
  ENSG00000243107_2 (sequence is synthesized)
cttcctattttatgcattggcttttgtagggaaagactttttcctgtagatgtagctatagtgttggttggatagggtgctttggctttgattctgggtgagtgcagtagtatagtctcc

SEQ ID NO: 876020 - DNA, 120 bp, Artificial Sequence
  ENSG00000243107_3 (sequence is synthesized)
ctgtgatttcttcagctttaatgagcattagcggtgtctgagagtccctcagtggcttagactgtggttgttaatgaaggctgtagtaggcttttctggggactgtgactccaggtagac

SEQ ID NO: 876021 - DNA, 120 bp, Artificial Sequence
  ENSG00000243107_4 (sequence is synthesized)
cagtgctcaggcactagtagttgtgccagtaggcagggcatgcctttcctcaggcccctagatagtacatgtgggcgccagcaggcataggcagagcataacagtacttaaggccccaga

SEQ ID NO: 876022 - DNA, 120 bp, Artificial Sequence
  ENSG00000243107_5 (sequence is synthesized)
tgaaatgcacaggcaccaacagcaggcagaacaggcctgtcgtcaggccctctgatggtgtatgcaggcaatggcagcagcgtgctagttgagtcagtcctcaggcccttagatggcatg

SEQ ID NO: 876023 - DNA, 120 bp, Artificial Sequence
  ENSG00000243107_6 (sequence is synthesized)
agagcaggcttgtccttaggaccctagataatgtgtgctggtggcagtggtgggcagggcaggcttctctccaagcccacctctggagtttgcaggtgctggtggcaggcaggtgggttg

SEQ ID NO: 876024 - DNA, 120 bp, Artificial Sequence
  ENSG00000243107_7 (sequence is synthesized)
acctcctggcactatgtgcacaggtgacagcagcagtaggtgggttagacccttttcaatcccactttagagctcttcagttagaagttagtttatggtgctcctttttctaaccgtaag

SEQ ID NO: 876025 - DNA, 120 bp, Artificial Sequence
  ENSG00000243107_8 (sequence is synthesized)
tcattataaaatacaggtttatcagttattttttggcatatttaacacatttaaatgggatgaacagctttttagtttataataggaagctaataaaaatcaaatctaatttgtttcatt

SEQ ID NO: 876026 - DNA, 69 bp, Artificial Sequence
  ENSG00000243107_9 (sequence is synthesized)
aataggaagctaataaaaatcaaatctaatttgtttcgcagtggaggttgtagtgagccaagattgcac

SEQ ID NO: 876027 - DNA, 120 bp, Artificial Sequence
  ENSG00000243107_10 (sequence is synthesized)
caaaaaaaaaaaaaaattactttcaacaaggcatatagtctcttgtaatatatatgtatactattacattgtacagaatctgtacttatgtttggtgtgtaatataccaattagttttat

SEQ ID NO: 876028 - DNA, 120 bp, Artificial Sequence
  ENSG00000243107_11 (sequence is synthesized)
ataatatcctcataagctattctaatttttgagagaaacacaaaaagttatagattgatagtctgtataatattagacaaaatagtaagctttataaaaagttatttttggtaaatggta

SEQ ID NO: 876029 - DNA, 120 bp, Artificial Sequence
  ENSG00000243107_12 (sequence is synthesized)
aggaatttggggtggaatgtgatgagattaaaatgtagctttggtataacttcatgtgtatttcaaaatatactgaacgtcaacatgatttgaataaagaaaatgtattttctacttgaa

SEQ ID NO: 876030 - DNA, 120 bp, Artificial Sequence
  ENSG00000198358_0 (sequence is synthesized)
taggccaattttaagtggggcacaaagcaagaaaagcctccacggcaagtctaggctttgatgaaaattttccttccacgtggaccttatggttgagcataccatataagattgctagtt

SEQ ID NO: 876031 - DNA, 66 bp, Artificial Sequence
  ENSG00000198358_1 (sequence is synthesized)
tggaccttatggttgagcataccatataagattgctagttggaaaagcctcccgaggtgctgggac

SEQ ID NO: 876032 - DNA, 120 bp, Artificial Sequence
  ENSG00000198358_2 (sequence is synthesized)
cgtctctgcccggccgccccatctgagagctcctgccttgctgctgggtgctggagaggctaaatgtatgactaaggagcatcaagtgactaccaaacccaaactccccatcaagcactg

SEQ ID NO: 876033 - DNA, 120 bp, Artificial Sequence
  ENSG00000198358_3 (sequence is synthesized)
ccaaacccaaactccccatcaagcactggtatatgtgttgctgaagtgaacatttatttttattcaatgggttcttcctagccactgtgcaagcccagaatatgtgaggtggaattcacc

SEQ ID NO: 876034 - DNA, 120 bp, Artificial Sequence
  ENSG00000198358_4 (sequence is synthesized)
agaaccatagaattccagtttttccgtctccaaatagccggggttggaagatgggttctcgccctgacaccgcagagctctgtctcatctatagaacaagagtacagccgcctccgttat

SEQ ID NO: 876035 - DNA, 78 bp, Artificial Sequence
  ENSG00000198358_5 (sequence is synthesized)
tgtctcatctatagaacaagagtacagccgcctccgttatctcccgactgcagctgctcttaaactcagctcaccgca

SEQ ID NO: 876036 - DNA, 84 bp, Artificial Sequence
  ENSG00000198358_6 (sequence is synthesized)
taactattgttcctcgttgggtggaacgagagactgagaaaagaaagagacacagcgacaaagtatagagaaagaaaagtgggc

SEQ ID NO: 876037 - DNA, 120 bp, Artificial Sequence
  ENSG00000198358_7 (sequence is synthesized)
aacatgtgaacaaatgtctgtgtcataaacaaggttaagaaaaggtgctgtgcttttgacgtgcacatacataaacatctcggtgcattaaaaagcagtattgccgccagcatgtctcac

SEQ ID NO: 876038 - DNA, 120 bp, Artificial Sequence
  ENSG00000198358_8 (sequence is synthesized)
ctccagccctaaggtggttttctcctatctcagtaaatagaacatacaatcgggttttacaccaaaacattccattgcccagggataagcagaagacagatgccttcctcttatctcaac

SEQ ID NO: 876039 - DNA, 60 bp, Artificial Sequence
  ENSG00000198358_9 (sequence is synthesized)
caagcatgtgagtcaacacagcacatgtctctgtgagcacagggttgggggtagggttac

SEQ ID NO: 876040 - DNA, 66 bp, Artificial Sequence
  ENSG00000198358_10 (sequence is synthesized)
tttcttttccccacaattataagagtatacaaggtggtgatgaagaaacctgggattacgtgctgt

SEQ ID NO: 876041 - DNA, 120 bp, Artificial Sequence
  ENSG00000198358_11 (sequence is synthesized)
atacaaggtggtgatgaagaaacctgggattacgtgctgtgaaatggggataacagcaattctaacttcatagttttctcatggtaattaaatgacacaaaatcatgttaagttccaaga

SEQ ID NO: 876042 - DNA, 120 bp, Artificial Sequence
  ENSG00000276564_0 (sequence is synthesized)
tcaactttttcttctaatgtcatgacttttttctgcttcttgggagcacctccagaatcactagtggcacttcgtaggagtctcattatgcagagcttaaggtactgcactacacatgat

SEQ ID NO: 876043 - DNA, 120 bp, Artificial Sequence
  ENSG00000276564_1 (sequence is synthesized)
gaaaaatatgtgagaacctcaagagattactttttacttctatgtgcaatttcctggagagacaactgctcacgcggagatgatgaacatcacttggtgttttaagcagtactcgcagct

SEQ ID NO: 876044 - DNA, 120 bp, Artificial Sequence
  ENSG00000276564_2 (sequence is synthesized)
cttgagcttcaccacaatagcaacaggaggtgactacaaaattgttacagtagtacaatatccactacagttgatttatgttgatttacattgctcatctataaatggtgccacgtatgg

SEQ ID NO: 876045 - DNA, 63 bp, Artificial Sequence
  ENSG00000276564_3 (sequence is synthesized)
ttgatttacattgctcatctataaatggtgccacgtatggtctgtatgtgtatgtaagttttg

SEQ ID NO: 876046 - DNA, 120 bp, Artificial Sequence
  ENSG00000276564_4 (sequence is synthesized)
tacctaactttttcttaattcttttgatatttctaggctatgtggttcatctgagctttttcaaattttcacacatctccaaaaaattttgcaacacatttattgaaaagaatccaaata

SEQ ID NO: 876047 - DNA, 120 bp, Artificial Sequence
  ENSG00000276564_5 (sequence is synthesized)
tatgtggacccatgaagttcaaagtcatgttgttcaagggtcaactgtgttttaatttttactaagtcagtgtggcttttcagaattttcaccatgatgttttataacttagcatttctt

SEQ ID NO: 876048 - DNA, 120 bp, Artificial Sequence
  ENSG00000276564_6 (sequence is synthesized)
ttggtcgtcccagtaacttttgctcccattttctacaagtatttcttttttaaaaaggcaaaatgacattcagtttcttaatgtctcaccatgtaccttcataacatttgaagagcagct

SEQ ID NO: 876049 - DNA, 120 bp, Artificial Sequence
  ENSG00000276564_7 (sequence is synthesized)
tatctgatgagtgctgagagggcaaaggcagtgggcactgatttcccatgaagttcatctcttgttggtactgccagttcccacaatcctagcattctctgggcatcagtcagtgtctac

SEQ ID NO: 876050 - DNA, 120 bp, Artificial Sequence
  ENSG00000276564_8 (sequence is synthesized)
aaaaaaggattttcaaatattaaagcatgtgaaaagacaaacaggccaaaactcagagctctctagggactatgacctccaaaacagactccattctgacattttcacaggctacttgaa

SEQ ID NO: 876051 - DNA, 120 bp, Artificial Sequence
  ENSG00000276564_9 (sequence is synthesized)
ggaattccagcagggttgttccatttggtaaactcctaaacaaaccctctgtcatcgaggactgatttatagaattttctccttatgtgcttgttctgaagagattaagatagtagatat

SEQ ID NO: 876052 - DNA, 120 bp, Artificial Sequence
  ENSG00000276564_10 (sequence is synthesized)
tgctgagactcttttaaaagtcatttgatatatatgataagtactatacagaagatttttggtattttgaagtaataaaacagttatttgtaatgtttaaagagattttgtgttctgagt

SEQ ID NO: 876053 - DNA, 120 bp, Artificial Sequence
  ENSG00000276564_11 (sequence is synthesized)
tgtcttctaagttctttttctttttgattccaggaaatctatgtcataatcacatctctaaattaagtttttttcattataaacccaatcatttaacaaagaaattgaataaattcagaa

SEQ ID NO: 876054 - DNA, 120 bp, Artificial Sequence
  ENSG00000276564_12 (sequence is synthesized)
taaacaagtatgttaaaaacatgtttatgcatatatataaatatatacatatgatatacatatatcatatgttttacaatgacctttagaatatgtgaaacagaaacagttcggttgtta

SEQ ID NO: 876055 - DNA, 120 bp, Artificial Sequence
  ENSG00000276564_13 (sequence is synthesized)
gttcggttgttatagaatattcttctatgaaatcttggtgtaatggcagctgtttagatgatgctgtaaggtcactagagggggtggatctataagttgtttttcaattaatctggatcc

SEQ ID NO: 876056 - DNA, 120 bp, Artificial Sequence
  ENSG00000276564_14 (sequence is synthesized)
tcttaaaatattttattgtgtatttttatgcatttctttttttaaaaagaagaatataatgctaaaaataaaggagaagggcagaacccaagagatttggagcctggagaacttaaggaa

SEQ ID NO: 876057 - DNA, 120 bp, Artificial Sequence
  ENSG00000276564_15 (sequence is synthesized)
atgggtagttgggatttatttggcttgtagttgtccttaactgctaacagcctcatggtggtctcatctgaagtctgtgagtggcatgtatgaaattccagggtgaacggcattccacat

SEQ ID NO: 876058 - DNA, 120 bp, Artificial Sequence
  ENSG00000276564_16 (sequence is synthesized)
tgggaggaccaggtttgttggggaatttttgtatggtttgtttccttcttcgtgtgtttctttttaatcctttaaatgaattctttaactgaattaacagagttttaactgctaaataaa

SEQ ID NO: 876059 - DNA, 120 bp, Artificial Sequence
  ENSG00000276564_17 (sequence is synthesized)
agtcctatacaatcaaaaatttcttaagatttgatatctgattctgttgtaggaatgtaatatattttgggaatgagtttaaaaatgggacacaggcaagtaaattgatttatgatgctt

SEQ ID NO: 876060 - DNA, 120 bp, Artificial Sequence
  ENSG00000276564_18 (sequence is synthesized)
tcaaccaagcttcacaaaattagtactaaaaataaaattcatgttatcatattctaataacctgtcataaacctagcatattttaggtctccttagtggaaaaaaaagaaaggaaatgaa

SEQ ID NO: 876061 - DNA, 120 bp, Artificial Sequence
  ENSG00000276564_19 (sequence is synthesized)
agtgaaataataaattgcttaattggtcaaaattagttattgagttcttggctgtactagagaattgtgtggctcttaattgatgtttaaaatataaataaaatgtgtatgctgaaaaag

SEQ ID NO: 876062 - DNA, 120 bp, Artificial Sequence
  ENSG00000229613_0 (sequence is synthesized)
cctgtgacttagaatgccttaaccatgtgggaatgcagcccagtaggtctcagcctaattttatccagcccctactcaagatggagtcactctggttcaaatgcctctgacacaaccact

SEQ ID NO: 876063 - DNA, 120 bp, Artificial Sequence
  ENSG00000229613_1 (sequence is synthesized)
tccccttggctcatccattggctattctccagaccttctctaactctttagattttccaggctggagtcagacaccaaccgcaaaacattgttaagccagaaggcaaaggcaagccccta

SEQ ID NO: 876064 - DNA, 120 bp, Artificial Sequence
  ENSG00000229613_2 (sequence is synthesized)
ctccatatctgaactgggaggaggggaaaccccagccctgctctaaaattcttctcctctgaattctttccttttgcagcatgcccagcctcttgcataggaagaagtggtaagctaagg

SEQ ID NO: 876065 - DNA, 120 bp, Artificial Sequence
  ENSG00000229613_3 (sequence is synthesized)
agagaaatgcagggttcctagtacaccaattttccaactttttcatcttggccctgctttaaaatgatgcatctactgtcttcatgcctcagcacagcagagaaaaccatgctgtgttcc

SEQ ID NO: 876066 - DNA, 120 bp, Artificial Sequence
  ENSG00000229613_4 (sequence is synthesized)
tactttgaatgtttcagtgaaaatgatgaagctgaaaaaatgacggaggcccgttttacatggtcacctgaatgtggaaaagttgagttggagcaaaactggcacggccatactggatgg

SEQ ID NO: 876067 - DNA, 120 bp, Artificial Sequence
  ENSG00000229613_5 (sequence is synthesized)
acctcagcatgaccaggacacatttcagctcaaatcccctgtgccaagaacacattctgccaaggaccaccacctcttcccacaactgtgagtggatttatgtcatcacaggaggtgcaa

SEQ ID NO: 876068 - DNA, 120 bp, Artificial Sequence
  ENSG00000229613_6 (sequence is synthesized)
aaacgtgtggtgaggtaaatgaattgggatgtccttggctgcctgagcaagagggcaactttcctgcctttagaatagagaaaacacagcaggataattaagaggatgagactttggttc

SEQ ID NO: 876069 - DNA, 120 bp, Artificial Sequence
  ENSG00000229613_7 (sequence is synthesized)
caacagacagtggcttctccttccctaaattgcccttattttgtagtaagttataatatgtttattttctaccaccttattacttcactacgtgaaccaaaaataaaatcctaaagccaa

SEQ ID NO: 876070 - DNA, 120 bp, Artificial Sequence
  ENSG00000229613_8 (sequence is synthesized)
aaagcttaaagctgttgggatgagcagctgcctgggaatcacgctccttcctgctctttccaaaaagccaggtgccgccggccagcatcccgctccctttgacccgcagtctgtgcggga

SEQ ID NO: 876071 - DNA, 120 bp, Artificial Sequence
  ENSG00000229613_9 (sequence is synthesized)
agtaggcccggagtggtgccagcaggaggtggccttagaaaggcggagacccaaggagcagagtgagtcggcgtccagctccacctgaaagcgccatcttgtcgccacttccctcaggag

SEQ ID NO: 876072 - DNA, 120 bp, Artificial Sequence
  ENSG00000229613_10 (sequence is synthesized)
ctgactcagcacaagaggacagcttcaattccctataatttcatctctgacccaaaaattcagcatgcctcctaccttagccccctgccctccaaactatctttgaaaaacccctaacct

SEQ ID NO: 876073 - DNA, 120 bp, Artificial Sequence
  ENSG00000229613_11 (sequence is synthesized)
caaactatctttgaaaaacccctaacctcccagccttcagaaagattgatttgagtaataactctgtctcctgtgtggcatggctgggctcgcatcaattaaactctttctttactgcaa

SEQ ID NO: 876074 - DNA, 120 bp, Artificial Sequence
  ENSG00000229613_12 (sequence is synthesized)
taccagagcaccgatggacttggatacctgagatatctgcttgggatcccacactttcaaggtctctcctctggccttcttctggttctgcgactccttacagcgctgggagttggtgat

SEQ ID NO: 876075 - DNA, 120 bp, Artificial Sequence
  ENSG00000229613_13 (sequence is synthesized)
catggagctcagctcttggccctcaacaaatctcttccccataaagatccttttgagagcttaggatgtcccccggatggttttggttgcagattgtggtggtggagggagctatacaat

SEQ ID NO: 876076 - DNA, 120 bp, Artificial Sequence
  ENSG00000229613_14 (sequence is synthesized)
ttaatctattgccattaattggatgcgctaatggcagattgggtagtgataatgccataagaggtagtgtgtgagccgtgtgctgcatctgtgctagctcaggtaagtcagcacacagca

SEQ ID NO: 876077 - DNA, 120 bp, Artificial Sequence
  ENSG00000229613_15 (sequence is synthesized)
cctgcagcctcctctcacctcttccctgagcagcaccttttcacctgaacatgctgatcccctagtgcttcatcttgacagcaacttaacaagccctgggcagctttttaaaataaatga

SEQ ID NO: 876078 - DNA, 120 bp, Artificial Sequence
  ENSG00000229613_16 (sequence is synthesized)
ctatgatattgactatgaatctacataaaagccacttgttttttagtcataatctgtgtctaactgcagaagaaattcacacctttgaaaaacaaataaaaatgtaaaaagtgaaaattg

SEQ ID NO: 876079 - DNA, 120 bp, Artificial Sequence
  ENSG00000229613_17 (sequence is synthesized)
tttgtaaccacaatattctgaaatagaacctttttgttagatcattttcaagaggatttttcatactttcctacagtaataccaatgtatatgcacttgtataaattcttggttaaaata

SEQ ID NO: 876080 - DNA, 120 bp, Artificial Sequence
  ENSG00000229613_18 (sequence is synthesized)
tctgccaaggaccaccacctcttcccacaactagcaaactgattttgaacctcccagacttgatgtacatgttaatgttcagctaactcagcgtttcccgagataccaccggaattgaga

SEQ ID NO: 876081 - DNA, 120 bp, Artificial Sequence
  ENSG00000229613_19 (sequence is synthesized)
agctgccgctgaccgacatttctgctgctcaccacgtccctttgcctcattaagaacggcctgggagacccaggggagttctgaagcatagggtcgcaactgagttggacttcaattcat

SEQ ID NO: 876082 - DNA, 120 bp, Artificial Sequence
  ENSG00000229613_20 (sequence is synthesized)
cctctttcctcctgtcctagttctatccatcctctgttctttcttgctctctcttttgttttcttcctctggcacacaagacataagagcagcatagccacaagcaaggcttagttaggt

SEQ ID NO: 876083 - DNA, 120 bp, Artificial Sequence
  ENSG00000229613_21 (sequence is synthesized)
ttcagtgaaaatgatgaagctgaaaaaatgacggaggcccgttttacattgcatttctcagagtcatcgcctctgctgcagatggaacaacagccatggagaatgagggtcacctgaatg

SEQ ID NO: 876084 - DNA, 120 bp, Artificial Sequence
  ENSG00000229613_22 (sequence is synthesized)
aaaggacctaatgaaatgtttgtggaacctgtgtaaaacatgctgcacaaagatgtaaataaatcaacccatgaactcctagtaccctgaccgcagcgtatgtaagatcaataaatagct

SEQ ID NO: 876085 - DNA, 120 bp, Artificial Sequence
  ENSG00000229613_23 (sequence is synthesized)
aacagaaacaagggcccaccaccaacagggtagatcgtccgttgggctgggggaaggggaggcatcccgtgtgttagaaaagtgtgtccctgatttcgctgtgcaaattgaaagtggcat

SEQ ID NO: 876086 - DNA, 120 bp, Artificial Sequence
  ENSG00000229613_24 (sequence is synthesized)
tacttttgcagggccttaggggagtgaaaagagctcctggcagcccttagctcagggcactccaggccccacccggccctacagcacagctgagggatcaaagtagcgccatgtctagcc

SEQ ID NO: 876087 - DNA, 120 bp, Artificial Sequence
  ENSG00000229613_25 (sequence is synthesized)
ctaagtccacacacgatcctctcagggcagcgtggcggcccatccctggtggggctcattaccccaattttaagtttccttctgcagcagggaagcctggtcctgcctgcaaagagtttg

SEQ ID NO: 876088 - DNA, 120 bp, Artificial Sequence
  ENSG00000229613_26 (sequence is synthesized)
tctcccttgctagatggagctccttgaagaaggggctgttttcttcatctactctgacttcggacttgtcactttcccctcttgacctccatattcagatccgtgaataggagtaagtgg

SEQ ID NO: 876089 - DNA, 120 bp, Artificial Sequence
  ENSG00000229613_27 (sequence is synthesized)
gtaaaggcccctctagctttaaaacccctccaatacagagagaactctgaaaccagaaccagaagctgaggcgcggtgaatggagcattttccctggcatgatggatgggacctacggat

SEQ ID NO: 876090 - DNA, 120 bp, Artificial Sequence
  ENSG00000229613_28 (sequence is synthesized)
ctggctgtgaaggcggtatcttgtcactggaatgcctctgcagactcggacccttgcaacacacagtttgcaaacccattgcaaacccatagtttgcaaatcagactcaagaatgatctt

SEQ ID NO: 876091 - DNA, 120 bp, Artificial Sequence
  ENSG00000229613_29 (sequence is synthesized)
cagtattggtggttttgtgtgggttttgtttgttatttttatttgtttttgagacttcgttattggcacaacagcttctggaaatctgtttcacagagagtatgggggcttctttggcca

SEQ ID NO: 876092 - DNA, 120 bp, Artificial Sequence
  ENSG00000229613_30 (sequence is synthesized)
aatggagtgggtacttatgagttcggtcagtgcctgagggagcactcacttccttgcctggtcatattttcattggtgcaggctccgtctgcttggcagccactgtttgggccacagcct

SEQ ID NO: 876093 - DNA, 89 bp, Artificial Sequence
  ENSG00000247151_0 (sequence is synthesized)
ccatgcccagctaatttttgtgtttttcgtagatacgatttcctgacctccagtgatcctccagcctcgggctcccaagacctaaggaa

SEQ ID NO: 876094 - DNA, 120 bp, Artificial Sequence
  ENSG00000247151_1 (sequence is synthesized)
ccagtgatcctccagcctcgggctcccaagacctaaggaatttgtataaaaccttccagataactcagaagctgaggacttattaggcaaatctacttatatgtaattaactattagagg

SEQ ID NO: 876095 - DNA, 120 bp, Artificial Sequence
  ENSG00000247151_2 (sequence is synthesized)
tccactgtattttttttgctgatgaaaaatacaaagattttctttcctactagaaatttttacctgatattatgtcactatcatttctttgaatttgttagatatacgatagattaaatc

SEQ ID NO: 876096 - DNA, 120 bp, Artificial Sequence
  ENSG00000247151_3 (sequence is synthesized)
aatatgtttccgcaataaaagaactgattctgacatcattcattatctaaagttctttcttggctgcgtttaaaaataacaaaacttttgtttccaaatggtgagatatgaagtaaaata

SEQ ID NO: 876097 - DNA, 120 bp, Artificial Sequence
  ENSG00000247151_4 (sequence is synthesized)
acttcggtgggcatatattcttattttcctagagtttatagtagaattcatgaagcaaataaaaccctgtaaaataggtttaaagtattgaaatgtaaaattctaaactttttctgttac

SEQ ID NO: 876098 - DNA, 120 bp, Artificial Sequence
  ENSG00000247151_5 (sequence is synthesized)
tagtctcgtttgtttatttataaagctaacaatttttataaccttctgtcttttcctccctaagactttttattgctttatttttagaagcttattgtgggcatgattaagatgaaagca

SEQ ID NO: 876099 - DNA, 120 bp, Artificial Sequence
  ENSG00000247151_6 (sequence is synthesized)
aaaattttagatatgtagcagaggaagaaaatacatttaggacaaactgcctcttaagtagagaaaataatagttgagctattctagttgaaatttcttacttggttgcaaatgtaccct

SEQ ID NO: 876100 - DNA, 120 bp, Artificial Sequence
  ENSG00000247151_7 (sequence is synthesized)
caaaagtggaagatgattttatgcaaaatgtggctgtctgtggagagtcaatttgggcaaattaaactaaatgacctaaacatttataccagctacaatattgtgacttttatataacta

SEQ ID NO: 876101 - DNA, 120 bp, Artificial Sequence
  ENSG00000247151_8 (sequence is synthesized)
cttttattcaatcaggtacaatttcatcatttctccaatttaattgctttaaaatgttaccattgggtgccatcccagaaccccatggggaaggctgttaagaagtcccagctctattcc

SEQ ID NO: 876102 - DNA, 120 bp, Artificial Sequence
  ENSG00000247151_9 (sequence is synthesized)
tctattctaacctccctcagcgtctctttcttgctttcagccagctcccaaaggattcagcactcattcttccactcctcgcagctgtcaccaccagctctgtttcctggggttcctccc

SEQ ID NO: 876103 - DNA, 120 bp, Artificial Sequence
  ENSG00000247151_10 (sequence is synthesized)
caacctcatcccacccaagactggttatgatctgacctagtttccttagcaccccccttcctttctatctctgaaaataagtatgaacactgtttacacactgagggtacagagcattaa

SEQ ID NO: 876104 - DNA, 120 bp, Artificial Sequence
  ENSG00000247151_11 (sequence is synthesized)
gacgaacctgtaatccagctgtctctgccattatcatgcacatatcctttgtgggagactcatccaccgtcacgtgcctgacttccccttagaatctgcaaagaataaaatcgctatgtt

SEQ ID NO: 876105 - DNA, 120 bp, Artificial Sequence
  ENSG00000247151_12 (sequence is synthesized)
tagttgtcttttttttttcaagaatgtgtctttttagctagtacccctttccctagagtggctgcttactgcatacacaatgattgtggcatgaaataattaaacgataaaatcccaggc

SEQ ID NO: 876106 - DNA, 120 bp, Artificial Sequence
  ENSG00000247151_13 (sequence is synthesized)
tgctgttgaatagtgtcagaaggaggttggtactctgcacttagctacccagacctgccacacacatttacagccaccacctggcctctgtaagcatcagagtttcccgtttctgacccc

SEQ ID NO: 876107 - DNA, 120 bp, Artificial Sequence
  ENSG00000247151_14 (sequence is synthesized)
aagccttggatttccccagtattaggtgggcaagcatggcactctctccacagggttcttttaactcttctctccacacccgcactggagaccactggtaaccatctgtggccatcacct

SEQ ID NO: 876108 - DNA, 120 bp, Artificial Sequence
  ENSG00000247151_15 (sequence is synthesized)
aaactctcacccaggttgatttgtacaaatagcacaagaggacaccaactccatgcagatggcagcccagcaggtcacaccagtccttctgtcctcacactggcagacagaggcctcctc

SEQ ID NO: 876109 - DNA, 120 bp, Artificial Sequence
  ENSG00000247151_16 (sequence is synthesized)
tctggagtcttcacaggggcctgagctagagctggaaatgcagctggagctgcagccaaagctggggctgcagggccttgatttgagacttggccttggtcttgggtgggcagaggtaag

SEQ ID NO: 876110 - DNA, 120 bp, Artificial Sequence
  ENSG00000247151_17 (sequence is synthesized)
acccttggcaatgcaggcaggagcacgcttcccgagcttggggtaggcaatgtaggcaagtcaattgagcttctggatgatgtgctttgggatttgggacttaacctccttggccttttt

SEQ ID NO: 876111 - DNA, 120 bp, Artificial Sequence
  ENSG00000247151_18 (sequence is synthesized)
gaggactttgatagacttggcatacagacacatggcattggtactgttggcccgcttcttattcacgcccttcttgttgtgcttcttggcaaagcacatgttcctcaggaacttggggtc

SEQ ID NO: 876112 - DNA, 120 bp, Artificial Sequence
  ENSG00000247151_19 (sequence is synthesized)
taccccattaagaggtttgtatctttgttatcacagtttcttgatgtcatttctgtaccatttttgggactggttgtgtgtggtgtggttcttggacttggccatgtctacatcataacc

SEQ ID NO: 876113 - DNA, 120 bp, Artificial Sequence
  ENSG00000247151_20 (sequence is synthesized)
tgtggctccagaagctcttgggaccagaagagaaagaaccaaaaagtgaattttattttaaaaaaatgttttgagacagggtctcattctgatgcccaggttggggtgcagtggcacaat

SEQ ID NO: 876114 - DNA, 76 bp, Artificial Sequence
  ENSG00000247151_21 (sequence is synthesized)
ctcaaccaagtgcactaccatgcccagctaatttttgaaattttctgcagagacaaggtctcactatgttgcccag

SEQ ID NO: 876115 - DNA, 83 bp, Artificial Sequence
  ENSG00000247151_22 (sequence is synthesized)
agtgttcctcctaccaccatacccaggctcaaaaagtgaatttaaaaataagtaactgctagatagtattaaaatattatcat

SEQ ID NO: 876116 - DNA, 120 bp, Artificial Sequence
  ENSG00000247151_23 (sequence is synthesized)
aaaaataagtaactgctagatagtattaaaatattatcatttggaacaagtgaaaaatattttcacgtagccaggctgagttccagaatgaatttagtttaattgctttgcttaattttt

SEQ ID NO: 876117 - DNA, 120 bp, Artificial Sequence
  ENSG00000247151_24 (sequence is synthesized)
gatcacagacgcctgccactatgtctggctaatttttgtatgtttttcagagacaaggtttcgccatgttgcctaggctggtctctaacccctgagctccggtgattcacccgcctcagc

SEQ ID NO: 876118 - DNA, 120 bp, Artificial Sequence
  ENSG00000247151_25 (sequence is synthesized)
tgggattacagacatgagccactgtgccggcctgttttgcttaatattgattgcttttagtttcagctttcaatcacaaaagacaatcatgcagtagataattaagtgtaatatggatta

SEQ ID NO: 876119 - DNA, 120 bp, Artificial Sequence
  ENSG00000247151_26 (sequence is synthesized)
taatatggattactttgaaacttagcaatgagagtctttttttttctttttatacaaaattcctctaaaatgggaatatttttcacataaaataaagggaaacttagaaaatgtgtctaa

SEQ ID NO: 876120 - DNA, 120 bp, Artificial Sequence
  ENSG00000247151_27 (sequence is synthesized)
gtataatggaagcattcaaatgtttgttttaagctttctaatacatttatttgtacagatcaagacttactaatatgctaaaaaggaacagttaaaataaactattgtacattcttaaaa

SEQ ID NO: 876121 - DNA, 120 bp, Artificial Sequence
  ENSG00000247151_28 (sequence is synthesized)
cgggaagctgtttcgcctggaggctcgcgcgctttttggaattcagttatcaagctttagagcctggctactcacagttgaagcctgattgcagggttcttttaactcttctctccacac

SEQ ID NO: 876122 - DNA, 120 bp, Artificial Sequence
  ENSG00000247151_29 (sequence is synthesized)
aagcctgattgcagggttcttttaactcttctctccacacccgcactggagaccactggtaaccatctgtggccatcacctaaactctcacccagtagagatggggtttcaccatgttag

SEQ ID NO: 876123 - DNA, 120 bp, Artificial Sequence
  ENSG00000247151_30 (sequence is synthesized)
acaggcgtgagccacaatgcccggcccacgttttgctgttaataatgatggtgctgaagactatggctttgatgactagttctgctttaagaaaacattccgttgatttgtacaaatagc

SEQ ID NO: 876124 - DNA, 120 bp, Artificial Sequence
  ENSG00000230623_0 (sequence is synthesized)
gatcttcaatggccaatgatttaatcaatcatgcctgtgtaatgaagccttcataaaaacctaaaaaaggacggggtttggagagcttcctgtaagcgaacccgtgaaggttccaggagg

SEQ ID NO: 876125 - DNA, 120 bp, Artificial Sequence
  ENSG00000230623_1 (sequence is synthesized)
atggcgcacccggaaagggcgtggaagctccgcgccccttcccacagactttcccccatccatctcttcatctggtgttcatcgatagcctttgtaatgtccttaatagtaaaccggaaa

SEQ ID NO: 876126 - DNA, 120 bp, Artificial Sequence
  ENSG00000230623_2 (sequence is synthesized)
acacaggttctttctacgttgcccaagctggagtgcagtggccattcaacaggtgggatcatagcacaccgcagcctcaaattcctgggctccagcgatcctcccatctcagcctcccaa

SEQ ID NO: 876127 - DNA, 120 bp, Artificial Sequence
  ENSG00000230623_3 (sequence is synthesized)
catctcagcctcccaagtagctggggctataggcatgtgccaccacacccagctattccttcttatagccaaataatattccattgtatggatcattttttttcttttcttttctttttt

SEQ ID NO: 876128 - DNA, 74 bp, Artificial Sequence
  ENSG00000230623_4 (sequence is synthesized)
tcactgcaacctgaggaagaagagaatcaccacatatcgtatttagaggtcctgcagaaagggcagagcgagtt

SEQ ID NO: 876129 - DNA, 120 bp, Artificial Sequence
  ENSG00000230623_5 (sequence is synthesized)
agcattacacagccgctccatggaagtgacaatgagccttgtctttcacacgtaactccaggaaccaggggaaacaaaaccaattccacccagaggtacagacaaagaagagcaccctcc

SEQ ID NO: 876130 - DNA, 120 bp, Artificial Sequence
  ENSG00000230623_6 (sequence is synthesized)
caaaggagcccgcatgataagtggccacggcgaacatcactgtgatcagtcagaaaggcaggcgagttattagcttagccctgaacctcctacttaatgtagaaccagtggtgatggtta

SEQ ID NO: 876131 - DNA, 120 bp, Artificial Sequence
  ENSG00000230623_7 (sequence is synthesized)
acagaccctggctgcagtgacaagcctgggacctgctcgaggaaatccaattgaaaagcagccaagaggaacaacaagctagaaacagatgttccagctaccaggatgtgcacgcattta

SEQ ID NO: 876132 - DNA, 120 bp, Artificial Sequence
  ENSG00000230623_8 (sequence is synthesized)
acctgaacatgtagttggggtgggatggtagcattcgtttctaaatatagtgatttcacttcttcccccatatagatattgtcaagtttaattatagccatccacattagttttgtcaaa

SEQ ID NO: 876133 - DNA, 120 bp, Artificial Sequence
  ENSG00000230623_9 (sequence is synthesized)
ttttcagcaatttctttaaaataagaagatgtcagaatgataactgctattaagggaattcagggtgtttggtttatctacccagtcttactaaaacatttcagttaaatcatccactct

SEQ ID NO: 876134 - DNA, 120 bp, Artificial Sequence
  ENSG00000230623_10 (sequence is synthesized)
taaactccagtctcatagcaattaaaaattatcttttaaaaaattgcccaaatgaaattccaacagttcatgtaattatttgatttaatattaccatgttagtaaaatatctttaagata

SEQ ID NO: 876135 - DNA, 120 bp, Artificial Sequence
  ENSG00000230623_11 (sequence is synthesized)
agtgtttggaggcggagtctaacaacaggtggctaggtcatgagggctctgcctcatgaataaattaacgccgttatcgcgggagtgggtttgttatatcaggagtgggctccttatgaa

SEQ ID NO: 876136 - DNA, 120 bp, Artificial Sequence
  ENSG00000230623_12 (sequence is synthesized)
tcgaggcagccgcattgactcaccttgcagacaagcaagcagagccgcagagcagtgacccgtgcccagcgcctcgcagctagagctggattggaatccagggctttgcaggcttcctgc

SEQ ID NO: 876137 - DNA, 120 bp, Artificial Sequence
  ENSG00000230623_13 (sequence is synthesized)
ttcactcaatcctctttctgttgcctctggcctcaaggtgttggcctgggaggaagtagcagattaaattccatgggcacgaagtccgtagctgacgaatacttaatatgttgcagtttc

SEQ ID NO: 876138 - DNA, 120 bp, Artificial Sequence
  ENSG00000230623_14 (sequence is synthesized)
acagtgaaagttggcaagtccagggtgggaacatgccccaagcagctgagtcttctggattttacttctgttctttgcctctcaatttttgattttgttatataaaaagcaaatcagtaa

SEQ ID NO: 876139 - DNA, 120 bp, Artificial Sequence
  ENSG00000230623_15 (sequence is synthesized)
aaacctgaaatcatgccaaggactctctgcttctctttcacttggggtgtctatctgatgctgccacaaccagttgaaacgtataacattaacaataaaaattagtttttttgtaactaa

SEQ ID NO: 876140 - DNA, 120 bp, Artificial Sequence
  ENSG00000230623_16 (sequence is synthesized)
gggaaccgtgctgggataggatacagggaccaaccagtcctgatcattagcttagccagagaggtaaactgactgacaatcaatctgccagggatcaattactatggaagctcatagtgt

SEQ ID NO: 876141 - DNA, 120 bp, Artificial Sequence
  ENSG00000230623_17 (sequence is synthesized)
gggcccctaacccagactgtgggtctgaggaggtctcctggaggtagtgctatcctaacagagacctgaagggtacttggaatccagccacagaatactatttaccatctcattttactc

SEQ ID NO: 876142 - DNA, 120 bp, Artificial Sequence
  ENSG00000230623_18 (sequence is synthesized)
gaaactctgtgctcctccccacctgccttgccctatgcatctcctcatctggctgctcatctgcatcctttattaatacaacaaaccagtaaatggtctctgtcgcccaggctggagtgc

SEQ ID NO: 876143 - DNA, 90 bp, Artificial Sequence
  ENSG00000230623_19 (sequence is synthesized)
gcccaggctggagtgcagtggtgcaaccatggctcacacagcctcaacctcctgagctcaggtgattctcccaataaagcacctcatctg

SEQ ID NO: 876144 - DNA, 120 bp, Artificial Sequence
  ENSG00000230623_20 (sequence is synthesized)
ggtcctctatggggaaatgacacatgctctcaggctgaccctctgagacctggttaagaagtgccagacctcaaggagacaggacaggctctgatgcagagaagcttgtccccagtgctc

SEQ ID NO: 876145 - DNA, 120 bp, Artificial Sequence
  ENSG00000230623_21 (sequence is synthesized)
aatgacttcggatgtttgttaatactgagtggaggaagaagagaatcaccacatatcgtatttagaggtcctgcagaaagggcagagcgagtttcatgtttgagtgcagcggatgcatgg

SEQ ID NO: 876146 - DNA, 120 bp, Artificial Sequence
  ENSG00000230623_22 (sequence is synthesized)
ggtgtgataaccatgcgaacaggggctagaatataagcttaacagaatcagttaattagatttggaagagagttgagtcttgtgaaccacagtgatatgtcatgtacattaggaaacatt

SEQ ID NO: 876147 - DNA, 120 bp, Artificial Sequence
  ENSG00000230623_23 (sequence is synthesized)
ctcctttacgtcaacacaattctggttttctctaatgggctttatacgaggagagagaccatctcactgtgttgatttttctcaagaaaaaaatcaatactctcaatggattttaagtag

SEQ ID NO: 876148 - DNA, 120 bp, Artificial Sequence
  ENSG00000230623_24 (sequence is synthesized)
atctaatgtagtactgcactatgctcataagaagataagcatatgtaaaagattttaaaatgtgaattaatgcatgccacactgaaaccagatcataccccacactcatgttgttattat

SEQ ID NO: 876149 - DNA, 120 bp, Artificial Sequence
  ENSG00000230623_25 (sequence is synthesized)
gtgtacctaaagcaaagaacagctgcagagtattttctctggtaacacttcattttttattggtaggttttaatccgatacatttttggggtcactgaattcttatttgctttagaatgc

SEQ ID NO: 876150 - DNA, 120 bp, Artificial Sequence
  ENSG00000230623_26 (sequence is synthesized)
ccgattatatcattctgcaaaggataaaagggcttgagccatcatcctgtgctgaaatttattgaaggtatttatgaagagggtgatcttgaggaatgcaagcttttaaaatctaagaac

SEQ ID NO: 876151 - DNA, 120 bp, Artificial Sequence
  ENSG00000230623_27 (sequence is synthesized)
agcagcaaaaataaattaatcaggaatccatcactaatttatacatgagtcacttacgaggaaggtaaaacggttcagtaaattatggatttacaaataaacttgattctagggccttgg

SEQ ID NO: 876152 - DNA, 120 bp, Artificial Sequence
  ENSG00000230623_28 (sequence is synthesized)
aaaaatccttggaatctgcaaagtaataaatgtctttttgtatgctaatgaagcgactgatgatggctggcaacccctaggtagcttcaggatgggggctggtcaccggaaagaccaagg

SEQ ID NO: 876153 - DNA, 120 bp, Artificial Sequence
  ENSG00000230623_29 (sequence is synthesized)
atatgccatcttttgtgactggcttctttcactttttcattgtttaacataatattttcaaagttcatctgtgttgtggcatgtatcagtacttcattccatcttttttttttttttaat

SEQ ID NO: 876154 - DNA, 120 bp, Artificial Sequence
  ENSG00000230627_0 (sequence is synthesized)
aggcaaagccagaaagccctggcaacccaaaactgaaggatctggggctttcttcctgcaagctctgctcagcgaggggcttgtgctcctacaagctctttgctacataagtcaagccaa

SEQ ID NO: 876155 - DNA, 120 bp, Artificial Sequence
  ENSG00000230627_1 (sequence is synthesized)
ccggctggcaaatgacacaggaactttgggagcgcatggactcaggccaagcggccgtcctcaccctcggccacctcagggcagggacgaagagtaagcccagcctttgatggtggggat

SEQ ID NO: 876156 - DNA, 120 bp, Artificial Sequence
  ENSG00000230627_2 (sequence is synthesized)
tagtcccaaaattctggagttcaccactcctcccgctacactggctttatttcaaatctctgttggtccatgtcaacatcagcgatgggagttgaaagaagtaaaacagtgactcgtgca

SEQ ID NO: 876157 - DNA, 120 bp, Artificial Sequence
  ENSG00000230628_0 (sequence is synthesized)
actctgtcctgctgccttgtgaagaaggtgtctgcttcctcttcaccttctgccatgattgtcagtttcctgaggccttcccagccatgctgaactaacagctggtacaagtggatctgc

SEQ ID NO: 876158 - DNA, 120 bp, Artificial Sequence
  ENSG00000230628_1 (sequence is synthesized)
tcggcacctataacctaattacctctcaggctcacacaagtctctggccgctaagcgaatgatctcccaaagggattattctcaagcagcacagaaactgtccctatgcctcaggtggcc

SEQ ID NO: 876159 - DNA, 120 bp, Artificial Sequence
  ENSG00000230628_2 (sequence is synthesized)
ccagaactctttcgtactagagacttatctgttaataaagttaacaaaggaaagtggccttccaagaatgtttgtttgggccactacctggaagaaataacacttgaccatgagagactt

SEQ ID NO: 876160 - DNA, 120 bp, Artificial Sequence
  ENSG00000230628_3 (sequence is synthesized)
ggctgagcagtgctgggtcagcttaaccaaagaagaccagccatcacccacggcaagagcagctctgacttggacccactgttcccccagcctgttagcagcctgtgaacaatctttaag

SEQ ID NO: 876161 - DNA, 120 bp, Artificial Sequence
  ENSG00000230628_4 (sequence is synthesized)
tgacccctggccctgtcacatctccattcaacagggttcttggggaggatgtgtggaccgagaacagtgcccacccacaccacctgtaagtgtggccacggcagccagccagcatggatg

SEQ ID NO: 876162 - DNA, 120 bp, Artificial Sequence
  ENSG00000230628_5 (sequence is synthesized)
ctaagtaacaagtggtattggggcacagatgtggcgggagcgctttggggcaaagaaagaggtgctgtgagtgaggacagaaaggaaggggaaaaaaaagcctcatgggttagagcgcct

SEQ ID NO: 876163 - DNA, 120 bp, Artificial Sequence
  ENSG00000230628_6 (sequence is synthesized)
ctcacctttggctcttcttcagaagactggtaaaagaaaacaagaagagaaattggtttccctgacttctctaaagcaagcgttcttcagaaaagagaatcgatcagcctggttaaagtg

SEQ ID NO: 876164 - DNA, 120 bp, Artificial Sequence
  ENSG00000230628_7 (sequence is synthesized)
gataaactatgtgatgtccatccagagaggtgtctattaatggctgtaaaatggaaagatgaatcaatgggaccgattaatatttatgaagagttgaactaggcagagtgaaaaagcctt

SEQ ID NO: 876165 - DNA, 120 bp, Artificial Sequence
  ENSG00000230628_8 (sequence is synthesized)
gtatattggataagaaaggaaaagcattgcacaccataggatgcgtttgtttggctaaggtttctgttttgatcactgggtaattgtatagagcaggggcgtatggtagagaaagaaaat

SEQ ID NO: 876166 - DNA, 120 bp, Artificial Sequence
  ENSG00000230628_9 (sequence is synthesized)
ctatatctagaagttattgactttatgtacaaaagcactggttggtgcctatttttgaggaccactccatcttaaaaataactttggttttgtacggcctagttgtggtggaaaaggagc

SEQ ID NO: 876167 - DNA, 120 bp, Artificial Sequence
  ENSG00000230628_10 (sequence is synthesized)
tccaaagagtaagcaagtttcctacaaaaagaatccaagctgttgaaactacaattaagaaatgcaaagagttactaattttactacttagaggaaaggaaattcacaagcaggaaagaa

SEQ ID NO: 876168 - DNA, 120 bp, Artificial Sequence
  ENSG00000230628_11 (sequence is synthesized)
actgtggatcagggcaagttgtaactctagaggttcagagataggagctctaattacaccagggcaagggagtactgtttggggaaatttctgaaacatgaaataggaaagctgagggtc

SEQ ID NO: 876169 - DNA, 120 bp, Artificial Sequence
  ENSG00000230628_12 (sequence is synthesized)
aaaatgatattgtgatgtgaataaatagagaagacatgtttgcatggagctcagctgggtaatcatggaaagaaggaggggcgaaggaggaaactgaaaatcgaaataaagaacagaagc

SEQ ID NO: 876170 - DNA, 120 bp, Artificial Sequence
  ENSG00000230628_13 (sequence is synthesized)
acagaccatgaaatatgccaaatatagtgtgcaaatactcagaaggcatggaaagataagttagaagccaaaactcagttatcactatcgtgtgaaggaacaataaaactcttagcaaaa

SEQ ID NO: 876171 - DNA, 120 bp, Artificial Sequence
  ENSG00000230628_14 (sequence is synthesized)
ggtttttagacggtttaagtgagctctgcaagtgggagacacggtgatgattattgacagttgctatctttcaagggggagaagcaaactgatgttacacattagaattagttagcacca

SEQ ID NO: 876172 - DNA, 120 bp, Artificial Sequence
  ENSG00000230628_15 (sequence is synthesized)
ccgaacacaggttacaaaaatactgggaggaattctctctcctgagcacattacgcaatatttgcaaatgtgtgcaggtaagtgttgactctctcatcatgctggacctggaaatggttc

SEQ ID NO: 876173 - DNA, 120 bp, Artificial Sequence
  ENSG00000230628_16 (sequence is synthesized)
tcagcaaatcatggcatgatttctttttcaaagttgggtacacgaatattatcgtaaccagctaagagcagggagacgtggcatgggagactaacagatagtgcagcttttaagagaaga

SEQ ID NO: 876174 - DNA, 120 bp, Artificial Sequence
  ENSG00000230628_17 (sequence is synthesized)
cgtagaaatcaatctagtaacaaatatttattaagcattggagtgtgctaggcaccaagagaaaagaaacctccacagctgataaagcctttcaaaataatgtcctcagttaatttgcac

SEQ ID NO: 876175 - DNA, 120 bp, Artificial Sequence
  ENSG00000230628_18 (sequence is synthesized)
atttccatgaggtaggtgttgttagccatttccgttaatgagaaaaaaaaaaatgagattcagaaaggttaattaaattggagatctcctgattttttagttttatatccttcccgtgtc

SEQ ID NO: 876176 - DNA, 120 bp, Artificial Sequence
  ENSG00000230628_19 (sequence is synthesized)
ctttccaggcttatattctggtcctatcacttctcagctgagttacttcaacaagttatttattctctgtgttcccagctgtcaaaatgaaaatgccagtacccacctggtaaggagtga

SEQ ID NO: 876177 - DNA, 120 bp, Artificial Sequence
  ENSG00000230628_20 (sequence is synthesized)
gagaacatttataaaaatgctcggctgggtacctgacacataggaggtcctcagtaaatttgttttctccctttcttcctgaagtacggtggcagagggattcagccagccagcctgggt

SEQ ID NO: 876178 - DNA, 120 bp, Artificial Sequence
  ENSG00000230628_21 (sequence is synthesized)
agcacaagccatgatgccctgctgaatctgtgttctagggtcggacagggggagtccttttgcctagagggatggtgtgcgaggcctaagaggacttgggcagagtcttgaaggacgagc

SEQ ID NO: 876179 - DNA, 120 bp, Artificial Sequence
  ENSG00000230628_22 (sequence is synthesized)
aggatttgctgtggtggagaggtggtcacgggttgagcagataggagaaccaaggaatcaaggcagggaaagagaggggatgcatgtgaagggccaggagctgttaactagtttgctaag

SEQ ID NO: 876180 - DNA, 120 bp, Artificial Sequence
  ENSG00000230628_23 (sequence is synthesized)
cagcaggcgaggatttagaaggagttggagaagtgtggagggagctgaggctcttgtgaggggaacttttatgctaagggttccaacttggccctgtgaatgaaggtgagctggggaagg

SEQ ID NO: 876181 - DNA, 120 bp, Artificial Sequence
  ENSG00000230628_24 (sequence is synthesized)
tttgtgaacttggagtctcacctgtaaaagattaatctggtgccagtgtacagaatggaccgtcaaggaagaggtggaaaaacaaggaaaatttgtattttatagacacacacacacata

SEQ ID NO: 876182 - DNA, 120 bp, Artificial Sequence
  ENSG00000230628_25 (sequence is synthesized)
gacacagagccctttttattagaaaacatataatcaacttaaccccattttaaatggcttggacattaattttactcttgtaattgattatagaggtttaaaactgttgtgtttttgcct

SEQ ID NO: 876183 - DNA, 120 bp, Artificial Sequence
  ENSG00000230628_26 (sequence is synthesized)
ttgtgacatattatggctgtatctaaaatttatttgatgttaaatcaagaacaaaactcttcaattctattgttgttcctaaggtaaaatataatctactttgagtcaattcactgtgtc

SEQ ID NO: 876184 - DNA, 120 bp, Artificial Sequence
  ENSG00000230628_27 (sequence is synthesized)
ataaactttccaggaatgggaaacttgataaaaagcagagactcactgcatatgacaataattaaatctatattcaacaagtataaaagaatggttgtaggggtgagcaatttggaagaa

SEQ ID NO: 876185 - DNA, 120 bp, Artificial Sequence
  ENSG00000230628_28 (sequence is synthesized)
aaaaagccacttgacttaaatatgacagaaaatcatactgaggtctgacaccccatgaccttttttgagatttgaggttatgccatgtatttgagaataaataaaatccatttaagtgtc

SEQ ID NO: 876186 - DNA, 120 bp, Artificial Sequence
  ENSG00000237938_0 (sequence is synthesized)
agaagctggtctggcaatcctcatggcacgtaaagaggcggtcatccgtgaggaccaggcagcaggcgagaagagggacatctgtgaatccctcatcagaggctggccacaccggcaccc

SEQ ID NO: 876187 - DNA, 120 bp, Artificial Sequence
  ENSG00000237938_1 (sequence is synthesized)
tgacctcggactgtaggctccagagctgtgagaaagaatgtctgttgtggaagccgcctgtctgcggtgctttgttccagcagccgagctgactaggacaggcctccacttcctcttgct

SEQ ID NO: 876188 - DNA, 120 bp, Artificial Sequence
  ENSG00000237938_2 (sequence is synthesized)
caaagaacctcctagaggtgggaagggtttccaggaaggcatgcaactgccctcagggggtgtcccggtctgccctggatgaacagctgatgctgggagtggacagatttccggggatct

SEQ ID NO: 876189 - DNA, 120 bp, Artificial Sequence
  ENSG00000237938_3 (sequence is synthesized)
tctcggtcccaaagcaggctcctgccaagcccatgtgttcttgctccggctcctgtgattctcctcagcacacgcagttgcacccaagaggagccctgagagcagggcaaggagacactg

SEQ ID NO: 876190 - DNA, 120 bp, Artificial Sequence
  ENSG00000237938_4 (sequence is synthesized)
ccctggcagctgcagttgcacaatctccaaattgctgaggggacacctccatccatggatccatccttgccctggctcttccggcaaggcccacccctccaactcctctaaggtggccca

SEQ ID NO: 876191 - DNA, 120 bp, Artificial Sequence
  ENSG00000237938_5 (sequence is synthesized)
tgggcccaacctaaggagactgtgccgccttcttcagcttgcacggtcagcaatgcaggtcttgctaacagcaagtttgagagggacctcccttcctgggacatataacccgtggtacag

SEQ ID NO: 876192 - DNA, 120 bp, Artificial Sequence
  ENSG00000237938_6 (sequence is synthesized)
ggcctaaggtttgaaagaaaccaggctgttccagtaaatcattgggtcaagacaacaaaatgacctgcagcttcttcctcggtccctgatgcaaagggtgcgaccatcccaaacacatca

SEQ ID NO: 876193 - DNA, 120 bp, Artificial Sequence
  ENSG00000237938_7 (sequence is synthesized)
gcgagcgcagaaggaactcagagaaatcggacggacacacaggacacagtggcaaggtttccctgcgcttcagacctgcctggttctctcttcttctaggggttgcttaacctccttctg

SEQ ID NO: 876194 - DNA, 120 bp, Artificial Sequence
  ENSG00000237938_8 (sequence is synthesized)
gtggagggtggacgatggagacaagccactcaccaggccttgcagccccgcccccactcaaagctcaccaagacgcagtactccttgcccggctcggtggagacggcgctgatgtcgccc

SEQ ID NO: 876195 - DNA, 120 bp, Artificial Sequence
  ENSG00000237938_9 (sequence is synthesized)
agcttggctgtgcccaaagagcggaagaagctggtctggcaatcctcatggcacgtaaagaggcggtcatccgtgaggaccaggcagcagggctcctgccaagcccatgtgttcttgctc

SEQ ID NO: 876196 - DNA, 120 bp, Artificial Sequence
  ENSG00000237938_10 (sequence is synthesized)
agccctgagaggtccaaggagaagacagagcctccccgggtgagctgccagagtgagctcaggaatcctgctccaggaactccagaaatctcaccctgccctgaggcaagcagtgcaact

SEQ ID NO: 876197 - DNA, 120 bp, Artificial Sequence
  ENSG00000237938_11 (sequence is synthesized)
gggctgttagttctcaggccgcagggagctctgaaaggctgtagaggaaggtcaggccctgcttgtcaagtgactgcagcaggcgtgtcaggaggggggttagttgttagaatcggaggg

SEQ ID NO: 876198 - DNA, 120 bp, Artificial Sequence
  ENSG00000237938_12 (sequence is synthesized)
aaaaaaaaacaatatccagcatgtgtgctgcaagaagaggggctaagagggtacatgatgttatgatggaattctggaatccaagctaatttaactcaaacaggggacccttcaatgcta

SEQ ID NO: 876199 - DNA, 120 bp, Artificial Sequence
  ENSG00000248682_0 (sequence is synthesized)
tctgcatcaacaacttctggaagcagagagtccctgaaccttggagcaaggagagatgtaacatacagcctcggaggggttggaggagaggtccatggagatcacctggctcagccttct

SEQ ID NO: 876200 - DNA, 120 bp, Artificial Sequence
  ENSG00000248682_1 (sequence is synthesized)
atccctgtgctcttggctctgagcaaggctgcctcacttcattttagtttagtctgtgtgacttgagcacaagttctgcacacaaaactgtgcaaggccactaatagcactcacagagca

SEQ ID NO: 876201 - DNA, 120 bp, Artificial Sequence
  ENSG00000248682_2 (sequence is synthesized)
gtgctatcccttccttcctttgaaatggtggaggtggagacagtacatacaagagttactcaagacaaggatgagggtgcagggaggaagccgagcccttccatgccacctctgagacag

SEQ ID NO: 876202 - DNA, 120 bp, Artificial Sequence
  ENSG00000237934_0 (sequence is synthesized)
ccacaccctccctgcacctcttacggcttccaggactcccaccattcaggactcattttttggctctttagcacaattgttttgaactgaaggaatcagagacttagggcaacttctgga

SEQ ID NO: 876203 - DNA, 120 bp, Artificial Sequence
  ENSG00000237934_1 (sequence is synthesized)
agtttctacccagttggcaaagaaaccttctcaatcccctacttaccctaaactaagaggaccagaaagtctgcaggccccatgatatgctacatctgctgacaccagggaaactccact

SEQ ID NO: 876204 - DNA, 120 bp, Artificial Sequence
  ENSG00000237934_2 (sequence is synthesized)
attgtcacagccggacaattgttggagcaaagaggattcacgtctcatgataatttccatggctgcagtgttatgctgagaaggatgttgagggcccgtcttgtcttggcaggaagagcg

SEQ ID NO: 876205 - DNA, 120 bp, Artificial Sequence
  ENSG00000237934_3 (sequence is synthesized)
ttgtctggggagaatgtgataaagaggagtaactgaagataattggagactaacgtgatttcctcactgccataattagtggcagaggtgggactggaacacaggcaagaaacatcccaa

SEQ ID NO: 876206 - DNA, 120 bp, Artificial Sequence
  ENSG00000248685_0 (sequence is synthesized)
atagaggacactggaaatggttttcttaactgaacaagtgactagaataaaggaattaatgaacgacatcagagctgaaatcccaaaccataaatcataaaaggatcagacagcaaagag

SEQ ID NO: 876207 - DNA, 120 bp, Artificial Sequence
  ENSG00000248685_1 (sequence is synthesized)
tactcaaaagctgatttattgagatcctgatgagtttgaagtaactagaaacttgatcaagattattatacattgcactgttcttgctgatactccaaagacatgtagaaaatagaaagg

SEQ ID NO: 876208 - DNA, 120 bp, Artificial Sequence
  ENSG00000248685_2 (sequence is synthesized)
taagtttgcaggaggaaaaaagaacaatggaatgaagaagcaaacagggagttaaaataactccttggaatagtagaatcaggaaagcaaaggtaaagcattaaagtctaagggctgcat

SEQ ID NO: 876209 - DNA, 120 bp, Artificial Sequence
  ENSG00000248685_3 (sequence is synthesized)
gactcctaaggggaaaatgcatgtatttcttttattttgcactgagattaaatttgctgattttttttcatactgtgtgttctttcgctcccaatcctcacataaaatatttcagggtga

SEQ ID NO: 876210 - DNA, 120 bp, Artificial Sequence
  ENSG00000248685_4 (sequence is synthesized)
gttcagtctttaataatgtgagaataaacagaataaattaaaagcacaccatattcttctcagcttcctcaggggctttgtccaaacagcttgaacaactgcaaaataatattcaggaac

SEQ ID NO: 876211 - DNA, 120 bp, Artificial Sequence
  ENSG00000248685_5 (sequence is synthesized)
tattcaagagaaatctttgtgctaacagatatacagagatatctagatagcttaatattgtgaaacttgaagatttctcaatgacataaaaacctgtagtttttccaagaaacaccattc

SEQ ID NO: 876212 - DNA, 120 bp, Artificial Sequence
  ENSG00000248685_6 (sequence is synthesized)
cccaaaaatttaatttgtaaaatttgaatcctgtctttctactaatttagcatatttttgaaaattttccttattttttttggtttctctgatttattagccttactgcaattataaagg

SEQ ID NO: 876213 - DNA, 120 bp, Artificial Sequence
  ENSG00000248685_7 (sequence is synthesized)
aaccctggaattttgctttaagcaaatgtcatttatttatctatgagaaaatgagtgaaatgaatgaaaaactatgttaaagataaggggaaaccaagtgttttgttttaaaagtcaaat

SEQ ID NO: 876214 - DNA, 120 bp, Artificial Sequence
  ENSG00000248685_8 (sequence is synthesized)
gtggaatgactaaagtatacaagttttaatataaaatagaaatttaatatgtgctccttcaacgtgatctgtgtaagattttttgccataaaattctgtctacttagagaaaaaaataaa

SEQ ID NO: 876215 - DNA, 120 bp, Artificial Sequence
  ENSG00000248685_9 (sequence is synthesized)
ctggaatctcagtggattcgtctcaacacggccagatggatgattcttccagggactaatgaacttgttagaatttcggataacatttggttgtcaaaaaaaaaaaaagagcataaaaag

SEQ ID NO: 876216 - DNA, 120 bp, Artificial Sequence
  ENSG00000248685_10 (sequence is synthesized)
taatagaccataactgagatgggtggggcttattctagataagatagtcaaggactgacatatgggaagaaggctaccttctgtgaaggcatcagccattgaggatgctacttctgtagc

SEQ ID NO: 876217 - DNA, 120 bp, Artificial Sequence
  ENSG00000248685_11 (sequence is synthesized)
atctggagcaaaatattccaggcaaagggaataagaagtgactctaaaataatcaataatatggaaattgtacagcagaagttgaaagattagagaggcagaagttcagtgagaaaaaaa

SEQ ID NO: 876218 - DNA, 120 bp, Artificial Sequence
  ENSG00000248685_12 (sequence is synthesized)
gatgtatttaattaagaaaggatgtgcactgatgagcatcttaaacagatagcttgctgctatttagagaacagattgcaagagggaaagaccagcagtacaaatattggctagtctgct

SEQ ID NO: 876219 - DNA, 120 bp, Artificial Sequence
  ENSG00000248685_13 (sequence is synthesized)
acttctatagtacaagtgaaggatgatgataaaaagaggacattcgtggtggagtaggggttttttaattttattttgatgatggagctacaagagtttctgatgataatatatgtgtgg

SEQ ID NO: 876220 - DNA, 120 bp, Artificial Sequence
  ENSG00000248685_14 (sequence is synthesized)
ttagaaaataaagtcttaatcaactgggcacatgatgatcccatttccagaaataggaaagattgggggaaaatagattggatgggaggaaaaaaaatcagaagttatatttcagttatg

SEQ ID NO: 876221 - DNA, 120 bp, Artificial Sequence
  ENSG00000248685_15 (sequence is synthesized)
ttaatttttatgttaatttggttatgataagttttactaaatcagacaagaatagaaggaatcaatgatgtgtctttgctacatctgaaagaactgattggcatagaaactagaagagat

SEQ ID NO: 876222 - DNA, 120 bp, Artificial Sequence
  ENSG00000248685_16 (sequence is synthesized)
tccagaagaaatctatttagggaatcttaaatggactaaagttaagactaaaaaaaattctgtatttcagttgacggaaactgtgcatccctccagcaattctggaaaccacacggagca

SEQ ID NO: 876223 - DNA, 120 bp, Artificial Sequence
  ENSG00000248685_17 (sequence is synthesized)
cgttgcctactgtacataattctggtttaagggggccagagaggtgggagtggtgtggagcaggtagtgtaagaatcactgcagcttcctattaataataaaaatgtgcaagacaataaa

SEQ ID NO: 876224 - DNA, 120 bp, Artificial Sequence
  ENSG00000248685_18 (sequence is synthesized)
attatcctcaacaaaaaaacatttcacagtgagaatcagaagaatatttgcatcaggcaactctgggtgctagatatttattttttttctttttcacatgaactataaaaacttaccaca

SEQ ID NO: 876225 - DNA, 120 bp, Artificial Sequence
  ENSG00000248685_19 (sequence is synthesized)
gtagatgactttcacatgtaggcaaagttgattctaggaattattgtgaggtaagagaaatgtgtttgagacaaggtgtggtctcttcttcttaagttttcctctctgcatgtttttatt

SEQ ID NO: 876226 - DNA, 120 bp, Artificial Sequence
  ENSG00000248685_20 (sequence is synthesized)
tcatcctaacccagagtccttaaattctccagcatcaatcttaatgcacaatttacttaacacttttgagtagagacacatggggagcccataaacttaaatataaaatgtgaaatcaga

SEQ ID NO: 876227 - DNA, 120 bp, Artificial Sequence
  ENSG00000248685_21 (sequence is synthesized)
tatgtgatttctgtgtaaatgtgtctcttgcatctgctgtgggtctatattttactggacactccagatgctatatctttggatccacaactgcatgcccactaagatcatactttcccc

SEQ ID NO: 876228 - DNA, 120 bp, Artificial Sequence
  ENSG00000248685_22 (sequence is synthesized)
agatttccccaagtcagtgactcagtataatgtgaatacacagtggattcattactgggagatatgagagttttccaacaggagaccgtagctcaagtactccttttctggaaaccaaac

SEQ ID NO: 876229 - DNA, 120 bp, Artificial Sequence
  ENSG00000248685_23 (sequence is synthesized)
ctctgttggaatcatgctacatcagagaattttcctcctaatccattttttcatccctatctccttctatgtgtatcagcccagcattatgatataaagaatctactgttcttttcttgc

SEQ ID NO: 876230 - DNA, 120 bp, Artificial Sequence
  ENSG00000248685_24 (sequence is synthesized)
ttctccctacaataaatgtcttgaatgtctaattctttcttgctgtctgccactcggtggtcctaaacaaatgcaaatgataccaatatatttaagaaaaaagatggaaaaatgaagaaa

SEQ ID NO: 876231 - DNA, 120 bp, Artificial Sequence
  ENSG00000243810_0 (sequence is synthesized)
gtagccggcttgccttgcggaggatcctgcttccccctcctccaccccatttttttcctttcacccagtaaaaccctgtttaactcacccttcaaaccgtctgcgaggctacgttttcgt

SEQ ID NO: 876232 - DNA, 120 bp, Artificial Sequence
  ENSG00000243810_1 (sequence is synthesized)
ggccacgggacggacaaggaccccatctttagctgaactacggaaaagccctgcaacaccaccatctcatcgctgacttggaaataagctagcagtggctgtgtcagcaagaccaccaca

SEQ ID NO: 876233 - DNA, 120 bp, Artificial Sequence
  ENSG00000243810_2 (sequence is synthesized)
gggaaatatgctcggctgaaaaactgcatttcccaactcaagacctaagaggtggtcaggagatacaagcaggagtccttggatgagtcttcaagtatttgaagactggctggccatcct

SEQ ID NO: 876234 - DNA, 120 bp, Artificial Sequence
  ENSG00000243810_3 (sequence is synthesized)
gcacaccctgaatcttcactcctctggctgcgcatctggagtgacggagcccctccctcgctgtgcttcagcttgttccttcccttcttcagtgggactccaaggaacgaaggtcatatt

SEQ ID NO: 876235 - DNA, 120 bp, Artificial Sequence
  ENSG00000243818_0 (sequence is synthesized)
ggagatggacatggacaggggctgaaactgcagtaccagcagatggggagcttaagaaggaagctagttcatggcacagcacccgtaaagtccccagaattggaggcaccagattcttct

SEQ ID NO: 876236 - DNA, 120 bp, Artificial Sequence
  ENSG00000243818_1 (sequence is synthesized)
tggaggcaccagattcttctgaaagaaaaggagcaattcagcacttgtcatgcagataagaggtcaacaccccaggacggagtgaaaacctaagatgggactgtctagttgcaggaaaac

SEQ ID NO: 876237 - DNA, 120 bp, Artificial Sequence
  ENSG00000243818_2 (sequence is synthesized)
ttctacattatgggtcatcaagacaggaggatatgaggcagaatcaccacacaagctaacctgatgtacatatgacattaatccaatagacttaggaataagatacagggggttttcctg

SEQ ID NO: 876238 - DNA, 89 bp, Artificial Sequence
  ENSG00000243818_3 (sequence is synthesized)
atccaatagacttaggaataagatacagggggttttcctgaatgattcgagtatatccccattcatattaagaaaacaaagtattgggc

SEQ ID NO: 876239 - DNA, 120 bp, Artificial Sequence
  ENSG00000243818_4 (sequence is synthesized)
tcaacgactctcttaccgtccagctctcaagtcccttctcttgtgaaaatggaaaagttgaactacagttgagatattattcccaggtgttctttggaacacaggggatttctccaaaag

SEQ ID NO: 876240 - DNA, 120 bp, Artificial Sequence
  ENSG00000243818_5 (sequence is synthesized)
gcacagaacaaattgcctccaaacagccaagattccagcagaagctggagtagcagactacttggatcttcaaagtacctggccctgagtcagttaaggaagatcttttcttctcttttg

SEQ ID NO: 876241 - DNA, 120 bp, Artificial Sequence
  ENSG00000243818_6 (sequence is synthesized)
gatcattgacctcccaatcctaataatatgttcactggccaaacttcctaatcgatttgtcttttggatataacgttcctcctactgtttgcctgattgagaaatctgctacagaacatg

SEQ ID NO: 876242 - DNA, 120 bp, Artificial Sequence
  ENSG00000243818_7 (sequence is synthesized)
accggttagcattcccaccaaccccagtgctacactgactgtctttcgatggactttgctccttgctgcctctctgaggtcccagaccttcagagtgaccttcacagctctgcctaactt

SEQ ID NO: 876243 - DNA, 120 bp, Artificial Sequence
  ENSG00000243818_8 (sequence is synthesized)
tctgtcatacttctatcaagagagacagctaaatcaatatttttaatgtgctttgctgtcggaattcgatgatctgtcacagttcttgcccaatacaccccatcattattgttaaaatgt

SEQ ID NO: 876244 - DNA, 120 bp, Artificial Sequence
  ENSG00000243818_9 (sequence is synthesized)
ttttagctttgtttgtagaattgctttaactggtttcatctctgggagctacactttgaaatataactttagcaacattttactatactttttcacaacccagagcagtactattttatg

SEQ ID NO: 876245 - DNA, 120 bp, Artificial Sequence
  ENSG00000243818_10 (sequence is synthesized)
cttagtggttaaactaattccataaatcttttgcaactatcctctattctttttcttgtaatttttacctgggaaggtttttactgataatcatcctatcctgagtcatcccacaaacca

SEQ ID NO: 876246 - DNA, 120 bp, Artificial Sequence
  ENSG00000243818_11 (sequence is synthesized)
atctgtctcactaatcattgcttctaacctacagactaagcataacttctgctaaatgatctttgataagatgctatgactctataaagtctttgatattcatgtctaaatttaatcact

SEQ ID NO: 876247 - DNA, 120 bp, Artificial Sequence
  ENSG00000243818_12 (sequence is synthesized)
tgtagattttcatagaatcaatctttcacttctacaattgggagtatttataagttgtttatcttaaacagttcctctatcacgcttttcacgttaaataaagcaatcccttcaaatcaa

SEQ ID NO: 876248 - DNA, 120 bp, Artificial Sequence
  ENSG00000243818_13 (sequence is synthesized)
cactggcaaggaggtggtagcaggaaataggcatgtggtgacttcagtaacagagacgactgcagggctgacctaagcttagtagcctggcttctccgggagctgagggtgagcatcatg

SEQ ID NO: 876249 - DNA, 120 bp, Artificial Sequence
  ENSG00000243818_14 (sequence is synthesized)
ccgtctcaaaaaaaaagaaaaaaatctttttctttgtcacctatgcaatgtttgacctgcaagtgcttgtatcttttgtaattgtttaaatccctcaaaattttaaatgagtattgaata

SEQ ID NO: 876250 - DNA, 120 bp, Artificial Sequence
  ENSG00000243818_15 (sequence is synthesized)
catgcagataagaggtcaacaccccaggacggagtgaaaacctaaggattcacaaacccacccttgtgcgaatccagccgtctgtgttctagactggcaaggaccatatctgattctgag

SEQ ID NO: 876251 - DNA, 120 bp, Artificial Sequence
  ENSG00000243818_16 (sequence is synthesized)
ttgtatcttttgtaattgtttaaatccctcaaaattttaaatgagtattgaatatattttgtgtttttccaaatataagattctataaagaagagaatgatgtaagtgacccgggggcaa

SEQ ID NO: 876252 - DNA, 120 bp, Artificial Sequence
  ENSG00000243818_17 (sequence is synthesized)
tggggggagcttaaatttgaaactagaaaaaattttgaacaaaataatcataattgttagctgatgaaaaactagaaaatattttctgagtaaattcttgatttcagaaattaactataa

SEQ ID NO: 876253 - DNA, 120 bp, Artificial Sequence
  ENSG00000243818_18 (sequence is synthesized)
tttatattgctcttaatatcttacccttgaatataaatgattaatgccctttaaaatgtccttttttctagctaacctgatgtacatatgacattaatccaatagacttaggaataagat

SEQ ID NO: 876254 - DNA, 120 bp, Artificial Sequence
  ENSG00000243818_19 (sequence is synthesized)
attccttctttggcctcacccagtgcaatatgtgaggatgttctccaccctctaccctgggcctggaactacggatgaagcacagctgcggcatggttgaaaatgtggcattaaatgccg

SEQ ID NO: 876255 - DNA, 120 bp, Artificial Sequence
  ENSG00000243818_20 (sequence is synthesized)
ctgcctctgaagctagcttcctctctaagatcctgtatttaagaagatgattctaaccaacttttgaaatgttcagagcaattcagcacttgtcatgcagataagaggtcaacaccccag

SEQ ID NO: 876256 - DNA, 120 bp, Artificial Sequence
  ENSG00000243818_21 (sequence is synthesized)
caaaaaatgtcgagtttctggcaaggtatggaaacaggacagaaggagaccagagtcgaagcaccagagggcatagatgtggaaagtggtcctagttaggagctgttgcccaggaaatgt

SEQ ID NO: 876257 - DNA, 120 bp, Artificial Sequence
  ENSG00000243818_22 (sequence is synthesized)
tgagggcacaagctgtaagcaggaccacagtgaagacagctagtgtcaaaagccctgccaagccagtccttcacaagggctgtccagcctttagcatgggggactcagcatggcaggcct

SEQ ID NO: 876258 - DNA, 120 bp, Artificial Sequence
  ENSG00000243818_23 (sequence is synthesized)
gtacctagtaaaatttctgtcttcccagtggtgacaatcggctccttccgcacctgtaagagcaaatttggttctgccactgtctgattgcctggtgctcacagttcacttccctgtcaa

SEQ ID NO: 876259 - DNA, 120 bp, Artificial Sequence
  ENSG00000243818_24 (sequence is synthesized)
gccaggtcatcctaataccagagaggacttcacttctccctagcaatgaccaattctgtgaaactgattactccaaactgtatgtatagacttagcaatgaggaaaggctttgccagatc

SEQ ID NO: 876260 - DNA, 120 bp, Artificial Sequence
  ENSG00000243818_25 (sequence is synthesized)
atcttttaaaactaaacctcaacttcgatgtgctctctgtgctccaaccacacctgtctttttccttgttcctcaatggtgtcatgtttctgttacagggtcttagcataagctatttct

SEQ ID NO: 876261 - DNA, 120 bp, Artificial Sequence
  ENSG00000243818_26 (sequence is synthesized)
tctgcctggagggcgcatcccccaaccatcacatgactggccacattgctcagactttagcctagatgtcacctcttcagagaagccttctctgaccaccttatttaatgttgatcactc

SEQ ID NO: 876262 - DNA, 120 bp, Artificial Sequence
  ENSG00000243818_27 (sequence is synthesized)
cacctgcagcccaaacaccagctaataaattccctcctactcctccatcgtttctttaatttttatgcctcatgtgaaaagtatcgagtcaatcacatacttcagttcatggtataatat

SEQ ID NO: 876263 - DNA, 120 bp, Artificial Sequence
  ENSG00000243818_28 (sequence is synthesized)
tattacatttctttcgtggatattttccccattcatccctggtttccatttccgttacctctcctttcacatattcattcactataaggcattacatatatatccttgtctaaaaatgta

SEQ ID NO: 876264 - DNA, 120 bp, Artificial Sequence
  ENSG00000243818_29 (sequence is synthesized)
atattgtcaaatgtaagttattatttggtatatcatatgtttcacaaatagtattgtgcaatagaccttgctctagttattatgttttgtattcaccagtgtgttctaaagacccatctg

SEQ ID NO: 876265 - DNA, 120 bp, Artificial Sequence
  ENSG00000243818_30 (sequence is synthesized)
tatgtaggtacacttggttcattgcttctaactgatccttggtatcccgtagtgtgcattcatccctgctctggatacagtcagctcccaaattccataaacaactcctttgtaagtaac

SEQ ID NO: 876266 - DNA, 120 bp, Artificial Sequence
  ENSG00000243818_31 (sequence is synthesized)
ctccttttgacagggggtagaattgctcagggtccagatgctcccattattatctgttcctcaccctggccaggctgtggcactgccctgatattatcccatcacctccgtgtagcagat

SEQ ID NO: 876267 - DNA, 120 bp, Artificial Sequence
  ENSG00000243818_32 (sequence is synthesized)
attttgtctcaaggtggttccaggccaggcgattatctgccaaggacagtggttagagagaggaaacagcctgcaactctgcctgcaccatgtcctaacagtgactttctctgctcagcc

SEQ ID NO: 876268 - DNA, 120 bp, Artificial Sequence
  ENSG00000243818_33 (sequence is synthesized)
tatggtttacccacagcaggtcacagccaccctttctctctgcccagtggtttcttatggtttttacctagatttacgtcgacttgcagatcagtacactcctctcctgcttctgaggca

SEQ ID NO: 876269 - DNA, 120 bp, Artificial Sequence
  ENSG00000243818_34 (sequence is synthesized)
acatcagggttggaatttgtggagttccttatagtcttcataatgctaatcactacctgaaattatcatctttttaattggtttacttgcttattgtctgtctccctcactgtaagactg

SEQ ID NO: 876270 - DNA, 120 bp, Artificial Sequence
  ENSG00000243818_35 (sequence is synthesized)
taaatgccacatgagcaaggaccttatctgaacaccttcctaggtttggggatatcccaccacatgcataccactgaggggcagagatgccttccagtgtagaaacagctaggaccatat

SEQ ID NO: 876271 - DNA, 120 bp, Artificial Sequence
  ENSG00000243818_36 (sequence is synthesized)
agtcacagccccaggcagcttcacagctaaggcacgggcattccttctctatttggccatcagaccgacctgtgaatcccaagttggagaaatgaagtcaccaaggcagtggagaattca

SEQ ID NO: 876272 - DNA, 120 bp, Artificial Sequence
  ENSG00000243818_37 (sequence is synthesized)
gtggtcggggcagctgtagtggcagcagtagtgcctgtggcaacagtttcaggagtagcagttggtatcctgcctccaaagacagaatgtaggtccaccagcagcaccgcctttaccaga

SEQ ID NO: 876273 - DNA, 120 bp, Artificial Sequence
  ENSG00000243818_38 (sequence is synthesized)
ctggtactaggacctaattttggaagtggttcttcctatcgagactttgggctacctaatatcctttcaacaaatttgttatttcctaaatcagtcagaatcaacttttagtgtgtaaac

SEQ ID NO: 876274 - DNA, 120 bp, Artificial Sequence
  ENSG00000243818_39 (sequence is synthesized)
tgagaaccctcagtagaactattagccacaatgtccgcttttattgtctaagtccatttgagctgaactttctgtaacttgaagacagaagctccctaactcaggggtcctcaactccca

SEQ ID NO: 876275 - DNA, 120 bp, Artificial Sequence
  ENSG00000243818_40 (sequence is synthesized)
ggccacacagcaggaggtcagcagtgggctggctagcaggggaggcttcatctgtatttacagccgcttcccatcactcgcatcaccgcctgagctctgcttccttcagatcagcagtgg

SEQ ID NO: 876276 - DNA, 78 bp, Artificial Sequence
  ENSG00000243818_41 (sequence is synthesized)
atttggggttgcggctttgttcatagggtcatcaagacaggaggatatgaggcagaatcaccacacaatggaggtggg

SEQ ID NO: 876277 - DNA, 78 bp, Artificial Sequence
  ENSG00000243819_0 (sequence is synthesized)
ccagcctgggggacagagcgagatgctctccctgctgttagcatcccgagcggcaggaggaggctttcgagtctctgc

SEQ ID NO: 876278 - DNA, 120 bp, Artificial Sequence
  ENSG00000243819_1 (sequence is synthesized)
tagcatcccgagcggcaggaggaggctttcgagtctctgcccaggccgagatgtcatcctcccgggcgggggcgaggcagttcagcgagtgaacccagcgaatgaaggcgaccagggtgc

SEQ ID NO: 876279 - DNA, 120 bp, Artificial Sequence
  ENSG00000243819_2 (sequence is synthesized)
acccagcgaatgaaggcgaccagggtgcgaattccgagtggaagtgtattctcttctctcctccagtgtttctgcgatgttacgttagaagtactgtaggccgggtgcggtggctcacgc

SEQ ID NO: 876280 - DNA, 72 bp, Artificial Sequence
  ENSG00000243819_3 (sequence is synthesized)
cgggcctggtggcgcgcgcctgtaatctcagctactctgaaggctgaggtgggggaatcgcctgaacccggg

SEQ ID NO: 876281 - DNA, 89 bp, Artificial Sequence
  ENSG00000243819_4 (sequence is synthesized)
aaatcagtcgggcctggtggcgcgcgcctgtaatctcagctactctgaaggctgaggtggggcgtcagctgagatcgtgccactgcagt

SEQ ID NO: 876282 - DNA, 120 bp, Artificial Sequence
  ENSG00000243819_5 (sequence is synthesized)
aaaaaaaaaaaaaagaagactgtggcgtcatcttcaacccattcctatctctggccctcactttcagtatctaaacctggatatttctaattatgaaatatttccttaaagtaatctgtt

SEQ ID NO: 876283 - DNA, 120 bp, Artificial Sequence
  ENSG00000243819_6 (sequence is synthesized)
ttcattcctcctgctgaaactcaaatacttaactatttttggattataactttcccaagtgatcttcttacttcctttgatttaatgaacaaattattttatgccttactttctaaaacc

SEQ ID NO: 876284 - DNA, 120 bp, Artificial Sequence
  ENSG00000243819_7 (sequence is synthesized)
taggttgagagttcttcgtggaccctatatcatttgtccttatattccctatccaccccatccacccctacccagagtaccagaacagtgcctggcctctattaggcattgctacatatt

SEQ ID NO: 876285 - DNA, 120 bp, Artificial Sequence
  ENSG00000243819_8 (sequence is synthesized)
tacatttagccatgtacgtagggatatattccttaactctgtcctcaaatttaagatcctccacaaatttttaattttctacactggttacagttaagaaaaactgtaaacatctttggg

SEQ ID NO: 876286 - DNA, 120 bp, Artificial Sequence
  ENSG00000243819_9 (sequence is synthesized)
aaaggtggcataatagaatggttagatcacagactctggcttggcttggtggtgcaggcctattgtcctagctactagtgaagccgaagcaggagaatcacttgagcccaggagttcttg

SEQ ID NO: 876287 - DNA, 120 bp, Artificial Sequence
  ENSG00000243819_10 (sequence is synthesized)
gctgtagcacgcaacgagcgttgggtgtcctcagtttggcatcaatatggtgaccccacaagagccagggaccaccatgttacctaaggaggtgtgaagcggctcaggtcagaaatggag

SEQ ID NO: 876288 - DNA, 120 bp, Artificial Sequence
  ENSG00000243819_11 (sequence is synthesized)
caagtcaaaactcccatgctcaccagtaatgggatcatgcctgtgactaacactgtactccagcttgggcaacacagcaagaccctatctcttgaaaaataaataaagatcacagactct

SEQ ID NO: 876289 - DNA, 120 bp, Artificial Sequence
  ENSG00000243819_12 (sequence is synthesized)
gaagccagactggcaagattcaaatcccgactgccatttttaactgaaagaccttaggtaagttacctaacctctctgtacctgtgtaaaatggagataacagtagtatccacttcacag

SEQ ID NO: 876290 - DNA, 120 bp, Artificial Sequence
  ENSG00000243819_13 (sequence is synthesized)
agttatgaggatgaaatacattcatatttataaaacgtttggaacccagtacttggcacatagtaagaccatgtaagtgtttgtaaaataaaactgaaaataaagccatataccaaataa

SEQ ID NO: 876291 - DNA, 120 bp, Artificial Sequence
  ENSG00000249225_0 (sequence is synthesized)
gaaacacactgatcctacatttggaatatggagacacagaaaggttttggtttcaaaggtagccaaggcagaattaccaggaccctacttaaaggtttcactgtgaggaaaccaacctta

SEQ ID NO: 876292 - DNA, 120 bp, Artificial Sequence
  ENSG00000249225_1 (sequence is synthesized)
atcacctgtctggaatacttaaatgaccttttaataatccaaatgtgtttttctaacatgtcctcctgctaatctctacatttgagccaatgtcatcttggcaaaatgccagattgctga

SEQ ID NO: 876293 - DNA, 120 bp, Artificial Sequence
  ENSG00000249225_2 (sequence is synthesized)
tgtcactactgctcagacccatcacagcatctccacttaaactctcaaacagcttcgaatgactcttataaggaaaatcaaaagccttaggccctcatattcaataatattctacacaaa

SEQ ID NO: 876294 - DNA, 120 bp, Artificial Sequence
  ENSG00000249228_0 (sequence is synthesized)
gattccttgagcacttgatatagagaagacagtgtgtaagatgccagctgaggtggtaacctcagtgtcaaaagatccccagcagcatgagcatgtccatatgatgccttttaccacact

SEQ ID NO: 876295 - DNA, 120 bp, Artificial Sequence
  ENSG00000249228_1 (sequence is synthesized)
gcggcacagcaagaaggccctcactggatgcaactctttgatcttggacctcttgaggggtgacagtgtgctggcagccctcgcagccctccatcgctcttggcacctcctcagcctggg

SEQ ID NO: 876296 - DNA, 120 bp, Artificial Sequence
  ENSG00000249228_2 (sequence is synthesized)
cgcccactctggccggacttgaggagcccttcaggccccccgccccaccacgctgcactgtgggagccccttcctgggacgtccgaggccacacctggctccctcagcctgcggggaggt

SEQ ID NO: 876297 - DNA, 120 bp, Artificial Sequence
  ENSG00000249228_3 (sequence is synthesized)
gtaaagggagaggcacgggtggaaactggagctgcatgcagtgcttgcaggccagctagagttctgggtgggcatgggcttggtgagccctgcactcagagtggctggctggcccccggg

SEQ ID NO: 876298 - DNA, 120 bp, Artificial Sequence
  ENSG00000249228_4 (sequence is synthesized)
ggcttagcacccgggccagcagctgctgagggtgcgccgggtcccccagcagtgctggcccaccagggctatactcgatttctcgtggggccttagctgcctccacacagggcagagctc

SEQ ID NO: 876299 - DNA, 120 bp, Artificial Sequence
  ENSG00000249228_5 (sequence is synthesized)
cagagctcaggacctgcagcctgccatgcctgagccccccagccgccgcccccgccgtgggctccttcactgcccgagactccctgatgagtgctgccccctgctccagggcgcccggtc

SEQ ID NO: 876300 - DNA, 120 bp, Artificial Sequence
  ENSG00000249228_6 (sequence is synthesized)
cgaccacccaagggctgaggagtgtgggctcacggcgggggactggcaggcagctctacctgcggccgggtttgggatccactgggtgaagcaagctgggctcctgagtctagtggggac

SEQ ID NO: 876301 - DNA, 65 bp, Artificial Sequence
  ENSG00000249228_7 (sequence is synthesized)
cctttatgtctagctaagggattgtaaaaacaccaatcagcactatgtgtctacctcaaggtgtc

SEQ ID NO: 876302 - DNA, 120 bp, Artificial Sequence
  ENSG00000249228_8 (sequence is synthesized)
agagaataaacgcaggcttccagagccggcagaggcaacccgcacataccttttcacagtgtggcatctttgttcttttgctctttgcgatatagcttgctgctgctcactctttgggtc

SEQ ID NO: 876303 - DNA, 120 bp, Artificial Sequence
  ENSG00000249228_9 (sequence is synthesized)
agcttcactcctgagccagcgagaccacacacccaccagaaggaagaaactcctaacacatccaaatatcagaaggaacaaaccggggacatgacgcctttaagaactgtgacactgcga

SEQ ID NO: 876304 - DNA, 120 bp, Artificial Sequence
  ENSG00000265840_0 (sequence is synthesized)
taataaatacaattccggatttattaaaaatcagggctcccctgctgtgccctcctggcactaaggaaataaataaccagagggggcacagctaggtaaagggggaaaaaatcagatctc

SEQ ID NO: 876305 - DNA, 120 bp, Artificial Sequence
  ENSG00000265840_1 (sequence is synthesized)
ccttatggctcttgggacatagcacctgagcaggcacctcagtccgtgtagagtgtgaccggcaccaaggcatgtctgccctacccaagaagggagacagggctgaagcaccaattggag

SEQ ID NO: 876306 - DNA, 70 bp, Artificial Sequence
  ENSG00000265843_0 (sequence is synthesized)
atttgcccatgaggcgactcagaaggagcatgagcagagatgaccctaataggtggtgccaacacagttt

SEQ ID NO: 876307 - DNA, 120 bp, Artificial Sequence
  ENSG00000265843_1 (sequence is synthesized)
tgagcagagatgaccctaataggtggtgccaacacagtttccctgagaagttgaaatcgaggactggtgcccactgaggaggtctgaggagaggaggactcagagcagccagatgcatca

SEQ ID NO: 876308 - DNA, 120 bp, Artificial Sequence
  ENSG00000265843_2 (sequence is synthesized)
ggcccctcctgaagtctccgacagcacgctgttcatttagttgtgaattctaaggcaaagactatgactctggaccacgcattcaattagggaggggaaaactaccctctactagaatat

SEQ ID NO: 876309 - DNA, 120 bp, Artificial Sequence
  ENSG00000265843_3 (sequence is synthesized)
cactgaaggaagaaatagaagctctgaaatgtcccttctcaataatgttgggaaaggaaggttgggacattcatccccatgacaacttttagaaagcataagtatccaattgctaacatt

SEQ ID NO: 876310 - DNA, 120 bp, Artificial Sequence
  ENSG00000265843_4 (sequence is synthesized)
gattgcttatattatagaattagtttaattttttatggtgtctaaaatatggtcaagtcagagcagtaagttctaattttgagttctgccctgctccgaagcagaaggagagtgcatgag

SEQ ID NO: 876311 - DNA, 120 bp, Artificial Sequence
  ENSG00000265843_5 (sequence is synthesized)
attatataaagactcagagaagagatacagctcctcccgcaccagagaaatgcagctccgtgagccccgatggagccagcatgctgctgggtgctgaggagcaggcagaggcacccagga

SEQ ID NO: 876312 - DNA, 120 bp, Artificial Sequence
  ENSG00000265843_6 (sequence is synthesized)
tggcggtccccaaggagaacggaggcacagaacaacgcatgaggggccacatgacttagggccgggatcggtcactcagccagcaaaaacactggaagaaaacaaaacaacttcagactc

SEQ ID NO: 876313 - DNA, 120 bp, Artificial Sequence
  ENSG00000265843_7 (sequence is synthesized)
cgtaatatatctgcccaaagactggacaacaaaggtaaaggaggctgatgaggaaacgaaaggatccgtggttcttggctcgctgggtggctcatcaacaaagccccagcatcactcctg

SEQ ID NO: 876314 - DNA, 120 bp, Artificial Sequence
  ENSG00000265843_8 (sequence is synthesized)
cagatgccctagcctggcctgggctgggatgggcaaaattcaccatgggactcttgttcaagagagggagatcaaagccagaaacacttacccagaatggccatgcagactaaaattcca

SEQ ID NO: 876315 - DNA, 120 bp, Artificial Sequence
  ENSG00000265843_9 (sequence is synthesized)
attctaaaaatacttttaaaatgtaacgtacaacaaaggaaagctggaaaaatatttaaaaaaggatgaaagggcaagaaaaattcaacccacgacctcaaggcgattataatctgtgtt

SEQ ID NO: 876316 - DNA, 120 bp, Artificial Sequence
  ENSG00000265843_10 (sequence is synthesized)
ctgctgcttcccagagccgcttcagtcttcagctcagagtctaccagacactaaaatgcaactgaacactcagttcatacttgttcttctaattagctgcctcttccatttgattaatat

SEQ ID NO: 876317 - DNA, 120 bp, Artificial Sequence
  ENSG00000265843_11 (sequence is synthesized)
tgcctcctaatttaattgtaaattgtatttctggtttatatttcgcttctccctcctgttgtacctggtgaccatcttcattaatcatattgtagctttttaatgaatctcatatgccaa

SEQ ID NO: 876318 - DNA, 120 bp, Artificial Sequence
  ENSG00000265843_12 (sequence is synthesized)
tttatggtgaacaagacttgatatgaaggcatcttcatcaaatcattcataatcttgtaactattggtttattttctgtaacgacctataaatgtacaccaaaaaaatgaaagattcccc

SEQ ID NO: 876319 - DNA, 120 bp, Artificial Sequence
  ENSG00000265843_13 (sequence is synthesized)
ctaaaatgtaatgggacagaactttgtttacgtagatttctgaggatgggttgagacgccaaattccgcttgtgtttggaatttctatttcactgggcttagtgagggtgcccatgtttt

SEQ ID NO: 876320 - DNA, 120 bp, Artificial Sequence
  ENSG00000265843_14 (sequence is synthesized)
gcaatcctgtgctctagaatctatcataaacagattcttctaattgtttgacattaaactgcaaatttgtgtttttgtgtctgctcaaatataaaatgtctttgggaaaaatacagagaa

SEQ ID NO: 876321 - DNA, 120 bp, Artificial Sequence
  ENSG00000265843_15 (sequence is synthesized)
aatgaaggcaaaaatctattttaaaattctctcccgaaagcctctatttggaagtgatcgtgctctcttgagatgtgcatttcatatgaggaatcccactaaccaggactctgtccccgc

SEQ ID NO: 876322 - DNA, 120 bp, Artificial Sequence
  ENSG00000265843_16 (sequence is synthesized)
ttctagaggaaagtttgaagcttctataagcataaaaccttgaactgagtcactgggaacctgtgagaggcttctgcaggcacacggcagcctccacgatgttctctcctcattcacgtc

SEQ ID NO: 876323 - DNA, 70 bp, Artificial Sequence
  ENSG00000265843_17 (sequence is synthesized)
gccgatcacagggctcagttgaagtccaagactgtcagaggtgtggataaagttaaaatatttaaccttc

SEQ ID NO: 876324 - DNA, 120 bp, Artificial Sequence
  ENSG00000265843_18 (sequence is synthesized)
attgaggaggacatctctgaatacacaccccaggcagcaggaccaaattcaagatttctgattctgctggctgggatgtaacccaacgtatcaggcaccaaatgggcttgcttttgtgtt

SEQ ID NO: 876325 - DNA, 120 bp, Artificial Sequence
  ENSG00000265843_19 (sequence is synthesized)
ttttcatttccattccttggcagaatctcttttatctttgactcccctcacattccagcctctttgttttcataagtggaatggcatttgtaggctaagccaaggacaaaaagggaggct

SEQ ID NO: 876326 - DNA, 120 bp, Artificial Sequence
  ENSG00000265843_20 (sequence is synthesized)
gtgtggggtcacgttgcaacatagtggctacccacaatgtctttggcatcccaaatagaaatttccaacggcaaatatccaggcatgcttgaaatccataagcgtgcactctgcctcgtt

SEQ ID NO: 876327 - DNA, 120 bp, Artificial Sequence
  ENSG00000265843_21 (sequence is synthesized)
gcgcttccacacgacattgtttctccttgacacatcgcaagcctcaaatcaatgctgatagacacaagaaccctctggcatcccctgtgatctaggatttcccgcgatgttacttgctgt

SEQ ID NO: 876328 - DNA, 120 bp, Artificial Sequence
  ENSG00000265843_22 (sequence is synthesized)
tctaattactctttcttcatgcaaaatattataagtggcttggttaagcgcaccctaaactggccacgttgctgtccttataaaaataaacaaatgctccgttttttacacctctaaaca

SEQ ID NO: 876329 - DNA, 120 bp, Artificial Sequence
  ENSG00000265843_23 (sequence is synthesized)
actgtcagaggtgtggataaagttaaaatatttaaccttctcatgtaaacataagagcctgattaattttgagacatgagctttggacccagacctgagctggactcttgcttcacttca

SEQ ID NO: 876330 - DNA, 120 bp, Artificial Sequence
  ENSG00000265843_24 (sequence is synthesized)
atgttaaacgacgcttagacgggggcgcacggtgacagatgcggccccggcacaggggcactggcgttgagattccacatcagcatcggtgggaacctgggagaactattgcgccttttg

SEQ ID NO: 876331 - DNA, 120 bp, Artificial Sequence
  ENSG00000265843_25 (sequence is synthesized)
cagacccagcctggattctatttttagttttctaatcctgtaatactctttcctagggatctgcatccaatatccttgaagtatcaaaatttgcttcctctgaaatgaatggatataaaa

SEQ ID NO: 876332 - DNA, 120 bp, Artificial Sequence
  ENSG00000265843_26 (sequence is synthesized)
cgactttcgagaacagaacagtaaagtgtgtgctcagagtccgtgggggcagcatcagggcttccactcttgcatgccgtgctacactggagtcccattctacaccacctgcccacacac

SEQ ID NO: 876333 - DNA, 120 bp, Artificial Sequence
  ENSG00000265843_27 (sequence is synthesized)
agctctgctgaggcacgaggccccgtgggtgcagcaccatcttctcgagggtatccttccttgctgcagcgtcttatctgtgtgcagctgcaggtgttccttagcagggtctccatatag

SEQ ID NO: 876334 - DNA, 120 bp, Artificial Sequence
  ENSG00000265843_28 (sequence is synthesized)
atgactgcgcttgaaacatttcaaatctcctcctatttcaaactgctttataaatccttgtaggagtgaccaatgtatatcatattaccccacaatacagaaaggaatcttcatcagtaa

SEQ ID NO: 876335 - DNA, 120 bp, Artificial Sequence
  ENSG00000265843_29 (sequence is synthesized)
caagaggggggcgcctcatctatgtgaatcctgtgacccccacaaatattatagaagcaatatgagaggaagttcatggcgaccccacgcatattatagaagcaacacaggaggaagttc

SEQ ID NO: 876336 - DNA, 120 bp, Artificial Sequence
  ENSG00000265843_30 (sequence is synthesized)
atggtgaccccacgcgtattatagaagcaatacgggaggaagttcatggtaactccacgcgtattatagaagcaacacgggaggaagttcatggcgaccccacgcatattatggaagcaa

SEQ ID NO: 876337 - DNA, 120 bp, Artificial Sequence
  ENSG00000265843_31 (sequence is synthesized)
cacgggaggaagttcatggcgaccccacgcatattatggaagcaatacgggaggaagttcatggcgaccccacgcttattatagaagcaacacgggaggaagttcatggcgactccacgc

SEQ ID NO: 876338 - DNA, 120 bp, Artificial Sequence
  ENSG00000265843_32 (sequence is synthesized)
atattatagaaacaacacgggaggaagttcatggcgaccccacgcatattatggaagcaacacgggaggaagttcatggcgaccccacgcatattatggaaacaatacgggaggaagttc

SEQ ID NO: 876339 - DNA, 120 bp, Artificial Sequence
  ENSG00000265843_33 (sequence is synthesized)
atggcgaccccacgcatattatagaagcaacacgggaggaagttcatggcgactccacgcatattatagaaacaatacgggaggaagttcatggtgaccccacgcatataatacaagtaa

SEQ ID NO: 876340 - DNA, 120 bp, Artificial Sequence
  ENSG00000265843_34 (sequence is synthesized)
cacgggaggaagttcatggggaccaggggtaaggtcttcaggaagaagtgtgacttggtaggtggtgaagtgaatggcatacttttcaaagctagaggctcaaccaagaagaaaagataa

SEQ ID NO: 876341 - DNA, 120 bp, Artificial Sequence
  ENSG00000265845_0 (sequence is synthesized)
aaagttccatctcagagccctgctgtcatgctatgagagaggacatggaggagacaagtgaaatctcaggaggatgcttaccaggaatcaggaaactggaaaaacaatggcctgctggga

SEQ ID NO: 876342 - DNA, 120 bp, Artificial Sequence
  ENSG00000265845_1 (sequence is synthesized)
ctacaaaaggccacatctaaactactgaaatgcatgcaagtaattttcaaaggcctacagactctgctatgcttcagtagctgtcctatcaaaattaaccctgaagggtgtcacttctga

SEQ ID NO: 876343 - DNA, 120 bp, Artificial Sequence
  ENSG00000265845_2 (sequence is synthesized)
ggtgaggtcacaacataggaaagttgcttggtgtataattagtgtggggagcacaggggggtggattacaatgcacagacaaattctaatccatagcctgtaatttgagggttgggtcaa

SEQ ID NO: 876344 - DNA, 120 bp, Artificial Sequence
  ENSG00000265845_3 (sequence is synthesized)
tcataatttgggtgcaagcacacctacttccttttttaataagggagaatttagctcttgttacccacaagagttctcaaagtagaaaataataaaccatgttcttgaagccagtactga

SEQ ID NO: 876345 - DNA, 120 bp, Artificial Sequence
  ENSG00000265845_4 (sequence is synthesized)
tgccaagtctctggataccagtgacttatttgccctggggtgagagaaaactccattttccatcaagctggagaagcagcctttgtttttcagccatggataaggccacttattaggagg

SEQ ID NO: 876346 - DNA, 86 bp, Artificial Sequence
  ENSG00000265845_5 (sequence is synthesized)
ctttgtttttcagccatggataaggccacttattaggaggacaacaagaaggtggaccagtaagacaacatgacacgtaattgcag

SEQ ID NO: 876347 - DNA, 66 bp, Artificial Sequence
  ENSG00000265845_6 (sequence is synthesized)
cacaaagacaatacgacatacctagattctaattcaacacagaaaatgcaaaacaaataaataaat

SEQ ID NO: 876348 - DNA, 120 bp, Artificial Sequence
  ENSG00000265844_0 (sequence is synthesized)
attgcagctactgtgggtttctggcggcatctgtgctttgagccaattccagtcatttgtgaacaaatgtataaattgagcagggtttataaaagtgtcttggtcacccaggctggacta

SEQ ID NO: 876349 - DNA, 90 bp, Artificial Sequence
  ENSG00000265844_1 (sequence is synthesized)
cagggtttataaaagtgtcttggtcacccaggctggactacagtggtgcaatcatggctcactgaagcctcaaccccctgaactcaagca

SEQ ID NO: 876350 - DNA, 120 bp, Artificial Sequence
  ENSG00000265844_2 (sequence is synthesized)
gggcccacagctctggggacagtaaaacaggaaacatctgatgcagttgttctgaaggatcaccttggtgaagcccaatttctgcagatcctgtgtacaaaggtcaagaaacatgcccag

SEQ ID NO: 876351 - DNA, 120 bp, Artificial Sequence
  ENSG00000265844_3 (sequence is synthesized)
atctccgtatatacttattctgggtaattaatttcagcaagtgacatctggcaagtagatcaggtctccattgctttatagaaggcaactatttcacagctagagaggcctgcagtggat

SEQ ID NO: 876352 - DNA, 68 bp, Artificial Sequence
  ENSG00000268746_0 (sequence is synthesized)
tatactgtaatcacgcccggccaatatactgcattttgtaaaagcatttatttattattattttgttt

SEQ ID NO: 876353 - DNA, 85 bp, Artificial Sequence
  ENSG00000268743_0 (sequence is synthesized)
ccccaaagtactgggattacaggcgtgggccaccatacccagctggatggcatctgcattttaaacaaggcccctggtgactcca

SEQ ID NO: 876354 - DNA, 120 bp, Artificial Sequence
  ENSG00000268743_1 (sequence is synthesized)
cattttaaacaaggcccctggtgactccagcctcaggttgtctagttttttcaaatgctgcagcgggtgcagaggggcaggaggcgccagcacagggattcctcctgctttgcagccgtg

SEQ ID NO: 876355 - DNA, 120 bp, Artificial Sequence
  ENSG00000268743_2 (sequence is synthesized)
cagtgggactctggaagccacgccatattatccgggaggctccggtgctattgcctcttgttctgtgacactcttgggtgtaaaattgatacggacgtatttctaacagccacggcggtt

SEQ ID NO: 876356 - DNA, 120 bp, Artificial Sequence
  ENSG00000274238_0 (sequence is synthesized)
ctgctgagaagcagtgaatccaagcagaatctgagtatcatcactttttagttaaactaaccagtccaatatcctgatttttctttaacaggcaaagaatttttgagtctttcccataga

SEQ ID NO: 876357 - DNA, 120 bp, Artificial Sequence
  ENSG00000274238_1 (sequence is synthesized)
ctgagttcttgtgaactattttacagcaataatggcatccaatcctatagataacaataacaaagctgcagaccattttgttgccaggtttctcctccagggtggctttccagctagttt

SEQ ID NO: 876358 - DNA, 120 bp, Artificial Sequence
  ENSG00000274238_2 (sequence is synthesized)
cattaactaaaaaccaagtctaaagcacacatataataacatatgtgtgtgcaaactggcttgctttcaaattcctaaatcatacaattaaattttaaaaataactgtatttggaaacaa

SEQ ID NO: 876359 - DNA, 120 bp, Artificial Sequence
  ENSG00000274238_3 (sequence is synthesized)
gaaaaaagtcactttgacacccaactgatgtatataaaggagactgtgcatatgggttttaaaatgagatgaaaattgaaatttgatctttgagattaaaaacaatgttatgtaaatcta

SEQ ID NO: 876360 - DNA, 120 bp, Artificial Sequence
  ENSG00000268307_0 (sequence is synthesized)
ccagctcgctcctaggtgcttttgtggcttctgcactctaccagcttggagccaggggcctcattctctcttgcagtaaaatgaggctgatgactgagcctaggagttgctgggcatctg

SEQ ID NO: 876361 - DNA, 120 bp, Artificial Sequence
  ENSG00000268307_1 (sequence is synthesized)
cttgcccagcctcagccaatctcctctttctcttcttcagagctggagttgtgccctcctatcctctctctgcccaccccatcactgctgtacaccctgccccttggcacttcggccccg

SEQ ID NO: 876362 - DNA, 120 bp, Artificial Sequence
  ENSG00000268307_2 (sequence is synthesized)
gacttgctcctcctggcaggcctgggtgcttgtgaagccgggtgccagagggcccagcacggcacggcctttgattctgttttctgtaaatcgacgacaataaattctctttttccttca

SEQ ID NO: 876363 - DNA, 120 bp, Artificial Sequence
  ENSG00000272694_0 (sequence is synthesized)
aggcacagggttaccatggtgacagaggctggctgggaggggctggggcgccacgaacccagcctgctcctcaaccctctctcggccctccaggcatcacagtgcaccgctgcccttctg

SEQ ID NO: 876364 - DNA, 120 bp, Artificial Sequence
  ENSG00000272694_1 (sequence is synthesized)
cggtgggcaggggtctcggaggaccagagaagctggggccgggagcctgcacctgagacgtcctgggagctggcctgcccgccacacgccccactcttcccaggccacgtggaagacact

SEQ ID NO: 876365 - DNA, 120 bp, Artificial Sequence
  ENSG00000272694_2 (sequence is synthesized)
tgaagtgggctggtggaatgtcgccctgcctcggctcctttcccgtcaacaggaccctctcccttctcccgggtgccggcataggggtcaaaagccccccaggattctgaatcacagctg

SEQ ID NO: 876366 - DNA, 120 bp, Artificial Sequence
  ENSG00000272694_3 (sequence is synthesized)
gccccaagggaccacagcttcggaaagggatgtggggtgggcacagggcgggcaggggtccacaagagagctgcagggggttccgggacagcactgggctgggaagttgggggacttgag

SEQ ID NO: 876367 - DNA, 120 bp, Artificial Sequence
  ENSG00000272694_4 (sequence is synthesized)
gctaagctgctgtgtgaccctggggttgtcaactcccttctctgggcctcagtttccccccctctctaaagtggaaggagacattgcccgatgtctaatgctaaatctgcaggtgacttg

SEQ ID NO: 876368 - DNA, 120 bp, Artificial Sequence
  ENSG00000272694_5 (sequence is synthesized)
actcccagcttgggaagggaccctctccctgccctagaggggcttcagtccctctctactccagctttcttgacccccacacctgtttctagccccagaccccccagaccccacaccctc

SEQ ID NO: 876369 - DNA, 120 bp, Artificial Sequence
  ENSG00000272694_6 (sequence is synthesized)
tcttggcttccttcctccccccgccagccccccggccctgcacaccccagcagagtccctgggcagcacagtaaagacgactggtttcggtatcagtttgtaaactttaaggaaaatgtg

SEQ ID NO: 876370 - DNA, 120 bp, Artificial Sequence
  ENSG00000272695_0 (sequence is synthesized)
gggggcgggaccagcgcgcgggcggggcgcgggttcccgggaggatccgggcgcggggaaagcggagcgtccgggacgcggcgggactcgagtgtttcggaaaaggagcgtctccccagg

SEQ ID NO: 876371 - DNA, 120 bp, Artificial Sequence
  ENSG00000272695_1 (sequence is synthesized)
ggagcgtctccccaggcggtggttgtcttcactagcgatggggtaaaaggaggacgcaatacctggttcaacttgagcagacggagtctcgctatgttgcccaggctggggtgcagtggc

SEQ ID NO: 876372 - DNA, 120 bp, Artificial Sequence
  ENSG00000272695_2 (sequence is synthesized)
aaatgaatgtccctgggaatgatcttcaaggagaattaaagtgggatagagaagtcatctatctgcacctgtgtctgaaccagaatgacgaggcacttccatgtcagctagttactggag

SEQ ID NO: 876373 - DNA, 120 bp, Artificial Sequence
  ENSG00000272695_3 (sequence is synthesized)
caggcggagtaaggagtacccctgggcttctgccccgaaaccaccacggctacttcaaaacaatattacattaattttcctgcttgttcttgagaagcactggtttgaaaaattggatgg

SEQ ID NO: 876374 - DNA, 120 bp, Artificial Sequence
  ENSG00000272695_4 (sequence is synthesized)
ggtgatacatgttttaatcagtatttacaaggctccttaatcacttcatcagacaattcattgagcacctactatgtgccaggcagtgtaattcattgagcacctgctgtgtgccaggca

SEQ ID NO: 876375 - DNA, 120 bp, Artificial Sequence
  ENSG00000272695_5 (sequence is synthesized)
gtgtctgaggcacttctagctattatttcctaagggttccagcagcccatggataaacttcaaagagtgtaagctcctaaaaattgttcgtattttctgcacatttttgtagttttggag

SEQ ID NO: 876376 - DNA, 120 bp, Artificial Sequence
  ENSG00000272695_6 (sequence is synthesized)
aatctgcacctgggcgtggacctgctgcttcagatcagtaggtatcagaatgaactcagttggatggggcagttcaggacccctggcctccttttagtctggaccccactctcattcctc

SEQ ID NO: 876377 - DNA, 120 bp, Artificial Sequence
  ENSG00000272695_7 (sequence is synthesized)
atattctcaattcactctttctactgagttactatcctagtaatgacaatgcctcctatcatctagagacttggtttgatacaatgcattcacatacaactgctcgttttgatttctata

SEQ ID NO: 876378 - DNA, 120 bp, Artificial Sequence
  ENSG00000272695_8 (sequence is synthesized)
actggggaatacagaaagcaaatatgcggtgcaatggaggatgtctccattaccccagataactccaaaattcttcacctagttaccagtgcaggaaattcgttcgaaggcagaaatgga

SEQ ID NO: 876379 - DNA, 120 bp, Artificial Sequence
  ENSG00000272695_9 (sequence is synthesized)
aaatgaataagaaacaatttggatgtgttccaaaaatggagagttgtcaggcactatatcatacaacctgaaatatcaatggtgaagtagacagttcacctccacagggggcaggaggtt

SEQ ID NO: 876380 - DNA, 120 bp, Artificial Sequence
  ENSG00000272695_10 (sequence is synthesized)
ggacccagggcaatggatgttttatatggatggttaaccggtctgtggccatgaggtggaaagctgtgtacacctgtgaagccatcatcacaatcaagttagggaacatatccatcaccc

SEQ ID NO: 876381 - DNA, 120 bp, Artificial Sequence
  ENSG00000272695_11 (sequence is synthesized)
aaaaaagtgttctcatgccctttggtaattcctccctcctaaatgtccccaccctaccccacatcccagtttctatgcaaaaaccgctgaccaactttctatcactatagatttgtttgt

SEQ ID NO: 876382 - DNA, 120 bp, Artificial Sequence
  ENSG00000272695_12 (sequence is synthesized)
attttctagacttttatataaaaagaattatactgtatgtacacttttttgtctgtttttttcacttaacatatttattttcagaatcatctatcttgttgcaggtgtattcctttttat

SEQ ID NO: 876383 - DNA, 120 bp, Artificial Sequence
  ENSG00000272695_13 (sequence is synthesized)
tgctcagtagtattccactgtatggatataacacaatttgtttatcattcacctgttgagggacattatacttgcttctaaatttttactatcacaaataaagctgctgtaggcattcat

SEQ ID NO: 876384 - DNA, 89 bp, Artificial Sequence
  ENSG00000272696_0 (sequence is synthesized)
tactgattcctgtgggtgctgtgcagtcggcacagaggaagggcccaataaacggtggccactgtggtcacttcctgcctttctcccgg

SEQ ID NO: 876385 - DNA, 120 bp, Artificial Sequence
  ENSG00000272696_1 (sequence is synthesized)
aaacggtggccactgtggtcacttcctgcctttctcccggtctgtttctccctctggctgagggacagaataactctgcattcactcgtggggagacagaacagggagagggggcatgag

SEQ ID NO: 876386 - DNA, 120 bp, Artificial Sequence
  ENSG00000272696_2 (sequence is synthesized)
cagatggctcatgactagggctttgtgtgtccagacccagccacatgcaggccctggccattaggtccagagtcacgcgcctggctgccccatgatgcaatgatggttttccttctccgg

SEQ ID NO: 876387 - DNA, 120 bp, Artificial Sequence
  ENSG00000272696_3 (sequence is synthesized)
accaggggtattcactggccatgggacccagaacaagtcacctaaatcctactttcttcttccataaaatcatatagtatctacctaataaagttgttgtggtaaataaatgtgcataaa

SEQ ID NO: 876388 - DNA, 120 bp, Artificial Sequence
  ENSG00000272690_0 (sequence is synthesized)
aggatgagcgttaggagggcgaggcctgggcgccacccgtctggggcccgaaaggagggagctttccctctgtcctccagcctttggactgtctccaaacaagccattcgttcaccaaat

SEQ ID NO: 876389 - DNA, 120 bp, Artificial Sequence
  ENSG00000272690_1 (sequence is synthesized)
acttattaagcacctaccatgtgcctgacaagggagatgtaacggagacaaggaaaaccaatgggaacagctggggaaactgagttacagagcttttctgcactgagtcatcaggagcaa

SEQ ID NO: 876390 - DNA, 120 bp, Artificial Sequence
  ENSG00000272690_2 (sequence is synthesized)
aggagcaaatgctagatcagatagggtctctctctctgccacccaggccagagtgcagttgacgcagggcaggggagccccgaagtggagcatagtgtgtccggaactggtgggttcttg

SEQ ID NO: 876391 - DNA, 80 bp, Artificial Sequence
  ENSG00000272690_3 (sequence is synthesized)
tgcgcaccaccacgcccaggctgtgcttctcagtggctcccaccagatacctgatggtcctgtcgatttgctgaatcatc

SEQ ID NO: 876392 - DNA, 120 bp, Artificial Sequence
  ENSG00000272690_4 (sequence is synthesized)
caccagatacctgatggtcctgtcgatttgctgaatcatcaacttcctattctctgcctctggcctgaatcgatgtcccacgttatctggctctctgtaacacagagtcacaaagtcaaa

SEQ ID NO: 876393 - DNA, 88 bp, Artificial Sequence
  ENSG00000272690_5 (sequence is synthesized)
ccaggctggagtgcaatggtgtgatctcatctcgctgcaacctctgccttctggatttctgggattacagttgcacgccaccacacct

SEQ ID NO: 876394 - DNA, 85 bp, Artificial Sequence
  ENSG00000272690_6 (sequence is synthesized)
cgtcttatctgtaacctctgcaggtaatacattttccttcctgataaaagcatttctatggttgcttttacttgcaaatcctcta

SEQ ID NO: 876395 - DNA, 82 bp, Artificial Sequence
  ENSG00000272690_7 (sequence is synthesized)
tatctgtaacctctgcaggtaatacattttccttcctgataaaagcatttctatggttgcttttacttgcaaatcctctaat

SEQ ID NO: 876396 - DNA, 120 bp, Artificial Sequence
  ENSG00000272690_8 (sequence is synthesized)
caatcgactttgccttgaaatgtgacattgactagaaggatgaaacttctaacatgctgtagaacatagtttcactggctaacttattatttagaagaagctaatattgccattatgagg

SEQ ID NO: 876397 - DNA, 120 bp, Artificial Sequence
  ENSG00000272690_9 (sequence is synthesized)
gacttaggtggctctgaagaaccagttgtatttctgatgtttgcaatgttaaatcacagatattgccaatgtgaaataggttctgtatgctgtgttctcaatacacaccttttccaaaga

SEQ ID NO: 876398 - DNA, 120 bp, Artificial Sequence
  ENSG00000272690_10 (sequence is synthesized)
ggagggcgaggcctggggtagggccaggataagcgtcgttggggcaggtcctgggtagagtccaggttggcgggtcctggggcggagtcaggatagggcgatcctggaagctgggcttca

SEQ ID NO: 876399 - DNA, 120 bp, Artificial Sequence
  ENSG00000272690_11 (sequence is synthesized)
gaagcgtccagtacctccgccttcaggaaggtctttttagcaggggccttacaggtgcacgcttcggtcctggaggccttatcctaacctctccatcagcgccacccgtctggggcccga

SEQ ID NO: 876400 - DNA, 81 bp, Artificial Sequence
  ENSG00000272690_12 (sequence is synthesized)
gagtcacaaagtcaaagtcttccttggtgaaccagttcatgacagtatcgatgttcgcactccgctctgtctcgttgctgt

SEQ ID NO: 876401 - DNA, 120 bp, Artificial Sequence
  ENSG00000272690_13 (sequence is synthesized)
gagtcactgagcagaacgaagcgagttgcctgagattcttcaaagccccagcccttttggaggttacattgttattctcagagcctttatgatgcataataaagacctagcttgtaccaa

SEQ ID NO: 876402 - DNA, 120 bp, Artificial Sequence
  ENSG00000272690_14 (sequence is synthesized)
gacttggcttgcactgagagctgccctcccactctctctccaaatttcctcttcggagtagcctaacaaggtgctgtcacagacccttgtcagccacgatgaccccacccagaccatccc

SEQ ID NO: 876403 - DNA, 120 bp, Artificial Sequence
  ENSG00000272690_15 (sequence is synthesized)
ttgatactctctggagctctctggggaggggtgagacctgccgtcttctttgtacggtttgcccaggtcttacagtcatggctggctgcctctctctgagaactgggactcctgaacttg

SEQ ID NO: 876404 - DNA, 120 bp, Artificial Sequence
  ENSG00000272690_16 (sequence is synthesized)
gtgaaatacctcagccatcgatcatgttgaattattgggaacactcatttaaaatccgagcctgttccagatagactctctctctttctgccctgactgtgagagaagccctgctggatg

SEQ ID NO: 876405 - DNA, 120 bp, Artificial Sequence
  ENSG00000272690_17 (sequence is synthesized)
gtggagatgctcgtgggctgtgagcaagggatgcaaaggctgccgggaatcccatctttccagcatcatctgctaagtcacattagttcctgggtatctggatgggttctagcagcatta

SEQ ID NO: 876406 - DNA, 120 bp, Artificial Sequence
  ENSG00000272690_18 (sequence is synthesized)
ctgtcattgaaggaaaaatgatagccatattaaaggttaatgcagcaatctccacataggctgccttgaagggacgcaggacaagggtaggttttccttgtgatggacaggaggcaggcg

SEQ ID NO: 876407 - DNA, 120 bp, Artificial Sequence
  ENSG00000272690_19 (sequence is synthesized)
ccccaaaaggcactgggggccagctggagtgctatgccgaggcgggctgacctgggccgtgggttcgctgattgcagcggtttcctgccagctccttggagagctggcagatggcccagc

SEQ ID NO: 876408 - DNA, 120 bp, Artificial Sequence
  ENSG00000272690_20 (sequence is synthesized)
cccacagcaggagccgcgaatggcagagcgacatacaacaatttgatatccacttgccagaggagccgggtgtcatcagtcgcctggatctgtgcccaacttctttttgcataaacactt

SEQ ID NO: 876409 - DNA, 87 bp, Artificial Sequence
  ENSG00000272690_21 (sequence is synthesized)
aattgagcagaaggaaacaaagttctgcagataaacaccaatgagacaaaaaaacacaaataagaaaaatgacagaaaagagccacc

SEQ ID NO: 876410 - DNA, 87 bp, Artificial Sequence
  ENSG00000272690_22 (sequence is synthesized)
gacaaaaaaacacaaataagaaaaatgacagaaaagagccaccatagcaagagcatggaggccctgggttttgaactgtgagataag

SEQ ID NO: 876411 - DNA, 120 bp, Artificial Sequence
  ENSG00000272690_23 (sequence is synthesized)
gattcctgtgaaatccaggtctaagtgttttgactacagaagtaatattatgtcataggtgagagctgtgagttgctgaacccaaagtgagttcaaatccaagttctgcctcctgcaacc

SEQ ID NO: 876412 - DNA, 120 bp, Artificial Sequence
  ENSG00000272690_24 (sequence is synthesized)
tttgtgactttgagaagttccaacaccactttgtgcctcagttttctcatctgtcaaatgggcataatcacagctcttgcctcagagttgttgtaaattaatacatgtaaagcactgaaa

SEQ ID NO: 876413 - DNA, 120 bp, Artificial Sequence
  ENSG00000272690_25 (sequence is synthesized)
tcagcctggtatacactaagtgttatgaacgttattttcttggaaggacagaacttattttcatggtctaagccagaaaatctaaaaaatgtgagagaaggggaaagaatctagagtgtc

SEQ ID NO: 876414 - DNA, 120 bp, Artificial Sequence
  ENSG00000272690_26 (sequence is synthesized)
ggtcattgacaatttcctgtgattctacagctgccttgtaaactatggtagctcctagccacttgttgtttagattttgtgctttagaaatgaattaaggccggacatggtggctcatgc

SEQ ID NO: 876415 - DNA, 68 bp, Artificial Sequence
  ENSG00000272690_27 (sequence is synthesized)
gtagagagcattttgtctggtgtctttggctgacagaatttatgtcacaaggtgcacatatttggggg

SEQ ID NO: 876416 - DNA, 78 bp, Artificial Sequence
  ENSG00000272690_28 (sequence is synthesized)
tgctgttttgatcagctctctgcctgcaggagacaaggaaaaccaatgggaacagcccagtaaaggcttttctgcact

SEQ ID NO: 876417 - DNA, 120 bp, Artificial Sequence
  ENSG00000272690_29 (sequence is synthesized)
gggtagggccaggataagcgtcgttggggcaggtcctgggtagagtccaggttggcgggtcctggggcggagtcaggatagggcgatcctggaagctgggcttcagaagcgtccaggggc

SEQ ID NO: 876418 - DNA, 120 bp, Artificial Sequence
  ENSG00000272690_30 (sequence is synthesized)
gtcgttggggcaggtcctgggtagagtccaggttggcgggtcctggggcggagtcaggatagggcgatcctggaagctgggcttcagaagcgtccagctggggaaactgagttacagagc

SEQ ID NO: 876419 - DNA, 120 bp, Artificial Sequence
  ENSG00000272690_31 (sequence is synthesized)
ggtgatccagagagagagagagaacacgattgtctcagcaatgggtcttcttctgagtcttgaaggagcacttccagagcctctcagtgttaaacatcgtgttgtgaatgactccgtgag

SEQ ID NO: 876420 - DNA, 120 bp, Artificial Sequence
  ENSG00000272690_32 (sequence is synthesized)
aggggaggtacggataagctcttcgaatggatgttgccggggtgtcagtgttctttgagggcacagactatgtgtcactaaagaaagagcccagtgccttttctcattgctcaagagatt

SEQ ID NO: 876421 - DNA, 120 bp, Artificial Sequence
  ENSG00000272690_33 (sequence is synthesized)
gaaggggtagtaagaaaagatgttaagttataaacacgtttcagttttggtaccagttgaaccaatttacgttttgaagaggaaagagtcttgcctacaatgtcagcccccgggttttcc

SEQ ID NO: 876422 - DNA, 120 bp, Artificial Sequence
  ENSG00000272690_34 (sequence is synthesized)
ttctgcttatggaatccaggcaatgggcaaagagaaaaagaaaactaaggaatcagccaggtgcagtggctcatgcttgtgatcttggcactttgggaagctgaggcaggtggacttctt

SEQ ID NO: 876423 - DNA, 90 bp, Artificial Sequence
  ENSG00000272690_35 (sequence is synthesized)
gacttcttgagtgcagcgaccccgtttctacaaaaaatacaaaaagttgctgagcatggtgacatgcacctgtagtcccagttacttggg

SEQ ID NO: 876424 - DNA, 120 bp, Artificial Sequence
  ENSG00000272690_36 (sequence is synthesized)
gtgggagaactacttcatcccaggaggctgaggctgcagcgagccatgatcgtgccactatactcctgcctgggtggcagagtgaggccctgtctcaaaagaaaacaaaaaagataaaaa

SEQ ID NO: 876425 - DNA, 120 bp, Artificial Sequence
  ENSG00000272690_37 (sequence is synthesized)
gtgaaccagttcatgacagtatcgatgttcgcactccgctctgtctcgttgctgtttgggtgagtgtaggactccaccagggactgcttgacagcctcaccctcgtatttagcacctccc

SEQ ID NO: 876426 - DNA, 120 bp, Artificial Sequence
  ENSG00000272690_38 (sequence is synthesized)
ctggaatagtgggatgatgctgctttgttgccctgcaagtacaagaagaaaattccgtcagggccatttatcatacctttctcacaatcagcaaagctcgagttgtctacatctgtgccc

SEQ ID NO: 876427 - DNA, 120 bp, Artificial Sequence
  ENSG00000272690_39 (sequence is synthesized)
cagtccaaagacatagaaaatatgtggtctttggagtcagacagggtggagttagattctgggcttccccaggatctcatagcatctacaacactgttagttacaagatgtgctattatt

SEQ ID NO: 876428 - DNA, 120 bp, Artificial Sequence
  ENSG00000272690_40 (sequence is synthesized)
ttatgggctactaagcagaaaaatgctgccaacgagaccgtgacttaccagtgattgtaaggtgtattccaacttcagagatggcaaaatgaaaaataattccttagaatagagggagac

SEQ ID NO: 876429 - DNA, 120 bp, Artificial Sequence
  ENSG00000272690_41 (sequence is synthesized)
ggatccggagcttcgggcggggccgagtctgggtttggggcccgggaggcggggccagttagggcgagggtccctgggatcgtcgggtcaggccttgggctaacgtagacactctcgcag

SEQ ID NO: 876430 - DNA, 120 bp, Artificial Sequence
  ENSG00000272690_42 (sequence is synthesized)
gtgtctgagatgttgcatacaccctctcagtccctctatcctgagatggagtcacctgaggatccacagcaagtcctaaccagggatgggtctgggtgattaaggaaggttggcttcaga

SEQ ID NO: 876431 - DNA, 120 bp, Artificial Sequence
  ENSG00000272690_43 (sequence is synthesized)
tgacagtatcgatgttcgcactccgctctgtctcgttgctgtttggagatgaggtctcgctaatttgcccaggctggtcctgaactcctgggttcaactaattctcctgcctcagcctct

SEQ ID NO: 876432 - DNA, 76 bp, Artificial Sequence
  ENSG00000272690_44 (sequence is synthesized)
aggtgtatccagcagctcaagagagacatcgaccagcgagaaggggccatgatgatggtggtggttttgtgaaaac

SEQ ID NO: 876433 - DNA, 120 bp, Artificial Sequence
  ENSG00000272690_45 (sequence is synthesized)
gggggagtcactgagcagaacgaagcgagttgcctgagattcttcaaagccccagcccttttggaggttacattgttattctcagagcctttatgatgcataataaagacctagcttgta

SEQ ID NO: 876434 - DNA, 88 bp, Artificial Sequence
  ENSG00000272690_46 (sequence is synthesized)
tgaacctgggagatggaggttgcagtgagacaaagttgtgccactgcactccagcctggggaatttaggtaaaataagagaaaattga

SEQ ID NO: 876435 - DNA, 120 bp, Artificial Sequence
  ENSG00000272690_47 (sequence is synthesized)
ttaggtaaaataagagaaaattgaaaattcagctcttcattctcaccagccacatttcaagggctcaacagcccatgtgggtggctagcagctcccatattggacagtgcagagtagagc

SEQ ID NO: 876436 - DNA, 120 bp, Artificial Sequence
  ENSG00000272690_48 (sequence is synthesized)
aagtctgccattgcagaatgtttgattggaccatgaccgaatagtctaatgcagtggtccccaattttttttagcaccaaggaccagtttccatggatttttggggggaagtttccggat

SEQ ID NO: 876437 - DNA, 73 bp, Artificial Sequence
  ENSG00000272690_49 (sequence is synthesized)
tacgaaagtgcctccgcagagacagaaaacccgtaatcgagcatcatcgactcgcagggtgaacaaaatggtg

SEQ ID NO: 876438 - DNA, 120 bp, Artificial Sequence
  ENSG00000272690_50 (sequence is synthesized)
ggtgatatcagaagaacagatgaagttaccatccaccaaggaaacggcacatgtggagagccagggagaggaagagaaagaaaaagagacagagatcagagagagacacagaaagtgtat

SEQ ID NO: 876439 - DNA, 120 bp, Artificial Sequence
  ENSG00000272691_0 (sequence is synthesized)
atttccagatggtgaatcagacaccagacgtaacaatatttccatatttgggtatagcagtagcctgcgtttttaacatttttctgcctctgttatccaaccacaaagcattcttgacag

SEQ ID NO: 876440 - DNA, 120 bp, Artificial Sequence
  ENSG00000272691_1 (sequence is synthesized)
caaatgttgttaaatatagatttaacttctcttcccagagcaggaaattctttggaattccttgtttttcacgcaatctgtccatcatgatttaaaataaaagcacagtggatcatccaa

SEQ ID NO: 876441 - DNA, 120 bp, Artificial Sequence
  ENSG00000272692_0 (sequence is synthesized)
ggcaccacggagcctgcgcaagctgcggggccgtaaaggaaccggcccccaatctccggggcttcagtcccgcccctctctccccccagtgccctgcagcgctcccagggtccgtgtctg

SEQ ID NO: 876442 - DNA, 120 bp, Artificial Sequence
  ENSG00000272692_1 (sequence is synthesized)
ccctccccaagcccccactgtcaatacaatccctgttaaaaaaaaaaaatctttttagagccaggcacgtgccgtcggcctctcccctgcccgcctggcccaggaggcgcccacacctgc

SEQ ID NO: 876443 - DNA, 120 bp, Artificial Sequence
  ENSG00000272692_2 (sequence is synthesized)
gccctcacttgccgagacttttacctgtgcagtccccggcggcgcctgcagccgcgcaggtgccatttaaaaattttgtatgaattatgtcctcgcccacagcgactctctgagatctgg

SEQ ID NO: 876444 - DNA, 120 bp, Artificial Sequence
  ENSG00000272692_3 (sequence is synthesized)
ggcatgccaactccttactctgggggagtattggagggagaattctacttttctgatgggggagtaccagcctgttaaccacaaccatttgcagctgaagccagtgcagagcaggaggga

SEQ ID NO: 876445 - DNA, 120 bp, Artificial Sequence
  ENSG00000272692_4 (sequence is synthesized)
gatctgcacagaggagaacagtataaatggcatggggtcatctcagcccctggccagctcccagcctaatgggaaaaccggaccattgagcattccttgctgtttccctgtagtcccagc

SEQ ID NO: 876446 - DNA, 120 bp, Artificial Sequence
  ENSG00000272692_5 (sequence is synthesized)
ccaagccagcatgctctttttttaaaaagcaaatccaaccatgtttctcttctgcttaaaggcatccgggttcccattgttcttgagaacaagttgagcttgcctcccctggctggcggg

SEQ ID NO: 876447 - DNA, 120 bp, Artificial Sequence
  ENSG00000272692_6 (sequence is synthesized)
tctacactggctctgccccagcttgcctttctgcctttgtctgcctccacaccccctcacctggaactcctgctacccaaggcttccttttagttcctcaaatgtgccatgctactcccc

SEQ ID NO: 876448 - DNA, 120 bp, Artificial Sequence
  ENSG00000272692_7 (sequence is synthesized)
actttcctgcatcctcccgcctcccattaccctcacttataatagaatttcctgttgagagtctgtccgcttcactggatggtaaactcccagggggtagggactagggccgttccttca

SEQ ID NO: 876449 - DNA, 120 bp, Artificial Sequence
  ENSG00000272692_8 (sequence is synthesized)
aggaacaaatgaagaaggaacatttgtataaaccaccaactatgatgaacgaatgaaactgccctttttggggccaccagtaagtattctccatggtctcacattccaagatgttctcaa

SEQ ID NO: 876450 - DNA, 120 bp, Artificial Sequence
  ENSG00000272692_9 (sequence is synthesized)
cttaatgagggcgatgatacaaatctcatgaaaacatatgttattttgaatgcctttattgtaaatgtcaaataaggggatgctggaggaggttggagaagaggaatatgcatggattac

SEQ ID NO: 876451 - DNA, 120 bp, Artificial Sequence
  ENSG00000272692_10 (sequence is synthesized)
agccatttattcagggtttcaagatgcaagatgtgttggttgacacaatttaatggaaaaccatgccacccacgaccatctcccagtgttgggcatgtatgtctcaaggctctagcctgc

SEQ ID NO: 876452 - DNA, 120 bp, Artificial Sequence
  ENSG00000272692_11 (sequence is synthesized)
accccctttcctcttcctttcttcacatattattgctatcacagttcagttcttactagtttctgacttaactgctgctacaagaaccttctaattgttctgcccatcctccacctctcc

SEQ ID NO: 876453 - DNA, 120 bp, Artificial Sequence
  ENSG00000272692_12 (sequence is synthesized)
tgcctctaatccatcatacatactcctgctgggttaattttcctgaccacatcattcccttactcaaaactcttcagtggctccctatgatacagtgtaacacttgactcttcatagccc

SEQ ID NO: 876454 - DNA, 120 bp, Artificial Sequence
  ENSG00000272692_13 (sequence is synthesized)
acttccaaactacttttgtaaagctttaagatgcattccaaaattatgaaagaaacacatgttcacctcaaccaggaaaacactcaaagatatacaaagaaaaacatcagtgatcttcct

SEQ ID NO: 876455 - DNA, 120 bp, Artificial Sequence
  ENSG00000272692_14 (sequence is synthesized)
cacctcctctgcatttcccacccagtctcccaagacatccattgttaaggacctggggtataacttctacctctttcaccatgctccatgctcataataaactatattcatatatgtgga

SEQ ID NO: 876456 - DNA, 120 bp, Artificial Sequence
  ENSG00000287885_0 (sequence is synthesized)
ggagaagctggaactttaccaggcttttcccacttgccttgggattttctgcccatcttcccaggaacacccggcaggccccatgaatggaccttgggccaaaatgatgtttaagaaggg

SEQ ID NO: 876457 - DNA, 120 bp, Artificial Sequence
  ENSG00000287885_1 (sequence is synthesized)
gacggaccatttagatgacaaatgggcttcagggcgctgtcagaacttccaggcggcggggactattaacggtcacatggaggccgccgcatctgtgatggcagagcggatgctgaaatt

SEQ ID NO: 876458 - DNA, 120 bp, Artificial Sequence
  ENSG00000287885_2 (sequence is synthesized)
ggtcacacagcctcgagtcccaaggcccggacagatgtgttctatacacttgtttaaacacggcgctcattaggagctgcttcctctgggctttgtggttgcccatttgccgccttctca

SEQ ID NO: 876459 - DNA, 120 bp, Artificial Sequence
  ENSG00000287885_3 (sequence is synthesized)
tccgatcgcgttacccttaataaccatcgccctggcaggagaggggtgccgaattccgtctcctgcgtgcctgcgtgtgtaatgtgccgagcaagtgatcctaatgatgcattcagcaca

SEQ ID NO: 876460 - DNA, 120 bp, Artificial Sequence
  ENSG00000287885_4 (sequence is synthesized)
acaccgtttgaaaaaaacagaagagggaggtgaaattccccaagctttcatttcccttcatggttgaacttcgatgactcaagtcatttgcagtcaatctatttcgctgacttgtcctgc

SEQ ID NO: 876461 - DNA, 120 bp, Artificial Sequence
  ENSG00000287885_5 (sequence is synthesized)
tgactgccaggaggtcaacatttctgactttgcccctccaggggcagcatgtggtcccagctggttgtgctgtgctgtggtgggaatgggggctgggggaggtggctgtgtcatctggaa

SEQ ID NO: 876462 - DNA, 120 bp, Artificial Sequence
  ENSG00000287885_6 (sequence is synthesized)
gctacgttgggggctctcttcttttgcactggagcttcacattctgcaaagatgatacttccaggatagtgcttttgtttgctgtttgtgttgggtgggattagctctgattacatatta

SEQ ID NO: 876463 - DNA, 120 bp, Artificial Sequence
  ENSG00000287885_7 (sequence is synthesized)
ataacctagagcactatctagtaattagatgttatcttccagatgtttaaaagaaacctttaatattttaagctgcttggagttctcttggcactttattaaaatggatggaatttaaaa

SEQ ID NO: 876464 - DNA, 120 bp, Artificial Sequence
  ENSG00000272699_0 (sequence is synthesized)
cacaatcataggaggcaatgtaataatagacaaatctagattaatattccaacttggctacctaccaggtgagcgatgttgggcactaaagattcttaaatattttgagcctcagattcc

SEQ ID NO: 876465 - DNA, 120 bp, Artificial Sequence
  ENSG00000272699_1 (sequence is synthesized)
atttcaaagtggtgattaagactgaattaaataacatatgcaaagtacacagcccattgttcagaacacagcaagtattcaacaaatactggctctggttctccatatgtcatgttgaaa

SEQ ID NO: 876466 - DNA, 120 bp, Artificial Sequence
  ENSG00000272699_2 (sequence is synthesized)
aatatttatagaatatatatgtgtgtgtgtgtggctgttgtagaacgaatggcaaggagataaaaggtccacaatccttatagggttataaggacccctcgggacagttctttttcagaa

SEQ ID NO: 876467 - DNA, 120 bp, Artificial Sequence
  ENSG00000272699_3 (sequence is synthesized)
ttcagaatttttcagattttagaaaggtaatatactgtgtatttggtaaaacccaaatatggtgcaatttacaatatactctcaagtcaacattattaaataacactattcaaatcctca

SEQ ID NO: 876468 - DNA, 71 bp, Artificial Sequence
  ENSG00000287884_0 (sequence is synthesized)
atccccggctggaacaagatgctggtgaaagcgctagggctagagaccaaggctctgctggttttatgatt

SEQ ID NO: 876469 - DNA, 120 bp, Artificial Sequence
  ENSG00000287884_1 (sequence is synthesized)
cgctagggctagagaccaaggctctgctggttttatgattgtttttttggggggtaggagggttgacttcatgtttgaattttcaccaggtaaagaatgacagtgcggggtgcatcatgg

SEQ ID NO: 876470 - DNA, 120 bp, Artificial Sequence
  ENSG00000287884_2 (sequence is synthesized)
cacacagcagaaacacactgagatggtttgtaactgagggctcactgtcctttcctaaccttttaggtctaaacaagctacggcaaacgtgtctgtcaggagcacgggagggcagatgtg

SEQ ID NO: 876471 - DNA, 120 bp, Artificial Sequence
  ENSG00000287884_3 (sequence is synthesized)
gtttccctggcgtagaggtctgggtgtggttacttgtggcatcggggcctggggaggagagcggttcccacccagccccaagacccaggctcctgcccgcgtcccgacgtgttccttctg

SEQ ID NO: 876472 - DNA, 120 bp, Artificial Sequence
  ENSG00000287884_4 (sequence is synthesized)
atgcaatgtcacttggggtcacctcctcgccatgcagctgctgtctaggagatgcatggtgtgtgctgggggctgagcagggtgctgggaaatctggtgtgcccacctcacaggccgggg

SEQ ID NO: 876473 - DNA, 120 bp, Artificial Sequence
  ENSG00000287884_5 (sequence is synthesized)
gtccctgggggcactgcagcagcctggagggtctgtgcccctggagagtggcagctgcagctggctccacttgagaccacatttgaaacgtgagcactcgggctggcccattttcccaca

SEQ ID NO: 876474 - DNA, 120 bp, Artificial Sequence
  ENSG00000287884_6 (sequence is synthesized)
gggggcaaaatgagcatttacatgaaatcccaatgccagatggcggtggctgagccagccagacagaaagtgaaacaccaatgagccgaagacagctcccctttgagacgcttagccagt

SEQ ID NO: 876475 - DNA, 120 bp, Artificial Sequence
  ENSG00000287884_7 (sequence is synthesized)
atcatactcagctccgtggcagcctacagcatcacctgtccctggctcattcgcccttcagctcctgcagtcccggatgcctcgctccctggggtctctgtcccctgtgttgggggacgc

SEQ ID NO: 876476 - DNA, 120 bp, Artificial Sequence
  ENSG00000287884_8 (sequence is synthesized)
cttggctgctgtgtgggctctgcccccagagggcaccggaccacatctagggacatctgtggttgtcacaactggaggtgctcctggcatggagtgggtggaggccagggatgccacttg

SEQ ID NO: 876477 - DNA, 120 bp, Artificial Sequence
  ENSG00000287884_9 (sequence is synthesized)
gtgcacaggatggccccgccccagagaaccacccggccctggcgtccatggtgtccctgctctaactttgaagagcctgggccgggctcccggaccaccccacctctctatccagaagtg

SEQ ID NO: 876478 - DNA, 120 bp, Artificial Sequence
  ENSG00000287884_10 (sequence is synthesized)
acccttgggagctctgtcccatcccgaggctgacactgtcagtgtgcaaggacacctgcaatcccaccaggagtctcggttccctgagctccaggcacgggaactggcccatacagcatc

SEQ ID NO: 876479 - DNA, 120 bp, Artificial Sequence
  ENSG00000287884_11 (sequence is synthesized)
tccactaccgggcacctcaacttgaacacatccaaacccgactctggattttttctctcctagaacagtccctctctgagtctgtcttagactggacctgcggagccctccgggcatcca

SEQ ID NO: 876480 - DNA, 120 bp, Artificial Sequence
  ENSG00000287884_12 (sequence is synthesized)
tgccgcctccctcctctctgatcccccaccctttccactgcaaacggtgtgggctcagctgtccaagcacatccagaatcagacccaccaggacagctcagccactgccatgacagcaag

SEQ ID NO: 876481 - DNA, 120 bp, Artificial Sequence
  ENSG00000287884_13 (sequence is synthesized)
cctgtcgcctctcccggcccctgggcctgtgtgcaagctgcaaccagaggagtcatctgaaactgagtgaacaattccatcacagctacctacagcaggagctggcaaatgtttctacaa

SEQ ID NO: 876482 - DNA, 120 bp, Artificial Sequence
  ENSG00000287884_14 (sequence is synthesized)
agggctagacagtaaatcttggccttgcacaacagtttctgctgggactacccagttctgctgctgcagcacaaaagcgaccacagacagtctctgtaaacaagtggctgtggctcagtg

SEQ ID NO: 876483 - DNA, 120 bp, Artificial Sequence
  ENSG00000263394_0 (sequence is synthesized)
ggaccttgattgagtcctgtaccgtgcctcagtttccccacttataaaaagaggttactaaaaaggatgcttcactcaagggtgtgaagacccagtgaatgaagtgttaataagagctcc

SEQ ID NO: 876484 - DNA, 120 bp, Artificial Sequence
  ENSG00000263394_1 (sequence is synthesized)
acgtatagcgatgctgctgttcagctgcaccagggtggactcccttgacttgctgggagttacaatgaggaaggaaggaccgttaaacctgtaggtctttccagagaaagtgcgtttcct

SEQ ID NO: 876485 - DNA, 120 bp, Artificial Sequence
  ENSG00000263394_2 (sequence is synthesized)
aaaaccaaatcctgcccttgctccaaaactgtcagtggtggtttcccatgaccacgccacagtcccagggtctcccctggccttcaaggctggcacagtctgaccctgccaacgtcccta

SEQ ID NO: 876486 - DNA, 120 bp, Artificial Sequence
  ENSG00000263394_3 (sequence is synthesized)
tggtctgcacatgctgttctctttgccaagaatgccatttccccagccccctggtcccgatggggaacacctcctcatccttcaaagccaagctggaagggaacatctttggagatgccg

SEQ ID NO: 876487 - DNA, 120 bp, Artificial Sequence
  ENSG00000263394_4 (sequence is synthesized)
cttgacctcccaggcagaaggggtcattctccctggagatgtggtcacgtcattaaccacactgggttagaatcatcagaagctgttcctgcctcttccgtcaagcaaggggctctggag

SEQ ID NO: 876488 - DNA, 120 bp, Artificial Sequence
  ENSG00000263394_5 (sequence is synthesized)
gccagaaaatgcctatgaatcatgcccacacccccagagcccagcatggggcgggctcaggttaggtcaatcgtgtttgaagactgaataaatgaatgtcttcatttgctaccctcagaa

SEQ ID NO: 876489 - DNA, 120 bp, Artificial Sequence
  ENSG00000271344_0 (sequence is synthesized)
caactccaaaacccccttctacacataacaccatgctctcctaatggtaggaggagacaaaaatggcagccgcagttcagttttcagttggtggaatgatttttgtgcacctggtgaaat

SEQ ID NO: 876490 - DNA, 120 bp, Artificial Sequence
  ENSG00000271344_1 (sequence is synthesized)
cactttcacccttaggtattaaaatctccaaacttcatacatgcaattaaaaattattttttatttttaaaaaatctttttccacatgttctatgcaatttttcatacaactcttcctta

SEQ ID NO: 876491 - DNA, 120 bp, Artificial Sequence
  ENSG00000271344_2 (sequence is synthesized)
agaaactcctagaggatgtacgcaattaaaatgaagtcaactcagaaaaacacggctccaggaaagtggtgggttcaatgtaggaaaaaagtgaaggcaatatccaggtgaagagagatg

SEQ ID NO: 876492 - DNA, 120 bp, Artificial Sequence
  ENSG00000271344_3 (sequence is synthesized)
aagagagagtccagaatgacaggagaacagcagccccagaaagcagtcagctcttactggagcaggagagaggactctgctaaatacatctccgcaaagatcaaattgatggaatacctg

SEQ ID NO: 876493 - DNA, 120 bp, Artificial Sequence
  ENSG00000271344_4 (sequence is synthesized)
atgtgtttgaatgcactgagagacttacgcttatggcaaagtttaggggtgtgttaggaataggactattaagccaagcaaacaaaaaataatataaatattaactctgagaggaagaag

SEQ ID NO: 876494 - DNA, 120 bp, Artificial Sequence
  ENSG00000271344_5 (sequence is synthesized)
tcgaatatagattgaatcaaagcagaggatggttgaagctcaatttgggggatgggggaaaggggaagggaaaaaaggtgaagattaaacccttcccttccatggctggaagttctgtgc

SEQ ID NO: 876495 - DNA, 120 bp, Artificial Sequence
  ENSG00000271344_6 (sequence is synthesized)
cccagaattcccttggttcctgcatgttctccaagctgatctacatctaagagctcatcacgtctggtttccaggtgggtttggccagtgggaaacccaggcaggagatcagagaggatg

SEQ ID NO: 876496 - DNA, 120 bp, Artificial Sequence
  ENSG00000271344_7 (sequence is synthesized)
tcagagaggatgaggagaatggggtcaggacaactatttcctcccttgtggtgacataaggtaggctgttaacagagggaaactgtcagaagtatttgaaccagagcaactccatcttga

SEQ ID NO: 876497 - DNA, 89 bp, Artificial Sequence
  ENSG00000271344_8 (sequence is synthesized)
taaaataaggctgagacctactgggctccattcctaggaggctaggcattcttagtcaaaggatgagataaaccactggccaagaccca

SEQ ID NO: 876498 - DNA, 120 bp, Artificial Sequence
  ENSG00000271344_9 (sequence is synthesized)
ccaacactaagatggtgataaaagggacctctggtcgtccccactgctcattatatgctcattataatgcattagcatgcgaaagggctgctattctctaataaacttgctttcacttta

SEQ ID NO: 876499 - DNA, 120 bp, Artificial Sequence
  ENSG00000244479_0 (sequence is synthesized)
attctagcaccccaacgcctacctcagcccccaactctaaataacttctttccaccttgctaagaatgcaacgttgtgattcacatcaagctttaggaggctccccatatgtagggaact

SEQ ID NO: 876500 - DNA, 120 bp, Artificial Sequence
  ENSG00000244479_1 (sequence is synthesized)
ggggtgaggggcagggcaggattcactgttccaggttacggagctttggttaacacggagagaagctacacatagactcacacagtatgcaaatacctatggagatacataaggaaaggc

SEQ ID NO: 876501 - DNA, 120 bp, Artificial Sequence
  ENSG00000244479_2 (sequence is synthesized)
tctctgctttcaagaagctctcaatctgattgaggagagaaacaggtagcaaataatggcagcagagcatggtcattcaacatttattcaaccaaaaatactaagtcagctctatacaaa

SEQ ID NO: 876502 - DNA, 120 bp, Artificial Sequence
  ENSG00000244479_3 (sequence is synthesized)
ctaatggaaggatacagctatgcaaatatagaacactaaagtgttacatgacagatgtatgagcagaactgggaagaaaggaccctgaaaagttagctggttccaagtgaccctccaagg

SEQ ID NO: 876503 - DNA, 120 bp, Artificial Sequence
  ENSG00000244479_4 (sequence is synthesized)
gaggagggcacccacctggtcggtgtcacatgctgcttcggccccagcgtcccctccaggtcccggcgccggccgcagtccccagagccgtccccagcgcaggcccggccgccccacccg

SEQ ID NO: 876504 - DNA, 120 bp, Artificial Sequence
  ENSG00000244479_5 (sequence is synthesized)
ttccctagaagctactacctctccctggagggtggagatatttgctggtcaaagatattaaagtaattgtgaaataaaagaaaaaattgtctgataaaaccacatctcatagaaacccaa

SEQ ID NO: 876505 - DNA, 120 bp, Artificial Sequence
  ENSG00000244479_6 (sequence is synthesized)
ccgtgctgactgttttttgaagataaaatgatcaagtcagatttgaagaattgactgttggaggtcattcaacatttattcaaccaaaaatactaagtcagctctatacaaactaatgga

SEQ ID NO: 876506 - DNA, 120 bp, Artificial Sequence
  ENSG00000244479_7 (sequence is synthesized)
ggtcattcaacatttattcaaccaaaaatactaagtcagctctatacaaactaatggaaggatacagctatgcaaatatagaacactaaagtgttacatgacagatgtatgagaagtacc

SEQ ID NO: 876507 - DNA, 120 bp, Artificial Sequence
  ENSG00000244479_8 (sequence is synthesized)
ccctggagggtggagatatttgctggtcaaagcaagaaggccctctgcagatgctgacaccttgatattggacttcccagattccagaactctgagaaataaatttctattttaaataaa

SEQ ID NO: 876508 - DNA, 80 bp, Artificial Sequence
  ENSG00000244479_9 (sequence is synthesized)
gagccccgagggcgcggtgcgcgggcgcaggtcgggcgcaggcggggtgacccggggaaggggcgcgcacagagacagag

SEQ ID NO: 876509 - DNA, 120 bp, Artificial Sequence
  ENSG00000244479_10 (sequence is synthesized)
ggagccagccgggccccacggtgtcctcggacgcctccgaaatctccctgcgtgtttgtttcttcggagcttcaccggagcctgactctggaaccggcctgtctgcctgctgcagtctgg

SEQ ID NO: 876510 - DNA, 120 bp, Artificial Sequence
  ENSG00000244479_11 (sequence is synthesized)
acgttgtgttctgttagtcttggaggccaaggctgagtgggtttatctctgtgcccctccagtgacttcaaagaatgccaaaagtctctcgagtgtgcctgtgtgcacacacagacacac

SEQ ID NO: 876511 - DNA, 120 bp, Artificial Sequence
  ENSG00000244479_12 (sequence is synthesized)
gccacacaccccgagccctgcctgcgggcccagcccccccatttccggagcctgcgccccggacccagcgggggctgatccctgggaaaggcctggcttcctcttccttcctgtccctgc

SEQ ID NO: 876512 - DNA, 120 bp, Artificial Sequence
  ENSG00000244479_13 (sequence is synthesized)
cactaaagtgttacatgacagatgtatgagtcttggatatgtctttatcagcagtatgaaaactgactaatacagtaaattggtaccagtggagtggggcgctgctgaaaagatacctga

SEQ ID NO: 876513 - DNA, 120 bp, Artificial Sequence
  ENSG00000244479_14 (sequence is synthesized)
gacttgggggccatgtacatgatgatggcactgccaaagaagagtcccaccacgcagaggtgggaggagcaggtggagaaggcctttctgcggccctccccagactggatcctcaggatg

SEQ ID NO: 876514 - DNA, 120 bp, Artificial Sequence
  ENSG00000244479_15 (sequence is synthesized)
gccgccaggatgtgcgagtaggagacaagcaccaggctgggtggccccaccaggaagaacacgcaggctgcaaagatgaccacctggttgagccaggtgtcagcacaggccagcctgagg

SEQ ID NO: 876515 - DNA, 120 bp, Artificial Sequence
  ENSG00000244479_16 (sequence is synthesized)
caggtcattcaacatttattcaaccaaaaatactaagtcagctctatacaaactaatggaaggatacagctatgcaaatatagaacactaaagtgttacatgacagatgtatgagatatt

SEQ ID NO: 876516 - DNA, 120 bp, Artificial Sequence
  ENSG00000244479_17 (sequence is synthesized)
aaagaaaaaattgtctgataaaaccacatctcatagaaacccaatgaatgcaacacatctaaaattttatctgcaaaaaacgagagaagacttgcccttctgtcagtaaagcacagataa

SEQ ID NO: 876517 - DNA, 120 bp, Artificial Sequence
  ENSG00000244479_18 (sequence is synthesized)
tatgaggggaagagtgctggattcagagcccacctcaggggaagacaggaccctctccaagatggtttccctagaagctactacctctccctggagggtggagatatttgctggtcaaag

SEQ ID NO: 876518 - DNA, 120 bp, Artificial Sequence
  ENSG00000236711_0 (sequence is synthesized)
agacaaattgagatggctagtatggatgactcttctgagggtttttgccagaaatgggataaaaacatagggcagtagctggtggggggtggagaagtatcttgaaggtagaaaggccaa

SEQ ID NO: 876519 - DNA, 120 bp, Artificial Sequence
  ENSG00000236711_1 (sequence is synthesized)
gtatgtggatgcaggtcctgtggaaacttatttctgatgtattcatttttctcattaaaatacaaaataaatatcagttgcaggtatggacagggaaaaaggggttgcaggttttagtgg

SEQ ID NO: 876520 - DNA, 120 bp, Artificial Sequence
  ENSG00000236711_2 (sequence is synthesized)
gacatgagagaagggactggggggtgggttgtgactgccggggacatcacaggtccacttgaggttctcagtcatgaaagtaaaatgtgatcaggcagcatggttgtgttgaaatccaag

SEQ ID NO: 876521 - DNA, 120 bp, Artificial Sequence
  ENSG00000236711_3 (sequence is synthesized)
ttttaaaaaactctacagagaatcactgctcccagtcacagaactgatttacttggctgtgatctcccttcatttttaaatatcctttcattgatatataacatatagagaaaaatatgc

SEQ ID NO: 876522 - DNA, 120 bp, Artificial Sequence
  ENSG00000236714_0 (sequence is synthesized)
ggcagaatctgggctcagagtctagccctgcaggacccagtgtggcagctgcgtgtctctggagcactggagagggggctactgcaaattaagatctgctgtaaagagcatcttcctggt

SEQ ID NO: 876523 - DNA, 120 bp, Artificial Sequence
  ENSG00000236714_1 (sequence is synthesized)
tattctctgggacgcaaaaccatggtggtatctgatctcatcacacttctgccaggaggtgaaatcgaagaggctacattcttgatgctcagtgtcttcttcaggtcatttgcctgagga

SEQ ID NO: 876524 - DNA, 120 bp, Artificial Sequence
  ENSG00000236714_2 (sequence is synthesized)
cacctggggatactgagctatgaaaagaaaacatttggaagatcactgattccttcatggagaggctggcttgggaatagatgacgtgtcaaagattgacatcaaccttgagtgcttatt

SEQ ID NO: 876525 - DNA, 120 bp, Artificial Sequence
  ENSG00000236714_3 (sequence is synthesized)
tgtggacttgagatacagataaaaaaaaaaaaaaaaaaacctccctagagtgagggctacttgggatacatgctatatcccaaggagttctcagtttgaggtcagccccagctctacaac

SEQ ID NO: 876526 - DNA, 120 bp, Artificial Sequence
  ENSG00000236714_4 (sequence is synthesized)
tcaccaggagagtgcgcgaggatgagggagagacagcctgctctggttctcttcaaggtgacaatgacacctgttgacagatgagaattccagccaggaatacagatttaggaatcatgt

SEQ ID NO: 876527 - DNA, 120 bp, Artificial Sequence
  ENSG00000236714_5 (sequence is synthesized)
ttctcactctcatgatgacatagaagagatgcgtctgaatctttctgccagtgtgttaaagttattctgatattgactgtagttctgagctttgtctctatcccaccaaaccactaactt

SEQ ID NO: 876528 - DNA, 120 bp, Artificial Sequence
  ENSG00000236714_6 (sequence is synthesized)
ctggaaattacttgtagaccaagatgggaggactccgtgtgtggctccctctcttcatgtgacaaagaaacttcctaaaatactaaaagctaaaggagattgttatctaagcttgagatg

SEQ ID NO: 876529 - DNA, 120 bp, Artificial Sequence
  ENSG00000236714_7 (sequence is synthesized)
gaaggttgccagcggaaacttggaggatcacagccagtcgcctgggattgaccacagggagtggcagaggcagaaagcaaaagaccagttgcaattatccagaatcctgaattgagcctg

SEQ ID NO: 876530 - DNA, 120 bp, Artificial Sequence
  ENSG00000236714_8 (sequence is synthesized)
tgttcccagttcctagaaaccctcaaggttattggtttcctcctcgcttaatagaccagtggaagaaatctacctccagttctatcttcacatgagcaactgtttacagtttacaatatt

SEQ ID NO: 876531 - DNA, 120 bp, Artificial Sequence
  ENSG00000236714_9 (sequence is synthesized)
actctgaaaatcagttcttttcaagttttatctaacacccaccagaagaaacagaagattatgaaaatggaatttgtcaaagttcctctcccaacaatatgatatttaattttgctaaca

SEQ ID NO: 876532 - DNA, 120 bp, Artificial Sequence
  ENSG00000236714_10 (sequence is synthesized)
tttttttttgaacacttactatattgcagacaatggtctaagtaaagcattttatgtgcatcctatcatgtcatcatcacacagccctgtgaggtagatactattattattaaccacatt

SEQ ID NO: 876533 - DNA, 120 bp, Artificial Sequence
  ENSG00000236714_11 (sequence is synthesized)
gtctgatgtttaagattttgctgttagcattactttgaaatgacaatatgagggcattttatgtattttttttgccccaatatgatctgcagaaactatgtattttaagtactacatttc

SEQ ID NO: 876534 - DNA, 120 bp, Artificial Sequence
  ENSG00000236714_12 (sequence is synthesized)
ttttatttaccaaattattgtcagataagaaaccgaaataaaagtttacagggtctaggattcctccataatgaatgaactttggggtatttcagtgacaaattggctttaacgcgatca

SEQ ID NO: 876535 - DNA, 120 bp, Artificial Sequence
  ENSG00000236714_13 (sequence is synthesized)
aattccatcctacaatgaaagtgtgttagtttgtggtttcaagtttaaaaacagcactgtattgtcttccagaaatatataaatagaaattcaagaagtatttcaatgaatacagataaa

SEQ ID NO: 876536 - DNA, 120 bp, Artificial Sequence
  ENSG00000236714_14 (sequence is synthesized)
attagttttgttagaacatcaaatatgtgggtttcatttcttagctcagtttagaaactgtaatttcaattttttttagcagctgtggtaaattttgagatttgaaatttcatataatat

SEQ ID NO: 876537 - DNA, 120 bp, Artificial Sequence
  ENSG00000236714_15 (sequence is synthesized)
aaatcctcatttattgagcatttaaattatatgcccaacaatttactgtgtacattacttcacttgttcttaactataactctacaaaatattattgtccttgatttatagatgaagata

SEQ ID NO: 876538 - DNA, 120 bp, Artificial Sequence
  ENSG00000236714_16 (sequence is synthesized)
ttgagactcagttaagtaacttgcttgaaattcaaaaacgttaactgtggaaggcagtatttgaacccagtgttcaaaaccccatgctctttttattatatgaccttatttcctattcag

SEQ ID NO: 876539 - DNA, 120 bp, Artificial Sequence
  ENSG00000236714_17 (sequence is synthesized)
tcttcagaagatatattgtcttattagattattctcgttctctaaataagtgaccttgggcaactatctttttccctggtattttcccctgcctttaaaacaatgtgatcaaactggaag

SEQ ID NO: 876540 - DNA, 120 bp, Artificial Sequence
  ENSG00000236714_18 (sequence is synthesized)
tttttcacgatctctcttagccctaaagctccttggttctgtaattccaccaatagcccatttcaaaaataattctacagtaatcagtgggactcctgtttttcccatcttttttttttt

SEQ ID NO: 876541 - DNA, 120 bp, Artificial Sequence
  ENSG00000236714_19 (sequence is synthesized)
tgaaacagaaaattgaaacttttaaattagtttagtaaatacatctactagtttttttcttttatagtcatggttatattatttggtccttcttagttgcaacatgtttccttgctgtca

SEQ ID NO: 876542 - DNA, 120 bp, Artificial Sequence
  ENSG00000236714_20 (sequence is synthesized)
atttataatacctctcatcaacaatagcctgaagaaatagatttgaattgctttccctaatttatagctggaaaactaggctacgctggtatcttaaattgactttcctgaggtcacggg

SEQ ID NO: 876543 - DNA, 120 bp, Artificial Sequence
  ENSG00000236714_21 (sequence is synthesized)
cactcagtgccaagaggagttggtacctacgcatttgaaatttctggatttctggtcttactctgtacttagtcactcttttctttcatttggccctatggtgggcaaactacagcctac

SEQ ID NO: 876544 - DNA, 120 bp, Artificial Sequence
  ENSG00000236714_22 (sequence is synthesized)
aggccaattccagcctaccatctgtttttgtatggtccatgaactaagaatggttatcacattttaaaatggtgggaaaaaaagactattttgtgacataaaaattatatgaaatccaaa

SEQ ID NO: 876545 - DNA, 120 bp, Artificial Sequence
  ENSG00000236714_23 (sequence is synthesized)
aattacttgtagaccaagatgggaggactccgtgtgtggctccatatgaatgacttatcgtgcctgtccagagtcagggaaaggagaaacaatcttatttgagaagggaggatatcactg

SEQ ID NO: 876546 - DNA, 120 bp, Artificial Sequence
  ENSG00000236714_24 (sequence is synthesized)
cagtggttgtgaaatcgtgtttggaagctagattgctctagaccactaaggtctgtgtctcctcttggtcttcacagctctcttcatgtgacaaagaaacttcctaaaatactaaaagct

SEQ ID NO: 876547 - DNA, 120 bp, Artificial Sequence
  ENSG00000236714_25 (sequence is synthesized)
acacaaatcacaaagtagtggagagtgggcctgatatagaagcacactgggcatccttctctcattgcactgtgaagttcaggtcctctggctgtcactcagactcccttgtgagttcct

SEQ ID NO: 876548 - DNA, 120 bp, Artificial Sequence
  ENSG00000236714_26 (sequence is synthesized)
tgaaggtgtgggcatgtctcgttcatccttggctccccagtgcctagtccagcacccgaagcatagtaagatttcaataaatgtctgctctcttcatgtgacaaagaaacttcctaaaat

SEQ ID NO: 876549 - DNA, 120 bp, Artificial Sequence
  ENSG00000236714_27 (sequence is synthesized)
gggaggactccgtgtgtggctccttgaaggttgacttcagatcacaactgccagttaaaacaccatgaacacactggacttttcaactgttttgaatgaaatgtgcaagtgaagccagca

SEQ ID NO: 876550 - DNA, 120 bp, Artificial Sequence
  ENSG00000236714_28 (sequence is synthesized)
gtgtgtggctccctgatgaagacaggctaatgctaagtctcttaaccaacctggaggatggagaagatgggagagtgctattcttcttctaggaagctgcattcctcaactctttacctg

SEQ ID NO: 876551 - DNA, 120 bp, Artificial Sequence
  ENSG00000236716_0 (sequence is synthesized)
ctgacacaaagaagcaggtgtgagaccggcccctttctcccatgccttagacagggctccagggactgcttcaggggagatgtcagagggcagcagggaccgggaagggaggaagaaagc

SEQ ID NO: 876552 - DNA, 120 bp, Artificial Sequence
  ENSG00000236716_1 (sequence is synthesized)
agagtgacagtgagaggtgggaaaactacaagaggaattgtttgtacgcttggatctggacttttagaactggtcaggacctgacagatcctccagcccagttctcccggctctcaaaca

SEQ ID NO: 876553 - DNA, 120 bp, Artificial Sequence
  ENSG00000236716_2 (sequence is synthesized)
ggtaaatgaaggagaaaagaaaagaacaaaatccaccgggaaccagagacttccaggctccaaagacaggcaatctccaccaggaaacacaggagaagccctgaaaagttagtcttctgg

SEQ ID NO: 876554 - DNA, 120 bp, Artificial Sequence
  ENSG00000236716_3 (sequence is synthesized)
aagagaaatttacatctacaaaggaaatctccatttgtaagtgtgtcttcttctgcactaggaagagaaggatgactaaatcagagaagtctcttgtcagagaaagcacggacttcagtc

SEQ ID NO: 876555 - DNA, 120 bp, Artificial Sequence
  ENSG00000236719_0 (sequence is synthesized)
agttgagagtcatagtgtggacaagggcaggtgccctgggcatctgcacagctggtacactccttcatccaaagtttgatcaagacaaaggaaaacataattaggagctcagggaggcag

SEQ ID NO: 876556 - DNA, 120 bp, Artificial Sequence
  ENSG00000236719_1 (sequence is synthesized)
ctgtatggaggccaatatgcagacaagggaagtaactcaggcattttgggggagaggtacagaaagaagagaaaagactgaactgactgctgttctgaacaagaactgtgactatatgtg

SEQ ID NO: 876557 - DNA, 120 bp, Artificial Sequence
  ENSG00000236719_2 (sequence is synthesized)
gtactcccagaatgctggtttcctttcagacccatcaagtggccatcctattggcttggactgaagacccccactggagaactgtctctgcagcctatactgatgacactggccactgtc

SEQ ID NO: 876558 - DNA, 120 bp, Artificial Sequence
  ENSG00000236719_3 (sequence is synthesized)
cagggctccaccccaaggagtccaagccccagacatttagccttagagagaatccagattttgcatttccagtgcagggattgatggagccttgtgtatcaaagtgccaatttctttcta

SEQ ID NO: 876559 - DNA, 120 bp, Artificial Sequence
  ENSG00000236719_4 (sequence is synthesized)
acaagctagggaggataccgttgacagcagcagaaaggggtagcagtggtttgctttccaaatggtaataagaagggcctggcagtggcaacctgtccacgtatcattaaaaatggactc

SEQ ID NO: 876560 - DNA, 120 bp, Artificial Sequence
  ENSG00000236719_5 (sequence is synthesized)
tcctgcttcgtttggaattcaacccaatgaacttgaataaactctggacaatgaccagcacagagccctaagcaggatacagcaagattatttgctttactcatccactgagtacctacc

SEQ ID NO: 876561 - DNA, 120 bp, Artificial Sequence
  ENSG00000236719_6 (sequence is synthesized)
tctagccacaaataataaaaataagaagaatctgaaggacaagtgggacagaaatactcaagcagaatgagggtgagattgaagtccctgaacatacagtgccctttacacttgatctta

SEQ ID NO: 876562 - DNA, 120 bp, Artificial Sequence
  ENSG00000236719_7 (sequence is synthesized)
gccaaaaggccgagaagagattacagtgctttttaaaggtagcatttcacccagccaataatcaatccctttggccttcttgaggtgcaaggccacacactcaaattctttaatcaaaca

SEQ ID NO: 876563 - DNA, 120 bp, Artificial Sequence
  ENSG00000236719_8 (sequence is synthesized)
ataggctagtgcaaatggagctatttcttaaacccagctgtttacacagcagctacaaatctgttcagaaggaatcccccaccatccacaactgtctatcgagcagatgtgcaagagtat

SEQ ID NO: 876564 - DNA, 120 bp, Artificial Sequence
  ENSG00000236719_9 (sequence is synthesized)
ttgtctctcaccaccagggttgcagtcaggacaagagagcaggtttgaacgtcttcggctcctagaactgcacaagctgtgtcttcagtgcccagaggcggctgcaacgtctccccagtt

SEQ ID NO: 876565 - DNA, 120 bp, Artificial Sequence
  ENSG00000236719_10 (sequence is synthesized)
ctcctctcagaacaatggaaattttttttagaggcgtaataggaaggtttgcattgaattattaaacaatgggtattgaaaaatatgttttctttgacctctgtacttctagcttttacc

SEQ ID NO: 876566 - DNA, 120 bp, Artificial Sequence
  ENSG00000236719_11 (sequence is synthesized)
agtcagtgttttcttgtaccaaggctaagatatgtataacactgaaatggatgtcttcttatataatattttacaagcttttgaaaacctgtgccctttaataaattttaaaacgtttca

SEQ ID NO: 876567 - DNA, 120 bp, Artificial Sequence
  ENSG00000236719_12 (sequence is synthesized)
agagcagttgctttgcctggagtggttgggtactcagcctggctgaggcttgtctgggagaactttctctgtcattgttcatcttgatctgtgagaagctgtaggtgcccctaaggctca

SEQ ID NO: 876568 - DNA, 120 bp, Artificial Sequence
  ENSG00000270697_0 (sequence is synthesized)
agcagcaactgtgattttttaaaattagctttttattggatccatgtttgttttacagttaggattctgctatggactaaattgtgcacccctggtccccacgctcaaattcatatattc

SEQ ID NO: 876569 - DNA, 120 bp, Artificial Sequence
  ENSG00000270697_1 (sequence is synthesized)
ccataattgaagataaggtttcgaaagaggtgattacattaaaatgatgtcattagggtggggccctacttcaatatgtctggtgtcataagaaagacaacaggagcacaagtgcataaa

SEQ ID NO: 876570 - DNA, 120 bp, Artificial Sequence
  ENSG00000270697_2 (sequence is synthesized)
gggacgaccatctgcaagccaaggaggagaggcctcagaagaaccccagactgccagcacttcatctttgacctccagcctccagaactaggagaaaataaatttctattgtttaagcca

SEQ ID NO: 876571 - DNA, 120 bp, Artificial Sequence
  ENSG00000232419_0 (sequence is synthesized)
gacagtcccattgagcaacacttcaatgaatgcacccctccaaattgagaaggccatgaagatgaaatgaaatagtctagattcccagatgaagttgcaagacatcttctacccctcaac

SEQ ID NO: 876572 - DNA, 120 bp, Artificial Sequence
  ENSG00000232419_1 (sequence is synthesized)
attgctgctcacattatttgtctcaagataaaatcccaaaactctggaggggtgctgcctcacaagatgcatcacctgctcagttgggaaccaaatttgaggtaaattcaaggtgccctg

SEQ ID NO: 876573 - DNA, 120 bp, Artificial Sequence
  ENSG00000232416_0 (sequence is synthesized)
aaaggaagaagaggaacacgttgctgtgtgctcgtggcacgtggcctgttgggtcctttcgcagtcctttgaagcagttgcttttactgtcccctgttttacagaagaggaaacagccaa

SEQ ID NO: 876574 - DNA, 120 bp, Artificial Sequence
  ENSG00000232416_1 (sequence is synthesized)
ggtgacttaagggcagagcgccagcaggtatggagcctgaatttaaatgcaggtctgcatactgcaagcacctgggttctctccacccctcctctggactcccatttgttctctgtcagt

SEQ ID NO: 876575 - DNA, 120 bp, Artificial Sequence
  ENSG00000232416_2 (sequence is synthesized)
gactgagaaagggtgggtgggactaggaactcagcttccggtccatgaccacatccatggaatatgggaggaagagatcaaatcacaaatcttgggagtgagggagagacacatccttgg

SEQ ID NO: 876576 - DNA, 120 bp, Artificial Sequence
  ENSG00000232416_3 (sequence is synthesized)
ggctactcaagccccccatatcctttgcataccttctttatcccttttctacccagtggatttggagggagtgggcttgggataccatcagacaacgagaaacacgatttgcaggactgt

SEQ ID NO: 876577 - DNA, 120 bp, Artificial Sequence
  ENSG00000232416_4 (sequence is synthesized)
gtggaggtatccaggcctgagggccctgctccagagctcccctcctcactctgtggctggaacaaaatctcttccttgtgtggccttggcttccctagcagggatcccaaaacatgggat

SEQ ID NO: 876578 - DNA, 120 bp, Artificial Sequence
  ENSG00000232416_5 (sequence is synthesized)
ctggccatgctgctcagtccttgggttgatttctttgagctccagcttctctgagcatcccctctgctgtccccacatcctgatagcccctctgggagctggggcctggcctttctgccc

SEQ ID NO: 876579 - DNA, 120 bp, Artificial Sequence
  ENSG00000232416_6 (sequence is synthesized)
attctcaacaaacactcttgtctggagacaggcaggacaatggagagctaccttgtcctgctgctgcccctgccaccacagctgcttatgtgtgaccgatggggttgagaggggcaagag

SEQ ID NO: 876580 - DNA, 120 bp, Artificial Sequence
  ENSG00000232416_7 (sequence is synthesized)
tttttttttttttttttttttgctatgcacagttcctcccagcaaccttccctctctgaccaatggggcctctaggctctgcccttcacgttggggtcttcccccacctccggccctttg

SEQ ID NO: 876581 - DNA, 120 bp, Artificial Sequence
  ENSG00000232416_8 (sequence is synthesized)
cgttggggtcttcccccacctccggccctttggttttgatatggctagtgaccagcactgaccaccatcccaagctgggaagagcaattggtgaagagtgtgtgtactatttactttctt

SEQ ID NO: 876582 - DNA, 120 bp, Artificial Sequence
  ENSG00000232416_9 (sequence is synthesized)
cacccttgcccctttattctcaaggtcttttgattgtgaagcaaggcccgaggccttgactggtgagattagcccgggaggtggtggctccctcctgctctctgtggtgaaagccaagca

SEQ ID NO: 876583 - DNA, 120 bp, Artificial Sequence
  ENSG00000232416_10 (sequence is synthesized)
cactttcctaaaaccagcgtcggaagctgtgctgtagcctgtaattactgacatgaaggtccccacacagagtctggatggaggctgccctggaagcagccccgggctgggaaagggctg

SEQ ID NO: 876584 - DNA, 120 bp, Artificial Sequence
  ENSG00000232416_11 (sequence is synthesized)
agtgtcaacaggcctgtgtttgaatccaagtcacctgtgttctctgacaggtcactcagttcctccggccacagctgcccctctgtgagatgacataacactgcttacctcttggtgtgg

SEQ ID NO: 876585 - DNA, 120 bp, Artificial Sequence
  ENSG00000232416_12 (sequence is synthesized)
ctatgaggattgattgggctgatgtgtagaaaatatgtaatgcagggcttgtcctggaggtgatgttaggtaatggtgaggtggatcttccctgtgtggtccctcccttcgtgtgcccct

SEQ ID NO: 876586 - DNA, 120 bp, Artificial Sequence
  ENSG00000232416_13 (sequence is synthesized)
gcccagcctcttggcacctcctgtttactccccgagcccccagattctcacctttgcccagagccacattcgggcttgtcttcctcttccatgtccccgcatgcagaatcctctctttct

SEQ ID NO: 876587 - DNA, 120 bp, Artificial Sequence
  ENSG00000232416_14 (sequence is synthesized)
tatccctctggaatgcagctgaccaaacaaattcccactaatgtaactggtagtatcttagaggtgaactctcctgtgggcattttatttgtatcttagaagaatttttgttttaaatct

SEQ ID NO: 876588 - DNA, 120 bp, Artificial Sequence
  ENSG00000232416_15 (sequence is synthesized)
tatttttcccaactggcatatagtagggtgctcaataaaggtgggttgcctgaataagtgaaagaacctaaggaacaatgtctaatggtggaatttcagtcatgtcttcatgctttcagc

SEQ ID NO: 876589 - DNA, 120 bp, Artificial Sequence
  ENSG00000232416_16 (sequence is synthesized)
ctctctgcaaacatttattttgtgtgctagatactggagatatgttgctggataaaacagccacagtccttgccctttggaacttccagtatagtggggacaatcagttaataagcaaac

SEQ ID NO: 876590 - DNA, 120 bp, Artificial Sequence
  ENSG00000232416_17 (sequence is synthesized)
aaacacatttctatttataaatggtgataaaattccttggctaaaagaatattgcagagtctatgatactgtataacaggggcttctaattaaatttaggggatcctgatgccacttagc

SEQ ID NO: 876591 - DNA, 120 bp, Artificial Sequence
  ENSG00000232416_18 (sequence is synthesized)
agtgggatttcagaggacctttcagaggagctaagcatttatcagctgccgcttattcattgccttgattttcttcaaaagacaactataatcattcaaaaattccaagttgggtccaaa

SEQ ID NO: 876592 - DNA, 120 bp, Artificial Sequence
  ENSG00000232416_19 (sequence is synthesized)
atgtcaaaggactctgcatgctgctgaaagcaaatgaatgtggagggtttcaaacaagacaaaaggcattcctccctgcccaatcccagtgcagtcaaggccaacctaggcagcagccac

SEQ ID NO: 876593 - DNA, 120 bp, Artificial Sequence
  ENSG00000232416_20 (sequence is synthesized)
cttctcaggaaacaaggccttggagaaatcagtgcctgtgtgaagatggtgtcggctgaaaagaagagcaatggcgtcaagtactaaatgattatcaagggtcaacttctgtatctgtat

SEQ ID NO: 876594 - DNA, 120 bp, Artificial Sequence
  ENSG00000232416_21 (sequence is synthesized)
cagctgcaacacactgtctttaatacccccagcccaggagctcgtgccttacatgctgggcccacattctgccccaagcagaagctgcagggacctcagtgtccacccttcctgcctcat

SEQ ID NO: 876595 - DNA, 120 bp, Artificial Sequence
  ENSG00000232416_22 (sequence is synthesized)
gtctcaaggcagcagctcctctctggtaacctgatggtgatgtggccagggtgccgagatgggacagcaaagatgatgggctctgcacaccaactccaggaaactcattctgggccagct

SEQ ID NO: 876596 - DNA, 120 bp, Artificial Sequence
  ENSG00000232416_23 (sequence is synthesized)
ctatgcaaagggaaaagcatgttgcattcacctaggccaagaaacagtgttgtaggttaagggcatggactgcttgagttcagtgccagctatgccacttaccagctgtgggaccttggg

SEQ ID NO: 876597 - DNA, 120 bp, Artificial Sequence
  ENSG00000232416_24 (sequence is synthesized)
caagttgcctttgtgcctatgcttccactttccttttccctccaccatgaagatgggttaagagtctcaaggttgtggtgactgtagatatatgagtgtgcatttgctatgctttacctg

SEQ ID NO: 876598 - DNA, 120 bp, Artificial Sequence
  ENSG00000232416_25 (sequence is synthesized)
tctggcatctagcaaacattcttcacatgtttgctgttatcaagattgttgtatatgtgaatgaaatgatacgatgtctcagatttgctttaaaataatagggaggttggggaagtgggt

SEQ ID NO: 876599 - DNA, 120 bp, Artificial Sequence
  ENSG00000232416_26 (sequence is synthesized)
tggggtacagacgaaacaggagtaggtgtgagttgataatgttgaagttgagtgatcagtacgtgggtttattacactattcttttcacatttgctttgaaactgttcataaaaatttcc

SEQ ID NO: 876600 - DNA, 120 bp, Artificial Sequence
  ENSG00000232416_27 (sequence is synthesized)
ataataaaagttctatatatatataaatatatacatacatatgagaaaatgatgtttatagcagagcttcactagacatggtatgtagcatgtagtgcacaagctgattttaagtgatat

SEQ ID NO: 876601 - DNA, 120 bp, Artificial Sequence
  ENSG00000232416_28 (sequence is synthesized)
tcagatggccttttaaatttaattattatgtatttaaaatttaattaattatagcaagtgatatgaactgtgataatgcagaaggtttccttttaaaataaagttcagtcaaaaaagtga

SEQ ID NO: 876602 - DNA, 120 bp, Artificial Sequence
  ENSG00000232415_0 (sequence is synthesized)
aagcagtcagcagtgagcaggggaggaggccagggctgctgggggtcggcgctgaggaagccaggattttccgagggccaatgccgggagccacgccaacgccaggagccacaccaactc

SEQ ID NO: 876603 - DNA, 120 bp, Artificial Sequence
  ENSG00000232415_1 (sequence is synthesized)
caggagccacgccaactccaggagccaagccaactccaggagccacaccgacaccaggagccacgccaactccaggagccacgccgacaccaggaactaaccctgcaagattgagaagag

SEQ ID NO: 876604 - DNA, 120 bp, Artificial Sequence
  ENSG00000232415_2 (sequence is synthesized)
gctggagcctcggccctggcatagatttgctgtgtgaccctggatcagttactttcccttgctgggcctcagcttcctcctccctaatatgaagtgtgtgcaggctcaggagttcataac

SEQ ID NO: 876605 - DNA, 120 bp, Artificial Sequence
  ENSG00000232412_0 (sequence is synthesized)
gctccgcgttctccattttgggccacccatggggggggggggtctccgtagaggccccgagggagagttgggcgagggaaggaagagaaaatcttcagcgagggtagtcgaaaagaagag

SEQ ID NO: 876606 - DNA, 120 bp, Artificial Sequence
  ENSG00000232412_1 (sequence is synthesized)
ggagggcctatcccctccaaagcgccgctttttccttggacaggaagaagtgacctattgcagtgtctccattgctgttatagaagttcgtagattcataaaatagtgtttgcttaagaa

SEQ ID NO: 876607 - DNA, 120 bp, Artificial Sequence
  ENSG00000232413_0 (sequence is synthesized)
aataggctcgtatgtggcgcccggcccagaaaggtacaataactgtatattttaacttaatggttttttggggggcatgcaaatttcagtgagcagattgcaccgaggcccgggcttgga

SEQ ID NO: 876608 - DNA, 120 bp, Artificial Sequence
  ENSG00000232413_1 (sequence is synthesized)
caaaatcgagatatcaaacaccaagtgtaaaaagacaagttgaaaaaccctgccagaagcattctgtggcagagattaaaacaatttcagaagcaggcacccaatccttctctttggatg

SEQ ID NO: 876609 - DNA, 120 bp, Artificial Sequence
  ENSG00000232411_0 (sequence is synthesized)
aaaaatctataaacaaacccagtgaagattatattgtaatatcatttaataaaaattattattagctatctaaacttgggcaaactcttcactttttgtattaggccattcttgtgctgc

SEQ ID NO: 876610 - DNA, 120 bp, Artificial Sequence
  ENSG00000232411_1 (sequence is synthesized)
tatgaagaaatatccgagactggataatttataaaataagaagtttggctcacagttctgcaagctgtgcaagaagaatagcagcctcaggaagcttccaatcatggcagaaagcaaagc

SEQ ID NO: 876611 - DNA, 120 bp, Artificial Sequence
  ENSG00000232411_2 (sequence is synthesized)
tgaagagaaccaacttgagtctgacagtccttccagaacacggcacccacctccaccatataacacagccaagtgaaacactaaggaggctctgtaaggcatgactctgaagaaggccac

SEQ ID NO: 876612 - DNA, 120 bp, Artificial Sequence
  ENSG00000232411_3 (sequence is synthesized)
tatcttttactgccgtgacaccatttctcagaacacatcacatggcccctgagtggtcaggagtccagagaaaaacagtcaagccctcctttaatagtaaaatttttgtctgaccctctc

SEQ ID NO: 876613 - DNA, 120 bp, Artificial Sequence
  ENSG00000234692_0 (sequence is synthesized)
ttaaatacagccttttcatcttaaaaattacattaagtttctggaattctgatatacccaattccaattctggaggctggcaagttcaagatcaaggtgccagaagatttggtgtttgga

SEQ ID NO: 876614 - DNA, 120 bp, Artificial Sequence
  ENSG00000234692_1 (sequence is synthesized)
aaactctttgaactgacttacagtagcttcttcagcagtcagctgtaacgatggctggagcacctggtacctgagtgagggccaagaatgggctctgcatgtgccctccctcaacaattg

SEQ ID NO: 876615 - DNA, 120 bp, Artificial Sequence
  ENSG00000234692_2 (sequence is synthesized)
cccaccacccattctcacacaaatgcagtgggggatgaacctgtagggatgggtaatcagcctgaaaggaacaattttgcatatgtgtaaaatctgaaaaaataaattattattcatggg

SEQ ID NO: 876616 - DNA, 120 bp, Artificial Sequence
  ENSG00000254111_0 (sequence is synthesized)
catggccccctcagagctggcaaaaccccaagaaggggcaggaaggccccgtcccagaggctgccattctactagcatagccgtggcctgtgtgcctgctcagggcaatgctgagatctt

SEQ ID NO: 876617 - DNA, 120 bp, Artificial Sequence
  ENSG00000254111_1 (sequence is synthesized)
taatttttcttcacagagattaatccccagaggaagcagcttgccagtgaatgacagcttttgtttgctcatgttttcctctcctcccagagtcaactttcagaatataccaggatgttc

SEQ ID NO: 876618 - DNA, 120 bp, Artificial Sequence
  ENSG00000254111_2 (sequence is synthesized)
tcttttcttttcttttctttttttttactggaggagaggggaggctccacagcatattatccaaaggcgaggcagatggttctttgtccaatagtgagagaggggagagaggggccattg

SEQ ID NO: 876619 - DNA, 120 bp, Artificial Sequence
  ENSG00000254111_3 (sequence is synthesized)
aggggagagaggggccattggtcttctctttttgtgttttacgtttttacttctcatgttgagatgttgtaacggcacttcatacctcctcggccgctgttgtcttcacaatgcacagaa

SEQ ID NO: 876620 - DNA, 120 bp, Artificial Sequence
  ENSG00000254111_4 (sequence is synthesized)
catgttccatgtcatgtcatcttgctcttcccacacaactcttctgtggggcaatactggttttggaattgccattttagaagtgagcaaacaagactcagatcaagtgacccagctcaa

SEQ ID NO: 876621 - DNA, 120 bp, Artificial Sequence
  ENSG00000254111_5 (sequence is synthesized)
cctgggagttacgtcagcagcctgaccttccatcttcctcctctaaagaagcgtccctgccaccctgagcacgaagccctcgggttcctaaaggccgaggcgcttcttctcatttacttc

SEQ ID NO: 876622 - DNA, 120 bp, Artificial Sequence
  ENSG00000254111_6 (sequence is synthesized)
ccttgaggaagaaagaccagcccatccaccctcatttcccaccgaagggcatcgcaaataaagtttgcccacgcaaccaggccaccaccattaatttctctctgccctgctcttacattc

SEQ ID NO: 876623 - DNA, 120 bp, Artificial Sequence
  ENSG00000254111_7 (sequence is synthesized)
tcctcaaggttttcagtcccctagagaggctcccttccctcttttctttccttcctccagccccccttttcacctccctccaccattgtttgaggttaagaagcatgctacggtgttcta

SEQ ID NO: 876624 - DNA, 120 bp, Artificial Sequence
  ENSG00000254111_8 (sequence is synthesized)
taaatcacttggcaagagtagacgacaaaagcaaaatataattcagattaaagtcatcctcccgctgaaatgatagtttcttaaataaatggcgatgctgcctatcaatcttgctggcaa

SEQ ID NO: 876625 - DNA, 120 bp, Artificial Sequence
  ENSG00000254111_9 (sequence is synthesized)
ctggtcctctcatattcatctttctgggggtgatttaggatccacctgggtcctccgagaagattctcccatcatttccttcccgtctctctggatcttgctgctgggcttggcgcagtt

SEQ ID NO: 876626 - DNA, 120 bp, Artificial Sequence
  ENSG00000254111_10 (sequence is synthesized)
gacaaattctccaagtaatccctcaaaagattggagaaatgctccgaacgctccattaaacttattttccatgctttaagagacccaaaactatgtccaataaataagtgttccctgtga

SEQ ID NO: 876627 - DNA, 120 bp, Artificial Sequence
  ENSG00000254111_11 (sequence is synthesized)
ctccctgcccagagcttctcttcactgactgtctgggacaagccagcgccgtggagctgtctctttttcatttctcagcctcactggccattccagtcctcaagaaatatttgcttgatg

SEQ ID NO: 876628 - DNA, 120 bp, Artificial Sequence
  ENSG00000254111_12 (sequence is synthesized)
tgacttcttggaaccaaatgttggtacccaactgaaagggatggagccctccgaacttggaagttccgctgaggatgagggcggccgccattttgaaacgaacagactccaaaagcacgc

SEQ ID NO: 876629 - DNA, 120 bp, Artificial Sequence
  ENSG00000254111_13 (sequence is synthesized)
tccactgggcctgcccctgcgatcttaaaacagatgtccgtgaaatgtgacccatgaatagcagttatctggagagagagctctgaagctgatgaaaccattagagccactgaaggcacc

SEQ ID NO: 876630 - DNA, 120 bp, Artificial Sequence
  ENSG00000254111_14 (sequence is synthesized)
tggtaaatgcgatgcggggagtacagaagagagaatcagaaacacaccggcactctcattcccatgaggccacttacagtgggtaaaacgtcgcttgagaagagcggcagctccagcctg

SEQ ID NO: 876631 - DNA, 120 bp, Artificial Sequence
  ENSG00000254111_15 (sequence is synthesized)
caggcaaggactggtttgtccaagctggaagagcaaagagtgaaagggccagggaggaggaggctgctttggggtcagtaggagctcacattggcagactaggacatcagagaggaaccc

SEQ ID NO: 876632 - DNA, 120 bp, Artificial Sequence
  ENSG00000254111_16 (sequence is synthesized)
ctttctgcaggacagcagagacacagtgaatggacatctggggccaaattcctccagcgcacggggaccctgagggcacgaaagccagaaagaggaccccgctgtgtccctggcctccta

SEQ ID NO: 876633 - DNA, 120 bp, Artificial Sequence
  ENSG00000254111_17 (sequence is synthesized)
ctgcacactcctgtggcttgaacatctccatcagctgttgcttttttttaccttgtacctcactttacccattttagcctaaaaacaagaacgtctgccctcttccttcttaaccaagac

SEQ ID NO: 876634 - DNA, 120 bp, Artificial Sequence
  ENSG00000254111_18 (sequence is synthesized)
gcggaaatatcaagcagaacaggggaaaaactcaatcgtcatcttggaaagtcgcgatggcgtgtgtgtgtggaggggagagtcctttgtttgcacacaaacagcagctccagcctgaat

SEQ ID NO: 876635 - DNA, 120 bp, Artificial Sequence
  ENSG00000254111_19 (sequence is synthesized)
ggaataaaaactttgggaaacaaatgtaacctttggagctgcttggtaaatattggaactgtttactatggaggcccagatgtgtcaaaaccaagaaacaaacaggaaccagcaaaaaca

SEQ ID NO: 876636 - DNA, 120 bp, Artificial Sequence
  ENSG00000254111_20 (sequence is synthesized)
gatgtgaagactagacatgtatacatattaaccatgtattacatatgcatatgtgtgcacacgtgtcactcatgtactgattcccagagggctggataacttcggccaagaaaattccca

SEQ ID NO: 876637 - DNA, 120 bp, Artificial Sequence
  ENSG00000254111_21 (sequence is synthesized)
ctggggaagagacatcatccataggttatcccaaatagttctatcttaggagtccacttctctgagtctctcttcacgtgatcaatcacttgtttagaaaatatttctcatggtcaataa

SEQ ID NO: 876638 - DNA, 120 bp, Artificial Sequence
  ENSG00000254111_22 (sequence is synthesized)
actctggaaacaggttcccaagccttcaagagctgccaagccatcccagaataaagcgcccctcctcaccgagcagcaggctctggtctgtgcagcttccacaaggcctgatcccaggaa

SEQ ID NO: 876639 - DNA, 120 bp, Artificial Sequence
  ENSG00000254111_23 (sequence is synthesized)
aagccttcctgcttcccagggacttccccattcctgtccccaaaacaacgcctgaggctgtcagcctagagaaggggaagtccccaccaccccgtcccaggatgcgaggcaggaagacat

SEQ ID NO: 876640 - DNA, 120 bp, Artificial Sequence
  ENSG00000254111_24 (sequence is synthesized)
ttaccccacctgcgggacaaaaagattaaggcccacggtgtgtatacagcctcgggccaattacagttttcaaattctcccactccctccactggcatttgtcctagagtgaaatgtgcc

SEQ ID NO: 876641 - DNA, 120 bp, Artificial Sequence
  ENSG00000254111_25 (sequence is synthesized)
taaaatgaagaggagaaagacagaggataacagaagggtgtcagggaaggagtcttaaatatcagatgaccccaaatctgaccctggttctgcaataaagtgtctatgtgacctgagacc

SEQ ID NO: 876642 - DNA, 120 bp, Artificial Sequence
  ENSG00000254111_26 (sequence is synthesized)
agtggcttcaccaaccggaaccccagtttcttccatctgtggtgaagcgttgaaccaaatgacctcctgcttctcagactcccagagatggtccctttctcaggccccagggcctccctc

SEQ ID NO: 876643 - DNA, 120 bp, Artificial Sequence
  ENSG00000254111_27 (sequence is synthesized)
cctccaaggcacccctgcaggtctggacagagttggagggtgtggggttggaacggcacctgtgtttacaatggtacaatctgcagtttactgtaataaaatcatttaatacattcataa

SEQ ID NO: 876644 - DNA, 120 bp, Artificial Sequence
  ENSG00000264078_0 (sequence is synthesized)
cttttcggttctctacagcgcaaggcctcgctgaagcgaacccatcgtgggaagggcgcggagaaagcggggagaaagagcagggggacgtcgggcctgcgcctggcaccgccgctacct

SEQ ID NO: 876645 - DNA, 120 bp, Artificial Sequence
  ENSG00000264078_1 (sequence is synthesized)
ggattcgcgggcccctcacacactcacctgccgatccagttctgaaatttaaattccagttggatgctgtggatcagaggatgatttgcaactttccacagaagcaacagaggaatgaga

SEQ ID NO: 876646 - DNA, 120 bp, Artificial Sequence
  ENSG00000264078_2 (sequence is synthesized)
acagcagacgtggcaatttggccacactccccttccattatgggatcataagtagagtacgttgacatcgtctattcccataaactgttcaggacagccacaaaaaagatctagtccttt

SEQ ID NO: 876647 - DNA, 85 bp, Artificial Sequence
  ENSG00000264078_3 (sequence is synthesized)
taaactgttcaggacagccacaaaaaagatctagtcctttgggatctccagcaccaaaaaaaaaaaaaaaaaaatatccatggcc

SEQ ID NO: 876648 - DNA, 120 bp, Artificial Sequence
  ENSG00000270562_0 (sequence is synthesized)
aacacaaattacctgctctcccagtgatcagtcacgtgcaaaaagctttgtccaattctttgaaaaggtgagatttttttttttctttttgcggtttttgaagtttggttgaatttagaa

SEQ ID NO: 876649 - DNA, 120 bp, Artificial Sequence
  ENSG00000270562_1 (sequence is synthesized)
attcgaaggaataaactaagagcctgaattaaatgttttgaaatatacatacataaaacaaaagacactagtatttctttcacttttatcaatacgcatagagaaggaagcagagtatgt

SEQ ID NO: 876650 - DNA, 120 bp, Artificial Sequence
  ENSG00000270562_2 (sequence is synthesized)
gtttccaaaacgtgacttggaaagctgtaagacctctatgtcttgttgttgttgttgttgttgttgttaacagaagtaaattttttcagacccaccaccacagaagtggccagactccca

SEQ ID NO: 876651 - DNA, 120 bp, Artificial Sequence
  ENSG00000270562_3 (sequence is synthesized)
aaccagcatttccagctactggctggctggtgtacaccaggccaattctttatgagaatatattaaaagtcacccctgtggattcctacaaagtacttccccttgcggggaggggagagg

SEQ ID NO: 876652 - DNA, 120 bp, Artificial Sequence
  ENSG00000270562_4 (sequence is synthesized)
cttactgtccctttggtcttgagaccagcacagttgtagataatatcctgaaaaggttattattaaattctttcgcgtaatgcccctttacaaatattgttaaacattaatttacagaag

SEQ ID NO: 876653 - DNA, 120 bp, Artificial Sequence
  ENSG00000270562_5 (sequence is synthesized)
aacttaaatcttaatttcaagggtggcataagactatcgctttgaaattgtatctttcgcaagttaaaaaaaaaaaataacaaagccattcgctgatgctacagaataaaagaaagggag

SEQ ID NO: 876654 - DNA, 120 bp, Artificial Sequence
  ENSG00000270562_6 (sequence is synthesized)
gctgctaaggtaatttcagcctggtagaattcacattgcatgcatgctgcataaagttccatgctatccagataagactattcactgaatcttttagactagaatctagaccaataaaat

SEQ ID NO: 876655 - DNA, 120 bp, Artificial Sequence
  ENSG00000270562_7 (sequence is synthesized)
gcattttagtttgtatggaatgtcctagcttcctagaggctagggttcgacgtcttgtttgtcaagacataaagggattaatgacatacccactgtgtgctagaccacagagtgggcaca

SEQ ID NO: 876656 - DNA, 120 bp, Artificial Sequence
  ENSG00000270562_8 (sequence is synthesized)
gagggatgaaaaaataaaaattcctgcccttgaggagctcacagtctaagctgtcaataataacatctaacatttattaaatactatgatctaggcactgaactaaaagctttatgtcaa

SEQ ID NO: 876657 - DNA, 120 bp, Artificial Sequence
  ENSG00000270562_9 (sequence is synthesized)
ctcagttaatactgccaacaactctttgacatcactggaaattccatatgctgaattcacacggaattaagtggaaatctacaaagtagccagtctactggttctgtagtggtcaaccta

SEQ ID NO: 876658 - DNA, 120 bp, Artificial Sequence
  ENSG00000270562_10 (sequence is synthesized)
ctgtagaattataactcaggggaataacgacttatttaaatgtaacagatctattcatagtctgtaaagaacaattcatcctctgatcttgtttttcagattaagcagtgtgtttattaa

SEQ ID NO: 876659 - DNA, 120 bp, Artificial Sequence
  ENSG00000270562_11 (sequence is synthesized)
aaattattatcatcgcaatactaaaaagatctttagattgctgctaatctgattctgcattttaactgccttaaattctacattcacttgcaagtgggggccacagtcaggttggcaaca

SEQ ID NO: 876660 - DNA, 120 bp, Artificial Sequence
  ENSG00000270562_12 (sequence is synthesized)
agttttgcagacaaaaggaaatcctggttgtaaatcccatgatatattgtactcaattttgtatgatactgtctaatgtgctgtgctgccttattaaagaactcgatgtccatttggttt

SEQ ID NO: 876661 - DNA, 120 bp, Artificial Sequence
  ENSG00000270562_13 (sequence is synthesized)
acattagagggaaacttaactgcagcttaacatattgttcattttcaacactgtcacgttacattcgtggggggcagattttaatttctttatcagtaatcaactggaagtttctttttg

SEQ ID NO: 876662 - DNA, 120 bp, Artificial Sequence
  ENSG00000270562_14 (sequence is synthesized)
ttaaattaaagcaagaaaggttttaaaataaagggcatgggggtaggacgccaccttttggtgataaaacaaatagaaatcccttctgaaaacagatgttcctgacataattttattttt

SEQ ID NO: 876663 - DNA, 120 bp, Artificial Sequence
  ENSG00000270562_15 (sequence is synthesized)
aattacaccaaggcaaaggtgcttgtccccatttcgttatattttaagtaacaggagaaaaaaaaaaccaatgtaaatgcaaaattagcaaattatagttaactgcagccaaaattttcc

SEQ ID NO: 876664 - DNA, 120 bp, Artificial Sequence
  ENSG00000270562_16 (sequence is synthesized)
caaacgtatcagaatatgttagtcccctgtcacattactgttgattgtatacaccaaacatgagcttcattcaccaaataccatgtcactaaatatatgtacatttggggaacagaaact

SEQ ID NO: 876665 - DNA, 120 bp, Artificial Sequence
  ENSG00000270562_17 (sequence is synthesized)
ggagtggacatttaccacctgacgacgtacctgaatgctcttgtaagttttgagttgaacaaaaactaaaaccacttaatttagtgtttctttaaccacagttactggtgtcctgatttt

SEQ ID NO: 876666 - DNA, 120 bp, Artificial Sequence
  ENSG00000270562_18 (sequence is synthesized)
tgccatatctatatgacataacagttcccgaataattaatataccatactcattggaggccacttattatggtaattgtagcaaacattttcatttaaatcaaccttcttttaatttttt

SEQ ID NO: 876667 - DNA, 120 bp, Artificial Sequence
  ENSG00000270562_19 (sequence is synthesized)
tctattactgccttaaatgggaaatcagtatcacccaccataaattaaaaacaagcacagtaaaaacaaagtcactgatttctctttgagggtcaaaacaaaaattaaaaatgatttttg

SEQ ID NO: 876668 - DNA, 120 bp, Artificial Sequence
  ENSG00000273275_0 (sequence is synthesized)
tagattagcaagatttctcacacttaaaccacaaatatatgtgggtgtttagatacatacatgcatattaaatatcaccagttttttagattagctgcaagtcttttgaaacaagggaat

SEQ ID NO: 876669 - DNA, 120 bp, Artificial Sequence
  ENSG00000273275_1 (sequence is synthesized)
tcatgattcaaacacaagtttaatgacaaattatttacccatgtaatcaaacaaatggatatcccttataagtagttacatgatcacttcaggtattcttcagtaagtgatacatacaat

SEQ ID NO: 876670 - DNA, 120 bp, Artificial Sequence
  ENSG00000273275_2 (sequence is synthesized)
ttacaaagtagcagaatgaagcagctataagccctgtgcagttactatatgaacacaagaactagctcttggcagtagcaatgaactagactttctcctcaagcagaggtgtattaaaag

SEQ ID NO: 876671 - DNA, 120 bp, Artificial Sequence
  ENSG00000273275_3 (sequence is synthesized)
ctgctcagcaatgagaagtagtccctggatatattcataagtataaataaagttacagactcctttgttacaaaaatgtaattaaggtaaataataggacgttaacaaatgctttgtcaa

SEQ ID NO: 876672 - DNA, 120 bp, Artificial Sequence
  ENSG00000273275_4 (sequence is synthesized)
tctctcaaaggagaaagcacaggaaaaggaaaatagctggcctaacacccggctcaaattgtacagtcttctatctatatataaaactgtgtgaaataaaagtaaggatgttttatgttc

SEQ ID NO: 876673 - DNA, 120 bp, Artificial Sequence
  ENSG00000273271_0 (sequence is synthesized)
aaaagcatcagatggattagggctgatgccactaaacatcaaggtagttcatgagctaaattaaaacttgactgagtagacacaaatttgcaaacaagtagctaggcattctaaatacag

SEQ ID NO: 876674 - DNA, 120 bp, Artificial Sequence
  ENSG00000273271_1 (sequence is synthesized)
ctcttcaaacaaggcttcacgtctacacactaatgctctgggaagaaagatggggctgcacctgatttcagaagtaccaaagggtaaactctcagttactgagttatgcctgttaattac

SEQ ID NO: 876675 - DNA, 120 bp, Artificial Sequence
  ENSG00000273271_2 (sequence is synthesized)
aaaaatcttgtccttaaatttaatatttttctgaaaggctttcagaaaacatacacatataaatggagtctcgactagttttcagtatcaatttttttttttatctacagaagcttccta

SEQ ID NO: 876676 - DNA, 120 bp, Artificial Sequence
  ENSG00000273271_3 (sequence is synthesized)
tgtttcacaatgatgattgattttgctagtggttgacagtactgttcatgacatttcctgtattagttcccctttggcacttgtattagttctatattcaataaatgctacaaaaccaaa

SEQ ID NO: 876677 - DNA, 120 bp, Artificial Sequence
  ENSG00000273270_0 (sequence is synthesized)
gtcctgcgactgcccgaggtcggaggcccggaggacccgccgccgcctttgtgtcaccagcccccgccccgctggactggcccgggccggggcggttgggccggcgctgaagaggcttgg

SEQ ID NO: 876678 - DNA, 120 bp, Artificial Sequence
  ENSG00000273270_1 (sequence is synthesized)
tgggccggcgctgaagaggcttggccgcccgggtccacccgttcccggatccgcctcggcggcccccgcgcccgcccaacccctgcccaacccctcggctccgcgagtttgggtgagaag

SEQ ID NO: 876679 - DNA, 120 bp, Artificial Sequence
  ENSG00000273270_2 (sequence is synthesized)
gaagtgcggcggcttttcccagggatggagtttagaggacgctaatcctatgtgcgagcggcggaccccgcccggatttcccggaggcgcccggttagtgaggcgacggcgcccacccgc

SEQ ID NO: 876680 - DNA, 120 bp, Artificial Sequence
  ENSG00000273270_3 (sequence is synthesized)
gctcccgaccgccactccccggagccgccggcccgccccagccccgcgcgtcgccccggagggcgggctgcactccctccacgcacctggctggcagagcgtctccagggacaaaaggtg

SEQ ID NO: 876681 - DNA, 120 bp, Artificial Sequence
  ENSG00000273270_4 (sequence is synthesized)
aaaaggtgccctggcatcaaagccgagcccccgcccccgccgggatgctgccctccggaaggaggggcgctgcccccaaggtactctccccgggcacccagggggaggttccatttcaac

SEQ ID NO: 876682 - DNA, 120 bp, Artificial Sequence
  ENSG00000273270_5 (sequence is synthesized)
ctccgatgaaaaacacggccctcccgggtatttaggagggtctgagggtaagtgccaagatggagaaaacacaccggcccctcacagagtatctcctgaggaatgacaactatctagtgg

SEQ ID NO: 876683 - DNA, 120 bp, Artificial Sequence
  ENSG00000273270_6 (sequence is synthesized)
gcaaggagggcttcctgcatagcagagggcaccccctctgatcccccaacgccaagggaaaaaaatcactcttcaccggctcccctgagccaggacaggctccagtgcagccacccacct

SEQ ID NO: 876684 - DNA, 120 bp, Artificial Sequence
  ENSG00000273270_7 (sequence is synthesized)
tataattttccgcggatgctgccttgatcagatagatctgaagatgactttaaggactacaagcaaatctcaagggaaaaattcagaccttgaacaacagccttgaactttttcagggtt

SEQ ID NO: 876685 - DNA, 120 bp, Artificial Sequence
  ENSG00000273270_8 (sequence is synthesized)
agacaagtactcccctgtggagtttctgcccttatttcttcgttcttctgttaattcttccatattttaacagaacacagacctgccgaaacgacacaggatggcgctttgctttttgtt

SEQ ID NO: 876686 - DNA, 120 bp, Artificial Sequence
  ENSG00000273270_9 (sequence is synthesized)
agttctccaaccttccaaacccttggggcacatgcaagcactgtggaaaaactccattaaaccaagagtcatcttactccagatcccagactgcttgggaagttggacatgcatattccc

SEQ ID NO: 876687 - DNA, 120 bp, Artificial Sequence
  ENSG00000273270_10 (sequence is synthesized)
aaagagaacagtgttggaaggagacaggagagcagctcgggggttgggggtagagggtaggaaaagagggcaagatggatgactaccactcgaggccagcctccactgcctgttagggca

SEQ ID NO: 876688 - DNA, 120 bp, Artificial Sequence
  ENSG00000273270_11 (sequence is synthesized)
gtagaacctaagagccggtccaaggcaacacaaaagacagtgaggctaggtctttcattgcagccaacgatcaagaaagcaactccatcaaatgacactgtcttttaaaaaaaaattttt

SEQ ID NO: 876689 - DNA, 90 bp, Artificial Sequence
  ENSG00000273270_12 (sequence is synthesized)
tgagtagctgagattacaggcacgcgctaccaggcccggctaattttttttttttttggtggagtcgaggttttgccatgttggccacgt

SEQ ID NO: 876690 - DNA, 120 bp, Artificial Sequence
  ENSG00000273270_13 (sequence is synthesized)
cagcctcccaaagtgctgggatttcaagcgttagccaccgcgcccgaccaaatgacactgtcttaaatgatttaatgtcttaaatcgggaaaggagagtaagagaaagcactcaacggag

SEQ ID NO: 876691 - DNA, 120 bp, Artificial Sequence
  ENSG00000273270_14 (sequence is synthesized)
tcagaggtgtcttgcagcctagctctttccacagacaagctacatgggcctatcatctaaccttttcaagcttctccgactgcttctgtgttggagggatttgggctagaggatcttttt

SEQ ID NO: 876692 - DNA, 86 bp, Artificial Sequence
  ENSG00000273270_15 (sequence is synthesized)
tgcttctgtgttggagggatttgggctagaggatctttttatttttttttattttattttggtgacggagtctctcactgtcgccc

SEQ ID NO: 876693 - DNA, 70 bp, Artificial Sequence
  ENSG00000273270_16 (sequence is synthesized)
acaggcatgagccaccgcacctggcctgtgatcccatttttcaaagtaattaggcgggtggatcacttga

SEQ ID NO: 876694 - DNA, 77 bp, Artificial Sequence
  ENSG00000273270_17 (sequence is synthesized)
aaaccccatctctactaaaaatatttttttaattagctgggcgtggcggcgggcacctgtaatcccagctaaaggtt

SEQ ID NO: 876695 - DNA, 120 bp, Artificial Sequence
  ENSG00000273270_18 (sequence is synthesized)
ggtcgtgccactgcaatccacctggccaacagagcaagactctgtctctaaaataataatttttattattgttattcttgacaggccagtgtagaacaggtggggcatctatggtgacag

SEQ ID NO: 876696 - DNA, 120 bp, Artificial Sequence
  ENSG00000273270_19 (sequence is synthesized)
aactgggttccaattctgtcccttcacctgtcccaggttcctcatctgaaaactgtgacccagtaaacctaatttcatgagcagctttcattaaaattgaaataatggtggaaaatgcct

SEQ ID NO: 876697 - DNA, 120 bp, Artificial Sequence
  ENSG00000273270_20 (sequence is synthesized)
tgtaaccgtgcttgatgtagagtagttacttagccagttatttcctctcttcttcccattcctaacaaaatggaaaaacgtttggttgctaggaaagagccttaaggggattttgttgtt

SEQ ID NO: 876698 - DNA, 79 bp, Artificial Sequence
  ENSG00000273270_21 (sequence is synthesized)
tctagcttgggcaatatattgaaaccttgtctcttaaaaaaaaaaaaaaaaaagaggccaggtgtggtggctcacacct

SEQ ID NO: 876699 - DNA, 60 bp, Artificial Sequence
  ENSG00000273270_22 (sequence is synthesized)
tcttaaaaaaaaaaaaaaatggatcacttgacaccaggagttcgagaccagcctgggcaa

SEQ ID NO: 876700 - DNA, 64 bp, Artificial Sequence
  ENSG00000273270_23 (sequence is synthesized)
ctcacacctgtaataccagcactttggtaaacccagtctctactaaaaataaaaaaaaattagc

SEQ ID NO: 876701 - DNA, 89 bp, Artificial Sequence
  ENSG00000273270_24 (sequence is synthesized)
aagccaagacagtagacgccctctcaaaaaaaaaaaaaaattacatctttaaaaaaaaatgcagggccgggtgcggtggctcatgcctg

SEQ ID NO: 876702 - DNA, 120 bp, Artificial Sequence
  ENSG00000273270_25 (sequence is synthesized)
aataataattaacaaaaaaaaaaaaatacaaaagttagttgcacatgttgccatatgctcgtggtcccagctactcagcaggctgaggttgggagatcacttgagcccagaaggtggagg

SEQ ID NO: 876703 - DNA, 120 bp, Artificial Sequence
  ENSG00000273270_26 (sequence is synthesized)
ttgcagtgagctgagaacccaccattgtactccagcctgcgtgtcagtgagattctgtctcaaaaaaaaaaagaaaagaaaaaaaatctaggctatgctccctagtatgggaaatctagt

SEQ ID NO: 876704 - DNA, 120 bp, Artificial Sequence
  ENSG00000273270_27 (sequence is synthesized)
ctagtcatttgacagaatcaggctttgcaggccatattgtctctgtcgtaactaccaactctgctggttaaaagggaagtagccacaaacaatatctgaatgatggattatggctgtgtt

SEQ ID NO: 876705 - DNA, 120 bp, Artificial Sequence
  ENSG00000273270_28 (sequence is synthesized)
ccaataaaactttatttgcaaaaacaggttgctggttgcaaggtagttttccaacctctacgtgattctcagactttaggttgcatcataatcacctggagggcttgttcaaacgcagat

SEQ ID NO: 876706 - DNA, 120 bp, Artificial Sequence
  ENSG00000273270_29 (sequence is synthesized)
tgctgggccccacccccagaatttttgattcagccagtctggggtggggctgatatttgtatttctaccaactttccaggtgaggctggctgatgatggtctggaaaccactttgaaaac

SEQ ID NO: 876707 - DNA, 120 bp, Artificial Sequence
  ENSG00000273270_30 (sequence is synthesized)
ctctgaagcttttctcaactcccttctttgtgtacctaaaacactttatccctactgtagatgtagcattagcgtgttatattagtttagtgattggtgtgtgggtctctgggagccttt

SEQ ID NO: 876708 - DNA, 120 bp, Artificial Sequence
  ENSG00000273270_31 (sequence is synthesized)
ctgaatcacctccctagcctagtgcctgacaatagcaatttgctccccattcattgactgaactgaaaccggagggtcatggtcatcatcattgttccaagccatagatagaagatgaag

SEQ ID NO: 876709 - DNA, 120 bp, Artificial Sequence
  ENSG00000273270_32 (sequence is synthesized)
tcaccacccctgatctcagagctcatcagagtagagcttgggctggaccctgcccttctctgcagtgagcagttttctctgtggagctctgtgcaacctggagccagtcctgcctggggt

SEQ ID NO: 876710 - DNA, 120 bp, Artificial Sequence
  ENSG00000273270_33 (sequence is synthesized)
aagaggaaaaaagactccttccccccagccccacagcctgtacgcaaacacaccgggagacatgacctgctcagaggagacctggaaccaagggaataaaatgagagtgggttgggggct

SEQ ID NO: 876711 - DNA, 120 bp, Artificial Sequence
  ENSG00000273270_34 (sequence is synthesized)
gctgttagttattttttgcttgtaagtggacaatttgtggtgtggtgtgtgaatttggggtcttaaatccagatagctgtctgctgtggacagccactgtttctgaattacagggcattt

SEQ ID NO: 876712 - DNA, 120 bp, Artificial Sequence
  ENSG00000273270_35 (sequence is synthesized)
caagtgacctgtggtcaggatgttttctcagatcaggcaaaatcaattggtcctgataataaccaggggagttgtactttccctatcttgagtagaagaagccacagctcccgggtccac

SEQ ID NO: 876713 - DNA, 67 bp, Artificial Sequence
  ENSG00000273270_36 (sequence is synthesized)
ccctatcttgagtagaagaagccacagctcccgggtccacctgcctctcctgactgcccacctccca

SEQ ID NO: 876714 - DNA, 84 bp, Artificial Sequence
  ENSG00000273270_37 (sequence is synthesized)
gcgatctcagctcactgcaacctggagcgaggagctgggattacagacgcgcgccacctcgcccagctaatttttttatatttt

SEQ ID NO: 876715 - DNA, 120 bp, Artificial Sequence
  ENSG00000273270_38 (sequence is synthesized)
cctgggggcactgcaagtagagccaggcatgtggcccatgcatccttcccagcctctttcctgctgggcatggaggaggaggcactgccaggagctccccacagacaggcgctgcttact

SEQ ID NO: 876716 - DNA, 120 bp, Artificial Sequence
  ENSG00000273270_39 (sequence is synthesized)
gatgggttggctgcaaactgtaggcataacagttaccttcctcttcacaacccccaggcctgacgaggcttacatgggaattgctttgatttgtgaagtcttaagactatactgctgggc

SEQ ID NO: 876717 - DNA, 120 bp, Artificial Sequence
  ENSG00000273270_40 (sequence is synthesized)
ctctgtcttaaaaaaaaaaaaaaaaagactatactacctaatcttccatgcctcgctctttccacattaatagacaaaaccaggaaaaaggactgcttcccctccagctcttgattgggc

SEQ ID NO: 876718 - DNA, 120 bp, Artificial Sequence
  ENSG00000273270_41 (sequence is synthesized)
aggactgcttcccctccagctcttgattgggctccataagaactgccaaaaggccaggcagcatttgctactcttctggggttcacttctgaaaggtgcgaccctgcaacctagagcaca

SEQ ID NO: 876719 - DNA, 120 bp, Artificial Sequence
  ENSG00000273270_42 (sequence is synthesized)
gggaagttaggacagcaaaggagctgggctgagccgacgctggcttagaactctttctgatactccctgttcccgccagctcgttagcccagcctgccaatcagttttgcatcaataaac

SEQ ID NO: 876720 - DNA, 120 bp, Artificial Sequence
  ENSG00000273270_43 (sequence is synthesized)
tttatgttctgaggttggccagatgaatgagaggagagcagctaaagactgatctctgaccttggcacgtaaacagcctccagattggacttgacagttaataaaggaaaggccctgcaa

SEQ ID NO: 876721 - DNA, 120 bp, Artificial Sequence
  ENSG00000273272_0 (sequence is synthesized)
cactttccagcagccactctcacatcaaatgattgccatcaggattaaacaacttacagaattcaacaccccaccacccaggtctatgatggtgatcacctgtacacgactctgcactcc

SEQ ID NO: 876722 - DNA, 120 bp, Artificial Sequence
  ENSG00000273272_1 (sequence is synthesized)
ctccagtgactacgtcactcagtggtaacagagagcaaagctctaccatctggtcatcctctcagcttgcccagtggggatttgttgaagtaaatttttttttttttttgtgacggagtc

SEQ ID NO: 876723 - DNA, 75 bp, Artificial Sequence
  ENSG00000273272_2 (sequence is synthesized)
cactgcaacctctgcctcctgggttcccatcttgctggcttgccacaggttatgtgataatgactgggcatcatt

SEQ ID NO: 876724 - DNA, 120 bp, Artificial Sequence
  ENSG00000273272_3 (sequence is synthesized)
aggcccacagtaggccccgggcacattttcagctgcgaagcggaggactagcaaccggtgaggtagaaggagaaccaagagatggtgggagaatgggaactgagctgagagagcttccgg

SEQ ID NO: 876725 - DNA, 120 bp, Artificial Sequence
  ENSG00000273272_4 (sequence is synthesized)
aaggttgcggtggcctagggcgatccacgtcattgagaaacggcgttaggctgatttcacggggcagatgacatggaagtgctgctgaggaagacgctgagctccgaggtgaaaagggat

SEQ ID NO: 876726 - DNA, 120 bp, Artificial Sequence
  ENSG00000273272_5 (sequence is synthesized)
gaggacgcctaagaagacacgagcgcaatacctaatacaatttcctgaaattgtttcatgtcacacgttaaaataatatgaaacacgttaaataataaaatggtatgaaggttttgtctg

SEQ ID NO: 876727 - DNA, 120 bp, Artificial Sequence
  ENSG00000234712_0 (sequence is synthesized)
ctaattggcattttatggtcagaataattagcccagggtggtccgggctcacacactgacaggtccaccgaactatgttaatgaaggaaatgctggggaggtgtcacagcacagtgtcac

SEQ ID NO: 876728 - DNA, 120 bp, Artificial Sequence
  ENSG00000234712_1 (sequence is synthesized)
agatgataccgtagaataacttaaacaatttcatttagaaatttatgaaaccactaacacttcgacacgtatttctacaaagcagctttgagttagggaagaatgtttctcttcagtgtt

SEQ ID NO: 876729 - DNA, 120 bp, Artificial Sequence
  ENSG00000234712_2 (sequence is synthesized)
caaagtacaaaagcatttaagcaagagttgcagccaagccctgtgagatgcagatctgtgtgcagttatctctgcccccctggaggatggcacagcactaggtgattgattatgcaaggg

SEQ ID NO: 876730 - DNA, 77 bp, Artificial Sequence
  ENSG00000234710_0 (sequence is synthesized)
cacccggaactcacgctggcccgcgagcgccgcgcgcagccctggttcccgcccgcggctctctctccacacatccc

SEQ ID NO: 876731 - DNA, 120 bp, Artificial Sequence
  ENSG00000234710_1 (sequence is synthesized)
ctctcagtcagagcccacagataatagcaacacactaaggtcctcaaggtacatcgttgggatcaagcaactttgatcccaaggagaagaataaaaacaagagggacgactgggccaagg

SEQ ID NO: 876732 - DNA, 120 bp, Artificial Sequence
  ENSG00000234710_2 (sequence is synthesized)
cctgtgaggatcaacccagtgaagatgcttgaggaagacatgctagagcaaaaactacaactctggtcctcttggatattttagataaggactttacccacataaagaaggtgttgccct

SEQ ID NO: 876733 - DNA, 120 bp, Artificial Sequence
  ENSG00000234710_3 (sequence is synthesized)
ggggactggctgagagaaattacagactgttactcacttcaaaagaaacggactgctacagtggtacttacgtcaccagaaagaaacacttccacaaagaatttgatttgatggcatcat

SEQ ID NO: 876734 - DNA, 120 bp, Artificial Sequence
  ENSG00000234710_4 (sequence is synthesized)
gtggacatagaactctcatagtaatgacccaacctgtgtttccagtcatcctgatgaactctcaacaaaatcagattgttatactgttgttctcactttacaccgatattttctcttgct

SEQ ID NO: 876735 - DNA, 120 bp, Artificial Sequence
  ENSG00000234710_5 (sequence is synthesized)
cctaaaaaaagtatctggtattaaatagaattctgtatcttaaaaaacttgccattgagaaaaatgagaagtaactgtacattttaatactgaaggttttaataaaaaaagcagtgtgaa

SEQ ID NO: 876736 - DNA, 120 bp, Artificial Sequence
  ENSG00000234710_6 (sequence is synthesized)
cagaggagccagcagaagacagcaagcccttggtatagatagagaagccatggatgaaaagaagcaggccttaaagacagagcaaagtaacatagcattcctctctactatcatcctgta

SEQ ID NO: 876737 - DNA, 66 bp, Artificial Sequence
  ENSG00000234710_7 (sequence is synthesized)
catccacccacctcggcctctcaaagtgccggaattacaggtcctcaaggtacatcgttgggatca

SEQ ID NO: 876738 - DNA, 120 bp, Artificial Sequence
  ENSG00000234710_8 (sequence is synthesized)
attaaatagagaccacacaagatacccactctaattgaatgaaggccttttcatgacatcaattcagctgcagtatcttcagttcttacagtggggaagccagaatctctagacatggga

SEQ ID NO: 876739 - DNA, 120 bp, Artificial Sequence
  ENSG00000234717_0 (sequence is synthesized)
accgtcatctagccacagcggcatcggctgagaccttcatcctgattgttccttgggtgctgtttagtgccagccactgaagagaacctccttgtttccacccacgtggccccatctggt

SEQ ID NO: 876740 - DNA, 120 bp, Artificial Sequence
  ENSG00000234717_1 (sequence is synthesized)
ttcagggcctcctctgtgctattttggggtgcgaggagatcatttttcaacgcctacagcatggcgggactgggaactccacagcctccgcaacacttttcgtgccgccatttcttctca

SEQ ID NO: 876741 - DNA, 120 bp, Artificial Sequence
  ENSG00000234717_2 (sequence is synthesized)
ccgccatttcttctcagggtcttgccgcctttctcaagctcagcctgtggagtaaagcgcaggcacatctctcagagacgaggtccattatattgcccaggctggtctcaagctcctggg

SEQ ID NO: 876742 - DNA, 120 bp, Artificial Sequence
  ENSG00000234717_3 (sequence is synthesized)
cagttattgcttgatggattctgctaactcccaggagaatccaagtgggaggacaagtagaagaaaaaagagtccaaaggctggagccctcagtttgttgtttatggaacattcctgcag

SEQ ID NO: 876743 - DNA, 120 bp, Artificial Sequence
  ENSG00000234717_4 (sequence is synthesized)
tccccagaaggggcatgaaaacatttgcttagaaaaaacaatactaaaatttatatggaactacaaaagacccagaatagctaaagatatcctaagcacaaagaatgaaactggaggaat

SEQ ID NO: 876744 - DNA, 78 bp, Artificial Sequence
  ENSG00000234717_5 (sequence is synthesized)
taatggaactgaatagagaacccagaaacaaatccacacatctacagtgaattcattttttacaaaggtgccaagaat

SEQ ID NO: 876745 - DNA, 120 bp, Artificial Sequence
  ENSG00000234717_6 (sequence is synthesized)
catctacagtgaattcattttttacaaaggtgccaagaatatccactggagaaaagacagtctctttaataagtggtgctggaaaaactggatatccatacgcgcaagaatggaactaaa

SEQ ID NO: 876746 - DNA, 120 bp, Artificial Sequence
  ENSG00000234715_0 (sequence is synthesized)
ggccccgccgccaccctccgcgctgggacgccggggcgcgggcatccctgccgcctacggatctcttcccaagcacctagaactttccaaagcgtgcttggaatttaacaccttggtcgt

SEQ ID NO: 876747 - DNA, 120 bp, Artificial Sequence
  ENSG00000234715_1 (sequence is synthesized)
cgatccccgcaaatatactctgatgagaccggctttcttcccataccgcccaggagtttctccaggtggcattcctgtcgccttgaggtggaacatcagtagaggctcgaggctgaagca

SEQ ID NO: 876748 - DNA, 120 bp, Artificial Sequence
  ENSG00000234715_2 (sequence is synthesized)
agcacaatacacaagagactccgattcgtacaggaacatttcgaaaacaggaaatcctgaggacaatgtccaattcttttctaaaagtcttctggctagtcccagcatttccagggaagc

SEQ ID NO: 876749 - DNA, 120 bp, Artificial Sequence
  ENSG00000234715_3 (sequence is synthesized)
tgaacaggtgcagccggaggcttggagccactatggaagcagcacagttgatgcctcagaggatccagagaaaagaccagataactataattcagccttcacccatattgtgtctttttg

SEQ ID NO: 876750 - DNA, 120 bp, Artificial Sequence
  ENSG00000234715_4 (sequence is synthesized)
tcctacatcacagatacaggactcaagagtcaaagtgcacagaaatttgaattccgataagaatactctgagccagtttattctggggtacatacttcattttatgctagaactctgcaa

SEQ ID NO: 876751 - DNA, 120 bp, Artificial Sequence
  ENSG00000234715_5 (sequence is synthesized)
tcctgatgaaagagggcttgcattgctcaactaactaactcacccgtctctcctgcagtattagaaactacttctgtatgtacacgttacagtttctaggaactccatttttgcaagaca

SEQ ID NO: 876752 - DNA, 120 bp, Artificial Sequence
  ENSG00000234715_6 (sequence is synthesized)
gataggagccagaaaatttgttccttcaactgtatatcgctaattaaacataaaatcaaatcagcattttaggtacttgaataactagtctgtgcttacttttattcatatggaagcagt

SEQ ID NO: 876753 - DNA, 120 bp, Artificial Sequence
  ENSG00000234715_7 (sequence is synthesized)
gtttaaattattctctgattgtaaactcacttatgtaaaccattatacaggaaaaaaatgagtaatgaagcaaagttctgaagcagatctatgtaagcaaatttcaataaccttcttaag

SEQ ID NO: 876754 - DNA, 120 bp, Artificial Sequence
  ENSG00000234715_8 (sequence is synthesized)
agaatatgacacttagtagtggtgagggacattttaagctttttctatttacaagttttttttaaacgagggtgtttcaaagtaaatatttgctgttacgttatgccacatgatatacta

SEQ ID NO: 876755 - DNA, 120 bp, Artificial Sequence
  ENSG00000234715_9 (sequence is synthesized)
gaggctttcttcacagctagctgatcggatccttgcagctgtttcttctgtaggtctcggagctcactgagaacgtccagcacgccttcccggcggggcccggcccaggtgcgcactaga

SEQ ID NO: 876756 - DNA, 120 bp, Artificial Sequence
  ENSG00000234715_10 (sequence is synthesized)
tgaggcagtcaaccaagtcaattggttcccgatcaactaaatctctcctaaaaataaacactgccgcgagcttcgagagttcagcgtgtcagagcctctatgatggcagagcacctgccg

SEQ ID NO: 876757 - DNA, 120 bp, Artificial Sequence
  ENSG00000234715_11 (sequence is synthesized)
cgatgcctgattggtagggagaaggatttcccgggagggggccaataccaaattttagggctgttaggctctgagcagtcccttcgtgaccggataagtcagagacccggggtttgagcc

SEQ ID NO: 876758 - DNA, 120 bp, Artificial Sequence
  ENSG00000234715_12 (sequence is synthesized)
ttgcccggcgctgagcggagggcccagtttcgggaccacagccttgctccctgggagctccgggcggccaatgccgggcaagcccagcccggcacaggaggaggcagggcccgtctccgg

SEQ ID NO: 876759 - DNA, 120 bp, Artificial Sequence
  ENSG00000234715_13 (sequence is synthesized)
aaagagggccagaggcagaactgagggcctggttttgtgtaattcgatttggatacaaacaggccagacccaaactggaaacggcgaagggctggattagcaccgaagggattcgaggag

SEQ ID NO: 876760 - DNA, 120 bp, Artificial Sequence
  ENSG00000234715_14 (sequence is synthesized)
gcaaacgggaagtaaaaatgctgtgtggagctgcagagggcaaggggacaggggttgcaaaggaaagagcttcgtgagactttctccttcccggcgtagggaccagcagagtgcgggcag

SEQ ID NO: 876761 - DNA, 120 bp, Artificial Sequence
  ENSG00000234715_15 (sequence is synthesized)
gtcagccctgtcaccggttcgtttagggaaaaagcgcgacatggggcctgggagacaggggcagaggcggtgacagcgagggcccctgctcgggtgggcccgcgggcctcagctcagtcc

SEQ ID NO: 876762 - DNA, 80 bp, Artificial Sequence
  ENSG00000234715_16 (sequence is synthesized)
cgcgcactcaccagcccgggctgccctgggcggagccgccccgccgcgctccacagccgctgcctcttcgacgcgcgcgc

SEQ ID NO: 876763 - DNA, 78 bp, Artificial Sequence
  ENSG00000234715_17 (sequence is synthesized)
tccaattcttttctaaaagtcttctggctagtcccagcatttccagggaagctgaacaggtgcagccggaggcttgga

SEQ ID NO: 876764 - DNA, 120 bp, Artificial Sequence
  ENSG00000234715_18 (sequence is synthesized)
aaaagaagctatgaaatatatataatttaagactataattttgttaaaaatatgtttatgtaaatgcgctaaaaaaagttctttaagaatatatgccaaaatattgacaatggttatccc

SEQ ID NO: 876765 - DNA, 120 bp, Artificial Sequence
  ENSG00000234715_19 (sequence is synthesized)
gttatcccctgagtgatttttattttcatccttaggattttctgtattttctgtttcacattttgaacatgtatacttttacaagaaaatatgaactaaaattaaaaatttttaaactcc

SEQ ID NO: 876766 - DNA, 120 bp, Artificial Sequence
  ENSG00000234714_0 (sequence is synthesized)
acatttctatttcaaggctattaacagtggagcagctgtacactaccagagaatttttagaaatcataatgaaattaaacagcagatacaaaaagaaaaaaaaaagatgccttctttaga

SEQ ID NO: 876767 - DNA, 120 bp, Artificial Sequence
  ENSG00000234714_1 (sequence is synthesized)
tgtcatccaggctggagtgcagtggcggatcataactcactgcagcctccaactcctggactcaagcgatcctcccgcctcagcctctcaaggacccttgtgattacattggacccacct

SEQ ID NO: 876768 - DNA, 120 bp, Artificial Sequence
  ENSG00000234714_2 (sequence is synthesized)
tctgtgaagttttacaactttcttctgcaaccaacccttctaaggaagttgaggatttcttctctctgtttttccctcatcatcttctaatgataatatagagatcaaaactcaagtggt

SEQ ID NO: 876769 - DNA, 120 bp, Artificial Sequence
  ENSG00000234714_3 (sequence is synthesized)
aaaaaggagcaagaatcccgctcctcctggatacaccagttttggatgtcaaaccgaatgctccattatctctacagatcgcgctgactcttcacactgtggaacatttcaacctcctct

SEQ ID NO: 876770 - DNA, 120 bp, Artificial Sequence
  ENSG00000269356_0 (sequence is synthesized)
gtgtggggacttcattttgattttcagtctgatctgttggggtctaggcaggagcttggtcccaaacaacacacccatgtgtgctgaggacacgctccaggggattcttacgcccgcctg

SEQ ID NO: 876771 - DNA, 120 bp, Artificial Sequence
  ENSG00000269356_1 (sequence is synthesized)
catcagagaacccaggtcttgtgggcgaggcagcgtggagagggagcgcagctctggagacggcccccagggcttgcgggcgggcgggcgaggcagcgtggagagcggagagcgaagctc

SEQ ID NO: 876772 - DNA, 120 bp, Artificial Sequence
  ENSG00000269356_2 (sequence is synthesized)
ctccctgcccgaggcgcaaactgtctcactccaaagggcgtccggagggttctgcggggcggctgtgcactgacacctgccccccacgtgggagtccgccggctcctggcccttgccggt

SEQ ID NO: 876773 - DNA, 120 bp, Artificial Sequence
  ENSG00000269356_3 (sequence is synthesized)
tggtgttgcgcgtctgagatgacgcccctgcggtaggagcggggtttccctgatcaccgcttcttttgaccatcttttctggcagggccttgtatttttaaaatgtgtaaaggttaagct

SEQ ID NO: 876774 - DNA, 120 bp, Artificial Sequence
  ENSG00000269356_4 (sequence is synthesized)
ttctgagatcagaaaaataatatttagtgaaccatgtgatttaagtcactgtgtatgtgacatgaaatatttatacctaacccactagcaaatggctcgttaaacatatttgagatttaa

SEQ ID NO: 876775 - DNA, 120 bp, Artificial Sequence
  ENSG00000272354_0 (sequence is synthesized)
tgtggtttctctaccattcctcctggattgtgtccaccttaaccagtgcagtgttatcctggaacagaggaaaccacagacctccagggcacacattagagaatactatttgcaggttta

SEQ ID NO: 876776 - DNA, 120 bp, Artificial Sequence
  ENSG00000272354_1 (sequence is synthesized)
acaaaattaaaaccagtttggttgaatgtttctcatcctgttttaaccacaaggagcagaaagatctgaaattctacagagattagaattttatcagaagaacttcaacatgataataaa

SEQ ID NO: 876777 - DNA, 120 bp, Artificial Sequence
  ENSG00000272354_2 (sequence is synthesized)
attcaccataaacttaactgaataagagcaataacaatttttaaaaagcttaaaaatgtagttgaattacctgttcaatattgtatgaaatgtgttcacagtaaaccttttgcaaatgtc

SEQ ID NO: 876778 - DNA, 120 bp, Artificial Sequence
  ENSG00000269900_0 (sequence is synthesized)
ggttcgtgctgaaggcctgtatcctaggctacacactgaggactctgttcctcccctttccgcctaggggaaagtccccggacctcgggcagagagtgccacgtgcatacgcacgtagac

SEQ ID NO: 876779 - DNA, 120 bp, Artificial Sequence
  ENSG00000269900_1 (sequence is synthesized)
caagaagcgtatcccgctgagcggcgtggcgcgggggcgtcatccgtcagctccctctagttacgcaggcagtgcgtgtccgcgcaccaaccacacggggctcattctcagcgcggctgt

SEQ ID NO: 876780 - DNA, 120 bp, Artificial Sequence
  ENSG00000269901_0 (sequence is synthesized)
taaaacatacatacatacatttattgattgattgatggatggatggatggagtctcgctctgttgcccaggagttcaaggctgctgtgagtgacaatcaagccactgcactccagcctgg

SEQ ID NO: 876781 - DNA, 120 bp, Artificial Sequence
  ENSG00000269901_1 (sequence is synthesized)
aaatgatacttgcatgtaacatgggttgtcaatctgagggactgtgggttgtcaatatccctgcagaccactcaccctcagaccagctcagtgggtcacactcactgaagtcaggaaata

SEQ ID NO: 876782 - DNA, 120 bp, Artificial Sequence
  ENSG00000269901_2 (sequence is synthesized)
ataacaactggcctacctgctctcactgagccgagctccgcaccaacccccgaccactgaagcacatcaagattcccaggggggtcctgccagtgccctgatgatcaggtggctcttcct

SEQ ID NO: 876783 - DNA, 120 bp, Artificial Sequence
  ENSG00000269902_0 (sequence is synthesized)
attgtatgtcttacttatttattcatttgacattttaattagacactagcagtattgttttctttgaatacatttaaaggtcctagatttatttctttttgatgctcatcttctaactca

SEQ ID NO: 876784 - DNA, 120 bp, Artificial Sequence
  ENSG00000269902_1 (sequence is synthesized)
ttccctcctatcaatctcagactgctgtaaataaatgattttttgccttttttttttttttttactattagttatcatatttatttttcttaaacaagctgtactggttatacagtctga

SEQ ID NO: 876785 - DNA, 120 bp, Artificial Sequence
  ENSG00000269902_2 (sequence is synthesized)
tgaatataatcattgggtaacaaatccagaagattaagttactaaggagaacatgcaaagtaaacacttgcattttatgaactaccttcaatttaaatagacaactgggtaactgtatat

SEQ ID NO: 876786 - DNA, 120 bp, Artificial Sequence
  ENSG00000269902_3 (sequence is synthesized)
gacatgttttgggagtaagacctgttaaacctacctacttcctactgttttcatttgaaaaataaatcaattattaaacagttattctacacattaaagactgtaagtgatttaaccttg

SEQ ID NO: 876787 - DNA, 120 bp, Artificial Sequence
  ENSG00000269903_0 (sequence is synthesized)
gatctcatctcgcactattgtgggaaacctgtgaaccacctccagccctttgctggatataaacgaccaagtacaaacccttctctgagccgttgtgccagcacctccaacgctcttccc

SEQ ID NO: 876788 - DNA, 120 bp, Artificial Sequence
  ENSG00000269903_1 (sequence is synthesized)
ggaggataacatttggagagtgccagcggtcagcagggctctgtgccaagtgtcttatatttggagtctgggtcagggccctgatttatcactgcatgtatggcttggccctggaggact

SEQ ID NO: 876789 - DNA, 120 bp, Artificial Sequence
  ENSG00000269903_2 (sequence is synthesized)
gttcacacagccttgatgtagattttcatcacactccccaagtgagggaaacttgcggccatacttgtgtgtgttctatgtaaaatgtgataaatgttaaatatactgcaaatctggtaa

SEQ ID NO: 876790 - DNA, 120 bp, Artificial Sequence
  ENSG00000269906_0 (sequence is synthesized)
acagttttctgttctttttacttgaatgattttcttcatgttgtatactttttatgagtggttttaatgactgcgtaatcttccatttggtgcatattcagtggttaatgaggacttgac

SEQ ID NO: 876791 - DNA, 120 bp, Artificial Sequence
  ENSG00000269906_1 (sequence is synthesized)
ctatacttcagaaatttggaaagaggagaagtgggacacgcccacattaatgggacttggccactaacggggtttgaaggacaaaggagagggaagagtcagataggattagcacagcac

SEQ ID NO: 876792 - DNA, 120 bp, Artificial Sequence
  ENSG00000269906_2 (sequence is synthesized)
ctggaggcttaagacagtttttggtagctgagggagaacagaaatagctatgtttactgttaatatagaatatgtgttattctttgcgttcacctttcccacctatattgtagacgtcac

SEQ ID NO: 876793 - DNA, 120 bp, Artificial Sequence
  ENSG00000269906_3 (sequence is synthesized)
tgatagcttgtaatacttttctacctgaggtttaagtatgtaaatatgaggaattaataacaagttaaactcttgttttgaaaatctaatttgccaaatataattgaggaaatactataa

SEQ ID NO: 876794 - DNA, 120 bp, Artificial Sequence
  ENSG00000269906_4 (sequence is synthesized)
gaactaaatctctactgatcctctcttaggagcaatttgagataatttttctaagtttaaagacagactttaaagcaactttccagtcacaacttcaaaataaagtacaagttaattgca

SEQ ID NO: 876795 - DNA, 120 bp, Artificial Sequence
  ENSG00000262020_0 (sequence is synthesized)
cgaatctccaggcaatccgatgaaaatagccagggacttccactctgcctaaaagctcttgtctgcaaagaagctggggcgaagcacgcagaatgctaggaagttggatcctgcagaatc

SEQ ID NO: 876796 - DNA, 120 bp, Artificial Sequence
  ENSG00000262020_1 (sequence is synthesized)
tttatgatattcacattaatccgcaaatgaagaataaacaaacagggcgatgtggtcaggatttcaaacatggagcaagaatttgggactggcatgggagcccactttgaacaaatgaag

SEQ ID NO: 876797 - DNA, 120 bp, Artificial Sequence
  ENSG00000262020_2 (sequence is synthesized)
ggcttctcgtttaaaaggaagacagttcatgctgctgagaataaactctaggggacaaaacagaagcaagtgactgggcaagagactactgcaataattcaggtttcaggacttccctta

SEQ ID NO: 876798 - DNA, 120 bp, Artificial Sequence
  ENSG00000262020_3 (sequence is synthesized)
cacaccacatgatctaacacactgtcgcgaggatcttttgaggaacagccagctaggttatgccaggcaagagtaaaaatgacccaaaattgcaccatggttacgtcagaagtctcagac

SEQ ID NO: 876799 - DNA, 120 bp, Artificial Sequence
  ENSG00000262020_4 (sequence is synthesized)
aacagaatatcatgcaggctactaaacacaagagttctgaatctatgaagtagcgaggaggcttccggactgctcccccgcccaccggacatcctggctgagctccctcatggcacgtct

SEQ ID NO: 876800 - DNA, 120 bp, Artificial Sequence
  ENSG00000274598_0 (sequence is synthesized)
atgttgaaagggaggagctatagctcacagcgagggccacaagagaaagcttcctggagaaggcataaacactggaagacaggcatgacgtcgggaggcagatgggaggaaggacaccat

SEQ ID NO: 876801 - DNA, 120 bp, Artificial Sequence
  ENSG00000274598_1 (sequence is synthesized)
gagccgagaaccacagtaggctttatggggacagtgctatagctggggatagaacagagaatgcgaagcatggagaacagggggaatagtgcgagaggtaatacaagaatggttttttat

SEQ ID NO: 876802 - DNA, 120 bp, Artificial Sequence
  ENSG00000274598_2 (sequence is synthesized)
atttaggttaacgacatacaatggctaattgtggcaacccatagagagttagcacaagaagtttggactctaatcaatagatgatgtcacatggctaaaagttctggggctgggaaagaa

SEQ ID NO: 876803 - DNA, 120 bp, Artificial Sequence
  ENSG00000274598_3 (sequence is synthesized)
tgtcatgagagcaatggttagcggctgtgcagagtgggcgagaggccagggaggcgcttgtcctgattcttctcaccaggccaaaagcttccggagctctgctgtcctataccacagctg

SEQ ID NO: 876804 - DNA, 120 bp, Artificial Sequence
  ENSG00000274598_4 (sequence is synthesized)
atagcctcatgtagctaattaaacttaaatttaaattaactaaaatgaaataaaatgacaaacccagtttcttggtcacacttactgcatcttaagtgttcagtcaacacatctggccag

SEQ ID NO: 876805 - DNA, 120 bp, Artificial Sequence
  ENSG00000274591_0 (sequence is synthesized)
aaaagtaaagaaaaagaaatggttttaaaaattattctggtttttagttattctgttgaattattcattactaaagttatgttccatttgaagatataatttgaatttcttatgtgacat

SEQ ID NO: 876806 - DNA, 120 bp, Artificial Sequence
  ENSG00000274591_1 (sequence is synthesized)
atttcttatgtgacatctgttgggcatagtctgcaatagcaaatgaagcaaataggaaagtaatttattcatcttttaaaatctttcaattgagactaataaaaatgtatgaatacattg

SEQ ID NO: 876807 - DNA, 120 bp, Artificial Sequence
  ENSG00000260778_0 (sequence is synthesized)
gtcaaaatccactggtggcgtttggggtgttcccgtggacgcggcctcccggcaggcggacctccaccgggtgggcgcggcaggcgggctgtgcgggcaggaagagcgacgagcttgaga

SEQ ID NO: 876808 - DNA, 120 bp, Artificial Sequence
  ENSG00000260778_1 (sequence is synthesized)
ccggggaggtgacactgccgctgagacccgaatggaagggcgcgcccggcgggggaacagcaggcgccgagatggagtctcactgtagtccagatggagtgcaatggcgtgatctcggct

SEQ ID NO: 876809 - DNA, 120 bp, Artificial Sequence
  ENSG00000260778_2 (sequence is synthesized)
gcgcagcgatgacgtaaacgcctggcccaatgggcgccagcgaggaagcgttaaagagtcaaggcagtttgtgggagtcgcgctggggacgttcaaggtgtctcctagccgatggagtct

SEQ ID NO: 876810 - DNA, 73 bp, Artificial Sequence
  ENSG00000260778_3 (sequence is synthesized)
cacttccttgaacacagaggtgaccatgaggagggaggcgtgaaccaggatgacggggcagcagatggagcct

SEQ ID NO: 876811 - DNA, 120 bp, Artificial Sequence
  ENSG00000260778_4 (sequence is synthesized)
ggaggcgtgaaccaggatgacggggcagcagatggagcctgcctccctgagacctcaggtgaccgagtgctggactgcctcctcctgcctacatggctgagaaataaacttctttttcaa

SEQ ID NO: 876812 - DNA, 120 bp, Artificial Sequence
  ENSG00000260778_5 (sequence is synthesized)
cgtgtgttgaggaaggaaggcagggcccccgctccccgggcctgaccccactgcttcagccccctcctgcctgcctacagcctggcctcgagggcccatcagatggagtctcactgtagt

SEQ ID NO: 876813 - DNA, 120 bp, Artificial Sequence
  ENSG00000260772_0 (sequence is synthesized)
ataaaatgggtacattatgggcagtgtaatacaagctttcttttcattgcctagtactttaccagcagaccacagttttgccctggctagaccaaccctcagaacaaaatcatcattcct

SEQ ID NO: 876814 - DNA, 120 bp, Artificial Sequence
  ENSG00000260772_1 (sequence is synthesized)
tgtatttatatttgtatctgagatagtaaacaagatggctggccaggtcaacatggcaccttaacttatttttttaataggtaaaacttcttcaaaagtagcttgctttgtataagaact

SEQ ID NO: 876815 - DNA, 120 bp, Artificial Sequence
  ENSG00000260772_2 (sequence is synthesized)
aagctatcagtatagatatagctatccttggagcttatgtttcagacaagaattatttactaaaataaataataaacaagataatgcattatacaatttgggcatttctcgtttctcaag

SEQ ID NO: 876816 - DNA, 120 bp, Artificial Sequence
  ENSG00000260772_3 (sequence is synthesized)
tgtatgcatcatggtaaatataaactaaccacaagataggtagattgattcatttcattttaatctccttgtgtaattcagtacctccataattgttctaatcttcttcccactgtttac

SEQ ID NO: 876817 - DNA, 120 bp, Artificial Sequence
  ENSG00000260772_4 (sequence is synthesized)
aaattaccagttaattaactcgtgaaagaaaaattcacatatcagaataaaaataaatgtatactcactttataaaaatcaccactgctgtctttccttaatactagcagtggaaatgta

SEQ ID NO: 876818 - DNA, 120 bp, Artificial Sequence
  ENSG00000260772_5 (sequence is synthesized)
agtggcttactctacaaattttggtgctggcaaatacataggcaaactgttgggagctgctctagttacattcctcccttcttattccctttttctcttcctcactttattgcataacat

SEQ ID NO: 876819 - DNA, 120 bp, Artificial Sequence
  ENSG00000260772_6 (sequence is synthesized)
gttctatttgactcccacttgtaataactcctttaaaaaattccatgtttaaccatatgaccctgcttgcttactcatattctccctccctctccccttcctttctctctcttccagaag

SEQ ID NO: 876820 - DNA, 120 bp, Artificial Sequence
  ENSG00000260772_7 (sequence is synthesized)
tcatttgcctggtttgaaatattttgtagggattgcttattatattattttagctgatgaacctcaggacaacgtctacacacacacacatacatacacgcacacaaaatctcagctgtt

SEQ ID NO: 876821 - DNA, 120 bp, Artificial Sequence
  ENSG00000260772_8 (sequence is synthesized)
gaagagtgggcttggaatcagacttctgtgtccagtaaaaaactcctgcactgaagtcattgtgacttgagtagttacagactgattccagtgaacttgatctaatttcttttgatctaa

SEQ ID NO: 876822 - DNA, 120 bp, Artificial Sequence
  ENSG00000260772_9 (sequence is synthesized)
tgaatgtgtctgcttaccttgtttccttttaattgataagctccaagtagttgctaattttttgacaactttaaatgagtttcattcacttcttttacttaatgttttaagtatagtacc

SEQ ID NO: 876823 - DNA, 120 bp, Artificial Sequence
  ENSG00000260772_10 (sequence is synthesized)
aataatttcattaacctgttctcaagtggtttagctaccattctgccatttttaatttttatttaattttatttgcttgagcacactgatcaaccactgaactgccttcttccattgtcc

SEQ ID NO: 876824 - DNA, 120 bp, Artificial Sequence
  ENSG00000260772_11 (sequence is synthesized)
tgcaatgatataagggttacatttttgtgtatatggctttcatagttgggatttcagagcactgataccagatattttcagtttgttctctgggggaatttcatttgcatctatgttttt

SEQ ID NO: 876825 - DNA, 120 bp, Artificial Sequence
  ENSG00000260772_12 (sequence is synthesized)
agctatctgtgataacttgttaaatattaaaaagatattttgcttctattggaacatttgtatactcgcaactatatttctgtaaacagctgcagtcaaaaataaaacactgaaagtttt

SEQ ID NO: 876826 - DNA, 120 bp, Artificial Sequence
  ENSG00000260773_0 (sequence is synthesized)
ctcaaaaatgtcttagaaaatgaattattttataaaatgaaacccatttatagttcatgaaattagagatcagcaaatttgggtcatgttcaccttgggtacaggaaaagtattacacat

SEQ ID NO: 876827 - DNA, 71 bp, Artificial Sequence
  ENSG00000260773_1 (sequence is synthesized)
gggtcatgttcaccttgggtacaggaaaagtattacacatgtcttacttgcatttctttttttttttgaga

SEQ ID NO: 876828 - DNA, 120 bp, Artificial Sequence
  ENSG00000260773_2 (sequence is synthesized)
gggactacaggcgcctgccatcacgcccgggaagcagctccacaactaccacatctccatgaattgagcggtttcgagccttcatcccgtggattaggatgtcactgactaaatctgtgt

SEQ ID NO: 876829 - DNA, 120 bp, Artificial Sequence
  ENSG00000260773_3 (sequence is synthesized)
gtgtttggggcagcacagaaaaaacccataaagccaagggaatggcacaccagtgaggcattccgcgcatgatatactcgaagtctaatcagtactcctgcaagtaaagctttttctttt

SEQ ID NO: 876830 - DNA, 120 bp, Artificial Sequence
  ENSG00000260777_0 (sequence is synthesized)
ggcaagggcggagttagttaggtttccttttcctgagtgtgacgcgccttagtgggcacacgtgctagccgggatggtgggaacggggggaagatgaacccagaaatgctgagtcagggt

SEQ ID NO: 876831 - DNA, 120 bp, Artificial Sequence
  ENSG00000260777_1 (sequence is synthesized)
ggccaagatggttgcctgtcgccatcttggggccttcaccagagtccaaacaaaaagctaagctagggcctggttctgctcccagtctagcattggaaccacttctaggaacgtttcttg

SEQ ID NO: 876832 - DNA, 120 bp, Artificial Sequence
  ENSG00000260777_2 (sequence is synthesized)
ctgagtcagcttgtcatacagatcctggtctacattttgaaccttacttttgaggtgaaaagctcagctaggtcctggctctggtcccagtctagcattggaaccacttctaggaacgtt

SEQ ID NO: 876833 - DNA, 120 bp, Artificial Sequence
  ENSG00000260777_3 (sequence is synthesized)
tcttgctgagtcagcttgtcatacagattctggtctacatttagaaccttgcttttgaggtgaaaagtgaaaggcaatggaagggttccatagacaaaaagggtcgagaggcagggcaaa

SEQ ID NO: 876834 - DNA, 120 bp, Artificial Sequence
  ENSG00000260777_4 (sequence is synthesized)
gaatgcaaaagttcctttattaagctcttggacgaggttcactggtccgcaggggagggccggggaagtcgcactgtgttggaggtgcagcaggcttatatggacactaggtgagttagg

SEQ ID NO: 876835 - DNA, 120 bp, Artificial Sequence
  ENSG00000260777_5 (sequence is synthesized)
ggcggattcggggtggggcaagggcggagttagttaggttttattttcctgagtgtgacacgccttagcgggctcacgttcttgccgggatggcgggaacggggggaagatgaacccgct

SEQ ID NO: 876836 - DNA, 120 bp, Artificial Sequence
  ENSG00000260777_6 (sequence is synthesized)
aatgctgagtcagggtggccaagatggttgcctgtcgccatcttggggccttcaccggagtccaaacaaaaagctaagctagggcctggttctggtccctgtctagcattggaaccactt

SEQ ID NO: 876837 - DNA, 120 bp, Artificial Sequence
  ENSG00000260777_7 (sequence is synthesized)
gtttcttgctgagtcagcttgtcatacagatcctggtctacattttcaacctacttttgaggtgaaaagctaagctagggcctggttctggtcctagtcttgcattggaaccacttctag

SEQ ID NO: 876838 - DNA, 120 bp, Artificial Sequence
  ENSG00000260777_8 (sequence is synthesized)
gtttcttgctgagtcagcttgtcatacagatcctgatgtgcagcagcaaattgctctggctccgggggcaggtctccagctgaatgtgtgcctacgaatggaatcaaagtctcatcaaaa

SEQ ID NO: 876839 - DNA, 120 bp, Artificial Sequence
  ENSG00000260777_9 (sequence is synthesized)
gtctcatcaaaatctcagtcagttcctgaggcagaagagatgggtgtgtcttatccaagatttctctggctccaggggcaggtctccagctgaatctgtgcctacaaatggaatcaaagt

SEQ ID NO: 876840 - DNA, 120 bp, Artificial Sequence
  ENSG00000260777_10 (sequence is synthesized)
ctcatcaaagtctcagtcagttcctgaggcagaagagatgggtgtgtcttatccaagatttctctggctccaggggcaggtctccagctgaatctgtgcctacgaatgcaatcaaagtct

SEQ ID NO: 876841 - DNA, 120 bp, Artificial Sequence
  ENSG00000260777_11 (sequence is synthesized)
atcaaagtctcagttcctgaggcagaagagatgggtgtgtcttatccaagatttctctggctccaggggcaggtctccagctgaatctgtgcctacaaatggaatcaaagtctcatcaaa

SEQ ID NO: 876842 - DNA, 120 bp, Artificial Sequence
  ENSG00000260777_12 (sequence is synthesized)
gtctcagtcagttcctgaggcagaagaggtgggtgtgtcttatccaagatttctcttatggaacaaagttacatcaaagccaatttaaaagcctatgtaaaaaaaattattattattgat

SEQ ID NO: 876843 - DNA, 120 bp, Artificial Sequence
  ENSG00000260777_13 (sequence is synthesized)
gcaatgtatacaaatatatagaccaatataataagtttactattcctaccatgatttgtctttagtaaaatgggaaactggagaaaaacttatgtttccaaatgattatatatctgtgtt

SEQ ID NO: 876844 - DNA, 120 bp, Artificial Sequence
  ENSG00000260777_14 (sequence is synthesized)
agattctagtcttgcctaattttttttcaatttggattactttctacagtttggaccaaattctaatttttttttattacaagtctccaaaataatttttaaatttttttttccttcttt

SEQ ID NO: 876845 - DNA, 73 bp, Artificial Sequence
  ENSG00000260777_15 (sequence is synthesized)
aagtctccaaaataatttttaaatttttttttccttcttttttaaaatcctgtgaactgaagccagacaactt

SEQ ID NO: 876846 - DNA, 120 bp, Artificial Sequence
  ENSG00000260777_16 (sequence is synthesized)
aaaccactttcatacctgcctactgatgcatagacttcagagtaatgaggcctatatcaaatgtttcccggattgttcttttgtttgttgttgttttctctctcttcctcccactatttt

SEQ ID NO: 876847 - DNA, 120 bp, Artificial Sequence
  ENSG00000260777_17 (sequence is synthesized)
ctcttcgcaggacatgagacttaacaacctgctaaaaatgagcttttgggacctacccatcaaggaataaactgtcctcgccatgagagatcaaatgaaacctgagaccagagactcatt

SEQ ID NO: 876848 - DNA, 120 bp, Artificial Sequence
  ENSG00000260777_18 (sequence is synthesized)
ttcttgtaaaatgctttctccaacagatttttaaaaagaaaaggggggaaatgtgaaaggaaaatatctgtggtccccaaaatcacgaaggaaaactcaagccgggaactgcttagggca

SEQ ID NO: 876849 - DNA, 120 bp, Artificial Sequence
  ENSG00000260777_19 (sequence is synthesized)
tgcctcccattctattcaaagtcactcctttgcccaatcagatagatgcttatctgatttgcctcctttggaaaggctgatcagaaactcaaaagaatggaaccatttgtgtaacagcca

SEQ ID NO: 876850 - DNA, 120 bp, Artificial Sequence
  ENSG00000260777_20 (sequence is synthesized)
gccatctgtgacctggaagcttccttcccacttcagtcttcctgcctttgcttcaagttgtcctgtctttccagatgaagcaatgtacttcttaacatatattgactgatgtctcatgat

SEQ ID NO: 876851 - DNA, 120 bp, Artificial Sequence
  ENSG00000260777_21 (sequence is synthesized)
atgtctcatgatgtctccctaaatgtatgaaaccaagctgtgcctgacaaccttggacatattttgtcaagacttccctgaggctgtcattggtgcatcctcaaccttggcaaaataaac

SEQ ID NO: 876852 - DNA, 90 bp, Artificial Sequence
  ENSG00000260986_0 (sequence is synthesized)
ctgttttggcttgtattgacaagttgttttcacacagcccccacatcacccaaccaaccagcagagatcctccttcccaagaaacagata

SEQ ID NO: 876853 - DNA, 120 bp, Artificial Sequence
  ENSG00000260986_1 (sequence is synthesized)
caaccaaccagcagagatcctccttcccaagaaacagataaagaaactgaggcccaggaaggctaagagtcctgccaggattattcacctttcaagccaagcaagcactggctgtgagag

SEQ ID NO: 876854 - DNA, 120 bp, Artificial Sequence
  ENSG00000260986_2 (sequence is synthesized)
ggctgtgagagaagattaaaacaattacaactcacccagttcacagatgctgagtaactgatctcctgccccactaaccttaacgacagctttctctggacaagggactgatttcagtaa

SEQ ID NO: 876855 - DNA, 74 bp, Artificial Sequence
  ENSG00000260986_3 (sequence is synthesized)
tgataagagaccatcctccatggactggttctggccagttttagaggctgtgcctttacgaggctgagtacctt

SEQ ID NO: 876856 - DNA, 120 bp, Artificial Sequence
  ENSG00000262898_0 (sequence is synthesized)
ttcagatgatggggaagccgggcatcacggagagctgagaagactcgcttgttcacacttactcgaaagcagaagaggcctgggaacttcagctggcgactctggtgtttctgactttgg

SEQ ID NO: 876857 - DNA, 120 bp, Artificial Sequence
  ENSG00000262898_1 (sequence is synthesized)
ctatcagcaaacactgctggaggctctgccccgtccacacccagcttctgtgagcacggaggaggcataatctgcaaagtctgacacaggccatgcctaaccatccttgactggctacct

SEQ ID NO: 876858 - DNA, 120 bp, Artificial Sequence
  ENSG00000262898_2 (sequence is synthesized)
aggctgcagtcatttaggagagtggacggatgccagggctgtgctgcctgcagcctttgtggggctcagtgaccagaggagcagcccatgccaagcctagtccccagggatgctgcctgc

SEQ ID NO: 876859 - DNA, 120 bp, Artificial Sequence
  ENSG00000262898_3 (sequence is synthesized)
ggtgctcacgcatcttatacagggacacagaggaactctgggctccaccctgcagcctctgctccagcacgcggtggtcccaggagatgtagaaccagcccttcctctgcagttgcactg

SEQ ID NO: 876860 - DNA, 120 bp, Artificial Sequence
  ENSG00000262898_4 (sequence is synthesized)
gtgagaaggtggctgtctgcaagccaggaagagggccctcaccagaacccaactcagctggtaccgtctgcagcttccaaactccagaactgtgagaaataaatgtgtgttgttattaaa

SEQ ID NO: 876861 - DNA, 120 bp, Artificial Sequence
  ENSG00000262898_5 (sequence is synthesized)
aggcagaattatcttttaaaaactttgcatatgaggtgcttgataaaagctagttggatttgaatttggccacagctcagataatctggggaactggggtgtctgctaaggatatgtgac

SEQ ID NO: 876862 - DNA, 120 bp, Artificial Sequence
  ENSG00000262898_6 (sequence is synthesized)
gggaacaacaagatcaacaagaggagcaagaacaacatcaagagttggggcctgggggtcctgacgggtacaggatgggtacagacccacacaggaatcccagagtgtgttccacagcag

SEQ ID NO: 876863 - DNA, 120 bp, Artificial Sequence
  ENSG00000262898_7 (sequence is synthesized)
gacacgcctgcgctgaaagagtgggcagaaaggagctgacctgggattatgatccaaactcagctgggcctcccctccctgccccaggattgtggagtgagaacgttgcagcaggagaga

SEQ ID NO: 876864 - DNA, 120 bp, Artificial Sequence
  ENSG00000262898_8 (sequence is synthesized)
acaacgcagcaaagcacagcaggggaaccggaaatgctcaccttttgacagggtacttttagttctggggccttatcttaaggatattccaacatatacaaaaagattcatgcacagaga

SEQ ID NO: 876865 - DNA, 120 bp, Artificial Sequence
  ENSG00000262898_9 (sequence is synthesized)
tatttactttagtattatttaccataggaaaaaagttggaaacaatacattttatgttctgtaaaatgaaagaacagttaaataaatcatggctctaagacgactccagggctgtgtacg

SEQ ID NO: 876866 - DNA, 120 bp, Artificial Sequence
  ENSG00000262898_10 (sequence is synthesized)
gaagttcagggacagaatcagttgaggctgttccacctgagcctaagcttcctctgctgtatgtcgggaatcaggtgggggccaagcgagatcaccacagtgcaggccagtgtgcagggc

SEQ ID NO: 876867 - DNA, 120 bp, Artificial Sequence
  ENSG00000262898_11 (sequence is synthesized)
acaggtgggcgccagggaggggacgccgcacagccccatgctctcgccaaaaacgtgcagcacaatttggaagaaaacatttccatctgttaataaagagcaacggcctctggtcataag

SEQ ID NO: 876868 - DNA, 120 bp, Artificial Sequence
  ENSG00000262898_12 (sequence is synthesized)
gggcgacgctcagggcggctgtgtgagcatccgtgtcaggtgggctgctggatgctggggggtcactgactcacccctagggctgagggcgggtgggttactggcctccacatgggtgtg

SEQ ID NO: 876869 - DNA, 120 bp, Artificial Sequence
  ENSG00000262898_13 (sequence is synthesized)
acaacctggcagtgagggatggtcatgcagacatgtgttgggcatggagcatccgtggtggtggaagccctcccatgccgggccgcggggcagggctctgggagaggacgcaggatccct

SEQ ID NO: 876870 - DNA, 120 bp, Artificial Sequence
  ENSG00000262898_14 (sequence is synthesized)
ccctgcatgtctgtctgcagatcagcttcacctgcccccaccctggcagttcaatctactgtcattagacccacctgccctcaccctggcctgcacccttcaatctactgttattagacc

SEQ ID NO: 876871 - DNA, 120 bp, Artificial Sequence
  ENSG00000262898_15 (sequence is synthesized)
cacggggtttcttggtgattaaacgtgtgtgttgctctctgcacatccaagaactgcagaaagaggtttttctcattcctgtgatagatgaaagtgcaatttttaaaaacagtgaaacta

SEQ ID NO: 876872 - DNA, 120 bp, Artificial Sequence
  ENSG00000262898_16 (sequence is synthesized)
ttcctgcacaagagaactgtgactggattctgccagggaggagctgtgaccagcagggcagagacatgggagggaagagccggcgtcacctccaggcctcctgcgcccgagaggagggaa

SEQ ID NO: 876873 - DNA, 120 bp, Artificial Sequence
  ENSG00000262898_17 (sequence is synthesized)
agccatttgcttggtttaggaaaagcctaagcttctgcccccccgattcaccacagaagccctctattatcactcctgttacgtgtaaaggctgagttattgctaactctcaacaggtcc

SEQ ID NO: 876874 - DNA, 120 bp, Artificial Sequence
  ENSG00000262898_18 (sequence is synthesized)
tagaatcctttatgtgcattcgggggactgggggaggccctggacactgtgccaggtgctgtgtctcaaggttcactggacctgacagggagattgggaacaaaggccctgagagatgtg

SEQ ID NO: 876875 - DNA, 120 bp, Artificial Sequence
  ENSG00000262898_19 (sequence is synthesized)
gggagcagcctttgtgtctgagctgtcactcagctctttgctttatgccactggcgtacctgctggaggaactccatgtggaggaaggctgggccctgtggggggcattcgagggggaca

SEQ ID NO: 876876 - DNA, 120 bp, Artificial Sequence
  ENSG00000262898_20 (sequence is synthesized)
ctctggccagcctcaggctgggtccacctagggggaggaggggacaagccacctcatggatgttgtacacagtggcccaaaagtgaccttaaaaatggatttaaggaataaatccaaatc

SEQ ID NO: 876877 - DNA, 120 bp, Artificial Sequence
  ENSG00000262898_21 (sequence is synthesized)
caaatataagacataagccatctgaagaaacagccttggtgattgtctttgaacctccagactgtggggtgacttgcctcatacaggctgatatggaagtgcttatctcagtaacttcac

SEQ ID NO: 876878 - DNA, 120 bp, Artificial Sequence
  ENSG00000262898_22 (sequence is synthesized)
tgtgctctgtctgaagagaagatgtttcgcggctgagtggcccgcattgcatcttataaaagcggagcccagggagaccgaatctggctcgtgtctctagcattgcttgagagtggggac

SEQ ID NO: 876879 - DNA, 120 bp, Artificial Sequence
  ENSG00000262898_23 (sequence is synthesized)
attttggccccagacacaggattctgacctgtgtgggaggcacgtccctgtgttggaggtgggtgcccccagcttctacatattaatgatgtccctgttagggttactttgcccatcccc

SEQ ID NO: 876880 - DNA, 120 bp, Artificial Sequence
  ENSG00000262898_24 (sequence is synthesized)
gacggcacaggagccggtcatcatccccaaagacacagctccgaatacctcatcctgaaatcccaaagatcaaaatcccaaaagtataaatctggaaaaaataatgtcgatgttatttat

SEQ ID NO: 876881 - DNA, 120 bp, Artificial Sequence
  ENSG00000262898_25 (sequence is synthesized)
gaccacagagcccctggagcctgcacgccacggagtctcccactgaggagtgaggaggcctcttgtggggacagatctggaatgagtggcatccaaacctgactcatatttccaacttta

SEQ ID NO: 876882 - DNA, 120 bp, Artificial Sequence
  ENSG00000262898_26 (sequence is synthesized)
ttaatttttgcaagacttcggagggtgctctgtggcgattaatattgctgagctgagcacagctgcagtactttcctgtaaaactgactaaaggagaagttggtgtcttcctcatacaag

SEQ ID NO: 876883 - DNA, 120 bp, Artificial Sequence
  ENSG00000262898_27 (sequence is synthesized)
aaatacataaatcagttaaaaatagttctccgagcggatatgatgatgtcgtggccgtcacaggaaacacatgaatcagcctcatcctcagttccagggaagtggggacagtcggtggtc

SEQ ID NO: 876884 - DNA, 120 bp, Artificial Sequence
  ENSG00000262898_28 (sequence is synthesized)
cagaggccattctgctccagagtggggcatagcctcgggcgaggttcacagcttggggggctggtcctgccctgtcccacatgtggctgtgtgggcagcatggatcttcttccgcggtga

SEQ ID NO: 876885 - DNA, 120 bp, Artificial Sequence
  ENSG00000226251_0 (sequence is synthesized)
aggttggttctctctcatgagccccctcaccatgtgatgtcccaagctgccttgggactctgcagagggtccccataagaggaaggccccgactagatggaatcctttgtccctggactt

SEQ ID NO: 876886 - DNA, 120 bp, Artificial Sequence
  ENSG00000226251_1 (sequence is synthesized)
ctcagcctccagaactctttcccattgagtgttttcaatgggaaatgtctaactgctctgtgggtgtacaccacggccagttgctaattttggaacacttgtgaatcctgggcccagagt

SEQ ID NO: 876887 - DNA, 120 bp, Artificial Sequence
  ENSG00000226251_2 (sequence is synthesized)
catgaccaatactgttgcctcattttaccttctgaaatgatggaggaagttctgctgaggatggggtcagggtaacagcagacttctgaataactctgcacccccagaaacctgcaaagg

SEQ ID NO: 876888 - DNA, 120 bp, Artificial Sequence
  ENSG00000226251_3 (sequence is synthesized)
cttccaccccggatatcactgtgaacctcttgcagccagcctattatgggacctcatcttgtgatcgtgattccccaggatcaaccatctgagcagataccttggaatgtccccagattt

SEQ ID NO: 876889 - DNA, 120 bp, Artificial Sequence
  ENSG00000226251_4 (sequence is synthesized)
cagagcctcggaccagcagcaacacactctgaagtaggtctcagaagacaaaaagctgaaatcaactcatgcttcctgctacacagaatccactgagaggaaaaggaaacttcaccgaaa

SEQ ID NO: 876890 - DNA, 120 bp, Artificial Sequence
  ENSG00000226251_5 (sequence is synthesized)
cttcagaaagctacagaaatgacatccattttcacaatcccagaaggaaagatgcatctgaagggaataaaaacagagcaatggaagagtatttgttaaaataaatggctttgacagggc

SEQ ID NO: 876891 - DNA, 120 bp, Artificial Sequence
  ENSG00000226251_6 (sequence is synthesized)
atctctgctgagagaagaacttgaaaaaatgggcatgaaactaaagggatttgtgcttgctgagtaagagcttctacaaggattccccaggatcaaccatctgagcagataccttggaat

SEQ ID NO: 876892 - DNA, 120 bp, Artificial Sequence
  ENSG00000226251_7 (sequence is synthesized)
gcttggcgaactccttgaggacatgggctttgttttctgttccattttaccctccactgtgccttcgcagggattccccaggatcaaccatctgagcagataccttggaatgtccccaga

SEQ ID NO: 876893 - DNA, 120 bp, Artificial Sequence
  ENSG00000226251_8 (sequence is synthesized)
aactgccaacttctactgacagccttctagaaaaaaccctgacattcaatgtctgggtgaagtaatagtaacaggaatcattgccatgaagggcagtctgtcaacttgggcgtgcaaaca

SEQ ID NO: 876894 - DNA, 120 bp, Artificial Sequence
  ENSG00000226251_9 (sequence is synthesized)
gagccccctcaccatgtgatgtcccaagctgccttgggactctgcagagggtccccataagaggaaggccccgactagatggaatcctttgtccctggacttctcagcctccagaactga

SEQ ID NO: 876895 - DNA, 120 bp, Artificial Sequence
  ENSG00000226250_0 (sequence is synthesized)
ggagctcagcttagagaacaggaagtgggagccacataccccgagctggcggcttgagcctgtggtatctaggctcacctcactgcggttggtggaggtgatggaggttgcagcttggcc

SEQ ID NO: 876896 - DNA, 120 bp, Artificial Sequence
  ENSG00000226250_1 (sequence is synthesized)
agcatggtagaaaggtggcagggcacgtctggcttttaccacccagttgcttcgagccaggagatggaggagtcatctgttgcacgctggaggctggagcctgcagatggcatggttctg

SEQ ID NO: 876897 - DNA, 120 bp, Artificial Sequence
  ENSG00000226250_2 (sequence is synthesized)
tggctcacctcgctgcagttggtggcagagacagagactgcagcttgaccagagtggtggagtggtaggagagtgtctgcgggggcctcctggaggtgatatgtatctcaagagcactcc

SEQ ID NO: 876898 - DNA, 120 bp, Artificial Sequence
  ENSG00000226250_3 (sequence is synthesized)
gaaacctgtgtaacacagttatgcatagagtggtcttaggaagctgactctaacatgaaaatttagagttggatcttttgctgacatattgaatattcataagagcatatgatacatttg

SEQ ID NO: 876899 - DNA, 120 bp, Artificial Sequence
  ENSG00000226250_4 (sequence is synthesized)
tctatcataaacatgtcatttcaaaaaaccctcaaagttgccttgtagaacataattttaaaactagtgtgtaggaatatttcatatcagttattcagtcttcttaatatctgaaccgaa

SEQ ID NO: 876900 - DNA, 120 bp, Artificial Sequence
  ENSG00000226250_5 (sequence is synthesized)
atctgaaccgaaattaatcttccattctgcttttatttataaataatgatttattgtcagattcaataatttatattttcatttattctaaggtaggaaataccagcataaaaataaatt

SEQ ID NO: 876901 - DNA, 120 bp, Artificial Sequence
  ENSG00000226250_6 (sequence is synthesized)
caagaacctgcagtgttgagcccttttttatttctggtattactacctttgatatgtatctcaagagcactccacaacaaagattctgcctgcaatcctccacttcaaggtctgttccag

SEQ ID NO: 876902 - DNA, 120 bp, Artificial Sequence
  ENSG00000226250_7 (sequence is synthesized)
cagttggtggcagagacagagactgcagcttgaccagagtggtggagtgagtattgtcatctgcatgagcaaatctggttcatcacatctttgcaacaggaaaaggaagggaggatcatg

SEQ ID NO: 876903 - DNA, 120 bp, Artificial Sequence
  ENSG00000226250_8 (sequence is synthesized)
ctggagcctgcagatggcatggttctgtggctcacctcgctgcagttggtggcagagacagagactgcagcttgaccagagtggtggagtggttggagtgcagtggcatgatcttgactc

SEQ ID NO: 876904 - DNA, 120 bp, Artificial Sequence
  ENSG00000226250_9 (sequence is synthesized)
ttgaagtttatgcattttattgactactttaaagaaacaatctatattgtatcatttttcaagcccacaggaatgcataaagtctataattttgacactttttatttttaaggttatgag

SEQ ID NO: 876905 - DNA, 120 bp, Artificial Sequence
  ENSG00000226250_10 (sequence is synthesized)
catgtaaaatactgttgatatgtgtaaggatatgtaaaaatgccactagatagcttatgttgaagagatagtgtctaaatttttgtccagagtggattggttgcagtttcttaggtgtgt

SEQ ID NO: 876906 - DNA, 120 bp, Artificial Sequence
  ENSG00000226250_11 (sequence is synthesized)
tcctcaatacattgcctcaatgttttaaagcatatagaaatattaatactatttaacctcatatagtcctttgtaggttgcttaatatttctacagactaaagatagcacagcctccatt

SEQ ID NO: 876907 - DNA, 120 bp, Artificial Sequence
  ENSG00000226250_12 (sequence is synthesized)
aatattcagtaatattaataaaatttgggatatatagcgttagaatccaacaaatccagaggaaaattgttaaattatatagctgtagagcaggaaatgaaacccaggttccaagctcta

SEQ ID NO: 876908 - DNA, 120 bp, Artificial Sequence
  ENSG00000226250_13 (sequence is synthesized)
agggggccataagctaccatacaagtgaatcagtgactgggcatagagtcagcaaaattacaggatggttaaaagagagctgtggagtctaacactatgtaaacataaaattttaaactg

SEQ ID NO: 876909 - DNA, 120 bp, Artificial Sequence
  ENSG00000226250_14 (sequence is synthesized)
ataccccgagctggcggcttgagcctgtggtatctaggctcacctcactgcggttggtggaggtgatggaggttgcagcttggccagcatggtagaaaggtggcaggactctagattcta

SEQ ID NO: 876910 - DNA, 120 bp, Artificial Sequence
  ENSG00000226250_15 (sequence is synthesized)
gagactgcagcttgaccagagtggtggagtgatatgtatctcaagagcactccacaacaaagattctgcctgcaatcctccacttcaagtgattccctaaggtccacaaagaacgcaaga

SEQ ID NO: 876911 - DNA, 120 bp, Artificial Sequence
  ENSG00000226250_16 (sequence is synthesized)
cagagtagatgctcatagaaggcaccaattcaagaggaagcccgctgctcatagtgatacttccctgcccacgtttctgtacacttgggcagtgcagcacctcttctatagtgtctctta

SEQ ID NO: 876912 - DNA, 120 bp, Artificial Sequence
  ENSG00000226250_17 (sequence is synthesized)
tttttcacttcttgacacacggtcgcattgttgttgttgttgttttgacaacaggtttagccttgggacttgcttctaaatgtaagcagcagtgatttgtgaagtgtgacaaactgggac

SEQ ID NO: 876913 - DNA, 120 bp, Artificial Sequence
  ENSG00000226250_18 (sequence is synthesized)
tcaattctccatgttgtcttgttagttatgaccttgaaagcttttttccacatggatcttcaaatagatacagtgagtaaagtcttctagtaacttgcatggccatgtaaaagaaataac

SEQ ID NO: 876914 - DNA, 120 bp, Artificial Sequence
  ENSG00000226250_19 (sequence is synthesized)
ctttcactggattaaaccagtgataatatgtgaaagctataagaagtatcctaggtgaaaagtgtatattcacgtcagacatgagataaatgctcaataaatgtgttttctcactcataa

SEQ ID NO: 876915 - DNA, 120 bp, Artificial Sequence
  ENSG00000226252_0 (sequence is synthesized)
aggtgcgggggggccatgctggcctcggccgcgtcccgtccctctagctgggggtcactgcgagccgcctcgctcggcggccgctcggtcatcctgtgggcagacagacagacaagcgga

SEQ ID NO: 876916 - DNA, 120 bp, Artificial Sequence
  ENSG00000226252_1 (sequence is synthesized)
tgcccgctctgacgaccgcccctgacccaccgacgtgggctggggtaaaggggagaagggcagagagaggaactcacgcaccgagacgtgagaagaggcagacaaagttagcgccacgtg

SEQ ID NO: 876917 - DNA, 120 bp, Artificial Sequence
  ENSG00000226252_2 (sequence is synthesized)
gggctagggcgggaggccggttggggctagggtgggagggaaagagggtctctggattgggagaagggaggggtgcctgggagacacagagactgagggccaaaaggacagagatggagg

SEQ ID NO: 876918 - DNA, 120 bp, Artificial Sequence
  ENSG00000226252_3 (sequence is synthesized)
aagacgacagagacaccggaagaaaaggaatacagccagcgacagaaacacagaaggggaaatcaggaggaaggaaatgtacaaggaggtgtgctggggctcttccatcacctggcttca

SEQ ID NO: 876919 - DNA, 120 bp, Artificial Sequence
  ENSG00000226252_4 (sequence is synthesized)
tccagatagagctgggcaccagcaagaaccaaaacagaaaaatcaggagactcaagggccagagtttgtgagttgtgagttgtacatatatgatcaacaccacataagttgtttaaaata

SEQ ID NO: 876920 - DNA, 120 bp, Artificial Sequence
  ENSG00000226252_5 (sequence is synthesized)
agctttctgctctctgaattatataattgggtatttaaaagaagaaaacaaatacaaaaaaacaatttacccccatgcagagtccatctaaatcatacatagcagccattgagctcccat

SEQ ID NO: 876921 - DNA, 120 bp, Artificial Sequence
  ENSG00000226252_6 (sequence is synthesized)
actgccactgcaatgctctggacaggagtcatcctaggaaccatccctcccaccccagaagggagaatggatcatctgcagcctcctctggagcttggctcaattgccactagacaccca

SEQ ID NO: 876922 - DNA, 120 bp, Artificial Sequence
  ENSG00000226252_7 (sequence is synthesized)
ggatgacagagagtcaagattcagactgctgtacaccttctttgggaatgccagccccccaggtctggcacagaaaccacaaaattccctaagtcctggtgtatacaagctgtaaaggca

SEQ ID NO: 876923 - DNA, 120 bp, Artificial Sequence
  ENSG00000226252_8 (sequence is synthesized)
gtaggtccctgacacttcattggaagtgagtttatgattttggtggagacaataggtctctatccatagaatgcaaccaccaagacaccaaggccactggaaatgcaccagaagtatatc

SEQ ID NO: 876924 - DNA, 120 bp, Artificial Sequence
  ENSG00000226252_9 (sequence is synthesized)
agccaggtcctcttgctcccagcagcagcgaaatgtgccagaaatataccaacccctgggaaacatacaagcttcaaggtattggttccctacctcactgctctccgtcctgacacaccg

SEQ ID NO: 876925 - DNA, 120 bp, Artificial Sequence
  ENSG00000226252_10 (sequence is synthesized)
gtgtgagcccagtgatccatgcttaagccccagcttctaaccgagtgacagtgtgcactgcagttgcagactgagctcaagctctgttatgacacatttttaccctccaattaattctta

SEQ ID NO: 876926 - DNA, 120 bp, Artificial Sequence
  ENSG00000226252_11 (sequence is synthesized)
ggctcctgctctagcggtggattcctgagaggcaatgggagtacatattccagatgaattgaccctggccacaaatgtcctctccagacacctataaatatcccatcgccaaggttcctt

SEQ ID NO: 876927 - DNA, 120 bp, Artificial Sequence
  ENSG00000226252_12 (sequence is synthesized)
gtaagaaatatatgattggatcccaggatctgtggaggacctctcccggctcctccccacattttaggaaaatcctgccggtttaggattaccagccagaggtccatgccccaaagaagc

SEQ ID NO: 876928 - DNA, 120 bp, Artificial Sequence
  ENSG00000226252_13 (sequence is synthesized)
cactcacaaacactgatggttgttggcgactaagctgcatcacttgatttggattacagaaaggaacgcccgagagattttgtttgtttttatttggggagaatgaaggaggagggagat

SEQ ID NO: 876929 - DNA, 120 bp, Artificial Sequence
  ENSG00000226252_14 (sequence is synthesized)
tttagactgaatcgttctagagtatttgacgactacagctcctctctctttgtactacggagaccctgcttatagcccccaacaggaaatcctcatctgcagttgccagacagccagaat

SEQ ID NO: 876930 - DNA, 120 bp, Artificial Sequence
  ENSG00000226252_15 (sequence is synthesized)
atttccacctgtgccagaacaagacagaagaccccaggagattcttcctggggacaggtctcaagcagacccaatcccccatacagagaatttcttagatgaaaacagcctcaggccctt

SEQ ID NO: 876931 - DNA, 120 bp, Artificial Sequence
  ENSG00000226252_16 (sequence is synthesized)
caaacccaccagggaacagcaccaccatcctcgcctctaccggagaagaggggtgttcctgcctccccaccctaggcctcaggcctgggatcagggcccactcgagctgggactgcacta

SEQ ID NO: 876932 - DNA, 120 bp, Artificial Sequence
  ENSG00000226252_17 (sequence is synthesized)
gccaggaaggctgccgccttcctcctgcgggagctccaggcacagtctgtaccacccggatacagccgccccaaagttaccggccttgggaaacgtccacagaaccgggaccaatgggaa

SEQ ID NO: 876933 - DNA, 120 bp, Artificial Sequence
  ENSG00000226252_18 (sequence is synthesized)
aggcctggacgactaagtccaactagctggttttaccctgggtggaaaagggaaaaagccgctgaatgccacagaggcagctacagcagtcagatcccgattccaagctctggctggtcc

SEQ ID NO: 876934 - DNA, 120 bp, Artificial Sequence
  ENSG00000226252_19 (sequence is synthesized)
tcccctccccccacccccaatctgagaatgggctctcctctgtcctgagccttcctcaccccaggccggaacacaaggccttcctagacaccgtttccaccggcaccattcccctgaaaa

SEQ ID NO: 876935 - DNA, 120 bp, Artificial Sequence
  ENSG00000226252_20 (sequence is synthesized)
ctcacctggggcatatttagagagaccggcccctctgaataggatctccactccgccggaaaggggcggaagccgaggaagaggatgcacacccgggtctttgctttccccctttttcgc

SEQ ID NO: 876936 - DNA, 120 bp, Artificial Sequence
  ENSG00000226252_21 (sequence is synthesized)
tgagaggcctgcagttacgctgcggtgtggtcctgggcgatctgccgcgcccaaagcgagtttccaggaaagataggggtggagagaaagaggcagggcaagagggagggagagagagaa

SEQ ID NO: 876937 - DNA, 120 bp, Artificial Sequence
  ENSG00000226252_22 (sequence is synthesized)
atgggggtcaatggctgggaattacctcctgtccccgaccaaccagtccagggaatcgcaaacagctttccgcccccaacctgcaggtgtttggagcctttcctctaccccctcctcccc

SEQ ID NO: 876938 - DNA, 120 bp, Artificial Sequence
  ENSG00000226252_23 (sequence is synthesized)
ccacccgccttaaaaaaccctatacatgaccaatcaggaatagctatttagtccaacagcaacaacaacccctcccgacaggctgtctggaacattttcgaaccctccaactgggatcgg

SEQ ID NO: 876939 - DNA, 120 bp, Artificial Sequence
  ENSG00000226252_24 (sequence is synthesized)
tctggttcagtgtttgttttctaagcagggaggtgtctacgcggttgcctcctcagccaggtctccggctgccgctacaccgcgaagggatagtcccgggcctggatgggcggaggtccg

SEQ ID NO: 876940 - DNA, 120 bp, Artificial Sequence
  ENSG00000226252_25 (sequence is synthesized)
tgttgggaaaggcgaatagtcttcagactctggtcggtgggacagaaccttgaagtcccccccacctcattctctctctgacccccatccacccacctccagcccaaagcgaaaccagaa

SEQ ID NO: 876941 - DNA, 120 bp, Artificial Sequence
  ENSG00000226252_26 (sequence is synthesized)
cccaattccaggggctgtactttcctacagaaatggagttgggaagggggcttggagagagatatctgatctgttcaggtcctttctcgtctccctactgattaagagaaagaagaaaga

SEQ ID NO: 876942 - DNA, 120 bp, Artificial Sequence
  ENSG00000226252_27 (sequence is synthesized)
gagaggaagagagagacagaaaaagaaaaggaaataaagaccaacaaagggggaaagaaagaaacaaaggggaaaagtcccccaccttcccctccaccacccctacgaaatgattttcga

SEQ ID NO: 876943 - DNA, 120 bp, Artificial Sequence
  ENSG00000226252_28 (sequence is synthesized)
tttttcggggtttagacagagtaagggagaattctaatgatttgttacagcaataaacaaggtaaaaggaaaggaggtaaaaacaaacccgacactactttcaaggatgtagcaggattg

SEQ ID NO: 876944 - DNA, 120 bp, Artificial Sequence
  ENSG00000226252_29 (sequence is synthesized)
agcttgcttttattttttcctagtggattttgtttaatttgttttgcctaaatcgtcaggcttatgatcacacatcgaagtcttggattaactgcgaaggcctccttctatttgccgcgg

SEQ ID NO: 876945 - DNA, 120 bp, Artificial Sequence
  ENSG00000226252_30 (sequence is synthesized)
ctttggtggacatataggaataattcttccctggattgcaatacaatgcggaagattttctttctcctcttctaatccaaaagaggggaggggaggaaagaagaggggaatccatccatt

SEQ ID NO: 876946 - DNA, 120 bp, Artificial Sequence
  ENSG00000226252_31 (sequence is synthesized)
cccggcgtgttcgcggggggttaatgttgcgtgttcgctgggggttaatgtttgccttatgaccaagtctctgtgtccgtgcctctctccattttctcttcctacctcaaacccagcaac

SEQ ID NO: 876947 - DNA, 120 bp, Artificial Sequence
  ENSG00000226252_32 (sequence is synthesized)
ttagaaaacggctgtagcggaaaaaaacccgctgctttgttctcccgccaaaggagccaaaagggacaaactgctgcgctctgggatgattattttaattaaaatagatgttaatgatga

SEQ ID NO: 876948 - DNA, 120 bp, Artificial Sequence
  ENSG00000226258_0 (sequence is synthesized)
ctatcttgtgactcatgcatggcacgtctataagtcaagctggaatcctctaaaataagtcacatgggaaaaaattctgatcttattctagacgaagaatgaaaagccaggaagctacat

SEQ ID NO: 876949 - DNA, 120 bp, Artificial Sequence
  ENSG00000226258_1 (sequence is synthesized)
aacccaaggtgcctttctaggattttagcacatggaagaaatgtccctacccatgcatacagaaacgcataagaacaggaagtgacgtattgtttatcaggaaaaacagtattcatgtat

SEQ ID NO: 876950 - DNA, 120 bp, Artificial Sequence
  ENSG00000226258_2 (sequence is synthesized)
caaaaattgaggctgatctccaagctctactgtggaaagagttcatcaagttcctagactgaagaaagctaattaaaaagtcattaaaatgacaaaaatctaggacacctgtgcattttg

SEQ ID NO: 876951 - DNA, 120 bp, Artificial Sequence
  ENSG00000226258_3 (sequence is synthesized)
aaatatctcattttgtatcaaatactttggcagttctggattgataaccaagtttatatttcagcaaacaggggacctcaagagcataacttaatctcagagttgttcacctccgtgcaa

SEQ ID NO: 876952 - DNA, 120 bp, Artificial Sequence
  ENSG00000226258_4 (sequence is synthesized)
aagtgaagactgagtctgaaatgggaaagatatccccacacaagtccagcacaggctgttagaactctatatctcttgttctggaagctttgaagtccaagatgaaggtggcagcagctt

SEQ ID NO: 876953 - DNA, 120 bp, Artificial Sequence
  ENSG00000226258_5 (sequence is synthesized)
gagtgtctgggtccccagtttgaaatgtcttgttactgctgacaagacctgcatgactgaccatttgctccctaagagatgaaaactgacattgctttgaagttcaaaatgacattgcca

SEQ ID NO: 876954 - DNA, 120 bp, Artificial Sequence
  ENSG00000226258_6 (sequence is synthesized)
aaacaagaagaaatggaaaataactgcagcacgtttatgacattcgtttctttctccacatgaaacatacaatgagaacactttatagatgaattgtgtcttcgattgaatagagaatgg

SEQ ID NO: 876955 - DNA, 120 bp, Artificial Sequence
  ENSG00000226258_7 (sequence is synthesized)
agtggaaagcctttaaaaaatagtgatataatacacagctgatatttttggttcatagaatactttaaagtacatcatttacaaagcaaattactaaattataagaaatgctgtcatcat

SEQ ID NO: 876956 - DNA, 120 bp, Artificial Sequence
  ENSG00000226258_8 (sequence is synthesized)
caataaacattcacagagcttcaggttttaacacaaagcattcctcatatttcaggtgatattatttatgaaaaaattacttggagattgctccaaggttatcacattcttttcaaacca

SEQ ID NO: 876957 - DNA, 120 bp, Artificial Sequence
  ENSG00000226258_9 (sequence is synthesized)
accatcaattccctattattatttactattattagttattatttataaatacatatgaatacacaatgaaagcatgctttatgtatagcatataaatatatttgaactttactttcccca

SEQ ID NO: 876958 - DNA, 120 bp, Artificial Sequence
  ENSG00000226258_10 (sequence is synthesized)
ctatctatcctgcaatattacaccaccagtaaaagagtatctaaatattaattgctcctatcacaatagtggaaactagaagagataagttttcccaaatctgagtagaaaaccatggtt

SEQ ID NO: 876959 - DNA, 120 bp, Artificial Sequence
  ENSG00000226258_11 (sequence is synthesized)
taaggcaagctatttatgatgagctaactcacttgcaagttaccagagagcatggagtaaatcctttatttctcatgtcctcattgtgcctaagactgcgtttctgtacacacattaaaa

SEQ ID NO: 876960 - DNA, 120 bp, Artificial Sequence
  ENSG00000226258_12 (sequence is synthesized)
aaacaggaaatcaatggttcccaatggtgatgtgtgaactcttcaggatctggaggaacattattaaattgctccattagctttctcttgtttgggttgaaaataaaaattgtgatgcca

SEQ ID NO: 876961 - DNA, 120 bp, Artificial Sequence
  ENSG00000226258_13 (sequence is synthesized)
ccattacaagggtcacagctgacatacctataacaaaaaccagatgaacaagaaaaatgcataatgtgttcatttaataaagttttaagtgacgtgggagccttcagaaatgcagaccca

SEQ ID NO: 876962 - DNA, 120 bp, Artificial Sequence
  ENSG00000226258_14 (sequence is synthesized)
aacccagggaaaattttgaatttgtatgcttctgaagaaagaagtgaatagttgtggagaaacgtgattcgacaaaaagagtatgacctaatgataataaactgtagagaatttagcaaa

SEQ ID NO: 876963 - DNA, 120 bp, Artificial Sequence
  ENSG00000226258_15 (sequence is synthesized)
atggcacgtctataagtcaagctggaatcctctaaaataagtcacatgggaaaaaattctgatcttattctagacgaagaatgaaaagccaggaagctacataacccaagagagaagtta

SEQ ID NO: 876964 - DNA, 120 bp, Artificial Sequence
  ENSG00000226258_16 (sequence is synthesized)
gccttcccactaccacttgttgcaactcccacacttcatatgtacaccacctctttccttgacccttgaaagacaccatgtggttttcacctgagaatgatataaatatgaacactctaa

SEQ ID NO: 876965 - DNA, 120 bp, Artificial Sequence
  ENSG00000226258_17 (sequence is synthesized)
tctgatcttattctagacgaagaatgaaaagccaggaagctacataacccaagaaacaacagtcagatgccaataaccaggaaccacctgcaggacaagctaagcccagaaatgctgcct

SEQ ID NO: 876966 - DNA, 120 bp, Artificial Sequence
  ENSG00000226258_18 (sequence is synthesized)
atgtaccttgctgggtgcaaaaagtgccaatgcaaaagaaaatgcaagactgcgcatacttaacccctcctggaagaacaaacttttttcaaggaatccccacccctgtctccacctacc

SEQ ID NO: 876967 - DNA, 120 bp, Artificial Sequence
  ENSG00000226258_19 (sequence is synthesized)
tgcccaaaagtccttaaaaatttccctttactctacttccagggagaaggtgctttgagcatgagctcccgttctccattacttgatcaatgaatggaatttctgcactgttttgccaaa

SEQ ID NO: 876968 - DNA, 120 bp, Artificial Sequence
  ENSG00000226258_20 (sequence is synthesized)
agggtggtacaaagaagagaagaccagggaagagaagctcatgaaggaaacaaacatggctgtctggtttggaaaagcacatttgatagtttatgaagtcacagaggagagtgactcttg

SEQ ID NO: 876969 - DNA, 120 bp, Artificial Sequence
  ENSG00000226258_21 (sequence is synthesized)
actgccagaaaagggtcttctgatctattttctggtaaaataggtcagagtgacccttttaggttttacggcttgctgtgaggtcaaagaattctaatttctatgggccgccttgggaga

SEQ ID NO: 876970 - DNA, 120 bp, Artificial Sequence
  ENSG00000226258_22 (sequence is synthesized)
gaggagagctggagaaaggagagtgagagaaggtcagaggggccttccttctgaggcccttccagtgcccttcagttcaaagtactctgcatgccaagacaccatatattggggtataat

SEQ ID NO: 876971 - DNA, 120 bp, Artificial Sequence
  ENSG00000226258_23 (sequence is synthesized)
gttttgagtcctagcagttaataatataatatttttcaaaaaatctagagaagaatttatttcataatgttactaaccagttttttaaagtcaaatttgaaaatgatgccaaaaattata

SEQ ID NO: 876972 - DNA, 120 bp, Artificial Sequence
  ENSG00000226258_24 (sequence is synthesized)
ctgattttttttcttcagataattgtgaaattctactgtgtcttctctttaaagatgaaaaaataagataaaaaacatgagctgggcatgatggtgtgcctgtaatcccagctacttggg

SEQ ID NO: 876973 - DNA, 120 bp, Artificial Sequence
  ENSG00000245768_0 (sequence is synthesized)
ggtggtaacatgtttcggcgtccttccacactgtcgcggcttatgttgttttgctgtttgggtttgcactgtctttttgagctgtaacacagcaaaggtttgcagtttcgctcctgaaat

SEQ ID NO: 876974 - DNA, 120 bp, Artificial Sequence
  ENSG00000245768_1 (sequence is synthesized)
catcgagaccacaaacccaccgggaagaacgaacaactccagacgcaccgctttaagagctgtaatactcgttaggaaggtgtgcagcttgactcctgagtcagcgagaccatgaaccca

SEQ ID NO: 876975 - DNA, 120 bp, Artificial Sequence
  ENSG00000245768_2 (sequence is synthesized)
tcagaaggaaaaaactccgaacatcagaaggaacaagtttcagacacgccacctttaagaactgtgatactcaccgcgagggcccgcggcttcattcttgaagtccgtgagaccaagaac

SEQ ID NO: 876976 - DNA, 120 bp, Artificial Sequence
  ENSG00000245768_3 (sequence is synthesized)
ctaccaattccgaatacgttgggttcaagtggttctcctgcctcagactcccgaatacctgggactacaggcacccaccacgcccgggtaattgtatgacaatggagaggtgattactgc

SEQ ID NO: 876977 - DNA, 120 bp, Artificial Sequence
  ENSG00000245768_4 (sequence is synthesized)
cacagagcctggtgtgagcggcgctctgtcaacaccagctcttcatgggttgtggtttcctccagttcctggatgtgtggagttcatcctccactgactggcgccccggttgacaatgag

SEQ ID NO: 876978 - DNA, 120 bp, Artificial Sequence
  ENSG00000245768_5 (sequence is synthesized)
gtctggcatccctggagttgagtaactagttctggctgctggtctccaggtgacatgtgtcacgtttgagctaaggtaaaaacatcaaaatctgagcaacatccctgaagatatagctga

SEQ ID NO: 876979 - DNA, 120 bp, Artificial Sequence
  ENSG00000245768_6 (sequence is synthesized)
aaaaagcttttctacaccttgtccttcttaaaagcaattcatttccacataagaaagtattattagacttcacaatagttttgaaatataatattaatttgcaaggttattatggccaat

SEQ ID NO: 876980 - DNA, 120 bp, Artificial Sequence
  ENSG00000245768_7 (sequence is synthesized)
agctcaaaataactcttgaaacttactaatgacatcatcctgtttattattccatggagctaggtggcaaatggtaggcatttcattttagtgctcttgatgaataaatgaacaaacaat

SEQ ID NO: 876981 - DNA, 120 bp, Artificial Sequence
  ENSG00000245768_8 (sequence is synthesized)
cagtgcggggaccagagggatgtgggatcctgaggatcactgtggggcacggacgctcaatcctcagtccccaaggccgcggcggcgaggcccgggtggaaggcggcggcgatcccgggg

SEQ ID NO: 876982 - DNA, 120 bp, Artificial Sequence
  ENSG00000245768_9 (sequence is synthesized)
aggacgcggccggagtgcagcagggccatggtggaccgtaggagggcagtgggcagccgcaggacggagcagagggcgagcggacacacacacagggaaccggctcctgctgaaggtaat

SEQ ID NO: 876983 - DNA, 79 bp, Artificial Sequence
  ENSG00000245768_10 (sequence is synthesized)
aattggcaactgatgaagggaagtgtatcagtccgttttcatgctgctgataaagacacttcgacatggctggggaggc

SEQ ID NO: 876984 - DNA, 85 bp, Artificial Sequence
  ENSG00000245768_11 (sequence is synthesized)
tgtgcaggggaactcctctttttaaaagtatcagatctcgtgagatttattcactattatgacaacagcagaagacgtgcctccc

SEQ ID NO: 876985 - DNA, 120 bp, Artificial Sequence
  ENSG00000245768_12 (sequence is synthesized)
ccccatgattcaattacctcccactgagtgcctccctcaacatgtgggaattacgagttatacttcaagatgatttgggtggggacacacagccaaaccatattagggagcaggaaaaag

SEQ ID NO: 876986 - DNA, 120 bp, Artificial Sequence
  ENSG00000245768_13 (sequence is synthesized)
aaacaaaaacagcaactaataactcccaagaccacagcttcgctcctgtctagagctttgctacttagccacaggaacacgggtgatcatacctcaacagaagtctgccagcattcatta

SEQ ID NO: 876987 - DNA, 120 bp, Artificial Sequence
  ENSG00000245768_14 (sequence is synthesized)
ggcggtgtttcagcagaggagtctttggagcttccacgaactggttcaataaacaatcttgctgtgaaacacagagcttggtatttagaagggttttagctggcatatccacaaagctgc

SEQ ID NO: 876988 - DNA, 120 bp, Artificial Sequence
  ENSG00000245768_15 (sequence is synthesized)
agcatcctgtccactgctaattccactgtgaaatgttgaaatacagctcttagctccgagaaagcatgtaggcttctatttgcatgcaaatcattgccattcatgtgtgaactacagcag

SEQ ID NO: 876989 - DNA, 120 bp, Artificial Sequence
  ENSG00000245768_16 (sequence is synthesized)
gtaacagctctgccagatggaataatttggggtaaggccatcctctttgttaaaggccacaggtatccatgcatgctgcagtgtagctcattcctactttccacgtcaccccctggggaa

SEQ ID NO: 876990 - DNA, 120 bp, Artificial Sequence
  ENSG00000245768_17 (sequence is synthesized)
taatcattttaatgatgggcctcaaggaaaggaaacgccattctaccctgtcatcatttagtaaacaaaatggtgccaattagtgtaatgctgacctaatgtaatatttgatgcaattag

SEQ ID NO: 876991 - DNA, 120 bp, Artificial Sequence
  ENSG00000245768_18 (sequence is synthesized)
taaattgagagggataaaaaggaacatggtaaattgatagatcaagaaaactcccttggattttgaaaaagtacagattgcatgcatgtttcaaggaaaaccactgtggtctcaccccag

SEQ ID NO: 876992 - DNA, 120 bp, Artificial Sequence
  ENSG00000245768_19 (sequence is synthesized)
gtggcagtgccttgtagtggttaggagtgtgtgtctctagaatcggaatgcttgtgtctcaatcgcagctctacctcttactaaccagaagactttgaataaaactcacacttcctaagt

SEQ ID NO: 876993 - DNA, 120 bp, Artificial Sequence
  ENSG00000245768_20 (sequence is synthesized)
gtcaacttcatcatctgtaaagtgaagatagtagtagacaattgaacttaatcctctcctggtcatatgaggtaggtctgatttaagtagttgagcagcctgcctgatacatgtaaagct

SEQ ID NO: 876994 - DNA, 120 bp, Artificial Sequence
  ENSG00000245768_21 (sequence is synthesized)
taacaataactataaataatcataattacaatgaataaaatagccatagaagctagttgcattaaatttatttgtaataaatgtagtagctaatgctgtacttgatcaattcacagagct

SEQ ID NO: 876995 - DNA, 120 bp, Artificial Sequence
  ENSG00000245768_22 (sequence is synthesized)
gatttctccaataaataggaagctcctaagtatagagaccatgtcttctcttcttgtcatcagtggtttgctcaccatctaacacttaggatgtattcaacaaatggttattaaatgcac

SEQ ID NO: 876996 - DNA, 120 bp, Artificial Sequence
  ENSG00000245768_23 (sequence is synthesized)
caggtgacatgtgtcacgtttgagctaagaattgcttcacatgattatggaggctgacaagtcccaagactcacagtcggcaagctggacacccaagacagctggtgctgcacatattac

SEQ ID NO: 876997 - DNA, 120 bp, Artificial Sequence
  ENSG00000245768_24 (sequence is synthesized)
cagtgatgtagtttcagtctgaatctgaaggcctgagaaccaggacagttgatggtgtaaattccagtccgaggtcaggagaagcctaatgttctagcctaacatcttgcagcttttttg

SEQ ID NO: 876998 - DNA, 120 bp, Artificial Sequence
  ENSG00000245768_25 (sequence is synthesized)
ttctatgcaagttttaaagtaattggatgggacccagccacattagggaggccaatctgctttactcagtctaccaattcaaatctaatcttatccagaaacaccctcgtagacacatcc

SEQ ID NO: 876999 - DNA, 120 bp, Artificial Sequence
  ENSG00000245768_26 (sequence is synthesized)
aaatatctcagcactcaaaggcttaggcaagtcgatatgtaaaattaatgatcacaaggagggagaatgggttcaacaggtatttaaaagtattcataatagaaaagtatttattgtgtt

SEQ ID NO: 877000 - DNA, 120 bp, Artificial Sequence
  ENSG00000245768_27 (sequence is synthesized)
tatgtggcaggcagtattctgagtgctgttattgtatctcagttaaaacactagttaggtaagaaaagcgtcacctctgtgaggtggttactattattgtcctcatttagcagatgagaa

SEQ ID NO: 877001 - DNA, 120 bp, Artificial Sequence
  ENSG00000245768_28 (sequence is synthesized)
aacaggcagagaaaaatttacatgatttgctggcactcatgcaactgataagtatctgaactgggattcgaacccaaactaactcagagtttaagctcttaactgccattctagagtcct

SEQ ID NO: 877002 - DNA, 120 bp, Artificial Sequence
  ENSG00000245768_29 (sequence is synthesized)
ccttggggacaggtgattgtaggtagaaaaaagaaatatggggagaggcatgctgaattgaaaaaaaaaacctctctaaatgaaactgagaaccacatcttctagtactaattataggta

SEQ ID NO: 877003 - DNA, 120 bp, Artificial Sequence
  ENSG00000245768_30 (sequence is synthesized)
gagaactctgctaaatattttgcaagcattatccaatttaatgataaaaaccatactggacatgagaagccattatatccattttacagaaaagaaaaatgagctgggttggaattgcag

SEQ ID NO: 877004 - DNA, 120 bp, Artificial Sequence
  ENSG00000245768_31 (sequence is synthesized)
ctgggacatttttgatactgtgatcttagatacattcatctgtcagactccagctgattccaaactccttgttcattctattaggttgtgctataagaaaaaattctgtaagctttaaaa

SEQ ID NO: 877005 - DNA, 120 bp, Artificial Sequence
  ENSG00000245768_32 (sequence is synthesized)
gtggtaagtcaactcaaggcacagccaataagcatttatatgactgtacattatttacctaactctgcagagggagccagatatcctttagtgtagtaacgaagaatggctcctgcatat

SEQ ID NO: 877006 - DNA, 120 bp, Artificial Sequence
  ENSG00000245768_33 (sequence is synthesized)
ccccagcaattctcaggaaaaggtgggtgttatattctcttaaatagagaggcgtttttttcttagtcctattactggcagcttctaaatttaataacaaaatgctcacctacaaataag

SEQ ID NO: 877007 - DNA, 120 bp, Artificial Sequence
  ENSG00000245768_34 (sequence is synthesized)
aagaataaaagcttaacttgccagggggaaaaaaagttctatgatgtaacagacccaggaataagtgatattcatgggaaggtcactgcctgaggctgcttgataaactccagccctttc

SEQ ID NO: 877008 - DNA, 120 bp, Artificial Sequence
  ENSG00000245768_35 (sequence is synthesized)
ctatatccactgtttaatgtttaagctttggatgctaagagtggttataataaactgtccaacagtttctcacttagacttcccaagaaggtgacaaaataaaatcaatgtaaagctgtc

SEQ ID NO: 877009 - DNA, 120 bp, Artificial Sequence
  ENSG00000264859_0 (sequence is synthesized)
gttcctgcgggatcggttcccatcatccaatacctcccaccagactccacttccatcattggaggtcacatttcaactaagatttggaggggaccgtatcctaactatattaacttccaa

SEQ ID NO: 877010 - DNA, 120 bp, Artificial Sequence
  ENSG00000264859_1 (sequence is synthesized)
ttttcatcgaaagcccacctgtctaagaagagctcctagacattccctttccccttcaacttggaggaattgggaatgacaaagagaaattaatcaaaagaagaattaatctctccaatc

SEQ ID NO: 877011 - DNA, 120 bp, Artificial Sequence
  ENSG00000264859_2 (sequence is synthesized)
agccttggcattttctttctatctttgatatgttgttttttacagtgtcttggttttcagaataagctgtttgtaactacttcctccactatattgtgagcctctggagggcaaggtctg

SEQ ID NO: 877012 - DNA, 120 bp, Artificial Sequence
  ENSG00000264859_3 (sequence is synthesized)
ggccttactcatctttgagtaattttaaagccactaaatagggctctgcacatagtgagaattcaacatatgcttagttgaatctaatatttcagaaaaagtcaacatctattctttaag

SEQ ID NO: 877013 - DNA, 120 bp, Artificial Sequence
  ENSG00000264859_4 (sequence is synthesized)
atagcccacagcaggctgagtgtgttattcgtaaatccattggccagcgtcatttcctccaaagtgcagcatttttgatagaaccaaaggctcatgactgaccttcagaaagacattttg

SEQ ID NO: 877014 - DNA, 120 bp, Artificial Sequence
  ENSG00000264859_5 (sequence is synthesized)
tatttcaccatcaaagagtggtatgggttttattagacttccgtaatccaggtctcgtttctcaggcaactctgaagcgtatcacactttatctgagagggtcacaattagtgaaggaag

SEQ ID NO: 877015 - DNA, 120 bp, Artificial Sequence
  ENSG00000264859_6 (sequence is synthesized)
gaattggcctttgcaagtttgtgttgctcacgaacttattaaattgcttgatttttttttttcttcctagctttgatagattgactttgcctcttttactgcgtgcatagtgccatcttg

SEQ ID NO: 877016 - DNA, 120 bp, Artificial Sequence
  ENSG00000264859_7 (sequence is synthesized)
tggccataaagcatataacactcatagttatgccacagtgcttctgttccatcttatttctgtagtccagaggatctcttaagtgtagaaacacatggattattactagccaaggccatc

SEQ ID NO: 877017 - DNA, 120 bp, Artificial Sequence
  ENSG00000264859_8 (sequence is synthesized)
atatttggttagcaacgtcctactgtagacattttgatgtggtggtgattggaatatggtctgcagagatcaaccagaattagctccatgtgccactgggagtgggaactgaagtcacgc

SEQ ID NO: 877018 - DNA, 120 bp, Artificial Sequence
  ENSG00000264859_9 (sequence is synthesized)
aggaataaaccagtcttcatgctttaggatgttctgatgtgccattgtcgtgaaatcttcattcatgagacattccagtttaccggcagtgtcgactagaatatgctacagcccccaaaa

SEQ ID NO: 877019 - DNA, 120 bp, Artificial Sequence
  ENSG00000264859_10 (sequence is synthesized)
tacgtttttagtataaggattattttgagctgattattttgagaaatagcagacgcaggagaaactctgaagacagaacgcaaacttcagctagtgtcttgaatttaagtcccaaatcat

SEQ ID NO: 877020 - DNA, 120 bp, Artificial Sequence
  ENSG00000264859_11 (sequence is synthesized)
ctaagaagcggtcatctagctctccttcaataaaactgcaacaaccaatagaagcattcagcgattcagtttcttcctgagaataaaccagaaggcaatctttggctgtgtgattttcat

SEQ ID NO: 877021 - DNA, 120 bp, Artificial Sequence
  ENSG00000264859_12 (sequence is synthesized)
cttcctcagtgttatatatcctctgcctctcctacggagctcatccctaccaagcctgctcctgcagagggatgcaactttccgacccactgacatctgtcttggtcatatgacttgctt

SEQ ID NO: 877022 - DNA, 120 bp, Artificial Sequence
  ENSG00000264859_13 (sequence is synthesized)
tggtcaatgaaatgtggtgtaaaaaggtggaggctttgagagccattgcctggttctgccttgttcttttctttgggtcacaaggacggcagcttcccaggtacaatctgctctctcagt

SEQ ID NO: 877023 - DNA, 120 bp, Artificial Sequence
  ENSG00000264859_14 (sequence is synthesized)
gtgcatcttgatatgaagacatcatgaaggaaagcagagctgactgactggcaaaaacataactgtggatagaacccaaagagaaaacaaagcccaaacagtctcagctcctttactcta

SEQ ID NO: 877024 - DNA, 120 bp, Artificial Sequence
  ENSG00000264859_15 (sequence is synthesized)
tgcgaccaatggcatttcaacctccctctacagtttgataccttcttctatagttacagaattcttaactttgttttgacctggatccatggccacccaaaataaagactatatttctaa

SEQ ID NO: 877025 - DNA, 120 bp, Artificial Sequence
  ENSG00000264859_16 (sequence is synthesized)
caaaacaaaacaaacacaaaacagacaaataattagcaatataaattcattttaaaacaagactctatattcctgttcaaaatgcagtaatgtgaatttaattacaaggaaccatcaggg

SEQ ID NO: 877026 - DNA, 120 bp, Artificial Sequence
  ENSG00000264859_17 (sequence is synthesized)
aaacacaaattgagagagatcctacgacacaactggactgtattcttaaaaaaaattaatatcagggaaaaaatagaaaggcagaggggactgtttcagattaaaggagactaaagtgtc

SEQ ID NO: 877027 - DNA, 120 bp, Artificial Sequence
  ENSG00000264859_18 (sequence is synthesized)
aggacaactaaatggaatgcaggatcctgagaaaaacaaaattgctgtaaaagatagtgtgatagttggctaaactgaaatatggactatgtcaatattaaagttctacatttgttaact

SEQ ID NO: 877028 - DNA, 77 bp, Artificial Sequence
  ENSG00000261826_0 (sequence is synthesized)
caagaaggatgggtacaaacaagtccagacaatgaagactacaataaatacctaactcttcaatgtccagacactga

SEQ ID NO: 877029 - DNA, 90 bp, Artificial Sequence
  ENSG00000261826_1 (sequence is synthesized)
cctaatgaactaaatgaagcaccagggaccaatcctgcagagacagagatatgtaacattttagacagagaattcaaaatagctgttttg

SEQ ID NO: 877030 - DNA, 120 bp, Artificial Sequence
  ENSG00000261826_2 (sequence is synthesized)
cagagaaggaattgaaggttctctcagataaaattatcaaagagattgaaataattaaaatgaatcaagcagaaattctggagttgaaaaatgcaactgacatacggaagaatgcatcgg

SEQ ID NO: 877031 - DNA, 120 bp, Artificial Sequence
  ENSG00000261826_3 (sequence is synthesized)
ggtctcttaacaagagacttaatctttcagaagaaagaattagtgagctcggagatagcctatttgacaatatacagtcagaggaagcaaactaaaagaaaaagagagacaacccaaata

SEQ ID NO: 877032 - DNA, 120 bp, Artificial Sequence
  ENSG00000261826_4 (sequence is synthesized)
attaaaatcagagattttgaaggaatacttcctaactcattctaccaggccagtattactgtgataccaaaaccagattaagacacatcagagaaaactacaggccaatatatctgatga

SEQ ID NO: 877033 - DNA, 120 bp, Artificial Sequence
  ENSG00000261826_5 (sequence is synthesized)
acattaatgcaaaaatccttagcaaaatactagcaaaccaaaaccaacaacacattaaaaaggtcactcatcatggccaagtagaatttattccagggatgcaaagatgcttcaacatac

SEQ ID NO: 877034 - DNA, 120 bp, Artificial Sequence
  ENSG00000261826_6 (sequence is synthesized)
atatcaacagaatgaaggacaaaaatcatatagtcacttcaattgatgctgaaaaagcatttgataatattcagcatcctttcatgataaaaatcctaaaaaatctgggtagagaagaaa

SEQ ID NO: 877035 - DNA, 120 bp, Artificial Sequence
  ENSG00000261826_7 (sequence is synthesized)
taaaaaatctgggtagagaagaaacatatctcaacacaataaaagtcatataaaacagacccacaactagtatcatactgaatggggaaaaactgaaagactttcttctaagatctgtag

SEQ ID NO: 877036 - DNA, 120 bp, Artificial Sequence
  ENSG00000261826_8 (sequence is synthesized)
gaagacaagaacgctcactttcacctctgttattcaacattgcactggacgtcctagctggagcaattagacaagagaaagaaataaagaacattcaaattggaaaggaagaagacaaat

SEQ ID NO: 877037 - DNA, 120 bp, Artificial Sequence
  ENSG00000261826_9 (sequence is synthesized)
tatccttgtttgtagataatataatcttatatttggaaaaacccaaagactccacaagaaaactcagcactgataaattcagtaaagttgcaggatacaaaatctacatctaaaaatgag

SEQ ID NO: 877038 - DNA, 120 bp, Artificial Sequence
  ENSG00000261826_10 (sequence is synthesized)
tgagtagcagttctatatgtcaacaccaagcaagctgaaaaagaaattaagaaagtaatcccattcacaatacctacaaatactgtaaaatgcctaggaattaaccaaagaagtgaaaga

SEQ ID NO: 877039 - DNA, 120 bp, Artificial Sequence
  ENSG00000261826_11 (sequence is synthesized)
tgtttatggatttggagaatcaatattgttaaaatatccacactacccaaagcaatctacagattcatcacaatcctgatcaaactaccagtaacattcttcaccgaaatagaaaaaata

SEQ ID NO: 877040 - DNA, 120 bp, Artificial Sequence
  ENSG00000261826_12 (sequence is synthesized)
aataatcttaaaatttatatagaatcacaaaagacccagaatagccaaagctagcttgagcaaaaagaacaaaactgtaggaatcgtattacctgacttcaaattatactacagagctgt

SEQ ID NO: 877041 - DNA, 120 bp, Artificial Sequence
  ENSG00000261826_13 (sequence is synthesized)
acacatagaccaatggaacagaatagataacccagaaacaaatacatacatctacaatcgactcattttcaacaaagttgccaagaacgtacactgggggaaaggacggtgtcttcaata

SEQ ID NO: 877042 - DNA, 120 bp, Artificial Sequence
  ENSG00000261826_14 (sequence is synthesized)
gtacactgggggaaaggacggtgtcttcaataaatggtgctgggaaagccagatatccatatacataagaatgaaactagacttctatctctcaccatatacaaaaatcaaatcaaaatg

SEQ ID NO: 877043 - DNA, 120 bp, Artificial Sequence
  ENSG00000261826_15 (sequence is synthesized)
tactaaagacttaaatataagacctgaaattatgacaccatggaaagaaaacattagagaaactctctagcactggactgggcaaagattgcttgtgtaatatccacaatcatagacaac

SEQ ID NO: 877044 - DNA, 120 bp, Artificial Sequence
  ENSG00000261826_16 (sequence is synthesized)
caaagcaacaaatggacaaatgagatctcttcaagttaaaaagcttctgcacagcaaacaatcaacaaaatgaagaggcaacccacagaactgaagaaaatatttgcaaactactcatct

SEQ ID NO: 877045 - DNA, 120 bp, Artificial Sequence
  ENSG00000261826_17 (sequence is synthesized)
aacaatggattgataaccagaatatataaggagctcgaacaacactgtaggaaaaaatataataatcaaattaaaaatagacaaaatatatgaatagacgtttctcaaaacaaggcattc

SEQ ID NO: 877046 - DNA, 80 bp, Artificial Sequence
  ENSG00000261826_18 (sequence is synthesized)
acaaaatatatgaatagacgtttctcaaaacaaggcattcaaatggcaaagaggtatatgtaaagttgctcaacatcgct

SEQ ID NO: 877047 - DNA, 120 bp, Artificial Sequence
  ENSG00000261826_19 (sequence is synthesized)
gcaataacacttgctggtgaagatgtggagaaaagggaacccttataaactgatggtgggaatgtaaattagtgcagccactagggagaacagtttggagattcctcagaaaactaaaaa

SEQ ID NO: 877048 - DNA, 88 bp, Artificial Sequence
  ENSG00000261826_20 (sequence is synthesized)
gcaatcccactgctaggtatatacccaaaggaaaggaaatcagtgtatcaaagggatatctgcattctcattttgtggcatcctaagt

SEQ ID NO: 877049 - DNA, 88 bp, Artificial Sequence
  ENSG00000261826_21 (sequence is synthesized)
tgcattctcattttgtggcatcctaagtgtctatcaacagatgaatgactaaagaaaaagtggtacatacacacaatggagtactatt

SEQ ID NO: 877050 - DNA, 120 bp, Artificial Sequence
  ENSG00000250739_0 (sequence is synthesized)
gatggcagagctgagtcccgagagctcagccctgagctgcctttcatctggtcaccgtgttcaggggttcttctccgtgtaaataaacatctgcgatgaaaacctccacaggtctcatca

SEQ ID NO: 877051 - DNA, 120 bp, Artificial Sequence
  ENSG00000250739_1 (sequence is synthesized)
gcaaagaggaagatctattaaggatctagtgagtaaatgacacttttggaatgtttagaacttcgagggggaaaccacatgttttcacatcccactatatcatttccataaggatgaggc

SEQ ID NO: 877052 - DNA, 120 bp, Artificial Sequence
  ENSG00000250739_2 (sequence is synthesized)
aaagcactacccctatttgcagaagagagactgccgtgaagtcagtggacactatctccaggtcagaatccaacctaaaggcctttaatcaatgcctcctgtctttcagcagggcagatg

SEQ ID NO: 877053 - DNA, 120 bp, Artificial Sequence
  ENSG00000250739_3 (sequence is synthesized)
tcttgagcagcatcagccaaactgtaggagctgagaagaggaagctttgctcagggtaagcgccctgggataatgtctttaatgtcaagaggatgcacgctgtgaacgtggaaagccctc

SEQ ID NO: 877054 - DNA, 120 bp, Artificial Sequence
  ENSG00000250739_4 (sequence is synthesized)
caggctgaaagagggaataacacaggcggggagtgttgccaagcatttgcgagcactctgttcggtggacagacagccggcttgctcatgattccgccttctctgttattggcaacaagc

SEQ ID NO: 877055 - DNA, 120 bp, Artificial Sequence
  ENSG00000250739_5 (sequence is synthesized)
cgtcactggaactttgtatccttaagctttgaggccttgactcaggtgggggtcccggaataagctcatgaagtttttgcctcgttacccccaggctccaaatcactggtacaaatttct

SEQ ID NO: 877056 - DNA, 120 bp, Artificial Sequence
  ENSG00000250739_6 (sequence is synthesized)
cagtctgatttaatgcttagggaaatgtcgtatttttggatccttcattttaaaaaaacatatatatttaccagtgctatctccgccaattccgaataaaccttagacttcagatcatga

SEQ ID NO: 877057 - DNA, 120 bp, Artificial Sequence
  ENSG00000261824_0 (sequence is synthesized)
agagatgcgcagtgctgcccctttctatgggcagggccgaaggtccgcgtgtaaaagtacccagtccctggtaacctgacacttcccttttaaaagccaccttttgtctatctctggcct

SEQ ID NO: 877058 - DNA, 120 bp, Artificial Sequence
  ENSG00000261824_1 (sequence is synthesized)
gccacgattcttcctgtgctccataggaggacccattggacccccgggctggctgcagggcccacacctgggttagacctcgcacagggacgctgctgccactgtaataaagcgtgccta

SEQ ID NO: 877059 - DNA, 120 bp, Artificial Sequence
  ENSG00000261824_2 (sequence is synthesized)
ctggaggagcaattttactgcgacattttaaagaaacaaatttaattgatttccaagaatctatgcagggacatttttgtgctcattgaggcctactgtgaaaaaccaaacatcaggggt

SEQ ID NO: 877060 - DNA, 77 bp, Artificial Sequence
  ENSG00000261824_3 (sequence is synthesized)
gctcattgaggcctactgtgaaaaaccaaacatcaggggtggagccaaaaacacacagaagatggatgatttctgca

SEQ ID NO: 877061 - DNA, 120 bp, Artificial Sequence
  ENSG00000261824_4 (sequence is synthesized)
agacaccaccccagccagcatggccggcaggagcgcaccgcgctgtctccctccagggatccgcaccgccctacaatcctgctttgtgctgagattgtagtcctgcaggcgtacaactaa

SEQ ID NO: 877062 - DNA, 120 bp, Artificial Sequence
  ENSG00000261824_5 (sequence is synthesized)
caagctgggtgcagataagagactacagctccccgcatcccaagcaaaggtccctcctctacggagcccctccacgcgtccactgcggttccgccgtgccaaggggagcttggctgttca

SEQ ID NO: 877063 - DNA, 120 bp, Artificial Sequence
  ENSG00000261824_6 (sequence is synthesized)
cgggcctcacctgctagcgagaagatagcttggccgggcggctgatctcaccttgtaattctgacactgtgtctcccgggcttgtcggcttcatgacttgtgcccaaagtttgatttctc

SEQ ID NO: 877064 - DNA, 120 bp, Artificial Sequence
  ENSG00000261824_7 (sequence is synthesized)
ctagaaggtcaaattcatcatgcaggaaggagggtaagaatatatatagagagaaaagaacagagaagaaatacaacagcaactcactactggagtgggttcatatttatcatgctggaa

SEQ ID NO: 877065 - DNA, 120 bp, Artificial Sequence
  ENSG00000261824_8 (sequence is synthesized)
ggagtgtagaaaaatagaggaatgaagaaggaaaacaacgcaagtcattctatgtactgtggaaacaaactgacagtgggtttagaaaaaaacaacagaggaagaaggtctgagtagtcc

SEQ ID NO: 877066 - DNA, 120 bp, Artificial Sequence
  ENSG00000261824_9 (sequence is synthesized)
caggtaattgggaaaccgagaagggaagaccactcgggtgagaccagggagatcgaagccacagtaaatcacgatcacatccctctgctggacctgaacggtactgccgcctgcaagagc

SEQ ID NO: 877067 - DNA, 120 bp, Artificial Sequence
  ENSG00000261824_10 (sequence is synthesized)
catctggtcgaccttagacatgacaaggcgagaaccatctggtcaaccttagacatggcactcttgtggctaagtccaactctagttgctgaaatacgtctcaaaaaaacaaaaacaatc

SEQ ID NO: 877068 - DNA, 120 bp, Artificial Sequence
  ENSG00000261824_11 (sequence is synthesized)
caacagtaaatgttttacaaaaacaaaaaaataaacaatattaaagaacaatgtataaataagtgggagtgaaccaaggtaaaaggtaattaatatcaccattaagatctcctctctttc

SEQ ID NO: 877069 - DNA, 120 bp, Artificial Sequence
  ENSG00000261824_12 (sequence is synthesized)
tctttttctctccatttgtgatacccaggctggagtgtgacaaaggaaaatctaaaaggtcaacttcatttacaggaaagagcataggaaaacagacaaaagaacaaagaagaaaaacaa

SEQ ID NO: 877070 - DNA, 120 bp, Artificial Sequence
  ENSG00000261824_13 (sequence is synthesized)
gcaattttactgcgacattttaaagaaacaaatttaattgatttccaagggtgtccatcgcgcttccttcactgccttgatcatgtcggggtcaccacctgcgggggtttgtcctgcaga

SEQ ID NO: 877071 - DNA, 120 bp, Artificial Sequence
  ENSG00000261824_14 (sequence is synthesized)
ccctgactcaacgacggatgaataatgtacactgacacagatcttatgcttgtcagtcctgctgagcatccaggccacttacagactccaagaagagtcctgtcagccacggctctgact

SEQ ID NO: 877072 - DNA, 120 bp, Artificial Sequence
  ENSG00000261824_15 (sequence is synthesized)
tttaatgacagaagtctcaggctggaaacactctttttgtagaacatacaaatggacatttctaagcacattgaggcctataatgaaaaatcaaatatcccacaatgaaaactagaagga

SEQ ID NO: 877073 - DNA, 120 bp, Artificial Sequence
  ENSG00000261824_16 (sequence is synthesized)
agctatctgtgataatgctttgtggtgtatggattcatctcactgactgaaacctgagttttgattcaccagaatctatgcagggacatttttgtgctcattgaggcctactgtgaaaaa

SEQ ID NO: 877074 - DNA, 120 bp, Artificial Sequence
  ENSG00000261824_17 (sequence is synthesized)
tttttgtagaatctatgaaaagacatttctgagcttattctggtttatagagtaaaaccgaatatcctgaaataaaaactggaaactaggttggaaactttttttgtagaatctatgaag

SEQ ID NO: 877075 - DNA, 120 bp, Artificial Sequence
  ENSG00000261824_18 (sequence is synthesized)
aaacatttctgagctcactgaggcatatttggaaaaatgggtatctcacaatacaaactggaaacaagctatctgtggaaacgttttatgatgtgtggattcatgtcacagagttaatcc

SEQ ID NO: 877076 - DNA, 120 bp, Artificial Sequence
  ENSG00000261824_19 (sequence is synthesized)
tttgttttgattcaacagtttgaaaacactttttttgtagaatatacaaaaagacatttctgagccctttgaatcctatagtaaagaaacaaatatctcacgataaaaactaaaaagaaa

SEQ ID NO: 877077 - DNA, 120 bp, Artificial Sequence
  ENSG00000261824_20 (sequence is synthesized)
tgagcaaattgaggctaagagtaaaaaatcaaatatcacacgataaaaactagtaacaagctatctgtgaaaatgcttttcaatgtttgaattcatttcacagagttaaacctttgtttt

SEQ ID NO: 877078 - DNA, 120 bp, Artificial Sequence
  ENSG00000261824_21 (sequence is synthesized)
gattgaacaggttggagacactctttttataggatctaccaagagacatttctgacctcattgaggccaatagtaaaaaatcaaatgtctcatgataaaaagtaaaaagatgctatctgt

SEQ ID NO: 877079 - DNA, 120 bp, Artificial Sequence
  ENSG00000261824_22 (sequence is synthesized)
gttggaaaccttctttttgtaaaacctacagtgggacatttctgagctcattgaggcttgtagtgaaaaactgagtttcctgcaataaaaaccgaaaacaggttatctgtgaaagtgatt

SEQ ID NO: 877080 - DNA, 120 bp, Artificial Sequence
  ENSG00000261824_23 (sequence is synthesized)
tgtgatgtgcaaattcatctcatgaaaataaacctctgctttgattgaataaatgggaagaacttttttgtagaaatttctgagctcctttaggtctatagcaaaaaaatctaatatcct

SEQ ID NO: 877081 - DNA, 120 bp, Artificial Sequence
  ENSG00000261824_24 (sequence is synthesized)
tatagcaaaaaaatctaatatcctgcaaacaaaactagaaacaagctacatgtgaaggtgctttctgatgtgtgaattcatctcaccaaatgaaactcgtgttttgatttagtaggttga

SEQ ID NO: 877082 - DNA, 120 bp, Artificial Sequence
  ENSG00000261824_25 (sequence is synthesized)
gaagggacattactgagcttattgaggcttatattgaaaaactgaatatcccacaaaataaactagaaacaagtgatctgtgaaaatagttggccatgtgtaaatttatctcacacagtt

SEQ ID NO: 877083 - DNA, 120 bp, Artificial Sequence
  ENSG00000261824_26 (sequence is synthesized)
aaaccctttttttgactcaacaaattagaactctttttgtagaatctatgaagggacatttctgagctcattgaggcctatcgtgaaaaactgaatatcccatgatgaaaactagaaaga

SEQ ID NO: 877084 - DNA, 120 bp, Artificial Sequence
  ENSG00000261824_27 (sequence is synthesized)
agctatctgtgaaaatatttagcaatgtgttctttcatctcacagagttaaatctttttttttttttattcaccatattggaaatactctttttgtagaatctacaaagaaacatttctg

SEQ ID NO: 877085 - DNA, 120 bp, Artificial Sequence
  ENSG00000261824_28 (sequence is synthesized)
agcccattgaagcctatagtaaaaaaacaaatattctgcagttgaaactagaaacaatctctttgaaaatgccttgtgatgtgtggatgcatctcattaaaaggagcctgtgttttggtt

SEQ ID NO: 877086 - DNA, 120 bp, Artificial Sequence
  ENSG00000261824_29 (sequence is synthesized)
caccagattggaaacacttttttgtagaatatacgatgggatgtatctgagcccattgaggcctatagtaaaaaatggaatatcttgcaataaaaaactagaaacgagctatctttgaat

SEQ ID NO: 877087 - DNA, 88 bp, Artificial Sequence
  ENSG00000261824_30 (sequence is synthesized)
atgctttctgatttttgactcaccaagatggaaatacttttttttgtagaatctatgataagacatttctgagtctattgatgtgtat

SEQ ID NO: 877088 - DNA, 120 bp, Artificial Sequence
  ENSG00000261824_31 (sequence is synthesized)
tcatctcactgactgaaacctgagttttgattcaccaggttggaaacactctttttgtagaatgtatgaagagatatttctgaggcctgttgtgaaaaactgaggtttccacaagaaaaa

SEQ ID NO: 877089 - DNA, 120 bp, Artificial Sequence
  ENSG00000261824_32 (sequence is synthesized)
ctggaaacaagttatctgagaaaatgctttatgatgggtgaattcatctcacaaaattaaaccttcgttttgattcaaaaggttggaaacacttttactgtattatctatgaagaaacgt

SEQ ID NO: 877090 - DNA, 120 bp, Artificial Sequence
  ENSG00000261824_33 (sequence is synthesized)
ttttgaggccattaagtcctacactgaaaaactgaatatactgcattaaacattctaaagaagctaactgtgaaaatgctttgcaatgtgtgtatttatctcacagagttaaaccattgt

SEQ ID NO: 877091 - DNA, 120 bp, Artificial Sequence
  ENSG00000261824_34 (sequence is synthesized)
tttgattcatcagtttggaaacagtttctttgtagaatctatgaagggacctttcagaggccattgaggcctataataaagaaacaaatatcccacaataaaacaagaaacatatagaaa

SEQ ID NO: 877092 - DNA, 84 bp, Artificial Sequence
  ENSG00000261824_35 (sequence is synthesized)
taccaggttcatctcactggggagtgttggaaagtgggttcaggacagtgggtgcaggacaccgagcatgagccaaaagagggt

SEQ ID NO: 877093 - DNA, 120 bp, Artificial Sequence
  ENSG00000261824_36 (sequence is synthesized)
acaccaggagattatatcccttgcatggcttggagggttctacacccatggagccttgcttattgctagcacagcagtataagatcaaactgcaaggtggcagagaggcttggggagggg

SEQ ID NO: 877094 - DNA, 87 bp, Artificial Sequence
  ENSG00000261824_37 (sequence is synthesized)
aagatcaaactgcaaggtggcagagaggcttggggaggggcacccaccattgccgaggcttgaataggtaaacaaagtggctaggaa

SEQ ID NO: 877095 - DNA, 80 bp, Artificial Sequence
  ENSG00000261824_38 (sequence is synthesized)
cctgcctgcctctgtagactccacctccgggggcaggacatagccaaacaaaaggcaacagaaacctttgcagatttaat

SEQ ID NO: 877096 - DNA, 79 bp, Artificial Sequence
  ENSG00000261824_39 (sequence is synthesized)
cagcacgcagctggagatctgagaatggagagattgcctcctcaagtgggtccctgaaccccaagtagcataacggccg

SEQ ID NO: 877097 - DNA, 120 bp, Artificial Sequence
  ENSG00000261824_40 (sequence is synthesized)
gacatccacacaaaaaccccatctgtacgtcaccatcattgaagaccaaaggtagaaaaaaccacaaaaatggggaataaaacagaaaagaaaaactggaaactctaaaaattagagtgc

SEQ ID NO: 877098 - DNA, 72 bp, Artificial Sequence
  ENSG00000261824_41 (sequence is synthesized)
accaaaggtagaaaaaaccacaaaaatggggaataaaacagaaaagaaaaactggaaactctaaaaataaac

SEQ ID NO: 877099 - DNA, 77 bp, Artificial Sequence
  ENSG00000261824_42 (sequence is synthesized)
atcaaactattctgagctaaaagagagttagatgaatagctaactagaatagccaatgcagagaagtccttaaagga

SEQ ID NO: 877100 - DNA, 74 bp, Artificial Sequence
  ENSG00000261824_43 (sequence is synthesized)
agaataaggcacgagaaatacatgatgaatgcacaagcctcagtaaccaattcgatcaactggaagaaagggta

SEQ ID NO: 877101 - DNA, 65 bp, Artificial Sequence
  ENSG00000261824_44 (sequence is synthesized)
gcttataaaaccccaaatctacatcggattgttgtatccgaaagtgacagggagaatggaaccaa

SEQ ID NO: 877102 - DNA, 75 bp, Artificial Sequence
  ENSG00000261824_45 (sequence is synthesized)
aagacacataattgtcagattcgccaaatttcaaatgaaggaaaaaatgttaaggagacaaacagcagatatgtc

SEQ ID NO: 877103 - DNA, 63 bp, Artificial Sequence
  ENSG00000261824_46 (sequence is synthesized)
gatatgtcagagaattttcaacgcagaatttcatatacagtcaaactaagcttcataagtgaa

SEQ ID NO: 877104 - DNA, 73 bp, Artificial Sequence
  ENSG00000261824_47 (sequence is synthesized)
agacacagactggcaaattggataaaaggtcaggagctatcagtatgctgtattcaggaaacacatctcacat

SEQ ID NO: 877105 - DNA, 65 bp, Artificial Sequence
  ENSG00000261824_48 (sequence is synthesized)
gaagtaaagcactcttccgcaaatgtaaaaggacagaaattataacaaagaaaaccgctcaatga

SEQ ID NO: 877106 - DNA, 63 bp, Artificial Sequence
  ENSG00000261824_49 (sequence is synthesized)
acattcaaaatctagcagaaggcaagaacaactaagatcagagtagagctgaaggaaatagac

SEQ ID NO: 877107 - DNA, 85 bp, Artificial Sequence
  ENSG00000261824_50 (sequence is synthesized)
gccaagcaaaaaaagtcaaggaccacatggattcatagctgaattctaccagaggaaaaaggaggagctggtaccattccttctg

SEQ ID NO: 877108 - DNA, 120 bp, Artificial Sequence
  ENSG00000261824_51 (sequence is synthesized)
caaaaggttggaaacactctttttgtagttgaacgaagggacatttttgagtcccttgaggcctatagtaatgaacagaatatcctgcaataaaaattagaaagaagttatctgggaaaa

SEQ ID NO: 877109 - DNA, 120 bp, Artificial Sequence
  ENSG00000261824_52 (sequence is synthesized)
aacaaatttaattgatttccaagagtgtgacagaaatctaaaagatcaacttcatcgtgcaggaaggagcatagaaaaatagagaaaagaagaaaacagcaaaccattctgagtaccgtg

SEQ ID NO: 877110 - DNA, 120 bp, Artificial Sequence
  ENSG00000261824_53 (sequence is synthesized)
gaaacaaactaaaagtgggcttagaaggaaaacagaggaagaaggtctgagtagtcccagggactccagaggccaagatgggaaagccacccaggcgagacaggggagatggaagccaca

SEQ ID NO: 877111 - DNA, 120 bp, Artificial Sequence
  ENSG00000261824_54 (sequence is synthesized)
gggaatcactatcacatacctctgctggacctgaatggtcctggcgccagctagagccatctggtcgaccttagacatgtcaaggcaggagccatctgatcgaccttagacttggcaagc

SEQ ID NO: 877112 - DNA, 120 bp, Artificial Sequence
  ENSG00000261824_55 (sequence is synthesized)
tggtggctaagtccagtgctcactgccgacatctgtctcaaaataaacaaaaagtccaacagtgaatatttaacaataacaaaaatataataccaaacaatattaaagaccaataaataa

SEQ ID NO: 877113 - DNA, 120 bp, Artificial Sequence
  ENSG00000261824_56 (sequence is synthesized)
tttttgtaaaatctaggaagggaaatttctgagcccattgaggcacatagtgaaaaaccgaggatcctgtgataaaaactagaaaaacgcaatatgtgaagttgctttgtgatgtgtgga

SEQ ID NO: 877114 - DNA, 120 bp, Artificial Sequence
  ENSG00000261824_57 (sequence is synthesized)
ttcgtctccccgaatggaatctctgttttgattcaccaggttggaaacaatgtttttgtagaatgtacaatgagacatttctgagtccatttaggcctatactgagaaacccaatatcct

SEQ ID NO: 877115 - DNA, 120 bp, Artificial Sequence
  ENSG00000261824_58 (sequence is synthesized)
gctataagaagtagaaaaatgctatctgtaaaaatgctttgtgatgcatggattcatctcacagagttaaagctttgtttggattcaacaggtgaaaaacccttttttacagaatctaca

SEQ ID NO: 877116 - DNA, 120 bp, Artificial Sequence
  ENSG00000261824_59 (sequence is synthesized)
gaagtttatagtgaaaaacagaatatcctgtgataaaaagtagaaacaagctatccgttgaaatgctttgcaaggtctgaattcatctgacagagttaaacctctcttttaattcatcaa

SEQ ID NO: 877117 - DNA, 120 bp, Artificial Sequence
  ENSG00000261824_60 (sequence is synthesized)
tttggaaacacgcttttcttagaatctatgaagaaacatttctgacccaattgaaacctatactgaaaaatagaatatcccaaaataaaaccagagaaaagttatctctgaaaatggatt

SEQ ID NO: 877118 - DNA, 80 bp, Artificial Sequence
  ENSG00000261824_61 (sequence is synthesized)
caaaataaaaccagagaaaagttatctctgaaaatggattgtaatatgtggattcatctaacagagttaaacgaatctat

SEQ ID NO: 877119 - DNA, 120 bp, Artificial Sequence
  ENSG00000261824_62 (sequence is synthesized)
acagagtatcccgcaatgaaaagtacaaacaacctatctgtgcaaatgctttgccatgtgggaattcctcttacaaagttacacatttgttttgattcaataggttgaaacactcttttt

SEQ ID NO: 877120 - DNA, 120 bp, Artificial Sequence
  ENSG00000261824_63 (sequence is synthesized)
gtagcatctactaaggaacatttcagagctcactgaggcctataatgaaaaactgaatattccatgttaaaaagtagaaacaagctataagttaaaatgctttgggttttctggatttac

SEQ ID NO: 877121 - DNA, 120 bp, Artificial Sequence
  ENSG00000261824_64 (sequence is synthesized)
atcacagatttaaacttttgttttgattcatcaccttggaaacttgctttttgtagaatctatgaaggaacatttctgagctcattgaggcctatagtgaaaaacggaatatccagtgat

SEQ ID NO: 877122 - DNA, 120 bp, Artificial Sequence
  ENSG00000261824_65 (sequence is synthesized)
aaaaaccagaagcaagctatctgtggaaatgctttgtgatgtttggattcatctcacagagttaaatctttgttttaattaaacgggttggaaacactctttttgtagaatcaatgaaaa

SEQ ID NO: 877123 - DNA, 120 bp, Artificial Sequence
  ENSG00000261824_66 (sequence is synthesized)
gacatttctgagcccactcaggcctatgttgaaaaatcgaatatcccacaataaaaactagaaacaaggcaagtataaaaatgctttgtggtgtctggattcatcttagaaagttaaacc

SEQ ID NO: 877124 - DNA, 120 bp, Artificial Sequence
  ENSG00000261824_67 (sequence is synthesized)
tttgctttaattaaataggttggaaacactgttgttgtagaatctacgaagggacatttctgaggccttcgactcctattgttacacactgaatagcccatgataaaaactagaaacaag

SEQ ID NO: 877125 - DNA, 120 bp, Artificial Sequence
  ENSG00000261824_68 (sequence is synthesized)
cttgctctgaaagtgctttgtaatgcgtggacttatctcactgaatgaaaccctttgtttgattcactaggttaaaaacactgttgttgtagaatctatgaagggacatttatgagtcaa

SEQ ID NO: 877126 - DNA, 120 bp, Artificial Sequence
  ENSG00000261824_69 (sequence is synthesized)
ttgagacctacagtaagaaaccaaatatttcgtgataaaaattagaagcaagctatttgaaaaaatgctttgcaatgtgtacattcatctcaccaaatataacttgtgttttgaatcacc

SEQ ID NO: 877127 - DNA, 120 bp, Artificial Sequence
  ENSG00000261824_70 (sequence is synthesized)
tgattggaaatactctttttgtaaaatctccaaagggacatttctgagcccattgaggcctataatataaaacagactatcttgtgataaaaactagaaagaagctatctgtgaaaaatg

SEQ ID NO: 877128 - DNA, 120 bp, Artificial Sequence
  ENSG00000261824_71 (sequence is synthesized)
cttgtgatatgttgattcatctcagagttaaattattattttgattgaacagcttggaaacactctccttgtagaatctagaaattgtaatttctgagctcattgagacctatagtgaaa

SEQ ID NO: 877129 - DNA, 120 bp, Artificial Sequence
  ENSG00000261824_72 (sequence is synthesized)
aaaaagacatttctgagcccattgaggcctacagtgaaaaaccaagaatcccataatacaatctagaaaacaagctatctaggaaactgttttggatgtgtggattcatttaacagaatg

SEQ ID NO: 877130 - DNA, 90 bp, Artificial Sequence
  ENSG00000261824_73 (sequence is synthesized)
tttttgtggaatgcacgaagaacattctttgtggaagaacattgatgcctatagtgattaaccaaatatcacgtgatgccttgcagcgta

SEQ ID NO: 877131 - DNA, 120 bp, Artificial Sequence
  ENSG00000261824_74 (sequence is synthesized)
agaaacaagctatctgtgaaaatgccttgcagcgtatggattcatgtcacagagttacacctatgttttgattcaacaggttggaaacaatctttttgtagaatctacaaaggaatattt

SEQ ID NO: 877132 - DNA, 120 bp, Artificial Sequence
  ENSG00000261824_75 (sequence is synthesized)
ctgagccaattgagttctagagtgaaaaacagaatatcctgtgataaaaactataaataagctctctgtgaaattgctttgagactgtggatgcatctttcagagttatgcccttgctta

SEQ ID NO: 877133 - DNA, 120 bp, Artificial Sequence
  ENSG00000261824_76 (sequence is synthesized)
tcaacaggttggaaacacttttcttgtagaatctatgaagggatatttctgaacctattgaggcctatggtgaaaaattgaatattctgcgatataaaccagaaacaagctctctgtgaa

SEQ ID NO: 877134 - DNA, 120 bp, Artificial Sequence
  ENSG00000261824_77 (sequence is synthesized)
aatgcttttccatgtgtgcatccatcttacagagttaaacgtttgtttagattcaacaggttggaaatactctttttgtagaatctatgaagggatatttctgaactttttgaggcctat

SEQ ID NO: 877135 - DNA, 120 bp, Artificial Sequence
  ENSG00000261824_78 (sequence is synthesized)
tggcaaaatccgaatattacgtgataaaaactagaaacaaggtatcagtgaaaatgctttgtgatgtgtgggtttatctcaccaaataaaacctgtgtcttgattcaccaggttggacac

SEQ ID NO: 877136 - DNA, 120 bp, Artificial Sequence
  ENSG00000261824_79 (sequence is synthesized)
acttttttttctataacctacatagggcgatttctgagcctattgaggtctatagcaaagcaacaacaacaaatatcctgtcttataatctagaaagaagttatctctgaaaatacttta

SEQ ID NO: 877137 - DNA, 120 bp, Artificial Sequence
  ENSG00000261824_80 (sequence is synthesized)
tgatgtgtgaattcatctcacaaagttaaacctttgttttgattcaactgattggaaacactctttttgtaaaatctatgaagggaaatttctgagcccatttaggcctatagtgagaaa

SEQ ID NO: 877138 - DNA, 120 bp, Artificial Sequence
  ENSG00000261824_81 (sequence is synthesized)
cagaatatcccactgtaataagtagaaacaagctatctgtgaaaatcatttatggtggctggattcatctcaccaaatgaaacctgtgctttgattcaccagtttggaaacactattttt

SEQ ID NO: 877139 - DNA, 120 bp, Artificial Sequence
  ENSG00000261824_82 (sequence is synthesized)
atagaatctatgcaggaatatttctgatcccattgaggcatatgctgaaaattcgaatatcccatgataaaaactacaaacaagctatctatgaaaatgttttgtcatgtgtggattcat

SEQ ID NO: 877140 - DNA, 120 bp, Artificial Sequence
  ENSG00000261824_83 (sequence is synthesized)
cagagttaaacctttgttttgattcatctgtttgaaaacacgcttttttgtagaatctaagaatcaacatttctgagtgcattgaagcctatagtgaaaaacaaaatatctgatgataaa

SEQ ID NO: 877141 - DNA, 120 bp, Artificial Sequence
  ENSG00000261824_84 (sequence is synthesized)
gctatctgtgaaaatgctttgtgatatgtggattcatctcaaagaattaaactttattttgattcaacaggctggaaacactgttttcgtagaacctacaaaaagacattggggagccca

SEQ ID NO: 877142 - DNA, 120 bp, Artificial Sequence
  ENSG00000261824_85 (sequence is synthesized)
caacaggctggaaacactgttttcgtagaacctacaaaaagacattggggagcccactgagtcttacagtgataaaccaaggatcctgtgataaaactagaaacaagctatctgtgaaaa

SEQ ID NO: 877143 - DNA, 120 bp, Artificial Sequence
  ENSG00000261824_86 (sequence is synthesized)
ttttattcaatacgttggaaacaccattttttagtgtctctaaagggactttttcagccctttgaaacctatagtgaaaaaccaaatatcttgcaataaaaacaaataaacaaaaaagaa

SEQ ID NO: 877144 - DNA, 120 bp, Artificial Sequence
  ENSG00000261824_87 (sequence is synthesized)
aaaaaaaatccaaaggtcaaactcagtttgcaggaaggagcataggagaataaaggatggaacaaagaagaaaaagaacagcaagttactctgagtattgtggaaacaaactgaaattag

SEQ ID NO: 877145 - DNA, 120 bp, Artificial Sequence
  ENSG00000261824_88 (sequence is synthesized)
agtgagagagagagagaaaaaaaaagaaggtccgagcaatctcagatatatgagaggccaagatgggaagatcacttgggtaagactgggaagattgagtctgcagtgagtcacagtcgc

SEQ ID NO: 877146 - DNA, 120 bp, Artificial Sequence
  ENSG00000261824_89 (sequence is synthesized)
atcattctgctggatttgaatggtactgcttctggcccaagttgtctgggcaaccttagacatggtaaggcaagagccatctgatcaacattagacatggcaaggtgaaagccatctggt

SEQ ID NO: 877147 - DNA, 120 bp, Artificial Sequence
  ENSG00000261824_90 (sequence is synthesized)
ttggaaactctttctgcagaatctgcaaagaaatatttctgagcccattgaggcctacagtggaaaactgaatattctgtgataaaactagaaacaccctatctgtgaaaatgctttgtg

SEQ ID NO: 877148 - DNA, 120 bp, Artificial Sequence
  ENSG00000261824_91 (sequence is synthesized)
atgtgtggatttttctcatcgaatggaacctctgttttgactcacaagggtgaaacactattttagtagaatctaggaagaaacatatctgagcccatttatgcctacagtgagaaactg

SEQ ID NO: 877149 - DNA, 120 bp, Artificial Sequence
  ENSG00000261824_92 (sequence is synthesized)
taaaaatgctttgtgatgtgtggattcagtgttaaacttttattttgattccacagttttgacaccctatttgtagaatatatgaatgaacatttctcagcccattgaggcctatcatgt

SEQ ID NO: 877150 - DNA, 120 bp, Artificial Sequence
  ENSG00000261824_93 (sequence is synthesized)
tattttataataaaaactggaaacaagtgatctgttaaaatgttttttagtgtgtgaatttgtttcacaaagataaatctttgcatggattcaacaggttggaaacattattgtagaacc

SEQ ID NO: 877151 - DNA, 120 bp, Artificial Sequence
  ENSG00000261824_94 (sequence is synthesized)
attcaacaggttggaaacattattgtagaacctatgaagggatgtttttagcctattaaggactatatatataaaaaaaactagaaacaagctgtctgtgaaaatgctttgtgatgtgtg

SEQ ID NO: 877152 - DNA, 120 bp, Artificial Sequence
  ENSG00000261824_95 (sequence is synthesized)
gtgattcaacaggttggaaacatgctttttgtagaatctacgagttgacatttctgagccctctctgggttatggtgaaaacgaaatatcccatgataaaaactagaaacaacctatctg

SEQ ID NO: 877153 - DNA, 120 bp, Artificial Sequence
  ENSG00000261824_96 (sequence is synthesized)
aatatcccgcaataaaaaccagaaacaaggcatctatgaaaattctttgtgatatgtgcattcatctcacagtgcaaaactttttctttgattcaacaggttggaaactctgtttttgta

SEQ ID NO: 877154 - DNA, 120 bp, Artificial Sequence
  ENSG00000261824_97 (sequence is synthesized)
aaattaatgaaggcacatttctgagccctttgaaacctatagtgaaaaactgaatatcccaccttaaaaatgagaaacacgctattagtaaaaatgttttgcaatgtgtggattcatgtt

SEQ ID NO: 877155 - DNA, 65 bp, Artificial Sequence
  ENSG00000261824_98 (sequence is synthesized)
tttcatggacgcttatcatgtcctgtcagctgaggcagatgtatgttgcctcaggacaatgtgat

SEQ ID NO: 877156 - DNA, 120 bp, Artificial Sequence
  ENSG00000261824_99 (sequence is synthesized)
tagtcctgtcagctgaggcagatgtatgttgcctcaggacaatgtgataattgtgttacctgcacaaactgtagagcatgtgtgtttgaacaaatatgaaatctgggcaccttgaaaaaa

SEQ ID NO: 877157 - DNA, 76 bp, Artificial Sequence
  ENSG00000261824_100 (sequence is synthesized)
tgaaatctgggcaccttgaaaaaagaacacgataagagcaattgttcagatggaacagagccatatttctcttctt

SEQ ID NO: 877158 - DNA, 120 bp, Artificial Sequence
  ENSG00000261824_101 (sequence is synthesized)
aaggaacatccctgggaaagagaatatgcacccaggggtataagtctatagatggcccccctgtgcgtgcccctcttttatggtctgtagactacaggggtgaaatagaccccagtctcc

SEQ ID NO: 877159 - DNA, 90 bp, Artificial Sequence
  ENSG00000261824_102 (sequence is synthesized)
ggaagaggaaattcctgtctaataaattttagtcagaccggttgctctcaaaaccctttctcctaataagatgttatcaatgacaatggt

SEQ ID NO: 877160 - DNA, 120 bp, Artificial Sequence
  ENSG00000261824_103 (sequence is synthesized)
acccacacctattcgtatactccctctccttttgaaacgccttaataaaaccttgctggttttacagcttgtggggcatcatggaacctaccaatacgtgatgtctaccccggacgccca

SEQ ID NO: 877161 - DNA, 120 bp, Artificial Sequence
  ENSG00000261824_104 (sequence is synthesized)
tcccagtagtcccaaggactcgggaggctgagacacgaagactgcccaggtgagactacagagactgaagttgcagtgaatcatcacatcctgctactggacttgaacagtactgctgct

SEQ ID NO: 877162 - DNA, 120 bp, Artificial Sequence
  ENSG00000261824_105 (sequence is synthesized)
gatgagagccatctgggcgaccttcgacatggcaaggtgcgagccatctgatcagccttagacatggcaaggcaagagccatctggtcaaccttagaagtgacaagggacagccacctgg

SEQ ID NO: 877163 - DNA, 120 bp, Artificial Sequence
  ENSG00000261824_106 (sequence is synthesized)
tcgacctttgacatggcaggatgacagccatctggtcgaccttagagatgggaatgcaagaggcttcaggtccaccttcaacatggtaaggctaaagccatcttgtccagcttagacatg

SEQ ID NO: 877164 - DNA, 120 bp, Artificial Sequence
  ENSG00000261824_107 (sequence is synthesized)
aaccatctggtcaacctcagacatgggaaagtgagagccatctgatctacttcagacatggcaaggcaagaggcatcttgacctcagacatggcaaggaaagagccatccggtcgacttt

SEQ ID NO: 877165 - DNA, 120 bp, Artificial Sequence
  ENSG00000261824_108 (sequence is synthesized)
agagatggaaatgcgaaaagggtttgggtccaccttaagcatggaaaggcaagaggcatctggtctagtttaggcatggcaaggcaagagacatatggtttaccttagtcatgggaaggt

SEQ ID NO: 877166 - DNA, 120 bp, Artificial Sequence
  ENSG00000261824_109 (sequence is synthesized)
gagagccatctggtcgaccatagacatggcaaggtgggaaccatcaagtccacttcagacatggcaaggtgaaagccatcttggtcaaccttagacataggaagttgagagccacatggt

SEQ ID NO: 877167 - DNA, 120 bp, Artificial Sequence
  ENSG00000261824_110 (sequence is synthesized)
ctacttaaggcatggcaaggcaacaagcatctggtcaacctcaaacatggcaaggcaagagccatctggtcaacattagagatggtaatgcaagaggcttcagatccatcttagacatgg

SEQ ID NO: 877168 - DNA, 120 bp, Artificial Sequence
  ENSG00000261824_111 (sequence is synthesized)
taaggcaagaagcatctcatctagcttagacatggcaaatcaagagccatgtggtccaccttagtcatgggaaggtgagagccatctcgttgaccatagacagggcaaggtgggagccat

SEQ ID NO: 877169 - DNA, 120 bp, Artificial Sequence
  ENSG00000261824_112 (sequence is synthesized)
caagtccacctcagacatggcaaggcgagagccatctagtctgcctcagacatggcaaggtgagagccatctggttaactttagacatgggaaggagagccaactggttggcctcagaca

SEQ ID NO: 877170 - DNA, 120 bp, Artificial Sequence
  ENSG00000261824_113 (sequence is synthesized)
tggaaaggctagagccatccagtcgacctcagaaatgggaaagagagagccatctggacaaccttaaacatgacaaaatgagagccatctggtagactttagacatagaatggcaagagc

SEQ ID NO: 877171 - DNA, 120 bp, Artificial Sequence
  ENSG00000261824_114 (sequence is synthesized)
catctggtcaatcgtagatgtggcaaggtgagagccatctgattgacctagacatggcaaggtgagagacatctggtcgactgaagacaaggaaaaatgaaagccatctggttgagctta

SEQ ID NO: 877172 - DNA, 120 bp, Artificial Sequence
  ENSG00000261824_115 (sequence is synthesized)
gacatggcaaggcaagagtcatctggccgaccttagacatggaaaaagaagagccatctgtttgaccttagacatggcaaggcaagatccatctggtcaaccttagacatggcaaggtga

SEQ ID NO: 877173 - DNA, 120 bp, Artificial Sequence
  ENSG00000261824_116 (sequence is synthesized)
gagccatcttgttgaactcactcgaagaggagacccatctggtcaacctcagacatggcaaggtgagagccatctgatcgaccttagacatggcaaggtgagagccatctggtcgacctt

SEQ ID NO: 877174 - DNA, 120 bp, Artificial Sequence
  ENSG00000261824_117 (sequence is synthesized)
agatatggcaaggtgagaatcatctggtcaatcttaaacatggcaaggtgagatccaacttgaccttagatatgatgaggtgagaaccaactgttcaatcttagacatggctaggcaagt

SEQ ID NO: 877175 - DNA, 120 bp, Artificial Sequence
  ENSG00000261824_118 (sequence is synthesized)
gccatctggtccaccttagatatggcaaggcgagagccatctggtcgaccttagacatggcaaggtgagagctgtctgttcatcttagacatgacaagctggcagctaaatgcgatgcat

SEQ ID NO: 877176 - DNA, 120 bp, Artificial Sequence
  ENSG00000261824_119 (sequence is synthesized)
gcagtcgacatccatctcaaaataaatgaaccaacagtaaatatataacaataacaaggaaataatagtgaacaaccctaaagaccaaataattaagtaggagtgtacaataataaaagg

SEQ ID NO: 877177 - DNA, 120 bp, Artificial Sequence
  ENSG00000261824_120 (sequence is synthesized)
aggcgtgagccaccatgcctggccacatctacttttttaaatgtgtcattatatttgtgatattgtcatgatgttttctacttatattttattcaaaaattttatactttaagttcttac

SEQ ID NO: 877178 - DNA, 120 bp, Artificial Sequence
  ENSG00000261824_121 (sequence is synthesized)
ttgtggatatccattttttcccagcaccaattgttataaagacagtcctttgcccattgaacggtctttgtatccccatcaaaaattatttgaccatatgctgctttatactgttccagt

SEQ ID NO: 877179 - DNA, 120 bp, Artificial Sequence
  ENSG00000261824_122 (sequence is synthesized)
gtccatatgtgtgtctctttgccagtaccacactattttggaactttgtattaagctttggaatgaataagtgtacattttgtaacactggacttctttttcaagataattttgactcat

SEQ ID NO: 877180 - DNA, 120 bp, Artificial Sequence
  ENSG00000261824_123 (sequence is synthesized)
tggggtcccttgagattccatatgaaatttaggtaggatttttctatttctgcaaaatagaattttttgctttttttgttactcccgacgtattttattcttttcagtgctattgtaaat

SEQ ID NO: 877181 - DNA, 120 bp, Artificial Sequence
  ENSG00000261824_124 (sequence is synthesized)
gtgcttgtttgcttagttttgttttctaattattcatcattactgtatagaaacacaagtgatatttgcatgttaattttgtatgctgctactatgctgaatttattagttgtaatactt

SEQ ID NO: 877182 - DNA, 120 bp, Artificial Sequence
  ENSG00000261824_125 (sequence is synthesized)
tttgtgtggatctgtgaaatctctagagctttccacataaaattatattatctgtaggctagagtaattttacctctacatttccaatttggatagtttgtttctttttaattcttaatt

SEQ ID NO: 877183 - DNA, 120 bp, Artificial Sequence
  ENSG00000261824_126 (sequence is synthesized)
tgactagaacttccaacactatgtggaatagaaatagcaaaagcagacacctttgccttgttcctgagcttagagcagaagctttttgtctttcaccctggagtacattgtttgatgtgg

SEQ ID NO: 877184 - DNA, 120 bp, Artificial Sequence
  ENSG00000261824_127 (sequence is synthesized)
ttttttaatgtgtggatttcacaatggtagtattttagttttaaaattcctacttttttgagtgttttcaccctgaaaagattttgaatttcataaaatacttttctctgcatccatgag

SEQ ID NO: 877185 - DNA, 120 bp, Artificial Sequence
  ENSG00000261824_128 (sequence is synthesized)
gtgatcaatgtttcttttattttgttaatgtgtacacattgatcaatttttatatgttaaaaaattcatgttttaagatatccttgcattctaagaataaattgcacttggtcgtggtga

SEQ ID NO: 877186 - DNA, 120 bp, Artificial Sequence
  ENSG00000261824_129 (sequence is synthesized)
caccaggttggaaacactctttttgtagttgaacgaagggacatttttgagtcccttgaggcctatagtaatgaacagaatatcctgcaataaaaattagaaagaagttatctgggaaaa

SEQ ID NO: 877187 - DNA, 120 bp, Artificial Sequence
  ENSG00000261824_130 (sequence is synthesized)
agttaaacctttgttctgattcaacattgttcagaacactctttttgtagaatctacagagatactttttagcattttgaggcctctagtgaaaaaccgaatgtcctgcaatagaaactg

SEQ ID NO: 877188 - DNA, 120 bp, Artificial Sequence
  ENSG00000261824_131 (sequence is synthesized)
gaaacaaccttctgtgaaaatgctttgtgattcgtctattcatctcaaagaatgaaacttgtgctttgattcaacaggttggaaaaccctttttgtagaatctacgtaggaacatttctg

SEQ ID NO: 877189 - DNA, 120 bp, Artificial Sequence
  ENSG00000261824_132 (sequence is synthesized)
ggaaaaccctttttgtagaatctacgtaggaacatttctgagcccattgaggcctctagtgaaaaaactgaatatcccagaattaaaactataaacaagctatctgtgaagaagctttgt

SEQ ID NO: 877190 - DNA, 120 bp, Artificial Sequence
  ENSG00000261824_133 (sequence is synthesized)
atttgcctggttgggaacactctttttgtacagtctataaagaaacatttctgagtgcattgagtcatatgttgaaaaatcgaatatctcgtgataaaaactaggcaggaggtatctgtg

SEQ ID NO: 877191 - DNA, 120 bp, Artificial Sequence
  ENSG00000261824_134 (sequence is synthesized)
aaaatgctttgagatgtgtgggtattggcctcacagagttaaacttttgttttgattcaacagtttggaaacatactttgtagaatctacaatgacatatttctgagcccattgaggcct

SEQ ID NO: 877192 - DNA, 120 bp, Artificial Sequence
  ENSG00000261824_135 (sequence is synthesized)
gtagtgaaaaaccgaatatcccatgataaaaactcaaaacaagcgatatgtgaaaatgctttgtgacgtgtggttcatctcatagagttaaacctggttttgatccactacattggaaac

SEQ ID NO: 877193 - DNA, 120 bp, Artificial Sequence
  ENSG00000261824_136 (sequence is synthesized)
gcatttccaactgagaatctatgaagggacatcatttctgagcccattgagacttgtagtgaaaaaccaagcatcccctgataaataggtagtagaaacaaactacctatgaaaatgctt

SEQ ID NO: 877194 - DNA, 120 bp, Artificial Sequence
  ENSG00000261824_137 (sequence is synthesized)
tttgatttgtggatttatctcacagtgttaaatttttgatttgattcaactggttgaaaacattctttatgtagaatctatgaagagacgtttttgagcttatcgagatgtaaggtgaga

SEQ ID NO: 877195 - DNA, 120 bp, Artificial Sequence
  ENSG00000261824_138 (sequence is synthesized)
aactgaatatcccgctatgcaaagtacaaacaagctctctgtgaaaatgctttgttatatggggattcttctcactgaatggatcttgtgttgtgattcactgggttggaaacacttttt

SEQ ID NO: 877196 - DNA, 120 bp, Artificial Sequence
  ENSG00000261824_139 (sequence is synthesized)
tttagaatctatgaagggacatttccgaggccatcgaggcctatagtgaacaacagaatattctgtgataaaaactagaaacaacctacctgtgaaaacgatttgtgatctttggattca

SEQ ID NO: 877197 - DNA, 120 bp, Artificial Sequence
  ENSG00000261824_140 (sequence is synthesized)
tctcaccacatggaacctgtgttttgattcagctggttggaaaaactctttttgtggaatctaccaaaggatatttctaagcccgttgaggcctatattaaattgattatctcatggttg

SEQ ID NO: 877198 - DNA, 120 bp, Artificial Sequence
  ENSG00000261824_141 (sequence is synthesized)
agacttagtgaaaaacagaatatcccctgacaaaaattagaaacaagctttctgtgaaaatgttttttgatgtctgtatttatctcactgaatgaaaaatgcattttgattcaagatgct

SEQ ID NO: 877199 - DNA, 120 bp, Artificial Sequence
  ENSG00000261824_142 (sequence is synthesized)
ggaaacactatttttgtagaatctatgaagggatatttctgaactcattgaagtctacagtgacaaaccgactatccaatgataaaaactagaaatacgctgtgaaaaagttttatgatg

SEQ ID NO: 877200 - DNA, 120 bp, Artificial Sequence
  ENSG00000261824_143 (sequence is synthesized)
tgtggattcttctcactgaattaaacctgcattgtaaatcatcaggactgaaaccttctatttgtagaatctatgaaggaacatttatgagcccatcgaggcctgtattgaaaaacaaag

SEQ ID NO: 877201 - DNA, 120 bp, Artificial Sequence
  ENSG00000261824_144 (sequence is synthesized)
gatcctgtggtaaaaactagaaacaacctaaatatggaaatgctttgagaaatgtgattcatctcacagagatgaatctttgtattgattcatcaggttggaaactctctttttgtggaa

SEQ ID NO: 877202 - DNA, 120 bp, Artificial Sequence
  ENSG00000261824_145 (sequence is synthesized)
aataaaaggtctaaaaagagacatatctgagcccattgtggcctacagtgaaaaactgaatttcttgaacaaacgctggaaaccagctatgtgtgaaaatgctttgtgatgtgtgggttt

SEQ ID NO: 877203 - DNA, 120 bp, Artificial Sequence
  ENSG00000261824_146 (sequence is synthesized)
atctcacaaagttaaaccattgttttgattcaacatgttggaaacactctctctgtagaatctatgaaaaaacatttctgagctcattgagaagtatagtgaaaaaccacatatcctgaa

SEQ ID NO: 877204 - DNA, 120 bp, Artificial Sequence
  ENSG00000261824_147 (sequence is synthesized)
atcctgaaatagaaactagaaacaagatacgtgtggaatgtttgtgatgtgtggattcatctcaccaaatggaacctgtattttgattcacccagttggaaacacactttttgtagaatc

SEQ ID NO: 877205 - DNA, 120 bp, Artificial Sequence
  ENSG00000261824_148 (sequence is synthesized)
gacatttcagagcccattgaggcctattgtgaaaaatcaattatcccatggtaaaaacttgaaacaacctatctgtgaaaatactttgtgatgtatagattcatctcacaaagttaaacc

SEQ ID NO: 877206 - DNA, 120 bp, Artificial Sequence
  ENSG00000261824_149 (sequence is synthesized)
attgtttttattcaacacattggaaacactattttttagaatctacaaatagaaatttcttagctttttgagacctatagtaagaaactaatatcccacaataaaaactagagacaagct

SEQ ID NO: 877207 - DNA, 120 bp, Artificial Sequence
  ENSG00000261824_150 (sequence is synthesized)
gtatgtgaaaatgttttgtgatgtgtgcattcatctaactgaatggcacctgtgttttgattcacaaggttggaaacactttttgtagaatctacagaggtacatttctgagcccattga

SEQ ID NO: 877208 - DNA, 120 bp, Artificial Sequence
  ENSG00000261824_151 (sequence is synthesized)
ggcctactgtgaaaaaccaaatattctgtgataaaaattagaaacaagctatctttgaaaatgctttggtatatgtggatttatctcacagcatttaacctatgttttgattcaacaggt

SEQ ID NO: 877209 - DNA, 120 bp, Artificial Sequence
  ENSG00000261824_152 (sequence is synthesized)
tggaacgacttttttagcagaatctatgacagtacgtttctttgtccttttaaacctatcatgaaaaaccaaatttcctgtgataaaaaccagaaacagggtttctgtgaaaatgctttg

SEQ ID NO: 877210 - DNA, 120 bp, Artificial Sequence
  ENSG00000261824_153 (sequence is synthesized)
tgatgtgtggattcatctcacagacgttaacctttgttttgtttcaacaggttcaaaacactcttcctgtaaaatctacttagggacagtcctgagcccattgaggtctttagtaaaaaa

SEQ ID NO: 877211 - DNA, 120 bp, Artificial Sequence
  ENSG00000261824_154 (sequence is synthesized)
cggaatatcccatgataaaaactagaaacaaactatctgggaaaatgtttgtgatgtgtggtttcatatcacagagtaaaacctttgttttgatttaaaacgttgaaatcactctttttg

SEQ ID NO: 877212 - DNA, 120 bp, Artificial Sequence
  ENSG00000261824_155 (sequence is synthesized)
tagtatctagaaatggatatttctgaacccgttgatgcttatagtaaaaaattaaattttctacaatataaactagaaacaaactatccgtgaaaacgttttgtaatatgttaattcagc

SEQ ID NO: 877213 - DNA, 120 bp, Artificial Sequence
  ENSG00000261824_156 (sequence is synthesized)
atcccacaataaaaactagaaacaagctatctgggaaaatgccttgtgatgttttcattcatcttagagagttaaaccattgttgtaattaaacaggttggaaacactctctttgtagaa

SEQ ID NO: 877214 - DNA, 120 bp, Artificial Sequence
  ENSG00000261824_157 (sequence is synthesized)
actacgaattgacatttctgagccctttgaggcctacagtgaaaaacagaatatccagtgattaaaactaaaaactttctgtctgtgaaaatgctttgtgatgtgtggaagcatctcata

SEQ ID NO: 877215 - DNA, 120 bp, Artificial Sequence
  ENSG00000261824_158 (sequence is synthesized)
gagttaaacctttgttttggttcaacaggttggaaacacttttttagtagaatctatgagaaaatctttgtgaacccaatgaggactctgtgtgtgtgtttgtgtgtggggggggtgggg

SEQ ID NO: 877216 - DNA, 120 bp, Artificial Sequence
  ENSG00000261824_159 (sequence is synthesized)
gggcaggaaacaacgaggatttcatgatggaaactggaaagaaccatctgtgaaaatggtttgtgatgtgtggattcacctcacagaattaaacctttggtttgatagaacagattgaaa

SEQ ID NO: 877217 - DNA, 120 bp, Artificial Sequence
  ENSG00000261824_160 (sequence is synthesized)
acactgtttttgtacaatctaaaaagagacatttctgagcccattgaagcctgacgtgaaaaaccaagggtctcacaataaaaacgaattacaagctatctgtgaaaatgcttagcaatg

SEQ ID NO: 877218 - DNA, 120 bp, Artificial Sequence
  ENSG00000261824_161 (sequence is synthesized)
ggtcttgctctgtcacccaggctgaaatgcaatggcacaatctcggctcactggttcaagcaattctcctgcgtcagcctcacaagtagctgagaatacaggtgccagccaccacaactg

SEQ ID NO: 877219 - DNA, 120 bp, Artificial Sequence
  ENSG00000261824_162 (sequence is synthesized)
ggtgccagccaccacaactggcagtttttttgtatttttataaaagatggggtttcagcatgttaaccaggatggtctcgatttgctgacctcctgatctgcctgccttggcctcccaaa

SEQ ID NO: 877220 - DNA, 120 bp, Artificial Sequence
  ENSG00000261824_163 (sequence is synthesized)
atcactttttttgtagaatctgtgcaggcacatttctgaggcctacagtgaaaaattgtaggcctcattgaggcctacagtgaaaaattgaatatccctcaataaaaattacaaacaagc

SEQ ID NO: 877221 - DNA, 120 bp, Artificial Sequence
  ENSG00000261824_164 (sequence is synthesized)
gaaacaaatttaattgatttccaaggcttgagtgtgattaaaaaaaaaaaattaaaaggtaaacttcaccgtgcaggaagaagcataggaaaagagagagagaaaagaacaaagaaaaaa

SEQ ID NO: 877222 - DNA, 120 bp, Artificial Sequence
  ENSG00000261824_165 (sequence is synthesized)
aagaatagcaagtctctccaagtactatggaaacaaacagaaagtggaattaggaaaaaagagaggaagaaggtctgagtagtccaagggacacgggaggccagttgggaagaccgcccg

SEQ ID NO: 877223 - DNA, 120 bp, Artificial Sequence
  ENSG00000261824_166 (sequence is synthesized)
ggcgagaccaggaagatcaaggccacagtgaatcacgatcccatccctctgctcaacctgaattgtactgctgctggcgagagagatctggtcgaccttagacatggcaaggcgagaggt

SEQ ID NO: 877224 - DNA, 120 bp, Artificial Sequence
  ENSG00000261824_167 (sequence is synthesized)
gaggtccatcaggtcgaccttagtccaacgctcacagccgacatctctctcaaaataaataaacaaatccaacagtaaatatttaacaatgacaaaaaaattaaagaacaatacataaac

SEQ ID NO: 877225 - DNA, 120 bp, Artificial Sequence
  ENSG00000261824_168 (sequence is synthesized)
aggttgcagttaacaaaagtaaaaagtaattaatatcacaattaagatcttctcccctgtctctctgtttgtcacacccaggctggagtgtgtgacaaaataaaaaatctaaaagatcaa

SEQ ID NO: 877226 - DNA, 120 bp, Artificial Sequence
  ENSG00000261824_169 (sequence is synthesized)
gaatctatgaaggaacatttctgaaccaattttggcctatagtggaaaactgaacattctgtgatataaactagagaaaagatatctgtgaaaatgctttgcaatgtgtggattcatctc

SEQ ID NO: 877227 - DNA, 120 bp, Artificial Sequence
  ENSG00000261824_170 (sequence is synthesized)
actggatggaacctatgctttgatttagtaggttggaaatactcattttgtagaatctacaaaggatatttctgagcccctttgagcctgtagtgaaaaatcaaggatcccatgaagaaa

SEQ ID NO: 877228 - DNA, 120 bp, Artificial Sequence
  ENSG00000261824_171 (sequence is synthesized)
aacagaaaaacactatctgtcaaaatgcttattggtgtgtggattcttcttaccaaatggaacctgtgttttgattcaccaggttggaaacacttttttgtagagtctatgaagggacat

SEQ ID NO: 877229 - DNA, 120 bp, Artificial Sequence
  ENSG00000261824_172 (sequence is synthesized)
ttctcagcccattgaggcctatagtgatgaacaaaatatcccataatagaagctagaaaaaagctatttccaaaaatgctttgcaatgtgtggatttatcttacagaattaaacctttat

SEQ ID NO: 877230 - DNA, 120 bp, Artificial Sequence
  ENSG00000261824_173 (sequence is synthesized)
tttgatttgacagtctgcaaacacttttttttgtagaaagtacagagggacatttctgagaccatcaagaactatagtaaaaaaatcaaacaacctgccttaatatttagaaacaagcta

SEQ ID NO: 877231 - DNA, 120 bp, Artificial Sequence
  ENSG00000261824_174 (sequence is synthesized)
tctgttaaaatgctttagaatattttcattcatgtcacagatttcaaccttttttttgattcaacaagataaaaacactcttttagttgaatctacaaaaagatatttcaaagtccgttg

SEQ ID NO: 877232 - DNA, 120 bp, Artificial Sequence
  ENSG00000261824_175 (sequence is synthesized)
ttttagttgaatctacaaaaagatatttcaaagtccgttgaggcctatagtgaaaaactgaatatcccatgataaaaactagaagtgagccctgtgtgaaaatgctttgtgatgtgtgga

SEQ ID NO: 877233 - DNA, 120 bp, Artificial Sequence
  ENSG00000261824_176 (sequence is synthesized)
ttggaaacactctttttgtagcatctatgaagggacattctgaggccattgaggcctatagtgaaaagcagaatatccttccttaaaatctagaaacaatctatctgtgaagatgattta

SEQ ID NO: 877234 - DNA, 78 bp, Artificial Sequence
  ENSG00000261824_177 (sequence is synthesized)
ccttaaaatctagaaacaatctatctgtgaagatgatttatgatgtgagcatttatctcacagatttaaaactctatg

SEQ ID NO: 877235 - DNA, 120 bp, Artificial Sequence
  ENSG00000261824_178 (sequence is synthesized)
ctgaatatccagcattaaaaactagaaacaagctatatgtaaaaatgttttgtgatgtgtggattcatctctcccaatggaacctgtgttttgattctccaggttggaaacactttttgt

SEQ ID NO: 877236 - DNA, 120 bp, Artificial Sequence
  ENSG00000261824_179 (sequence is synthesized)
gaaatctatgaagcgacatttctgagcccattgaggcatattgtaaaatttgaatattccacgataagaactagaaacaagctatctctgaaaatccttttcaatgtgtggcttctcctc

SEQ ID NO: 877237 - DNA, 120 bp, Artificial Sequence
  ENSG00000261824_180 (sequence is synthesized)
acagagttaaatctttgtttcaattcaacaccttgaaaacacttttttggtagaatctacgaagggacatttctgacccattgaggcctacagtaaaaaatgtagggacatttctgagcc

SEQ ID NO: 877238 - DNA, 120 bp, Artificial Sequence
  ENSG00000261824_181 (sequence is synthesized)
cattgaagcctatagttaaaaaactaatttctggtgataaaatctagaaacaagccatctgtgaaaatgctttgtgatgtatggatttatctcaaaaagttaaaactatgtttttaacca

SEQ ID NO: 877239 - DNA, 120 bp, Artificial Sequence
  ENSG00000261824_182 (sequence is synthesized)
acaggttgaaatcactctttttgtagaatctatgaaaagacgtttctgagcccactgaggcctgtagagaaaaactgtatatcctgcaataaaagctagaagaaaagctctccgtgtaaa

SEQ ID NO: 877240 - DNA, 120 bp, Artificial Sequence
  ENSG00000261824_183 (sequence is synthesized)
tggttcccgatgtgtgggttaatctcacagagttaaacatttgtttttatttaacaggttagaaacgttctttttgtagaatctacgaaggaatatttctgagcccattgaggcctatag

SEQ ID NO: 877241 - DNA, 120 bp, Artificial Sequence
  ENSG00000261824_184 (sequence is synthesized)
caagaagccatatatccgtcaataaaaactggaaacaagctatctgtgaacattttttgtgatgtatgcatttatctcaccaaatggaacctgtgttttgattcaccagtttggaaacac

SEQ ID NO: 877242 - DNA, 120 bp, Artificial Sequence
  ENSG00000261824_185 (sequence is synthesized)
caagttatctgcaaaaatgctctgtgatgtgtggatttatctcacagagatgaagctttgttttgattcaacatgttggaaacactttttttgtagaatctacaaagggacatttctgag

SEQ ID NO: 877243 - DNA, 120 bp, Artificial Sequence
  ENSG00000261824_186 (sequence is synthesized)
accattaaaaactacagtaaaaaaaggtataatgcaccttaaaatctagaaacaaagctatctgtgaaaatgctttgcaatatgtggattcatgtcacagatttaaacctttgttttgat

SEQ ID NO: 877244 - DNA, 120 bp, Artificial Sequence
  ENSG00000261824_187 (sequence is synthesized)
tgaacaaattggaaacactgttttagtagattatataaagggacatttcaaagcccattgaagcctatagtgaaaaatcaaaaatcccgtgagcaaaaatagaaacaacctctgtgggaa

SEQ ID NO: 877245 - DNA, 120 bp, Artificial Sequence
  ENSG00000261824_188 (sequence is synthesized)
aatgctgtgtgatacgttcattcatctcacagggataacctttgtttttattcaacaccttggaaacattctttttgtagagtctatgaaaaaaatttctgagccaattgaagtctgtag

SEQ ID NO: 877246 - DNA, 120 bp, Artificial Sequence
  ENSG00000261824_189 (sequence is synthesized)
tgaaaaagctaatatcccattttaaaatataaaacaaactatgaaaatgagttttgatgtgtggattcatcgagagttagacctttgttctaaatcaacaggttaagaacactctttttg

SEQ ID NO: 877247 - DNA, 120 bp, Artificial Sequence
  ENSG00000261824_190 (sequence is synthesized)
tagaatctatgaaaaaacatttctgagcccgttgaggcctattgcgaagtgaatctcttgcaataaaaagcagaaaccagctctctgtgaaataattttgtgatgtacaaatttatcttg

SEQ ID NO: 877248 - DNA, 120 bp, Artificial Sequence
  ENSG00000261824_191 (sequence is synthesized)
cagagttaaaactttgttttaattcaacaagttgaaaccttctttttgtagaatctgcaaagagacatttctgagcccattgaggccaatagcaaaaaaatgaatatcccacaataaaaa

SEQ ID NO: 877249 - DNA, 120 bp, Artificial Sequence
  ENSG00000261824_192 (sequence is synthesized)
ctagaaacaaaacagctgtgtaaatgctttgcaatatgtggattcgtctcactgagttaaacctatgttttgattcaacaagttaaaaaacttgtttttgtagtatcttcgaagggacaa

SEQ ID NO: 877250 - DNA, 120 bp, Artificial Sequence
  ENSG00000261824_193 (sequence is synthesized)
ttctgagcctatggagattatagcaaaaaactgaatatcctgcaataaaaactagaaacaagatatccgtggaaatgctttgagatgtgtagatttatttcacagaattaaacctttgtt

SEQ ID NO: 877251 - DNA, 120 bp, Artificial Sequence
  ENSG00000261824_194 (sequence is synthesized)
ttgatttaacaggttggaaccactctattttaagaatctatgaagaaatatctttgtccctattgtacactatagtggacaactgaatacttcatgacaaaaactagaaacaagctagct

SEQ ID NO: 877252 - DNA, 120 bp, Artificial Sequence
  ENSG00000261824_195 (sequence is synthesized)
gtgaaaatgctttgcaatgggtgaattcatctcactcagttaaaccttcgttttgattcaacaagggtgaaacactcttttggtagaatctacaaagaaacatttatgagccccttgagg

SEQ ID NO: 877253 - DNA, 120 bp, Artificial Sequence
  ENSG00000261824_196 (sequence is synthesized)
actatagtgaaaaaatgaatctcctgcattaatatctagaaacaatctatttgtgaaaatgctgtgtgatgcatggatccatctcacagatttcaaactttattttgattcaacaggctg

SEQ ID NO: 877254 - DNA, 120 bp, Artificial Sequence
  ENSG00000261824_197 (sequence is synthesized)
gaaacactcttgttatagaagctacgaagggtcatttctgaacccattgaggccaatagtgaaaaactaaatatcctgcaataaacctagaaaaaatctatctgcgaaaatactttgtgt

SEQ ID NO: 877255 - DNA, 120 bp, Artificial Sequence
  ENSG00000261824_198 (sequence is synthesized)
agtgtggatgagtgtctcagggttaaacatttgtttttattcaccaggttcgaaacactctttttgttgaacagacaaagggacatttcttagcccagttaggcctataaaggtaaaccg

SEQ ID NO: 877256 - DNA, 120 bp, Artificial Sequence
  ENSG00000261824_199 (sequence is synthesized)
aatatcccgtgatacatagtagaaacaagctatctgcaaaaatgctttgtgaattgtagattcatctcacagaattaagcctttgttttaattcaacaggttaaaaacactatttttgta

SEQ ID NO: 877257 - DNA, 120 bp, Artificial Sequence
  ENSG00000261824_200 (sequence is synthesized)
gactctacgaagaaacatttctgaaaccattgaaacctatgggggaaaaaaacccccgaaattcctgtgataagaaatggaaagcagctatctgtgaaaatgctttgtaatgtgtggatt

SEQ ID NO: 877258 - DNA, 120 bp, Artificial Sequence
  ENSG00000261824_201 (sequence is synthesized)
ttgcaatgtgtggatttgtctcacaaagttaaacctgtgtttgattcaacgggttggaaacactttttttgtagaatctatgaagaaacatttctgagaccattgaagcctatagtaaaa

SEQ ID NO: 877259 - DNA, 120 bp, Artificial Sequence
  ENSG00000261824_202 (sequence is synthesized)
aattgaatatcctgtgatataaatgagaaacaagttatctacgaaaatgtatattaatctcactgaatgcaacctgtgttttacttcaccaggttaaagatgctctgttggtaaaatctg

SEQ ID NO: 877260 - DNA, 120 bp, Artificial Sequence
  ENSG00000261824_203 (sequence is synthesized)
tgaagggacatttctgagcacattgaggcctatagtgaaaaaacgaatatcctgctataaaaactagaaacaagctatgtgtgaaaatgctttgcaatgtgtggattcacctcacagatt

SEQ ID NO: 877261 - DNA, 120 bp, Artificial Sequence
  ENSG00000261824_204 (sequence is synthesized)
taaacctttgttttgtttcaacaggttggaaacactctttttgtagttgaacgaagggacatttttgagtcccttgaggcctatagtaatgaacagaatatcctgcaataaaaattagaa

SEQ ID NO: 877262 - DNA, 78 bp, Artificial Sequence
  ENSG00000261824_205 (sequence is synthesized)
gaagaaaaacaaaagcaaatcactctaagtactgttactgtggaaacaaactaaaagtgggttaaaaaaaaaaaaaaa

SEQ ID NO: 877263 - DNA, 120 bp, Artificial Sequence
  ENSG00000261824_206 (sequence is synthesized)
gtgaacaaaggtaaaaggtaactaatatcacaattaaaatattctgctatctctcactctctctcttcccctttccatttgtcacacccaggctggaatgtgacaaaaaaatataaaagg

SEQ ID NO: 877264 - DNA, 120 bp, Artificial Sequence
  ENSG00000261824_207 (sequence is synthesized)
tcaatttcatcatgcaggaatgagtgtagaaaaagggagaaaagaacaaagaagaaaaacaacagcaagtctctctaaaacttcagttagtttcactgtagaaaaaaaaattgaaagtgg

SEQ ID NO: 877265 - DNA, 120 bp, Artificial Sequence
  ENSG00000261824_208 (sequence is synthesized)
tcgagaccacagtgaatcatgatcacatccctctgctgtacctgaatagtacttccaaaggcaggagccatctggtcatccttagtcatggcaaggcgagagccatctggttgaccttag

SEQ ID NO: 877266 - DNA, 120 bp, Artificial Sequence
  ENSG00000261824_209 (sequence is synthesized)
ataaggtgagagccatctggttgaccttagacttggcaagctggcagctaagtccaatcctctcagctgacatcttggagagagagacagacagacagacacaaacagcgagacaggaga

SEQ ID NO: 877267 - DNA, 120 bp, Artificial Sequence
  ENSG00000261824_210 (sequence is synthesized)
aaatcttaattgtgttattaattacttttcacctttgttcactccaaacagaaaaaaatccaacagtgaatatttaacaataacaaagatataactacaaacaatattaaagacaaataa

SEQ ID NO: 877268 - DNA, 120 bp, Artificial Sequence
  ENSG00000261824_211 (sequence is synthesized)
atgggagtgaacaaaggtaacaggtaattaatatcacaattaaattcttctaatctctttctatctctcactctcgatttctctctgtcaacttcatcaagcaggaaggagcacaggaaa

SEQ ID NO: 877269 - DNA, 120 bp, Artificial Sequence
  ENSG00000261824_212 (sequence is synthesized)
atataaagagaaaacaagaaaaaaatagaaagtcactctaaggactgtggaaacaaactgaaagtaaggttaggaaaaacaaaggaaggatgtcgaaatagtctgagggaatcaggaggc

SEQ ID NO: 877270 - DNA, 120 bp, Artificial Sequence
  ENSG00000261824_213 (sequence is synthesized)
cgagatcatcagaaggccaccctgtagagacctggaagacgcccagggcacagtgaatcacgatccgatccctctgctggacctgaatggtactgctgctgctgagagccatcctctcga

SEQ ID NO: 877271 - DNA, 120 bp, Artificial Sequence
  ENSG00000261824_214 (sequence is synthesized)
ccctagacttaccaagctggtggctaaatacaaccctcgtgggaagatctgtctcaaaagaaaaaaatccaacagggaatatttaacagtaacaaagaactaaccataacaatattaaag

SEQ ID NO: 877272 - DNA, 120 bp, Artificial Sequence
  ENSG00000261824_215 (sequence is synthesized)
acaaataaataagtgggagtgaacaaaggtgaaaggtcaattatatcacaattaagatcttctctctctttctccatttgtcacaaccaggctggattgttccaaaaaaaaaaaatctag

SEQ ID NO: 877273 - DNA, 84 bp, Artificial Sequence
  ENSG00000261824_216 (sequence is synthesized)
ggacagaatctccgtggacatctgtctggaggagcaattttactgcgacattttaaagaaacaaatttaattgatttccaagta

SEQ ID NO: 877274 - DNA, 120 bp, Artificial Sequence
  ENSG00000261824_217 (sequence is synthesized)
attcaaatgggagagactcttgactgacaccaggcattctaatgagagagactccaggaagatccaggcagtctaatgataaatatacctgggcgaacccagccattctaattggagaga

SEQ ID NO: 877275 - DNA, 120 bp, Artificial Sequence
  ENSG00000261824_218 (sequence is synthesized)
cagaccaggtaaaagccaagaggctctcataggcgccttggcagagttgccattggaacgggcgtcctctagtagctgggatctccccgccccttcctcctgaggggccactcctttctg

SEQ ID NO: 877276 - DNA, 120 bp, Artificial Sequence
  ENSG00000261824_219 (sequence is synthesized)
agaaacaaactgaaagttgggttagaaaaaaaaaaagaagaaggtccaagtagtctgaaggactcgggaggccaagatgggaagtccacccagatgacaccggggagatcgaggctgcag

SEQ ID NO: 877277 - DNA, 120 bp, Artificial Sequence
  ENSG00000261824_220 (sequence is synthesized)
agaataaggatcacatccctctgctggacctgaatggtactgatgctgttgagagccatctggtcctcagacatgggaaggcaagagccatctgttcgaccttagacatggcaagatgaa

SEQ ID NO: 877278 - DNA, 120 bp, Artificial Sequence
  ENSG00000261824_221 (sequence is synthesized)
agctaagtccagtgctcgctgccaacacgtttctcaaaataaataaacaaaaatttcaacagtaaatattcaacaataacaaagaaataataacaactttaaagaccaataagtaaataa

SEQ ID NO: 877279 - DNA, 120 bp, Artificial Sequence
  ENSG00000261824_222 (sequence is synthesized)
actctatatagaatctacaaagagacatttctgagtctattgaggcctatagtgaaaattcaaatatttaaactaaaaacaagttatcaattaaaacgctttgtgatgtgtggattcatc

SEQ ID NO: 877280 - DNA, 120 bp, Artificial Sequence
  ENSG00000261824_223 (sequence is synthesized)
acacagagttaaaccttggttttgattaagcaagttggaaacattcttttttagaatctagaagagacattactgagtgcatgaaggcctatagtgaagatctgaatatcccacgataaa

SEQ ID NO: 877281 - DNA, 120 bp, Artificial Sequence
  ENSG00000261824_224 (sequence is synthesized)
aagtagaaacaagttatctgcgaatatgttttgtgatgtgtggatttatcccactgaatgaaacctgcgttttgattcaagttggatagactctttttgtaggatcaatgaagagtcatt

SEQ ID NO: 877282 - DNA, 120 bp, Artificial Sequence
  ENSG00000261824_225 (sequence is synthesized)
tctgagcccattgaggcttactgtgaaaactcgaatattgcactatagaaactagaaacaagctttctgtgaaaatactttgaaagctgtgaatttgtctcaccgaatcaaacctgtgtt

SEQ ID NO: 877283 - DNA, 120 bp, Artificial Sequence
  ENSG00000261824_226 (sequence is synthesized)
ttggttcaacaagttggaaacactcttattgtagaatctacaaagggatatttatgagaccattgaggcctatagtgaaaaatgaaatatcccattataaaactagaaacaagctatctg

SEQ ID NO: 877284 - DNA, 120 bp, Artificial Sequence
  ENSG00000261824_227 (sequence is synthesized)
agaaaatgctttttaacatctggatttgtctcactgagttaaagccttgttctaattcgttagactgaaatcacttttttgtaaaatctacaaaggaacatttctaagcttattgagggc

SEQ ID NO: 877285 - DNA, 120 bp, Artificial Sequence
  ENSG00000261824_228 (sequence is synthesized)
tatagtgaaaaaatgaatattccacgaaaagaactaggaacaagctatctgtgaaatgctttgcgatgcatggttttatctcacagagttaaatctttgttttgacttaacaggttggaa

SEQ ID NO: 877286 - DNA, 120 bp, Artificial Sequence
  ENSG00000261824_229 (sequence is synthesized)
atcctttctttgtagaatctacaaagggatgtttccgagaccattgaggcctgtagtaaaaaatcaaatatctcatgatataaactaaaaagaatctatcaatgaaaatgcattgcaagg

SEQ ID NO: 877287 - DNA, 120 bp, Artificial Sequence
  ENSG00000261824_230 (sequence is synthesized)
aaatagtgaaaatgagaaatcatagcaactccctggaaaatcttgctctgccagttttctaaatcacagtagggcctcgatatggttttatttgtttttgtttttgttttggagtgtgtt

SEQ ID NO: 877288 - DNA, 120 bp, Artificial Sequence
  ENSG00000261824_231 (sequence is synthesized)
caccttttgaatataagaatttgcggttttgaccaagtttttaaattttcagctattgtttatttgtttttgtattatatttaatttttctgtctctccctctctgtctcagactcaatc

SEQ ID NO: 877289 - DNA, 120 bp, Artificial Sequence
  ENSG00000261824_232 (sequence is synthesized)
atttcacaggtctcttaggcctcttttcattttctttaaacttgtttcagtcttcagattggatggtttatattgctgtcttctgtttctactctgtaaactaaaagttctttttatttt

SEQ ID NO: 877290 - DNA, 120 bp, Artificial Sequence
  ENSG00000261824_233 (sequence is synthesized)
attattttattgtcttctattttactctttttataatttccatgtctctgctgagactctacatgagttaattcattatgagaatattttcctttacccccatgaacgtacttataatag

SEQ ID NO: 877291 - DNA, 120 bp, Artificial Sequence
  ENSG00000261824_234 (sequence is synthesized)
ctgccctgaaatacttgtctgctgattacatcatctcggacatcttagaaatagcttctgctgcctgctttttatcttgtgtatagtttgcatgttacatttcttcacacattttatgaa

SEQ ID NO: 877292 - DNA, 120 bp, Artificial Sequence
  ENSG00000261824_235 (sequence is synthesized)
ttttaatattgtgtaatagaaattataaatattagttatagagactaaattctgttgtattctttggaagagcattgttattatttgaagagggggtaaatgtggctgaattcaaacaga

SEQ ID NO: 877293 - DNA, 120 bp, Artificial Sequence
  ENSG00000261824_236 (sequence is synthesized)
ataattatcttccctacggtgggaaaggttgaaattctcattcagtcacacacacgtatgtatgtattgtatatagatgaatgtttctatgtaactatatataatattttatccagattg

SEQ ID NO: 877294 - DNA, 120 bp, Artificial Sequence
  ENSG00000261824_237 (sequence is synthesized)
gcatttccaactgagaatctatgaaaggatatttctgagcccattgaggatctatagtaaaaaaatctattatcctgtgataaacactagaagtaagctatctgtgaaaatgctttgcct

SEQ ID NO: 877295 - DNA, 120 bp, Artificial Sequence
  ENSG00000261824_238 (sequence is synthesized)
gcacacatttaatgacagaagtctcaggtaaacaccactagaaggtaattattgttgctgaacccccgagtagagagcaatcatgcaccagtggatgatcagaggctggaaacactcttt

SEQ ID NO: 877296 - DNA, 120 bp, Artificial Sequence
  ENSG00000261824_239 (sequence is synthesized)
tttactgcgacattttaaagaaacaaatttaattgatttccaaggtaagaaattaaaccttgaaaactaaactgaaaagtcatctgtgtttgacaagtcagactttctccaagaagaaaa

SEQ ID NO: 877297 - DNA, 120 bp, Artificial Sequence
  ENSG00000261823_0 (sequence is synthesized)
tggactaggaatcagaaaacctgccagctgtggtagactcatttccatatctgaaattgtgagtaatattatctatacctaataggtttcattcatttattcaacacatttattaagcac

SEQ ID NO: 877298 - DNA, 120 bp, Artificial Sequence
  ENSG00000261823_1 (sequence is synthesized)
ttactacatgcaggatactattctatatgatgggcacacaaattaaccaaagttcctcctctcatgacatttgcattctagaggaagagacagaagatgaacacatatatacacatagac

SEQ ID NO: 877299 - DNA, 120 bp, Artificial Sequence
  ENSG00000261823_2 (sequence is synthesized)
atatgtaatatctggcagtgttaaggactatcaagaaaaaaagggtaaagggacagaacaatgagggaagggtaaaactatttaaaataaagtggtcagggaagtcttccaaatgaagtg

SEQ ID NO: 877300 - DNA, 120 bp, Artificial Sequence
  ENSG00000261823_3 (sequence is synthesized)
aataaaagatagtggcttgggcttgggtagatgtaatgaatgttttgagaagtggtttattctatgtattttgaagacagaattgacaggacttgttggtgagctggatctggatatagg

SEQ ID NO: 877301 - DNA, 120 bp, Artificial Sequence
  ENSG00000261823_4 (sequence is synthesized)
aaaacagatcaagatgactcttcaattttagactgaacaattgggtgatgccttttactaagacagggagaaggaagagagcaggtttgctgagggcagggaagcaagagcttcctttag

SEQ ID NO: 877302 - DNA, 120 bp, Artificial Sequence
  ENSG00000261823_5 (sequence is synthesized)
gacatgtgaagtttaacacacaatagagatatcaagtgggcagaaaggaagaggtaagggcaagacacaaaaatgtgaggatgatcaacgtatatatagatggtatataaagccatggaa

SEQ ID NO: 877303 - DNA, 120 bp, Artificial Sequence
  ENSG00000261822_0 (sequence is synthesized)
ttttagttagaaattacaagtttatttttatattttgaaaaaggcataatagaaaacaaaaataaacaaccaggcatatcaatatttgtgacatacacatacacacaaaaatgaatatag

SEQ ID NO: 877304 - DNA, 120 bp, Artificial Sequence
  ENSG00000261822_1 (sequence is synthesized)
gaaataacacgaagaaaaagcatagtatgttttgaaaccaacgtggggtatgaacagatttttgatgaaatacaactaaaggttttaagtgtctatgtaatgttcgagatattacgatca

SEQ ID NO: 877305 - DNA, 120 bp, Artificial Sequence
  ENSG00000261822_2 (sequence is synthesized)
caggatttattttggtaatgatcctgcttccttataaacaactacttatcattgttgaagtcttcttgtgttaaggagtacaatgaggccaggcgcagtggctaacacctgtactcccag

SEQ ID NO: 877306 - DNA, 120 bp, Artificial Sequence
  ENSG00000261822_3 (sequence is synthesized)
cactttcggaggtgtgagccaccacaccagacgataaacacacatttttaaaaaaagagaatttcccacctgagaaatggttaattcacttatattaataaattgtcatggctatttttt

SEQ ID NO: 877307 - DNA, 87 bp, Artificial Sequence
  ENSG00000261822_4 (sequence is synthesized)
cagtgaggtcaagattgggccacaccacactctcagcaacctgggtgacagagtgagatcctgtctttaaaaaaaaaaaaaaaaaaa

SEQ ID NO: 877308 - DNA, 120 bp, Artificial Sequence
  ENSG00000264853_0 (sequence is synthesized)
tgtttagtgctaaggttgatactaagcagaattaaagatgtgaaatttaataaataccctgttttaagagctttgctaaagatgtgtatggaatgttctgaatgaaacagacttagtaag

SEQ ID NO: 877309 - DNA, 120 bp, Artificial Sequence
  ENSG00000264853_1 (sequence is synthesized)
acatgagtgttgaaaagttttctcagttaatttagcagcactcaggactgctttgtccatgcagatacggctgacttactggggacttttgtttctaacattagccaagcttactgtcaa

SEQ ID NO: 877310 - DNA, 120 bp, Artificial Sequence
  ENSG00000264853_2 (sequence is synthesized)
ctctgaagagatgttggagttgtcctagaacacttaaacttggaagttaaattgtctttcaatgtgtttggcagagttataaaagtagacatgagccatattgatagcggcacggcatat

SEQ ID NO: 877311 - DNA, 120 bp, Artificial Sequence
  ENSG00000264853_3 (sequence is synthesized)
gaagagcttcagaatacttatgacacttctttgacgttctgtgaaaggctatagataagtacctccaaacatcatgcctccagcctcactcttgcttaaggaaatactctgaaagtagat

SEQ ID NO: 877312 - DNA, 64 bp, Artificial Sequence
  ENSG00000264853_4 (sequence is synthesized)
cagcctcactcttgcttaaggaaatactctgaaagtagattttctttcttttttgagacagcac

SEQ ID NO: 877313 - DNA, 73 bp, Artificial Sequence
  ENSG00000264853_5 (sequence is synthesized)
caccaccacgcctggctaatttttgttcttttagtagagacggggatttggttggcccacctcggcctcccaa

SEQ ID NO: 877314 - DNA, 120 bp, Artificial Sequence
  ENSG00000264853_6 (sequence is synthesized)
ccaaagtgctgggattacgggcatgagttactgcgcccagccaaatatctgttcttttagctctttgatagttcctttgtagtgacaaattattttttaaaagcttataaattggtgttt

SEQ ID NO: 877315 - DNA, 120 bp, Artificial Sequence
  ENSG00000264853_7 (sequence is synthesized)
ttataaattggtgtttctgtggaagatgttatttctcatcgaatgcgtattgatagtgttttaagtttagaccacaaagtatttgtcttccatgtgcctgatatttacatagtactctaa

SEQ ID NO: 877316 - DNA, 120 bp, Artificial Sequence
  ENSG00000264853_8 (sequence is synthesized)
gctgcactgttgagtactgtagcatctagcttatatggctatttaaatttatattaggctaaaaattcaccagtgcagccatatttcaagttttcagtggctgtgagtggccaatggctc

SEQ ID NO: 877317 - DNA, 120 bp, Artificial Sequence
  ENSG00000264853_9 (sequence is synthesized)
tgttgtattggacagtacagatataggacatatgcagaaattatcattggacaaccctgctgtagaatgtcaccagtgtttctggaatcactgttttcgtgcttgaagtattttgtgctc

SEQ ID NO: 877318 - DNA, 120 bp, Artificial Sequence
  ENSG00000264853_10 (sequence is synthesized)
cactttgaaatgctaggaaatcgtgtcttcccttcacattgtaaactcttggtgattattgtggtctttggaggtgaagcccttgggcagaattgggatgggagtggaaagtaaactgct

SEQ ID NO: 877319 - DNA, 120 bp, Artificial Sequence
  ENSG00000264853_11 (sequence is synthesized)
aggtgttcccgttctcatgagtcccttccctgtctgcactgttccctttccttgtgaacctttatttcccaaaccccttcttcaccttttccacctccagcctgtgcagaggcagataga

SEQ ID NO: 877320 - DNA, 120 bp, Artificial Sequence
  ENSG00000264853_12 (sequence is synthesized)
tactggggacctgttgtactttgttctgcatcttcactagtggaaataagagttctcttaggctcactgctcgggggtggcctgtaagatgttcttgagtctagtgctttctcttttaat

SEQ ID NO: 877321 - DNA, 120 bp, Artificial Sequence
  ENSG00000264853_13 (sequence is synthesized)
ttgggtgccttgtgtcattggatgtgtaatgtggtctcgagctaaatgtgcagacagcagcatctgagacatatccagagagcagaggcagcatttctttgaattcagcaaaaccataat

SEQ ID NO: 877322 - DNA, 120 bp, Artificial Sequence
  ENSG00000264853_14 (sequence is synthesized)
tattgtgttttcttttcagaactgtgttttacgcaaataatcttcggcaaagtcttactcttattgtagatactcattttaattctgtgtgttaacttgcaccacagttttgcataattt

SEQ ID NO: 877323 - DNA, 120 bp, Artificial Sequence
  ENSG00000264853_15 (sequence is synthesized)
actatcctcctccagaaagctctacagtgttccattggtcaacgcttttgccagtaatgtcagaaataatgggttgggtgatcttactttctatatttaaacaaaattttgtcaattttc

SEQ ID NO: 877324 - DNA, 120 bp, Artificial Sequence
  ENSG00000264853_16 (sequence is synthesized)
agttagttgcttgttttccctgaccactgggctatctcgtatttctggtcttcagtcatgttgttccttttgtgtggtgtaacctttagcatttacgtgccttggccacctctcgttgct

SEQ ID NO: 877325 - DNA, 120 bp, Artificial Sequence
  ENSG00000264853_17 (sequence is synthesized)
tagaacagacccaatctccagaaggttttctgggtgttcttcttttccctcgggttcccctttgctgccccgagcaccattgtgtacctcttgccacagtgtgcttttgttactccattt

SEQ ID NO: 877326 - DNA, 120 bp, Artificial Sequence
  ENSG00000264853_18 (sequence is synthesized)
cacagtaggttcctctatcagcatcttgcacagttgcctagcaacatagtttaatgtgttggaggcaagaagggaggaaattcacaccatgttcatcctactcagtgtgaactgagtcta

SEQ ID NO: 877327 - DNA, 120 bp, Artificial Sequence
  ENSG00000264853_19 (sequence is synthesized)
tagttgatatcctctttgtgtcactcaatgttgtcctgcctgagttcaggcttggttcttacgttgcggcagctcttttgcctttatttaggcaacagaccagaaatagaaacccttgaa

SEQ ID NO: 877328 - DNA, 120 bp, Artificial Sequence
  ENSG00000264853_20 (sequence is synthesized)
tttttttttttttattcctttattttccttgccagcaccttggttagatttcttaactacttttttcttgagtctttgtaaagtataattacactttactgtgcttacgatctaaagaat

SEQ ID NO: 877329 - DNA, 120 bp, Artificial Sequence
  ENSG00000264853_21 (sequence is synthesized)
gaatacttaatcagtgttattttttatttttatgttttatttttgtattgattaggtcttgccatgttgcccagactggtctcggactcctggactcaagcagtcctcccaccttggcct

SEQ ID NO: 877330 - DNA, 87 bp, Artificial Sequence
  ENSG00000264853_22 (sequence is synthesized)
ttggcctcacttttatttcttaaagtcactgcccaataaacattccaagtttccactagtttttgtttttggacatttgttccatcc

SEQ ID NO: 877331 - DNA, 84 bp, Artificial Sequence
  ENSG00000250735_0 (sequence is synthesized)
atgattaacagcattcaaggtggtggctacacatcacatcagcctggattctcaagtaggaagatacgcaacagagcatccagc

SEQ ID NO: 877332 - DNA, 120 bp, Artificial Sequence
  ENSG00000250735_1 (sequence is synthesized)
tggattctcaagtaggaagatacgcaacagagcatccagctgaccttcactggatatgttgtatgaacaagaacatgcagcaatatggtggggacgcatactacagctgagctctggaca

SEQ ID NO: 877333 - DNA, 120 bp, Artificial Sequence
  ENSG00000250735_2 (sequence is synthesized)
ggaagttttccattttatgagaaactcaaaccaccaagaaaaccagcttatctcacaaaatatttttatacttctctagaactcagtaagaggccctcaacggattggatgatgcctctc

SEQ ID NO: 877334 - DNA, 120 bp, Artificial Sequence
  ENSG00000250735_3 (sequence is synthesized)
atctcttctggaaacactctcagactcacccagaagtaatgtttggccagccatcggagcatcctctggcttagtcaagttaacacatagaattaaccatcacagaaggcaacagaaaaa

SEQ ID NO: 877335 - DNA, 120 bp, Artificial Sequence
  ENSG00000250735_4 (sequence is synthesized)
cctttaaagaatcaatagaaaatatgtgcatcagaaaatattgctggcttacccaaaagctatttcccttttgttccttactaacaactcttactttgtttatatttgaggaagtaatgt

SEQ ID NO: 877336 - DNA, 120 bp, Artificial Sequence
  ENSG00000250735_5 (sequence is synthesized)
acttaaggaagttttgtctctaacccagcattcaagaatgcgaagacaatcacgttaatcccatttcctctaccagtgattggtgtggaggtgggcatatcactcacttataaccaaaag

SEQ ID NO: 877337 - DNA, 61 bp, Artificial Sequence
  ENSG00000250735_6 (sequence is synthesized)
atgcagcaatatggtggggacgcatactacagctgagctctggacaggaagttttccattt

SEQ ID NO: 877338 - DNA, 120 bp, Artificial Sequence
  ENSG00000258502_0 (sequence is synthesized)
agtcacatgcttgcatcttagtccaatcactgtggcctggaggatgggacaccatgatttgcaagactctggtcacatgcccacacctgtggcttctgaagcagagcaccagcagtgaca

SEQ ID NO: 877339 - DNA, 120 bp, Artificial Sequence
  ENSG00000258502_1 (sequence is synthesized)
gtcccaccagaaccgcatggaatagaaaactgtgcatttccctaaggaaagggaatgccagagaagggcagaagggaaatcaggaagacaaaacgtgtcttcatgttggagtggaccttt

SEQ ID NO: 877340 - DNA, 120 bp, Artificial Sequence
  ENSG00000258502_2 (sequence is synthesized)
cctctatctgtcaacagaatggataaattgtggaagagtaatatcagaatactacacatcagtaaaaaacaacaaacttctgctacaaacaatcaacatcgatgaatctttcaggcaaaa

SEQ ID NO: 877341 - DNA, 120 bp, Artificial Sequence
  ENSG00000258502_3 (sequence is synthesized)
ggttatagaaacagatgatcagtggcccacggattccaggtgaggatctgggacccagacatccagatattgaaaacacagggatggagtctgtatggaaaaaattaaaatatagcaaaa

SEQ ID NO: 877342 - DNA, 120 bp, Artificial Sequence
  ENSG00000258502_4 (sequence is synthesized)
tgtgaaatacggaagagaaatctttcaatttcccaatggaagtgagaaaagagcaaagaaaagtattggtcttccaaaacaaatagaggacggagctgctgctgttgcatggtgtctaga

SEQ ID NO: 877343 - DNA, 120 bp, Artificial Sequence
  ENSG00000258502_5 (sequence is synthesized)
acccatcaacctccaaataaaggctattaaaaaacaatcaaagtgtgaagagggcagaaaatgtgatgaagagattctttggagaaagtagctgccactgttaccttgggatctgcctat

SEQ ID NO: 877344 - DNA, 120 bp, Artificial Sequence
  ENSG00000258502_6 (sequence is synthesized)
agtcctcacagagcttgcccttgcaggatagaacataggagtctgggagtctgcaagaagagacagggtctcactatgttgccccagttggccttgaactgctggactcaagggatcctc

SEQ ID NO: 877345 - DNA, 120 bp, Artificial Sequence
  ENSG00000258502_7 (sequence is synthesized)
ctgcctcagcatcctgagtagctgggtctacaggcatgaaccaccaggcccagaaccctgtcttttgaaagccatatgcgatctgtctgccctgaagtgactacttcatctccaaccagc

SEQ ID NO: 877346 - DNA, 120 bp, Artificial Sequence
  ENSG00000258502_8 (sequence is synthesized)
ccttggctggcaaagtcaggaagactccagtctttcctgaagaccaggggagagtttataactctagcatcaaagtcagcagctgttcatctagaagacaacttcccaaaagtcaatgtc

SEQ ID NO: 877347 - DNA, 120 bp, Artificial Sequence
  ENSG00000258502_9 (sequence is synthesized)
tttgcctgaagcttttcttcccagatctcctatggtgaaacaaccaaagggaagaagaatgtgggcagccctcagtaagacaggagatgagcatcaacattgacccattctttcttccag

SEQ ID NO: 877348 - DNA, 120 bp, Artificial Sequence
  ENSG00000258502_10 (sequence is synthesized)
tttatctagattcatatatacaagactgaagagtgaagagagacccagagaatgttctaaaatctgccagttagcataatcacacagagaaatctctgcttccagaggaggagccaagtt

SEQ ID NO: 877349 - DNA, 120 bp, Artificial Sequence
  ENSG00000258502_11 (sequence is synthesized)
caagtcagaggtgaggaatgccaacaggaaagctcactttctccggggatattcaggccaacactaggaaaccacagccaagtcaggcagggcttggggcggaactgctgacacctccac

SEQ ID NO: 877350 - DNA, 120 bp, Artificial Sequence
  ENSG00000258502_12 (sequence is synthesized)
cctagccaatccaaggtgcacgcctgcctcatgcagcccagcgtgactcccgccattggcacactgtgcccatcacaggctggagctcctttcctccaccgtcttcccaactcctgccaa

SEQ ID NO: 877351 - DNA, 120 bp, Artificial Sequence
  ENSG00000258502_13 (sequence is synthesized)
tgccttggagagcagtgggactccaaaagcacgagccaggatggggtggactcagtgatgtgctggtaaatgtttaagaaccagctctccagaaagaaaaaaaaaaaaggctctgatttt

SEQ ID NO: 877352 - DNA, 120 bp, Artificial Sequence
  ENSG00000258502_14 (sequence is synthesized)
aactcaggaggactctctctctggcccttcatgcctattgaatcctagcgactgtctgtctgttgacaaggcacagactgtctgttgactctctgtctgttgacaaggcacccaagccct

SEQ ID NO: 877353 - DNA, 120 bp, Artificial Sequence
  ENSG00000258502_15 (sequence is synthesized)
actccttggctggattctcagaaatatggattccaatgcaaaaggttaatgcctacaataagtgttcttgaaatacagtcacgcgttgcttaaccatggggatatattctgataaattca

SEQ ID NO: 877354 - DNA, 120 bp, Artificial Sequence
  ENSG00000258502_16 (sequence is synthesized)
tcattaggcgatttcatcactgggcgaacatcacagctcgtactcacacaaacctagatgtcatagcctactacacacctaggctatatgatataggctattgctagcaacaaacctgta

SEQ ID NO: 877355 - DNA, 120 bp, Artificial Sequence
  ENSG00000258502_17 (sequence is synthesized)
caagccaagcatcaaatggatggctcaacaaggaggccaagaccagctaatgtttagtgagcacccaaaggggccacactggagagaacagcacagctccgtctgagaaacagctgttcc

SEQ ID NO: 877356 - DNA, 120 bp, Artificial Sequence
  ENSG00000258502_18 (sequence is synthesized)
ttcctgcctgagaggcagagtgatagaagatatcacagaatgttgctgctttgtcttccaccctgaaccctccacgacctccctgtagcttcctgattttaagtagacatcaaatgattc

SEQ ID NO: 877357 - DNA, 120 bp, Artificial Sequence
  ENSG00000258502_19 (sequence is synthesized)
cagtactgggattcccagaataatgcacatatgtacatactcagatattccccaagccctggatataattttaagggagttcacagaccacactcccccacccatctgtggacccagatt

SEQ ID NO: 877358 - DNA, 120 bp, Artificial Sequence
  ENSG00000258502_20 (sequence is synthesized)
ctgtgggttcgagattcagaagccctgtttctaggcaggccctctgttgctaacgcccctcgagaacatcaccctagatgattatcccttcttcctccactccttcccaccttctccaac

SEQ ID NO: 877359 - DNA, 120 bp, Artificial Sequence
  ENSG00000258502_21 (sequence is synthesized)
tgctgggtttcagcacaaagattgcttgccagttaaactggcaccatggaccgcacagtagttgtttcttgggtctagaggaaacagccagattcctttaagtaaatcatgtcttagtta

SEQ ID NO: 877360 - DNA, 120 bp, Artificial Sequence
  ENSG00000258502_22 (sequence is synthesized)
taaaatagtggctaccttggatagtggtggtagggttatggattgagaaacaagggaatcttgagtgctggaaagactctgttttatatcctgatctgaataatggttacaagggtatga

SEQ ID NO: 877361 - DNA, 120 bp, Artificial Sequence
  ENSG00000258502_23 (sequence is synthesized)
aaatattcatgaagctgtagttttttgtaaattgtacctcaatcaaaaagacattacataatggaagtgcttactgagtaaatgatattatatctggaattcagggaggaggggaagtga

SEQ ID NO: 877362 - DNA, 120 bp, Artificial Sequence
  ENSG00000258502_24 (sequence is synthesized)
aaggggagtctataaaatattgatgagttgataattgtaaaattgggtaatgggcacatgaagggttgttatactattttgtctgcttttttagcttaaaaaataaataaaaaatataaa

SEQ ID NO: 877363 - DNA, 120 bp, Artificial Sequence
  ENSG00000258502_25 (sequence is synthesized)
taactactcctttggattctgcttttcacttgttcttcatcagactatggaagcttagacttcataatttggctgagacttcaaaaatagttttaaagaaagctattcccaccctgctaa

SEQ ID NO: 877364 - DNA, 120 bp, Artificial Sequence
  ENSG00000258502_26 (sequence is synthesized)
atgtcaactcaaaaacaaccctcctcatggagactcctgtggccacctcagtgggaaacattcgacatcattggtattagaatcaccgatgttggaaacaagctcacttaagtagcttcc

SEQ ID NO: 877365 - DNA, 120 bp, Artificial Sequence
  ENSG00000258502_27 (sequence is synthesized)
aagtatgagatttctctacttgcctctttaatattctgccatcacttttagagagttatctcacctaactccagccggaaatactaatacatgccctgggtctaaagaaaatattgcctt

SEQ ID NO: 877366 - DNA, 120 bp, Artificial Sequence
  ENSG00000258502_28 (sequence is synthesized)
tggaatttgtgtaagaatttacgattgagacctctgaatatgccatgaaaaatatgagccttactctcatgagctgagggaagtgaatgtatttgaatctatgaatctcaaaacaacatg

SEQ ID NO: 877367 - DNA, 120 bp, Artificial Sequence
  ENSG00000258502_29 (sequence is synthesized)
taaaatgtgtaaggatctgatgctacaagggttattagtttgaaatttggtgattttgctgccagatgtccataaactacactacccactgacaaatacatttattagaagtttttctta

SEQ ID NO: 877368 - DNA, 120 bp, Artificial Sequence
  ENSG00000258502_30 (sequence is synthesized)
caaaaagacatgaactattttatcagggaatctaatatacaaatagttcctagaaattgtaagtcttgtcatacagcacactagtggttacagcctatgaaatatataaacaacttctaa

SEQ ID NO: 877369 - DNA, 120 bp, Artificial Sequence
  ENSG00000258502_31 (sequence is synthesized)
tctacaggcatgaaccaccaggcccagaaccctgtgactggtttttgcagctgaagcctgatgaacactatgcagcttggatgacaatgattttgtttaaaatctcctataaagttccaa

SEQ ID NO: 877370 - DNA, 120 bp, Artificial Sequence
  ENSG00000258502_32 (sequence is synthesized)
caagagagagaaagaaaaactacaatcattttccatttacccatcaacccatcaacctccaaagacagggtctcactatgttgccccagttggccttgaactgctggactcaagggatcc

SEQ ID NO: 877371 - DNA, 120 bp, Artificial Sequence
  ENSG00000258504_0 (sequence is synthesized)
aaaaaacaaagaacactttattcccttgacagtttctgtacagcgacaccaggctgtgcaaagcccagtgtcgtcttcactgagcacattccccaggacgcctggtgcagccctcctctg

SEQ ID NO: 877372 - DNA, 120 bp, Artificial Sequence
  ENSG00000258504_1 (sequence is synthesized)
aagtcacattctcaggggctggttccctaggtctgactcagaaatgatcattcttacagccagggccacagagcaagtgccttcggtactaggcagcatgggacaggggagggcttcaca

SEQ ID NO: 877373 - DNA, 120 bp, Artificial Sequence
  ENSG00000258504_2 (sequence is synthesized)
ctcaattatctcggcattgggacaactgcccccatttccaagatgggaagacaggctcagagatgtttaacaacttggccaaagctgtcctctccagggacatgagcagctgtgttgctc

SEQ ID NO: 877374 - DNA, 120 bp, Artificial Sequence
  ENSG00000258504_3 (sequence is synthesized)
ggcactgagaatgcctgggaggcaccgtttgctggggagcagagggactgacctttggcttctttgtggctggaggtgttccaggcctggtgagggggtcccatactgttctctgctgag

SEQ ID NO: 877375 - DNA, 120 bp, Artificial Sequence
  ENSG00000258504_4 (sequence is synthesized)
ccctctgcacactttgggggatcctggctggcggtggtaggtgggccggagactcagttgtccgtcagctggccatgtccccattttatggacagggcaggagcacaatgacgtggccag

SEQ ID NO: 877376 - DNA, 120 bp, Artificial Sequence
  ENSG00000258507_0 (sequence is synthesized)
acagtggagccgtccggtctccgcaccgccaccccgagaagggcggtgagctcaagctgcgggcagggcatggggctgcggagaagggaggcgtctgatccgcccgggcctccttaggct

SEQ ID NO: 877377 - DNA, 120 bp, Artificial Sequence
  ENSG00000258507_1 (sequence is synthesized)
tctggaaggaagcggtgttaacccgaaggctagagcggagcgaagctcgaggcgcgcagataagcccagtgtggccccaggagaggcagaggtgggctgcccagaagccaaatccaccgg

SEQ ID NO: 877378 - DNA, 120 bp, Artificial Sequence
  ENSG00000258507_2 (sequence is synthesized)
caggaaccagaggggctattgcaccccccaccaccaccaccaccgcgtgacgaagagaggagggaatgggagggcccagtggaaaccgagtctttgaagaagctcgcccaccccagtgtc

SEQ ID NO: 877379 - DNA, 120 bp, Artificial Sequence
  ENSG00000258507_3 (sequence is synthesized)
cccccaggacctcccagtgacgatgctccgagagtttcattctcgacggggcccagtggaggaatgcactcaggaccgactccaggaccttcgtttttcgttgcctggagctcagcgtcc

SEQ ID NO: 877380 - DNA, 89 bp, Artificial Sequence
  ENSG00000263081_0 (sequence is synthesized)
ccgtctagatgggagtgataaggaccaagtatccctgggagaagaaaacagctctggtagcagatcactcaagcccgggaggtgtactt

SEQ ID NO: 877381 - DNA, 120 bp, Artificial Sequence
  ENSG00000263081_1 (sequence is synthesized)
aaaaaaagctctaagatctagtgccacctcctacaggtaggcacccggcgttctaggtaccctgctagaccagcccttccctgactccaccctgctgtagaatgatggcctctttctttc

SEQ ID NO: 877382 - DNA, 120 bp, Artificial Sequence
  ENSG00000263080_0 (sequence is synthesized)
aggtaaagaacttcctctttcaacgcatctcaaaatttggcgtggatgcagatcacctacagagtatgattattcatctttacattgccttgttttgagatgatgaaactgaggttcaag

SEQ ID NO: 877383 - DNA, 120 bp, Artificial Sequence
  ENSG00000263080_1 (sequence is synthesized)
ccaatgacaagcctgaagccacatggctagtgagtggcagagtcagaactcaaacccaaatccacctgaccccaaacttcatgtatcttgaactacaggctccatctcactgttcacact

SEQ ID NO: 877384 - DNA, 120 bp, Artificial Sequence
  ENSG00000263080_2 (sequence is synthesized)
agtgcctgctcagcagcaagacctcttctcttcacagagcctttgttgagccccaccactggaattaacctcttccttccagaccagtttggtggtgcccctaatccacagtttcccaac

SEQ ID NO: 877385 - DNA, 120 bp, Artificial Sequence
  ENSG00000263080_3 (sequence is synthesized)
ctcagccctactgacactggggctggataatctttgtcgtgggggctgtcgtgtgcactgcaggatatggagcagtacccctgctttccacccacgagatgccatggcaccctcctcaag

SEQ ID NO: 877386 - DNA, 120 bp, Artificial Sequence
  ENSG00000263080_4 (sequence is synthesized)
ttgcaacaaccaaaatatgtcttcagacattgccactgtcccctagggtactaaatcacctctatggagaaccactgtcctaagctacaatactcactgccctctgttttgagccataaa

SEQ ID NO: 877387 - DNA, 83 bp, Artificial Sequence
  ENSG00000263080_5 (sequence is synthesized)
ctctttcaacgcatctcaaaatttggcgtggatgcagatcacctacagagtatgattattcatctttacattgccttgttttg

SEQ ID NO: 877388 - DNA, 120 bp, Artificial Sequence
  ENSG00000263080_6 (sequence is synthesized)
ggagtgcagtggcacagtgacggctcactacaacgttcacctcccgggcataggtgattctcctacctcagcctcccaagtatctcggactacaggcgtgcaccaccacgtccagctaat

SEQ ID NO: 877389 - DNA, 75 bp, Artificial Sequence
  ENSG00000263080_7 (sequence is synthesized)
tttgtattttttgtagagacagggtcttaccatgttgcccaaggtggtctggaactcctgggatcacgcaatcct

SEQ ID NO: 877390 - DNA, 120 bp, Artificial Sequence
  ENSG00000263080_8 (sequence is synthesized)
tgtatattgttttcacttaataatgaacatctttctgtatcagcaaatatccatctgcttcctcttgaatgactgcataatactcgatttgtcttatcacatattaaaccaatatcctac

SEQ ID NO: 877391 - DNA, 120 bp, Artificial Sequence
  ENSG00000263089_0 (sequence is synthesized)
gggtgcttctgcccttccacgtagagcagctgtcaggaactcgggacactttcccagcccaattcacagaaggaaggccagaagcttaacccagtagtgtctgagtacctgcttggcaaa

SEQ ID NO: 877392 - DNA, 120 bp, Artificial Sequence
  ENSG00000263089_1 (sequence is synthesized)
gccttctacggccaaaatgaaaaccctgaatccactaccaggtgctctaggtaagacaagacaagccaaaagccagaaataccatctctggacatggcctcaaagtaagagctccgccag

SEQ ID NO: 877393 - DNA, 120 bp, Artificial Sequence
  ENSG00000263089_2 (sequence is synthesized)
cccaactaaaagttaaaccaactcctgctctggaaaacttagtacccgaggttgaactgcccagtctctttcctgctctgctggccaaatccatggcaggtccaagtcacatgcctcttt

SEQ ID NO: 877394 - DNA, 120 bp, Artificial Sequence
  ENSG00000263089_3 (sequence is synthesized)
tcgtgaaggaaaaatcatcagcacctcctacaaaggtcttcctaatcacttcattttgggggtaggggtgtggattttaaaactttgaagactatgtcacactcaccttgcccctcacct

SEQ ID NO: 877395 - DNA, 120 bp, Artificial Sequence
  ENSG00000263089_4 (sequence is synthesized)
ctggccttgacaaccatcttgctttacaagtgaattccgccaggtttctaaagatggtcacaacacaggtgccaggaatgccttcctgggtacatggagttcccgcccacgaccacagaa

SEQ ID NO: 877396 - DNA, 120 bp, Artificial Sequence
  ENSG00000263089_5 (sequence is synthesized)
gacattacacaaaactgcccaaaaagtatgaaatggcaatctgacaacaacctgacttaaaagccagtaaagacatcagaaaagatgttggtgtgcagcaagaaacccttcgcagcacct

SEQ ID NO: 877397 - DNA, 120 bp, Artificial Sequence
  ENSG00000263089_6 (sequence is synthesized)
cacatgggcaaaaccaaagaggtaagaccctgatcttcctaatggcagacagtgaactacgaccaccccagaaatcacataaaagcatagaaggtaatttctattcaacaaataattact

SEQ ID NO: 877398 - DNA, 120 bp, Artificial Sequence
  ENSG00000263089_7 (sequence is synthesized)
ggcactcacagagaaaagcatggtgggacacaaattaatcaggcaaggcactgccctcgaggcactttcagtcttggcggggagtagtggagggcagaagaaaaaaaaaaaaaaaaaaaa

SEQ ID NO: 877399 - DNA, 87 bp, Artificial Sequence
  ENSG00000263089_8 (sequence is synthesized)
ggagtagtggagggcagggccaccacggtagctcacgcctacaatccccaacacttcgggaggattgcttgaggccaggagctcaag

SEQ ID NO: 877400 - DNA, 120 bp, Artificial Sequence
  ENSG00000263089_9 (sequence is synthesized)
gggcaatatagtgagaccttgtatctacaaaaaaaaaatttttttttaattacccaggcatagtggcgcacacctgtagtcccaactactcgagaggctgaggtgggagaattgcttgaa

SEQ ID NO: 877401 - DNA, 120 bp, Artificial Sequence
  ENSG00000263089_10 (sequence is synthesized)
tgcactccaacctgggcaacagagtgacaccttgtctcaaaaaacaagcaatgaccttttctccagtgggcctgttactgccactctctgctactgaccaactgaaagttttgtccatag

SEQ ID NO: 877402 - DNA, 120 bp, Artificial Sequence
  ENSG00000263089_11 (sequence is synthesized)
gtccataggacatggaagtgccctgttaggggtgaaggaggaacagaaaatggggtgccagtgtcctcagactagaatgttctagtatcttggggtaggaatgagagaatataagcctga

SEQ ID NO: 877403 - DNA, 120 bp, Artificial Sequence
  ENSG00000263089_12 (sequence is synthesized)
gagaatataagcctgaatgccagcattatgggagccaaggagagttgggatgccccattcaatatatagactttcattcaagacccatcttcagccaggcacgatggctcacacctgtaa

SEQ ID NO: 877404 - DNA, 120 bp, Artificial Sequence
  ENSG00000263089_13 (sequence is synthesized)
ccaggagttcgagactagcctgggcaatgtggtgagacctcatctctacaaaaaaaaatttaaaagaattagtcgggcatagtagtacatgcctcttgtcccagctactgagcaggctga

SEQ ID NO: 877405 - DNA, 89 bp, Artificial Sequence
  ENSG00000263089_14 (sequence is synthesized)
atcaaggctgcagtgagctatgatggcattactgcactccagcctgggggacagtgagacctgtctttaaaaaaaaaaaaaaaaaaaaa

SEQ ID NO: 877406 - DNA, 120 bp, Artificial Sequence
  ENSG00000263089_15 (sequence is synthesized)
aaaaaaaaaaaaaaaaaagttgggggggacccattttcaccactccctggtacccaaatccagatcgccacatttataacttctctaaaaagtgaagccagaccttctgctggcctggcc

SEQ ID NO: 877407 - DNA, 120 bp, Artificial Sequence
  ENSG00000263089_16 (sequence is synthesized)
tggcggaagggctccacaggcctagttgtctgctgacttcagccacccaactgaaggcccaatccatgccttcaaaggtgcctgtccctgcatggatcggctggcttcttgtgggccaca

SEQ ID NO: 877408 - DNA, 120 bp, Artificial Sequence
  ENSG00000263089_17 (sequence is synthesized)
ggatccagaaacgagacaagagaaggggagagggaattccaaggctgaaggggaagcagagccagggaaaagggatgcgcccaggagaaacgtggaaccgttgcgagtacctggtatgtg

SEQ ID NO: 877409 - DNA, 120 bp, Artificial Sequence
  ENSG00000263089_18 (sequence is synthesized)
gagccacagtgagagccactttcccccaatgacaggcattccacagcaatggtggaggctgcgaggtggtcagggaactggtgagagagacagaaaattaagcaaaagaaactaaggaaa

SEQ ID NO: 877410 - DNA, 120 bp, Artificial Sequence
  ENSG00000263089_19 (sequence is synthesized)
ttaactaggagaggagaagaagaaaatgaaggaaaagaagaaatatgggaaactaaaaaccttgcagccataaacaaggttcatattataataatgtatattctgaagatcaacttgacc

SEQ ID NO: 877411 - DNA, 120 bp, Artificial Sequence
  ENSG00000263089_20 (sequence is synthesized)
aaaacttgggctatctctacactgggatgatgagggaagaaaaaagcataggaacgagctaaatcctatctcccacagcagaaaaacaaatcagataataatccttaaaaagaaagaaaa

SEQ ID NO: 877412 - DNA, 120 bp, Artificial Sequence
  ENSG00000263089_21 (sequence is synthesized)
taatactactgacaatggtggggacagctggaagaattgaaagtaatgggggtggggggcagtgggcaaaggactgtcctttcaagccttgtacacagtcaaaagccaaatcctttctac

SEQ ID NO: 877413 - DNA, 120 bp, Artificial Sequence
  ENSG00000263089_22 (sequence is synthesized)
aagtaatgttttgatagaaaacacgttattaagatacatacaagtagcaatgcatgctctattaccacacagctttatgtttcttattaaccatcctaaatttgcattaatgtcaactca

SEQ ID NO: 877414 - DNA, 120 bp, Artificial Sequence
  ENSG00000263089_23 (sequence is synthesized)
tctgtgtacaaacttgtaaggccttattttcctataataattgatgccaattttgcttcagagacccccagctgcccagctgacataatagtaatatcaaaaagagagcatgcttattga

SEQ ID NO: 877415 - DNA, 120 bp, Artificial Sequence
  ENSG00000263089_24 (sequence is synthesized)
caggttagatccctctggaagcaaggcattgagggctagccagcatcagatggctggacctctcagggccagtcatttaacaaagagtttaacacgcactgtgagccaagttcgctgggc

SEQ ID NO: 877416 - DNA, 120 bp, Artificial Sequence
  ENSG00000263089_25 (sequence is synthesized)
acataaggcaaagagatccctcaggaagcaaaggtggaaggaagggtagagagtcaaattacaggtaagatactgcaaagattccgcgacttaaatataaagacctgcagcctctctcaa

SEQ ID NO: 877417 - DNA, 120 bp, Artificial Sequence
  ENSG00000263089_26 (sequence is synthesized)
ctgattgagagaactgagccctaaggctgcccttgcatgtgatgaattacctatatccctgtgcgtgtagcagggcaccagctgggagagttgaggaacggtcacctagtccttttctgt

SEQ ID NO: 877418 - DNA, 120 bp, Artificial Sequence
  ENSG00000263089_27 (sequence is synthesized)
gtgctgtggttgaaatgagaaaggctggatggagcacttggaaggggaagctgcagacagaatgaggcgggaatgcctcttggaagaggtggcatcagaactggaacacttgagaactgt

SEQ ID NO: 877419 - DNA, 120 bp, Artificial Sequence
  ENSG00000263089_28 (sequence is synthesized)
gccaagatctggggggaagcaggaggagagcggggagaaagttccaggcaggaagaacatgtgccaaagtcctaaggcaggaacaggcttggctgactcaagaggtagcaagaggggagg

SEQ ID NO: 877420 - DNA, 120 bp, Artificial Sequence
  ENSG00000263089_29 (sequence is synthesized)
tgaagatgaggcagagcatggctctcagaaaaagggctctccaacatcactgcgcggaaggccagtcggactcgcaagaaccccaagggacacggtccaccaaactttctccagagggga

SEQ ID NO: 877421 - DNA, 120 bp, Artificial Sequence
  ENSG00000263089_30 (sequence is synthesized)
aagcgatgtgcctgaagagccaaggggctttagttcttaattaataagcagaagctgcttccagacttgattcctgaaacaggatgcctctgtggctggtagcatgacaggtacactgtg

SEQ ID NO: 877422 - DNA, 120 bp, Artificial Sequence
  ENSG00000263089_31 (sequence is synthesized)
taggtaaacaggggcttgcttttacctttaagttctcagcgaatacacttgccaggaagccctgtggccacaccacacattagccttacagagccaccactaagggtaagggataataag

SEQ ID NO: 877423 - DNA, 120 bp, Artificial Sequence
  ENSG00000263089_32 (sequence is synthesized)
ccccccttactctcaggctccctcaaaggaacctgttccaataaggcagtccagccccaggaggcggacacacacagcctacgtaagcccttgccacttctttgaatcagactttgcaaa

SEQ ID NO: 877424 - DNA, 120 bp, Artificial Sequence
  ENSG00000263089_33 (sequence is synthesized)
aaacaaccttgctctccagccaacataaaccataggcaacagagggccttataaggcttgaagctttcttaatcagaaacagttagatgggctggagttagcagctccaagttagaggga

SEQ ID NO: 877425 - DNA, 120 bp, Artificial Sequence
  ENSG00000263089_34 (sequence is synthesized)
aggaggaactgaaaaggagagaagaaagggtggcctagggaaccagcaagcttgctggtcaaactgctttttcatccctcttcagcttctgtgtcatcacagtaaagaattctcaccggg

SEQ ID NO: 877426 - DNA, 120 bp, Artificial Sequence
  ENSG00000227125_0 (sequence is synthesized)
cacagagaaggggtgagcctcacaagttgtcaggcttcctgatttattttgtggaaaataaaattcactaaaaaaatacaataaaggggaaaataaacagattaaagccagaatgagcca

SEQ ID NO: 877427 - DNA, 120 bp, Artificial Sequence
  ENSG00000227125_1 (sequence is synthesized)
gctccttgcaaaccagccattctactcctgatggagaaggcagctgagggaattagcgagcttaatccctccagccagcagctacaggccgtcctggggctggatagctctgcttcaagg

SEQ ID NO: 877428 - DNA, 120 bp, Artificial Sequence
  ENSG00000227125_2 (sequence is synthesized)
cctctgccctcttccacggccaaggttcccttcaaatggacatttgagcatgctctgattctcagcactccctggggaaaagaaagaagaaaccgggctggcagaatggaggtgagggag

SEQ ID NO: 877429 - DNA, 120 bp, Artificial Sequence
  ENSG00000227125_3 (sequence is synthesized)
gaggtggctgtcttcagtatgtactcccctcctgagcctggccaagagctcatgcactctttcccctgccttcttcctctgtgtgcccactcttctgtcactgttcctgctcagccctcc

SEQ ID NO: 877430 - DNA, 120 bp, Artificial Sequence
  ENSG00000250081_0 (sequence is synthesized)
cctacaccagtagtttgccagaggcccttggacctttggtcaaaggctgaaggctgcactgttggcttcgctacttttgaagttttgggacttcaactggcttccttgcttctcagcttg

SEQ ID NO: 877431 - DNA, 120 bp, Artificial Sequence
  ENSG00000250081_1 (sequence is synthesized)
ggcctattgtggaatttcaccttatgatcgtatgtgacgaaggagtttcctgtcaactctattctgcccataatcttcatttcttaaacgaagaaggaaaagaaaagctggagtgaaaag

SEQ ID NO: 877432 - DNA, 120 bp, Artificial Sequence
  ENSG00000250081_2 (sequence is synthesized)
ttttgaaagagaaaaaattgatctctgtaataattttcaagaatttttactgcaactaaaattcagtgtttagtttatgaagaaaaaaatgaatggctatagtacatacatttccatggt

SEQ ID NO: 877433 - DNA, 120 bp, Artificial Sequence
  ENSG00000227121_0 (sequence is synthesized)
aggtgtttttattacacaagacaaaaacggaaaaacagtaacaaatgattggttaagcctttcaaaacaaagaagttgaaggtcactggaataggttcattacactcaagcaaaggcctg

SEQ ID NO: 877434 - DNA, 120 bp, Artificial Sequence
  ENSG00000227121_1 (sequence is synthesized)
gcagaaatcagagacctcaagctaaaagtcataaaaggacaagaacctggaagtcgtcgaactgtggaagcaaaagacctgtaatgctcctgcttgccgagctgtgagcagtggtagtaa

SEQ ID NO: 877435 - DNA, 120 bp, Artificial Sequence
  ENSG00000227121_2 (sequence is synthesized)
aagagcagtaacattctctcctgcttgccaaacaggagagaagccactggcaccactccctcccactcactgaactatagaagagaaaaaattgaaacaccaaaattggggaaatgcgac

SEQ ID NO: 877436 - DNA, 120 bp, Artificial Sequence
  ENSG00000227121_3 (sequence is synthesized)
agtccatgtctctttcactcactgtggtcagcttccacaccatttctttggtgtggcttggcaagaacctcaggtgttacatcttggcgagccagacaggagactccagaaaaggggtga

SEQ ID NO: 877437 - DNA, 120 bp, Artificial Sequence
  ENSG00000227121_4 (sequence is synthesized)
ttttcctgtaccagtccaatgcctccagaggaagatcatacatttgccattttactgcttagtacgcatgcttgagcctgctcgcccaactgctgagatcttattcagaaactgctgatc

SEQ ID NO: 877438 - DNA, 120 bp, Artificial Sequence
  ENSG00000227121_5 (sequence is synthesized)
tctaggtcctgaccattgtttttgaatttttattattttcctacaatttaggctaaattctgaactatttgctggctacaagaggcctctaaaaaagagctgggttttagttttcttcat

SEQ ID NO: 877439 - DNA, 120 bp, Artificial Sequence
  ENSG00000227121_6 (sequence is synthesized)
gctctttaaaaactggcatataatggtgtgtatctctcgttgttttacttctaagaaactgaaggcatgatattctgaagactagaggtgattcaatagcctatgaatcttcttcatttg

SEQ ID NO: 877440 - DNA, 120 bp, Artificial Sequence
  ENSG00000227121_7 (sequence is synthesized)
gaaccccactgggcctgatctgtttcccatcaccaatgcacttctgctaaacctatatcctatcaagtactctccctaaatgctcagagaccataacagaagatgagggtgtgtgagatt

SEQ ID NO: 877441 - DNA, 120 bp, Artificial Sequence
  ENSG00000227121_8 (sequence is synthesized)
ataaaagccaaattagtggagtggaatctggaggctaaagcaactccatcttggatgctaatctgccatgttggcttctgattaaccccagttctggagggcctctgaggtttccaattt

SEQ ID NO: 877442 - DNA, 120 bp, Artificial Sequence
  ENSG00000227121_9 (sequence is synthesized)
atctactgtcccttgtgtaagaacaagtacttatcataaatcctgctattagggcaaatttctacccattccctctgaagcatgtgcacctctcctctacatgtaatctcccctacaata

SEQ ID NO: 877443 - DNA, 120 bp, Artificial Sequence
  ENSG00000227121_10 (sequence is synthesized)
gataaacccctctgggtctgggggctaatagtgtgggaacccatcatcttgcctcactgctgcacaagccacaggtgtggcttctgtttctaagtccctattaaatgtttctagatacca

SEQ ID NO: 877444 - DNA, 120 bp, Artificial Sequence
  ENSG00000227121_11 (sequence is synthesized)
agtccatgtctctttcactcactgtggtcagcttccacaccatttctttggtgtggcttggcaagaacctcaggtgttacatcttggcgagccagacaggagactccagaaaaggtatct

SEQ ID NO: 877445 - DNA, 120 bp, Artificial Sequence
  ENSG00000227121_12 (sequence is synthesized)
gaagggggagctggtctattatgtctcactataacaagactaaaattttgcaaataaattgttcctgccataatttatccttggtagaaatgaagaaattggagagagaaaaaattggat

SEQ ID NO: 877446 - DNA, 120 bp, Artificial Sequence
  ENSG00000267509_0 (sequence is synthesized)
actgcactccaatcctctctttggaacctgcaactgaatattgctcctaaatgggaagactgtcttgcaaggggacaactgccacaatattgccaaaataatccagaggaggtaacacgg

SEQ ID NO: 877447 - DNA, 120 bp, Artificial Sequence
  ENSG00000267509_1 (sequence is synthesized)
tgccatctccaagcctgtggctcgagaggtcggaaaagaagctctttctaattggaaaacagccagcaaagttgttaattccaaaaaacaagtatgtctctggagttaaaaaattttctg

SEQ ID NO: 877448 - DNA, 120 bp, Artificial Sequence
  ENSG00000267509_2 (sequence is synthesized)
ccttagaaacaagaacataccaatcatatccttcaatcagtctcaacaatgaaaagcctgagagcccctttgcagtttgtctgggctatctgaagatttctggccaatagtttgtaaggg

SEQ ID NO: 877449 - DNA, 120 bp, Artificial Sequence
  ENSG00000267509_3 (sequence is synthesized)
gaattggaacacttcaattctcatctgatacatttaaggaaagatacaagttctccacactttgcttccaacttcacagacaagagatctaagaacttggagatggagagtgacaggaag

SEQ ID NO: 877450 - DNA, 120 bp, Artificial Sequence
  ENSG00000267509_4 (sequence is synthesized)
actgcactccaatcctctctttggaacctgcaactgaatattgctcctaaatgggaagactgtcttgcaaggggacaactgccacaatattgccaaaattagaatccagaggaggtaaca

SEQ ID NO: 877451 - DNA, 120 bp, Artificial Sequence
  ENSG00000267506_0 (sequence is synthesized)
gaacaaaggcctggagactggagcgagctgcgttcttgggggtggggggtggggcggcagctggagagtgggggcttccccagcgggagagggaggacgattctggatggcttccctcct

SEQ ID NO: 877452 - DNA, 120 bp, Artificial Sequence
  ENSG00000267506_1 (sequence is synthesized)
tgtggacagagtgagtctctgctatgagaaaggtgttctacatacggctcgggagccagcaagtgcgtatgaagccccttcacatggctagtggcatcctaaggacccggcgacaattag

SEQ ID NO: 877453 - DNA, 120 bp, Artificial Sequence
  ENSG00000267506_2 (sequence is synthesized)
tcatggcgtcatcgaacaccaggctggaggaggtcttggatgccacagctccttttgaatttcaaagacgttcaaatccccatctggctgttacacttttaggctattgagagtgaaaac

SEQ ID NO: 877454 - DNA, 120 bp, Artificial Sequence
  ENSG00000267506_3 (sequence is synthesized)
tggctgttacacttttaggctattgagagtgaaaacaagcactgacatgaacacccaaccagctgccggtgacatcgtccccttctgagatctgaggacatggatacccaaccacctgcc

SEQ ID NO: 877455 - DNA, 120 bp, Artificial Sequence
  ENSG00000267506_4 (sequence is synthesized)
acacccaaccacctgccggtgatatcgtccccttctgagatctgaggacgtggatatccaaccacctgccggtgacattgtctccttctgagatctgaggacatggacaccaaaccacct

SEQ ID NO: 877456 - DNA, 120 bp, Artificial Sequence
  ENSG00000267506_5 (sequence is synthesized)
aaccacctgccggtgacattgtctccttctgagatctgaggacatgaacaccaaaccacctgccagtgacatcgtccccttctgagatctgaggacatggatacccaaccacctgccggt

SEQ ID NO: 877457 - DNA, 60 bp, Artificial Sequence
  ENSG00000267506_6 (sequence is synthesized)
tatcgtccccttctgagatctgaggacgtggatatccaaccacctgccggtgacattgtc

SEQ ID NO: 877458 - DNA, 90 bp, Artificial Sequence
  ENSG00000267506_7 (sequence is synthesized)
acccaaccacctgccggtgatatcgtccccttctgagatctgaggacgtggatatccaaccacctgccggtgacattgtctccttctgag

SEQ ID NO: 877459 - DNA, 85 bp, Artificial Sequence
  ENSG00000267506_8 (sequence is synthesized)
cggtgacattgtctccttctgagatctgaggacatgaacaccaaaccacctgccagtgacatcgtccccttctgagatctgatct

SEQ ID NO: 877460 - DNA, 120 bp, Artificial Sequence
  ENSG00000267506_9 (sequence is synthesized)
ctgaggacatggacaccaaaccacctgctggtgacattgtctccttctgagatctgaggacatgaacaccaaaccacctgccagtgacatcgtccccttctgagatctgaggacatggat

SEQ ID NO: 877461 - DNA, 85 bp, Artificial Sequence
  ENSG00000267506_10 (sequence is synthesized)
ccagtgacatcgtccccttctgagatctgatcttcttctgagatctgaggacatggacacccaaccacctgccggtgacatcgtc

SEQ ID NO: 877462 - DNA, 78 bp, Artificial Sequence
  ENSG00000267506_11 (sequence is synthesized)
gacatcgtctccttctgagacccttctgagatctgaggacattgatacccagccacctgccggtgacatcgtctcctt

SEQ ID NO: 877463 - DNA, 70 bp, Artificial Sequence
  ENSG00000267506_12 (sequence is synthesized)
atggacacccaacctgctgctggtgacatcgttcccttctgagatctgaggacatggacaccaaaccacc

SEQ ID NO: 877464 - DNA, 89 bp, Artificial Sequence
  ENSG00000267506_13 (sequence is synthesized)
tgccaatggacaccaaacctgctgccggtgacatcgtccccttctgagatctgaggacatggacacccaaccacctgccggtgacatcg

SEQ ID NO: 877465 - DNA, 120 bp, Artificial Sequence
  ENSG00000267506_14 (sequence is synthesized)
cctgccggtgacatcgtctccttctgaggtctgaggacagacactcacatggacacctaaacacctgccgatgatattgtctccttctgaaatctgaggacatggacacccaaccagctg

SEQ ID NO: 877466 - DNA, 120 bp, Artificial Sequence
  ENSG00000267506_15 (sequence is synthesized)
gctgctggtgacatcatctccttctgagatctgaggacagacactcacatagacgcccaatcagctgctggtgacattgtctccttctgaaatctgagggttggaacacattggcctggc

SEQ ID NO: 877467 - DNA, 120 bp, Artificial Sequence
  ENSG00000267506_16 (sequence is synthesized)
tcagtgtttctccatgtggttttgagaccacctgagttggaaccgatatgggttcccagcctcacgcctggagagctggattttgcgagtgtgaggttaggtccagcatctgcatgtgta

SEQ ID NO: 877468 - DNA, 120 bp, Artificial Sequence
  ENSG00000267506_17 (sequence is synthesized)
acgagctcccaggtgtttcgtagatgcattagggcttgagaagctcctttctagcaccatcttcctttttgcgcatgagggagttcaggtccagagaaataaagcagcaaggttagtggc

SEQ ID NO: 877469 - DNA, 120 bp, Artificial Sequence
  ENSG00000267506_18 (sequence is synthesized)
ggcttttccacctggacaatccctccctccccaggtggaaggtgagggggttctgcttctccccgggcagaagcagaaccacagcccctttgtcccctttgccagaggcttcaaggggca

SEQ ID NO: 877470 - DNA, 120 bp, Artificial Sequence
  ENSG00000267506_19 (sequence is synthesized)
gcgtcccccagcgccccccgagcaagctccccatctgacaagggaggccctagctcatcccagaagcatcagagtcatccttcacactcaccaccatgctgaggacccagaggggctcat

SEQ ID NO: 877471 - DNA, 120 bp, Artificial Sequence
  ENSG00000267506_20 (sequence is synthesized)
gcctccagtgtcagacaggattgagatccaggctgtctggctccggggtcttagccctgacactcgacttcagagggagttcttgcctgggagtgccttcaaagcacagtccctggacac

SEQ ID NO: 877472 - DNA, 120 bp, Artificial Sequence
  ENSG00000267506_21 (sequence is synthesized)
tttcccctgcgacatttagtcctttaaggaggctgtaagcacgttgacctgccccagagccagtcgtgccctcacgtccctcaggacggcccaccatggccaagcacaggccagagaaca

SEQ ID NO: 877473 - DNA, 120 bp, Artificial Sequence
  ENSG00000267506_22 (sequence is synthesized)
gccttgttgttggcgtcaggactgttggcatcagggtcctgcttgtcaggttaggaacgtggttcctttacctgcacctccaggtgatgctgtctccatccttagaacctgaaggcctag

SEQ ID NO: 877474 - DNA, 120 bp, Artificial Sequence
  ENSG00000267506_23 (sequence is synthesized)
gtccctaaaagtagcagcagcagcagtagtagtagcagtaatagtaggagaaggaggagctgaagacctcacaataatcattgcccaaccgcgtgaaccagcccatcttaagcatggaac

SEQ ID NO: 877475 - DNA, 120 bp, Artificial Sequence
  ENSG00000267506_24 (sequence is synthesized)
acacactgtcgaattctcacacctccttttggagcgggttctctcaattatcccatttacagacaaagaatctgagactccaaggggctaaatgatttgctcaaagtcagggtaagtgtg

SEQ ID NO: 877476 - DNA, 120 bp, Artificial Sequence
  ENSG00000267506_25 (sequence is synthesized)
agaactggagccgaaacccagcctgctggacctgagcccctgactctcaaccttaagccacgctgtctcccatggatccctccagggccaggcagttggtgctcaataattgcatactgc

SEQ ID NO: 877477 - DNA, 120 bp, Artificial Sequence
  ENSG00000267506_26 (sequence is synthesized)
gtggaggtgagctgggctctgggtgtggccaggtggtgtccctggagggctcagcacacctttctcaggtaggtggtattaggcagtgggctcatgtggtcctgattcagaggcggagaa

SEQ ID NO: 877478 - DNA, 120 bp, Artificial Sequence
  ENSG00000267506_27 (sequence is synthesized)
tgggagtgtttcagggatgcaggtatgagcctggtcctagcacgcatctctaggtggggacagactcctctcagccaccccattgcccagtgatagttcctttgcactgatgctgtcaca

SEQ ID NO: 877479 - DNA, 120 bp, Artificial Sequence
  ENSG00000267506_28 (sequence is synthesized)
tccttgtcattctgggggattaaactctgccctctggatgtgttcatgggcagctcagtaatacaaagaagtcattcataagtttactttgctttcgactgccctttcatggtaacgttg

SEQ ID NO: 877480 - DNA, 120 bp, Artificial Sequence
  ENSG00000267506_29 (sequence is synthesized)
gttcaagggaatcctgtgattccccaaatgtggggagcaaatcgagtcaccatgagtcacctccccaggctgatgtcttctctggcacatgtggccacgggggagccaggatgggtctcc

SEQ ID NO: 877481 - DNA, 120 bp, Artificial Sequence
  ENSG00000267506_30 (sequence is synthesized)
ttcctcactccatctgctcgctgggtcttggtctcaggtgcctcttcccttcactgcctgtcttttattcctctgtctaccctctcctcatacagaaattgggatttctcatacagagaa

SEQ ID NO: 877482 - DNA, 120 bp, Artificial Sequence
  ENSG00000267506_31 (sequence is synthesized)
atggagtgattgctcctgattgcacagccgggagggctgtacactggagcccctcctgctgcaattaacttattttccacccctgcggtgtgtggttcctggagcaacgcctgctacctg

SEQ ID NO: 877483 - DNA, 120 bp, Artificial Sequence
  ENSG00000267506_32 (sequence is synthesized)
cttctctgccccatcctctgtgaggaagggtccatgctgttcctttttctgtctcaaaaatgtgctcatgtgccccaagttgtgtgaaccaccgactctgtgctccttccaggccctgac

SEQ ID NO: 877484 - DNA, 120 bp, Artificial Sequence
  ENSG00000267506_33 (sequence is synthesized)
cagtgtgtttgagcattaaagctcgcaggtacatcaaaggtgctcagtaaatgctggataaatcaatccatgctttcctgggctctcctggtgggatgcattcttttagctaagcgtccc

SEQ ID NO: 877485 - DNA, 120 bp, Artificial Sequence
  ENSG00000267506_34 (sequence is synthesized)
tgccaggggagtggttggtttccatgaggccagagggggaaaagctggttgacccctatcctgggcattcagagtcatttcccgctcctttctgtggctggaaccagaagaatatatctc

SEQ ID NO: 877486 - DNA, 120 bp, Artificial Sequence
  ENSG00000267506_35 (sequence is synthesized)
aggtctaatagggtatggactgcataaagcctgggatttttgtgcattctgttcatgacaatgtctctagcctgttgaacagcccatagtaggcactcagcaaaccaataggaactgagg

SEQ ID NO: 877487 - DNA, 120 bp, Artificial Sequence
  ENSG00000267506_36 (sequence is synthesized)
gggtcaaggaaatgccctgtgatccccctgaatccaacccctctgtctttgcccacctttcctccgttaaaacacagcctatatcaatgagggcctgggagaaaactggggtgggggagg

SEQ ID NO: 877488 - DNA, 120 bp, Artificial Sequence
  ENSG00000267506_37 (sequence is synthesized)
actgtgcctctcttgaccttcatttacaaaaaataagttggctcctagacccgtgttggagccacactgcccgggacagccctgaagcagccacgtccccacctttcaggagtcggccaa

SEQ ID NO: 877489 - DNA, 120 bp, Artificial Sequence
  ENSG00000267506_38 (sequence is synthesized)
aaaaggtcatcaagatataaagcccgtttgggaagggaatgacttacgcagtgggcttgtataaatctggagaagttttatgcacaagtcggacaagaaatgtgttctacatacggctcg

SEQ ID NO: 877490 - DNA, 120 bp, Artificial Sequence
  ENSG00000267504_0 (sequence is synthesized)
gcatgatgtcacctgcctgtgataccaactgtattttgggcacggttgggtagatgagctgtgtcctcggccctgaccagcgctgactcagtgtttctgttgctcctcattgtatgaaag

SEQ ID NO: 877491 - DNA, 120 bp, Artificial Sequence
  ENSG00000267504_1 (sequence is synthesized)
gagaggaagaggccagcagtgcccttgaacccactgctggtttgccagtcatggtgggttgggatgcacacctgtgattccggtctccactttgaccctgtgtttgtgctttctgctttc

SEQ ID NO: 877492 - DNA, 120 bp, Artificial Sequence
  ENSG00000267504_2 (sequence is synthesized)
atcactgtatgatgaagcagctaggagcacaggaatttctcttaacgtctaactttataccacatgctgacagttagtgcctaaagtacagtgcgtgtattatttttaccctcttcacag

SEQ ID NO: 877493 - DNA, 120 bp, Artificial Sequence
  ENSG00000267504_3 (sequence is synthesized)
cccgtcgtgtccccagcaggagagaccgtggagggaccagggacaggcgcttaggcctgtgactgatcctctggattctgaaaccagagcagccaccctttttgctgacattaacctgga

SEQ ID NO: 877494 - DNA, 120 bp, Artificial Sequence
  ENSG00000267504_4 (sequence is synthesized)
ggggataacttaaaactattggtatttacttagttggaacattattttacttatttatttttttggcgatagaatcttattctgtttgccaggctggagtacagtggcacaaccatagtt

SEQ ID NO: 877495 - DNA, 74 bp, Artificial Sequence
  ENSG00000267504_5 (sequence is synthesized)
tctgtttgccaggctggagtacagtggcacaaccatagttcactgcagcctctatcccctggcacacacaccac

SEQ ID NO: 877496 - DNA, 120 bp, Artificial Sequence
  ENSG00000267504_6 (sequence is synthesized)
cgtcttgctatgctgcttaggctggtcttgaacagcctcaagccctcctcctgcctcagcctcccaaagccgaggattacaggattataggcatgagccagcaagcccagtctagaacat

SEQ ID NO: 877497 - DNA, 120 bp, Artificial Sequence
  ENSG00000267504_7 (sequence is synthesized)
ttataggcatgagccagcaagcccagtctagaacattctttatccttcctgttttcctcagatactttcactctttttttaaactttatttattttttatagagacagggtctcactatg

SEQ ID NO: 877498 - DNA, 64 bp, Artificial Sequence
  ENSG00000267504_8 (sequence is synthesized)
gatgatattttcactctaaaaagatagaaagtatattgaccagcctggccaacatggcgaaacc

SEQ ID NO: 877499 - DNA, 66 bp, Artificial Sequence
  ENSG00000267505_0 (sequence is synthesized)
agcccggcccgtgttttttttttttaagacagaatgttgccgggtacagtggctcaagcctgtaat

SEQ ID NO: 877500 - DNA, 120 bp, Artificial Sequence
  ENSG00000267505_1 (sequence is synthesized)
agacagaatgttgccgggtacagtggctcaagcctgtaattccaggattttgagaggctacgctgtatgggttagtgtgagttctttctatatttgtacaatgacagaatcacctgatgt

SEQ ID NO: 877501 - DNA, 120 bp, Artificial Sequence
  ENSG00000267505_2 (sequence is synthesized)
gcactccacagcaggatcacaagctggtctctggtcccagaccctgcggatccttgtcgacgcttccagtctcgatcacttcccgatggtttgaatgtgaagtcaacaatccacggaaca

SEQ ID NO: 877502 - DNA, 120 bp, Artificial Sequence
  ENSG00000267505_3 (sequence is synthesized)
atttgcacttactgtttctagggcttttgcagttaaaagtgtcttcagtttccccgatcttcctgcagatgcccctgcagtcagaagctgagtctgtcccttctcccagcagcagctggg

SEQ ID NO: 877503 - DNA, 120 bp, Artificial Sequence
  ENSG00000227128_0 (sequence is synthesized)
atttatggggtggggtgaggggtggggatgggatgagagaggctgctttcctgggcctacaattggagttcccttctccttgccatccccagaaactccaagagctgaccctctgtctta

SEQ ID NO: 877504 - DNA, 120 bp, Artificial Sequence
  ENSG00000227128_1 (sequence is synthesized)
ctaactcaaacggcccagaaacatcaaagtctgaccaaaaaccgttaatggtagtcagctccctccctttcacagaggtctcactactgtcggggggcgccgggcgcaggccgggcatgg

SEQ ID NO: 877505 - DNA, 120 bp, Artificial Sequence
  ENSG00000227128_2 (sequence is synthesized)
ggcctgagcttaggccaggtggaaaggtggaaggacctagtggggacagacgaagagaccgaggagccgcccgcccggctaaatggacacaggaaaggcctgagtcaggcttctcataat

SEQ ID NO: 877506 - DNA, 120 bp, Artificial Sequence
  ENSG00000227128_3 (sequence is synthesized)
aaataaactgcacgtgaataattcagcagtcgcgcgggggccggttgcatcagcgccgccgccgccgcgcggcgcccaattccccgcggaggggagtagccaattaaggcacttgaaaag

SEQ ID NO: 877507 - DNA, 120 bp, Artificial Sequence
  ENSG00000227128_4 (sequence is synthesized)
ggagtcgggtggaagatcccccgcccaccagtatcctggatttacccaggtcgagttcagagagcctccccggtcccaaccccctcgggccccatgggtcagggggccgcctgctgggaa

SEQ ID NO: 877508 - DNA, 120 bp, Artificial Sequence
  ENSG00000227128_5 (sequence is synthesized)
gtgctacctcagctaagccgctcaggtgtcccgagactccgggcaagggaagacaggcggcgagacggagccagaataagggatgcggacgtctgacctgtggaaaacccagcatctgca

SEQ ID NO: 877509 - DNA, 120 bp, Artificial Sequence
  ENSG00000227128_6 (sequence is synthesized)
gtgcccagccgcacagggaacgtgggcggcgtggttccaagcacagtgaagacgccaggctcggatctgtgctcagagccgggatccctccgggctgcttcgtcctggccaggactttcc

SEQ ID NO: 877510 - DNA, 120 bp, Artificial Sequence
  ENSG00000227128_7 (sequence is synthesized)
ttgccctgaagtgaggcgccagggaagctgcagggccctccgccctctctgaactcccacgtacttgggcctctcccagcctttcttggacctgtggaagcaattcctgcaggaccagac

SEQ ID NO: 877511 - DNA, 120 bp, Artificial Sequence
  ENSG00000227128_8 (sequence is synthesized)
tcccctgtctccccgcggccccctaggtacactccgtaacttccgaaaccttatttcgtttgagcgaaacccggcccctttggctcttcccacttcccacaagtccctgggttcccgatc

SEQ ID NO: 877512 - DNA, 120 bp, Artificial Sequence
  ENSG00000227128_9 (sequence is synthesized)
ctgagggattgcattcatcccatctcacacccaccaacgctcaatccctccagttcctccccagccccttcacttccattaattaggtcgactcccttccttcgccgctccctcctgtcc

SEQ ID NO: 877513 - DNA, 120 bp, Artificial Sequence
  ENSG00000227128_10 (sequence is synthesized)
tcgggccaagacctccgccctggctccgccagtcctgcgggggccggcatgcaccagacctcaaaagggatcttcacgggaattccgcatagccagatcccaagcctccagggaggccac

SEQ ID NO: 877514 - DNA, 120 bp, Artificial Sequence
  ENSG00000227128_11 (sequence is synthesized)
cagccctcccccatcttcttcttcctcctccgtctcctttcctcttccctccgcctctacgtatttctttctattcgtttcttttcgtttggtgaggtgccacccgccacagccctgtcc

SEQ ID NO: 877515 - DNA, 120 bp, Artificial Sequence
  ENSG00000227128_12 (sequence is synthesized)
cctagggagaggcctggactaactttgccgtcctcgtggccttagcccggactgtgagtctcgagcggcttccgagaggcagctcgggtgtcttcgcagagacagatgaggtgggctggc

SEQ ID NO: 877516 - DNA, 120 bp, Artificial Sequence
  ENSG00000227128_13 (sequence is synthesized)
gattccctagcctcagatggctctgccaccagccagctctgtgatcctggccgatggggtgccaggcattagaaaccttccctccaatcctcaccatgtctccattttgccaaagaagaa

SEQ ID NO: 877517 - DNA, 120 bp, Artificial Sequence
  ENSG00000227128_14 (sequence is synthesized)
actgaggttaaggtcgcgatgctctggccagcatcacaggtgggattcgaacgcagatggggtttggagcggctcttgtgtttaagccacacagtctgacgttagacgggtgaatccagc

SEQ ID NO: 877518 - DNA, 120 bp, Artificial Sequence
  ENSG00000227128_15 (sequence is synthesized)
cctcgcagggcctggagtgacctaagccgagaggagctgggctgaatctccaggcgttcctttctttctgccctaggaaagctttgaaattcttattttcaggtaaacgattttggcagt

SEQ ID NO: 877519 - DNA, 120 bp, Artificial Sequence
  ENSG00000227128_16 (sequence is synthesized)
gcccggagaaagatagaagtaagacctaaagaggaactttccgcatgttatgggagagcccctggggcgaggaggcgagggcagccttccccaggccaagggagcagccatcgctcttgg

SEQ ID NO: 877520 - DNA, 120 bp, Artificial Sequence
  ENSG00000227128_17 (sequence is synthesized)
atctgtttttcctcaagcgtctgtcctgtggggcctagtccccaagcggcagtcctggacctaacgggagaaggggctgggggaagagggcgcacccccagcccgggacccacagcagcc

SEQ ID NO: 877521 - DNA, 120 bp, Artificial Sequence
  ENSG00000227128_18 (sequence is synthesized)
ctagccagtcccccactctctccctctgtaggggcctctctctgagatcgggtcctcctcctgcagggcagcagagtggaagccagggcctgggaccctctggctgggcaaggagggact

SEQ ID NO: 877522 - DNA, 120 bp, Artificial Sequence
  ENSG00000227128_19 (sequence is synthesized)
ggagtccggctcccggtgaccccgtccccagtgccagcggtggggtcgcctgtggcggcccggacaggccacgggtccctctccccaagtcccattacgttgtatttatgtttcatttta

SEQ ID NO: 877523 - DNA, 120 bp, Artificial Sequence
  ENSG00000227128_20 (sequence is synthesized)
tagtttttttttcctcctcccttattattgtctcactctgggggaggcaaaggatataatatattcatctttattataccaaatctgtgtgaagcatttaataaaacgctgtttccacac

SEQ ID NO: 877524 - DNA, 120 bp, Artificial Sequence
  ENSG00000227128_21 (sequence is synthesized)
gccgatggggtgccaggcattagaaaccttccctccaatcctcaccatgtctccattttgccaaagaagaaactgaggttaaggtcgcgatgctctggccagcatcacaggttcctgtgc

SEQ ID NO: 877525 - DNA, 120 bp, Artificial Sequence
  ENSG00000227128_22 (sequence is synthesized)
gaagctgaattgtctctctgcaaggaaaaatttcctgacacaagtatctgtccaggcaagaagattcaactgcaagagctttcagcaggcaatggtgtccaactagaatcgaaacacatt

SEQ ID NO: 877526 - DNA, 120 bp, Artificial Sequence
  ENSG00000227128_23 (sequence is synthesized)
gttattgttttacttatttttataattactttttattttggcaagtaacgggtggtttcgcagttactgtagtgctagaaggcttttttaaaaaaacaataaacatacttgagtaagaaa

SEQ ID NO: 877527 - DNA, 120 bp, Artificial Sequence
  ENSG00000227128_24 (sequence is synthesized)
agatccccttatccaggccacctttggaaaccagcccacctgctacaccaaccttttcccaacaccgtggtcccacccctaccttcgctgctgaaaaaccgcattgtgtgggggtctgga

SEQ ID NO: 877528 - DNA, 120 bp, Artificial Sequence
  ENSG00000227128_25 (sequence is synthesized)
acattagctgctcctttattgcacccgaacctcgggcgactgaaaagccaccgcccccaccccaaactgcgagccgcgctcctggcgcacccgcctcccgccggcctagctgcaatgacc

SEQ ID NO: 877529 - DNA, 120 bp, Artificial Sequence
  ENSG00000227128_26 (sequence is synthesized)
gagggcaggagccttcctctgggtattccagttcatctcggaccttcgaagtcctaggagacaccgggctcccgctgaatatcggttgaatgactttccatagagcaaatggggtataca

SEQ ID NO: 877530 - DNA, 120 bp, Artificial Sequence
  ENSG00000227128_27 (sequence is synthesized)
gcgctccccgcgcgggtccaacgccctgggtgcccttctcgcctgcgccttgaagcccccacgcccatcctagcgcgtctctctgtgacctctcggccgccagcctgggaggaggggttt

SEQ ID NO: 877531 - DNA, 120 bp, Artificial Sequence
  ENSG00000227128_28 (sequence is synthesized)
ctatgaaaatgggaagaattccatcactgcctccctctcagggatcttgagaggccgaagatgccttgaaggtggacaggattttttaaacaggaaagaaaaaatcgagaatttgtaagg

SEQ ID NO: 877532 - DNA, 120 bp, Artificial Sequence
  ENSG00000227128_29 (sequence is synthesized)
tcaggatcaatgagggccagagagaaatagagaggctgcaggagtggtttcaggcaacacagagcgagctggaccccaggcgagcagacagggtgcaactccagtttgggcagaacccag

SEQ ID NO: 877533 - DNA, 120 bp, Artificial Sequence
  ENSG00000227128_30 (sequence is synthesized)
gaggtttcggcatgcctgggcctcaccccagcccacgaagacagctgaacctagtcaggatctcggcctgtcacagttggccctctcataatcctccctctaggtaggaaaatagtcttt

SEQ ID NO: 877534 - DNA, 120 bp, Artificial Sequence
  ENSG00000227128_31 (sequence is synthesized)
ttaagtccagttttacagctagcaaactgaggctcacaaagatcacgtggcttgtttgaggtgaacaaactaggaagtagtgtagctggtcacactgtcttccagactccatgcccctcc

SEQ ID NO: 877535 - DNA, 88 bp, Artificial Sequence
  ENSG00000227128_32 (sequence is synthesized)
tgtagctggtcacactgtcttccagactccatgcccctccccgcccccattctccagggtttttctgtaaaccttacattctgccttc

SEQ ID NO: 877536 - DNA, 120 bp, Artificial Sequence
  ENSG00000227128_33 (sequence is synthesized)
aaggagaaacaccctcattactttctatatccaggcccactgctcagtgtctttcagagcccaccacctggcttcttatagggcccagatctgggcacaccattcttacttaggctgctt

SEQ ID NO: 877537 - DNA, 120 bp, Artificial Sequence
  ENSG00000227128_34 (sequence is synthesized)
gtacctgtgctgtaggggagagggagttggctgtaaccaggcaaagccaggcagaaggagtcatgcaggacaggcttgaagtgggcaggtgagtctccctggctagaatccatactctcc

SEQ ID NO: 877538 - DNA, 120 bp, Artificial Sequence
  ENSG00000227128_35 (sequence is synthesized)
taggaatctcagtcttcctctgcccccatcaccccatccctgggagtgggggctgcacaagctcaacacacatcctgtaggctgctggtcagagctcctttggagacttaagttacttga

SEQ ID NO: 877539 - DNA, 120 bp, Artificial Sequence
  ENSG00000227128_36 (sequence is synthesized)
gaaatctgacagttcccccctggggctggctggggaggaggcacagactgtgtggcagggctaggactagggtgaggcatgtgaggtgccatatttaaggaaggcatctgctctcagctc

SEQ ID NO: 877540 - DNA, 120 bp, Artificial Sequence
  ENSG00000227128_37 (sequence is synthesized)
tgtgtgtgatcccttaggttttgtgccgtgggcatctcactcgcctcaccctagtcccagctctactgtgtggtctgggagttagaatcaagtccagtgaactgctgagaggggacaggg

SEQ ID NO: 877541 - DNA, 120 bp, Artificial Sequence
  ENSG00000227128_38 (sequence is synthesized)
aggctgatttcagctcatccttgagaatggctttctgaaggatcaaagtggaaacaatggaatgagcttcccccaacacatggagtatgcaagcagggcttagcgcttgctaagaaggaa

SEQ ID NO: 877542 - DNA, 120 bp, Artificial Sequence
  ENSG00000227128_39 (sequence is synthesized)
aataatcacggtcttattgtcatcaccaatattgtcctcatttgaccatcactttgtgtcaagtaaaagctgtcatcacattgtttcatttaatgtatataaatatgttttagctgaata

SEQ ID NO: 877543 - DNA, 120 bp, Artificial Sequence
  ENSG00000227128_40 (sequence is synthesized)
tgggatatcagagtctctgactttggggtcctttccagctccaagagtccattgttgcataagacaaagagcacttctgttgatttttgttggtttgatgcattgtcattatttgtggac

SEQ ID NO: 877544 - DNA, 120 bp, Artificial Sequence
  ENSG00000227128_41 (sequence is synthesized)
ttatagtcttatactaatggataagactttgagggcagggactgtgtctaatcacatttttttaaatgattccctctcctgttccatgctgaccacgggcctggggcacatagaagctgt

SEQ ID NO: 877545 - DNA, 120 bp, Artificial Sequence
  ENSG00000267503_0 (sequence is synthesized)
gggtgaaatacatactccgtgttctaaaattgtaagaccaggcgacaaccgtctctatatagagggtggcagttggttcaagctctaccttcctttctcagttggatctatttaaagcct

SEQ ID NO: 877546 - DNA, 120 bp, Artificial Sequence
  ENSG00000267503_1 (sequence is synthesized)
gcagcagaggaaacttggcagctgaatgtttccaaaagttttctctaatataaagaaaacagtggttatttataatcattactggagggtttgacaatcaggaaaacattaggttcagct

SEQ ID NO: 877547 - DNA, 120 bp, Artificial Sequence
  ENSG00000267503_2 (sequence is synthesized)
gtatattttaatgctccatatcccacaacatccaagagatgttggtatcaatcctacactgagtcaagacacgcttcggcatacatgtcatcacgtccgtctttgcacaggtgtcatcac

SEQ ID NO: 877548 - DNA, 120 bp, Artificial Sequence
  ENSG00000267503_3 (sequence is synthesized)
gtccgtctttgccttctcccaacatgtttcttgaacgataatcaggacaccactcccgatgatgaagtacacttccaacaaatgactgctcatcaaggtctcagctgcagtgtttaatca

SEQ ID NO: 877549 - DNA, 120 bp, Artificial Sequence
  ENSG00000267503_4 (sequence is synthesized)
cgcagcagaaaccatttattttctcatatacttctctttcttgaaatatctcttaattatctcatttactcctatataaaaatggtgctcaaaaatttaattacaagggcaagatcttaa

SEQ ID NO: 877550 - DNA, 120 bp, Artificial Sequence
  ENSG00000267501_0 (sequence is synthesized)
gacaaagtgaggaaggcattccaggcagtcaacagcaggcatgatactccagagtgagagaaactcaagtgtcctggggtgcagtcatgattaaccttcaacaaggagaggtttggccct

SEQ ID NO: 877551 - DNA, 120 bp, Artificial Sequence
  ENSG00000267501_1 (sequence is synthesized)
tatccccagctcccaggaggcaacctctaagcccttggaattgcctccctgataagagtgcgtttatttacctgggggccttgggccccaccagatagtctctgctaacaatgtgaccta

SEQ ID NO: 877552 - DNA, 120 bp, Artificial Sequence
  ENSG00000267501_2 (sequence is synthesized)
tggggggcccttggaccaagtggtatcagcttgacctctgcaggggctggaaaccaggatcagccaactgggcggccagccatgtctgggtgaccagcccctagtagaaaccttggacac

SEQ ID NO: 877553 - DNA, 120 bp, Artificial Sequence
  ENSG00000267501_3 (sequence is synthesized)
agtacaaaatcaggttttcagacacttaatacctagttagcaataacaactgattccaatgggaagataccacatggtgcttcgccttgttaataacacctgctagcaagccacatcttg

SEQ ID NO: 877554 - DNA, 120 bp, Artificial Sequence
  ENSG00000267501_4 (sequence is synthesized)
aatgacaaagctgatctgggggccaagtttggtgctgtttgctccaggggcccgaactgcaggtcaggacctgctcacatggcctttccctgtcaccagcagctcacactggctgacagt

SEQ ID NO: 877555 - DNA, 120 bp, Artificial Sequence
  ENSG00000267501_5 (sequence is synthesized)
gtggagtccagtggcctggactccctccaggccagacgcctccagccctcactgtgcagtcaggaggcttttcttccccttttctaagggctgcggtctcccaaaggcgcccagctggtg

SEQ ID NO: 877556 - DNA, 120 bp, Artificial Sequence
  ENSG00000277453_0 (sequence is synthesized)
attctgaaggaggggcttcagggcgcatgcccgggcagctgcgcgagtgaggggtggaaagaggtggctttttactccggggaacggtggcgagtgggggcttttgcctctcaaaatacg

SEQ ID NO: 877557 - DNA, 120 bp, Artificial Sequence
  ENSG00000277453_1 (sequence is synthesized)
agcccctcacaactacccatgcacctgccaaacccggcaattaagcttcttacacatccagccccgacaggggtctacactacagataatgcccgggttcaaattccgactccggattcc

SEQ ID NO: 877558 - DNA, 120 bp, Artificial Sequence
  ENSG00000277453_2 (sequence is synthesized)
cgtatctataagaacacaataccacactcaagcaatgctggacagttggacttaattgtggttaaaggcgggagtgaggtgggagtgcgataccaacggaatcacatcccgggctccatt

SEQ ID NO: 877559 - DNA, 120 bp, Artificial Sequence
  ENSG00000277453_3 (sequence is synthesized)
ccctaagcagctgtgtgacctgcggcaagtgttttaatcccttctggtctgtttctcctttaaaatgagagaaaatagcgcctagtttacaggattgtttttaaggattaaattaattca

SEQ ID NO: 877560 - DNA, 120 bp, Artificial Sequence
  ENSG00000282925_0 (sequence is synthesized)
agacaaggaaaggcataaatgaaatcagatccacagacccaagcagcagtaggagagaaagacattcgtaccaatgcctggagactcgaagaaagacccatagacattattaatagtgaa

SEQ ID NO: 877561 - DNA, 120 bp, Artificial Sequence
  ENSG00000282925_1 (sequence is synthesized)
actcacacccagccctctttaatcgtcataacattagcacagggacctagaccgtgcaccagatatagtaagtactttgggactgataataataactaagaaaacatgaagctggaaatt

SEQ ID NO: 877562 - DNA, 120 bp, Artificial Sequence
  ENSG00000282925_2 (sequence is synthesized)
catttcagctctgagataacaccaagaagtttctgaaatgtcttatataaaagtgcagccaagtgaagaaatgcagctccgctcaacattcggtcttctcagcttgtcaatcagcatgtg

SEQ ID NO: 877563 - DNA, 120 bp, Artificial Sequence
  ENSG00000282925_3 (sequence is synthesized)
caaacacttgctttgaagtggcaggaaacatcaacaaaggagctcatttaaactttttaagaaagattggaagtctagctgaactgctagattcctcagcccttgtctcatggatgaagt

SEQ ID NO: 877564 - DNA, 120 bp, Artificial Sequence
  ENSG00000282925_4 (sequence is synthesized)
agtgggtagagtgaagaagctgaaaaaacttggagatactgtacttatttacataagaaaaggcttgagttctccaaaaaggaaaattcccaaagcaacagcaaggagaggaaaaagcaa

SEQ ID NO: 877565 - DNA, 120 bp, Artificial Sequence
  ENSG00000282925_5 (sequence is synthesized)
gccagagaatcaggagcatttaagagaaagccagtgggtcctgggaggaactggaggagccggagccggtgctggcagtgcggggcttcaaggagctgaatcgcagaggggtttccaggc

SEQ ID NO: 877566 - DNA, 120 bp, Artificial Sequence
  ENSG00000282925_6 (sequence is synthesized)
tgttccattgtatgttatatgatgtaacccccttcaaacgacttcagtaaagactcacattacatttcaaggcttgtggaacaatgcagaagtgttcttttcttatgtgttattgtcttg

SEQ ID NO: 877567 - DNA, 120 bp, Artificial Sequence
  ENSG00000282925_7 (sequence is synthesized)
acggtggggctggcatttaaggctctgttctcttgcatgaaaagtgactgaaatggcacaaaacctggcaagtgcatttaaccctaacccacatgtgcttacaagcatgactgatggact

SEQ ID NO: 877568 - DNA, 120 bp, Artificial Sequence
  ENSG00000282925_8 (sequence is synthesized)
cccacgtaagtgccactcaagcctgctcccgctcgtcagtgcctcaggtggatgctgaggctccagccaggcatcactgcagtgaccagtgaccacagagcactgccaggtctgtcgtcc

SEQ ID NO: 877569 - DNA, 120 bp, Artificial Sequence
  ENSG00000282925_9 (sequence is synthesized)
acctctccacggcttcatcacctcacagagaccccaccatactgctcccgggaagaaatacccccaaaaatgtatgactgtctctgaaattgtgcatgattcattttcttccttaggttt

SEQ ID NO: 877570 - DNA, 120 bp, Artificial Sequence
  ENSG00000282925_10 (sequence is synthesized)
tttctatatttgccaaatatgctgtgttaagcaaatcatacatggttttggtacaatttttaaaaattggtttttctccccagttccttgcacagaacacctaaaacccttggaatttat

SEQ ID NO: 877571 - DNA, 120 bp, Artificial Sequence
  ENSG00000282925_11 (sequence is synthesized)
tgagacatagcagtatcttttgttattaatgccgatcccctttggatcaccccagagtttatgctaatgaagtaactttgggtggggcccctagatagtctcccttgggtctggtcacca

SEQ ID NO: 877572 - DNA, 120 bp, Artificial Sequence
  ENSG00000282925_12 (sequence is synthesized)
gaaagagcaagtgattatagagctagaattttcatccccactcacagacctccaggatgttggggaactggggatggctagagattaagctctataaaaactcttgaacaaagagatttg

SEQ ID NO: 877573 - DNA, 120 bp, Artificial Sequence
  ENSG00000282925_13 (sequence is synthesized)
ataagcttctgggtggctgagcatgtgaaggtgctgggaggaggcaccctgaaagggctggaagctccgagtcccacctccatatcttgcccaatgcatcccctgacttagtttttccta

SEQ ID NO: 877574 - DNA, 120 bp, Artificial Sequence
  ENSG00000277930_0 (sequence is synthesized)
gagctgagaggctgtccgcatatatcatactcaactgtgagcggggtctggtacttcgatcgcctttccagattaatcctctgacagcagcgaagggctgtgtgtgtgtgtgtgtgtgtg

SEQ ID NO: 877575 - DNA, 120 bp, Artificial Sequence
  ENSG00000277930_1 (sequence is synthesized)
tgtgtgtgtgtgtgtgaaggagggaaggagaagttctagcgacctagcatttggctaccccagacagcaagcaggagtgagtcaggtggcattgctgccagagaccaggcagcgtcgcgg

SEQ ID NO: 877576 - DNA, 120 bp, Artificial Sequence
  ENSG00000277930_2 (sequence is synthesized)
cttttctgactacagacagaaggactccccgttactgaatgtttttaatgtaccatctgcattatataaattgtcccattaatcctccaaaccattctaagaggacaggttttgccttaa

SEQ ID NO: 877577 - DNA, 120 bp, Artificial Sequence
  ENSG00000277930_3 (sequence is synthesized)
gttatccagatgttgtgtggtgaggtgaaggattccaacagttttgttcgttgagaaaagcagaatcctttttttttttcattaacaatgagaatgaattttcctattccatcaagattt

SEQ ID NO: 877578 - DNA, 120 bp, Artificial Sequence
  ENSG00000277930_4 (sequence is synthesized)
atacaaatacacatttttcaagaatcctggactaatcccacactactctgagccgcctttactttttaagcctctttatttctattatatgactgtgaactaagtagatttaacttttgt

SEQ ID NO: 877579 - DNA, 120 bp, Artificial Sequence
  ENSG00000203875_0 (sequence is synthesized)
gctgcgcacttcggtcttttacgtcggccttcgcgagcgtctgggcgggtggaacaatggcgctgtcttcagtggcacagtggagcagctctgaagatgcaaagatacacgaaaaaactt

SEQ ID NO: 877580 - DNA, 120 bp, Artificial Sequence
  ENSG00000203875_1 (sequence is synthesized)
gacgagtagccagtgaagataatgaatgtcgaatgtgactgactagcagcttcattttgaatgagggtcgctgtctgcccattgatagaggccagattgtcttggaagttccaaagttgc

SEQ ID NO: 877581 - DNA, 120 bp, Artificial Sequence
  ENSG00000203875_2 (sequence is synthesized)
aacgatttctggctagtgccacgaggtttacttgactgttgtgtgaaaagctgataagaaaaccatccagaaaaaagctcttcgttttacaaacatgaaaataaaacatgtaattttgga

SEQ ID NO: 877582 - DNA, 120 bp, Artificial Sequence
  ENSG00000203875_3 (sequence is synthesized)
gctgcgcacttcggtcttttacgtcggccttcgcgagcgtctgggcgggtggtaggtgagtgggtattgcgggctagtatccgagcaaaagatggtggcgcaggccgagttaagagcttt

SEQ ID NO: 877583 - DNA, 120 bp, Artificial Sequence
  ENSG00000203875_4 (sequence is synthesized)
aatcctgtgaagacatcttagtgaagagtttagagtgctgagagttgaaagcttgcacgtgggaaacgtgcggccggactgccacatgtactgaggttgagtcgtgacggccacaggctc

SEQ ID NO: 877584 - DNA, 120 bp, Artificial Sequence
  ENSG00000203875_5 (sequence is synthesized)
cgagttttggcgtgaggaaccgctgatcggccacgggcgccgaacttgctggcctccggcatgtgcctgagcggcggcggaaaaaccaccttaattggggcggagggttagttttaacag

SEQ ID NO: 877585 - DNA, 120 bp, Artificial Sequence
  ENSG00000203875_6 (sequence is synthesized)
caaagggcctttactaaaatggcgaaggccttccgtcggcgttgttttaaaatgggaagcctcgaccctgtattgaaactgagctgttcgaaggcggcgttgtgtgcaattcggattaat

SEQ ID NO: 877586 - DNA, 120 bp, Artificial Sequence
  ENSG00000203875_7 (sequence is synthesized)
tgtggaaaaacgccttggagtgtgacatttctgcgagaatgcttaaataccgatttcccgcaggaacaatggcgctgtcttcagtggcacagtggagcagctctgaagatgcaaaggtaa

SEQ ID NO: 877587 - DNA, 120 bp, Artificial Sequence
  ENSG00000203875_8 (sequence is synthesized)
gagcttagttaagcttagtttccaaactaaaggagtaaacctgttgatttacaggaataggaactgttgcatcgtttgaaatttacttttttttgttagatacacgaaaaaacttccaga

SEQ ID NO: 877588 - DNA, 120 bp, Artificial Sequence
  ENSG00000203875_9 (sequence is synthesized)
tggggagcattaaatggaaaatccactaaccagccttgtaatcaaattactgtgagtgaatgtttcgggtttgtgcagggtacaatgtaagggtttttggatcagtgtaagagtggagag

SEQ ID NO: 877589 - DNA, 120 bp, Artificial Sequence
  ENSG00000203875_10 (sequence is synthesized)
acaggaattagaagtaattgttactaagcaaatcatggaatatttagttttgatgtaactataattttgaaagcctggatgcttaagttgagaaatgggggaatgagatacagaaaataa

SEQ ID NO: 877590 - DNA, 120 bp, Artificial Sequence
  ENSG00000203875_11 (sequence is synthesized)
ggagcacaatagaataataatagcagtttattaagtatggtcatgagggaaggttactgataaaacaatctggtaaagacattcaggcttgctaaaatctaggaagaggtcatttggcag

SEQ ID NO: 877591 - DNA, 120 bp, Artificial Sequence
  ENSG00000203875_12 (sequence is synthesized)
gatgggttacataatgctatctgatactaccaaataaaatgagagagaagccttaggcatgtaacgtttggagatagaaaatgtaccttcactatgaaggtagtgtgtgtaagatggcag

SEQ ID NO: 877592 - DNA, 120 bp, Artificial Sequence
  ENSG00000203875_13 (sequence is synthesized)
ttgaaagcattgcttgtgtttatgtttatacccttgatctctgatgcccttacctaccgtacttaaaactctgttaatcattgtctttctccccctcccacaacttctgcataaaatttt

SEQ ID NO: 877593 - DNA, 120 bp, Artificial Sequence
  ENSG00000203875_14 (sequence is synthesized)
aagatctgtgtttcattagttcaagagtgcctagaatagggccaggcactgttatacagtatgtggtaaaagactattgagattccagttttcaaggaagagtgccattaccgttttgtt

SEQ ID NO: 877594 - DNA, 120 bp, Artificial Sequence
  ENSG00000203875_15 (sequence is synthesized)
aaagctggcaaacaagacaaagttgtgaaatagactggttgctttggagccctctgaccgcttttcctgtagctccttctacctcccttgcctcccaatagattttttaatatgtcacat

SEQ ID NO: 877595 - DNA, 82 bp, Artificial Sequence
  ENSG00000203875_16 (sequence is synthesized)
cttgagaccagcctggccaacatgggtactgctttctcttgctgcagcttgcttcctccctcaggtatgaagttaaggtaac

SEQ ID NO: 877596 - DNA, 120 bp, Artificial Sequence
  ENSG00000203875_17 (sequence is synthesized)
ggccaacatgggtactgctttctcttgctgcagcttgcttcctccctcaggtatgaagttaaggtaacatgaaggaggatattgaatgttcctaacacaaagaaatgataaatgtttgag

SEQ ID NO: 877597 - DNA, 120 bp, Artificial Sequence
  ENSG00000203875_18 (sequence is synthesized)
gatgactatacattatatatattgaaacatcagtatgtaccccatgaatatgtacaattatatgtcaacttaaacacatttaaaagtaaaaaaaaaaaaatccaaaacacgcaaggaact

SEQ ID NO: 877598 - DNA, 90 bp, Artificial Sequence
  ENSG00000203875_19 (sequence is synthesized)
agtgagcccagatcacaccactgctgtcaaaaaaaaaagatacagggtcaactgtacacattaaacacttctatcaactagtgatgtcag

SEQ ID NO: 877599 - DNA, 120 bp, Artificial Sequence
  ENSG00000203875_20 (sequence is synthesized)
actgtacacattaaacacttctatcaactagtgatgtcagtcttgtccattgtattattgcctatcttactaaacagtcatatttcaggaagtacaatatactcaaaaactaagttaatg

SEQ ID NO: 877600 - DNA, 120 bp, Artificial Sequence
  ENSG00000203875_21 (sequence is synthesized)
ttctttgtagatttatggttaatggatgattcatataatagaaacttaaatttatttgaccattctatttaatatagaataaatacaactagccaggcatggtggctcatgtctataatg

SEQ ID NO: 877601 - DNA, 120 bp, Artificial Sequence
  ENSG00000203875_22 (sequence is synthesized)
ccagcacttggggaggccaaggtgggaggctcacttgagcataggaattcaaggccagcctgggcaacacaatgtgagacccgtctctatgaaaattttaaaaattagccaagcatggta

SEQ ID NO: 877602 - DNA, 86 bp, Artificial Sequence
  ENSG00000203875_23 (sequence is synthesized)
acacaacgagaagtccaggaggtcaacgctgcagtgagctgtgtgtgtgccactgcatcctagcctgggcaacagagcaagaccct

SEQ ID NO: 877603 - DNA, 120 bp, Artificial Sequence
  ENSG00000203875_24 (sequence is synthesized)
gtctcaaaaataaagaataaatacaacctattaagcttgagagatccagtgaaatccaaataagagaaactgtgtcctacacagttttctgttaaccattttcttggtatttaaattatt

SEQ ID NO: 877604 - DNA, 120 bp, Artificial Sequence
  ENSG00000203875_25 (sequence is synthesized)
tatcaaattttaacttcaataaaaaattattctggagaacacatacctctagagtaagtaaagtatacactttcaatttttagacatgaggttttgaggtgtttgactgtatctaatttc

SEQ ID NO: 877605 - DNA, 120 bp, Artificial Sequence
  ENSG00000203875_26 (sequence is synthesized)
ctaaaggctctattttttaacctacaaaaattataaaaagatatataaaagatatgaaatgtaaaaataaggaagatatgaagattaaaataacctataatcccaccactcagaggtaac

SEQ ID NO: 877606 - DNA, 120 bp, Artificial Sequence
  ENSG00000203875_27 (sequence is synthesized)
aaatcaaattttttttgtcagtgaacagcgttctgagtgtggacgagtagccagtgaagataatgaatgtcgaatgtgactgactagcagcttcattttgaagtaggttgtatggcttaa

SEQ ID NO: 877607 - DNA, 120 bp, Artificial Sequence
  ENSG00000203875_28 (sequence is synthesized)
aggtctgattggtctaatcaatgatgaaacctatcccgaagctgataacctgaagaaaaataagtacggattcggcttctgagattaagaccagtaattcagaggtggagtaaattttgt

SEQ ID NO: 877608 - DNA, 120 bp, Artificial Sequence
  ENSG00000203875_29 (sequence is synthesized)
tgccgtgattttataacagttgtgttataaaatcctgggttttttttttttctgccaacagtgagggtcgctgtctgcccattgatagaggccagattgtcttggaagttccaaagttgc

SEQ ID NO: 877609 - DNA, 120 bp, Artificial Sequence
  ENSG00000203875_30 (sequence is synthesized)
cttttacggatctggcttctgagatggaccgttataaggacaatatttttttttaatacttttaatgcttttacatatgttgtaatgtttgtagtcttgtaagaatctcgtgtttttcct

SEQ ID NO: 877610 - DNA, 120 bp, Artificial Sequence
  ENSG00000203875_31 (sequence is synthesized)
gggaaatggccgggcgcgcggccggcctgcggcgcgctccacaacgcggaacgggcctcagaagagccaccgcgcgcgctcccgctaattcgcgaccacacccctgtctacttccatgtc

SEQ ID NO: 877611 - DNA, 120 bp, Artificial Sequence
  ENSG00000203875_32 (sequence is synthesized)
tgctaggctctgccaagactcctgaaataaaaccgttttgtcaacagtggcacaagatgccaaggaaaagtcaagctatgaaggattcttgaaaatagaacaagtggatttgagtctaaa

SEQ ID NO: 877612 - DNA, 120 bp, Artificial Sequence
  ENSG00000203875_33 (sequence is synthesized)
ccagcacagatgttgggacaataggcctaagaaataactgagcaaagacagtatggttcagagtctgagacaaatattgaggatttgggtaccaacagggtggataggtgtaggacagaa

SEQ ID NO: 877613 - DNA, 120 bp, Artificial Sequence
  ENSG00000203875_34 (sequence is synthesized)
aactgatgttataaatacccttaagattcttgagcaaggaagttacaaatgtaagactattcctgtaatgagagtcagatccaaaaaggtttaatttgaatggaattgaacttgaaagtt

SEQ ID NO: 877614 - DNA, 120 bp, Artificial Sequence
  ENSG00000203875_35 (sequence is synthesized)
cagtttcaattactgactccttgatggcaatttctaatcacacaggaggctgttagtctgtcatagcctcctaaaatctcaggcgatattggttaagatcagtttcctaagtttaccctc

SEQ ID NO: 877615 - DNA, 120 bp, Artificial Sequence
  ENSG00000203875_36 (sequence is synthesized)
ctcatgcctgtaatcccagcactctgcttgagcccaggaagagaccagcctggaaacagcaagttgtcatctctataaataagtaaaactgggtgtggtaacatgcgcttgttccagcta

SEQ ID NO: 877616 - DNA, 120 bp, Artificial Sequence
  ENSG00000203875_37 (sequence is synthesized)
aaaactgggtgtggtaacatgcgcttgttccagctactcgggaggctgagataggaggatcacttgaacctaggaggttgaagctacaatcagccatgattgcacctctgtcttctatcc

SEQ ID NO: 877617 - DNA, 120 bp, Artificial Sequence
  ENSG00000203875_38 (sequence is synthesized)
gcaaggatgagtgggtgttgcagagtaagacagcctaggctgctcccttagcaggagctttgggtggagtcaccctggaaaagagctttcagatacaccatgatggacatgttcagtgaa

SEQ ID NO: 877618 - DNA, 120 bp, Artificial Sequence
  ENSG00000203875_39 (sequence is synthesized)
aacaactatcacaatagttttctttttttgtgcaatgaatcatcttgaaatctgaacaacgaaagattgctcttattctggaactccattcagattaggatgggaatacctggataaaaa

SEQ ID NO: 877619 - DNA, 120 bp, Artificial Sequence
  ENSG00000203875_40 (sequence is synthesized)
ccattgtttgggtttacattatccctgttctttttgtagttactggtatatactctgtggcttctggtaatttaatccatcaccttctatcataaaagtgaaaagtaaaaaagctaaaat

SEQ ID NO: 877620 - DNA, 76 bp, Artificial Sequence
  ENSG00000203875_41 (sequence is synthesized)
catataaaattatagctgggtaggaggaataagttctagtgttctacaccactgtgggatgactatagttaacaat

SEQ ID NO: 877621 - DNA, 120 bp, Artificial Sequence
  ENSG00000203875_42 (sequence is synthesized)
cacttttaacagggctagtgccacgaggtttacttgactgttgtgtgaaaagctgataagaaaaccatccagaaaaaagctcttcgttttacaaacatgaaaataaaacatgtaattttg

SEQ ID NO: 877622 - DNA, 120 bp, Artificial Sequence
  ENSG00000203875_43 (sequence is synthesized)
gctgcgcacttcggtcttttacgtcggccttcgcgagcgtctgggcgggtggaacaatggcgctgtcttcagtggcacagtggagcagctctgaagatgcaaagtgagggtcgctgtctg

SEQ ID NO: 877623 - DNA, 120 bp, Artificial Sequence
  ENSG00000203875_44 (sequence is synthesized)
gactataatagactgggatatgcttgattctgattggtttcagaagttgaaagataatttacgtgtctgactttagtgacttcagccaacaggaatttttcctctgccttacaccaggct

SEQ ID NO: 877624 - DNA, 120 bp, Artificial Sequence
  ENSG00000203875_45 (sequence is synthesized)
tccaggtaatcttaaaatacagtaagctcaaacctaccatttggtgctttctaaaattagttctattgccagaaacccaatatccactgtgcttggctccccagtcaagtgtcctgtgaa

SEQ ID NO: 877625 - DNA, 120 bp, Artificial Sequence
  ENSG00000203875_46 (sequence is synthesized)
ctaacatcaatcctcactgccctgtgtatatgaaagagctttcagctgttttcatggtttttctaacagttccccagttgggattagagcctttgtttgaatcagcctactagaataacc

SEQ ID NO: 877626 - DNA, 120 bp, Artificial Sequence
  ENSG00000203875_47 (sequence is synthesized)
tgcttatcttttgccagtcctttaataggagtgggaccctccttcctgccttttcaaaagcttggttctggatccaaacaatacttatagtacttagttataggtatatattagtataca

SEQ ID NO: 877627 - DNA, 120 bp, Artificial Sequence
  ENSG00000203875_48 (sequence is synthesized)
tgacttaactgtctgaatattgccactgcctctgatcttactccatcctgtagagtaacatcttgtagagagcatcttggggcagaagaggatacattttcagtatgagaaccagactcc

SEQ ID NO: 877628 - DNA, 120 bp, Artificial Sequence
  ENSG00000203875_49 (sequence is synthesized)
ttgtcttactctcatgagtcctggtctcctcctggtactactattccactgctgaggtctcagcatgccatatagctgagtttgtcagagttaatgagggtttaatcagaatcccaaatc

SEQ ID NO: 877629 - DNA, 120 bp, Artificial Sequence
  ENSG00000203875_50 (sequence is synthesized)
aagtacagtccagtccaacctatttgagaactttatctttcttgttacttcatttattatagttcacttcaaaagagcaatggaaaaggcacttcagaatatgcaaaaaatgtatcattt

SEQ ID NO: 877630 - DNA, 120 bp, Artificial Sequence
  ENSG00000203875_51 (sequence is synthesized)
gaaggcaataatttacaaatatgcattacttcactgagatcaggaaacttttgtccttgcctcctgtagtgaatataactgatgtacaaaaatgtgtacatttaaaaagtatacaatttg

SEQ ID NO: 877631 - DNA, 120 bp, Artificial Sequence
  ENSG00000203875_52 (sequence is synthesized)
atgggtttttcataggaatatactcatgaaaccatcaacataatcaagataatgactatatccatcactcccaaaaatattctattgttggcttgattttgaacatgttaagtttaaata

SEQ ID NO: 877632 - DNA, 120 bp, Artificial Sequence
  ENSG00000203875_53 (sequence is synthesized)
gcacatgttattcaaattgggatttttgagtaggcagttagatatagaggtccacagttcagaggagaggtctgactaaaataaaattgggagttaacatatggaaggcatatttaaagc

SEQ ID NO: 877633 - DNA, 120 bp, Artificial Sequence
  ENSG00000203875_54 (sequence is synthesized)
cataagattagatgagatcaccaatagagaaaaaagtccaagagttgaaccctgtggcctttcaggattaggacattccaggtttattcaaatcctagagaataatttgtgccaagggac

SEQ ID NO: 877634 - DNA, 120 bp, Artificial Sequence
  ENSG00000203875_55 (sequence is synthesized)
aaaaatcaggacgcaggaatctgctgccaagttcaagggccatatttgttaggaacagaaactaagtagaaaaccaaggatgcctggaatgaaatgagccaagaaaaaaggataagaacc

SEQ ID NO: 877635 - DNA, 120 bp, Artificial Sequence
  ENSG00000203875_56 (sequence is synthesized)
aagcaaaacttgctggaaattgccttggatttaatatagaccattggtcaacatgaaaactgaagatagtgtctgatcatgactttgcaaagtaacagacgaagtgatcttcaggagaga

SEQ ID NO: 877636 - DNA, 120 bp, Artificial Sequence
  ENSG00000203875_57 (sequence is synthesized)
ataagatgaggaatttaggaagtatgataaggctttttcatcagacactgcagattgggagaaaatggagctgaccatggacaagttataaatttgcctagcattgataaagtatcagct

SEQ ID NO: 877637 - DNA, 120 bp, Artificial Sequence
  ENSG00000203875_58 (sequence is synthesized)
gaggctgaaaaccaccaattttaacaaaaatcagcatatttcttcagtattgtgtggtgcttatctccttgggagcagaaagcagagactggattaatccaaaatcagggataaactgac

SEQ ID NO: 877638 - DNA, 120 bp, Artificial Sequence
  ENSG00000203875_59 (sequence is synthesized)
caggaggagcagaggaataatgggccaagagtactgaggatgcaagtaaaagtgctcaaattactgtattgaccttgtaatcccaagctgatcggggaaggaaaaaaaaaaaacaggaga

SEQ ID NO: 877639 - DNA, 120 bp, Artificial Sequence
  ENSG00000203875_60 (sequence is synthesized)
gggctggaaaattgtcacaggtaatgacagaggatcagatgtgctatagaaatgtgctgttgaaaatggtagactaagcccctctccaattatactgtggaatgagccgtataacatgtt

SEQ ID NO: 877640 - DNA, 120 bp, Artificial Sequence
  ENSG00000203875_61 (sequence is synthesized)
gtgattattggtttctcccttctggacctggagtgtcagttcttctaaagcagagacttccctttaatctctgtttaaacttggtgcctaggacaatgtaatggcatccataaaatatct

SEQ ID NO: 877641 - DNA, 120 bp, Artificial Sequence
  ENSG00000203875_62 (sequence is synthesized)
aatggaatggagtttaacatgttttttagggtggaactggtggtgtgatttaaattctccaaaagagaaatgagaaaagttggaagctgttgtggcctgactttatacccccaaaattca

SEQ ID NO: 877642 - DNA, 120 bp, Artificial Sequence
  ENSG00000203875_63 (sequence is synthesized)
tattttgaataccccaaaaagaagtataatgtaagtccagaatcattactggtgatgacgttcaaaagtcagaattgagatataccccaaagaacacaccttgctattgccctagagaag

SEQ ID NO: 877643 - DNA, 120 bp, Artificial Sequence
  ENSG00000203875_64 (sequence is synthesized)
tttaatgtgttttatgcctatgttcctattgatgcagttaaagtgaccaactattagcaacaaaccccaaattgtcctttgtacaaaaatagttgattaggccaggtgcagtagctcata

SEQ ID NO: 877644 - DNA, 87 bp, Artificial Sequence
  ENSG00000203875_65 (sequence is synthesized)
atttgagaccagtgggcaacatagcaagcccgtctctacaaagtgttaaaaaattagctgggctacttggaggatctggctacgtgg

SEQ ID NO: 877645 - DNA, 120 bp, Artificial Sequence
  ENSG00000203876_0 (sequence is synthesized)
caagaattattagaaatacaggctttgctgttgttggctctactctagaagactcttatcatataacaagtgcttgcgtttataaggggcactgtacaggaagtctagggtgtattatga

SEQ ID NO: 877646 - DNA, 120 bp, Artificial Sequence
  ENSG00000203876_1 (sequence is synthesized)
cttcaatgcattgcccgtctgtcaatgtctaaagagtcctatatatggtctcagtctgcagtgtgtttaagacatttagacattttcctctcccttgtactctagtggaatcaggctgag

SEQ ID NO: 877647 - DNA, 120 bp, Artificial Sequence
  ENSG00000203876_2 (sequence is synthesized)
cttgtgttatataacaccaccgtcctgctctgtaatgagcaacttctaaagaggaggcagcaggggaacaaagccacctggcctttgccaacctttccaggctctgccagtgcacctgca

SEQ ID NO: 877648 - DNA, 120 bp, Artificial Sequence
  ENSG00000203876_3 (sequence is synthesized)
gagagctccgagagctcggcctggaagagagactggctattatgtttcattgcgtgagatgacacagtgcctttccaggacaggttggactgaaaaaatctctgcctttatttcttggcc

SEQ ID NO: 877649 - DNA, 120 bp, Artificial Sequence
  ENSG00000203876_4 (sequence is synthesized)
aaattttatccagggtctcccaagacttagggaatcattaagcagctgcttcattgaacccctgcctttcactctcacctcaactgctttgagaaatttgatcgactcagacagaaacat

SEQ ID NO: 877650 - DNA, 120 bp, Artificial Sequence
  ENSG00000203876_5 (sequence is synthesized)
gaaatattcataagaagctttcggtgagcagtgtctcaagagcttgcagggctaaactggggaaatgtcacatgttggttttacacctcagtagcacttgtgcatggtccgtgtccgacc

SEQ ID NO: 877651 - DNA, 120 bp, Artificial Sequence
  ENSG00000203876_6 (sequence is synthesized)
cattggtgtactaaatcagactgaagtttcatcactatgctttgagtataagacaaatatcactccctctcatgttgcctgctattgctaaagtaggagaggttatcaattagggccctt

SEQ ID NO: 877652 - DNA, 120 bp, Artificial Sequence
  ENSG00000203876_7 (sequence is synthesized)
tctgttgggacaggaaacccaattcaaattggtttaagtgaagaatgaactgtattgaatcaacaaaaaagcccaaggctagctggcttcaggagtggggcttcaaggctcaaatgaggt

SEQ ID NO: 877653 - DNA, 120 bp, Artificial Sequence
  ENSG00000203876_8 (sequence is synthesized)
catcagggcttggtctctctccatctctaggctctgccttctctttgattggcttcattttaagcctccatgttgtgggccccagtagttccaaactcccccttgtggtggcaagatggc

SEQ ID NO: 877654 - DNA, 120 bp, Artificial Sequence
  ENSG00000203876_9 (sequence is synthesized)
aacaacagttccagcctccatagcataaagcaagggtcaacacattttttccgtcaaggtgccagagaaaaaagattttaggatttgtggactgtgtggtttctgttgcagctactcagc

SEQ ID NO: 877655 - DNA, 120 bp, Artificial Sequence
  ENSG00000203876_10 (sequence is synthesized)
tctgctattatagtgtgaaaacagccatagataatacataaatgaatgagcatggctgtgtttcaataaaactttatttacaaaaacagacactgggctggattcagccagccagctata

SEQ ID NO: 877656 - DNA, 120 bp, Artificial Sequence
  ENSG00000203876_11 (sequence is synthesized)
gcttgcctacccctgttaactacatagagttgttgttggaaaatggctgttcagcgggggatgtaccttctggcttctcttgtaattggatatggccatatgactgagttcttgctaaaa

SEQ ID NO: 877657 - DNA, 120 bp, Artificial Sequence
  ENSG00000203876_12 (sequence is synthesized)
gaacctaggtggaagttatgtggaccctttctaggtcaaaacttgtaataaacaggtatgccccttcacattctttaccttctgcagctgaatgcagatgatgaagaagttttaggagtg

SEQ ID NO: 877658 - DNA, 120 bp, Artificial Sequence
  ENSG00000203876_13 (sequence is synthesized)
gcagagccacagggtaaggcagtctgattcctgaatcactgtgtgaagtggacccacttaatgaccaggaacaactgcctcagactgttacgtgggaaggaaataaatttctattgtgtt

SEQ ID NO: 877659 - DNA, 120 bp, Artificial Sequence
  ENSG00000203876_14 (sequence is synthesized)
tgagtcattatacatttttgatttattttcaacagcagtttacttaccttaagtagtaaagaagtcagtgtcagaaagagtgctaatgtatgaaataatcataatatgtagcactcagta

SEQ ID NO: 877660 - DNA, 120 bp, Artificial Sequence
  ENSG00000203876_15 (sequence is synthesized)
gttgtgccatgggaagcaagaaaacagaataggctgaagaaatggtgacctgtgttatgccgtggcaaaatagttcttaaaactatttggaaggccaagcaaatatctgctgtccctgta

SEQ ID NO: 877661 - DNA, 120 bp, Artificial Sequence
  ENSG00000203876_16 (sequence is synthesized)
actctagggaaagccattataaagagatagaacattgttgtgtgttacagttgagttatttgctgcttattgcactttattactagaaaaatacattccctggcaataattggccagttt

SEQ ID NO: 877662 - DNA, 120 bp, Artificial Sequence
  ENSG00000203876_17 (sequence is synthesized)
gtttataagcagaaacaaaagagaataaacaatccccaaatttggaaaaacctattgattctggacacccaactggaaatagactgaatcagaaaacaaaaaaacaaagaccaaaaaaaa

SEQ ID NO: 877663 - DNA, 120 bp, Artificial Sequence
  ENSG00000203876_18 (sequence is synthesized)
ccaaaaccaaaaacacaaacccaattgccctcctctaaaaaaagaaaaaaactttgaaaggagaaaagcccattaagaaatctcagttaaatatagcaactcgactctgcagcaaagggc

SEQ ID NO: 877664 - DNA, 120 bp, Artificial Sequence
  ENSG00000203876_19 (sequence is synthesized)
tcctttccacccagacctattgttcagatggtctcaaggtggctgccattaaattgagagaaatctttggagacaaggaagaaaataatttgggcttcagaactaggtctaggaaagaac

SEQ ID NO: 877665 - DNA, 120 bp, Artificial Sequence
  ENSG00000203876_20 (sequence is synthesized)
tctgggtgtggttattggcacttggaatttactggaaacaaataaacgagaaactttctatttttgagggaattgtattacaaaaaaaaatcacaagcttggatgaaataatctttgatt

SEQ ID NO: 877666 - DNA, 120 bp, Artificial Sequence
  ENSG00000203876_21 (sequence is synthesized)
ggttaagccttacccttccgtcctaaatttgtatgagcagaaagtgagctgtgttaaataaaatttacaggaggctgttggcttgaactgagctcctgcactgggcccaacagactaaat

SEQ ID NO: 877667 - DNA, 120 bp, Artificial Sequence
  ENSG00000203876_22 (sequence is synthesized)
caaaatggagtcactcatgcttaagttccacatcaccaaactgaaattaagttgtttatgtgaccttccaaaaaaccaggagagagaaagggataacagttaaatccccaagcaggccag

SEQ ID NO: 877668 - DNA, 69 bp, Artificial Sequence
  ENSG00000203876_23 (sequence is synthesized)
agagagaaagggataacagttaaatccccaagcaggccagttttagcagacgtaagaaagtcccctctg

SEQ ID NO: 877669 - DNA, 87 bp, Artificial Sequence
  ENSG00000203876_24 (sequence is synthesized)
gtggatcgcttgttgcaccaaagcactccagcttgggcaatggagcaaaaccctgtctcaaaaaaaaagaagaaaagaaaagaaaaa

SEQ ID NO: 877670 - DNA, 120 bp, Artificial Sequence
  ENSG00000203876_25 (sequence is synthesized)
gaaaagaaaagaaaaagaaaaacaaagccccctttgctttaatctttaccctttaccagaaatgtaactttgagacaaccaatccacattttgtttcctgtgtctgctttcctcagctct

SEQ ID NO: 877671 - DNA, 120 bp, Artificial Sequence
  ENSG00000203876_26 (sequence is synthesized)
attgcaaataaagccaattaagacttttgcattaaatttattttaattctgtattttgacagctgtataaagggggtacagtcttcaaggaggacactccagaagtggctaaaaaaaata

SEQ ID NO: 877672 - DNA, 120 bp, Artificial Sequence
  ENSG00000203876_27 (sequence is synthesized)
atggacatggaaggatacccaacagggtagagtaaggggccctaaacaaaaatagacaaaaaattcttcccagagagcagattaaggactaggtaaggaatttatctcccctgccaggca

SEQ ID NO: 877673 - DNA, 120 bp, Artificial Sequence
  ENSG00000203876_28 (sequence is synthesized)
gagggtctttacactgttggcccagcagaattccatcatgctattaagtaagtactgtgttcttctcatttttcttttttttctgaatgggagtctttttgcagatatcaggtcttgggt

SEQ ID NO: 877674 - DNA, 120 bp, Artificial Sequence
  ENSG00000203876_29 (sequence is synthesized)
ccaccacagtatagtggacatgtgttagagggacaggtaactggtctttgagttcatcaattgctggaccaggaggaaccgcatatagacctgattaagaagacattgtgtcctcaagca

SEQ ID NO: 877675 - DNA, 120 bp, Artificial Sequence
  ENSG00000203876_30 (sequence is synthesized)
tcctggactttgaggtggatgtagtggctgaatgggactttgggttttctttcctgaggagggcatgggtgtagtctccatgagggaagaaggatgcaaatggacagttggcatacagga

SEQ ID NO: 877676 - DNA, 120 bp, Artificial Sequence
  ENSG00000203876_31 (sequence is synthesized)
gggtggactgtgatagactgatagctgtttactaaaaatccatttccttttcatcctgaacacagctagaccacacgttcctggctgtacaagcagttaggtgtggctacatgattgagt

SEQ ID NO: 877677 - DNA, 120 bp, Artificial Sequence
  ENSG00000203876_32 (sequence is synthesized)
tctagccaacagaatgtgagtggaagtgatgtgggttgtttccaggccaagaagccagtgtgtcctctcctggctctcattcccttcctgctagttgaatacagataatcatgaggccca

SEQ ID NO: 877678 - DNA, 120 bp, Artificial Sequence
  ENSG00000203876_33 (sequence is synthesized)
agaccctaaggaacagtgcagccaggagtcggaaggagcctgggtttctgaatcatcacatggaggggagctgtcttcagctgggagagctgtcttcagttggatactgggtgagtgaaa

SEQ ID NO: 877679 - DNA, 120 bp, Artificial Sequence
  ENSG00000203876_34 (sequence is synthesized)
aataaactcctattgtttttgagcaattataagattttgtatgctcgttaccacagcttagtttatttaattaatataagaagcaacatgatctctttttctctgtgtgtgctaaacatg

SEQ ID NO: 877680 - DNA, 120 bp, Artificial Sequence
  ENSG00000203876_35 (sequence is synthesized)
ttctctctctgtaggctggctttcgtttcaattctgcatgtaactcagttgttagctggagcttccctttcccataaggtctaggtgaaattggaatgatcaccttatcatatgggtatc

SEQ ID NO: 877681 - DNA, 120 bp, Artificial Sequence
  ENSG00000203876_36 (sequence is synthesized)
taaagctttcccaagatatttctgaattcccaatggagcttctgttttctgtttttaaagattcctttcccttttgaagtcttcagctcaaatggtctctctctgtctctctctctctct

SEQ ID NO: 877682 - DNA, 120 bp, Artificial Sequence
  ENSG00000203876_37 (sequence is synthesized)
cttcagctcaaatggtctctctctgtctctctctctctctcttttttttttccttcttctttttttagagatagagtctttctttactgcctgggctggagtgcagtggcacaatcacag

SEQ ID NO: 877683 - DNA, 120 bp, Artificial Sequence
  ENSG00000203876_38 (sequence is synthesized)
ctgggattacaggtgtgagccaccgtacctggctggtctctgttctgttccaccctttttcctttttttttttttcctttgagttacacatgcatacatatgtacttcacactcacacaa

SEQ ID NO: 877684 - DNA, 120 bp, Artificial Sequence
  ENSG00000203876_39 (sequence is synthesized)
tgtacttcacactcacacaaattatttatgagagtaagagattgtagtgagaaattggtgaggaataagtagaggaagggcttacactcacaggggtgcaaacctcaaatgaaacagacg

SEQ ID NO: 877685 - DNA, 120 bp, Artificial Sequence
  ENSG00000203876_40 (sequence is synthesized)
tgtcaccaccctgaagtcacctaccactggtgagtatccctggcccttcacttcacctggccccaacttgtctccttagttttcattcttctctctccctctatttgtcattttcccctt

SEQ ID NO: 877686 - DNA, 120 bp, Artificial Sequence
  ENSG00000203876_41 (sequence is synthesized)
tacttgtaccaagagccatcaaaagcccttggatattctgggaagactaacaagttggtacattgggaaatctaacaattggatgctttttcaaattgctacttggaggagaggcagaat

SEQ ID NO: 877687 - DNA, 120 bp, Artificial Sequence
  ENSG00000203876_42 (sequence is synthesized)
cctgcctggggtacaaagcaaagtagaaggaccacactcagcctctgtcatcctgagcaattcagctctggccccaatatgcacaacttactaaaatagaagaaatgcatagaataaaat

SEQ ID NO: 877688 - DNA, 120 bp, Artificial Sequence
  ENSG00000203876_43 (sequence is synthesized)
agaataaatggattttgctcaacccaccctttttagagttttgtttgtttgtttgtttgttttaaacaactatctgtctttatgcaatcatgtccctggggactcaccccaaccccatat

SEQ ID NO: 877689 - DNA, 120 bp, Artificial Sequence
  ENSG00000203876_44 (sequence is synthesized)
ggcttatcaaagtgttcattaaaaatgtacccttctctttctgagttttgttagcctaaattttccaattttctttgcatttttggtgacatttaaattatcctaatgaggtttcactac

SEQ ID NO: 877690 - DNA, 120 bp, Artificial Sequence
  ENSG00000203876_45 (sequence is synthesized)
tgcttatagattggcattccaggcaggtctaccagcttcctcctaatataggattgctcaactctttctctacattttaggagaaaaactgagaagatttcttctttatttccagtggaa

SEQ ID NO: 877691 - DNA, 120 bp, Artificial Sequence
  ENSG00000203876_46 (sequence is synthesized)
tgtcttttgtccttctctgatgtcttggcatcaacttatgtttgttattgaaggatttcctgagcagcttatcatggtactttcatatacaaagataattctttccctaaaataaattta

SEQ ID NO: 877692 - DNA, 120 bp, Artificial Sequence
  ENSG00000203876_47 (sequence is synthesized)
ggttctagctggtaatatcataaaagcttttttttttttttaaccttgtttcatatgtacttgatagaatgcagtcattttagccctggaactaaattaactttcaactccagcggggtt

SEQ ID NO: 877693 - DNA, 120 bp, Artificial Sequence
  ENSG00000203876_48 (sequence is synthesized)
tccagcggggttgtcatgtacagttgtataggttgtacactaagccaccctagggagcaccttttacctatagtctatgtcactggtaatttcttttttttctttttttgagatggagtc

SEQ ID NO: 877694 - DNA, 120 bp, Artificial Sequence
  ENSG00000203876_49 (sequence is synthesized)
gttaggaagcaaacttgagtttcccatgctctgtggctgagcaagtcacttcaccattctcaggatggaagtggggatggaggtggcatcggcctcatttgaaccacatggactaagagg

SEQ ID NO: 877695 - DNA, 120 bp, Artificial Sequence
  ENSG00000203876_50 (sequence is synthesized)
ggctatgggagtattccccaaaggaagactgaggggcgttactagaaaatgggagaatggaagcagagtgggcaaaaccaacagatgttccctatagtaaataaaaaatttggacaatta

SEQ ID NO: 877696 - DNA, 120 bp, Artificial Sequence
  ENSG00000203876_51 (sequence is synthesized)
gggtgcccgcgtcccggcccggaagagaggcgggacgacggcgcgtcctctccccgcaagattacctcgcagcgcgtagccggctttgtgtttcccctccctccttctcggcagccgccc

SEQ ID NO: 877697 - DNA, 120 bp, Artificial Sequence
  ENSG00000203876_52 (sequence is synthesized)
gggctgcagcagccgccggatccgccgctgcggccgcctcttaagcgccgcagagccccagagggtgtggattctgcaatgctgcacagaaacctactgcagcctcagaccaacagcagc

SEQ ID NO: 877698 - DNA, 120 bp, Artificial Sequence
  ENSG00000203876_53 (sequence is synthesized)
atggtcaaaaacctctgatccaattcaacctactcatcttaacgattttatcagcatttaataagtttgttttggccatcatgtgttatagttttgtttgtggttttgacacctcattag

SEQ ID NO: 877699 - DNA, 120 bp, Artificial Sequence
  ENSG00000203876_54 (sequence is synthesized)
aggtttcatcagtgtaaggagccaacctaagagctcttctcacaagtttcccaagagagaaattgcccctccaaatgtgaggagtctcactttatatagatagcatccacacttcttgca

SEQ ID NO: 877700 - DNA, 120 bp, Artificial Sequence
  ENSG00000203876_55 (sequence is synthesized)
gtggaaaacaaaccttataaaatgtaatacgtttggtttcctaactttttcatgaccctggggtggtagaaggaagtgcaagttttatcacttggatttagagacaaggaaattgaaatg

SEQ ID NO: 877701 - DNA, 120 bp, Artificial Sequence
  ENSG00000203876_56 (sequence is synthesized)
gagagagaattgggctcacatgcaggcagcatgtctagctgcctccatcgtgtgatctgaggcaccccatgaggcctatgattactgtaaacctctaaaataaataaaaaataaaacaat

SEQ ID NO: 877702 - DNA, 120 bp, Artificial Sequence
  ENSG00000203876_57 (sequence is synthesized)
ccctgaaggaaggtacgagggccccttcaaacgccatacaaagaccttccggagtgcccagtgtgcagattgcctgacatgcgctctggaaccgtgagccatttgggaggtgcaagagga

SEQ ID NO: 877703 - DNA, 120 bp, Artificial Sequence
  ENSG00000203876_58 (sequence is synthesized)
ttccaggaaatggcagcaaggccttagaggagtttaagtatgtacttggccaggacaaaagtctgtcttcatctaggctctaggtgctgacttctgtaacaggggagctgttaacttctt

SEQ ID NO: 877704 - DNA, 120 bp, Artificial Sequence
  ENSG00000203876_59 (sequence is synthesized)
cctgggaatccaccttctaccccacacccagaagcagagcaccatccactcaggcctccaagtgctccaggccttgtattccacctctgcctactttgagccagcaactgatttcagcag

SEQ ID NO: 877705 - DNA, 120 bp, Artificial Sequence
  ENSG00000203876_60 (sequence is synthesized)
gaattcactgagactgacatcctctatgctcagcactgtgtgccaatagtatggccacacaagtagattttttcctatttctcttttcttaggctaatggttcagctctaaagataagac

SEQ ID NO: 877706 - DNA, 120 bp, Artificial Sequence
  ENSG00000203876_61 (sequence is synthesized)
ttatgtaagtaaaataagcagaatatctattaacttcgtattcagttcctgaaggaatataatcaaagcaatacagggagtcggtacaaggtaaagtcaaagtcgtgtgttcaatatggt

SEQ ID NO: 877707 - DNA, 120 bp, Artificial Sequence
  ENSG00000203876_62 (sequence is synthesized)
ggcatagtaggtgctcaacagccacatgtacctagtggccactatacgggaaaatgcaaaattaaccttctcactagagaaagtcctattggacagtattggcttgcagtaatagaggcc

SEQ ID NO: 877708 - DNA, 120 bp, Artificial Sequence
  ENSG00000203876_63 (sequence is synthesized)
aacttcagagtataggtgtggctccacctgggcctggaagtatagcagaattagatagaagaggagggaaagggaaagggtcttccaggtgggacaaacggtgttcagagattggaatga

SEQ ID NO: 877709 - DNA, 120 bp, Artificial Sequence
  ENSG00000203876_64 (sequence is synthesized)
acctggcataccgggccaacactcagtgggagaggactagctggagtagaacattccttttgaggaactgagaaaggcatcatcactgattataacaggcacagagaatgcaacagaaga

SEQ ID NO: 877710 - DNA, 120 bp, Artificial Sequence
  ENSG00000203876_65 (sequence is synthesized)
gcccaacctcctcctctcaattctcaattgaaattgagattgatgggattcccgtaatcccacctttcacttttactccaccccatcaagaggacagggttctgattcaaccttgggctt

SEQ ID NO: 877711 - DNA, 120 bp, Artificial Sequence
  ENSG00000203876_66 (sequence is synthesized)
ctgatcttggggggtgggagcttggagtcataactaattatctgctctatttgaaaacactgctgggactggactgtgttggggacctgaacctgcaacctgtgaccttactccccactc

SEQ ID NO: 877712 - DNA, 120 bp, Artificial Sequence
  ENSG00000203876_67 (sequence is synthesized)
gagctggcctttgaacctgctttgtcactgagaaatgatgaaaagctcagaagtcagacccacttgaattcaattactggcacttctactcaccaaccaagtgctcataggcaagtaatt

SEQ ID NO: 877713 - DNA, 120 bp, Artificial Sequence
  ENSG00000203876_68 (sequence is synthesized)
taactcctccaaacctcagtttacccatctacaaaatggggatgataatagcactggcctcatagaatagttatgatggttcaatgggataacagttgcaaggggcttggcatagttcac

SEQ ID NO: 877714 - DNA, 120 bp, Artificial Sequence
  ENSG00000203876_69 (sequence is synthesized)
agcaaaatgaaatgaataatctattcattatgttattcccctatcacactgaagctgtttgcaggtgcactgctgttattgtatctgcttccttctgaattaaaaaatttttaaatataa

SEQ ID NO: 877715 - DNA, 120 bp, Artificial Sequence
  ENSG00000228150_0 (sequence is synthesized)
cctttctgagtttcttcctagcgaggccgagagggtctttgaggaaaatcccgcatccggacacgccttgagggatggcgtcaaacccagaggcttggaaaagtggagacggagtttcac

SEQ ID NO: 877716 - DNA, 120 bp, Artificial Sequence
  ENSG00000228150_1 (sequence is synthesized)
catgagccaccgtgtccggccccactacattcttaaagaagcaataaattgaccttgtttaaatacacaatctgaattactggggtcttttgaaactaaacctttgttcattactaagat

SEQ ID NO: 877717 - DNA, 120 bp, Artificial Sequence
  ENSG00000228150_2 (sequence is synthesized)
ttctattttccttcctctttttcagcacttatttctatagcagtctcccagctgatgccacttaacttcattgaacaaaaaatgaggtttagaaaatcacaataatcattgtgaaagtat

SEQ ID NO: 877718 - DNA, 120 bp, Artificial Sequence
  ENSG00000256362_0 (sequence is synthesized)
agagtgtccatgggctgaaggcttttgaaatcaaatcacagtagaattgcctgaaggaagtgagagtgtatagcctgatgccgagaagaaaaagcctgggggtaacatacagagtgagaa

SEQ ID NO: 877719 - DNA, 120 bp, Artificial Sequence
  ENSG00000256362_1 (sequence is synthesized)
ctgacagctctttttaagtctttcaagggccatcatgtggaagatggagtaggaggcccagcaagcagatttgagagattgtgctctgtacttgtgcaatctaattgtgtcctgttagaa

SEQ ID NO: 877720 - DNA, 120 bp, Artificial Sequence
  ENSG00000256362_2 (sequence is synthesized)
aggagatgtcctgggaaactcagattaagaggacagaagcccaaaactaagctgtacagtcaaaaacgtctagctgtttcttgtagcagattgtgccagtaagcgtcactgaagagtaat

SEQ ID NO: 877721 - DNA, 120 bp, Artificial Sequence
  ENSG00000256362_3 (sequence is synthesized)
gaaaactttgcttccagagtggtatattaataatacacctaagcaaatattttgttgcttaagctgaaaggcattttctccttgaagggaaagcttctgaagatggcagtagattaacat

SEQ ID NO: 877722 - DNA, 120 bp, Artificial Sequence
  ENSG00000256362_4 (sequence is synthesized)
acccaaatatcttgatatcctcaataggaagaaagtcaagttaagtttcctgatctaaagagtccaggaaattaaattctctctatgttctgtttctgaagtactgcagaaactgctcaa

SEQ ID NO: 877723 - DNA, 120 bp, Artificial Sequence
  ENSG00000256362_5 (sequence is synthesized)
gatggaaggataccagagaagaaaaacattgctcaatgtttaaaacttattttattttttgaaaaaagaaacataataacttagtccaaaatcaaacaacataaaaagtatacattgaaa

SEQ ID NO: 877724 - DNA, 120 bp, Artificial Sequence
  ENSG00000256362_6 (sequence is synthesized)
agtttatcctcaccctatctacttccagcaatttccttccaattctatctgtagtattttttcatttttcttcttgttttttttaaataaaataaaataaaataataatgcacactatta

SEQ ID NO: 877725 - DNA, 120 bp, Artificial Sequence
  ENSG00000256364_0 (sequence is synthesized)
acccaaaaacgtccaatgagagaccaacaggcccctgacctaagtcagagctagactgcagaactctcagcccagctctgcagcagacatctgcgtcatcctcccagaaattcaactcag

SEQ ID NO: 877726 - DNA, 120 bp, Artificial Sequence
  ENSG00000256364_1 (sequence is synthesized)
gccacacttctggcaaaagaagtttcaccctgactgtccttgttttcagtcagctgggctcagtgggatctaaaaacctgggacagagtgtagatccagtagaggagcccaggcctctcc

SEQ ID NO: 877727 - DNA, 120 bp, Artificial Sequence
  ENSG00000256364_2 (sequence is synthesized)
cagtgcaaaaagcaaaaggtgaacaacagagtaattcttgacacatacaatacaaaaataaaaataaagaatcccacccctttaacctaaacttcatgtacctatatcttggaggagcca

SEQ ID NO: 877728 - DNA, 120 bp, Artificial Sequence
  ENSG00000256364_3 (sequence is synthesized)
caaaacaaaaacaaaaacaaaaaaactttcaagctacaattctcaaacgactaaatgctggcctggagtaatcattaaagagccaaaacccaggacatgagcccaagagctacctatttt

SEQ ID NO: 877729 - DNA, 120 bp, Artificial Sequence
  ENSG00000256364_4 (sequence is synthesized)
gagagggagaagaaatttcaaatgagccagattaaggaaacaaacaaacaaacaaaactgagaagaaatcaagtccccaacaggcactgaaatcaaaatgatttgttgtggtaacaagtc

SEQ ID NO: 877730 - DNA, 120 bp, Artificial Sequence
  ENSG00000256364_5 (sequence is synthesized)
agaggcgatctgaggacccgacataaccgaaacgtcttggatgctggacagtctataactggcacatgccagggagacaagcaatgacaaagctcaaacactaaaggtgggaccatcact

SEQ ID NO: 877731 - DNA, 120 bp, Artificial Sequence
  ENSG00000262848_0 (sequence is synthesized)
acagatttccatcaacaactgcctactcctgtatctctggacatctcttagaacccaacccatttttccactgaagtaaacacttacttaaaagtttaattcaggccaggtgcagtctct

SEQ ID NO: 877732 - DNA, 120 bp, Artificial Sequence
  ENSG00000262848_1 (sequence is synthesized)
actgtgagtaacaaggaagtgtttcctcgtgggtcatgagaaaaactctcttgttcaggtaagatcatatttacaggctcactgagcatgaatcactcttcacagaagcccagaatcagc

SEQ ID NO: 877733 - DNA, 120 bp, Artificial Sequence
  ENSG00000262848_2 (sequence is synthesized)
catctctaaatgaaaggtaattcctgtccaccttccatgcaggatggcgtttgaaaagcatgaaatggtaactggatagcatgtggaaaaagacaatctggagccatacttcacatctat

SEQ ID NO: 877734 - DNA, 120 bp, Artificial Sequence
  ENSG00000262848_3 (sequence is synthesized)
accaggaaaaactccaaatggatagagagatttaaatgtaaaaacagaaactataaaagtctgcctgaaaaaaacacgataaattcctgtaaaagctgggaatgaagaaaaccttcctat

SEQ ID NO: 877735 - DNA, 120 bp, Artificial Sequence
  ENSG00000228340_0 (sequence is synthesized)
attctgccgcccattttacccgcggggaagctgaggcccagtgctgtttaatatcttactcatgttcacttgatgagaaagtgacagatctgagacaaacccagaggttatgacaccagc

SEQ ID NO: 877736 - DNA, 120 bp, Artificial Sequence
  ENSG00000228340_1 (sequence is synthesized)
catggaagagcagagaggccaatgaggtggggaggttggaaacaaaaggccttctccaccccagcttgaccaacccaaaagctggaaggcaaggaagacctagaattccattttctggat

SEQ ID NO: 877737 - DNA, 120 bp, Artificial Sequence
  ENSG00000228340_2 (sequence is synthesized)
gtaccacagttcattcaaccatcccctactaatggacacttaagatcgacagaaaagaaatgagtcaacgatggtgcaggtgatctgtgcagtgctgtgcaggggatgggtcaaagctgt

SEQ ID NO: 877738 - DNA, 120 bp, Artificial Sequence
  ENSG00000228340_3 (sequence is synthesized)
gccaatcacaaaagcagaaacttggccaagctgaaagggaccagcttgacgaagcttctgcttttgtgactgtctcctaatgaaaccagagcacctcagaagatcaaggcttccaaattc

SEQ ID NO: 877739 - DNA, 120 bp, Artificial Sequence
  ENSG00000228340_4 (sequence is synthesized)
tcctgggggaacagacgtcagccattcagcacaaaggaaacttccttctctgtatgtcagaggaagacataattgtgccatttccttcttgaagaagtttacaaacatttgcaagttgtc

SEQ ID NO: 877740 - DNA, 120 bp, Artificial Sequence
  ENSG00000228340_5 (sequence is synthesized)
aaaaataattagtctaaaattgtttcataaaccgtggaatgaaacaggacgtgccttgttgagatcaaagggcttctgttaccttcttgtaaactcaaatgaaattcttttgaaagtaaa

SEQ ID NO: 877741 - DNA, 120 bp, Artificial Sequence
  ENSG00000228340_6 (sequence is synthesized)
gcccgttttacccgcgggaaagccgaggcccggtgctgtattctgccgcccattttacccgcggggaagctgaggcccagtgctgtttaatatcttactcatgttcacttgatgagaaag

SEQ ID NO: 877742 - DNA, 120 bp, Artificial Sequence
  ENSG00000228340_7 (sequence is synthesized)
actctgtttttaattcaaaagggagaagtgaaattctacctcacttttttaaaagaagagcctggaattggcctatccgtctttttccccgttggatcacagagcagaaaggaagctaag

SEQ ID NO: 877743 - DNA, 120 bp, Artificial Sequence
  ENSG00000228340_8 (sequence is synthesized)
acctctagtacagtgttcaatggaactggtgagaaaagacgtccttgctgtgttcctgatatgaagaggaaagcagtccttctccattaaatgctgacaacatgagcctcccgtggtcgg

SEQ ID NO: 877744 - DNA, 120 bp, Artificial Sequence
  ENSG00000228340_9 (sequence is synthesized)
aacgggcttgtgaaggcggtgctggggtgcaccagggcagcagctacaggaagggctccatcctgtgctcaaccctggggatgctggacagctttgaggaggtcacagaaccaggccagt

SEQ ID NO: 877745 - DNA, 120 bp, Artificial Sequence
  ENSG00000228340_10 (sequence is synthesized)
gttcgaactcaggagccgaatgtggagcctgtgctcgtaggtgtcgctaattccactcctgcttcctgtgtcctgtaagcttaagtgacatgctccaggcagcgcttaatctagggcgtc

SEQ ID NO: 877746 - DNA, 120 bp, Artificial Sequence
  ENSG00000228340_11 (sequence is synthesized)
ccaggcgtttcagacgcccaagcccagcctcctcgactcagccatgctgctatgcctctgactgtggatcccaggccaaagacagaggttctaacccccttctcccccaaggtggctacc

SEQ ID NO: 877747 - DNA, 120 bp, Artificial Sequence
  ENSG00000228340_12 (sequence is synthesized)
ttagttaacagctttcttgccatctgcccttcccatctccacccaccccaagtcccttcctttctacctgtggaatgtctactggtctcagcctcctcccccgagtgcctcttcccttcc

SEQ ID NO: 877748 - DNA, 120 bp, Artificial Sequence
  ENSG00000228340_13 (sequence is synthesized)
agctgtcatcaggaccatgtgactcctaggactcactctctgcctgccctacctgcccccaactacctctgccacctgctgctaccctcccccaatccatcctgtccatgaataccaggg

SEQ ID NO: 877749 - DNA, 120 bp, Artificial Sequence
  ENSG00000228340_14 (sequence is synthesized)
cctttctaaagcagtgatggaagctgaacacgccctgctggaaaggcagtgatggcttccccttatcctaactctgcagcctggatgtcacttcctctctgaatctcatggtccagctct

SEQ ID NO: 877750 - DNA, 120 bp, Artificial Sequence
  ENSG00000228340_15 (sequence is synthesized)
tgtggtgggagctgcctggagctccatagaaggattcgaaggccaggtcagagcttcctggagcctagggccatgattgattagtaatgcctccagggcacaggacgggtaagcaggggt

SEQ ID NO: 877751 - DNA, 120 bp, Artificial Sequence
  ENSG00000228340_16 (sequence is synthesized)
gtgtttaccatcaatctctctctctggcaacttgtggtcacttgagcatactatatggttttgggagcctgagttttgaatgtccctttcatttcataggatattttaccctctttgggt

SEQ ID NO: 877752 - DNA, 120 bp, Artificial Sequence
  ENSG00000228340_17 (sequence is synthesized)
cactttgcaaactcttaattgtccttcaagactcttctctgcagaagtcaatcctttgaggttttaacagaccccacgagccgtgttatccccagttgctgctataaacccttggatatc

SEQ ID NO: 877753 - DNA, 120 bp, Artificial Sequence
  ENSG00000228340_18 (sequence is synthesized)
tgacagatctgagacaaacccagatcgacagaaaagaaatgagtcaacgatggtgcagaaagggaccagcttgacgaagcttctgcttttgtgactgtctcctaatgggagaagtgaaat

SEQ ID NO: 877754 - DNA, 120 bp, Artificial Sequence
  ENSG00000228340_19 (sequence is synthesized)
gccagcatctcccactgagccagatgttccagggctaaggccagtttcatttgaaggcacagccttactatatcatattaatctgatgccaagtttttggatgttatgagcaaccacctc

SEQ ID NO: 877755 - DNA, 120 bp, Artificial Sequence
  ENSG00000228340_20 (sequence is synthesized)
atttattttttgtggttgtttaaccacaatgagtaaggtgagaaaactgtgatgcggtcgactggcacctagcattgcccccatctggaacatctgcagcctagatctgttctgatgaag

SEQ ID NO: 877756 - DNA, 120 bp, Artificial Sequence
  ENSG00000228340_21 (sequence is synthesized)
tagaagccgcagatcttatcctgaaacaggccaggtgcaagtgtcctcttagaagggatcaaccatgggatgcggcattaagagaagagagaaggacatccttacaactgtgcctttctt

SEQ ID NO: 877757 - DNA, 120 bp, Artificial Sequence
  ENSG00000228340_22 (sequence is synthesized)
aagggagtcaggtgctcatagcattgctggcagaattgagagcagcgggagccatgggatgggggtgctgcctggaaatcaggaaactggagaagcctgctggaacctgctgaggaaccc

SEQ ID NO: 877758 - DNA, 120 bp, Artificial Sequence
  ENSG00000228340_23 (sequence is synthesized)
atcactgcagcaagagactgatggtggactgcaggggccaggaaggtgcaggaagcccctgctgctgcaggagaaaggatgaaggatggttatcttccaccttccaaatctcacaggaac

SEQ ID NO: 877759 - DNA, 120 bp, Artificial Sequence
  ENSG00000228340_24 (sequence is synthesized)
acctcttctaggtggaatccaaaccagattccttctggaaagggattctggaaagtgtagttcttatgcttccagcctctgagataagcaaggacaattgctggaggcgagggtgtcgct

SEQ ID NO: 877760 - DNA, 120 bp, Artificial Sequence
  ENSG00000228340_25 (sequence is synthesized)
gaataccaaggaaggatagcaggtgtagttgcccacatggccactcagcatccacatggacatcccacccatgttaatttccaaagagccatcacagaaacatcatcatgcttcctcaca

SEQ ID NO: 877761 - DNA, 120 bp, Artificial Sequence
  ENSG00000228340_26 (sequence is synthesized)
aagaagaaatgctcacctccaccccaatagaaagggtccaggtatccatctctgagtgatggtcaccctccatattcagtaaaaaacaccctcggatagactgtggttgaaagactaaac

SEQ ID NO: 877762 - DNA, 120 bp, Artificial Sequence
  ENSG00000228340_27 (sequence is synthesized)
ctttaggttagccacagtcaatatatcttatataaaataagagaggcggggagagcaggggaaagagatactgggttatgtgtgtaaaaacatacacaataaagcaaacaagaaacgctg

SEQ ID NO: 877763 - DNA, 120 bp, Artificial Sequence
  ENSG00000228340_28 (sequence is synthesized)
cctatccactgggagtccttttgcgtttcagatgctcccaggctctcccgcagtttaaagacttaactcagcggctttcagggcctgtggttgagggactccgaaagaactgttgctggt

SEQ ID NO: 877764 - DNA, 120 bp, Artificial Sequence
  ENSG00000228340_29 (sequence is synthesized)
tctggtgctgggcaccaatgagaagctcatctggccccgggatcctggcaggacactgggagcactatttccatgggcagcagggttgttcctggagacatcactgacccaggacaccta

SEQ ID NO: 877765 - DNA, 120 bp, Artificial Sequence
  ENSG00000228340_30 (sequence is synthesized)
gcacaatggcactcgatgtgaaagtggcttcgtacaaatctgccactcaagcctaaataagtgcattccagaagagccgcagcccctctaacagctcctgaggaaaatcatactggtagc

SEQ ID NO: 877766 - DNA, 120 bp, Artificial Sequence
  ENSG00000228340_31 (sequence is synthesized)
cttcaagtggccatggtgggagcattgacccagggaaatccacatttcccaacacatgctggatacctgaggactccagagctactatctgctcatatctgctcaacattaaaaaaaaaa

SEQ ID NO: 877767 - DNA, 80 bp, Artificial Sequence
  ENSG00000228340_32 (sequence is synthesized)
ttgcaaagataccttagaccaggggtcggcaaactacattccacagaacgaagctgcccattacttgtctgaagtctcgc

SEQ ID NO: 877768 - DNA, 69 bp, Artificial Sequence
  ENSG00000228340_33 (sequence is synthesized)
cctcataagtacagttttataggacaaccatgctcattcatttccgtatcgtccacggctgctctacag

SEQ ID NO: 877769 - DNA, 120 bp, Artificial Sequence
  ENSG00000228340_34 (sequence is synthesized)
atgctcattcatttccgtatcgtccacggctgctctacagcagcagagtttagtggtcaggacagaaccggcacaacctgcacaacctgcacaactttcaaaggctgaatatttactctc

SEQ ID NO: 877770 - DNA, 120 bp, Artificial Sequence
  ENSG00000228340_35 (sequence is synthesized)
cggctctttagagaaagtttgcaactcctactttagactgatgcttctccaatgctaacgcgccagtcaccaaatcaccggcatctggtcccagcctccaaccataaaccacagctgaat

SEQ ID NO: 877771 - DNA, 120 bp, Artificial Sequence
  ENSG00000228340_36 (sequence is synthesized)
ggaaacttggtagcgcttgccttcaatagcagatgctgtaagaggaaagcaaggtgaccaagaaaacattgcaaaactctgggcagaatctggggcctgaagactctgagtcagaggcct

SEQ ID NO: 877772 - DNA, 120 bp, Artificial Sequence
  ENSG00000228340_37 (sequence is synthesized)
ctttttttgctctaaacacatattagcaagagtccaagaggcatcaaagatgagttagcagcaaaatgaggctttgtccttcatgtagaaaggattaaatgatagttgaaaatgcaataa

SEQ ID NO: 877773 - DNA, 120 bp, Artificial Sequence
  ENSG00000228340_38 (sequence is synthesized)
aggcggtgctggggtgcaccagggcagcagctacaggccctgctgaaagggttgacaatgaagactctcaggccaccgtaactcatggagaagccctgagcatctggcccgcttaatgca

SEQ ID NO: 877774 - DNA, 120 bp, Artificial Sequence
  ENSG00000228340_39 (sequence is synthesized)
ctgaagccctggacttggaatctgaagctgtcatcagccagtacacctatgaacctgtggaagacctgaagtacctgtttaaaagacagccaaaagataagtaaatacttcccaaatttc

SEQ ID NO: 877775 - DNA, 120 bp, Artificial Sequence
  ENSG00000228340_40 (sequence is synthesized)
ttcaagctcccagacttgctcaggcacattgcaaatagccatgatttgagatgattttctttaatgctgaagcagatgaagaacccaggttctttttagtggcaaggcttgtttatcagc

SEQ ID NO: 877776 - DNA, 120 bp, Artificial Sequence
  ENSG00000228340_41 (sequence is synthesized)
agctatacagctatgggcacagacacaggtaaacagcacagatgctgggagagggctggcatctgaccgtgaccatcacgcccatgtgacaaaggatgtcaccacagtgaacagttctga

SEQ ID NO: 877777 - DNA, 120 bp, Artificial Sequence
  ENSG00000228340_42 (sequence is synthesized)
ccacagtggcttttcacctgcttcgttaaatttaactcacaccggctcagaggacaatttgattcattctgtatctcagcagaaaccagagcacctcagaagatcaaggcttccaaattc

SEQ ID NO: 877778 - DNA, 120 bp, Artificial Sequence
  ENSG00000228340_43 (sequence is synthesized)
aaacatgaagaagatgaacggctctcagttaagcagcacgggtcagataggagcttgaaattgaatatttgagctgacacgggagagacatacttttgagattccaaatacgatttctgt

SEQ ID NO: 877779 - DNA, 120 bp, Artificial Sequence
  ENSG00000228340_44 (sequence is synthesized)
aatgagtaagattctgttcctgtgcagcgtggaaggctgccaggaaaggtgtgagagggtgagattgtttttgaaaatcatctgtcgcagcttctaagagcattttggtgctgtttgttt

SEQ ID NO: 877780 - DNA, 120 bp, Artificial Sequence
  ENSG00000228340_45 (sequence is synthesized)
aaacccaggatctggccattgagtcactgagagaccgtggagtcttcatagaccaagaccattctcttcatcaaagtctccctattcctgttgatcgacagaaaagaaatgagtcaacga

SEQ ID NO: 877781 - DNA, 120 bp, Artificial Sequence
  ENSG00000228340_46 (sequence is synthesized)
agggcccttcaaagggaggtctgtgggccagcagcacccaagggctctcctcccaagcacccaacgagcaagatgggtctgaggatacctgtgagaagtaattcaacacatctttcacac

SEQ ID NO: 877782 - DNA, 120 bp, Artificial Sequence
  ENSG00000228340_47 (sequence is synthesized)
atgggccaatttgctggtctaagttaaattggagtgacaaggacagctgcttaaagacaagctacagatgacagagccgaggtcgtctcctccaggtcccagagctgctatgtggctgag

SEQ ID NO: 877783 - DNA, 120 bp, Artificial Sequence
  ENSG00000228340_48 (sequence is synthesized)
ctgcagttcagagccagggtgactcagcttgcaagcctgtgctcctcacctccgtggcatgcttctcccaggctggcactgaatcaccggaaggactccttaagacatggataggggatc

SEQ ID NO: 877784 - DNA, 120 bp, Artificial Sequence
  ENSG00000228340_49 (sequence is synthesized)
caccccagaggtcctgaatcagcaagtctggggaggagactgagaattgacttttctatcaagttccccagtgatgctgatgctgctggtgtgcgtaccacgttctggaacctccgctcc

SEQ ID NO: 877785 - DNA, 120 bp, Artificial Sequence
  ENSG00000228340_50 (sequence is synthesized)
ctgctctagggccttctgggtggagccctagagctgagctcccagctgtgggcatggcaggcactgaagagtgttgctttagggtaatgtgttaacagtctaagaaggtgcgtggtgagt

SEQ ID NO: 877786 - DNA, 120 bp, Artificial Sequence
  ENSG00000228340_51 (sequence is synthesized)
aggctgaccatttctctctcttattgaacaaaatattgctaagccctggattttctcagctgtaaatcactgaaatctgaataaaattacccctacaatgaatcaatcaatagattaaaa

SEQ ID NO: 877787 - DNA, 120 bp, Artificial Sequence
  ENSG00000228340_52 (sequence is synthesized)
acaaacccagatggtgtgctgcattcccatggttttggatcctgcaaccactcttgttccacgcagaggccagcctgtgggttagagagatgcacagagagggacaaagcccggaacaat

SEQ ID NO: 877788 - DNA, 120 bp, Artificial Sequence
  ENSG00000228340_53 (sequence is synthesized)
cacagagaatcaaagcactctggttataccttgccttccctaagctgctgatgaattagcagatcaaattccagaaataattcaaccttccactgttttttttttttcacgcacgtgtcc

SEQ ID NO: 877789 - DNA, 120 bp, Artificial Sequence
  ENSG00000228340_54 (sequence is synthesized)
ctttgccaggcagccttgctgtagtgcctctgtttaatattccatttgtaagatgggcagctccaagtctatgctcactcagctgctcatcaagaataacaaggtaaatgacaaaggagg

SEQ ID NO: 877790 - DNA, 120 bp, Artificial Sequence
  ENSG00000228340_55 (sequence is synthesized)
taagaatgtcctcgtcaaatgtcctatgctgtcacctgccagaaagccctcggcagtcagtgtccaagatggctccccacgcaggaatctctctgaagtgctctgtgatctccacaacta

SEQ ID NO: 877791 - DNA, 120 bp, Artificial Sequence
  ENSG00000228340_56 (sequence is synthesized)
aaacataatttctggctccagagagctctggggctctgttcccttgttcagcccgtgctcctggtcatcgtcagccccaggactgaggcttggactggctcaggggctgctgtctgtgaa

SEQ ID NO: 877792 - DNA, 120 bp, Artificial Sequence
  ENSG00000228340_57 (sequence is synthesized)
gaattatttacctgtcacagctttgacacaccatcacaaactggagctgacacctcttctgttcaccttggagaggtgcagagtgaagagcagaccgtgacacacttaatagattgctgg

SEQ ID NO: 877793 - DNA, 120 bp, Artificial Sequence
  ENSG00000228340_58 (sequence is synthesized)
gcatttacggagctgcttgttacccagctcaagagccatgtccaactgctacagcgttcatcaaagacaagaagccacaaggagcaagtcagtactgcaattcattaaggcaacttgacc

SEQ ID NO: 877794 - DNA, 120 bp, Artificial Sequence
  ENSG00000228340_59 (sequence is synthesized)
tctggggagaggagaagaaaaaggaactagcagcattgattgcctatgtttcctgaagtgtggtgtcatggcataaaatgacattgaatcacagggtgagaaaaccacgcatttcagctc

SEQ ID NO: 877795 - DNA, 120 bp, Artificial Sequence
  ENSG00000228340_60 (sequence is synthesized)
ttgcttggcctttgaagacgacataggaagtctctgctggtgctagttgtcttgagcttctctttgacaccctttcctaatgcaaacagagtgggcctcagcatgggagcttctgcagat

SEQ ID NO: 877796 - DNA, 120 bp, Artificial Sequence
  ENSG00000228340_61 (sequence is synthesized)
ggagcaaagctactgaggccctgaagagctcatcaggtgatgacagcgcctgctgggatgtcagggaaaagaggagctggggccactgggcctctctgacaaacagaaagccaggcctga

SEQ ID NO: 877797 - DNA, 120 bp, Artificial Sequence
  ENSG00000228340_62 (sequence is synthesized)
tgctgtcttagttcctccacgtggcacttgttgagcacctgtctctggctggaatgccgggtgccagaagaaactctgcaagtaaaactcaaccatcccaggacactggaaaatcaccac

SEQ ID NO: 877798 - DNA, 120 bp, Artificial Sequence
  ENSG00000228340_63 (sequence is synthesized)
tgtgatgggccaactctggttcccagtgacattgtaagttgctcccgaatcgccttttccaaggcttaatcggctgaagtcgatgtgcagaaactcatcaacagaactttcagaaaggag

SEQ ID NO: 877799 - DNA, 120 bp, Artificial Sequence
  ENSG00000228340_64 (sequence is synthesized)
aagcgaaaatgggctgccccgaagatgaggtcttgcacctcgccaagtggctcctaaaaggccacttattggaaggatccctgtcttctaaagaattgaaatttcttggccgggcatgtt

SEQ ID NO: 877800 - DNA, 120 bp, Artificial Sequence
  ENSG00000228340_65 (sequence is synthesized)
tatgtccaacttcaaatcttgctgtcccaactgggacagcccaaacatagggagccactgcactaagatgttatgatttattaagataataaagctagcgggatgacaaatgtttcattt

SEQ ID NO: 877801 - DNA, 120 bp, Artificial Sequence
  ENSG00000228340_66 (sequence is synthesized)
ttcccccatgtgtttcccccaaaggaccgtctgcttttgcatgtgatttgactatgcgctgaggacctagcgtggtatatcagcaaagtggaaaagtgactgaagtgactgtttatcatc

SEQ ID NO: 877802 - DNA, 120 bp, Artificial Sequence
  ENSG00000228340_67 (sequence is synthesized)
ttgtaccaagttacaccactttaagctttaactccacagctcttgcattattttaaaaccgtctggcagatctctaaaactaatggtacaaaccactctgtgatacattaaaatacatcc

SEQ ID NO: 877803 - DNA, 120 bp, Artificial Sequence
  ENSG00000228340_68 (sequence is synthesized)
cactctgtcatactgcaaacaagtagctgctccccagtctttgaaaaagtactttcaagataaaatatgtactcatgggttctgcaggtttttaaaaagtcttgaatcttcacagattta

SEQ ID NO: 877804 - DNA, 120 bp, Artificial Sequence
  ENSG00000228340_69 (sequence is synthesized)
ctgggggggaaggggcgtttcatgtaaaatgtgtttttccttgacatttagaggtcttgcaaagtggtttattatagatcttgtggacatctcgctatttaattaaatttcagaaatata

SEQ ID NO: 877805 - DNA, 120 bp, Artificial Sequence
  ENSG00000228340_70 (sequence is synthesized)
attccgaagagacagagaacaccagaacaagggagaattggagtggaggtggatgctgaaattccagtataaaaatctactctggctgaggaataagacaaaatggtcaagcctgagaca

SEQ ID NO: 877806 - DNA, 120 bp, Artificial Sequence
  ENSG00000228340_71 (sequence is synthesized)
tctaactattaaacctgcagaagaaggagtcaggagctgctcatctttggaagtgcctagcagtggctggaggacctgggatgccctgagggacagtcagccagggtcaagcctgagaca

SEQ ID NO: 877807 - DNA, 120 bp, Artificial Sequence
  ENSG00000228340_72 (sequence is synthesized)
agaagagacatccaggagtagatttcaatgcacagcagcagctgagagaagccagctgtgaaaaagtaggctggctgtgttttcctccaactactttcagctgttaatgtggaggtggaa

SEQ ID NO: 877808 - DNA, 120 bp, Artificial Sequence
  ENSG00000228340_73 (sequence is synthesized)
ataaagattggatttgaccaattgagacttcgccagcttattccctgcctccaccaaagaagtgcatctcatcgaagaaggaatcaaaggaagctggtcgacgagctcagcatcggtccc

SEQ ID NO: 877809 - DNA, 120 bp, Artificial Sequence
  ENSG00000228340_74 (sequence is synthesized)
tggcagtgagcagtgagccgcgtggcacccctggcagacgtgtgttactgagcaaaccagagactgagaagcagagggcgggaaaacagtgccatgtatttctcatgagttctgtgatcg

SEQ ID NO: 877810 - DNA, 120 bp, Artificial Sequence
  ENSG00000228340_75 (sequence is synthesized)
ctcacaggctgggcaggaagggaagttaaaaaggaaaaaaaaaatgaagggaagatacgtgaaattgtgtgagcatccagtagctgccaggcctcatttagtgacaccgtggattgaagg

SEQ ID NO: 877811 - DNA, 120 bp, Artificial Sequence
  ENSG00000228340_76 (sequence is synthesized)
acaggtgtccttgtctgcaatgcagagaggagaggtttcaagctcaaaggcagtaagcagttctaaaccgtccagtcaggatgcaaacacagcatgttatgaggatgggccttgagtccg

SEQ ID NO: 877812 - DNA, 120 bp, Artificial Sequence
  ENSG00000228340_77 (sequence is synthesized)
gccaaggaacaagggttaggctttcaggcgtgggactcccgctaaggcaacctccggctcaccttgctctcatcatctctctggtgctaagagtgccacctgagcttggacacctggaag

SEQ ID NO: 877813 - DNA, 120 bp, Artificial Sequence
  ENSG00000228340_78 (sequence is synthesized)
ccttgttcctcaaaagcaggagagaatgagggctggaccgtgctggaattccttgacccctcctccaacccaaggcacagatcatcttgccaggaagattgaggggactccatgctaaga

SEQ ID NO: 877814 - DNA, 120 bp, Artificial Sequence
  ENSG00000228340_79 (sequence is synthesized)
atctgccctcctgcacatgccaaccacaagcatgaaaggttattttttaagaccattgtgagaaaaaaaattgctgccatccttgaaggcagcatttctgcctgtgattccttaatgact

SEQ ID NO: 877815 - DNA, 120 bp, Artificial Sequence
  ENSG00000228340_80 (sequence is synthesized)
tcagtctctgcccttgttcatttattgttgctataattataaatgcctccgtggtttggggagagttttctggaagcaaggaggcagaaaatctattttcctgaaagcttttctttttaa

SEQ ID NO: 877816 - DNA, 120 bp, Artificial Sequence
  ENSG00000228340_81 (sequence is synthesized)
attaggctgttgtttcttgtgtccctaatgccaacctaatgacatttcctgatgagatgactgtgtctgaattgctgcaattgcttctctgcagaaggcgttttcttgggctgtcctgag

SEQ ID NO: 877817 - DNA, 120 bp, Artificial Sequence
  ENSG00000228340_82 (sequence is synthesized)
tgggtagagcaggggtcctttgtcttggctagggctctgctgtacagtcaccagtgttgactgagcaggttctaaaagttttgtctctgcctcacctcgtgaaggtctcacagaaattcc

SEQ ID NO: 877818 - DNA, 120 bp, Artificial Sequence
  ENSG00000228340_83 (sequence is synthesized)
gatactgtcattgtccccgttttacagatgaggaaactaaggcactgggatattaaataacaaacccacaggcagacaacttgtaggtagctgaaaccagatttgaatcaggtatattct

SEQ ID NO: 877819 - DNA, 120 bp, Artificial Sequence
  ENSG00000228340_84 (sequence is synthesized)
ggtaagccagctctctggaacaaaaaaaaaggtaaaggaatggactttttagcatttgccaatttctgtggtgtaaatagtcccgccatggctgactgaaagctaccaatgatttaatag

SEQ ID NO: 877820 - DNA, 120 bp, Artificial Sequence
  ENSG00000228340_85 (sequence is synthesized)
ctgacttgctaaattcctgaatatttaaccacatgctcttgccaaccagagggtgttggctcagactctgactggatcttagactcttggctactgggttttgcacgtgcttaaaaaggg

SEQ ID NO: 877821 - DNA, 120 bp, Artificial Sequence
  ENSG00000228340_86 (sequence is synthesized)
gctttaggagagtaaaacaaacaaacaaacaaaaaacatgcattttgatattctcacattcaaggtgtggggatggggaggcatacctttggatgttactggaaatactatgcatttggg

SEQ ID NO: 877822 - DNA, 120 bp, Artificial Sequence
  ENSG00000228340_87 (sequence is synthesized)
gaagtcttctgaaacttacgagagaaagctaattctaattttaaatttttagggagtgagtgggaagaagtttctagaattagcctatcataagaaagttctgtgactttgcaaagctag

SEQ ID NO: 877823 - DNA, 120 bp, Artificial Sequence
  ENSG00000228340_88 (sequence is synthesized)
gagatctctgacttaaattatttccagcttagcagatgttcttctattttttcttctctttttatcatctttgatttggaccatacctacactccagcggtctgtcttcttggctccatg

SEQ ID NO: 877824 - DNA, 120 bp, Artificial Sequence
  ENSG00000228340_89 (sequence is synthesized)
aggtcaggggagtgcccattttggaggagctggcttaccaacaagccccttctctgagaactggcccaagaacagccctgctggaggagcagccacactaaccacatccggccctggacc

SEQ ID NO: 877825 - DNA, 120 bp, Artificial Sequence
  ENSG00000228340_90 (sequence is synthesized)
agtggggcactagacaccactacccactcatctccagaattgcaacccaaagatgcagagacagcattacctggtggtgagcttcgggctttcatccatgtgatttgagatatcatagtc

SEQ ID NO: 877826 - DNA, 120 bp, Artificial Sequence
  ENSG00000228340_91 (sequence is synthesized)
atgagtgccgtgtgtgagcagaggaagtcagtaaaaaaataaaggagacagtgaatcccaaagatgcagatattctggctcttgagacacagaaagggggtctttgattcctggtagaag

SEQ ID NO: 877827 - DNA, 120 bp, Artificial Sequence
  ENSG00000228340_92 (sequence is synthesized)
ttccagcttcccccctaacattcacctgttctcagggtgccccttccaaggatcacccatgtaagggcatttgaaaggggccacatagcctgtatgtattttctagttaaggaggtagac

SEQ ID NO: 877828 - DNA, 120 bp, Artificial Sequence
  ENSG00000228340_93 (sequence is synthesized)
tccaaagccatgctatatcttagtccaaaagtctgccagaaacttaaaatagttcaaattaatgttcagccaagttctccagcatagcttactagaagttatgcaataaacccaaataat

SEQ ID NO: 877829 - DNA, 120 bp, Artificial Sequence
  ENSG00000228340_94 (sequence is synthesized)
gcagtgaagaatggcttcagattcaaaccacatatgaccacattccaatggaggaatttcaacccaaaagagaagtttattttccttctcaaataaggattccaatgtttaatttttttt

SEQ ID NO: 877830 - DNA, 120 bp, Artificial Sequence
  ENSG00000228340_95 (sequence is synthesized)
ttcttttctggattgatgcataataggaatcttcaggcaggacaacataatcttctgagaagagggagctcattggcacaattagttatagacacagcaggttgagcccaggttcagagt

SEQ ID NO: 877831 - DNA, 120 bp, Artificial Sequence
  ENSG00000228340_96 (sequence is synthesized)
ctttggtgcaagctaaacgaggccttgcaaggagacagccagagctaagagtgtgaaaagtgacaagtgaggccaactgtcctccctgaagcatgagacagttaaatggtgcaatactaa

SEQ ID NO: 877832 - DNA, 120 bp, Artificial Sequence
  ENSG00000228340_97 (sequence is synthesized)
aacagtctcagctaagataatggtggtcgttgcacaactatatgaatttactcaatattacttaattgtccagtgtaaatgggtgaattctataagacataaattatctctcaataaatg

SEQ ID NO: 877833 - DNA, 63 bp, Artificial Sequence
  ENSG00000228340_98 (sequence is synthesized)
ctggcaggcacctgtaatcctagctaaggaggctgagacaagagaattgcttgaatctgggag

SEQ ID NO: 877834 - DNA, 86 bp, Artificial Sequence
  ENSG00000228340_99 (sequence is synthesized)
aaaattacccgggcatgctggcaggcacctgtaatcctagctaaggaggctgagacaactgaaccgagattgtgccattgcactcc

SEQ ID NO: 877835 - DNA, 72 bp, Artificial Sequence
  ENSG00000228340_100 (sequence is synthesized)
tctcactctgttgtccaggctggttgcagtggtatgatcacagcttatggcagcttcaatcataagggctca

SEQ ID NO: 877836 - DNA, 120 bp, Artificial Sequence
  ENSG00000228340_101 (sequence is synthesized)
ttacagggtctcactctgttgtccaggctggttgcagtggtatgatcacagcttatggcagcttcaatcataagggctcaagcaatcctccggccttagcctcctgagtagctgggacta

SEQ ID NO: 877837 - DNA, 62 bp, Artificial Sequence
  ENSG00000228340_102 (sequence is synthesized)
caggcatgaccatcgtgtccagctaatttttttttttcttttggtagaaatggggtctgctc

SEQ ID NO: 877838 - DNA, 120 bp, Artificial Sequence
  ENSG00000228340_103 (sequence is synthesized)
cccctttctttattggtgtcttatatactttggatgtcttaagaagtacatatctactgcaacactgtggagacactcccccatgttataccttagtaatacactggtaagcactcatac

SEQ ID NO: 877839 - DNA, 120 bp, Artificial Sequence
  ENSG00000228340_104 (sequence is synthesized)
tgagtagctctgtgacttggggaaagatctctctctggactgagatttcttggtttataaaatgggggtaataaaggtacctgctttgttaagttgtttggcaggttaacagagttaacc

SEQ ID NO: 877840 - DNA, 120 bp, Artificial Sequence
  ENSG00000228340_105 (sequence is synthesized)
ggcggtgctggggtgcaccagggcagcagctacaggccctgctgaaagggttgacaatgaagactctcaggccaccgtaactcatggagaagccctgagcatctggcccgcttggtaaat

SEQ ID NO: 877841 - DNA, 120 bp, Artificial Sequence
  ENSG00000228340_106 (sequence is synthesized)
tctgctatgtctcctccagccctgaccaaacttcaaatatgaggaaaataaacattgtcatatatcaaccggccagttcccagcaattcctgcctgcgtgcccatgcaaggggaggtctg

SEQ ID NO: 877842 - DNA, 120 bp, Artificial Sequence
  ENSG00000228340_107 (sequence is synthesized)
gtgctgcctcctgtagtaactacctgtggagccagctgaactcattttcccctgaacttcagaaagtgccagaatcaccccagagcacttgagtacttgccctgtgaagacagcaaggaa

SEQ ID NO: 877843 - DNA, 120 bp, Artificial Sequence
  ENSG00000228340_108 (sequence is synthesized)
tagtgggctcatctttaatttgcaactatggcacaaaggaaggagcagctgtggagaccagggcattggtgaaatgaaagcatattgtttccctccatcttccccaccctggggaggcca

SEQ ID NO: 877844 - DNA, 120 bp, Artificial Sequence
  ENSG00000228340_109 (sequence is synthesized)
gggtttctccaaggcagacactctctaagtgaaatctatggaattttggaaacaagataaaagacatactcgactgcaatgcacatactcaccgtggagcccggcacgcagggtaaagac

SEQ ID NO: 877845 - DNA, 120 bp, Artificial Sequence
  ENSG00000228340_110 (sequence is synthesized)
tcgctgggtttgcattgcacattctcactgaggagcccggcacgcagggttcagactcgctggttttgggttggtggacttcattttctttcacgctgctgcttgcccagtgggtgtaga

SEQ ID NO: 877846 - DNA, 120 bp, Artificial Sequence
  ENSG00000228340_111 (sequence is synthesized)
gagatggtcaggacagaagtccgtctgtggctgagtcagtacctcaggtgggaagaagctgatggaatccttcttgggcagctcctgcccctctccagcctaactggtcaagcctgagac

SEQ ID NO: 877847 - DNA, 120 bp, Artificial Sequence
  ENSG00000228340_112 (sequence is synthesized)
tgtctgggtcaaagaggatgtgtcctaaaaggagaatgagaaataaaacccagaaggagaaagaaaacgtggagaatattgctgattgcagccaagggaagagaatgtttccagaaggag

SEQ ID NO: 877848 - DNA, 120 bp, Artificial Sequence
  ENSG00000228340_113 (sequence is synthesized)
gttaccactgcgaggtcaagagtaacgcgaataaaaagcaatgggacagacactttggaagacagtttggcagtttcttacaaaagaagaaattggcccaatgtgacagtcatgtcctac

SEQ ID NO: 877849 - DNA, 120 bp, Artificial Sequence
  ENSG00000228340_114 (sequence is synthesized)
tacttggcacttgtattccttggtatttgcacaattgatttgaaagcttatatccacacagaaacgtgcacacaaatgattataacaactttattaataattgccaaaaacagaaagaaa

SEQ ID NO: 877850 - DNA, 120 bp, Artificial Sequence
  ENSG00000228340_115 (sequence is synthesized)
gcaagttgttcttcagtaggtgaatgaacaaaaaattgtactacattcgtacaatggagtcttattcatccttaagatgaaatgagctatcaagctataaaaaacattggggggggggat

SEQ ID NO: 877851 - DNA, 120 bp, Artificial Sequence
  ENSG00000228340_116 (sequence is synthesized)
tggagatagtaaaaaggatagtagatgctgggggccagggggcagtatgaagagagaagatgagtaagtggaacgtaggggatttttagggaagtaaaattattttgtataatactgtga

SEQ ID NO: 877852 - DNA, 120 bp, Artificial Sequence
  ENSG00000228340_117 (sequence is synthesized)
tggtgaatacctgatattatgcatctgacatcatgcagtgggcatatagaagcccatcaacaatacaatacaaatggtaaaccttagtgtaaactatagactttaggcaacactaataat

SEQ ID NO: 877853 - DNA, 120 bp, Artificial Sequence
  ENSG00000228340_118 (sequence is synthesized)
gtataaatattggttcaccaattgtaacaaaactaccacagtgatgcaataagtttatatttgtggaaactatgtgagaagagggaggaggagtatatgggaactctctgtacttttatg

SEQ ID NO: 877854 - DNA, 120 bp, Artificial Sequence
  ENSG00000228340_119 (sequence is synthesized)
ttctattttcatataaactgaaaactgctctaaaaaataaatcctactaagtaaaaacataaaaaggaaacatggagcaatgagaaatccatagaggttttgaaaagctctgaaagtatt

SEQ ID NO: 877855 - DNA, 120 bp, Artificial Sequence
  ENSG00000228340_120 (sequence is synthesized)
cctggaaaaatagaggaccatgcacatacatagagcatgaacatgttcaggaaagacctaaaaagaccctaaggtctcacttctggctgatcttgagaatatgtgtgacagcaagtgaag

SEQ ID NO: 877856 - DNA, 120 bp, Artificial Sequence
  ENSG00000228340_121 (sequence is synthesized)
gctaaggcagagttgttaattacctggctgagtgttgaaggcatacccctacaagtaaacagtggctctcagcaacacttagagatatattgactccatctatttaaatatgtctatgtc

SEQ ID NO: 877857 - DNA, 120 bp, Artificial Sequence
  ENSG00000228340_122 (sequence is synthesized)
cagtagttagctaaccactaaagacttcggtgatcaaacacaacaatgaatacagactgttcagaattagttcagaaaagtcactaaactaaacaaacaaaaaaaacaaacccagcaact

SEQ ID NO: 877858 - DNA, 120 bp, Artificial Sequence
  ENSG00000228340_123 (sequence is synthesized)
acaataagcagcaattgcagaccctggggacagaagagggcaaagagagaatctgatatctactattgctacattatattatttaaacatcaagttttaaaaaaataagagaaaaaagaa

SEQ ID NO: 877859 - DNA, 120 bp, Artificial Sequence
  ENSG00000228340_124 (sequence is synthesized)
aatgggaacaagtttgaaggataggatggagggaaggaaaatattttttattgcttccaatatagtggctttcataaagctgaaagtctcccctggaagaagacctcaggggccctttcc

SEQ ID NO: 877860 - DNA, 120 bp, Artificial Sequence
  ENSG00000228340_125 (sequence is synthesized)
tgaacaggtgagaatggtttgtaattaacatattaattggtaggtgcttctgaaatgctggaggatgcttgagaaaggacttgagtagttccagcattaccttttccaaattgttcttgt

SEQ ID NO: 877861 - DNA, 120 bp, Artificial Sequence
  ENSG00000228340_126 (sequence is synthesized)
cataaattgactcagccaaccctcttctttatacaaaggttaacttcccgtccagcaggtgtgggttatcacagtctacatgtggcagtttctgtataatatttgcctctgggtgcccct

SEQ ID NO: 877862 - DNA, 120 bp, Artificial Sequence
  ENSG00000228340_127 (sequence is synthesized)
gtgaaaacagctaaaaatagggacttttggagagagaagtctatcgggacagctaaggactgcaggtgaccttgaagccatgaggataagtccccgctttttggaagaggcagccggaac

SEQ ID NO: 877863 - DNA, 120 bp, Artificial Sequence
  ENSG00000228340_128 (sequence is synthesized)
ctgttagactgctactgaagctcggtacgttatctataccggcatctaactgctgccagccactaagaaatgttttcttgctacaaacaaaaaataaaaagaaaaataacattatctgca

SEQ ID NO: 877864 - DNA, 120 bp, Artificial Sequence
  ENSG00000228340_129 (sequence is synthesized)
gcagcagctacaggtgagtaggcggggacatttgaaaggggctaattttctcgtggtcctttatagggggatgtttgtatgttaagacagctctttcttccctatacaactctgtagctg

SEQ ID NO: 877865 - DNA, 120 bp, Artificial Sequence
  ENSG00000228340_130 (sequence is synthesized)
gggttgagtgcatgtaaactcagctaacaaaatcttcttgcattcggtttgaggtctattgctctgcagaatccccaggcctgccactttcctggcacatcttctcagcccttaggctca

SEQ ID NO: 877866 - DNA, 120 bp, Artificial Sequence
  ENSG00000228340_131 (sequence is synthesized)
ggctgcagtctttgattagtggtgcatgtatgtgcgacggggacagttgtcactgaaattacagacagctgaatggtgatttgaattgcatgagcattaaggcctttcttaagagagata

SEQ ID NO: 877867 - DNA, 120 bp, Artificial Sequence
  ENSG00000228340_132 (sequence is synthesized)
tgcaaaacccatggtttgattctcttgaagcatcgggaaggcctgtatagataaatccccctgacatcaacatagcggggacactctaagaacctaattttaatgaatatacattttgac

SEQ ID NO: 877868 - DNA, 120 bp, Artificial Sequence
  ENSG00000228340_133 (sequence is synthesized)
tttccaactgcaagagaatgagggcagatttgtttagatcttcctaattaatagcccaggttgactgtacttttctgtttaatataactgatttcatctcattaagggagaggtagaaat

SEQ ID NO: 877869 - DNA, 120 bp, Artificial Sequence
  ENSG00000228340_134 (sequence is synthesized)
tagatgcattctccacttcctggtaagaatatcttcttattataagctgggcataaaaacccatcatggcatgcgtactgggactgctgtgttctgggtggagccacgttcggaagacct

SEQ ID NO: 877870 - DNA, 120 bp, Artificial Sequence
  ENSG00000228340_135 (sequence is synthesized)
tgtctgtaatgaaatgggacatttttctgtacttagttaataatctttgggcagcatttgatcatttgaaaaaagtcacaccattcacttgatcaggaggcatctgcagggaatgcaggt

SEQ ID NO: 877871 - DNA, 120 bp, Artificial Sequence
  ENSG00000228340_136 (sequence is synthesized)
tgcagggaatgcaggtcgggcctgagtcctgttggcccaggaacaggtagttgtggcgtcaggcaatttttgttgttgttgttgatgttgttgtttttgagacagaggctcgctctgtcg

SEQ ID NO: 877872 - DNA, 60 bp, Artificial Sequence
  ENSG00000228340_137 (sequence is synthesized)
tcttgatcttatgtgcccggcctgaggtgtttttttagtcaggtaattgaggtgtttcca

SEQ ID NO: 877873 - DNA, 120 bp, Artificial Sequence
  ENSG00000228340_138 (sequence is synthesized)
cctgaggtgtttttttagtcaggtaattgaggtgtttccaccaggacaaagcctcttggtggctgagagggaccccactgaactctctgctgaccgatgggggagcatgctaagtgctta

SEQ ID NO: 877874 - DNA, 120 bp, Artificial Sequence
  ENSG00000228340_139 (sequence is synthesized)
ggaacattagcacataccttgtgaaactgatgtttttatggtcaaaaagggttggatatcagcacttccataagatacagtggacattgggacgcacatttactcccagtgaccccccac

SEQ ID NO: 877875 - DNA, 120 bp, Artificial Sequence
  ENSG00000228340_140 (sequence is synthesized)
tctgttccttggtgctctgtgtccccacctcagctgctctgggctgtggctttctgctcagcagttcttgttttgttactgctgttgttgccttggggtgagaaaggatttgtatccgca

SEQ ID NO: 877876 - DNA, 120 bp, Artificial Sequence
  ENSG00000228340_141 (sequence is synthesized)
cacagaggaagatgaaaaatgtcatatttctttatttcgtaaaagactgaattaaatacgactctcaagcaatatcttggcaggctggtgggaaattcaatctcagacattttggacttc

SEQ ID NO: 877877 - DNA, 120 bp, Artificial Sequence
  ENSG00000228340_142 (sequence is synthesized)
ttggtgagttcgagggtggctgtgctggtctccatctctggtgctcactactgatgaccttgtgcatgctgtatcattatttcgaaagatgattttatctcagtgttttgaataaacatt

SEQ ID NO: 877878 - DNA, 120 bp, Artificial Sequence
  ENSG00000228340_143 (sequence is synthesized)
ttccactgtgctccaagggcctcccagtggactgatgggtattagttcccagatatgggtctttgtggaggttgtaggccccgtgaggcaggggaccacacctgtcttaatcactgcttc

SEQ ID NO: 877879 - DNA, 120 bp, Artificial Sequence
  ENSG00000228340_144 (sequence is synthesized)
acctccagagcccggaacagcgcctggttcatagtgtccaataattattgagtgattgatttaaacggaaaaagtctcaggggtaactgaatcaggaagttgaggattttaggagtaatc

SEQ ID NO: 877880 - DNA, 120 bp, Artificial Sequence
  ENSG00000228340_145 (sequence is synthesized)
tggatacagttccttctggactaacagacaacttaggtagagaaaacattgttgaaatatacttacattattcagcagaaagagacctgaggaataataaaacactagaaaggaaatcac

SEQ ID NO: 877881 - DNA, 120 bp, Artificial Sequence
  ENSG00000228340_146 (sequence is synthesized)
tcactaaggaattatcagtagactttctgcaagcagtacatttgtataatttattactggatatataacaatatgatctcttttaaaatatacttatttcaatataacatacataaatgt

SEQ ID NO: 877882 - DNA, 120 bp, Artificial Sequence
  ENSG00000228340_147 (sequence is synthesized)
aaataatactttgtgtagttaatgagtctttacctactcaaaggaagaaagagaaggttatcagcatctagaaagcacactcctgccccctcccaattacagccttctcaaaatctaatc

SEQ ID NO: 877883 - DNA, 120 bp, Artificial Sequence
  ENSG00000228340_148 (sequence is synthesized)
cctatcagagggtctatcattaggaattaattctgattgttgaactttatacccaatgtgtacagagtgtgctttcttttgtgttggacttccttcactcatcgttatgtgtgggagatg

SEQ ID NO: 877884 - DNA, 120 bp, Artificial Sequence
  ENSG00000228340_149 (sequence is synthesized)
cacccatgttgtgtgtggttgtagtgtattcattttcattgcaatgtaatattccactgaagaagaagtcgtgatttatgcattatactgttgagggccgtttgggatgcctacaataaa

SEQ ID NO: 877885 - DNA, 120 bp, Artificial Sequence
  ENSG00000228340_150 (sequence is synthesized)
taacagtgctataacatccttgttcctgtttctggtggattcatgcaaacatttctattgagtggaattctatttaggagtggaattactggctgacttagatcacattccccagaagca

SEQ ID NO: 877886 - DNA, 120 bp, Artificial Sequence
  ENSG00000228340_151 (sequence is synthesized)
agagtctgagatgggtcttactgtgcaagtgatttacagaaagggtgctctcaggaggaagctgggaggaagcaagggaaggaggagacagcctgggagaagctataccatatatgggtt

SEQ ID NO: 877887 - DNA, 120 bp, Artificial Sequence
  ENSG00000228340_152 (sequence is synthesized)
cgggtagagtccagggcagcctgatgccatagggagctctggggggtgaccagcaccacagcattgatcctctgagggctttggtatcttttcatcagccagacattggctgggtgtcat

SEQ ID NO: 877888 - DNA, 120 bp, Artificial Sequence
  ENSG00000228340_153 (sequence is synthesized)
cccagaggggtggggataacattgtgaagcatctgtatgtgtgatggctcccatcagcaaaatcactctctggaaaaggtgtgggacctcagcagctaacactctgaggagctgggacat

SEQ ID NO: 877889 - DNA, 120 bp, Artificial Sequence
  ENSG00000228340_154 (sequence is synthesized)
cggtgccctggctcataaaatggcctgggtgggtcaccaagcatgtctgctacactaaggcagcaaggagccaatggccagtattagcaggcattgctagtgtttgtatggataggaata

SEQ ID NO: 877890 - DNA, 120 bp, Artificial Sequence
  ENSG00000228340_155 (sequence is synthesized)
cctcgagcatcgtaggagggtttctgttgttccagcttctcaccaacactaggtattatctgatttttcattttagccattttttccattgtgctcatttggctaataagatacagtggt

SEQ ID NO: 877891 - DNA, 120 bp, Artificial Sequence
  ENSG00000228340_156 (sequence is synthesized)
atcttgttgtgactttaatttgcattttcccgatgactaataaggctccctttccttatgtttattgctgtgtgtttatattattttaagaagtgtctcaagaactctacaattacgtcg

SEQ ID NO: 877892 - DNA, 120 bp, Artificial Sequence
  ENSG00000228340_157 (sequence is synthesized)
tctttaattgggtcgtctgcctttttcttattgtgtgggttaattacctattctggactgtagtcctcatcagatatttgctttagaaatgccttctccatcactacggttgtccttttt

SEQ ID NO: 877893 - DNA, 120 bp, Artificial Sequence
  ENSG00000228340_158 (sequence is synthesized)
aatcttgtaacatatcctttgctcaacagaagttcttaattttaatgaaatccagtgtcatctttttccttttatggtttgtgccatttgccctatttaaggaatctttgtctgccccaa

SEQ ID NO: 877894 - DNA, 120 bp, Artificial Sequence
  ENSG00000228340_159 (sequence is synthesized)
catctttcacacatgggccaatttgctggtctaagttaaattggagtgacaaggacagctgcttaaagaagacgaggtttcaccgtgttagacaggatggtttcgatctcctgacctcgt

SEQ ID NO: 877895 - DNA, 120 bp, Artificial Sequence
  ENSG00000228340_160 (sequence is synthesized)
gagccccccaagcaggagctgccgcatggctgcatggatctttcaccttctcagactgtccccccatgacttgggaaggcataattcttgtggttgaataagaatgaggtgaacgacaga

SEQ ID NO: 877896 - DNA, 120 bp, Artificial Sequence
  ENSG00000228340_161 (sequence is synthesized)
tccattaagtaaaatgctgacaacatgagcctcccgtggtcggaacgggcttgtgaaggcggtgctggggtgcaccagggcagcagctacagaatgcaccagctggagtcgacattaaag

SEQ ID NO: 877897 - DNA, 120 bp, Artificial Sequence
  ENSG00000228340_162 (sequence is synthesized)
tccccatcagcaagttttgcaaagctatggccacagggacacatgactggggcccctcctagtcttggaaggagcccccatggaaatgagggcctcacagtgaatccacctctgatccta

SEQ ID NO: 877898 - DNA, 120 bp, Artificial Sequence
  ENSG00000228340_163 (sequence is synthesized)
cttcacctgcagtcaaatgagaagagatttcaatcagctaaagacaccctatcccctctccccgacccctgcgaccccaggagctcctgccttgtcactgtgtccccaaacgaaccgcat

SEQ ID NO: 877899 - DNA, 120 bp, Artificial Sequence
  ENSG00000228340_164 (sequence is synthesized)
aatcaagcccctttctctccctagtggtcaacatctgggctgtgatgggcagctcccactcttgccttagaatatgactggagaggtgacttctcatcacatggagaatatgttcacccc

SEQ ID NO: 877900 - DNA, 120 bp, Artificial Sequence
  ENSG00000228340_165 (sequence is synthesized)
atggtgctttccacccaagctgaccatggcttgactttttggtgtagttgctagctctgtgccatccttggcaatgtgaccctggagcagctgtccccagtgtgcatttgggggatttca

SEQ ID NO: 877901 - DNA, 120 bp, Artificial Sequence
  ENSG00000228340_166 (sequence is synthesized)
tgtaattatgaataggatgcaaattttatagccccagtgaagggaaacacccctggcgaggcttcccggggccagagagaggactccactgagggagatggtggcagggccattctttgt

SEQ ID NO: 877902 - DNA, 120 bp, Artificial Sequence
  ENSG00000228340_167 (sequence is synthesized)
gtcctgcttttttttttttttttttttttaacatcctctttatgtcctgagagccatgtgcagatgaggaaaaatgacatgcaatgcatttttgcctgccacaatgactttgcaatcata

SEQ ID NO: 877903 - DNA, 120 bp, Artificial Sequence
  ENSG00000228340_168 (sequence is synthesized)
acaagcaaaatgttctaaacagtaagtgaatcgaggaagatatactgccaagtcaggaagaaaaaatccacctgttcagtgatttcaggaactgctgaagaaaatcaccagtgagtatca

SEQ ID NO: 877904 - DNA, 120 bp, Artificial Sequence
  ENSG00000228340_169 (sequence is synthesized)
gtttctgcaagagaatctaatgcaggctttgcttctcatcggaatcccccagctggtgtcttggttgactgagagtctgggggagagggcagagaatggatttattctctgctaggtttt

SEQ ID NO: 877905 - DNA, 120 bp, Artificial Sequence
  ENSG00000228340_170 (sequence is synthesized)
tttattctctgctaggtttttaacagtcaagaagggctgtggtcctaaggggcactggtcaaaccttagtgtgcatcagaattatctggataaggctaggcacagtggctcacgcctgta

SEQ ID NO: 877906 - DNA, 80 bp, Artificial Sequence
  ENSG00000228340_171 (sequence is synthesized)
aggctgaggcgccttttagtagagaaaccctatgtctattaaaaagtacaaaatttagccaggtgtggtggtgagtgcct

SEQ ID NO: 877907 - DNA, 120 bp, Artificial Sequence
  ENSG00000228340_172 (sequence is synthesized)
gtgagaaaagacgtccttgctgtgttcctgatatgaagaggaaagcagtccttctccattaagtaaagaacatggagggagctggagtccattttcctaagtgaactaacacaggaacag

SEQ ID NO: 877908 - DNA, 120 bp, Artificial Sequence
  ENSG00000228340_173 (sequence is synthesized)
tgggagttaaatggtgagaacacgtggatacatagagtggaacaacacatactggagcctattgaagggtggagggtgggaagagggagaggatccagaaaaataactattggtactcag

SEQ ID NO: 877909 - DNA, 75 bp, Artificial Sequence
  ENSG00000228340_174 (sequence is synthesized)
ttacaagcttacctatactacaaacttgtacatgtacccctgaacttaaaaattaaatttaaaaaattgctttta

SEQ ID NO: 877910 - DNA, 120 bp, Artificial Sequence
  ENSG00000228340_175 (sequence is synthesized)
tctcctaatgcaccgccggctcctacaagcaggccctggagaagccacttcacctccgcgtctcaggccactcacctccaaagacagatgcaaactccgcctccctcctcggtgagagtt

SEQ ID NO: 877911 - DNA, 120 bp, Artificial Sequence
  ENSG00000228340_176 (sequence is synthesized)
tctaataattaagcaaagtaaaatgttgtaatccatttttgtaacaatcattcctgacaggataggtatccatcaccacccctaccccaaagttcccattctatagaacaaaataacaaa

SEQ ID NO: 877912 - DNA, 120 bp, Artificial Sequence
  ENSG00000228340_177 (sequence is synthesized)
agtccttctccattaagtaaagtataaaccttaggtttttcatagatgtcctttgtcagatttcgaaatttctctgctattctcattttgctgaaagttttaaaaaattatttaaataac

SEQ ID NO: 877913 - DNA, 120 bp, Artificial Sequence
  ENSG00000228340_178 (sequence is synthesized)
acgggcttgtgaaggcggtgctggggtgcaccagggcagcagctacagatattgtactgtactcacccttcttcttgtgctgatgtgagacgatgaagcccccaggtgatgagatgaggt
